United States Patent Application Publication US 2014/0004565 A1 - sequence listing, part 87

SEQ ID NO: 2145664 - RNA, 19 nt, Artificial Sequence
  Description of Artificial Sequence: Synthetic oligonucleotide
ugcacucgaggcugucgcc

SEQ ID NO: 2145665 - RNA, 19 nt, Artificial Sequence
  Description of Artificial Sequence: Synthetic oligonucleotide
acugcugguagcugccgau

SEQ ID NO: 2145666 - RNA, 19 nt, Artificial Sequence
  Description of Artificial Sequence: Synthetic oligonucleotide
cugggcgcauauugcagug

SEQ ID NO: 2145667 - RNA, 19 nt, Artificial Sequence
  Description of Artificial Sequence: Synthetic oligonucleotide
caaagucguucuccuuggc

SEQ ID NO: 2145668 - RNA, 19 nt, Artificial Sequence
  Description of Artificial Sequence: Synthetic oligonucleotide
agcgugggagagcacuugu

SEQ ID NO: 2145669 - RNA, 19 nt, Artificial Sequence
  Description of Artificial Sequence: Synthetic oligonucleotide
gacgucuggcacgaagcug

SEQ ID NO: 2145670 - RNA, 19 nt, Artificial Sequence
  Description of Artificial Sequence: Synthetic oligonucleotide
caguacaaugagguugaug

SEQ ID NO: 2145671 - RNA, 19 nt, Artificial Sequence
  Description of Artificial Sequence: Synthetic oligonucleotide
auacuccuugaugaaggga

SEQ ID NO: 2145672 - RNA, 19 nt, Artificial Sequence
  Description of Artificial Sequence: Synthetic oligonucleotide
ucgggacuggacagcuuca

SEQ ID NO: 2145673 - RNA, 19 nt, Artificial Sequence
  Description of Artificial Sequence: Synthetic oligonucleotide
cacacccucggcagucucc

SEQ ID NO: 2145674 - RNA, 19 nt, Artificial Sequence
  Description of Artificial Sequence: Synthetic oligonucleotide
guagcugccgauguagaaa

SEQ ID NO: 2145675 - RNA, 19 nt, Artificial Sequence
  Description of Artificial Sequence: Synthetic oligonucleotide
ggaucugaaucgucauggc

SEQ ID NO: 2145676 - RNA, 19 nt, Artificial Sequence
  Description of Artificial Sequence: Synthetic oligonucleotide
gaagauguaguaggcuucu

SEQ ID NO: 2145677 - RNA, 19 nt, Artificial Sequence
  Description of Artificial Sequence: Synthetic oligonucleotide
cucaguggcaagguaguca

SEQ ID NO: 2145678 - RNA, 19 nt, Artificial Sequence
  Description of Artificial Sequence: Synthetic oligonucleotide
cuucacucgcugcgccucg

SEQ ID NO: 2145679 - RNA, 19 nt, Artificial Sequence
  Description of Artificial Sequence: Synthetic oligonucleotide
cacauccacacuccugcuc

SEQ ID NO: 2145680 - RNA, 19 nt, Artificial Sequence
  Description of Artificial Sequence: Synthetic oligonucleotide
aggagggcuugaucucguc

SEQ ID NO: 2145681 - RNA, 19 nt, Artificial Sequence
  Description of Artificial Sequence: Synthetic oligonucleotide
ggccugauacuccuugaug

SEQ ID NO: 2145682 - RNA, 19 nt, Artificial Sequence
  Description of Artificial Sequence: Synthetic oligonucleotide
aacaugcgcacagccugga

SEQ ID NO: 2145683 - RNA, 19 nt, Artificial Sequence
  Description of Artificial Sequence: Synthetic oligonucleotide
gcucuauacagaaagacau

SEQ ID NO: 2145684 - RNA, 19 nt, Artificial Sequence
  Description of Artificial Sequence: Synthetic oligonucleotide
gaaucgucauggccaugca

SEQ ID NO: 2145685 - RNA, 19 nt, Artificial Sequence
  Description of Artificial Sequence: Synthetic oligonucleotide
acaugcgcacagccuggag

SEQ ID NO: 2145686 - RNA, 19 nt, Artificial Sequence
  Description of Artificial Sequence: Synthetic oligonucleotide
ggaagauguaguaggcuuc

SEQ ID NO: 2145687 - RNA, 19 nt, Artificial Sequence
  Description of Artificial Sequence: Synthetic oligonucleotide
ucucgggguggccacuguc

SEQ ID NO: 2145688 - RNA, 19 nt, Artificial Sequence
  Description of Artificial Sequence: Synthetic oligonucleotide
agguaucgguuugucaccu

SEQ ID NO: 2145689 - RNA, 19 nt, Artificial Sequence
  Description of Artificial Sequence: Synthetic oligonucleotide
agguugacccaggcagugg

SEQ ID NO: 2145690 - RNA, 19 nt, Artificial Sequence
  Description of Artificial Sequence: Synthetic oligonucleotide
gugguauuggucacaucca

SEQ ID NO: 2145691 - RNA, 19 nt, Artificial Sequence
  Description of Artificial Sequence: Synthetic oligonucleotide
acgaagcuggggucaccag

SEQ ID NO: 2145692 - RNA, 19 nt, Artificial Sequence
  Description of Artificial Sequence: Synthetic oligonucleotide
acacuccugcucaucucac

SEQ ID NO: 2145693 - RNA, 19 nt, Artificial Sequence
  Description of Artificial Sequence: Synthetic oligonucleotide
uggcacgaagcugggguca

SEQ ID NO: 2145694 - RNA, 19 nt, Artificial Sequence
  Description of Artificial Sequence: Synthetic oligonucleotide
acuccuugaugaagggaug

SEQ ID NO: 2145695 - RNA, 19 nt, Artificial Sequence
  Description of Artificial Sequence: Synthetic oligonucleotide
cuggcacgaagcugggguc

SEQ ID NO: 2145696 - RNA, 19 nt, Artificial Sequence
  Description of Artificial Sequence: Synthetic oligonucleotide
aggacgacgucuggcacga

SEQ ID NO: 2145697 - RNA, 19 nt, Artificial Sequence
  Description of Artificial Sequence: Synthetic oligonucleotide
ucaggcgcugggcgcauau

SEQ ID NO: 2145698 - RNA, 19 nt, Artificial Sequence
  Description of Artificial Sequence: Synthetic oligonucleotide
ugacagguaucgguuuguc

SEQ ID NO: 2145699 - RNA, 19 nt, Artificial Sequence
  Description of Artificial Sequence: Synthetic oligonucleotide
ggucaccagggguaucucc

SEQ ID NO: 2145700 - RNA, 19 nt, Artificial Sequence
  Description of Artificial Sequence: Synthetic oligonucleotide
cucggcagucucccagcgg

SEQ ID NO: 2145701 - RNA, 19 nt, Artificial Sequence
  Description of Artificial Sequence: Synthetic oligonucleotide
uugacccaggcaguggcua

SEQ ID NO: 2145702 - RNA, 19 nt, Artificial Sequence
  Description of Artificial Sequence: Synthetic oligonucleotide
agaguggcauccucaucuu

SEQ ID NO: 2145703 - RNA, 19 nt, Artificial Sequence
  Description of Artificial Sequence: Synthetic oligonucleotide
ugggcgcauauugcagugc

SEQ ID NO: 2145704 - RNA, 19 nt, Artificial Sequence
  Description of Artificial Sequence: Synthetic oligonucleotide
ggcugcaucuggguuuugg

SEQ ID NO: 2145705 - RNA, 19 nt, Artificial Sequence
  Description of Artificial Sequence: Synthetic oligonucleotide
cucuccggagccgccagag

SEQ ID NO: 2145706 - RNA, 19 nt, Artificial Sequence
  Description of Artificial Sequence: Synthetic oligonucleotide
agcugccgauguagaaagc

SEQ ID NO: 2145707 - RNA, 19 nt, Artificial Sequence
  Description of Artificial Sequence: Synthetic oligonucleotide
gcgauguaugcucuauaca

SEQ ID NO: 2145708 - RNA, 19 nt, Artificial Sequence
  Description of Artificial Sequence: Synthetic oligonucleotide
ggugagaguggcauccuca

SEQ ID NO: 2145709 - RNA, 19 nt, Artificial Sequence
  Description of Artificial Sequence: Synthetic oligonucleotide
cagguugacccaggcagug

SEQ ID NO: 2145710 - RNA, 19 nt, Artificial Sequence
  Description of Artificial Sequence: Synthetic oligonucleotide
gguauuggucacauccaca

SEQ ID NO: 2145711 - RNA, 19 nt, Artificial Sequence
  Description of Artificial Sequence: Synthetic oligonucleotide
ucucaguggcaagguaguc

SEQ ID NO: 2145712 - RNA, 19 nt, Artificial Sequence
  Description of Artificial Sequence: Synthetic oligonucleotide
cacuguccuuguccagugc

SEQ ID NO: 2145713 - RNA, 19 nt, Artificial Sequence
  Description of Artificial Sequence: Synthetic oligonucleotide
ccugcucaucucacggucc

SEQ ID NO: 2145714 - RNA, 19 nt, Artificial Sequence
  Description of Artificial Sequence: Synthetic oligonucleotide
caccacgauggcaucccuc

SEQ ID NO: 2145715 - RNA, 19 nt, Artificial Sequence
  Description of Artificial Sequence: Synthetic oligonucleotide
gggguaucuccaccucagg

SEQ ID NO: 2145716 - RNA, 19 nt, Artificial Sequence
  Description of Artificial Sequence: Synthetic oligonucleotide
gaggaggaucugaaucguc

SEQ ID NO: 2145717 - RNA, 19 nt, Artificial Sequence
  Description of Artificial Sequence: Synthetic oligonucleotide
gccgaggagggcuugaucu

SEQ ID NO: 2145718 - RNA, 19 nt, Artificial Sequence
  Description of Artificial Sequence: Synthetic oligonucleotide
cucgaggcugucgcccugg

SEQ ID NO: 2145719 - RNA, 19 nt, Artificial Sequence
  Description of Artificial Sequence: Synthetic oligonucleotide
aagauguaguaggcuucuu

SEQ ID NO: 2145720 - RNA, 19 nt, Artificial Sequence
  Description of Artificial Sequence: Synthetic oligonucleotide
gagggucucgggguggcca

SEQ ID NO: 2145721 - RNA, 19 nt, Artificial Sequence
  Description of Artificial Sequence: Synthetic oligonucleotide
caguggcaagguagucagc

SEQ ID NO: 2145722 - RNA, 19 nt, Artificial Sequence
  Description of Artificial Sequence: Synthetic oligonucleotide
gggguggccacuguccuug

SEQ ID NO: 2145723 - RNA, 19 nt, Artificial Sequence
  Description of Artificial Sequence: Synthetic oligonucleotide
ggacagcuucacucgcugc

SEQ ID NO: 2145724 - RNA, 19 nt, Artificial Sequence
  Description of Artificial Sequence: Synthetic oligonucleotide
ggccaugcacucgaggcug

SEQ ID NO: 2145725 - RNA, 19 nt, Artificial Sequence
  Description of Artificial Sequence: Synthetic oligonucleotide
gguccugugugcauccuuc

SEQ ID NO: 2145726 - RNA, 19 nt, Artificial Sequence
  Description of Artificial Sequence: Synthetic oligonucleotide
gguagcugccgauguagaa

SEQ ID NO: 2145727 - RNA, 19 nt, Artificial Sequence
  Description of Artificial Sequence: Synthetic oligonucleotide
gcucaucucacgguccagc

SEQ ID NO: 2145728 - RNA, 19 nt, Artificial Sequence
  Description of Artificial Sequence: Synthetic oligonucleotide
ggcuagguccagccugucc

SEQ ID NO: 2145729 - RNA, 19 nt, Artificial Sequence
  Description of Artificial Sequence: Synthetic oligonucleotide
cgcugcgccucguugaugc

SEQ ID NO: 2145730 - RNA, 19 nt, Artificial Sequence
  Description of Artificial Sequence: Synthetic oligonucleotide
ggguuuuggucauggaagu

SEQ ID NO: 2145731 - RNA, 19 nt, Artificial Sequence
  Description of Artificial Sequence: Synthetic oligonucleotide
cacgaagcuggggucacca

SEQ ID NO: 2145732 - RNA, 19 nt, Artificial Sequence
  Description of Artificial Sequence: Synthetic oligonucleotide
acucgaggcugucgcccug

SEQ ID NO: 2145733 - RNA, 19 nt, Artificial Sequence
  Description of Artificial Sequence: Synthetic oligonucleotide
cugcugguagcugccgaug

SEQ ID NO: 2145734 - RNA, 19 nt, Artificial Sequence
  Description of Artificial Sequence: Synthetic oligonucleotide
ccgguucucaguggcaagg

SEQ ID NO: 2145735 - RNA, 19 nt, Artificial Sequence
  Description of Artificial Sequence: Synthetic oligonucleotide
cucccagcggccuugcgcu

SEQ ID NO: 2145736 - RNA, 19 nt, Artificial Sequence
  Description of Artificial Sequence: Synthetic oligonucleotide
cucaucucacgguccagcu

SEQ ID NO: 2145737 - RNA, 19 nt, Artificial Sequence
  Description of Artificial Sequence: Synthetic oligonucleotide
gugagaguggcauccucau

SEQ ID NO: 2145738 - RNA, 19 nt, Artificial Sequence
  Description of Artificial Sequence: Synthetic oligonucleotide
cugcgccucguugaugcac

SEQ ID NO: 2145739 - RNA, 19 nt, Artificial Sequence
  Description of Artificial Sequence: Synthetic oligonucleotide
gcuugaucucguccaggac

SEQ ID NO: 2145740 - RNA, 19 nt, Artificial Sequence
  Description of Artificial Sequence: Synthetic oligonucleotide
ggugcugugacaguacaau

SEQ ID NO: 2145741 - RNA, 19 nt, Artificial Sequence
  Description of Artificial Sequence: Synthetic oligonucleotide
gucuggcacgaagcugggg

SEQ ID NO: 2145742 - RNA, 19 nt, Artificial Sequence
  Description of Artificial Sequence: Synthetic oligonucleotide
caguggcuagcugggugag

SEQ ID NO: 2145743 - RNA, 19 nt, Artificial Sequence
  Description of Artificial Sequence: Synthetic oligonucleotide
ggagccgccagaggccgcg

SEQ ID NO: 2145744 - RNA, 19 nt, Artificial Sequence
  Description of Artificial Sequence: Synthetic oligonucleotide
cccuccgguucucaguggc

SEQ ID NO: 2145745 - RNA, 19 nt, Artificial Sequence
  Description of Artificial Sequence: Synthetic oligonucleotide
cacaucgaacagcucgucu

SEQ ID NO: 2145746 - RNA, 19 nt, Artificial Sequence
  Description of Artificial Sequence: Synthetic oligonucleotide
ggcgcugggcgcauauugc

SEQ ID NO: 2145747 - RNA, 19 nt, Artificial Sequence
  Description of Artificial Sequence: Synthetic oligonucleotide
gcacucgaggcugucgccc

SEQ ID NO: 2145748 - RNA, 19 nt, Artificial Sequence
  Description of Artificial Sequence: Synthetic oligonucleotide
cccugucgggacuggacag

SEQ ID NO: 2145749 - RNA, 19 nt, Artificial Sequence
  Description of Artificial Sequence: Synthetic oligonucleotide
ugucgggacuggacagcuu

SEQ ID NO: 2145750 - RNA, 19 nt, Artificial Sequence
  Description of Artificial Sequence: Synthetic oligonucleotide
ccacuguccuuguccagug

SEQ ID NO: 2145751 - RNA, 19 nt, Artificial Sequence
  Description of Artificial Sequence: Synthetic oligonucleotide
gugcgauguaugcucuaua

SEQ ID NO: 2145752 - RNA, 19 nt, Artificial Sequence
  Description of Artificial Sequence: Synthetic oligonucleotide
cagcacacccucggcaguc

SEQ ID NO: 2145753 - RNA, 19 nt, Artificial Sequence
  Description of Artificial Sequence: Synthetic oligonucleotide
ucacucgcugcgccucguu

SEQ ID NO: 2145754 - RNA, 19 nt, Artificial Sequence
  Description of Artificial Sequence: Synthetic oligonucleotide
ccugauacuccuugaugaa

SEQ ID NO: 2145755 - RNA, 19 nt, Artificial Sequence
  Description of Artificial Sequence: Synthetic oligonucleotide
guaaauggacagacuuuau

SEQ ID NO: 2145756 - RNA, 19 nt, Artificial Sequence
  Description of Artificial Sequence: Synthetic oligonucleotide
cagucucccagcggccuug

SEQ ID NO: 2145757 - RNA, 19 nt, Artificial Sequence
  Description of Artificial Sequence: Synthetic oligonucleotide
agggcugcaucuggguuuu

SEQ ID NO: 2145758 - RNA, 19 nt, Artificial Sequence
  Description of Artificial Sequence: Synthetic oligonucleotide
cagcgugggagagcacuug

SEQ ID NO: 2145759 - RNA, 19 nt, Artificial Sequence
  Description of Artificial Sequence: Synthetic oligonucleotide
ccagaggccgcgccgggag

SEQ ID NO: 2145760 - RNA, 19 nt, Artificial Sequence
  Description of Artificial Sequence: Synthetic oligonucleotide
cuccgguucucaguggcaa

SEQ ID NO: 2145761 - RNA, 19 nt, Artificial Sequence
  Description of Artificial Sequence: Synthetic oligonucleotide
cagaggccgcgccgggagc

SEQ ID NO: 2145762 - RNA, 19 nt, Artificial Sequence
  Description of Artificial Sequence: Synthetic oligonucleotide
gguaucgguuugucaccuc

SEQ ID NO: 2145763 - RNA, 19 nt, Artificial Sequence
  Description of Artificial Sequence: Synthetic oligonucleotide
caucccuccgguucucagu

SEQ ID NO: 2145764 - RNA, 19 nt, Artificial Sequence
  Description of Artificial Sequence: Synthetic oligonucleotide
gaggccgcgccgggagccg

SEQ ID NO: 2145765 - RNA, 19 nt, Artificial Sequence
  Description of Artificial Sequence: Synthetic oligonucleotide
ccacccacagccagguuga

SEQ ID NO: 2145766 - RNA, 19 nt, Artificial Sequence
  Description of Artificial Sequence: Synthetic oligonucleotide
agcacacccucggcagucu

SEQ ID NO: 2145767 - RNA, 19 nt, Artificial Sequence
  Description of Artificial Sequence: Synthetic oligonucleotide
ucccagcggccuugcgcug

SEQ ID NO: 2145768 - RNA, 19 nt, Artificial Sequence
  Description of Artificial Sequence: Synthetic oligonucleotide
gcucgucuaccucuccgga

SEQ ID NO: 2145769 - RNA, 19 nt, Artificial Sequence
  Description of Artificial Sequence: Synthetic oligonucleotide
ccacgauggcaucccuccg

SEQ ID NO: 2145770 - RNA, 19 nt, Artificial Sequence
  Description of Artificial Sequence: Synthetic oligonucleotide
ccucuccacuucccugucg

SEQ ID NO: 2145771 - RNA, 19 nt, Artificial Sequence
  Description of Artificial Sequence: Synthetic oligonucleotide
uugcgcugaguggcaggcu

SEQ ID NO: 2145772 - RNA, 19 nt, Artificial Sequence
  Description of Artificial Sequence: Synthetic oligonucleotide
ccucggcagucucccagcg

SEQ ID NO: 2145773 - RNA, 19 nt, Artificial Sequence
  Description of Artificial Sequence: Synthetic oligonucleotide
cugaaucgucauggccaug

SEQ ID NO: 2145774 - RNA, 19 nt, Artificial Sequence
  Description of Artificial Sequence: Synthetic oligonucleotide
gcgcugggcgcauauugca

SEQ ID NO: 2145775 - RNA, 19 nt, Artificial Sequence
  Description of Artificial Sequence: Synthetic oligonucleotide
gcugggugagaguggcauc

SEQ ID NO: 2145776 - RNA, 19 nt, Artificial Sequence
  Description of Artificial Sequence: Synthetic oligonucleotide
gugcgcagggcugcaucug

SEQ ID NO: 2145777 - RNA, 19 nt, Artificial Sequence
  Description of Artificial Sequence: Synthetic oligonucleotide
cccucggcagucucccagc

SEQ ID NO: 2145778 - RNA, 19 nt, Artificial Sequence
  Description of Artificial Sequence: Synthetic oligonucleotide
ccugucgggacuggacagc

SEQ ID NO: 2145779 - RNA, 19 nt, Artificial Sequence
  Description of Artificial Sequence: Synthetic oligonucleotide
ucgcugcgccucguugaug

SEQ ID NO: 2145780 - RNA, 19 nt, Artificial Sequence
  Description of Artificial Sequence: Synthetic oligonucleotide
caaugagguugaugagggu

SEQ ID NO: 2145781 - RNA, 19 nt, Artificial Sequence
  Description of Artificial Sequence: Synthetic oligonucleotide
ccgaggagggcuugaucuc

SEQ ID NO: 2145782 - RNA, 19 nt, Artificial Sequence
  Description of Artificial Sequence: Synthetic oligonucleotide
acaguacaaugagguugau

SEQ ID NO: 2145783 - RNA, 19 nt, Artificial Sequence
  Description of Artificial Sequence: Synthetic oligonucleotide
gcuucacucgcugcgccuc

SEQ ID NO: 2145784 - RNA, 19 nt, Artificial Sequence
  Description of Artificial Sequence: Synthetic oligonucleotide
gcacugcugguagcugccg

SEQ ID NO: 2145785 - RNA, 19 nt, Artificial Sequence
  Description of Artificial Sequence: Synthetic oligonucleotide
gggauggguccugugugca

SEQ ID NO: 2145786 - RNA, 19 nt, Artificial Sequence
  Description of Artificial Sequence: Synthetic oligonucleotide
gggugcgcagggcugcauc

SEQ ID NO: 2145787 - RNA, 19 nt, Artificial Sequence
  Description of Artificial Sequence: Synthetic oligonucleotide
gguuuuggucauggaagua

SEQ ID NO: 2145788 - RNA, 19 nt, Artificial Sequence
  Description of Artificial Sequence: Synthetic oligonucleotide
cugugacagguaucgguuu

SEQ ID NO: 2145789 - RNA, 19 nt, Artificial Sequence
  Description of Artificial Sequence: Synthetic oligonucleotide
ccuaggugcugugacagua

SEQ ID NO: 2145790 - RNA, 19 nt, Artificial Sequence
  Description of Artificial Sequence: Synthetic oligonucleotide
gcugugacagguaucgguu

SEQ ID NO: 2145791 - RNA, 19 nt, Artificial Sequence
  Description of Artificial Sequence: Synthetic oligonucleotide
gaggagggcuugaucucgu

SEQ ID NO: 2145792 - RNA, 19 nt, Artificial Sequence
  Description of Artificial Sequence: Synthetic oligonucleotide
cgucuaccucuccggagcc

SEQ ID NO: 2145793 - RNA, 19 nt, Artificial Sequence
  Description of Artificial Sequence: Synthetic oligonucleotide
cugugcgauguaugcucua

SEQ ID NO: 2145794 - RNA, 19 nt, Artificial Sequence
  Description of Artificial Sequence: Synthetic oligonucleotide
cuucccugucgggacugga

SEQ ID NO: 2145795 - RNA, 19 nt, Artificial Sequence
  Description of Artificial Sequence: Synthetic oligonucleotide
gcgcagggcugcaucuggg

SEQ ID NO: 2145796 - RNA, 19 nt, Artificial Sequence
  Description of Artificial Sequence: Synthetic oligonucleotide
cgucauggccaugcacucg

SEQ ID NO: 2145797 - RNA, 19 nt, Artificial Sequence
  Description of Artificial Sequence: Synthetic oligonucleotide
ggucucgggguggccacug

SEQ ID NO: 2145798 - RNA, 19 nt, Artificial Sequence
  Description of Artificial Sequence: Synthetic oligonucleotide
ggcuugccuaggugcugug

SEQ ID NO: 2145799 - RNA, 19 nt, Artificial Sequence
  Description of Artificial Sequence: Synthetic oligonucleotide
ggcacgaagcuggggucac

SEQ ID NO: 2145800 - RNA, 19 nt, Artificial Sequence
  Description of Artificial Sequence: Synthetic oligonucleotide
ccggagccgccagaggccg

SEQ ID NO: 2145801 - RNA, 19 nt, Artificial Sequence
  Description of Artificial Sequence: Synthetic oligonucleotide
ggccgaggagggcuugauc

SEQ ID NO: 2145802 - RNA, 19 nt, Artificial Sequence
  Description of Artificial Sequence: Synthetic oligonucleotide
gcugguagcugccgaugua

SEQ ID NO: 2145803 - RNA, 19 nt, Artificial Sequence
  Description of Artificial Sequence: Synthetic oligonucleotide
cacucgaggcugucgcccu

SEQ ID NO: 2145804 - RNA, 19 nt, Artificial Sequence
  Description of Artificial Sequence: Synthetic oligonucleotide
cugucgggacuggacagcu

SEQ ID NO: 2145805 - RNA, 19 nt, Artificial Sequence
  Description of Artificial Sequence: Synthetic oligonucleotide
gugcauccuucagcuguga

SEQ ID NO: 2145806 - RNA, 19 nt, Artificial Sequence
  Description of Artificial Sequence: Synthetic oligonucleotide
gcuugaggaggaucugaau

SEQ ID NO: 2145807 - RNA, 19 nt, Artificial Sequence
  Description of Artificial Sequence: Synthetic oligonucleotide
uggggucaccagggguauc

SEQ ID NO: 2145808 - RNA, 19 nt, Artificial Sequence
  Description of Artificial Sequence: Synthetic oligonucleotide
gccacuguccuuguccagu

SEQ ID NO: 2145809 - RNA, 19 nt, Artificial Sequence
  Description of Artificial Sequence: Synthetic oligonucleotide
ggggcuugccuaggugcug

SEQ ID NO: 2145810 - RNA, 19 nt, Artificial Sequence
  Description of Artificial Sequence: Synthetic oligonucleotide
gcuugccuaggugcuguga

SEQ ID NO: 2145811 - RNA, 19 nt, Artificial Sequence
  Description of Artificial Sequence: Synthetic oligonucleotide
gcgcugaguggcaggcugc

SEQ ID NO: 2145812 - RNA, 19 nt, Artificial Sequence
  Description of Artificial Sequence: Synthetic oligonucleotide
gccuugcgcugaguggcag

SEQ ID NO: 2145813 - RNA, 19 nt, Artificial Sequence
  Description of Artificial Sequence: Synthetic oligonucleotide
ccgauguagaaagcguucu

SEQ ID NO: 2145814 - RNA, 19 nt, Artificial Sequence
  Description of Artificial Sequence: Synthetic oligonucleotide
gcgugggagagcacuuguc

SEQ ID NO: 2145815 - RNA, 19 nt, Artificial Sequence
  Description of Artificial Sequence: Synthetic oligonucleotide
cucgcugcgccucguugau

SEQ ID NO: 2145816 - RNA, 19 nt, Artificial Sequence
  Description of Artificial Sequence: Synthetic oligonucleotide
ccagcggccuugcgcugag

SEQ ID NO: 2145817 - RNA, 19 nt, Artificial Sequence
  Description of Artificial Sequence: Synthetic oligonucleotide
gcaaggcggucaaagucgu

SEQ ID NO: 2145818 - RNA, 19 nt, Artificial Sequence
  Description of Artificial Sequence: Synthetic oligonucleotide
gcacgaagcuggggucacc

SEQ ID NO: 2145819 - RNA, 19 nt, Artificial Sequence
  Description of Artificial Sequence: Synthetic oligonucleotide
cagcuccuuccgggcuagg

SEQ ID NO: 2145820 - RNA, 19 nt, Artificial Sequence
  Description of Artificial Sequence: Synthetic oligonucleotide
gggagccggaggcgccaug

SEQ ID NO: 2145821 - RNA, 19 nt, Artificial Sequence
  Description of Artificial Sequence: Synthetic oligonucleotide
gcugcgccucguugaugca

SEQ ID NO: 2145822 - RNA, 19 nt, Artificial Sequence
  Description of Artificial Sequence: Synthetic oligonucleotide
cguugaugcacugcuggua

SEQ ID NO: 2145823 - RNA, 19 nt, Artificial Sequence
  Description of Artificial Sequence: Synthetic oligonucleotide
gggucaccagggguaucuc

SEQ ID NO: 2145824 - RNA, 19 nt, Artificial Sequence
  Description of Artificial Sequence: Synthetic oligonucleotide
gucucgggguggccacugu

SEQ ID NO: 2145825 - RNA, 19 nt, Artificial Sequence
  Description of Artificial Sequence: Synthetic oligonucleotide
gggcuugccuaggugcugu

SEQ ID NO: 2145826 - RNA, 19 nt, Artificial Sequence
  Description of Artificial Sequence: Synthetic oligonucleotide
gcgccgggagccggaggcg

SEQ ID NO: 2145827 - RNA, 19 nt, Artificial Sequence
  Description of Artificial Sequence: Synthetic oligonucleotide
ggccuugcgcugaguggca

SEQ ID NO: 2145828 - RNA, 19 nt, Artificial Sequence
  Description of Artificial Sequence: Synthetic oligonucleotide
ggguccugugugcauccuu

SEQ ID NO: 2145829 - RNA, 19 nt, Artificial Sequence
  Description of Artificial Sequence: Synthetic oligonucleotide
ccaugcacucgaggcuguc

SEQ ID NO: 2145830 - RNA, 19 nt, Artificial Sequence
  Description of Artificial Sequence: Synthetic oligonucleotide
ccucugugcgauguaugcu

SEQ ID NO: 2145831 - RNA, 19 nt, Artificial Sequence
  Description of Artificial Sequence: Synthetic oligonucleotide
caaggcggucaaagucguu

SEQ ID NO: 2145832 - RNA, 19 nt, Artificial Sequence
  Description of Artificial Sequence: Synthetic oligonucleotide
ggaccacaccauacuuccu

SEQ ID NO: 2145833 - RNA, 19 nt, Artificial Sequence
  Description of Artificial Sequence: Synthetic oligonucleotide
gccagaggccgcgccggga

SEQ ID NO: 2145834 - RNA, 19 nt, Artificial Sequence
  Description of Artificial Sequence: Synthetic oligonucleotide
cuggggccgaggagggcuu

SEQ ID NO: 2145835 - RNA, 19 nt, Artificial Sequence
  Description of Artificial Sequence: Synthetic oligonucleotide
cgacgucuggcacgaagcu

SEQ ID NO: 2145836 - RNA, 19 nt, Artificial Sequence
  Description of Artificial Sequence: Synthetic oligonucleotide
gccgcgccgggagccggag

SEQ ID NO: 2145837 - RNA, 19 nt, Artificial Sequence
  Description of Artificial Sequence: Synthetic oligonucleotide
ccgcgccgggagccggagg

SEQ ID NO: 2145838 - RNA, 19 nt, Artificial Sequence
  Description of Artificial Sequence: Synthetic oligonucleotide
gggcuagguccagccuguc

SEQ ID NO: 2145839 - RNA, 19 nt, Artificial Sequence
  Description of Artificial Sequence: Synthetic oligonucleotide
cccagcggccuugcgcuga

SEQ ID NO: 2145840 - RNA, 19 nt, Artificial Sequence
  Description of Artificial Sequence: Synthetic oligonucleotide
gcagcgugggagagcacuu

SEQ ID NO: 2145841 - RNA, 19 nt, Artificial Sequence
  Description of Artificial Sequence: Synthetic oligonucleotide
gcagucucccagcggccuu

SEQ ID NO: 2145842 - RNA, 19 nt, Artificial Sequence
  Description of Artificial Sequence: Synthetic oligonucleotide
ccacuucccugucgggacu

SEQ ID NO: 2145843 - RNA, 19 nt, Artificial Sequence
  Description of Artificial Sequence: Synthetic oligonucleotide
ccucuccggagccgccaga

SEQ ID NO: 2145844 - RNA, 19 nt, Artificial Sequence
  Description of Artificial Sequence: Synthetic oligonucleotide
cucaggcgcugggcgcaua

SEQ ID NO: 2145845 - RNA, 19 nt, Artificial Sequence
  Description of Artificial Sequence: Synthetic oligonucleotide
ccaccacgauggcaucccu

SEQ ID NO: 2145846 - RNA, 19 nt, Artificial Sequence
  Description of Artificial Sequence: Synthetic oligonucleotide
ccgggagccggaggcgcca

SEQ ID NO: 2145847 - RNA, 19 nt, Artificial Sequence
  Description of Artificial Sequence: Synthetic oligonucleotide
gggccgaggagggcuugau

SEQ ID NO: 2145848 - RNA, 19 nt, Artificial Sequence
  Description of Artificial Sequence: Synthetic oligonucleotide
cgguucucaguggcaaggu

SEQ ID NO: 2145849 - RNA, 19 nt, Artificial Sequence
  Description of Artificial Sequence: Synthetic oligonucleotide
gggucucgggguggccacu

SEQ ID NO: 2145850 - RNA, 19 nt, Artificial Sequence
  Description of Artificial Sequence: Synthetic oligonucleotide
caggcgcugggcgcauauu

SEQ ID NO: 2145851 - RNA, 19 nt, Artificial Sequence
  Description of Artificial Sequence: Synthetic oligonucleotide
cguucuccuuggccugaua

SEQ ID NO: 2145852 - RNA, 19 nt, Artificial Sequence
  Description of Artificial Sequence: Synthetic oligonucleotide
ggacgacgucuggcacgaa

SEQ ID NO: 2145853 - RNA, 19 nt, Artificial Sequence
  Description of Artificial Sequence: Synthetic oligonucleotide
cgggguggccacuguccuu

SEQ ID NO: 2145854 - RNA, 19 nt, Artificial Sequence
  Description of Artificial Sequence: Synthetic oligonucleotide
ccucaggcgcugggcgcau

SEQ ID NO: 2145855 - RNA, 19 nt, Artificial Sequence
  Description of Artificial Sequence: Synthetic oligonucleotide
acaaacuuaagcuuggacc

SEQ ID NO: 2145856 - RNA, 19 nt, Artificial Sequence
  Description of Artificial Sequence: Synthetic oligonucleotide
cuaaagacagugaagaugc

SEQ ID NO: 2145857 - RNA, 19 nt, Artificial Sequence
  Description of Artificial Sequence: Synthetic oligonucleotide
agucucacggcuuacagcc

SEQ ID NO: 2145858 - RNA, 19 nt, Artificial Sequence
  Description of Artificial Sequence: Synthetic oligonucleotide
uuagcuaugguccaagaac

SEQ ID NO: 2145859 - RNA, 19 nt, Artificial Sequence
  Description of Artificial Sequence: Synthetic oligonucleotide
uaagcuuggaccuuucagg

SEQ ID NO: 2145860 - RNA, 19 nt, Artificial Sequence
  Description of Artificial Sequence: Synthetic oligonucleotide
aaucagaugacauaacuuu

SEQ ID NO: 2145861 - RNA, 19 nt, Artificial Sequence
  Description of Artificial Sequence: Synthetic oligonucleotide
aacaaacuuaagcuuggac

SEQ ID NO: 2145862 - RNA, 19 nt, Artificial Sequence
  Description of Artificial Sequence: Synthetic oligonucleotide
aaacugaccaaugagaagu

SEQ ID NO: 2145863 - RNA, 19 nt, Artificial Sequence
  Description of Artificial Sequence: Synthetic oligonucleotide
aguuuaauuaggaacaauc

SEQ ID NO: 2145864 - RNA, 19 nt, Artificial Sequence
  Description of Artificial Sequence: Synthetic oligonucleotide
aaacauguucuugggaucc

SEQ ID NO: 2145865 - RNA, 19 nt, Artificial Sequence
  Description of Artificial Sequence: Synthetic oligonucleotide
aaugagaaguuguaccuug

SEQ ID NO: 2145866 - RNA, 19 nt, Artificial Sequence
  Description of Artificial Sequence: Synthetic oligonucleotide
ucuacuaugagggugccag

SEQ ID NO: 2145867 - RNA, 19 nt, Artificial Sequence
  Description of Artificial Sequence: Synthetic oligonucleotide
uaauuaggaacaaucagau

SEQ ID NO: 2145868 - RNA, 19 nt, Artificial Sequence
  Description of Artificial Sequence: Synthetic oligonucleotide
aacucuacuaugagggugc

SEQ ID NO: 2145869 - RNA, 19 nt, Artificial Sequence
  Description of Artificial Sequence: Synthetic oligonucleotide
cuugagguuacacucagag

SEQ ID NO: 2145870 - RNA, 19 nt, Artificial Sequence
  Description of Artificial Sequence: Synthetic oligonucleotide
caagaaccaccaaagaucc

SEQ ID NO: 2145871 - RNA, 19 nt, Artificial Sequence
  Description of Artificial Sequence: Synthetic oligonucleotide
ugggcuuugacuacacacg

SEQ ID NO: 2145872 - RNA, 19 nt, Artificial Sequence
  Description of Artificial Sequence: Synthetic oligonucleotide
ugugucaagucauaugggc

SEQ ID NO: 2145873 - RNA, 19 nt, Artificial Sequence
  Description of Artificial Sequence: Synthetic oligonucleotide
ugaaacugaccaaugagaa

SEQ ID NO: 2145874 - RNA, 19 nt, Artificial Sequence
  Description of Artificial Sequence: Synthetic oligonucleotide
uuugacuacacacgcuuag

SEQ ID NO: 2145875 - RNA, 19 nt, Artificial Sequence
  Description of Artificial Sequence: Synthetic oligonucleotide
gaaucugaaacgugcaccc

SEQ ID NO: 2145876 - RNA, 19 nt, Artificial Sequence
  Description of Artificial Sequence: Synthetic oligonucleotide
aucugaaacgugcacccgc

SEQ ID NO: 2145877 - RNA, 19 nt, Artificial Sequence
  Description of Artificial Sequence: Synthetic oligonucleotide
augccaagcauguuggccg

SEQ ID NO: 2145878 - RNA, 19 nt, Artificial Sequence
  Description of Artificial Sequence: Synthetic oligonucleotide
acaaucagaugacauaacu

SEQ ID NO: 2145879 - RNA, 19 nt, Artificial Sequence
  Description of Artificial Sequence: Synthetic oligonucleotide
uuuucuagagucucacggc

SEQ ID NO: 2145880 - RNA, 19 nt, Artificial Sequence
  Description of Artificial Sequence: Synthetic oligonucleotide
aaagacagugaagaugcag

SEQ ID NO: 2145881 - RNA, 19 nt, Artificial Sequence
  Description of Artificial Sequence: Synthetic oligonucleotide
uguaccuugagguuacacu

SEQ ID NO: 2145882 - RNA, 19 nt, Artificial Sequence
  Description of Artificial Sequence: Synthetic oligonucleotide
accuuuucgagugacgggc

SEQ ID NO: 2145883 - RNA, 19 nt, Artificial Sequence
  Description of Artificial Sequence: Synthetic oligonucleotide
uuaggaacaaucagaugac

SEQ ID NO: 2145884 - RNA, 19 nt, Artificial Sequence
  Description of Artificial Sequence: Synthetic oligonucleotide
ugaaacgugcacccgcagg

SEQ ID NO: 2145885 - RNA, 19 nt, Artificial Sequence
  Description of Artificial Sequence: Synthetic oligonucleotide
aacugaaacugaccaauga

SEQ ID NO: 2145886 - RNA, 19 nt, Artificial Sequence
  Description of Artificial Sequence: Synthetic oligonucleotide
uccauagagcgguugauug

SEQ ID NO: 2145887 - RNA, 19 nt, Artificial Sequence
  Description of Artificial Sequence: Synthetic oligonucleotide
uaugggcucaggaauuucc

SEQ ID NO: 2145888 - RNA, 19 nt, Artificial Sequence
  Description of Artificial Sequence: Synthetic oligonucleotide
uuuggcgcaucuuuucuag

SEQ ID NO: 2145889 - RNA, 19 nt, Artificial Sequence
  Description of Artificial Sequence: Synthetic oligonucleotide
ucguauguccuucaaauuu

SEQ ID NO: 2145890 - RNA, 19 nt, Artificial Sequence
  Description of Artificial Sequence: Synthetic oligonucleotide
agaauuugccccaauacug

SEQ ID NO: 2145891 - RNA, 19 nt, Artificial Sequence
  Description of Artificial Sequence: Synthetic oligonucleotide
uuucuagagucucacggcu

SEQ ID NO: 2145892 - RNA, 19 nt, Artificial Sequence
  Description of Artificial Sequence: Synthetic oligonucleotide
ugacuacacacgcuuaggc

SEQ ID NO: 2145893 - RNA, 19 nt, Artificial Sequence
  Description of Artificial Sequence: Synthetic oligonucleotide
aagugggacccuuucaaca

SEQ ID NO: 2145894 - RNA, 19 nt, Artificial Sequence
  Description of Artificial Sequence: Synthetic oligonucleotide
aacgugcacccgcaggagc

SEQ ID NO: 2145895 - RNA, 19 nt, Artificial Sequence
  Description of Artificial Sequence: Synthetic oligonucleotide
guggcuaugcgcucaaagg

SEQ ID NO: 2145896 - RNA, 19 nt, Artificial Sequence
  Description of Artificial Sequence: Synthetic oligonucleotide
aguggcuucaguugaaggu

SEQ ID NO: 2145897 - RNA, 19 nt, Artificial Sequence
  Description of Artificial Sequence: Synthetic oligonucleotide
accuaacucuacuaugagg

SEQ ID NO: 2145898 - RNA, 19 nt, Artificial Sequence
  Description of Artificial Sequence: Synthetic oligonucleotide
ucucucggcgacaacagug

SEQ ID NO: 2145899 - RNA, 19 nt, Artificial Sequence
  Description of Artificial Sequence: Synthetic oligonucleotide
agauccuaaagacagugaa

SEQ ID NO: 2145900 - RNA, 19 nt, Artificial Sequence
  Description of Artificial Sequence: Synthetic oligonucleotide
auccuaaagacagugaaga

SEQ ID NO: 2145901 - RNA, 19 nt, Artificial Sequence
  Description of Artificial Sequence: Synthetic oligonucleotide
ugagaaguuguaccuugag

SEQ ID NO: 2145902 - RNA, 19 nt, Artificial Sequence
  Description of Artificial Sequence: Synthetic oligonucleotide
uguaccucuuuaaauucac

SEQ ID NO: 2145903 - RNA, 19 nt, Artificial Sequence
  Description of Artificial Sequence: Synthetic oligonucleotide
aaacuuggcacugggagga

SEQ ID NO: 2145904 - RNA, 19 nt, Artificial Sequence
  Description of Artificial Sequence: Synthetic oligonucleotide
gucacguagugaucaaugg

SEQ ID NO: 2145905 - RNA, 19 nt, Artificial Sequence
  Description of Artificial Sequence: Synthetic oligonucleotide
aacuuuucagaagucauuu

SEQ ID NO: 2145906 - RNA, 19 nt, Artificial Sequence
  Description of Artificial Sequence: Synthetic oligonucleotide
cacucagaguuuaauuagg

SEQ ID NO: 2145907 - RNA, 19 nt, Artificial Sequence
  Description of Artificial Sequence: Synthetic oligonucleotide
uggcuaugcgcucaaaggu

SEQ ID NO: 2145908 - RNA, 19 nt, Artificial Sequence
  Description of Artificial Sequence: Synthetic oligonucleotide
gagcaacugaaacugacca

SEQ ID NO: 2145909 - RNA, 19 nt, Artificial Sequence
  Description of Artificial Sequence: Synthetic oligonucleotide
guaccuugagguuacacuc

SEQ ID NO: 2145910 - RNA, 19 nt, Artificial Sequence
  Description of Artificial Sequence: Synthetic oligonucleotide
ccaagaaucugaaacgugc

SEQ ID NO: 2145911 - RNA, 19 nt, Artificial Sequence
  Description of Artificial Sequence: Synthetic oligonucleotide
acaccuuuucgagugacgg

SEQ ID NO: 2145912 - RNA, 19 nt, Artificial Sequence
  Description of Artificial Sequence: Synthetic oligonucleotide
gauccuaaagacagugaag

SEQ ID NO: 2145913 - RNA, 19 nt, Artificial Sequence
  Description of Artificial Sequence: Synthetic oligonucleotide
uccaccuaacucuacuaug

SEQ ID NO: 2145914 - RNA, 19 nt, Artificial Sequence
  Description of Artificial Sequence: Synthetic oligonucleotide
uaacucuacuaugagggug

SEQ ID NO: 2145915 - RNA, 19 nt, Artificial Sequence
  Description of Artificial Sequence: Synthetic oligonucleotide
gaaacgugcacccgcagga

SEQ ID NO: 2145916 - RNA, 19 nt, Artificial Sequence
  Description of Artificial Sequence: Synthetic oligonucleotide
uuggccguggcuaugcgcu

SEQ ID NO: 2145917 - RNA, 19 nt, Artificial Sequence
  Description of Artificial Sequence: Synthetic oligonucleotide
cacguagugaucaauggca

SEQ ID NO: 2145918 - RNA, 19 nt, Artificial Sequence
  Description of Artificial Sequence: Synthetic oligonucleotide
ucaggaauuuccguaugcc

SEQ ID NO: 2145919 - RNA, 19 nt, Artificial Sequence
  Description of Artificial Sequence: Synthetic oligonucleotide
aguugaagguccucguaug

SEQ ID NO: 2145920 - RNA, 19 nt, Artificial Sequence
  Description of Artificial Sequence: Synthetic oligonucleotide
agugacgggcuugaaaggg

SEQ ID NO: 2145921 - RNA, 19 nt, Artificial Sequence
  Description of Artificial Sequence: Synthetic oligonucleotide
ucugaaacgugcacccgca

SEQ ID NO: 2145922 - RNA, 19 nt, Artificial Sequence
  Description of Artificial Sequence: Synthetic oligonucleotide
ugcgcucaaagguccaggg

SEQ ID NO: 2145923 - RNA, 19 nt, Artificial Sequence
  Description of Artificial Sequence: Synthetic oligonucleotide
uggcgcaucuuuucuagag

SEQ ID NO: 2145924 - RNA, 19 nt, Artificial Sequence
  Description of Artificial Sequence: Synthetic oligonucleotide
aauuuccguaugccaagca

SEQ ID NO: 2145925 - RNA, 19 nt, Artificial Sequence
  Description of Artificial Sequence: Synthetic oligonucleotide
ccaagaaccaccaaagauc

SEQ ID NO: 2145926 - RNA, 19 nt, Artificial Sequence
  Description of Artificial Sequence: Synthetic oligonucleotide
agagucucacggcuuacag

SEQ ID NO: 2145927 - RNA, 19 nt, Artificial Sequence
  Description of Artificial Sequence: Synthetic oligonucleotide
ucaaaacuuggcacuggga

SEQ ID NO: 2145928 - RNA, 19 nt, Artificial Sequence
  Description of Artificial Sequence: Synthetic oligonucleotide
ugucaggcgcaucauuuca

SEQ ID NO: 2145929 - RNA, 19 nt, Artificial Sequence
  Description of Artificial Sequence: Synthetic oligonucleotide
ugugcuuagcuauggucca

SEQ ID NO: 2145930 - RNA, 19 nt, Artificial Sequence
  Description of Artificial Sequence: Synthetic oligonucleotide
uugacuacacacgcuuagg

SEQ ID NO: 2145931 - RNA, 19 nt, Artificial Sequence
  Description of Artificial Sequence: Synthetic oligonucleotide
uugggauccauagagcggu

SEQ ID NO: 2145932 - RNA, 19 nt, Artificial Sequence
  Description of Artificial Sequence: Synthetic oligonucleotide
gagcgguugauugucaggc

SEQ ID NO: 2145933 - RNA, 19 nt, Artificial Sequence
  Description of Artificial Sequence: Synthetic oligonucleotide
gguccagggauuuugguug

SEQ ID NO: 2145934 - RNA, 19 nt, Artificial Sequence
  Description of Artificial Sequence: Synthetic oligonucleotide
aaucugaaacgugcacccg

SEQ ID NO: 2145935 - RNA, 19 nt, Artificial Sequence
  Description of Artificial Sequence: Synthetic oligonucleotide
ugggcaacuagguccagga

SEQ ID NO: 2145936 - RNA, 19 nt, Artificial Sequence
  Description of Artificial Sequence: Synthetic oligonucleotide
agucauuuacucaugugcu

SEQ ID NO: 2145937 - RNA, 19 nt, Artificial Sequence
  Description of Artificial Sequence: Synthetic oligonucleotide
agagcgguugauugucagg

SEQ ID NO: 2145938 - RNA, 19 nt, Artificial Sequence
  Description of Artificial Sequence: Synthetic oligonucleotide
acaagugggacccuuucaa

SEQ ID NO: 2145939 - RNA, 19 nt, Artificial Sequence
  Description of Artificial Sequence: Synthetic oligonucleotide
auucacagcguccaccuaa

SEQ ID NO: 2145940 - RNA, 19 nt, Artificial Sequence
  Description of Artificial Sequence: Synthetic oligonucleotide
cucucggcgacaacagugg

SEQ ID NO: 2145941 - RNA, 19 nt, Artificial Sequence
  Description of Artificial Sequence: Synthetic oligonucleotide
uacaagugggacccuuuca

SEQ ID NO: 2145942 - RNA, 19 nt, Artificial Sequence
  Description of Artificial Sequence: Synthetic oligonucleotide
aacccuguaccucuuuaaa

SEQ ID NO: 2145943 - RNA, 19 nt, Artificial Sequence
  Description of Artificial Sequence: Synthetic oligonucleotide
ugaccaaugagaaguugua

SEQ ID NO: 2145944 - RNA, 19 nt, Artificial Sequence
  Description of Artificial Sequence: Synthetic oligonucleotide
auuuccguaugccaagcau

SEQ ID NO: 2145945 - RNA, 19 nt, Artificial Sequence
  Description of Artificial Sequence: Synthetic oligonucleotide
caauacugcccuuucugug

SEQ ID NO: 2145946 - RNA, 19 nt, Artificial Sequence
  Description of Artificial Sequence: Synthetic oligonucleotide
ucuagagucucacggcuua

SEQ ID NO: 2145947 - RNA, 19 nt, Artificial Sequence
  Description of Artificial Sequence: Synthetic oligonucleotide
cugugucaagucauauggg

SEQ ID NO: 2145948 - RNA, 19 nt, Artificial Sequence
  Description of Artificial Sequence: Synthetic oligonucleotide
caaacauguucuugggauc

SEQ ID NO: 2145949 - RNA, 19 nt, Artificial Sequence
  Description of Artificial Sequence: Synthetic oligonucleotide
uaccuugagguuacacuca

SEQ ID NO: 2145950 - RNA, 19 nt, Artificial Sequence
  Description of Artificial Sequence: Synthetic oligonucleotide
aaguuguaccuugagguua

SEQ ID NO: 2145951 - RNA, 19 nt, Artificial Sequence
  Description of Artificial Sequence: Synthetic oligonucleotide
ugauuuuggcgcaucuuuu

SEQ ID NO: 2145952 - RNA, 19 nt, Artificial Sequence
  Description of Artificial Sequence: Synthetic oligonucleotide
uucacaggugucacguagu

SEQ ID NO: 2145953 - RNA, 19 nt, Artificial Sequence
  Description of Artificial Sequence: Synthetic oligonucleotide
cuuuugguacaagugggac

SEQ ID NO: 2145954 - RNA, 19 nt, Artificial Sequence
  Description of Artificial Sequence: Synthetic oligonucleotide
caaaauugccuucugugaa

SEQ ID NO: 2145955 - RNA, 19 nt, Artificial Sequence
  Description of Artificial Sequence: Synthetic oligonucleotide
ggaauuuccguaugccaag

SEQ ID NO: 2145956 - RNA, 19 nt, Artificial Sequence
  Description of Artificial Sequence: Synthetic oligonucleotide
ggcgcaucauuucaaaaug

SEQ ID NO: 2145957 - RNA, 19 nt, Artificial Sequence
  Description of Artificial Sequence: Synthetic oligonucleotide
uagagcgguugauugucag

SEQ ID NO: 2145958 - RNA, 19 nt, Artificial Sequence
  Description of Artificial Sequence: Synthetic oligonucleotide
uucaguugaagguccucgu

SEQ ID NO: 2145959 - RNA, 19 nt, Artificial Sequence
  Description of Artificial Sequence: Synthetic oligonucleotide
gaggagggucuucagacca

SEQ ID NO: 2145960 - RNA, 19 nt, Artificial Sequence
  Description of Artificial Sequence: Synthetic oligonucleotide
acuaugagggugccagucu

SEQ ID NO: 2145961 - RNA, 19 nt, Artificial Sequence
  Description of Artificial Sequence: Synthetic oligonucleotide
ugugcacguggguuccugg

SEQ ID NO: 2145962 - RNA, 19 nt, Artificial Sequence
  Description of Artificial Sequence: Synthetic oligonucleotide
cacacgcuuaggcaggaag

SEQ ID NO: 2145963 - RNA, 19 nt, Artificial Sequence
  Description of Artificial Sequence: Synthetic oligonucleotide
gaagggcugcccaagaauc

SEQ ID NO: 2145964 - RNA, 19 nt, Artificial Sequence
  Description of Artificial Sequence: Synthetic oligonucleotide
cuuuugagcaacugaaacu

SEQ ID NO: 2145965 - RNA, 19 nt, Artificial Sequence
  Description of Artificial Sequence: Synthetic oligonucleotide
acguagugaucaauggcac

SEQ ID NO: 2145966 - RNA, 19 nt, Artificial Sequence
  Description of Artificial Sequence: Synthetic oligonucleotide
ggugaggauucucucggcg

SEQ ID NO: 2145967 - RNA, 19 nt, Artificial Sequence
  Description of Artificial Sequence: Synthetic oligonucleotide
uuggaccuuucagggaugg

SEQ ID NO: 2145968 - RNA, 19 nt, Artificial Sequence
  Description of Artificial Sequence: Synthetic oligonucleotide
cauagagcgguugauuguc

SEQ ID NO: 2145969 - RNA, 19 nt, Artificial Sequence
  Description of Artificial Sequence: Synthetic oligonucleotide
gaauuuccguaugccaagc

SEQ ID NO: 2145970 - RNA, 19 nt, Artificial Sequence
  Description of Artificial Sequence: Synthetic oligonucleotide
ugcccuuucugugucaagu

SEQ ID NO: 2145971 - RNA, 19 nt, Artificial Sequence
  Description of Artificial Sequence: Synthetic oligonucleotide
ugggacccuuucaacaaac

SEQ ID NO: 2145972 - RNA, 19 nt, Artificial Sequence
  Description of Artificial Sequence: Synthetic oligonucleotide
ucgagugacgggcuugaaa

SEQ ID NO: 2145973 - RNA, 19 nt, Artificial Sequence
  Description of Artificial Sequence: Synthetic oligonucleotide
cgagugacgggcuugaaag

SEQ ID NO: 2145974 - RNA, 19 nt, Artificial Sequence
  Description of Artificial Sequence: Synthetic oligonucleotide
aagauccuaaagacaguga

SEQ ID NO: 2145975 - RNA, 19 nt, Artificial Sequence
  Description of Artificial Sequence: Synthetic oligonucleotide
agcgguugauugucaggcg

SEQ ID NO: 2145976 - RNA, 19 nt, Artificial Sequence
  Description of Artificial Sequence: Synthetic oligonucleotide
caccuuuucgagugacggg

SEQ ID NO: 2145977 - RNA, 19 nt, Artificial Sequence
  Description of Artificial Sequence: Synthetic oligonucleotide
gacaccuuuucgagugacg

SEQ ID NO: 2145978 - RNA, 19 nt, Artificial Sequence
  Description of Artificial Sequence: Synthetic oligonucleotide
gcaaaauugccuucuguga

SEQ ID NO: 2145979 - RNA, 19 nt, Artificial Sequence
  Description of Artificial Sequence: Synthetic oligonucleotide
uuuuggcgcaucuuuucua

SEQ ID NO: 2145980 - RNA, 19 nt, Artificial Sequence
  Description of Artificial Sequence: Synthetic oligonucleotide
uccuaaagacagugaagau

SEQ ID NO: 2145981 - RNA, 19 nt, Artificial Sequence
  Description of Artificial Sequence: Synthetic oligonucleotide
ggaccuuucagggauggag

SEQ ID NO: 2145982 - RNA, 19 nt, Artificial Sequence
  Description of Artificial Sequence: Synthetic oligonucleotide
aggugucacguagugauca

SEQ ID NO: 2145983 - RNA, 19 nt, Artificial Sequence
  Description of Artificial Sequence: Synthetic oligonucleotide
gggaggagggucuucagac

SEQ ID NO: 2145984 - RNA, 19 nt, Artificial Sequence
  Description of Artificial Sequence: Synthetic oligonucleotide
ucaggcgcaucauuucaaa

SEQ ID NO: 2145985 - RNA, 19 nt, Artificial Sequence
  Description of Artificial Sequence: Synthetic oligonucleotide
caggaauuuccguaugcca

SEQ ID NO: 2145986 - RNA, 19 nt, Artificial Sequence
  Description of Artificial Sequence: Synthetic oligonucleotide
acucagaguuuaauuagga

SEQ ID NO: 2145987 - RNA, 19 nt, Artificial Sequence
  Description of Artificial Sequence: Synthetic oligonucleotide
gagguaaccaccucccagu

SEQ ID NO: 2145988 - RNA, 19 nt, Artificial Sequence
  Description of Artificial Sequence: Synthetic oligonucleotide
auugucaggcgcaucauuu

SEQ ID NO: 2145989 - RNA, 19 nt, Artificial Sequence
  Description of Artificial Sequence: Synthetic oligonucleotide
aacuuaagcuuggaccuuu

SEQ ID NO: 2145990 - RNA, 19 nt, Artificial Sequence
  Description of Artificial Sequence: Synthetic oligonucleotide
acgggcuugaaaggggccg

SEQ ID NO: 2145991 - RNA, 19 nt, Artificial Sequence
  Description of Artificial Sequence: Synthetic oligonucleotide
acccuguaccucuuuaaau

SEQ ID NO: 2145992 - RNA, 19 nt, Artificial Sequence
  Description of Artificial Sequence: Synthetic oligonucleotide
caccuaacucuacuaugag

SEQ ID NO: 2145993 - RNA, 19 nt, Artificial Sequence
  Description of Artificial Sequence: Synthetic oligonucleotide
aguuugugggcaacuaggu

SEQ ID NO: 2145994 - RNA, 19 nt, Artificial Sequence
  Description of Artificial Sequence: Synthetic oligonucleotide
uaugcgcucaaagguccag

SEQ ID NO: 2145995 - RNA, 19 nt, Artificial Sequence
  Description of Artificial Sequence: Synthetic oligonucleotide
guagugaucaauggcaccu

SEQ ID NO: 2145996 - RNA, 19 nt, Artificial Sequence
  Description of Artificial Sequence: Synthetic oligonucleotide
cuuagcuaugguccaagaa

SEQ ID NO: 2145997 - RNA, 19 nt, Artificial Sequence
  Description of Artificial Sequence: Synthetic oligonucleotide
ucucggcgacaacaguggc

SEQ ID NO: 2145998 - RNA, 19 nt, Artificial Sequence
  Description of Artificial Sequence: Synthetic oligonucleotide
uugaagguccucguauguc

SEQ ID NO: 2145999 - RNA, 19 nt, Artificial Sequence
  Description of Artificial Sequence: Synthetic oligonucleotide
agaguuuaauuaggaacaa

SEQ ID NO: 2146000 - RNA, 19 nt, Artificial Sequence
  Description of Artificial Sequence: Synthetic oligonucleotide
ucucacggcuuacagccuu

SEQ ID NO: 2146001 - RNA, 19 nt, Artificial Sequence
  Description of Artificial Sequence: Synthetic oligonucleotide
gaccuuucagggauggaga

SEQ ID NO: 2146002 - RNA, 19 nt, Artificial Sequence
  Description of Artificial Sequence: Synthetic oligonucleotide
ggcaacuagguccaggaaa

SEQ ID NO: 2146003 - RNA, 19 nt, Artificial Sequence
  Description of Artificial Sequence: Synthetic oligonucleotide
gcaacuagguccaggaaac

SEQ ID NO: 2146004 - RNA, 19 nt, Artificial Sequence
  Description of Artificial Sequence: Synthetic oligonucleotide
uucuagagucucacggcuu

SEQ ID NO: 2146005 - RNA, 19 nt, Artificial Sequence
  Description of Artificial Sequence: Synthetic oligonucleotide
acuuuugguacaaguggga

SEQ ID NO: 2146006 - RNA, 19 nt, Artificial Sequence
  Description of Artificial Sequence: Synthetic oligonucleotide
guacaagugggacccuuuc

SEQ ID NO: 2146007 - RNA, 19 nt, Artificial Sequence
  Description of Artificial Sequence: Synthetic oligonucleotide
uucucucggcgacaacagu

SEQ ID NO: 2146008 - RNA, 19 nt, Artificial Sequence
  Description of Artificial Sequence: Synthetic oligonucleotide
acugaccaaugagaaguug

SEQ ID NO: 2146009 - RNA, 19 nt, Artificial Sequence
  Description of Artificial Sequence: Synthetic oligonucleotide
gcaaacauguucuugggau

SEQ ID NO: 2146010 - RNA, 19 nt, Artificial Sequence
  Description of Artificial Sequence: Synthetic oligonucleotide
uagagucucacggcuuaca

SEQ ID NO: 2146011 - RNA, 19 nt, Artificial Sequence
  Description of Artificial Sequence: Synthetic oligonucleotide
uucuuacuuuugguacaag

SEQ ID NO: 2146012 - RNA, 19 nt, Artificial Sequence
  Description of Artificial Sequence: Synthetic oligonucleotide
cacauggccacgcgcgagc

SEQ ID NO: 2146013 - RNA, 19 nt, Artificial Sequence
  Description of Artificial Sequence: Synthetic oligonucleotide
gccgguacucgccacuugg

SEQ ID NO: 2146014 - RNA, 19 nt, Artificial Sequence
  Description of Artificial Sequence: Synthetic oligonucleotide
aaacuuaagcuuggaccuu

SEQ ID NO: 2146015 - RNA, 19 nt, Artificial Sequence
  Description of Artificial Sequence: Synthetic oligonucleotide
gggagugcgcgucagcagc

SEQ ID NO: 2146016 - RNA, 19 nt, Artificial Sequence
  Description of Artificial Sequence: Synthetic oligonucleotide
acacgcuuaggcaggaaga

SEQ ID NO: 2146017 - RNA, 19 nt, Artificial Sequence
  Description of Artificial Sequence: Synthetic oligonucleotide
ccguaugccaagcauguug

SEQ ID NO: 2146018 - RNA, 19 nt, Artificial Sequence
  Description of Artificial Sequence: Synthetic oligonucleotide
guacucgccacuuggcaaa

SEQ ID NO: 2146019 - RNA, 19 nt, Artificial Sequence
  Description of Artificial Sequence: Synthetic oligonucleotide
agugcgcgucagcagccuc

SEQ ID NO: 2146020 - RNA, 19 nt, Artificial Sequence
  Description of Artificial Sequence: Synthetic oligonucleotide
cuuggaccuuucagggaug

SEQ ID NO: 2146021 - RNA, 19 nt, Artificial Sequence
  Description of Artificial Sequence: Synthetic oligonucleotide
gaaguuguaccuugagguu

SEQ ID NO: 2146022 - RNA, 19 nt, Artificial Sequence
  Description of Artificial Sequence: Synthetic oligonucleotide
cccgacaccuuuucgagug

SEQ ID NO: 2146023 - RNA, 19 nt, Artificial Sequence
  Description of Artificial Sequence: Synthetic oligonucleotide
gcgguugauugucaggcgc

SEQ ID NO: 2146024 - RNA, 19 nt, Artificial Sequence
  Description of Artificial Sequence: Synthetic oligonucleotide
gaugcagacucagucucaa

SEQ ID NO: 2146025 - RNA, 19 nt, Artificial Sequence
  Description of Artificial Sequence: Synthetic oligonucleotide
gcuaugcgcucaaaggucc

SEQ ID NO: 2146026 - RNA, 19 nt, Artificial Sequence
  Description of Artificial Sequence: Synthetic oligonucleotide
acuuaagcuuggaccuuuc

SEQ ID NO: 2146027 - RNA, 19 nt, Artificial Sequence
  Description of Artificial Sequence: Synthetic oligonucleotide
cuuaagcuuggaccuuuca

SEQ ID NO: 2146028 - RNA, 19 nt, Artificial Sequence
  Description of Artificial Sequence: Synthetic oligonucleotide
gcuugaaaggggccgguac

SEQ ID NO: 2146029 - RNA, 19 nt, Artificial Sequence
  Description of Artificial Sequence: Synthetic oligonucleotide
cugcccgacaccuuuucga

SEQ ID NO: 2146030 - RNA, 19 nt, Artificial Sequence
  Description of Artificial Sequence: Synthetic oligonucleotide
cuuaaucuuuugagcaacu

SEQ ID NO: 2146031 - RNA, 19 nt, Artificial Sequence
  Description of Artificial Sequence: Synthetic oligonucleotide
ccaccuaacucuacuauga

SEQ ID NO: 2146032 - RNA, 19 nt, Artificial Sequence
  Description of Artificial Sequence: Synthetic oligonucleotide
ggaggagggucuucagacc

SEQ ID NO: 2146033 - RNA, 19 nt, Artificial Sequence
  Description of Artificial Sequence: Synthetic oligonucleotide
guugaagguccucguaugu

SEQ ID NO: 2146034 - RNA, 19 nt, Artificial Sequence
  Description of Artificial Sequence: Synthetic oligonucleotide
acauggccacgcgcgagcg

SEQ ID NO: 2146035 - RNA, 19 nt, Artificial Sequence
  Description of Artificial Sequence: Synthetic oligonucleotide
cugaaacgugcacccgcag

SEQ ID NO: 2146036 - RNA, 19 nt, Artificial Sequence
  Description of Artificial Sequence: Synthetic oligonucleotide
gugggcaacuagguccagg

SEQ ID NO: 2146037 - RNA, 19 nt, Artificial Sequence
  Description of Artificial Sequence: Synthetic oligonucleotide
aagguccucguauguccuu

SEQ ID NO: 2146038 - RNA, 19 nt, Artificial Sequence
  Description of Artificial Sequence: Synthetic oligonucleotide
aacugaccaaugagaaguu

SEQ ID NO: 2146039 - RNA, 19 nt, Artificial Sequence
  Description of Artificial Sequence: Synthetic oligonucleotide
augagaaguuguaccuuga

SEQ ID NO: 2146040 - RNA, 19 nt, Artificial Sequence
  Description of Artificial Sequence: Synthetic oligonucleotide
agcggcgcgggagugcgcg

SEQ ID NO: 2146041 - RNA, 19 nt, Artificial Sequence
  Description of Artificial Sequence: Synthetic oligonucleotide
gguaaccaccucccagugc

SEQ ID NO: 2146042 - RNA, 19 nt, Artificial Sequence
  Description of Artificial Sequence: Synthetic oligonucleotide
caggaaacccuguaccucu

SEQ ID NO: 2146043 - RNA, 19 nt, Artificial Sequence
  Description of Artificial Sequence: Synthetic oligonucleotide
cuugaaaggggccgguacu

SEQ ID NO: 2146044 - RNA, 19 nt, Artificial Sequence
  Description of Artificial Sequence: Synthetic oligonucleotide
cuuugacuacacacgcuua

SEQ ID NO: 2146045 - RNA, 19 nt, Artificial Sequence
  Description of Artificial Sequence: Synthetic oligonucleotide
gggucuucagaccagcacu

SEQ ID NO: 2146046 - RNA, 19 nt, Artificial Sequence
  Description of Artificial Sequence: Synthetic oligonucleotide
cuucuuacuuuugguacaa

SEQ ID NO: 2146047 - RNA, 19 nt, Artificial Sequence
  Description of Artificial Sequence: Synthetic oligonucleotide
ggugccagucuucacaggu

SEQ ID NO: 2146048 - RNA, 19 nt, Artificial Sequence
  Description of Artificial Sequence: Synthetic oligonucleotide
auccauagagcgguugauu

SEQ ID NO: 2146049 - RNA, 19 nt, Artificial Sequence
  Description of Artificial Sequence: Synthetic oligonucleotide
gggauuuugguuguuauuu

SEQ ID NO: 2146050 - RNA, 19 nt, Artificial Sequence
  Description of Artificial Sequence: Synthetic oligonucleotide
augaccccaguggagguaa

SEQ ID NO: 2146051 - RNA, 19 nt, Artificial Sequence
  Description of Artificial Sequence: Synthetic oligonucleotide
uacugcccuuucuguguca

SEQ ID NO: 2146052 - RNA, 19 nt, Artificial Sequence
  Description of Artificial Sequence: Synthetic oligonucleotide
cuaacucuacuaugagggu

SEQ ID NO: 2146053 - RNA, 19 nt, Artificial Sequence
  Description of Artificial Sequence: Synthetic oligonucleotide
auagagcgguugauuguca

SEQ ID NO: 2146054 - RNA, 19 nt, Artificial Sequence
  Description of Artificial Sequence: Synthetic oligonucleotide
caggugucacguagugauc

SEQ ID NO: 2146055 - RNA, 19 nt, Artificial Sequence
  Description of Artificial Sequence: Synthetic oligonucleotide
cuagagucucacggcuuac

SEQ ID NO: 2146056 - RNA, 19 nt, Artificial Sequence
  Description of Artificial Sequence: Synthetic oligonucleotide
cguagugaucaauggcacc

SEQ ID NO: 2146057 - RNA, 19 nt, Artificial Sequence
  Description of Artificial Sequence: Synthetic oligonucleotide
agguuacacucagaguuua

SEQ ID NO: 2146058 - RNA, 19 nt, Artificial Sequence
  Description of Artificial Sequence: Synthetic oligonucleotide
ggcuaugcgcucaaagguc

SEQ ID NO: 2146059 - RNA, 19 nt, Artificial Sequence
  Description of Artificial Sequence: Synthetic oligonucleotide
gauugucaggcgcaucauu

SEQ ID NO: 2146060 - RNA, 19 nt, Artificial Sequence
  Description of Artificial Sequence: Synthetic oligonucleotide
cauggccacgcgcgagcgg

SEQ ID NO: 2146061 - RNA, 19 nt, Artificial Sequence
  Description of Artificial Sequence: Synthetic oligonucleotide
cuaugcgcucaaaggucca

SEQ ID NO: 2146062 - RNA, 19 nt, Artificial Sequence
  Description of Artificial Sequence: Synthetic oligonucleotide
gugccaaaacugcaaaauu

SEQ ID NO: 2146063 - RNA, 19 nt, Artificial Sequence
  Description of Artificial Sequence: Synthetic oligonucleotide
aggagggucuucagaccag

SEQ ID NO: 2146064 - RNA, 19 nt, Artificial Sequence
  Description of Artificial Sequence: Synthetic oligonucleotide
caguugaagguccucguau

SEQ ID NO: 2146065 - RNA, 19 nt, Artificial Sequence
  Description of Artificial Sequence: Synthetic oligonucleotide
cguggcuaugcgcucaaag

SEQ ID NO: 2146066 - RNA, 19 nt, Artificial Sequence
  Description of Artificial Sequence: Synthetic oligonucleotide
gucauuuacucaugugcuu

SEQ ID NO: 2146067 - RNA, 19 nt, Artificial Sequence
  Description of Artificial Sequence: Synthetic oligonucleotide
guugauugucaggcgcauc

SEQ ID NO: 2146068 - RNA, 19 nt, Artificial Sequence
  Description of Artificial Sequence: Synthetic oligonucleotide
gcuuugacuacacacgcuu

SEQ ID NO: 2146069 - RNA, 19 nt, Artificial Sequence
  Description of Artificial Sequence: Synthetic oligonucleotide
gcaacugaaacugaccaau

SEQ ID NO: 2146070 - RNA, 19 nt, Artificial Sequence
  Description of Artificial Sequence: Synthetic oligonucleotide
ccaagcauguuggccgugg

SEQ ID NO: 2146071 - RNA, 19 nt, Artificial Sequence
  Description of Artificial Sequence: Synthetic oligonucleotide
ugccccaauacugcccuuu

SEQ ID NO: 2146072 - RNA, 19 nt, Artificial Sequence
  Description of Artificial Sequence: Synthetic oligonucleotide
cugcccuuucugugucaag

SEQ ID NO: 2146073 - RNA, 19 nt, Artificial Sequence
  Description of Artificial Sequence: Synthetic oligonucleotide
agcguccaccuaacucuac

SEQ ID NO: 2146074 - RNA, 19 nt, Artificial Sequence
  Description of Artificial Sequence: Synthetic oligonucleotide
guccaccuaacucuacuau

SEQ ID NO: 2146075 - RNA, 19 nt, Artificial Sequence
  Description of Artificial Sequence: Synthetic oligonucleotide
cacgcuuaggcaggaagaa

SEQ ID NO: 2146076 - RNA, 19 nt, Artificial Sequence
  Description of Artificial Sequence: Synthetic oligonucleotide
ggagcggcgcgggagugcg

SEQ ID NO: 2146077 - RNA, 19 nt, Artificial Sequence
  Description of Artificial Sequence: Synthetic oligonucleotide
caggcgcaucauuucaaaa

SEQ ID NO: 2146078 - RNA, 19 nt, Artificial Sequence
  Description of Artificial Sequence: Synthetic oligonucleotide
ccucguauguccuucaaau

SEQ ID NO: 2146079 - RNA, 19 nt, Artificial Sequence
  Description of Artificial Sequence: Synthetic oligonucleotide
uggaccuuucagggaugga

SEQ ID NO: 2146080 - RNA, 19 nt, Artificial Sequence
  Description of Artificial Sequence: Synthetic oligonucleotide
uacucgccacuuggcaaac

SEQ ID NO: 2146081 - RNA, 19 nt, Artificial Sequence
  Description of Artificial Sequence: Synthetic oligonucleotide
acgcuuaggcaggaagaau

SEQ ID NO: 2146082 - RNA, 19 nt, Artificial Sequence
  Description of Artificial Sequence: Synthetic oligonucleotide
ugaccccaguggagguaac

SEQ ID NO: 2146083 - RNA, 19 nt, Artificial Sequence
  Description of Artificial Sequence: Synthetic oligonucleotide
cagggauuuugguuguuau

SEQ ID NO: 2146084 - RNA, 19 nt, Artificial Sequence
  Description of Artificial Sequence: Synthetic oligonucleotide
ugugggcaacuagguccag

SEQ ID NO: 2146085 - RNA, 19 nt, Artificial Sequence
  Description of Artificial Sequence: Synthetic oligonucleotide
gcuuagcuaugguccaaga

SEQ ID NO: 2146086 - RNA, 19 nt, Artificial Sequence
  Description of Artificial Sequence: Synthetic oligonucleotide
gucaggcgcaucauuucaa

SEQ ID NO: 2146087 - RNA, 19 nt, Artificial Sequence
  Description of Artificial Sequence: Synthetic oligonucleotide
gugugcacguggguuccug

SEQ ID NO: 2146088 - RNA, 19 nt, Artificial Sequence
  Description of Artificial Sequence: Synthetic oligonucleotide
ugggauccauagagcgguu

SEQ ID NO: 2146089 - RNA, 19 nt, Artificial Sequence
  Description of Artificial Sequence: Synthetic oligonucleotide
gggauccauagagcgguug

SEQ ID NO: 2146090 - RNA, 19 nt, Artificial Sequence
  Description of Artificial Sequence: Synthetic oligonucleotide
cucggcgacaacaguggcu

SEQ ID NO: 2146091 - RNA, 19 nt, Artificial Sequence
  Description of Artificial Sequence: Synthetic oligonucleotide
gccuccacauggccacgcg

SEQ ID NO: 2146092 - RNA, 19 nt, Artificial Sequence
  Description of Artificial Sequence: Synthetic oligonucleotide
cucguauguccuucaaauu

SEQ ID NO: 2146093 - RNA, 19 nt, Artificial Sequence
  Description of Artificial Sequence: Synthetic oligonucleotide
gcgcaucauuucaaaauga

SEQ ID NO: 2146094 - RNA, 19 nt, Artificial Sequence
  Description of Artificial Sequence: Synthetic oligonucleotide
cuaugagggugccagucuu

SEQ ID NO: 2146095 - RNA, 19 nt, Artificial Sequence
  Description of Artificial Sequence: Synthetic oligonucleotide
ggagugcgcgucagcagcc

SEQ ID NO: 2146096 - RNA, 19 nt, Artificial Sequence
  Description of Artificial Sequence: Synthetic oligonucleotide
ugugugcacguggguuccu

SEQ ID NO: 2146097 - RNA, 19 nt, Artificial Sequence
  Description of Artificial Sequence: Synthetic oligonucleotide
ggugucacguagugaucaa

SEQ ID NO: 2146098 - RNA, 19 nt, Artificial Sequence
  Description of Artificial Sequence: Synthetic oligonucleotide
uccguaugccaagcauguu

SEQ ID NO: 2146099 - RNA, 19 nt, Artificial Sequence
  Description of Artificial Sequence: Synthetic oligonucleotide
ggcgcaucuuuucuagagu

SEQ ID NO: 2146100 - RNA, 19 nt, Artificial Sequence
  Description of Artificial Sequence: Synthetic oligonucleotide
gguccucguauguccuuca

SEQ ID NO: 2146101 - RNA, 19 nt, Artificial Sequence
  Description of Artificial Sequence: Synthetic oligonucleotide
guccucguauguccuucaa

SEQ ID NO: 2146102 - RNA, 19 nt, Artificial Sequence
  Description of Artificial Sequence: Synthetic oligonucleotide
uucgagugacgggcuugaa

SEQ ID NO: 2146103 - RNA, 19 nt, Artificial Sequence
  Description of Artificial Sequence: Synthetic oligonucleotide
uggccguggcuaugcgcuc

SEQ ID NO: 2146104 - RNA, 19 nt, Artificial Sequence
  Description of Artificial Sequence: Synthetic oligonucleotide
cucuacuaugagggugcca

SEQ ID NO: 2146105 - RNA, 19 nt, Artificial Sequence
  Description of Artificial Sequence: Synthetic oligonucleotide
cuacuaugagggugccagu

SEQ ID NO: 2146106 - RNA, 19 nt, Artificial Sequence
  Description of Artificial Sequence: Synthetic oligonucleotide
ccuuucugugucaagucau

SEQ ID NO: 2146107 - RNA, 19 nt, Artificial Sequence
  Description of Artificial Sequence: Synthetic oligonucleotide
gcgcucaaagguccaggga

SEQ ID NO: 2146108 - RNA, 19 nt, Artificial Sequence
  Description of Artificial Sequence: Synthetic oligonucleotide
gcccaagaaucugaaacgu

SEQ ID NO: 2146109 - RNA, 19 nt, Artificial Sequence
  Description of Artificial Sequence: Synthetic oligonucleotide
uccagggauuuugguuguu

SEQ ID NO: 2146110 - RNA, 19 nt, Artificial Sequence
  Description of Artificial Sequence: Synthetic oligonucleotide
cagcguccaccuaacucua

SEQ ID NO: 2146111 - RNA, 19 nt, Artificial Sequence
  Description of Artificial Sequence: Synthetic oligonucleotide
guuguaccuugagguuaca

SEQ ID NO: 2146112 - RNA, 19 nt, Artificial Sequence
  Description of Artificial Sequence: Synthetic oligonucleotide
ggauucucucggcgacaac

SEQ ID NO: 2146113 - RNA, 19 nt, Artificial Sequence
  Description of Artificial Sequence: Synthetic oligonucleotide
gcgggagugcgcgucagca

SEQ ID NO: 2146114 - RNA, 19 nt, Artificial Sequence
  Description of Artificial Sequence: Synthetic oligonucleotide
gccccaauacugcccuuuc

SEQ ID NO: 2146115 - RNA, 19 nt, Artificial Sequence
  Description of Artificial Sequence: Synthetic oligonucleotide
gugcuuagcuaugguccaa

SEQ ID NO: 2146116 - RNA, 19 nt, Artificial Sequence
  Description of Artificial Sequence: Synthetic oligonucleotide
cauaugggcucaggaauuu

SEQ ID NO: 2146117 - RNA, 19 nt, Artificial Sequence
  Description of Artificial Sequence: Synthetic oligonucleotide
cuuuucgagugacgggcuu

SEQ ID NO: 2146118 - RNA, 19 nt, Artificial Sequence
  Description of Artificial Sequence: Synthetic oligonucleotide
gcuggaaagggcaguuugu

SEQ ID NO: 2146119 - RNA, 19 nt, Artificial Sequence
  Description of Artificial Sequence: Synthetic oligonucleotide
aggaaacccuguaccucuu

SEQ ID NO: 2146120 - RNA, 19 nt, Artificial Sequence
  Description of Artificial Sequence: Synthetic oligonucleotide
gcguccaccuaacucuacu

SEQ ID NO: 2146121 - RNA, 19 nt, Artificial Sequence
  Description of Artificial Sequence: Synthetic oligonucleotide
ccauagagcgguugauugu

SEQ ID NO: 2146122 - RNA, 19 nt, Artificial Sequence
  Description of Artificial Sequence: Synthetic oligonucleotide
cgguugauugucaggcgca

SEQ ID NO: 2146123 - RNA, 19 nt, Artificial Sequence
  Description of Artificial Sequence: Synthetic oligonucleotide
gugucacguagugaucaau

SEQ ID NO: 2146124 - RNA, 19 nt, Artificial Sequence
  Description of Artificial Sequence: Synthetic oligonucleotide
gggcaacuagguccaggaa

SEQ ID NO: 2146125 - RNA, 19 nt, Artificial Sequence
  Description of Artificial Sequence: Synthetic oligonucleotide
acguggguuccugggcuuu

SEQ ID NO: 2146126 - RNA, 19 nt, Artificial Sequence
  Description of Artificial Sequence: Synthetic oligonucleotide
cguauguccuucaaauuuu

SEQ ID NO: 2146127 - RNA, 19 nt, Artificial Sequence
  Description of Artificial Sequence: Synthetic oligonucleotide
ggccgguacucgccacuug

SEQ ID NO: 2146128 - RNA, 19 nt, Artificial Sequence
  Description of Artificial Sequence: Synthetic oligonucleotide
ccuugagguuacacucaga

SEQ ID NO: 2146129 - RNA, 19 nt, Artificial Sequence
  Description of Artificial Sequence: Synthetic oligonucleotide
cgcuuaggcaggaagaauu

SEQ ID NO: 2146130 - RNA, 19 nt, Artificial Sequence
  Description of Artificial Sequence: Synthetic oligonucleotide
gccacgcgcgagcggcggg

SEQ ID NO: 2146131 - RNA, 19 nt, Artificial Sequence
  Description of Artificial Sequence: Synthetic oligonucleotide
cgggcuugaaaggggccgg

SEQ ID NO: 2146132 - RNA, 19 nt, Artificial Sequence
  Description of Artificial Sequence: Synthetic oligonucleotide
ggccacgcgcgagcggcgg

SEQ ID NO: 2146133 - RNA, 19 nt, Artificial Sequence
  Description of Artificial Sequence: Synthetic oligonucleotide
gcuuaggcaggaagaauuu

SEQ ID NO: 2146134 - RNA, 19 nt, Artificial Sequence
  Description of Artificial Sequence: Synthetic oligonucleotide
ggcuuugacuacacacgcu

SEQ ID NO: 2146135 - RNA, 19 nt, Artificial Sequence
  Description of Artificial Sequence: Synthetic oligonucleotide
gagugcgcgucagcagccu

SEQ ID NO: 2146136 - RNA, 19 nt, Artificial Sequence
  Description of Artificial Sequence: Synthetic oligonucleotide
gguugauugucaggcgcau

SEQ ID NO: 2146137 - RNA, 19 nt, Artificial Sequence
  Description of Artificial Sequence: Synthetic oligonucleotide
gguacaagugggacccuuu

SEQ ID NO: 2146138 - RNA, 19 nt, Artificial Sequence
  Description of Artificial Sequence: Synthetic oligonucleotide
ccacgcgcgagcggcgggg

SEQ ID NO: 2146139 - RNA, 19 nt, Artificial Sequence
  Description of Artificial Sequence: Synthetic oligonucleotide
cucacggcuuacagccuuu

SEQ ID NO: 2146140 - RNA, 19 nt, Artificial Sequence
  Description of Artificial Sequence: Synthetic oligonucleotide
ccuuuucgagugacgggcu

SEQ ID NO: 2146141 - RNA, 19 nt, Artificial Sequence
  Description of Artificial Sequence: Synthetic oligonucleotide
ggcgcgggagugcgcguca

SEQ ID NO: 2146142 - RNA, 19 nt, Artificial Sequence
  Description of Artificial Sequence: Synthetic oligonucleotide
ggccguggcuaugcgcuca

SEQ ID NO: 2146143 - RNA, 19 nt, Artificial Sequence
  Description of Artificial Sequence: Synthetic oligonucleotide
ccagggauuuugguuguua

SEQ ID NO: 2146144 - RNA, 19 nt, Artificial Sequence
  Description of Artificial Sequence: Synthetic oligonucleotide
cguccaccuaacucuacua

SEQ ID NO: 2146145 - RNA, 19 nt, Artificial Sequence
  Description of Artificial Sequence: Synthetic oligonucleotide
cgcaucuuuucuagagucu

SEQ ID NO: 2146146 - RNA, 19 nt, Artificial Sequence
  Description of Artificial Sequence: Synthetic oligonucleotide
ccuuucagggauggagaua

SEQ ID NO: 2146147 - RNA, 19 nt, Artificial Sequence
  Description of Artificial Sequence: Synthetic oligonucleotide
cacguggguuccugggcuu

SEQ ID NO: 2146148 - RNA, 19 nt, Artificial Sequence
  Description of Artificial Sequence: Synthetic oligonucleotide
ggggccgguacucgccacu

SEQ ID NO: 2146149 - RNA, 19 nt, Artificial Sequence
  Description of Artificial Sequence: Synthetic oligonucleotide
gccguggcuaugcgcucaa

SEQ ID NO: 2146150 - RNA, 19 nt, Artificial Sequence
  Description of Artificial Sequence: Synthetic oligonucleotide
cgcugcccgacaccuuuuc

SEQ ID NO: 2146151 - RNA, 19 nt, Artificial Sequence
  Description of Artificial Sequence: Synthetic oligonucleotide
gcgcgggagugcgcgucag

SEQ ID NO: 2146152 - RNA, 19 nt, Artificial Sequence
  Description of Artificial Sequence: Synthetic oligonucleotide
gggccgguacucgccacuu

SEQ ID NO: 2146153 - RNA, 19 nt, Artificial Sequence
  Description of Artificial Sequence: Synthetic oligonucleotide
cggcgcgggagugcgcguc

SEQ ID NO: 2146154 - RNA, 19 nt, Artificial Sequence
  Description of Artificial Sequence: Synthetic oligonucleotide
ccguggcuaugcgcucaaa

SEQ ID NO: 2146155 - RNA, 19 nt, Artificial Sequence
  Description of Artificial Sequence: Synthetic oligonucleotide
gcgcugcccgacaccuuuu

SEQ ID NO: 2146156 - RNA, 19 nt, Artificial Sequence
  Description of Artificial Sequence: Synthetic oligonucleotide
auagucugaacauagauac

SEQ ID NO: 2146157 - RNA, 19 nt, Artificial Sequence
  Description of Artificial Sequence: Synthetic oligonucleotide
uguaguuauaagcacauug

SEQ ID NO: 2146158 - RNA, 19 nt, Artificial Sequence
  Description of Artificial Sequence: Synthetic oligonucleotide
acagacuguaguuauaagc

SEQ ID NO: 2146159 - RNA, 19 nt, Artificial Sequence
  Description of Artificial Sequence: Synthetic oligonucleotide
auaagcacauuguagacac

SEQ ID NO: 2146160 - RNA, 19 nt, Artificial Sequence
  Description of Artificial Sequence: Synthetic oligonucleotide
ucuaggaggugacagaugg

SEQ ID NO: 2146161 - RNA, 19 nt, Artificial Sequence
  Description of Artificial Sequence: Synthetic oligonucleotide
uuugagaacuagcacauag

SEQ ID NO: 2146162 - RNA, 19 nt, Artificial Sequence
  Description of Artificial Sequence: Synthetic oligonucleotide
gaaacacaggcuuauaucc

SEQ ID NO: 2146163 - RNA, 19 nt, Artificial Sequence
  Description of Artificial Sequence: Synthetic oligonucleotide
uuagcaugaauccuaauga

SEQ ID NO: 2146164 - RNA, 19 nt, Artificial Sequence
  Description of Artificial Sequence: Synthetic oligonucleotide
agaacuagcacauaguccu

SEQ ID NO: 2146165 - RNA, 19 nt, Artificial Sequence
  Description of Artificial Sequence: Synthetic oligonucleotide
aauggugggaccuuauauc

SEQ ID NO: 2146166 - RNA, 19 nt, Artificial Sequence
  Description of Artificial Sequence: Synthetic oligonucleotide
acaauuugcuucuaggagg

SEQ ID NO: 2146167 - RNA, 19 nt, Artificial Sequence
  Description of Artificial Sequence: Synthetic oligonucleotide
auuagcaugaauccuaaug

SEQ ID NO: 2146168 - RNA, 19 nt, Artificial Sequence
  Description of Artificial Sequence: Synthetic oligonucleotide
auaaacguguuguauuagc

SEQ ID NO: 2146169 - RNA, 19 nt, Artificial Sequence
  Description of Artificial Sequence: Synthetic oligonucleotide
auagauacaaaauaaguua

SEQ ID NO: 2146170 - RNA, 19 nt, Artificial Sequence
  Description of Artificial Sequence: Synthetic oligonucleotide
auccuaaugacaaacagac

SEQ ID NO: 2146171 - RNA, 19 nt, Artificial Sequence
  Description of Artificial Sequence: Synthetic oligonucleotide
ugaaacucuacagagaaca

SEQ ID NO: 2146172 - RNA, 19 nt, Artificial Sequence
  Description of Artificial Sequence: Synthetic oligonucleotide
aacguguuguauuagcaug

SEQ ID NO: 2146173 - RNA, 19 nt, Artificial Sequence
  Description of Artificial Sequence: Synthetic oligonucleotide
auggugggaccuuauaucc

SEQ ID NO: 2146174 - RNA, 19 nt, Artificial Sequence
  Description of Artificial Sequence: Synthetic oligonucleotide
guuguauuagcaugaaucc

SEQ ID NO: 2146175 - RNA, 19 nt, Artificial Sequence
  Description of Artificial Sequence: Synthetic oligonucleotide
cuauauagucugaacauag

SEQ ID NO: 2146176 - RNA, 19 nt, Artificial Sequence
  Description of Artificial Sequence: Synthetic oligonucleotide
aacauagauacaaaauaag

SEQ ID NO: 2146177 - RNA, 19 nt, Artificial Sequence
  Description of Artificial Sequence: Synthetic oligonucleotide
uguuuuccaucacaguagg

SEQ ID NO: 2146178 - RNA, 19 nt, Artificial Sequence
  Description of Artificial Sequence: Synthetic oligonucleotide
aagcacauuguagacacac

SEQ ID NO: 2146179 - RNA, 19 nt, Artificial Sequence
  Description of Artificial Sequence: Synthetic oligonucleotide
uagugugacugucaagucg

SEQ ID NO: 2146180 - RNA, 19 nt, Artificial Sequence
  Description of Artificial Sequence: Synthetic oligonucleotide
uguauuagcaugaauccua

SEQ ID NO: 2146181 - RNA, 19 nt, Artificial Sequence
  Description of Artificial Sequence: Synthetic oligonucleotide
cugaauuugaguugggaug

SEQ ID NO: 2146182 - RNA, 19 nt, Artificial Sequence
  Description of Artificial Sequence: Synthetic oligonucleotide
ugcucaaggugaauggacg

SEQ ID NO: 2146183 - RNA, 19 nt, Artificial Sequence
  Description of Artificial Sequence: Synthetic oligonucleotide
cucaagauggccuuuugag

SEQ ID NO: 2146184 - RNA, 19 nt, Artificial Sequence
  Description of Artificial Sequence: Synthetic oligonucleotide
uugauggcccaccaaaugc

SEQ ID NO: 2146185 - RNA, 19 nt, Artificial Sequence
  Description of Artificial Sequence: Synthetic oligonucleotide
uggaucaguggccagguag

SEQ ID NO: 2146186 - RNA, 19 nt, Artificial Sequence
  Description of Artificial Sequence: Synthetic oligonucleotide
uaaacguguuguauuagca

SEQ ID NO: 2146187 - RNA, 19 nt, Artificial Sequence
  Description of Artificial Sequence: Synthetic oligonucleotide
augaauccuaaugacaaac

SEQ ID NO: 2146188 - RNA, 19 nt, Artificial Sequence
  Description of Artificial Sequence: Synthetic oligonucleotide
uauauccugggauagggga

SEQ ID NO: 2146189 - RNA, 19 nt, Artificial Sequence
  Description of Artificial Sequence: Synthetic oligonucleotide
ugaauuugaguugggaugc

SEQ ID NO: 2146190 - RNA, 19 nt, Artificial Sequence
  Description of Artificial Sequence: Synthetic oligonucleotide
ugagaacuagcacauaguc

SEQ ID NO: 2146191 - RNA, 19 nt, Artificial Sequence
  Description of Artificial Sequence: Synthetic oligonucleotide
uguaucuggggacuggagc

SEQ ID NO: 2146192 - RNA, 19 nt, Artificial Sequence
  Description of Artificial Sequence: Synthetic oligonucleotide
guaggaguauagcagacag

SEQ ID NO: 2146193 - RNA, 19 nt, Artificial Sequence
  Description of Artificial Sequence: Synthetic oligonucleotide
acagucucuauauagucug

SEQ ID NO: 2146194 - RNA, 19 nt, Artificial Sequence
  Description of Artificial Sequence: Synthetic oligonucleotide
cagaacagucucuauauag

SEQ ID NO: 2146195 - RNA, 19 nt, Artificial Sequence
  Description of Artificial Sequence: Synthetic oligonucleotide
uggacuucugugaugucgg

SEQ ID NO: 2146196 - RNA, 19 nt, Artificial Sequence
  Description of Artificial Sequence: Synthetic oligonucleotide
ccuaaugacaaacagacug

SEQ ID NO: 2146197 - RNA, 19 nt, Artificial Sequence
  Description of Artificial Sequence: Synthetic oligonucleotide
uauagucugaacauagaua

SEQ ID NO: 2146198 - RNA, 19 nt, Artificial Sequence
  Description of Artificial Sequence: Synthetic oligonucleotide
agcgggaacaggcacacac

SEQ ID NO: 2146199 - RNA, 19 nt, Artificial Sequence
  Description of Artificial Sequence: Synthetic oligonucleotide
aguuauaagcacauuguag

SEQ ID NO: 2146200 - RNA, 19 nt, Artificial Sequence
  Description of Artificial Sequence: Synthetic oligonucleotide
cuuauauccugggauaggg

SEQ ID NO: 2146201 - RNA, 19 nt, Artificial Sequence
  Description of Artificial Sequence: Synthetic oligonucleotide
aacacaggcuuauauccug

SEQ ID NO: 2146202 - RNA, 19 nt, Artificial Sequence
  Description of Artificial Sequence: Synthetic oligonucleotide
ucacaguaggaguauagca

SEQ ID NO: 2146203 - RNA, 19 nt, Artificial Sequence
  Description of Artificial Sequence: Synthetic oligonucleotide
ucccugaaacucuacagag

SEQ ID NO: 2146204 - RNA, 19 nt, Artificial Sequence
  Description of Artificial Sequence: Synthetic oligonucleotide
auagcagacagucacugga

SEQ ID NO: 2146205 - RNA, 19 nt, Artificial Sequence
  Description of Artificial Sequence: Synthetic oligonucleotide
aagauggccuuuugagaac

SEQ ID NO: 2146206 - RNA, 19 nt, Artificial Sequence
  Description of Artificial Sequence: Synthetic oligonucleotide
auauagucugaacauagau

SEQ ID NO: 2146207 - RNA, 19 nt, Artificial Sequence
  Description of Artificial Sequence: Synthetic oligonucleotide
ugaauccuaaugacaaaca

SEQ ID NO: 2146208 - RNA, 19 nt, Artificial Sequence
  Description of Artificial Sequence: Synthetic oligonucleotide
uuggacuucugugaugucg

SEQ ID NO: 2146209 - RNA, 19 nt, Artificial Sequence
  Description of Artificial Sequence: Synthetic oligonucleotide
ucaaaacaaggaagaaccc

SEQ ID NO: 2146210 - RNA, 19 nt, Artificial Sequence
  Description of Artificial Sequence: Synthetic oligonucleotide
gaccuuauauccauaacug

SEQ ID NO: 2146211 - RNA, 19 nt, Artificial Sequence
  Description of Artificial Sequence: Synthetic oligonucleotide
aacuagcacauaguccugc

SEQ ID NO: 2146212 - RNA, 19 nt, Artificial Sequence
  Description of Artificial Sequence: Synthetic oligonucleotide
aaggugaauggacgggagg

SEQ ID NO: 2146213 - RNA, 19 nt, Artificial Sequence
  Description of Artificial Sequence: Synthetic oligonucleotide
cacaauuugcuucuaggag

SEQ ID NO: 2146214 - RNA, 19 nt, Artificial Sequence
  Description of Artificial Sequence: Synthetic oligonucleotide
uuauaagcacauuguagac

SEQ ID NO: 2146215 - RNA, 19 nt, Artificial Sequence
  Description of Artificial Sequence: Synthetic oligonucleotide
gauaaucuuuccccaguag

SEQ ID NO: 2146216 - RNA, 19 nt, Artificial Sequence
  Description of Artificial Sequence: Synthetic oligonucleotide
aauccuaaugacaaacaga

SEQ ID NO: 2146217 - RNA, 19 nt, Artificial Sequence
  Description of Artificial Sequence: Synthetic oligonucleotide
uauauagucugaacauaga

SEQ ID NO: 2146218 - RNA, 19 nt, Artificial Sequence
  Description of Artificial Sequence: Synthetic oligonucleotide
agagguguucaaaacaagg

SEQ ID NO: 2146219 - RNA, 19 nt, Artificial Sequence
  Description of Artificial Sequence: Synthetic oligonucleotide
ucuccugauggcuugguug

SEQ ID NO: 2146220 - RNA, 19 nt, Artificial Sequence
  Description of Artificial Sequence: Synthetic oligonucleotide
uuguagacacacagaacag

SEQ ID NO: 2146221 - RNA, 19 nt, Artificial Sequence
  Description of Artificial Sequence: Synthetic oligonucleotide
aaacguguuguauuagcau

SEQ ID NO: 2146222 - RNA, 19 nt, Artificial Sequence
  Description of Artificial Sequence: Synthetic oligonucleotide
acauagauacaaaauaagu

SEQ ID NO: 2146223 - RNA, 19 nt, Artificial Sequence
  Description of Artificial Sequence: Synthetic oligonucleotide
aucacaguaggaguauagc

SEQ ID NO: 2146224 - RNA, 19 nt, Artificial Sequence
  Description of Artificial Sequence: Synthetic oligonucleotide
aggugaauggacgggaggc

SEQ ID NO: 2146225 - RNA, 19 nt, Artificial Sequence
  Description of Artificial Sequence: Synthetic oligonucleotide
ucaagauggccuuuugaga

SEQ ID NO: 2146226 - RNA, 19 nt, Artificial Sequence
  Description of Artificial Sequence: Synthetic oligonucleotide
uauagcagacagucacugg

SEQ ID NO: 2146227 - RNA, 19 nt, Artificial Sequence
  Description of Artificial Sequence: Synthetic oligonucleotide
gaugucgggaacacgaggc

SEQ ID NO: 2146228 - RNA, 19 nt, Artificial Sequence
  Description of Artificial Sequence: Synthetic oligonucleotide
uugauaaucuuuccccagu

SEQ ID NO: 2146229 - RNA, 19 nt, Artificial Sequence
  Description of Artificial Sequence: Synthetic oligonucleotide
uauaagcacauuguagaca

SEQ ID NO: 2146230 - RNA, 19 nt, Artificial Sequence
  Description of Artificial Sequence: Synthetic oligonucleotide
ggauaggggagguacagcg

SEQ ID NO: 2146231 - RNA, 19 nt, Artificial Sequence
  Description of Artificial Sequence: Synthetic oligonucleotide
acaguaggaguauagcaga

SEQ ID NO: 2146232 - RNA, 19 nt, Artificial Sequence
  Description of Artificial Sequence: Synthetic oligonucleotide
guugauaaucuuuccccag

SEQ ID NO: 2146233 - RNA, 19 nt, Artificial Sequence
  Description of Artificial Sequence: Synthetic oligonucleotide
aaugacaaacagacuguag

SEQ ID NO: 2146234 - RNA, 19 nt, Artificial Sequence
  Description of Artificial Sequence: Synthetic oligonucleotide
uuugcuucuaggaggugac

SEQ ID NO: 2146235 - RNA, 19 nt, Artificial Sequence
  Description of Artificial Sequence: Synthetic oligonucleotide
agagggcaaguuuggaaac

SEQ ID NO: 2146236 - RNA, 19 nt, Artificial Sequence
  Description of Artificial Sequence: Synthetic oligonucleotide
agauugauggcccaccaaa

SEQ ID NO: 2146237 - RNA, 19 nt, Artificial Sequence
  Description of Artificial Sequence: Synthetic oligonucleotide
aauuugaguugggaugcuc

SEQ ID NO: 2146238 - RNA, 19 nt, Artificial Sequence
  Description of Artificial Sequence: Synthetic oligonucleotide
uugagaacuagcacauagu

SEQ ID NO: 2146239 - RNA, 19 nt, Artificial Sequence
  Description of Artificial Sequence: Synthetic oligonucleotide
auggacgggaggcucagcg

SEQ ID NO: 2146240 - RNA, 19 nt, Artificial Sequence
  Description of Artificial Sequence: Synthetic oligonucleotide
uaguuauaagcacauugua

SEQ ID NO: 2146241 - RNA, 19 nt, Artificial Sequence
  Description of Artificial Sequence: Synthetic oligonucleotide
agagaacaaggucccaguc

SEQ ID NO: 2146242 - RNA, 19 nt, Artificial Sequence
  Description of Artificial Sequence: Synthetic oligonucleotide
auugauggcccaccaaaug

SEQ ID NO: 2146243 - RNA, 19 nt, Artificial Sequence
  Description of Artificial Sequence: Synthetic oligonucleotide
uggaaacacaggcuuauau

SEQ ID NO: 2146244 - RNA, 19 nt, Artificial Sequence
  Description of Artificial Sequence: Synthetic oligonucleotide
ugccucauguaucugggga

SEQ ID NO: 2146245 - RNA, 19 nt, Artificial Sequence
  Description of Artificial Sequence: Synthetic oligonucleotide
cuccugauggcuugguugg

SEQ ID NO: 2146246 - RNA, 19 nt, Artificial Sequence
  Description of Artificial Sequence: Synthetic oligonucleotide
gagaacuagcacauagucc

SEQ ID NO: 2146247 - RNA, 19 nt, Artificial Sequence
  Description of Artificial Sequence: Synthetic oligonucleotide
gugacugucaagucgugug

SEQ ID NO: 2146248 - RNA, 19 nt, Artificial Sequence
  Description of Artificial Sequence: Synthetic oligonucleotide
uuauauccauaacugccuc

SEQ ID NO: 2146249 - RNA, 19 nt, Artificial Sequence
  Description of Artificial Sequence: Synthetic oligonucleotide
ucucaagauggccuuuuga

SEQ ID NO: 2146250 - RNA, 19 nt, Artificial Sequence
  Description of Artificial Sequence: Synthetic oligonucleotide
aagaacccuucucauuucu

SEQ ID NO: 2146251 - RNA, 19 nt, Artificial Sequence
  Description of Artificial Sequence: Synthetic oligonucleotide
agucugaacauagauacaa

SEQ ID NO: 2146252 - RNA, 19 nt, Artificial Sequence
  Description of Artificial Sequence: Synthetic oligonucleotide
aaggauaaacguguuguau

SEQ ID NO: 2146253 - RNA, 19 nt, Artificial Sequence
  Description of Artificial Sequence: Synthetic oligonucleotide
uguguguguguguuccuag

SEQ ID NO: 2146254 - RNA, 19 nt, Artificial Sequence
  Description of Artificial Sequence: Synthetic oligonucleotide
aacagucucuauauagucu

SEQ ID NO: 2146255 - RNA, 19 nt, Artificial Sequence
  Description of Artificial Sequence: Synthetic oligonucleotide
gauaaacguguuguauuag

SEQ ID NO: 2146256 - RNA, 19 nt, Artificial Sequence
  Description of Artificial Sequence: Synthetic oligonucleotide
ggcacaauuugcuucuagg

SEQ ID NO: 2146257 - RNA, 19 nt, Artificial Sequence
  Description of Artificial Sequence: Synthetic oligonucleotide
uagcaugaauccuaaugac

SEQ ID NO: 2146258 - RNA, 19 nt, Artificial Sequence
  Description of Artificial Sequence: Synthetic oligonucleotide
uauauccauaacugccuca

SEQ ID NO: 2146259 - RNA, 19 nt, Artificial Sequence
  Description of Artificial Sequence: Synthetic oligonucleotide
ugauggcccaccaaaugcu

SEQ ID NO: 2146260 - RNA, 19 nt, Artificial Sequence
  Description of Artificial Sequence: Synthetic oligonucleotide
agguaguaauggugggacc

SEQ ID NO: 2146261 - RNA, 19 nt, Artificial Sequence
  Description of Artificial Sequence: Synthetic oligonucleotide
guggcugaauuugaguugg

SEQ ID NO: 2146262 - RNA, 19 nt, Artificial Sequence
  Description of Artificial Sequence: Synthetic oligonucleotide
aucuuuccccaguagacca

SEQ ID NO: 2146263 - RNA, 19 nt, Artificial Sequence
  Description of Artificial Sequence: Synthetic oligonucleotide
uggccuuuugagaacuagc

SEQ ID NO: 2146264 - RNA, 19 nt, Artificial Sequence
  Description of Artificial Sequence: Synthetic oligonucleotide
aacccuucucauuucuagu

SEQ ID NO: 2146265 - RNA, 19 nt, Artificial Sequence
  Description of Artificial Sequence: Synthetic oligonucleotide
aggauaaacguguuguauu

SEQ ID NO: 2146266 - RNA, 19 nt, Artificial Sequence
  Description of Artificial Sequence: Synthetic oligonucleotide
caagauggccuuuugagaa

SEQ ID NO: 2146267 - RNA, 19 nt, Artificial Sequence
  Description of Artificial Sequence: Synthetic oligonucleotide
uauccugggauaggggagg

SEQ ID NO: 2146268 - RNA, 19 nt, Artificial Sequence
  Description of Artificial Sequence: Synthetic oligonucleotide
aagccaagggaaagguuac

SEQ ID NO: 2146269 - RNA, 19 nt, Artificial Sequence
  Description of Artificial Sequence: Synthetic oligonucleotide
acccuucucauuucuagug

SEQ ID NO: 2146270 - RNA, 19 nt, Artificial Sequence
  Description of Artificial Sequence: Synthetic oligonucleotide
ucuauauagucugaacaua

SEQ ID NO: 2146271 - RNA, 19 nt, Artificial Sequence
  Description of Artificial Sequence: Synthetic oligonucleotide
cauagauacaaaauaaguu

SEQ ID NO: 2146272 - RNA, 19 nt, Artificial Sequence
  Description of Artificial Sequence: Synthetic oligonucleotide
ugauaaucuuuccccagua

SEQ ID NO: 2146273 - RNA, 19 nt, Artificial Sequence
  Description of Artificial Sequence: Synthetic oligonucleotide
ugccaaggacaccagaguc

SEQ ID NO: 2146274 - RNA, 19 nt, Artificial Sequence
  Description of Artificial Sequence: Synthetic oligonucleotide
aguagaccacaugagagcu

SEQ ID NO: 2146275 - RNA, 19 nt, Artificial Sequence
  Description of Artificial Sequence: Synthetic oligonucleotide
uuggagagguguucaaaac

SEQ ID NO: 2146276 - RNA, 19 nt, Artificial Sequence
  Description of Artificial Sequence: Synthetic oligonucleotide
ggaugcucaaggugaaugg

SEQ ID NO: 2146277 - RNA, 19 nt, Artificial Sequence
  Description of Artificial Sequence: Synthetic oligonucleotide
cagucacuggaucaguggc

SEQ ID NO: 2146278 - RNA, 19 nt, Artificial Sequence
  Description of Artificial Sequence: Synthetic oligonucleotide
cauuguagacacacagaac

SEQ ID NO: 2146279 - RNA, 19 nt, Artificial Sequence
  Description of Artificial Sequence: Synthetic oligonucleotide
uccaacccugggaacuugg

SEQ ID NO: 2146280 - RNA, 19 nt, Artificial Sequence
  Description of Artificial Sequence: Synthetic oligonucleotide
ucaaggugaauggacggga

SEQ ID NO: 2146281 - RNA, 19 nt, Artificial Sequence
  Description of Artificial Sequence: Synthetic oligonucleotide
gagguguucaaaacaagga

SEQ ID NO: 2146282 - RNA, 19 nt, Artificial Sequence
  Description of Artificial Sequence: Synthetic oligonucleotide
ugaauggacgggaggcuca

SEQ ID NO: 2146283 - RNA, 19 nt, Artificial Sequence
  Description of Artificial Sequence: Synthetic oligonucleotide
ugacugucaagucgugugu

SEQ ID NO: 2146284 - RNA, 19 nt, Artificial Sequence
  Description of Artificial Sequence: Synthetic oligonucleotide
ggcaaguuuggaaacacag

SEQ ID NO: 2146285 - RNA, 19 nt, Artificial Sequence
  Description of Artificial Sequence: Synthetic oligonucleotide
ucucauuucuagugugacu

SEQ ID NO: 2146286 - RNA, 19 nt, Artificial Sequence
  Description of Artificial Sequence: Synthetic oligonucleotide
ucauguaucuggggacugg

SEQ ID NO: 2146287 - RNA, 19 nt, Artificial Sequence
  Description of Artificial Sequence: Synthetic oligonucleotide
agugugacugucaagucgu

SEQ ID NO: 2146288 - RNA, 19 nt, Artificial Sequence
  Description of Artificial Sequence: Synthetic oligonucleotide
ccaguagaccacaugagag

SEQ ID NO: 2146289 - RNA, 19 nt, Artificial Sequence
  Description of Artificial Sequence: Synthetic oligonucleotide
guauagcagacagucacug

SEQ ID NO: 2146290 - RNA, 19 nt, Artificial Sequence
  Description of Artificial Sequence: Synthetic oligonucleotide
uguguguguuccuaggcuu

SEQ ID NO: 2146291 - RNA, 19 nt, Artificial Sequence
  Description of Artificial Sequence: Synthetic oligonucleotide
uugccaaggacaccagagu

SEQ ID NO: 2146292 - RNA, 19 nt, Artificial Sequence
  Description of Artificial Sequence: Synthetic oligonucleotide
aaacacaggcuuauauccu

SEQ ID NO: 2146293 - RNA, 19 nt, Artificial Sequence
  Description of Artificial Sequence: Synthetic oligonucleotide
ugucaagucgugugugugu

SEQ ID NO: 2146294 - RNA, 19 nt, Artificial Sequence
  Description of Artificial Sequence: Synthetic oligonucleotide
ggaaacacaggcuuauauc

SEQ ID NO: 2146295 - RNA, 19 nt, Artificial Sequence
  Description of Artificial Sequence: Synthetic oligonucleotide
uucucauuucuagugugac

SEQ ID NO: 2146296 - RNA, 19 nt, Artificial Sequence
  Description of Artificial Sequence: Synthetic oligonucleotide
guagcaagccaagggaaag

SEQ ID NO: 2146297 - RNA, 19 nt, Artificial Sequence
  Description of Artificial Sequence: Synthetic oligonucleotide
cuaggcuugcggcuugucc

SEQ ID NO: 2146298 - RNA, 19 nt, Artificial Sequence
  Description of Artificial Sequence: Synthetic oligonucleotide
gucucuauauagucugaac

SEQ ID NO: 2146299 - RNA, 19 nt, Artificial Sequence
  Description of Artificial Sequence: Synthetic oligonucleotide
ccuuuugagaacuagcaca

SEQ ID NO: 2146300 - RNA, 19 nt, Artificial Sequence
  Description of Artificial Sequence: Synthetic oligonucleotide
uggaggguacugaguacag

SEQ ID NO: 2146301 - RNA, 19 nt, Artificial Sequence
  Description of Artificial Sequence: Synthetic oligonucleotide
uuacaguugcuuuguuuuc

SEQ ID NO: 2146302 - RNA, 19 nt, Artificial Sequence
  Description of Artificial Sequence: Synthetic oligonucleotide
ugggaccuuauauccauaa

SEQ ID NO: 2146303 - RNA, 19 nt, Artificial Sequence
  Description of Artificial Sequence: Synthetic oligonucleotide
uagucugaacauagauaca

SEQ ID NO: 2146304 - RNA, 19 nt, Artificial Sequence
  Description of Artificial Sequence: Synthetic oligonucleotide
gaaggcacaauuugcuucu

SEQ ID NO: 2146305 - RNA, 19 nt, Artificial Sequence
  Description of Artificial Sequence: Synthetic oligonucleotide
guguguguguguuccuagg

SEQ ID NO: 2146306 - RNA, 19 nt, Artificial Sequence
  Description of Artificial Sequence: Synthetic oligonucleotide
cagguaguaauggugggac

SEQ ID NO: 2146307 - RNA, 19 nt, Artificial Sequence
  Description of Artificial Sequence: Synthetic oligonucleotide
agcaugaauccuaaugaca

SEQ ID NO: 2146308 - RNA, 19 nt, Artificial Sequence
  Description of Artificial Sequence: Synthetic oligonucleotide
uccuaaugacaaacagacu

SEQ ID NO: 2146309 - RNA, 19 nt, Artificial Sequence
  Description of Artificial Sequence: Synthetic oligonucleotide
uccauaacugccucaugua

SEQ ID NO: 2146310 - RNA, 19 nt, Artificial Sequence
  Description of Artificial Sequence: Synthetic oligonucleotide
auauccauaacugccucau

SEQ ID NO: 2146311 - RNA, 19 nt, Artificial Sequence
  Description of Artificial Sequence: Synthetic oligonucleotide
ugugcucagauggugcugu

SEQ ID NO: 2146312 - RNA, 19 nt, Artificial Sequence
  Description of Artificial Sequence: Synthetic oligonucleotide
guaguuauaagcacauugu

SEQ ID NO: 2146313 - RNA, 19 nt, Artificial Sequence
  Description of Artificial Sequence: Synthetic oligonucleotide
acugccucauguaucuggg

SEQ ID NO: 2146314 - RNA, 19 nt, Artificial Sequence
  Description of Artificial Sequence: Synthetic oligonucleotide
gauggaggguacugaguac

SEQ ID NO: 2146315 - RNA, 19 nt, Artificial Sequence
  Description of Artificial Sequence: Synthetic oligonucleotide
acaguugcuuuguuuucca

SEQ ID NO: 2146316 - RNA, 19 nt, Artificial Sequence
  Description of Artificial Sequence: Synthetic oligonucleotide
uauccauaacugccucaug

SEQ ID NO: 2146317 - RNA, 19 nt, Artificial Sequence
  Description of Artificial Sequence: Synthetic oligonucleotide
uugaguugggaugcucaag

SEQ ID NO: 2146318 - RNA, 19 nt, Artificial Sequence
  Description of Artificial Sequence: Synthetic oligonucleotide
uugcggcuuguccugaccu

SEQ ID NO: 2146319 - RNA, 19 nt, Artificial Sequence
  Description of Artificial Sequence: Synthetic oligonucleotide
uaaugacaaacagacugua

SEQ ID NO: 2146320 - RNA, 19 nt, Artificial Sequence
  Description of Artificial Sequence: Synthetic oligonucleotide
uggacgggaggcucagcgg

SEQ ID NO: 2146321 - RNA, 19 nt, Artificial Sequence
  Description of Artificial Sequence: Synthetic oligonucleotide
acugucaagucgugugugu

SEQ ID NO: 2146322 - RNA, 19 nt, Artificial Sequence
  Description of Artificial Sequence: Synthetic oligonucleotide
guguguguguguguguucc

SEQ ID NO: 2146323 - RNA, 19 nt, Artificial Sequence
  Description of Artificial Sequence: Synthetic oligonucleotide
auauccugggauaggggag

SEQ ID NO: 2146324 - RNA, 19 nt, Artificial Sequence
  Description of Artificial Sequence: Synthetic oligonucleotide
acuagcacauaguccugcu

SEQ ID NO: 2146325 - RNA, 19 nt, Artificial Sequence
  Description of Artificial Sequence: Synthetic oligonucleotide
acuguaguuauaagcacau

SEQ ID NO: 2146326 - RNA, 19 nt, Artificial Sequence
  Description of Artificial Sequence: Synthetic oligonucleotide
ucgugugugugugugugug

SEQ ID NO: 2146327 - RNA, 19 nt, Artificial Sequence
  Description of Artificial Sequence: Synthetic oligonucleotide
ggaccuuauauccauaacu

SEQ ID NO: 2146328 - RNA, 19 nt, Artificial Sequence
  Description of Artificial Sequence: Synthetic oligonucleotide
agcggcccuucuuccaacc

SEQ ID NO: 2146329 - RNA, 19 nt, Artificial Sequence
  Description of Artificial Sequence: Synthetic oligonucleotide
acaggcuuauauccuggga

SEQ ID NO: 2146330 - RNA, 19 nt, Artificial Sequence
  Description of Artificial Sequence: Synthetic oligonucleotide
gcaaguuuggaaacacagg

SEQ ID NO: 2146331 - RNA, 19 nt, Artificial Sequence
  Description of Artificial Sequence: Synthetic oligonucleotide
auggaggguacugaguaca

SEQ ID NO: 2146332 - RNA, 19 nt, Artificial Sequence
  Description of Artificial Sequence: Synthetic oligonucleotide
uuguccugaccucggggug

SEQ ID NO: 2146333 - RNA, 19 nt, Artificial Sequence
  Description of Artificial Sequence: Synthetic oligonucleotide
accaaaugcuggugagcuc

SEQ ID NO: 2146334 - RNA, 19 nt, Artificial Sequence
  Description of Artificial Sequence: Synthetic oligonucleotide
ccagguagcaagccaaggg

SEQ ID NO: 2146335 - RNA, 19 nt, Artificial Sequence
  Description of Artificial Sequence: Synthetic oligonucleotide
auuucuagugugacuguca

SEQ ID NO: 2146336 - RNA, 19 nt, Artificial Sequence
  Description of Artificial Sequence: Synthetic oligonucleotide
gcucaaggugaauggacgg

SEQ ID NO: 2146337 - RNA, 19 nt, Artificial Sequence
  Description of Artificial Sequence: Synthetic oligonucleotide
cccaguccucucaagaugg

SEQ ID NO: 2146338 - RNA, 19 nt, Artificial Sequence
  Description of Artificial Sequence: Synthetic oligonucleotide
aguccucucaagauggccu

SEQ ID NO: 2146339 - RNA, 19 nt, Artificial Sequence
  Description of Artificial Sequence: Synthetic oligonucleotide
aguaggaguauagcagaca

SEQ ID NO: 2146340 - RNA, 19 nt, Artificial Sequence
  Description of Artificial Sequence: Synthetic oligonucleotide
cagacagucacuggaucag

SEQ ID NO: 2146341 - RNA, 19 nt, Artificial Sequence
  Description of Artificial Sequence: Synthetic oligonucleotide
cucuauauagucugaacau

SEQ ID NO: 2146342 - RNA, 19 nt, Artificial Sequence
  Description of Artificial Sequence: Synthetic oligonucleotide
gaagaacccuucucauuuc

SEQ ID NO: 2146343 - RNA, 19 nt, Artificial Sequence
  Description of Artificial Sequence: Synthetic oligonucleotide
aggcacaauuugcuucuag

SEQ ID NO: 2146344 - RNA, 19 nt, Artificial Sequence
  Description of Artificial Sequence: Synthetic oligonucleotide
aauggacgggaggcucagc

SEQ ID NO: 2146345 - RNA, 19 nt, Artificial Sequence
  Description of Artificial Sequence: Synthetic oligonucleotide
caguaggaguauagcagac

SEQ ID NO: 2146346 - RNA, 19 nt, Artificial Sequence
  Description of Artificial Sequence: Synthetic oligonucleotide
agucgugugugugugugug

SEQ ID NO: 2146347 - RNA, 19 nt, Artificial Sequence
  Description of Artificial Sequence: Synthetic oligonucleotide
cagguagcaagccaaggga

SEQ ID NO: 2146348 - RNA, 19 nt, Artificial Sequence
  Description of Artificial Sequence: Synthetic oligonucleotide
ucccuugccuggaugcucu

SEQ ID NO: 2146349 - RNA, 19 nt, Artificial Sequence
  Description of Artificial Sequence: Synthetic oligonucleotide
aagucgugugugugugugu

SEQ ID NO: 2146350 - RNA, 19 nt, Artificial Sequence
  Description of Artificial Sequence: Synthetic oligonucleotide
gcuugguuggacuucugug

SEQ ID NO: 2146351 - RNA, 19 nt, Artificial Sequence
  Description of Artificial Sequence: Synthetic oligonucleotide
cugaaacucuacagagaac

SEQ ID NO: 2146352 - RNA, 19 nt, Artificial Sequence
  Description of Artificial Sequence: Synthetic oligonucleotide
ucuuuccccaguagaccac

SEQ ID NO: 2146353 - RNA, 19 nt, Artificial Sequence
  Description of Artificial Sequence: Synthetic oligonucleotide
cuagugugacugucaaguc

SEQ ID NO: 2146354 - RNA, 19 nt, Artificial Sequence
  Description of Artificial Sequence: Synthetic oligonucleotide
aggcuuauauccugggaua

SEQ ID NO: 2146355 - RNA, 19 nt, Artificial Sequence
  Description of Artificial Sequence: Synthetic oligonucleotide
ggacgggaggcucagcggg

SEQ ID NO: 2146356 - RNA, 19 nt, Artificial Sequence
  Description of Artificial Sequence: Synthetic oligonucleotide
cuaggaggugacagauggc

SEQ ID NO: 2146357 - RNA, 19 nt, Artificial Sequence
  Description of Artificial Sequence: Synthetic oligonucleotide
guacugaguacagugggga

SEQ ID NO: 2146358 - RNA, 19 nt, Artificial Sequence
  Description of Artificial Sequence: Synthetic oligonucleotide
cuagagggcaaguuuggaa

SEQ ID NO: 2146359 - RNA, 19 nt, Artificial Sequence
  Description of Artificial Sequence: Synthetic oligonucleotide
gucaagucgugugugugug

SEQ ID NO: 2146360 - RNA, 19 nt, Artificial Sequence
  Description of Artificial Sequence: Synthetic oligonucleotide
caagucgugugugugugug

SEQ ID NO: 2146361 - RNA, 19 nt, Artificial Sequence
  Description of Artificial Sequence: Synthetic oligonucleotide
gcacaauuugcuucuagga

SEQ ID NO: 2146362 - RNA, 19 nt, Artificial Sequence
  Description of Artificial Sequence: Synthetic oligonucleotide
gaacuuggagagguguuca

SEQ ID NO: 2146363 - RNA, 19 nt, Artificial Sequence
  Description of Artificial Sequence: Synthetic oligonucleotide
gaccucgggguguugauaa

SEQ ID NO: 2146364 - RNA, 19 nt, Artificial Sequence
  Description of Artificial Sequence: Synthetic oligonucleotide
gacugucaagucgugugug

SEQ ID NO: 2146365 - RNA, 19 nt, Artificial Sequence
  Description of Artificial Sequence: Synthetic oligonucleotide
gguacugaguacagugggg

SEQ ID NO: 2146366 - RNA, 19 nt, Artificial Sequence
  Description of Artificial Sequence: Synthetic oligonucleotide
gguacagcggcccuucuuc

SEQ ID NO: 2146367 - RNA, 19 nt, Artificial Sequence
  Description of Artificial Sequence: Synthetic oligonucleotide
ugugacugucaagucgugu

SEQ ID NO: 2146368 - RNA, 19 nt, Artificial Sequence
  Description of Artificial Sequence: Synthetic oligonucleotide
agcaucuggcaggccagcc

SEQ ID NO: 2146369 - RNA, 19 nt, Artificial Sequence
  Description of Artificial Sequence: Synthetic oligonucleotide
ugugugugugugugugugu

SEQ ID NO: 2146370 - RNA, 19 nt, Artificial Sequence
  Description of Artificial Sequence: Synthetic oligonucleotide
gcaugaauccuaaugacaa

SEQ ID NO: 2146371 - RNA, 19 nt, Artificial Sequence
  Description of Artificial Sequence: Synthetic oligonucleotide
acguguuguauuagcauga

SEQ ID NO: 2146372 - RNA, 19 nt, Artificial Sequence
  Description of Artificial Sequence: Synthetic oligonucleotide
ggauaaacguguuguauua

SEQ ID NO: 2146373 - RNA, 19 nt, Artificial Sequence
  Description of Artificial Sequence: Synthetic oligonucleotide
agauggccuuuugagaacu

SEQ ID NO: 2146374 - RNA, 19 nt, Artificial Sequence
  Description of Artificial Sequence: Synthetic oligonucleotide
gauggcccaccaaaugcug

SEQ ID NO: 2146375 - RNA, 19 nt, Artificial Sequence
  Description of Artificial Sequence: Synthetic oligonucleotide
cugucaccagguaguaaug

SEQ ID NO: 2146376 - RNA, 19 nt, Artificial Sequence
  Description of Artificial Sequence: Synthetic oligonucleotide
aggaagaacccuucucauu

SEQ ID NO: 2146377 - RNA, 19 nt, Artificial Sequence
  Description of Artificial Sequence: Synthetic oligonucleotide
gugugugugugugugugug

SEQ ID NO: 2146378 - RNA, 19 nt, Artificial Sequence
  Description of Artificial Sequence: Synthetic oligonucleotide
ucagcgggaacaggcacac

SEQ ID NO: 2146379 - RNA, 19 nt, Artificial Sequence
  Description of Artificial Sequence: Synthetic oligonucleotide
ugguuggacuucugugaug

SEQ ID NO: 2146380 - RNA, 19 nt, Artificial Sequence
  Description of Artificial Sequence: Synthetic oligonucleotide
ugucgggaacacgaggcac

SEQ ID NO: 2146381 - RNA, 19 nt, Artificial Sequence
  Description of Artificial Sequence: Synthetic oligonucleotide
cucugggaggcugugugag

SEQ ID NO: 2146382 - RNA, 19 nt, Artificial Sequence
  Description of Artificial Sequence: Synthetic oligonucleotide
uguguguguguguguguuc

SEQ ID NO: 2146383 - RNA, 19 nt, Artificial Sequence
  Description of Artificial Sequence: Synthetic oligonucleotide
ccugaaacucuacagagaa

SEQ ID NO: 2146384 - RNA, 19 nt, Artificial Sequence
  Description of Artificial Sequence: Synthetic oligonucleotide
cuugcggcuuguccugacc

SEQ ID NO: 2146385 - RNA, 19 nt, Artificial Sequence
  Description of Artificial Sequence: Synthetic oligonucleotide
ucgugguucuugagggccu

SEQ ID NO: 2146386 - RNA, 19 nt, Artificial Sequence
  Description of Artificial Sequence: Synthetic oligonucleotide
acuggagcuagagggcaag

SEQ ID NO: 2146387 - RNA, 19 nt, Artificial Sequence
  Description of Artificial Sequence: Synthetic oligonucleotide
aauuugcuucuaggaggug

SEQ ID NO: 2146388 - RNA, 19 nt, Artificial Sequence
  Description of Artificial Sequence: Synthetic oligonucleotide
gaauggacgggaggcucag

SEQ ID NO: 2146389 - RNA, 19 nt, Artificial Sequence
  Description of Artificial Sequence: Synthetic oligonucleotide
ugcucagauggugcugugc

SEQ ID NO: 2146390 - RNA, 19 nt, Artificial Sequence
  Description of Artificial Sequence: Synthetic oligonucleotide
ggauggaggguacugagua

SEQ ID NO: 2146391 - RNA, 19 nt, Artificial Sequence
  Description of Artificial Sequence: Synthetic oligonucleotide
acagaacagucucuauaua

SEQ ID NO: 2146392 - RNA, 19 nt, Artificial Sequence
  Description of Artificial Sequence: Synthetic oligonucleotide
gggaugcucaaggugaaug

SEQ ID NO: 2146393 - RNA, 19 nt, Artificial Sequence
  Description of Artificial Sequence: Synthetic oligonucleotide
ucaagucgugugugugugu

SEQ ID NO: 2146394 - RNA, 19 nt, Artificial Sequence
  Description of Artificial Sequence: Synthetic oligonucleotide
uucuuccaacccugggaac

SEQ ID NO: 2146395 - RNA, 19 nt, Artificial Sequence
  Description of Artificial Sequence: Synthetic oligonucleotide
ggcuuauauccugggauag

SEQ ID NO: 2146396 - RNA, 19 nt, Artificial Sequence
  Description of Artificial Sequence: Synthetic oligonucleotide
uguguguguguguguuccu

SEQ ID NO: 2146397 - RNA, 19 nt, Artificial Sequence
  Description of Artificial Sequence: Synthetic oligonucleotide
acugaguacaguggggauu

SEQ ID NO: 2146398 - RNA, 19 nt, Artificial Sequence
  Description of Artificial Sequence: Synthetic oligonucleotide
uccaucacaguaggaguau

SEQ ID NO: 2146399 - RNA, 19 nt, Artificial Sequence
  Description of Artificial Sequence: Synthetic oligonucleotide
acucuacagagaacaaggu

SEQ ID NO: 2146400 - RNA, 19 nt, Artificial Sequence
  Description of Artificial Sequence: Synthetic oligonucleotide
cugucaagucgugugugug

SEQ ID NO: 2146401 - RNA, 19 nt, Artificial Sequence
  Description of Artificial Sequence: Synthetic oligonucleotide
cugccucauguaucugggg

SEQ ID NO: 2146402 - RNA, 19 nt, Artificial Sequence
  Description of Artificial Sequence: Synthetic oligonucleotide
auggcccaccaaaugcugg

SEQ ID NO: 2146403 - RNA, 19 nt, Artificial Sequence
  Description of Artificial Sequence: Synthetic oligonucleotide
guacagcggcccuucuucc

SEQ ID NO: 2146404 - RNA, 19 nt, Artificial Sequence
  Description of Artificial Sequence: Synthetic oligonucleotide
ggaucaguggccagguagc

SEQ ID NO: 2146405 - RNA, 19 nt, Artificial Sequence
  Description of Artificial Sequence: Synthetic oligonucleotide
gcagacagucacuggauca

SEQ ID NO: 2146406 - RNA, 19 nt, Artificial Sequence
  Description of Artificial Sequence: Synthetic oligonucleotide
ggaagaacccuucucauuu

SEQ ID NO: 2146407 - RNA, 19 nt, Artificial Sequence
  Description of Artificial Sequence: Synthetic oligonucleotide
caugaauccuaaugacaaa

SEQ ID NO: 2146408 - RNA, 19 nt, Artificial Sequence
  Description of Artificial Sequence: Synthetic oligonucleotide
guauuagcaugaauccuaa

SEQ ID NO: 2146409 - RNA, 19 nt, Artificial Sequence
  Description of Artificial Sequence: Synthetic oligonucleotide
caguccucucaagauggcc

SEQ ID NO: 2146410 - RNA, 19 nt, Artificial Sequence
  Description of Artificial Sequence: Synthetic oligonucleotide
caucuggcaggccagccca

SEQ ID NO: 2146411 - RNA, 19 nt, Artificial Sequence
  Description of Artificial Sequence: Synthetic oligonucleotide
gcuuauauccugggauagg

SEQ ID NO: 2146412 - RNA, 19 nt, Artificial Sequence
  Description of Artificial Sequence: Synthetic oligonucleotide
uguccugaccucggggugu

SEQ ID NO: 2146413 - RNA, 19 nt, Artificial Sequence
  Description of Artificial Sequence: Synthetic oligonucleotide
gugaugucgggaacacgag

SEQ ID NO: 2146414 - RNA, 19 nt, Artificial Sequence
  Description of Artificial Sequence: Synthetic oligonucleotide
gccaagggaaagguuacag

SEQ ID NO: 2146415 - RNA, 19 nt, Artificial Sequence
  Description of Artificial Sequence: Synthetic oligonucleotide
aggcuugcggcuuguccug

SEQ ID NO: 2146416 - RNA, 19 nt, Artificial Sequence
  Description of Artificial Sequence: Synthetic oligonucleotide
cucucaagauggccuuuug

SEQ ID NO: 2146417 - RNA, 19 nt, Artificial Sequence
  Description of Artificial Sequence: Synthetic oligonucleotide
ccaaaggauaaacguguug

SEQ ID NO: 2146418 - RNA, 19 nt, Artificial Sequence
  Description of Artificial Sequence: Synthetic oligonucleotide
acacacagaacagucucua

SEQ ID NO: 2146419 - RNA, 19 nt, Artificial Sequence
  Description of Artificial Sequence: Synthetic oligonucleotide
gacuucugugaugucggga

SEQ ID NO: 2146420 - RNA, 19 nt, Artificial Sequence
  Description of Artificial Sequence: Synthetic oligonucleotide
cuuguccugaccucggggu

SEQ ID NO: 2146421 - RNA, 19 nt, Artificial Sequence
  Description of Artificial Sequence: Synthetic oligonucleotide
cucagauggugcugugcuc

SEQ ID NO: 2146422 - RNA, 19 nt, Artificial Sequence
  Description of Artificial Sequence: Synthetic oligonucleotide
auggcuugguuggacuucu

SEQ ID NO: 2146423 - RNA, 19 nt, Artificial Sequence
  Description of Artificial Sequence: Synthetic oligonucleotide
caggcuuauauccugggau

SEQ ID NO: 2146424 - RNA, 19 nt, Artificial Sequence
  Description of Artificial Sequence: Synthetic oligonucleotide
agagucccugaaacucuac

SEQ ID NO: 2146425 - RNA, 19 nt, Artificial Sequence
  Description of Artificial Sequence: Synthetic oligonucleotide
auggugcugugcucuguca

SEQ ID NO: 2146426 - RNA, 19 nt, Artificial Sequence
  Description of Artificial Sequence: Synthetic oligonucleotide
acagcggcccuucuuccaa

SEQ ID NO: 2146427 - RNA, 19 nt, Artificial Sequence
  Description of Artificial Sequence: Synthetic oligonucleotide
guaauggugggaccuuaua

SEQ ID NO: 2146428 - RNA, 19 nt, Artificial Sequence
  Description of Artificial Sequence: Synthetic oligonucleotide
cucagcgggaacaggcaca

SEQ ID NO: 2146429 - RNA, 19 nt, Artificial Sequence
  Description of Artificial Sequence: Synthetic oligonucleotide
aucuggggacuggagcuag

SEQ ID NO: 2146430 - RNA, 19 nt, Artificial Sequence
  Description of Artificial Sequence: Synthetic oligonucleotide
cuggggacuggagcuagag

SEQ ID NO: 2146431 - RNA, 19 nt, Artificial Sequence
  Description of Artificial Sequence: Synthetic oligonucleotide
agguagcaagccaagggaa

SEQ ID NO: 2146432 - RNA, 19 nt, Artificial Sequence
  Description of Artificial Sequence: Synthetic oligonucleotide
cucauguaucuggggacug

SEQ ID NO: 2146433 - RNA, 19 nt, Artificial Sequence
  Description of Artificial Sequence: Synthetic oligonucleotide
uuuugagaacuagcacaua

SEQ ID NO: 2146434 - RNA, 19 nt, Artificial Sequence
  Description of Artificial Sequence: Synthetic oligonucleotide
gugaauggacgggaggcuc

SEQ ID NO: 2146435 - RNA, 19 nt, Artificial Sequence
  Description of Artificial Sequence: Synthetic oligonucleotide
uuuccccaguagaccacau

SEQ ID NO: 2146436 - RNA, 19 nt, Artificial Sequence
  Description of Artificial Sequence: Synthetic oligonucleotide
uaguaauggugggaccuua

SEQ ID NO: 2146437 - RNA, 19 nt, Artificial Sequence
  Description of Artificial Sequence: Synthetic oligonucleotide
ucuggggacuggagcuaga

SEQ ID NO: 2146438 - RNA, 19 nt, Artificial Sequence
  Description of Artificial Sequence: Synthetic oligonucleotide
gaucaguggccagguagca

SEQ ID NO: 2146439 - RNA, 19 nt, Artificial Sequence
  Description of Artificial Sequence: Synthetic oligonucleotide
aggacaccagagucccuga

SEQ ID NO: 2146440 - RNA, 19 nt, Artificial Sequence
  Description of Artificial Sequence: Synthetic oligonucleotide
gguaguaauggugggaccu

SEQ ID NO: 2146441 - RNA, 19 nt, Artificial Sequence
  Description of Artificial Sequence: Synthetic oligonucleotide
guguguuccuaggcuugcg

SEQ ID NO: 2146442 - RNA, 19 nt, Artificial Sequence
  Description of Artificial Sequence: Synthetic oligonucleotide
uggagcuagagggcaaguu

SEQ ID NO: 2146443 - RNA, 19 nt, Artificial Sequence
  Description of Artificial Sequence: Synthetic oligonucleotide
gggaccuuauauccauaac

SEQ ID NO: 2146444 - RNA, 19 nt, Artificial Sequence
  Description of Artificial Sequence: Synthetic oligonucleotide
caaacagacuguaguuaua

SEQ ID NO: 2146445 - RNA, 19 nt, Artificial Sequence
  Description of Artificial Sequence: Synthetic oligonucleotide
gguuggacuucugugaugu

SEQ ID NO: 2146446 - RNA, 19 nt, Artificial Sequence
  Description of Artificial Sequence: Synthetic oligonucleotide
ugcggcuuguccugaccuc

SEQ ID NO: 2146447 - RNA, 19 nt, Artificial Sequence
  Description of Artificial Sequence: Synthetic oligonucleotide
uggccagauugauggccca

SEQ ID NO: 2146448 - RNA, 19 nt, Artificial Sequence
  Description of Artificial Sequence: Synthetic oligonucleotide
aguaauggugggaccuuau

SEQ ID NO: 2146449 - RNA, 19 nt, Artificial Sequence
  Description of Artificial Sequence: Synthetic oligonucleotide
agacagucacuggaucagu

SEQ ID NO: 2146450 - RNA, 19 nt, Artificial Sequence
  Description of Artificial Sequence: Synthetic oligonucleotide
cucgggguguugauaaucu

SEQ ID NO: 2146451 - RNA, 19 nt, Artificial Sequence
  Description of Artificial Sequence: Synthetic oligonucleotide
gauugauggcccaccaaau

SEQ ID NO: 2146452 - RNA, 19 nt, Artificial Sequence
  Description of Artificial Sequence: Synthetic oligonucleotide
uuccaacccugggaacuug

SEQ ID NO: 2146453 - RNA, 19 nt, Artificial Sequence
  Description of Artificial Sequence: Synthetic oligonucleotide
uucccuugccuggaugcuc

SEQ ID NO: 2146454 - RNA, 19 nt, Artificial Sequence
  Description of Artificial Sequence: Synthetic oligonucleotide
uggugagcucucuucccuu

SEQ ID NO: 2146455 - RNA, 19 nt, Artificial Sequence
  Description of Artificial Sequence: Synthetic oligonucleotide
uaacugccucauguaucug

SEQ ID NO: 2146456 - RNA, 19 nt, Artificial Sequence
  Description of Artificial Sequence: Synthetic oligonucleotide
cagucucuauauagucuga

SEQ ID NO: 2146457 - RNA, 19 nt, Artificial Sequence
  Description of Artificial Sequence: Synthetic oligonucleotide
uuggaaacacaggcuuaua

SEQ ID NO: 2146458 - RNA, 19 nt, Artificial Sequence
  Description of Artificial Sequence: Synthetic oligonucleotide
gggaaagguuacagugggg

SEQ ID NO: 2146459 - RNA, 19 nt, Artificial Sequence
  Description of Artificial Sequence: Synthetic oligonucleotide
ggcuuguccugaccucggg

SEQ ID NO: 2146460 - RNA, 19 nt, Artificial Sequence
  Description of Artificial Sequence: Synthetic oligonucleotide
gggacuggagcuagagggc

SEQ ID NO: 2146461 - RNA, 19 nt, Artificial Sequence
  Description of Artificial Sequence: Synthetic oligonucleotide
ccccaguagaccacaugag

SEQ ID NO: 2146462 - RNA, 19 nt, Artificial Sequence
  Description of Artificial Sequence: Synthetic oligonucleotide
cccaguagaccacaugaga

SEQ ID NO: 2146463 - RNA, 19 nt, Artificial Sequence
  Description of Artificial Sequence: Synthetic oligonucleotide
gcucagauggugcugugcu

SEQ ID NO: 2146464 - RNA, 19 nt, Artificial Sequence
  Description of Artificial Sequence: Synthetic oligonucleotide
gacauccaguggcugaauu

SEQ ID NO: 2146465 - RNA, 19 nt, Artificial Sequence
  Description of Artificial Sequence: Synthetic oligonucleotide
cgggaacaggcacacacag

SEQ ID NO: 2146466 - RNA, 19 nt, Artificial Sequence
  Description of Artificial Sequence: Synthetic oligonucleotide
gccagauugauggcccacc

SEQ ID NO: 2146467 - RNA, 19 nt, Artificial Sequence
  Description of Artificial Sequence: Synthetic oligonucleotide
ugaccucgggguguugaua

SEQ ID NO: 2146468 - RNA, 19 nt, Artificial Sequence
  Description of Artificial Sequence: Synthetic oligonucleotide
ggagcuagagggcaaguuu

SEQ ID NO: 2146469 - RNA, 19 nt, Artificial Sequence
  Description of Artificial Sequence: Synthetic oligonucleotide
ggcugaauuugaguuggga

SEQ ID NO: 2146470 - RNA, 19 nt, Artificial Sequence
  Description of Artificial Sequence: Synthetic oligonucleotide
ggaguauagcagacaguca

SEQ ID NO: 2146471 - RNA, 19 nt, Artificial Sequence
  Description of Artificial Sequence: Synthetic oligonucleotide
ggugggaccuuauauccau

SEQ ID NO: 2146472 - RNA, 19 nt, Artificial Sequence
  Description of Artificial Sequence: Synthetic oligonucleotide
guuggacuucugugauguc

SEQ ID NO: 2146473 - RNA, 19 nt, Artificial Sequence
  Description of Artificial Sequence: Synthetic oligonucleotide
cagauugauggcccaccaa

SEQ ID NO: 2146474 - RNA, 19 nt, Artificial Sequence
  Description of Artificial Sequence: Synthetic oligonucleotide
gaacaaggucccaguccuc

SEQ ID NO: 2146475 - RNA, 19 nt, Artificial Sequence
  Description of Artificial Sequence: Synthetic oligonucleotide
gggaacaggcacacacagc

SEQ ID NO: 2146476 - RNA, 19 nt, Artificial Sequence
  Description of Artificial Sequence: Synthetic oligonucleotide
gucccaguccucucaagau

SEQ ID NO: 2146477 - RNA, 19 nt, Artificial Sequence
  Description of Artificial Sequence: Synthetic oligonucleotide
gggauaggggagguacagc

SEQ ID NO: 2146478 - RNA, 19 nt, Artificial Sequence
  Description of Artificial Sequence: Synthetic oligonucleotide
acgaggcacagagccagaa

SEQ ID NO: 2146479 - RNA, 19 nt, Artificial Sequence
  Description of Artificial Sequence: Synthetic oligonucleotide
ggacuggagcuagagggca

SEQ ID NO: 2146480 - RNA, 19 nt, Artificial Sequence
  Description of Artificial Sequence: Synthetic oligonucleotide
cuggugagcucucuucccu

SEQ ID NO: 2146481 - RNA, 19 nt, Artificial Sequence
  Description of Artificial Sequence: Synthetic oligonucleotide
ccaccaaaugcuggugagc

SEQ ID NO: 2146482 - RNA, 19 nt, Artificial Sequence
  Description of Artificial Sequence: Synthetic oligonucleotide
cugaguacaguggggauuu

SEQ ID NO: 2146483 - RNA, 19 nt, Artificial Sequence
  Description of Artificial Sequence: Synthetic oligonucleotide
gacuggagcuagagggcaa

SEQ ID NO: 2146484 - RNA, 19 nt, Artificial Sequence
  Description of Artificial Sequence: Synthetic oligonucleotide
ccaaaugcuggugagcucu

SEQ ID NO: 2146485 - RNA, 19 nt, Artificial Sequence
  Description of Artificial Sequence: Synthetic oligonucleotide
cccugaaacucuacagaga

SEQ ID NO: 2146486 - RNA, 19 nt, Artificial Sequence
  Description of Artificial Sequence: Synthetic oligonucleotide
cucucuucccuugccugga

SEQ ID NO: 2146487 - RNA, 19 nt, Artificial Sequence
  Description of Artificial Sequence: Synthetic oligonucleotide
ggagguacagcggcccuuc

SEQ ID NO: 2146488 - RNA, 19 nt, Artificial Sequence
  Description of Artificial Sequence: Synthetic oligonucleotide
cagcggcccuucuuccaac

SEQ ID NO: 2146489 - RNA, 19 nt, Artificial Sequence
  Description of Artificial Sequence: Synthetic oligonucleotide
guguguguguguguuccua

SEQ ID NO: 2146490 - RNA, 19 nt, Artificial Sequence
  Description of Artificial Sequence: Synthetic oligonucleotide
gcccaccaaaugcugguga

SEQ ID NO: 2146491 - RNA, 19 nt, Artificial Sequence
  Description of Artificial Sequence: Synthetic oligonucleotide
ggccagcccacucuccuga

SEQ ID NO: 2146492 - RNA, 19 nt, Artificial Sequence
  Description of Artificial Sequence: Synthetic oligonucleotide
accucgggguguugauaau

SEQ ID NO: 2146493 - RNA, 19 nt, Artificial Sequence
  Description of Artificial Sequence: Synthetic oligonucleotide
gagccagaaggcacaauuu

SEQ ID NO: 2146494 - RNA, 19 nt, Artificial Sequence
  Description of Artificial Sequence: Synthetic oligonucleotide
ccaguccucucaagauggc

SEQ ID NO: 2146495 - RNA, 19 nt, Artificial Sequence
  Description of Artificial Sequence: Synthetic oligonucleotide
gacgggaggcucagcggga

SEQ ID NO: 2146496 - RNA, 19 nt, Artificial Sequence
  Description of Artificial Sequence: Synthetic oligonucleotide
uccucucaagauggccuuu

SEQ ID NO: 2146497 - RNA, 19 nt, Artificial Sequence
  Description of Artificial Sequence: Synthetic oligonucleotide
uccuaggcuugcggcuugu

SEQ ID NO: 2146498 - RNA, 19 nt, Artificial Sequence
  Description of Artificial Sequence: Synthetic oligonucleotide
gauggccuuuugagaacua

SEQ ID NO: 2146499 - RNA, 19 nt, Artificial Sequence
  Description of Artificial Sequence: Synthetic oligonucleotide
ccagauugauggcccacca

SEQ ID NO: 2146500 - RNA, 19 nt, Artificial Sequence
  Description of Artificial Sequence: Synthetic oligonucleotide
gcuagagggcaaguuugga

SEQ ID NO: 2146501 - RNA, 19 nt, Artificial Sequence
  Description of Artificial Sequence: Synthetic oligonucleotide
ggcuugguuggacuucugu

SEQ ID NO: 2146502 - RNA, 19 nt, Artificial Sequence
  Description of Artificial Sequence: Synthetic oligonucleotide
ccucgggguguugauaauc

SEQ ID NO: 2146503 - RNA, 19 nt, Artificial Sequence
  Description of Artificial Sequence: Synthetic oligonucleotide
gcggcccuucuuccaaccc

SEQ ID NO: 2146504 - RNA, 19 nt, Artificial Sequence
  Description of Artificial Sequence: Synthetic oligonucleotide
guguguguguguguguguu

SEQ ID NO: 2146505 - RNA, 19 nt, Artificial Sequence
  Description of Artificial Sequence: Synthetic oligonucleotide
gucgugugugugugugugu

SEQ ID NO: 2146506 - RNA, 19 nt, Artificial Sequence
  Description of Artificial Sequence: Synthetic oligonucleotide
ccagguaguaaugguggga

SEQ ID NO: 2146507 - RNA, 19 nt, Artificial Sequence
  Description of Artificial Sequence: Synthetic oligonucleotide
guaguaauggugggaccuu

SEQ ID NO: 2146508 - RNA, 19 nt, Artificial Sequence
  Description of Artificial Sequence: Synthetic oligonucleotide
cuagcacauaguccugcuu

SEQ ID NO: 2146509 - RNA, 19 nt, Artificial Sequence
  Description of Artificial Sequence: Synthetic oligonucleotide
acgggaggcucagcgggaa

SEQ ID NO: 2146510 - RNA, 19 nt, Artificial Sequence
  Description of Artificial Sequence: Synthetic oligonucleotide
ugaguacaguggggauuuu

SEQ ID NO: 2146511 - RNA, 19 nt, Artificial Sequence
  Description of Artificial Sequence: Synthetic oligonucleotide
ggugaauggacgggaggcu

SEQ ID NO: 2146512 - RNA, 19 nt, Artificial Sequence
  Description of Artificial Sequence: Synthetic oligonucleotide
ccauaacugccucauguau

SEQ ID NO: 2146513 - RNA, 19 nt, Artificial Sequence
  Description of Artificial Sequence: Synthetic oligonucleotide
ccugggaacuuggagaggu

SEQ ID NO: 2146514 - RNA, 19 nt, Artificial Sequence
  Description of Artificial Sequence: Synthetic oligonucleotide
cacgaggcacagagccaga

SEQ ID NO: 2146515 - RNA, 19 nt, Artificial Sequence
  Description of Artificial Sequence: Synthetic oligonucleotide
guuccuaggcuugcggcuu

SEQ ID NO: 2146516 - RNA, 19 nt, Artificial Sequence
  Description of Artificial Sequence: Synthetic oligonucleotide
ggccagauugauggcccac

SEQ ID NO: 2146517 - RNA, 19 nt, Artificial Sequence
  Description of Artificial Sequence: Synthetic oligonucleotide
gcuugcggcuuguccugac

SEQ ID NO: 2146518 - RNA, 19 nt, Artificial Sequence
  Description of Artificial Sequence: Synthetic oligonucleotide
gcgggaacaggcacacaca

SEQ ID NO: 2146519 - RNA, 19 nt, Artificial Sequence
  Description of Artificial Sequence: Synthetic oligonucleotide
uccugaccucgggguguug

SEQ ID NO: 2146520 - RNA, 19 nt, Artificial Sequence
  Description of Artificial Sequence: Synthetic oligonucleotide
ccagcccacucuccugaug

SEQ ID NO: 2146521 - RNA, 19 nt, Artificial Sequence
  Description of Artificial Sequence: Synthetic oligonucleotide
gugggaccuuauauccaua

SEQ ID NO: 2146522 - RNA, 19 nt, Artificial Sequence
  Description of Artificial Sequence: Synthetic oligonucleotide
cugaccucgggguguugau

SEQ ID NO: 2146523 - RNA, 19 nt, Artificial Sequence
  Description of Artificial Sequence: Synthetic oligonucleotide
ccugaccucgggguguuga

SEQ ID NO: 2146524 - RNA, 19 nt, Artificial Sequence
  Description of Artificial Sequence: Synthetic oligonucleotide
ggaggguacugaguacagu

SEQ ID NO: 2146525 - RNA, 19 nt, Artificial Sequence
  Description of Artificial Sequence: Synthetic oligonucleotide
cuggaucaguggccaggua

SEQ ID NO: 2146526 - RNA, 19 nt, Artificial Sequence
  Description of Artificial Sequence: Synthetic oligonucleotide
cucuccugauggcuugguu

SEQ ID NO: 2146527 - RNA, 19 nt, Artificial Sequence
  Description of Artificial Sequence: Synthetic oligonucleotide
cuguaguuauaagcacauu

SEQ ID NO: 2146528 - RNA, 19 nt, Artificial Sequence
  Description of Artificial Sequence: Synthetic oligonucleotide
cuggagcuagagggcaagu

SEQ ID NO: 2146529 - RNA, 19 nt, Artificial Sequence
  Description of Artificial Sequence: Synthetic oligonucleotide
cguguuguauuagcaugaa

SEQ ID NO: 2146530 - RNA, 19 nt, Artificial Sequence
  Description of Artificial Sequence: Synthetic oligonucleotide
cuggaugcucugggaggcu

SEQ ID NO: 2146531 - RNA, 19 nt, Artificial Sequence
  Description of Artificial Sequence: Synthetic oligonucleotide
cccacucuccugauggcuu

SEQ ID NO: 2146532 - RNA, 19 nt, Artificial Sequence
  Description of Artificial Sequence: Synthetic oligonucleotide
cagcgggaacaggcacaca

SEQ ID NO: 2146533 - RNA, 19 nt, Artificial Sequence
  Description of Artificial Sequence: Synthetic oligonucleotide
cgugugugugugugugugu

SEQ ID NO: 2146534 - RNA, 19 nt, Artificial Sequence
  Description of Artificial Sequence: Synthetic oligonucleotide
gggagguacagcggcccuu

SEQ ID NO: 2146535 - RNA, 19 nt, Artificial Sequence
  Description of Artificial Sequence: Synthetic oligonucleotide
ucugacacaagcaacacgg

SEQ ID NO: 2146536 - RNA, 19 nt, Artificial Sequence
  Description of Artificial Sequence: Synthetic oligonucleotide
aaugaugugugccugagug

SEQ ID NO: 2146537 - RNA, 19 nt, Artificial Sequence
  Description of Artificial Sequence: Synthetic oligonucleotide
ucauauuuauacuggaaag

SEQ ID NO: 2146538 - RNA, 19 nt, Artificial Sequence
  Description of Artificial Sequence: Synthetic oligonucleotide
cuagagacagugaacaugg

SEQ ID NO: 2146539 - RNA, 19 nt, Artificial Sequence
  Description of Artificial Sequence: Synthetic oligonucleotide
aaaucgguccaccuggagg

SEQ ID NO: 2146540 - RNA, 19 nt, Artificial Sequence
  Description of Artificial Sequence: Synthetic oligonucleotide
agcugaagcaucaugaugc

SEQ ID NO: 2146541 - RNA, 19 nt, Artificial Sequence
  Description of Artificial Sequence: Synthetic oligonucleotide
guuaaaucgguccaccugg

SEQ ID NO: 2146542 - RNA, 19 nt, Artificial Sequence
  Description of Artificial Sequence: Synthetic oligonucleotide
auggcagcagguuaaaucg

SEQ ID NO: 2146543 - RNA, 19 nt, Artificial Sequence
  Description of Artificial Sequence: Synthetic oligonucleotide
ugucucauauuuauacugg

SEQ ID NO: 2146544 - RNA, 19 nt, Artificial Sequence
  Description of Artificial Sequence: Synthetic oligonucleotide
gcagcaauaagcuagagac

SEQ ID NO: 2146545 - RNA, 19 nt, Artificial Sequence
  Description of Artificial Sequence: Synthetic oligonucleotide
uguuaggugugucaggcgc

SEQ ID NO: 2146546 - RNA, 19 nt, Artificial Sequence
  Description of Artificial Sequence: Synthetic oligonucleotide
ugaagcaucaugaugccuc

SEQ ID NO: 2146547 - RNA, 19 nt, Artificial Sequence
  Description of Artificial Sequence: Synthetic oligonucleotide
ugagcaaucugaaugcgga

SEQ ID NO: 2146548 - RNA, 19 nt, Artificial Sequence
  Description of Artificial Sequence: Synthetic oligonucleotide
aaucgguccaccuggaggu

SEQ ID NO: 2146549 - RNA, 19 nt, Artificial Sequence
  Description of Artificial Sequence: Synthetic oligonucleotide
uggauagugucucugaguc

SEQ ID NO: 2146550 - RNA, 19 nt, Artificial Sequence
  Description of Artificial Sequence: Synthetic oligonucleotide
ugucaggcgcggaagaugg

SEQ ID NO: 2146551 - RNA, 19 nt, Artificial Sequence
  Description of Artificial Sequence: Synthetic oligonucleotide
gagaugugcagcaauaagc

SEQ ID NO: 2146552 - RNA, 19 nt, Artificial Sequence
  Description of Artificial Sequence: Synthetic oligonucleotide
gugucgauggcauugcgcg

SEQ ID NO: 2146553 - RNA, 19 nt, Artificial Sequence
  Description of Artificial Sequence: Synthetic oligonucleotide
ucugacuccaucaccaagu

SEQ ID NO: 2146554 - RNA, 19 nt, Artificial Sequence
  Description of Artificial Sequence: Synthetic oligonucleotide
ggagguagaacucugcagg

SEQ ID NO: 2146555 - RNA, 19 nt, Artificial Sequence
  Description of Artificial Sequence: Synthetic oligonucleotide
auugcaaccggucaccugu

SEQ ID NO: 2146556 - RNA, 19 nt, Artificial Sequence
  Description of Artificial Sequence: Synthetic oligonucleotide
ucacuuuccuccaaugaug

SEQ ID NO: 2146557 - RNA, 19 nt, Artificial Sequence
  Description of Artificial Sequence: Synthetic oligonucleotide
uucuugauaggccacugga

SEQ ID NO: 2146558 - RNA, 19 nt, Artificial Sequence
  Description of Artificial Sequence: Synthetic oligonucleotide
agcugagacaguguuaggc

SEQ ID NO: 2146559 - RNA, 19 nt, Artificial Sequence
  Description of Artificial Sequence: Synthetic oligonucleotide
auaagcuagagacagugaa

SEQ ID NO: 2146560 - RNA, 19 nt, Artificial Sequence
  Description of Artificial Sequence: Synthetic oligonucleotide
aacauggcuucuuccgugg

SEQ ID NO: 2146561 - RNA, 19 nt, Artificial Sequence
  Description of Artificial Sequence: Synthetic oligonucleotide
gauagcaucaggcagcucu

SEQ ID NO: 2146562 - RNA, 19 nt, Artificial Sequence
  Description of Artificial Sequence: Synthetic oligonucleotide
agcaaucugaaugcggacc

SEQ ID NO: 2146563 - RNA, 19 nt, Artificial Sequence
  Description of Artificial Sequence: Synthetic oligonucleotide
gauggcagcagguuaaauc

SEQ ID NO: 2146564 - RNA, 19 nt, Artificial Sequence
  Description of Artificial Sequence: Synthetic oligonucleotide
ugacacaagcaacacggcc

SEQ ID NO: 2146565 - RNA, 19 nt, Artificial Sequence
  Description of Artificial Sequence: Synthetic oligonucleotide
gaaagcugaagcaucauga

SEQ ID NO: 2146566 - RNA, 19 nt, Artificial Sequence
  Description of Artificial Sequence: Synthetic oligonucleotide
ucgucauucucagagaugu

SEQ ID NO: 2146567 - RNA, 19 nt, Artificial Sequence
  Description of Artificial Sequence: Synthetic oligonucleotide
gacacaagcaacacggccc

SEQ ID NO: 2146568 - RNA, 19 nt, Artificial Sequence
  Description of Artificial Sequence: Synthetic oligonucleotide
agagaugugcagcaauaag

SEQ ID NO: 2146569 - RNA, 19 nt, Artificial Sequence
  Description of Artificial Sequence: Synthetic oligonucleotide
ugguucuugggaaaagcug

SEQ ID NO: 2146570 - RNA, 19 nt, Artificial Sequence
  Description of Artificial Sequence: Synthetic oligonucleotide
aaucugaaugcggaccccg

SEQ ID NO: 2146571 - RNA, 19 nt, Artificial Sequence
  Description of Artificial Sequence: Synthetic oligonucleotide
ugcuguuucuugauaggcc

SEQ ID NO: 2146572 - RNA, 19 nt, Artificial Sequence
  Description of Artificial Sequence: Synthetic oligonucleotide
agacagugaacauggcuuc

SEQ ID NO: 2146573 - RNA, 19 nt, Artificial Sequence
  Description of Artificial Sequence: Synthetic oligonucleotide
caaccggucaccuguagcc

SEQ ID NO: 2146574 - RNA, 19 nt, Artificial Sequence
  Description of Artificial Sequence: Synthetic oligonucleotide
agagacagugaacauggcu

SEQ ID NO: 2146575 - RNA, 19 nt, Artificial Sequence
  Description of Artificial Sequence: Synthetic oligonucleotide
gaauccugauugcaaccgg

SEQ ID NO: 2146576 - RNA, 19 nt, Artificial Sequence
  Description of Artificial Sequence: Synthetic oligonucleotide
acauccgaauccugauugc

SEQ ID NO: 2146577 - RNA, 19 nt, Artificial Sequence
  Description of Artificial Sequence: Synthetic oligonucleotide
acggaauccgaacuccuuc

SEQ ID NO: 2146578 - RNA, 19 nt, Artificial Sequence
  Description of Artificial Sequence: Synthetic oligonucleotide
uggaguaccuugaggagcu

SEQ ID NO: 2146579 - RNA, 19 nt, Artificial Sequence
  Description of Artificial Sequence: Synthetic oligonucleotide
agacucugaaagguagucc

SEQ ID NO: 2146580 - RNA, 19 nt, Artificial Sequence
  Description of Artificial Sequence: Synthetic oligonucleotide
aucacuuuccuccaaugau

SEQ ID NO: 2146581 - RNA, 19 nt, Artificial Sequence
  Description of Artificial Sequence: Synthetic oligonucleotide
caugccugcguuaacucag

SEQ ID NO: 2146582 - RNA, 19 nt, Artificial Sequence
  Description of Artificial Sequence: Synthetic oligonucleotide
cacauccgaauccugauug

SEQ ID NO: 2146583 - RNA, 19 nt, Artificial Sequence
  Description of Artificial Sequence: Synthetic oligonucleotide
uccuucucuucccacucgg

SEQ ID NO: 2146584 - RNA, 19 nt, Artificial Sequence
  Description of Artificial Sequence: Synthetic oligonucleotide
ugaacauggcuucuuccgu

SEQ ID NO: 2146585 - RNA, 19 nt, Artificial Sequence
  Description of Artificial Sequence: Synthetic oligonucleotide
cucugauauguccaugggc

SEQ ID NO: 2146586 - RNA, 19 nt, Artificial Sequence
  Description of Artificial Sequence: Synthetic oligonucleotide
aguaccuugaggagcugcc

SEQ ID NO: 2146587 - RNA, 19 nt, Artificial Sequence
  Description of Artificial Sequence: Synthetic oligonucleotide
aaugcggaccccgcagacc

SEQ ID NO: 2146588 - RNA, 19 nt, Artificial Sequence
  Description of Artificial Sequence: Synthetic oligonucleotide
auacuggaaagcugaagca

SEQ ID NO: 2146589 - RNA, 19 nt, Artificial Sequence
  Description of Artificial Sequence: Synthetic oligonucleotide
uugauaggccacuggaacu

SEQ ID NO: 2146590 - RNA, 19 nt, Artificial Sequence
  Description of Artificial Sequence: Synthetic oligonucleotide
gucauucucagagaugugc

SEQ ID NO: 2146591 - RNA, 19 nt, Artificial Sequence
  Description of Artificial Sequence: Synthetic oligonucleotide
ucucugcacauccgaaucc

SEQ ID NO: 2146592 - RNA, 19 nt, Artificial Sequence
  Description of Artificial Sequence: Synthetic oligonucleotide
aauccgaacuccuucucuu

SEQ ID NO: 2146593 - RNA, 19 nt, Artificial Sequence
  Description of Artificial Sequence: Synthetic oligonucleotide
ugagacaguguuaggccug

SEQ ID NO: 2146594 - RNA, 19 nt, Artificial Sequence
  Description of Artificial Sequence: Synthetic oligonucleotide
gaaaagcugcuguuucuug

SEQ ID NO: 2146595 - RNA, 19 nt, Artificial Sequence
  Description of Artificial Sequence: Synthetic oligonucleotide
cugagcaaucugaaugcgg

SEQ ID NO: 2146596 - RNA, 19 nt, Artificial Sequence
  Description of Artificial Sequence: Synthetic oligonucleotide
ugauauguccaugggcucc

SEQ ID NO: 2146597 - RNA, 19 nt, Artificial Sequence
  Description of Artificial Sequence: Synthetic oligonucleotide
aaguucagggcccaagcua

SEQ ID NO: 2146598 - RNA, 19 nt, Artificial Sequence
  Description of Artificial Sequence: Synthetic oligonucleotide
aucaccaaguucagggccc

SEQ ID NO: 2146599 - RNA, 19 nt, Artificial Sequence
  Description of Artificial Sequence: Synthetic oligonucleotide
ucuugauaggccacuggaa

SEQ ID NO: 2146600 - RNA, 19 nt, Artificial Sequence
  Description of Artificial Sequence: Synthetic oligonucleotide
agaugugcagcaauaagcu

SEQ ID NO: 2146601 - RNA, 19 nt, Artificial Sequence
  Description of Artificial Sequence: Synthetic oligonucleotide
gaacauggcuucuuccgug

SEQ ID NO: 2146602 - RNA, 19 nt, Artificial Sequence
  Description of Artificial Sequence: Synthetic oligonucleotide
cagcagguuaaaucggucc

SEQ ID NO: 2146603 - RNA, 19 nt, Artificial Sequence
  Description of Artificial Sequence: Synthetic oligonucleotide
uccgaauccugauugcaac

SEQ ID NO: 2146604 - RNA, 19 nt, Artificial Sequence
  Description of Artificial Sequence: Synthetic oligonucleotide
caucaugaugccucuucgg

SEQ ID NO: 2146605 - RNA, 19 nt, Artificial Sequence
  Description of Artificial Sequence: Synthetic oligonucleotide
uccugauugcaaccgguca

SEQ ID NO: 2146606 - RNA, 19 nt, Artificial Sequence
  Description of Artificial Sequence: Synthetic oligonucleotide
agcagguuaaaucggucca

SEQ ID NO: 2146607 - RNA, 19 nt, Artificial Sequence
  Description of Artificial Sequence: Synthetic oligonucleotide
ucugguucuugggaaaagc

SEQ ID NO: 2146608 - RNA, 19 nt, Artificial Sequence
  Description of Artificial Sequence: Synthetic oligonucleotide
uguguaaggcccugauagc

SEQ ID NO: 2146609 - RNA, 19 nt, Artificial Sequence
  Description of Artificial Sequence: Synthetic oligonucleotide
ugacccaacagaacucaga

SEQ ID NO: 2146610 - RNA, 19 nt, Artificial Sequence
  Description of Artificial Sequence: Synthetic oligonucleotide
gacuugacccaacagaacu

SEQ ID NO: 2146611 - RNA, 19 nt, Artificial Sequence
  Description of Artificial Sequence: Synthetic oligonucleotide
ugggaaaagcugcuguuuc

SEQ ID NO: 2146612 - RNA, 19 nt, Artificial Sequence
  Description of Artificial Sequence: Synthetic oligonucleotide
agcaacacggccccggugu

SEQ ID NO: 2146613 - RNA, 19 nt, Artificial Sequence
  Description of Artificial Sequence: Synthetic oligonucleotide
gagguagaacucugcaggc

SEQ ID NO: 2146614 - RNA, 19 nt, Artificial Sequence
  Description of Artificial Sequence: Synthetic oligonucleotide
aagguaguccucaaggcau

SEQ ID NO: 2146615 - RNA, 19 nt, Artificial Sequence
  Description of Artificial Sequence: Synthetic oligonucleotide
ugcguuaacucagacucug

SEQ ID NO: 2146616 - RNA, 19 nt, Artificial Sequence
  Description of Artificial Sequence: Synthetic oligonucleotide
ugaugugugccugagugaa

SEQ ID NO: 2146617 - RNA, 19 nt, Artificial Sequence
  Description of Artificial Sequence: Synthetic oligonucleotide
uuccgucugacacaagcaa

SEQ ID NO: 2146618 - RNA, 19 nt, Artificial Sequence
  Description of Artificial Sequence: Synthetic oligonucleotide
gucugacacaagcaacacg

SEQ ID NO: 2146619 - RNA, 19 nt, Artificial Sequence
  Description of Artificial Sequence: Synthetic oligonucleotide
gacccaacagaacucagaa

SEQ ID NO: 2146620 - RNA, 19 nt, Artificial Sequence
  Description of Artificial Sequence: Synthetic oligonucleotide
cagggcccaagcuacaagc

SEQ ID NO: 2146621 - RNA, 19 nt, Artificial Sequence
  Description of Artificial Sequence: Synthetic oligonucleotide
cuagaugcacuagugcccc

SEQ ID NO: 2146622 - RNA, 19 nt, Artificial Sequence
  Description of Artificial Sequence: Synthetic oligonucleotide
uuaaaucgguccaccugga

SEQ ID NO: 2146623 - RNA, 19 nt, Artificial Sequence
  Description of Artificial Sequence: Synthetic oligonucleotide
gacucugaaagguaguccu

SEQ ID NO: 2146624 - RNA, 19 nt, Artificial Sequence
  Description of Artificial Sequence: Synthetic oligonucleotide
uccgucugacacaagcaac

SEQ ID NO: 2146625 - RNA, 19 nt, Artificial Sequence
  Description of Artificial Sequence: Synthetic oligonucleotide
aacucagacucugacucca

SEQ ID NO: 2146626 - RNA, 19 nt, Artificial Sequence
  Description of Artificial Sequence: Synthetic oligonucleotide
gguagaacucugcaggcgc

SEQ ID NO: 2146627 - RNA, 19 nt, Artificial Sequence
  Description of Artificial Sequence: Synthetic oligonucleotide
aauaagcuagagacaguga

SEQ ID NO: 2146628 - RNA, 19 nt, Artificial Sequence
  Description of Artificial Sequence: Synthetic oligonucleotide
cugacuugacccaacagaa

SEQ ID NO: 2146629 - RNA, 19 nt, Artificial Sequence
  Description of Artificial Sequence: Synthetic oligonucleotide
aguguuaggccugcacugg

SEQ ID NO: 2146630 - RNA, 19 nt, Artificial Sequence
  Description of Artificial Sequence: Synthetic oligonucleotide
guuaggccugcacugggag

SEQ ID NO: 2146631 - RNA, 19 nt, Artificial Sequence
  Description of Artificial Sequence: Synthetic oligonucleotide
ucaugccugcguuaacuca

SEQ ID NO: 2146632 - RNA, 19 nt, Artificial Sequence
  Description of Artificial Sequence: Synthetic oligonucleotide
uuaggugugucaggcgcgg

SEQ ID NO: 2146633 - RNA, 19 nt, Artificial Sequence
  Description of Artificial Sequence: Synthetic oligonucleotide
gguuaaaucgguccaccug

SEQ ID NO: 2146634 - RNA, 19 nt, Artificial Sequence
  Description of Artificial Sequence: Synthetic oligonucleotide
gacucugacuccaucacca

SEQ ID NO: 2146635 - RNA, 19 nt, Artificial Sequence
  Description of Artificial Sequence: Synthetic oligonucleotide
uccgauggcagcagguuaa

SEQ ID NO: 2146636 - RNA, 19 nt, Artificial Sequence
  Description of Artificial Sequence: Synthetic oligonucleotide
uuucucugcacauccgaau

SEQ ID NO: 2146637 - RNA, 19 nt, Artificial Sequence
  Description of Artificial Sequence: Synthetic oligonucleotide
uugaggagcugcccgacuc

SEQ ID NO: 2146638 - RNA, 19 nt, Artificial Sequence
  Description of Artificial Sequence: Synthetic oligonucleotide
aggcgcacgguccugagca

SEQ ID NO: 2146639 - RNA, 19 nt, Artificial Sequence
  Description of Artificial Sequence: Synthetic oligonucleotide
caguguuaggccugcacug

SEQ ID NO: 2146640 - RNA, 19 nt, Artificial Sequence
  Description of Artificial Sequence: Synthetic oligonucleotide
agagcuuucucugcacauc

SEQ ID NO: 2146641 - RNA, 19 nt, Artificial Sequence
  Description of Artificial Sequence: Synthetic oligonucleotide
agcagacucugaaagguag

SEQ ID NO: 2146642 - RNA, 19 nt, Artificial Sequence
  Description of Artificial Sequence: Synthetic oligonucleotide
aauccugauugcaaccggu

SEQ ID NO: 2146643 - RNA, 19 nt, Artificial Sequence
  Description of Artificial Sequence: Synthetic oligonucleotide
aagcugagacaguguuagg

SEQ ID NO: 2146644 - RNA, 19 nt, Artificial Sequence
  Description of Artificial Sequence: Synthetic oligonucleotide
uccguggccuggaagcaag

SEQ ID NO: 2146645 - RNA, 19 nt, Artificial Sequence
  Description of Artificial Sequence: Synthetic oligonucleotide
gguucuugggcucccuugg

SEQ ID NO: 2146646 - RNA, 19 nt, Artificial Sequence
  Description of Artificial Sequence: Synthetic oligonucleotide
ugacuugacccaacagaac

SEQ ID NO: 2146647 - RNA, 19 nt, Artificial Sequence
  Description of Artificial Sequence: Synthetic oligonucleotide
gaagcaagaggcaguccag

SEQ ID NO: 2146648 - RNA, 19 nt, Artificial Sequence
  Description of Artificial Sequence: Synthetic oligonucleotide
uucuuccguggccuggaag

SEQ ID NO: 2146649 - RNA, 19 nt, Artificial Sequence
  Description of Artificial Sequence: Synthetic oligonucleotide
aaccggucaccuguagccg

SEQ ID NO: 2146650 - RNA, 19 nt, Artificial Sequence
  Description of Artificial Sequence: Synthetic oligonucleotide
ugauaggccacuggaacuc

SEQ ID NO: 2146651 - RNA, 19 nt, Artificial Sequence
  Description of Artificial Sequence: Synthetic oligonucleotide
gcugagacaguguuaggcc

SEQ ID NO: 2146652 - RNA, 19 nt, Artificial Sequence
  Description of Artificial Sequence: Synthetic oligonucleotide
gaagccuggcaguuugaac

SEQ ID NO: 2146653 - RNA, 19 nt, Artificial Sequence
  Description of Artificial Sequence: Synthetic oligonucleotide
acaagcaacacggccccgg

SEQ ID NO: 2146654 - RNA, 19 nt, Artificial Sequence
  Description of Artificial Sequence: Synthetic oligonucleotide
gagucuccgaguccuggag

SEQ ID NO: 2146655 - RNA, 19 nt, Artificial Sequence
  Description of Artificial Sequence: Synthetic oligonucleotide
ugucccacggaauccgaac

SEQ ID NO: 2146656 - RNA, 19 nt, Artificial Sequence
  Description of Artificial Sequence: Synthetic oligonucleotide
uacuggaaagcugaagcau

SEQ ID NO: 2146657 - RNA, 19 nt, Artificial Sequence
  Description of Artificial Sequence: Synthetic oligonucleotide
gcaaucugaaugcggaccc

SEQ ID NO: 2146658 - RNA, 19 nt, Artificial Sequence
  Description of Artificial Sequence: Synthetic oligonucleotide
gguguuaggugugucaggc

SEQ ID NO: 2146659 - RNA, 19 nt, Artificial Sequence
  Description of Artificial Sequence: Synthetic oligonucleotide
ucaccuguagccggggcag

SEQ ID NO: 2146660 - RNA, 19 nt, Artificial Sequence
  Description of Artificial Sequence: Synthetic oligonucleotide
cugaaugcggaccccgcag

SEQ ID NO: 2146661 - RNA, 19 nt, Artificial Sequence
  Description of Artificial Sequence: Synthetic oligonucleotide
guuaggugugucaggcgcg

SEQ ID NO: 2146662 - RNA, 19 nt, Artificial Sequence
  Description of Artificial Sequence: Synthetic oligonucleotide
augcggaccccgcagaccu

SEQ ID NO: 2146663 - RNA, 19 nt, Artificial Sequence
  Description of Artificial Sequence: Synthetic oligonucleotide
ucuugggcucccuuggcuc

SEQ ID NO: 2146664 - RNA, 19 nt, Artificial Sequence
  Description of Artificial Sequence: Synthetic oligonucleotide
gcaucaugaugccucuucg

SEQ ID NO: 2146665 - RNA, 19 nt, Artificial Sequence
  Description of Artificial Sequence: Synthetic oligonucleotide
agguucuugggcucccuug

SEQ ID NO: 2146666 - RNA, 19 nt, Artificial Sequence
  Description of Artificial Sequence: Synthetic oligonucleotide
agguagaacucugcaggcg

SEQ ID NO: 2146667 - RNA, 19 nt, Artificial Sequence
  Description of Artificial Sequence: Synthetic oligonucleotide
gauugcaaccggucaccug

SEQ ID NO: 2146668 - RNA, 19 nt, Artificial Sequence
  Description of Artificial Sequence: Synthetic oligonucleotide
cugauugcaaccggucacc

SEQ ID NO: 2146669 - RNA, 19 nt, Artificial Sequence
  Description of Artificial Sequence: Synthetic oligonucleotide
agguuaaaucgguccaccu

SEQ ID NO: 2146670 - RNA, 19 nt, Artificial Sequence
  Description of Artificial Sequence: Synthetic oligonucleotide
ucaggcgcggaagaugggc

SEQ ID NO: 2146671 - RNA, 19 nt, Artificial Sequence
  Description of Artificial Sequence: Synthetic oligonucleotide
ugcacauccgaauccugau

SEQ ID NO: 2146672 - RNA, 19 nt, Artificial Sequence
  Description of Artificial Sequence: Synthetic oligonucleotide
cagaacucagaaucugcuc

SEQ ID NO: 2146673 - RNA, 19 nt, Artificial Sequence
  Description of Artificial Sequence: Synthetic oligonucleotide
guuaacucagacucugacu

SEQ ID NO: 2146674 - RNA, 19 nt, Artificial Sequence
  Description of Artificial Sequence: Synthetic oligonucleotide
accggucaccuguagccgg

SEQ ID NO: 2146675 - RNA, 19 nt, Artificial Sequence
  Description of Artificial Sequence: Synthetic oligonucleotide
cagacucugacuccaucac

SEQ ID NO: 2146676 - RNA, 19 nt, Artificial Sequence
  Description of Artificial Sequence: Synthetic oligonucleotide
uccucaaggcauucacaga

SEQ ID NO: 2146677 - RNA, 19 nt, Artificial Sequence
  Description of Artificial Sequence: Synthetic oligonucleotide
acucggaggugucgauggc

SEQ ID NO: 2146678 - RNA, 19 nt, Artificial Sequence
  Description of Artificial Sequence: Synthetic oligonucleotide
guguuaggccugcacuggg

SEQ ID NO: 2146679 - RNA, 19 nt, Artificial Sequence
  Description of Artificial Sequence: Synthetic oligonucleotide
cugacacaagcaacacggc

SEQ ID NO: 2146680 - RNA, 19 nt, Artificial Sequence
  Description of Artificial Sequence: Synthetic oligonucleotide
auagcaucaggcagcucuc

SEQ ID NO: 2146681 - RNA, 19 nt, Artificial Sequence
  Description of Artificial Sequence: Synthetic oligonucleotide
ucggaggugucgauggcau

SEQ ID NO: 2146682 - RNA, 19 nt, Artificial Sequence
  Description of Artificial Sequence: Synthetic oligonucleotide
gcuagagacagugaacaug

SEQ ID NO: 2146683 - RNA, 19 nt, Artificial Sequence
  Description of Artificial Sequence: Synthetic oligonucleotide
guguuaggugugucaggcg

SEQ ID NO: 2146684 - RNA, 19 nt, Artificial Sequence
  Description of Artificial Sequence: Synthetic oligonucleotide
aagcaagaggcaguccagu

SEQ ID NO: 2146685 - RNA, 19 nt, Artificial Sequence
  Description of Artificial Sequence: Synthetic oligonucleotide
gagacagugaacauggcuu

SEQ ID NO: 2146686 - RNA, 19 nt, Artificial Sequence
  Description of Artificial Sequence: Synthetic oligonucleotide
cagguuaaaucgguccacc

SEQ ID NO: 2146687 - RNA, 19 nt, Artificial Sequence
  Description of Artificial Sequence: Synthetic oligonucleotide
uaggccugcacugggagaa

SEQ ID NO: 2146688 - RNA, 19 nt, Artificial Sequence
  Description of Artificial Sequence: Synthetic oligonucleotide
cuggcaguuugaaccuggg

SEQ ID NO: 2146689 - RNA, 19 nt, Artificial Sequence
  Description of Artificial Sequence: Synthetic oligonucleotide
caucacuuuccuccaauga

SEQ ID NO: 2146690 - RNA, 19 nt, Artificial Sequence
  Description of Artificial Sequence: Synthetic oligonucleotide
uguagccggggcagcuccg

SEQ ID NO: 2146691 - RNA, 19 nt, Artificial Sequence
  Description of Artificial Sequence: Synthetic oligonucleotide
acucugcaggcgcacgguc

SEQ ID NO: 2146692 - RNA, 19 nt, Artificial Sequence
  Description of Artificial Sequence: Synthetic oligonucleotide
aucugaaugcggaccccgc

SEQ ID NO: 2146693 - RNA, 19 nt, Artificial Sequence
  Description of Artificial Sequence: Synthetic oligonucleotide
guaaggcccugauagcauc

SEQ ID NO: 2146694 - RNA, 19 nt, Artificial Sequence
  Description of Artificial Sequence: Synthetic oligonucleotide
gagggugucucauauuuau

SEQ ID NO: 2146695 - RNA, 19 nt, Artificial Sequence
  Description of Artificial Sequence: Synthetic oligonucleotide
ugcaaccggucaccuguag

SEQ ID NO: 2146696 - RNA, 19 nt, Artificial Sequence
  Description of Artificial Sequence: Synthetic oligonucleotide
gaguaccuugaggagcugc

SEQ ID NO: 2146697 - RNA, 19 nt, Artificial Sequence
  Description of Artificial Sequence: Synthetic oligonucleotide
uugcgcgucaccaggcauc

SEQ ID NO: 2146698 - RNA, 19 nt, Artificial Sequence
  Description of Artificial Sequence: Synthetic oligonucleotide
cucugucccacggaauccg

SEQ ID NO: 2146699 - RNA, 19 nt, Artificial Sequence
  Description of Artificial Sequence: Synthetic oligonucleotide
cucaugccugcguuaacuc

SEQ ID NO: 2146700 - RNA, 19 nt, Artificial Sequence
  Description of Artificial Sequence: Synthetic oligonucleotide
gugaagcaggguuucccug

SEQ ID NO: 2146701 - RNA, 19 nt, Artificial Sequence
  Description of Artificial Sequence: Synthetic oligonucleotide
ggaagaugggcccggaguc

SEQ ID NO: 2146702 - RNA, 19 nt, Artificial Sequence
  Description of Artificial Sequence: Synthetic oligonucleotide
aagcaacacggccccggug

SEQ ID NO: 2146703 - RNA, 19 nt, Artificial Sequence
  Description of Artificial Sequence: Synthetic oligonucleotide
guguaaggcccugauagca

SEQ ID NO: 2146704 - RNA, 19 nt, Artificial Sequence
  Description of Artificial Sequence: Synthetic oligonucleotide
agaacucugcaggcgcacg

SEQ ID NO: 2146705 - RNA, 19 nt, Artificial Sequence
  Description of Artificial Sequence: Synthetic oligonucleotide
uucuugggaaaagcugcug

SEQ ID NO: 2146706 - RNA, 19 nt, Artificial Sequence
  Description of Artificial Sequence: Synthetic oligonucleotide
auccugauugcaaccgguc

SEQ ID NO: 2146707 - RNA, 19 nt, Artificial Sequence
  Description of Artificial Sequence: Synthetic oligonucleotide
aggaggcggcccucugucc

SEQ ID NO: 2146708 - RNA, 19 nt, Artificial Sequence
  Description of Artificial Sequence: Synthetic oligonucleotide
agcugcccgacucguggac

SEQ ID NO: 2146709 - RNA, 19 nt, Artificial Sequence
  Description of Artificial Sequence: Synthetic oligonucleotide
gauaggccacuggaacucc

SEQ ID NO: 2146710 - RNA, 19 nt, Artificial Sequence
  Description of Artificial Sequence: Synthetic oligonucleotide
ugggcccggagucuccgag

SEQ ID NO: 2146711 - RNA, 19 nt, Artificial Sequence
  Description of Artificial Sequence: Synthetic oligonucleotide
ucucagcuagaugcacuag

SEQ ID NO: 2146712 - RNA, 19 nt, Artificial Sequence
  Description of Artificial Sequence: Synthetic oligonucleotide
gaggcaguccaguggguga

SEQ ID NO: 2146713 - RNA, 19 nt, Artificial Sequence
  Description of Artificial Sequence: Synthetic oligonucleotide
accaaguucagggcccaag

SEQ ID NO: 2146714 - RNA, 19 nt, Artificial Sequence
  Description of Artificial Sequence: Synthetic oligonucleotide
gaauccgaacuccuucucu

SEQ ID NO: 2146715 - RNA, 19 nt, Artificial Sequence
  Description of Artificial Sequence: Synthetic oligonucleotide
aacucccuggcaucacuuu

SEQ ID NO: 2146716 - RNA, 19 nt, Artificial Sequence
  Description of Artificial Sequence: Synthetic oligonucleotide
uccgaguccuggaguaccu

SEQ ID NO: 2146717 - RNA, 19 nt, Artificial Sequence
  Description of Artificial Sequence: Synthetic oligonucleotide
agucuccgaguccuggagu

SEQ ID NO: 2146718 - RNA, 19 nt, Artificial Sequence
  Description of Artificial Sequence: Synthetic oligonucleotide
aggcccugauagcaucagg

SEQ ID NO: 2146719 - RNA, 19 nt, Artificial Sequence
  Description of Artificial Sequence: Synthetic oligonucleotide
ucccugugucuucugacuu

SEQ ID NO: 2146720 - RNA, 19 nt, Artificial Sequence
  Description of Artificial Sequence: Synthetic oligonucleotide
ucugucccacggaauccga

SEQ ID NO: 2146721 - RNA, 19 nt, Artificial Sequence
  Description of Artificial Sequence: Synthetic oligonucleotide
gaacuccuucucuucccac

SEQ ID NO: 2146722 - RNA, 19 nt, Artificial Sequence
  Description of Artificial Sequence: Synthetic oligonucleotide
acuuuccuccaaugaugug

SEQ ID NO: 2146723 - RNA, 19 nt, Artificial Sequence
  Description of Artificial Sequence: Synthetic oligonucleotide
ugagugaagcaggguuucc

SEQ ID NO: 2146724 - RNA, 19 nt, Artificial Sequence
  Description of Artificial Sequence: Synthetic oligonucleotide
gcucccuuggcucugguuc

SEQ ID NO: 2146725 - RNA, 19 nt, Artificial Sequence
  Description of Artificial Sequence: Synthetic oligonucleotide
cuuucaccucauccagaag

SEQ ID NO: 2146726 - RNA, 19 nt, Artificial Sequence
  Description of Artificial Sequence: Synthetic oligonucleotide
acucguggacuggauagug

SEQ ID NO: 2146727 - RNA, 19 nt, Artificial Sequence
  Description of Artificial Sequence: Synthetic oligonucleotide
uggguuccgucugacacaa

SEQ ID NO: 2146728 - RNA, 19 nt, Artificial Sequence
  Description of Artificial Sequence: Synthetic oligonucleotide
gaugggcccggagucuccg

SEQ ID NO: 2146729 - RNA, 19 nt, Artificial Sequence
  Description of Artificial Sequence: Synthetic oligonucleotide
accuugaggagcugcccga

SEQ ID NO: 2146730 - RNA, 19 nt, Artificial Sequence
  Description of Artificial Sequence: Synthetic oligonucleotide
cugcacauccgaauccuga

SEQ ID NO: 2146731 - RNA, 19 nt, Artificial Sequence
  Description of Artificial Sequence: Synthetic oligonucleotide
gaugugugccugagugaag

SEQ ID NO: 2146732 - RNA, 19 nt, Artificial Sequence
  Description of Artificial Sequence: Synthetic oligonucleotide
aacucugcaggcgcacggu

SEQ ID NO: 2146733 - RNA, 19 nt, Artificial Sequence
  Description of Artificial Sequence: Synthetic oligonucleotide
cuuucucugcacauccgaa

SEQ ID NO: 2146734 - RNA, 19 nt, Artificial Sequence
  Description of Artificial Sequence: Synthetic oligonucleotide
gaggugucgauggcauugc

SEQ ID NO: 2146735 - RNA, 19 nt, Artificial Sequence
  Description of Artificial Sequence: Synthetic oligonucleotide
cucugaaagguaguccuca

SEQ ID NO: 2146736 - RNA, 19 nt, Artificial Sequence
  Description of Artificial Sequence: Synthetic oligonucleotide
agcuagagacagugaacau

SEQ ID NO: 2146737 - RNA, 19 nt, Artificial Sequence
  Description of Artificial Sequence: Synthetic oligonucleotide
ucgauggcauugcgcguca

SEQ ID NO: 2146738 - RNA, 19 nt, Artificial Sequence
  Description of Artificial Sequence: Synthetic oligonucleotide
ccugauugcaaccggucac

SEQ ID NO: 2146739 - RNA, 19 nt, Artificial Sequence
  Description of Artificial Sequence: Synthetic oligonucleotide
aagguucuugggcucccuu

SEQ ID NO: 2146740 - RNA, 19 nt, Artificial Sequence
  Description of Artificial Sequence: Synthetic oligonucleotide
ugauugcaaccggucaccu

SEQ ID NO: 2146741 - RNA, 19 nt, Artificial Sequence
  Description of Artificial Sequence: Synthetic oligonucleotide
uucccacucggaggugucg

SEQ ID NO: 2146742 - RNA, 19 nt, Artificial Sequence
  Description of Artificial Sequence: Synthetic oligonucleotide
caucggacacuguggguuc

SEQ ID NO: 2146743 - RNA, 19 nt, Artificial Sequence
  Description of Artificial Sequence: Synthetic oligonucleotide
gucaccuguagccggggca

SEQ ID NO: 2146744 - RNA, 19 nt, Artificial Sequence
  Description of Artificial Sequence: Synthetic oligonucleotide
auugcgcgucaccaggcau

SEQ ID NO: 2146745 - RNA, 19 nt, Artificial Sequence
  Description of Artificial Sequence: Synthetic oligonucleotide
ggauagugucucugagucc

SEQ ID NO: 2146746 - RNA, 19 nt, Artificial Sequence
  Description of Artificial Sequence: Synthetic oligonucleotide
agcuacaagcugaggagga

SEQ ID NO: 2146747 - RNA, 19 nt, Artificial Sequence
  Description of Artificial Sequence: Synthetic oligonucleotide
cuccgaguccuggaguacc

SEQ ID NO: 2146748 - RNA, 19 nt, Artificial Sequence
  Description of Artificial Sequence: Synthetic oligonucleotide
ucgguccaccuggagguag

SEQ ID NO: 2146749 - RNA, 19 nt, Artificial Sequence
  Description of Artificial Sequence: Synthetic oligonucleotide
caaucugaaugcggacccc

SEQ ID NO: 2146750 - RNA, 19 nt, Artificial Sequence
  Description of Artificial Sequence: Synthetic oligonucleotide
guuccgucugacacaagca

SEQ ID NO: 2146751 - RNA, 19 nt, Artificial Sequence
  Description of Artificial Sequence: Synthetic oligonucleotide
cuccaaugaugugugccug

SEQ ID NO: 2146752 - RNA, 19 nt, Artificial Sequence
  Description of Artificial Sequence: Synthetic oligonucleotide
gccacuggaacucccuggc

SEQ ID NO: 2146753 - RNA, 19 nt, Artificial Sequence
  Description of Artificial Sequence: Synthetic oligonucleotide
ccaucaccaaguucagggc

SEQ ID NO: 2146754 - RNA, 19 nt, Artificial Sequence
  Description of Artificial Sequence: Synthetic oligonucleotide
guaccuugaggagcugccc

SEQ ID NO: 2146755 - RNA, 19 nt, Artificial Sequence
  Description of Artificial Sequence: Synthetic oligonucleotide
ccgaauccugauugcaacc

SEQ ID NO: 2146756 - RNA, 19 nt, Artificial Sequence
  Description of Artificial Sequence: Synthetic oligonucleotide
cugaguccaggaucagcuc

SEQ ID NO: 2146757 - RNA, 19 nt, Artificial Sequence
  Description of Artificial Sequence: Synthetic oligonucleotide
aggugugucaggcgcggaa

SEQ ID NO: 2146758 - RNA, 19 nt, Artificial Sequence
  Description of Artificial Sequence: Synthetic oligonucleotide
guggguuccgucugacaca

SEQ ID NO: 2146759 - RNA, 19 nt, Artificial Sequence
  Description of Artificial Sequence: Synthetic oligonucleotide
cgacucguggacuggauag

SEQ ID NO: 2146760 - RNA, 19 nt, Artificial Sequence
  Description of Artificial Sequence: Synthetic oligonucleotide
ggugucgauggcauugcgc

SEQ ID NO: 2146761 - RNA, 19 nt, Artificial Sequence
  Description of Artificial Sequence: Synthetic oligonucleotide
gaguccaggaucagcucuc

SEQ ID NO: 2146762 - RNA, 19 nt, Artificial Sequence
  Description of Artificial Sequence: Synthetic oligonucleotide
cugguucuugggaaaagcu

SEQ ID NO: 2146763 - RNA, 19 nt, Artificial Sequence
  Description of Artificial Sequence: Synthetic oligonucleotide
ugccugcguuaacucagac

SEQ ID NO: 2146764 - RNA, 19 nt, Artificial Sequence
  Description of Artificial Sequence: Synthetic oligonucleotide
aagcagacucugaaaggua

SEQ ID NO: 2146765 - RNA, 19 nt, Artificial Sequence
  Description of Artificial Sequence: Synthetic oligonucleotide
ccuggaguaccuugaggag

SEQ ID NO: 2146766 - RNA, 19 nt, Artificial Sequence
  Description of Artificial Sequence: Synthetic oligonucleotide
ggagaagcagacucugaaa

SEQ ID NO: 2146767 - RNA, 19 nt, Artificial Sequence
  Description of Artificial Sequence: Synthetic oligonucleotide
gugucaggcgcggaagaug

SEQ ID NO: 2146768 - RNA, 19 nt, Artificial Sequence
  Description of Artificial Sequence: Synthetic oligonucleotide
ccucugauauguccauggg

SEQ ID NO: 2146769 - RNA, 19 nt, Artificial Sequence
  Description of Artificial Sequence: Synthetic oligonucleotide
gcaaccggucaccuguagc

SEQ ID NO: 2146770 - RNA, 19 nt, Artificial Sequence
  Description of Artificial Sequence: Synthetic oligonucleotide
acucugacuccaucaccaa

SEQ ID NO: 2146771 - RNA, 19 nt, Artificial Sequence
  Description of Artificial Sequence: Synthetic oligonucleotide
gggguggcuguguaaggcc

SEQ ID NO: 2146772 - RNA, 19 nt, Artificial Sequence
  Description of Artificial Sequence: Synthetic oligonucleotide
cauccgaauccugauugca

SEQ ID NO: 2146773 - RNA, 19 nt, Artificial Sequence
  Description of Artificial Sequence: Synthetic oligonucleotide
cgaauccugauugcaaccg

SEQ ID NO: 2146774 - RNA, 19 nt, Artificial Sequence
  Description of Artificial Sequence: Synthetic oligonucleotide
cugagacaguguuaggccu

SEQ ID NO: 2146775 - RNA, 19 nt, Artificial Sequence
  Description of Artificial Sequence: Synthetic oligonucleotide
cucagcuagaugcacuagu

SEQ ID NO: 2146776 - RNA, 19 nt, Artificial Sequence
  Description of Artificial Sequence: Synthetic oligonucleotide
ucaccaggcaucggacacu

SEQ ID NO: 2146777 - RNA, 19 nt, Artificial Sequence
  Description of Artificial Sequence: Synthetic oligonucleotide
ucccacucggaggugucga

SEQ ID NO: 2146778 - RNA, 19 nt, Artificial Sequence
  Description of Artificial Sequence: Synthetic oligonucleotide
cguuaacucagacucugac

SEQ ID NO: 2146779 - RNA, 19 nt, Artificial Sequence
  Description of Artificial Sequence: Synthetic oligonucleotide
agaugggcccggagucucc

SEQ ID NO: 2146780 - RNA, 19 nt, Artificial Sequence
  Description of Artificial Sequence: Synthetic oligonucleotide
ucucagagaugugcagcaa

SEQ ID NO: 2146781 - RNA, 19 nt, Artificial Sequence
  Description of Artificial Sequence: Synthetic oligonucleotide
cagagggugucucauauuu

SEQ ID NO: 2146782 - RNA, 19 nt, Artificial Sequence
  Description of Artificial Sequence: Synthetic oligonucleotide
caguuugaaccugggcaug

SEQ ID NO: 2146783 - RNA, 19 nt, Artificial Sequence
  Description of Artificial Sequence: Synthetic oligonucleotide
cuggauagugucucugagu

SEQ ID NO: 2146784 - RNA, 19 nt, Artificial Sequence
  Description of Artificial Sequence: Synthetic oligonucleotide
guagaacucugcaggcgca

SEQ ID NO: 2146785 - RNA, 19 nt, Artificial Sequence
  Description of Artificial Sequence: Synthetic oligonucleotide
cagcaagguucuugggcuc

SEQ ID NO: 2146786 - RNA, 19 nt, Artificial Sequence
  Description of Artificial Sequence: Synthetic oligonucleotide
agaagcugagacaguguua

SEQ ID NO: 2146787 - RNA, 19 nt, Artificial Sequence
  Description of Artificial Sequence: Synthetic oligonucleotide
caccaggcaucggacacug

SEQ ID NO: 2146788 - RNA, 19 nt, Artificial Sequence
  Description of Artificial Sequence: Synthetic oligonucleotide
acggccccgguguuaggug

SEQ ID NO: 2146789 - RNA, 19 nt, Artificial Sequence
  Description of Artificial Sequence: Synthetic oligonucleotide
ccgucugacacaagcaaca

SEQ ID NO: 2146790 - RNA, 19 nt, Artificial Sequence
  Description of Artificial Sequence: Synthetic oligonucleotide
auagugucucugaguccag

SEQ ID NO: 2146791 - RNA, 19 nt, Artificial Sequence
  Description of Artificial Sequence: Synthetic oligonucleotide
ugcaggcgcacgguccuga

SEQ ID NO: 2146792 - RNA, 19 nt, Artificial Sequence
  Description of Artificial Sequence: Synthetic oligonucleotide
ugcccgacucguggacugg

SEQ ID NO: 2146793 - RNA, 19 nt, Artificial Sequence
  Description of Artificial Sequence: Synthetic oligonucleotide
ggcccaagcuacaagcuga

SEQ ID NO: 2146794 - RNA, 19 nt, Artificial Sequence
  Description of Artificial Sequence: Synthetic oligonucleotide
uugcaaccggucaccugua

SEQ ID NO: 2146795 - RNA, 19 nt, Artificial Sequence
  Description of Artificial Sequence: Synthetic oligonucleotide
gcaguccagugggugaggg

SEQ ID NO: 2146796 - RNA, 19 nt, Artificial Sequence
  Description of Artificial Sequence: Synthetic oligonucleotide
gcaguuugaaccugggcau

SEQ ID NO: 2146797 - RNA, 19 nt, Artificial Sequence
  Description of Artificial Sequence: Synthetic oligonucleotide
cagagaugugcagcaauaa

SEQ ID NO: 2146798 - RNA, 19 nt, Artificial Sequence
  Description of Artificial Sequence: Synthetic oligonucleotide
cauugcgcgucaccaggca

SEQ ID NO: 2146799 - RNA, 19 nt, Artificial Sequence
  Description of Artificial Sequence: Synthetic oligonucleotide
ggcagcucucagcuagaug

SEQ ID NO: 2146800 - RNA, 19 nt, Artificial Sequence
  Description of Artificial Sequence: Synthetic oligonucleotide
gcagguuaaaucgguccac

SEQ ID NO: 2146801 - RNA, 19 nt, Artificial Sequence
  Description of Artificial Sequence: Synthetic oligonucleotide
ccgguguuaggugugucag

SEQ ID NO: 2146802 - RNA, 19 nt, Artificial Sequence
  Description of Artificial Sequence: Synthetic oligonucleotide
cagcuccgauggcagcagg

SEQ ID NO: 2146803 - RNA, 19 nt, Artificial Sequence
  Description of Artificial Sequence: Synthetic oligonucleotide
cccucugucccacggaauc

SEQ ID NO: 2146804 - RNA, 19 nt, Artificial Sequence
  Description of Artificial Sequence: Synthetic oligonucleotide
cucggaggugucgauggca

SEQ ID NO: 2146805 - RNA, 19 nt, Artificial Sequence
  Description of Artificial Sequence: Synthetic oligonucleotide
cccacggaauccgaacucc

SEQ ID NO: 2146806 - RNA, 19 nt, Artificial Sequence
  Description of Artificial Sequence: Synthetic oligonucleotide
uuccguggccuggaagcaa

SEQ ID NO: 2146807 - RNA, 19 nt, Artificial Sequence
  Description of Artificial Sequence: Synthetic oligonucleotide
gaugauccugguccucuuu

SEQ ID NO: 2146808 - RNA, 19 nt, Artificial Sequence
  Description of Artificial Sequence: Synthetic oligonucleotide
ggagucuccgaguccugga

SEQ ID NO: 2146809 - RNA, 19 nt, Artificial Sequence
  Description of Artificial Sequence: Synthetic oligonucleotide
agagggugucucauauuua

SEQ ID NO: 2146810 - RNA, 19 nt, Artificial Sequence
  Description of Artificial Sequence: Synthetic oligonucleotide
gaaccugggcauggaggga

SEQ ID NO: 2146811 - RNA, 19 nt, Artificial Sequence
  Description of Artificial Sequence: Synthetic oligonucleotide
guggcuguguaaggcccug

SEQ ID NO: 2146812 - RNA, 19 nt, Artificial Sequence
  Description of Artificial Sequence: Synthetic oligonucleotide
ugcggaccccgcagaccug

SEQ ID NO: 2146813 - RNA, 19 nt, Artificial Sequence
  Description of Artificial Sequence: Synthetic oligonucleotide
cccugugucuucugacuug

SEQ ID NO: 2146814 - RNA, 19 nt, Artificial Sequence
  Description of Artificial Sequence: Synthetic oligonucleotide
ggucaccuguagccggggc

SEQ ID NO: 2146815 - RNA, 19 nt, Artificial Sequence
  Description of Artificial Sequence: Synthetic oligonucleotide
gucaggcgcggaagauggg

SEQ ID NO: 2146816 - RNA, 19 nt, Artificial Sequence
  Description of Artificial Sequence: Synthetic oligonucleotide
ggcgcggaagaugggcccg

SEQ ID NO: 2146817 - RNA, 19 nt, Artificial Sequence
  Description of Artificial Sequence: Synthetic oligonucleotide
aggcagagggugucucaua

SEQ ID NO: 2146818 - RNA, 19 nt, Artificial Sequence
  Description of Artificial Sequence: Synthetic oligonucleotide
agggugucucauauuuaua

SEQ ID NO: 2146819 - RNA, 19 nt, Artificial Sequence
  Description of Artificial Sequence: Synthetic oligonucleotide
cucguggacuggauagugu

SEQ ID NO: 2146820 - RNA, 19 nt, Artificial Sequence
  Description of Artificial Sequence: Synthetic oligonucleotide
ggcagagggugucucauau

SEQ ID NO: 2146821 - RNA, 19 nt, Artificial Sequence
  Description of Artificial Sequence: Synthetic oligonucleotide
uaggugugucaggcgcgga

SEQ ID NO: 2146822 - RNA, 19 nt, Artificial Sequence
  Description of Artificial Sequence: Synthetic oligonucleotide
gcggcccucugucccacgg

SEQ ID NO: 2146823 - RNA, 19 nt, Artificial Sequence
  Description of Artificial Sequence: Synthetic oligonucleotide
ccggucaccuguagccggg

SEQ ID NO: 2146824 - RNA, 19 nt, Artificial Sequence
  Description of Artificial Sequence: Synthetic oligonucleotide
acacggccccgguguuagg

SEQ ID NO: 2146825 - RNA, 19 nt, Artificial Sequence
  Description of Artificial Sequence: Synthetic oligonucleotide
ccucugucccacggaaucc

SEQ ID NO: 2146826 - RNA, 19 nt, Artificial Sequence
  Description of Artificial Sequence: Synthetic oligonucleotide
gacucguggacuggauagu

SEQ ID NO: 2146827 - RNA, 19 nt, Artificial Sequence
  Description of Artificial Sequence: Synthetic oligonucleotide
augccugcguuaacucaga

SEQ ID NO: 2146828 - RNA, 19 nt, Artificial Sequence
  Description of Artificial Sequence: Synthetic oligonucleotide
ggcccggagucuccgaguc

SEQ ID NO: 2146829 - RNA, 19 nt, Artificial Sequence
  Description of Artificial Sequence: Synthetic oligonucleotide
gccugagugaagcaggguu

SEQ ID NO: 2146830 - RNA, 19 nt, Artificial Sequence
  Description of Artificial Sequence: Synthetic oligonucleotide
ggcucugguucuugggaaa

SEQ ID NO: 2146831 - RNA, 19 nt, Artificial Sequence
  Description of Artificial Sequence: Synthetic oligonucleotide
agguaguccucaaggcauu

SEQ ID NO: 2146832 - RNA, 19 nt, Artificial Sequence
  Description of Artificial Sequence: Synthetic oligonucleotide
ggaccccgcagaccugcag

SEQ ID NO: 2146833 - RNA, 19 nt, Artificial Sequence
  Description of Artificial Sequence: Synthetic oligonucleotide
gcccaagcuacaagcugag

SEQ ID NO: 2146834 - RNA, 19 nt, Artificial Sequence
  Description of Artificial Sequence: Synthetic oligonucleotide
gcggaagaugggcccggag

SEQ ID NO: 2146835 - RNA, 19 nt, Artificial Sequence
  Description of Artificial Sequence: Synthetic oligonucleotide
cgguguuaggugugucagg

SEQ ID NO: 2146836 - RNA, 19 nt, Artificial Sequence
  Description of Artificial Sequence: Synthetic oligonucleotide
gcuguguaaggcccugaua

SEQ ID NO: 2146837 - RNA, 19 nt, Artificial Sequence
  Description of Artificial Sequence: Synthetic oligonucleotide
caaugaugugugccugagu

SEQ ID NO: 2146838 - RNA, 19 nt, Artificial Sequence
  Description of Artificial Sequence: Synthetic oligonucleotide
aggcggcccucugucccac

SEQ ID NO: 2146839 - RNA, 19 nt, Artificial Sequence
  Description of Artificial Sequence: Synthetic oligonucleotide
augggcccggagucuccga

SEQ ID NO: 2146840 - RNA, 19 nt, Artificial Sequence
  Description of Artificial Sequence: Synthetic oligonucleotide
ugauagcaucaggcagcuc

SEQ ID NO: 2146841 - RNA, 19 nt, Artificial Sequence
  Description of Artificial Sequence: Synthetic oligonucleotide
aggaagccuggcaguuuga

SEQ ID NO: 2146842 - RNA, 19 nt, Artificial Sequence
  Description of Artificial Sequence: Synthetic oligonucleotide
cugcguuaacucagacucu

SEQ ID NO: 2146843 - RNA, 19 nt, Artificial Sequence
  Description of Artificial Sequence: Synthetic oligonucleotide
ccugugucuucugacuuga

SEQ ID NO: 2146844 - RNA, 19 nt, Artificial Sequence
  Description of Artificial Sequence: Synthetic oligonucleotide
gaacucccuggcaucacuu

SEQ ID NO: 2146845 - RNA, 19 nt, Artificial Sequence
  Description of Artificial Sequence: Synthetic oligonucleotide
cccgguguuagguguguca

SEQ ID NO: 2146846 - RNA, 19 nt, Artificial Sequence
  Description of Artificial Sequence: Synthetic oligonucleotide
caccuguagccggggcagc

SEQ ID NO: 2146847 - RNA, 19 nt, Artificial Sequence
  Description of Artificial Sequence: Synthetic oligonucleotide
gccugcguuaacucagacu

SEQ ID NO: 2146848 - RNA, 19 nt, Artificial Sequence
  Description of Artificial Sequence: Synthetic oligonucleotide
gcaucggacacuguggguu

SEQ ID NO: 2146849 - RNA, 19 nt, Artificial Sequence
  Description of Artificial Sequence: Synthetic oligonucleotide
gaggagcugcccgacucgu

SEQ ID NO: 2146850 - RNA, 19 nt, Artificial Sequence
  Description of Artificial Sequence: Synthetic oligonucleotide
ggcagcagguuaaaucggu

SEQ ID NO: 2146851 - RNA, 19 nt, Artificial Sequence
  Description of Artificial Sequence: Synthetic oligonucleotide
gcuacaagcugaggaggaa

SEQ ID NO: 2146852 - RNA, 19 nt, Artificial Sequence
  Description of Artificial Sequence: Synthetic oligonucleotide
cugacuccaucaccaaguu

SEQ ID NO: 2146853 - RNA, 19 nt, Artificial Sequence
  Description of Artificial Sequence: Synthetic oligonucleotide
cccaagcuacaagcugagg

SEQ ID NO: 2146854 - RNA, 19 nt, Artificial Sequence
  Description of Artificial Sequence: Synthetic oligonucleotide
cacggaauccgaacuccuu

SEQ ID NO: 2146855 - RNA, 19 nt, Artificial Sequence
  Description of Artificial Sequence: Synthetic oligonucleotide
gcgucaccaggcaucggac

SEQ ID NO: 2146856 - RNA, 19 nt, Artificial Sequence
  Description of Artificial Sequence: Synthetic oligonucleotide
gcggaccccgcagaccugc

SEQ ID NO: 2146857 - RNA, 19 nt, Artificial Sequence
  Description of Artificial Sequence: Synthetic oligonucleotide
cgucugacacaagcaacac

SEQ ID NO: 2146858 - RNA, 19 nt, Artificial Sequence
  Description of Artificial Sequence: Synthetic oligonucleotide
cuucuuccguggccuggaa

SEQ ID NO: 2146859 - RNA, 19 nt, Artificial Sequence
  Description of Artificial Sequence: Synthetic oligonucleotide
cgcgucaccaggcaucgga

SEQ ID NO: 2146860 - RNA, 19 nt, Artificial Sequence
  Description of Artificial Sequence: Synthetic oligonucleotide
ccacucggaggugucgaug

SEQ ID NO: 2146861 - RNA, 19 nt, Artificial Sequence
  Description of Artificial Sequence: Synthetic oligonucleotide
ccugagugaagcaggguuu

SEQ ID NO: 2146862 - RNA, 19 nt, Artificial Sequence
  Description of Artificial Sequence: Synthetic oligonucleotide
ggcuguguaaggcccugau

SEQ ID NO: 2146863 - RNA, 19 nt, Artificial Sequence
  Description of Artificial Sequence: Synthetic oligonucleotide
ccgcagaccugcagcagca

SEQ ID NO: 2146864 - RNA, 19 nt, Artificial Sequence
  Description of Artificial Sequence: Synthetic oligonucleotide
cgcacgguccugagcaauc

SEQ ID NO: 2146865 - RNA, 19 nt, Artificial Sequence
  Description of Artificial Sequence: Synthetic oligonucleotide
gccugcacugggagaagca

SEQ ID NO: 2146866 - RNA, 19 nt, Artificial Sequence
  Description of Artificial Sequence: Synthetic oligonucleotide
ggaguaccuugaggagcug

SEQ ID NO: 2146867 - RNA, 19 nt, Artificial Sequence
  Description of Artificial Sequence: Synthetic oligonucleotide
ccucaugccugcguuaacu

SEQ ID NO: 2146868 - RNA, 19 nt, Artificial Sequence
  Description of Artificial Sequence: Synthetic oligonucleotide
gcgcggaagaugggcccgg

SEQ ID NO: 2146869 - RNA, 19 nt, Artificial Sequence
  Description of Artificial Sequence: Synthetic oligonucleotide
ggcaucggacacugugggu

SEQ ID NO: 2146870 - RNA, 19 nt, Artificial Sequence
  Description of Artificial Sequence: Synthetic oligonucleotide
ggccccgguguuaggugug

SEQ ID NO: 2146871 - RNA, 19 nt, Artificial Sequence
  Description of Artificial Sequence: Synthetic oligonucleotide
gcacauccgaauccugauu

SEQ ID NO: 2146872 - RNA, 19 nt, Artificial Sequence
  Description of Artificial Sequence: Synthetic oligonucleotide
ggcggcccucugucccacg

SEQ ID NO: 2146873 - RNA, 19 nt, Artificial Sequence
  Description of Artificial Sequence: Synthetic oligonucleotide
cacggccccgguguuaggu

SEQ ID NO: 2146874 - RNA, 19 nt, Artificial Sequence
  Description of Artificial Sequence: Synthetic oligonucleotide
cgucaccaggcaucggaca

SEQ ID NO: 2146875 - RNA, 19 nt, Artificial Sequence
  Description of Artificial Sequence: Synthetic oligonucleotide
cggaauccgaacuccuucu

SEQ ID NO: 2146876 - RNA, 19 nt, Artificial Sequence
  Description of Artificial Sequence: Synthetic oligonucleotide
cccuggcaucacuuuccuc

SEQ ID NO: 2146877 - RNA, 19 nt, Artificial Sequence
  Description of Artificial Sequence: Synthetic oligonucleotide
ccaugggcuccucaugccu

SEQ ID NO: 2146878 - RNA, 19 nt, Artificial Sequence
  Description of Artificial Sequence: Synthetic oligonucleotide
accaggcaucggacacugu

SEQ ID NO: 2146879 - RNA, 19 nt, Artificial Sequence
  Description of Artificial Sequence: Synthetic oligonucleotide
caacacggccccgguguua

SEQ ID NO: 2146880 - RNA, 19 nt, Artificial Sequence
  Description of Artificial Sequence: Synthetic oligonucleotide
caagguucuugggcucccu

SEQ ID NO: 2146881 - RNA, 19 nt, Artificial Sequence
  Description of Artificial Sequence: Synthetic oligonucleotide
ccgacucguggacuggaua

SEQ ID NO: 2146882 - RNA, 19 nt, Artificial Sequence
  Description of Artificial Sequence: Synthetic oligonucleotide
ccggagucuccgaguccug

SEQ ID NO: 2146883 - RNA, 19 nt, Artificial Sequence
  Description of Artificial Sequence: Synthetic oligonucleotide
ggcgcacgguccugagcaa

SEQ ID NO: 2146884 - RNA, 19 nt, Artificial Sequence
  Description of Artificial Sequence: Synthetic oligonucleotide
gcagagggugucucauauu

SEQ ID NO: 2146885 - RNA, 19 nt, Artificial Sequence
  Description of Artificial Sequence: Synthetic oligonucleotide
cccggagucuccgaguccu

SEQ ID NO: 2146886 - RNA, 19 nt, Artificial Sequence
  Description of Artificial Sequence: Synthetic oligonucleotide
gcacgguccugagcaaucu

SEQ ID NO: 2146887 - RNA, 19 nt, Artificial Sequence
  Description of Artificial Sequence: Synthetic oligonucleotide
ccgaugauccugguccucu

SEQ ID NO: 2146888 - RNA, 19 nt, Artificial Sequence
  Description of Artificial Sequence: Synthetic oligonucleotide
cccgaugauccugguccuc

SEQ ID NO: 2146889 - RNA, 19 nt, Artificial Sequence
  Description of Artificial Sequence: Synthetic oligonucleotide
ccccgcagaccugcagcag

SEQ ID NO: 2146890 - RNA, 19 nt, Artificial Sequence
  Description of Artificial Sequence: Synthetic oligonucleotide
gcccgacucguggacugga

SEQ ID NO: 2146891 - RNA, 19 nt, Artificial Sequence
  Description of Artificial Sequence: Synthetic oligonucleotide
caccaaguucagggcccaa

SEQ ID NO: 2146892 - RNA, 19 nt, Artificial Sequence
  Description of Artificial Sequence: Synthetic oligonucleotide
gcugcccgacucguggacu

SEQ ID NO: 2146893 - RNA, 19 nt, Artificial Sequence
  Description of Artificial Sequence: Synthetic oligonucleotide
ggguuccgucugacacaag

SEQ ID NO: 2146894 - RNA, 19 nt, Artificial Sequence
  Description of Artificial Sequence: Synthetic oligonucleotide
ccguggccuggaagcaaga

SEQ ID NO: 2146895 - RNA, 19 nt, Artificial Sequence
  Description of Artificial Sequence: Synthetic oligonucleotide
ggcucccuuggcucugguu

SEQ ID NO: 2146896 - RNA, 19 nt, Artificial Sequence
  Description of Artificial Sequence: Synthetic oligonucleotide
gcgcgucaccaggcaucgg

SEQ ID NO: 2146897 - RNA, 19 nt, Artificial Sequence
  Description of Artificial Sequence: Synthetic oligonucleotide
gcaacacggccccgguguu

SEQ ID NO: 2146898 - RNA, 19 nt, Artificial Sequence
  Description of Artificial Sequence: Synthetic oligonucleotide
ccccgaugauccugguccu

SEQ ID NO: 2146899 - RNA, 19 nt, Artificial Sequence
  Description of Artificial Sequence: Synthetic oligonucleotide
ccgauggcagcagguuaaa

SEQ ID NO: 2146900 - RNA, 19 nt, Artificial Sequence
  Description of Artificial Sequence: Synthetic oligonucleotide
ccccgguguuagguguguc

SEQ ID NO: 2146901 - RNA, 19 nt, Artificial Sequence
  Description of Artificial Sequence: Synthetic oligonucleotide
gcgcacgguccugagcaau

SEQ ID NO: 2146902 - RNA, 19 nt, Artificial Sequence
  Description of Artificial Sequence: Synthetic oligonucleotide
cccacucggaggugucgau

SEQ ID NO: 2146903 - RNA, 19 nt, Artificial Sequence
  Description of Artificial Sequence: Synthetic oligonucleotide
cagagacagcaagguucuu

SEQ ID NO: 2146904 - RNA, 19 nt, Artificial Sequence
  Description of Artificial Sequence: Synthetic oligonucleotide
cccgacucguggacuggau

SEQ ID NO: 2146905 - RNA, 19 nt, Artificial Sequence
  Description of Artificial Sequence: Synthetic oligonucleotide
gccccgguguuaggugugu

SEQ ID NO: 2146906 - RNA, 19 nt, Artificial Sequence
  Description of Artificial Sequence: Synthetic oligonucleotide
gcccucugucccacggaau

SEQ ID NO: 2146907 - RNA, 19 nt, Artificial Sequence
  Description of Artificial Sequence: Synthetic oligonucleotide
cggccccgguguuaggugu

SEQ ID NO: 2146908 - RNA, 19 nt, Artificial Sequence
  Description of Artificial Sequence: Synthetic oligonucleotide
cggcccucugucccacgga

SEQ ID NO: 2146909 - RNA, 19 nt, Artificial Sequence
  Description of Artificial Sequence: Synthetic oligonucleotide
cggaccccgcagaccugca

SEQ ID NO: 2146910 - RNA, 19 nt, Artificial Sequence
  Description of Artificial Sequence: Synthetic oligonucleotide
cgcggaagaugggcccgga

SEQ ID NO: 2146911 - RNA, 19 nt, Artificial Sequence
  Description of Artificial Sequence: Synthetic oligonucleotide
cgauggcagcagguuaaau

SEQ ID NO: 2146912 - RNA, 19 nt, Artificial Sequence
  Description of Artificial Sequence: Synthetic oligonucleotide
ccgaguccuggaguaccuu

SEQ ID NO: 2146913 - RNA, 19 nt, Artificial Sequence
  Description of Artificial Sequence: Synthetic oligonucleotide
agaucuuuaaccuugaagg

SEQ ID NO: 2146914 - RNA, 19 nt, Artificial Sequence
  Description of Artificial Sequence: Synthetic oligonucleotide
uaugcugucaacauaaaag

SEQ ID NO: 2146915 - RNA, 19 nt, Artificial Sequence
  Description of Artificial Sequence: Synthetic oligonucleotide
agacacuagaucuuuaacc

SEQ ID NO: 2146916 - RNA, 19 nt, Artificial Sequence
  Description of Artificial Sequence: Synthetic oligonucleotide
aucgcaaucgaacagcagc

SEQ ID NO: 2146917 - RNA, 19 nt, Artificial Sequence
  Description of Artificial Sequence: Synthetic oligonucleotide
gauaccauacuccugggag

SEQ ID NO: 2146918 - RNA, 19 nt, Artificial Sequence
  Description of Artificial Sequence: Synthetic oligonucleotide
cugauuaaucuucacaucc

SEQ ID NO: 2146919 - RNA, 19 nt, Artificial Sequence
  Description of Artificial Sequence: Synthetic oligonucleotide
gaugauauccgccuggcgc

SEQ ID NO: 2146920 - RNA, 19 nt, Artificial Sequence
  Description of Artificial Sequence: Synthetic oligonucleotide
aagacacuagaucuuuaac

SEQ ID NO: 2146921 - RNA, 19 nt, Artificial Sequence
  Description of Artificial Sequence: Synthetic oligonucleotide
gaucuuuaaccuugaaggg

SEQ ID NO: 2146922 - RNA, 19 nt, Artificial Sequence
  Description of Artificial Sequence: Synthetic oligonucleotide
uguacaugcagucacuuuc

SEQ ID NO: 2146923 - RNA, 19 nt, Artificial Sequence
  Description of Artificial Sequence: Synthetic oligonucleotide
aucuuuaaccuugaagggc

SEQ ID NO: 2146924 - RNA, 19 nt, Artificial Sequence
  Description of Artificial Sequence: Synthetic oligonucleotide
ugaagugugggucgaagcc

SEQ ID NO: 2146925 - RNA, 19 nt, Artificial Sequence
  Description of Artificial Sequence: Synthetic oligonucleotide
uagucuucaggcuacaggu

SEQ ID NO: 2146926 - RNA, 19 nt, Artificial Sequence
  Description of Artificial Sequence: Synthetic oligonucleotide
ucgaagaugaagcggcuag

SEQ ID NO: 2146927 - RNA, 19 nt, Artificial Sequence
  Description of Artificial Sequence: Synthetic oligonucleotide
ucgcaaucgaacagcagcg

SEQ ID NO: 2146928 - RNA, 19 nt, Artificial Sequence
  Description of Artificial Sequence: Synthetic oligonucleotide
ucgaagcccaccacgaccg

SEQ ID NO: 2146929 - RNA, 19 nt, Artificial Sequence
  Description of Artificial Sequence: Synthetic oligonucleotide
aaacccaagcgccuuagcu

SEQ ID NO: 2146930 - RNA, 19 nt, Artificial Sequence
  Description of Artificial Sequence: Synthetic oligonucleotide
caaaaggucggcuaugcug

SEQ ID NO: 2146931 - RNA, 19 nt, Artificial Sequence
  Description of Artificial Sequence: Synthetic oligonucleotide
accgccgaaacccaagcgc

SEQ ID NO: 2146932 - RNA, 19 nt, Artificial Sequence
  Description of Artificial Sequence: Synthetic oligonucleotide
aaaaggucggcuaugcugu

SEQ ID NO: 2146933 - RNA, 19 nt, Artificial Sequence
  Description of Artificial Sequence: Synthetic oligonucleotide
ugauuaaucuucacauccu

SEQ ID NO: 2146934 - RNA, 19 nt, Artificial Sequence
  Description of Artificial Sequence: Synthetic oligonucleotide
aagcccagucgcuugccgc

SEQ ID NO: 2146935 - RNA, 19 nt, Artificial Sequence
  Description of Artificial Sequence: Synthetic oligonucleotide
guagcugaagugugggucg

SEQ ID NO: 2146936 - RNA, 19 nt, Artificial Sequence
  Description of Artificial Sequence: Synthetic oligonucleotide
cacaccaucgcaaucgaac

SEQ ID NO: 2146937 - RNA, 19 nt, Artificial Sequence
  Description of Artificial Sequence: Synthetic oligonucleotide
aaucgaacagcagcguguc

SEQ ID NO: 2146938 - RNA, 19 nt, Artificial Sequence
  Description of Artificial Sequence: Synthetic oligonucleotide
gacacuagaucuuuaaccu

SEQ ID NO: 2146939 - RNA, 19 nt, Artificial Sequence
  Description of Artificial Sequence: Synthetic oligonucleotide
gauuaaucuucacauccuc

SEQ ID NO: 2146940 - RNA, 19 nt, Artificial Sequence
  Description of Artificial Sequence: Synthetic oligonucleotide
accaucgcaaucgaacagc

SEQ ID NO: 2146941 - RNA, 19 nt, Artificial Sequence
  Description of Artificial Sequence: Synthetic oligonucleotide
agcgccuuagcuucuccgc

SEQ ID NO: 2146942 - RNA, 19 nt, Artificial Sequence
  Description of Artificial Sequence: Synthetic oligonucleotide
cagagauuaaagacacuag

SEQ ID NO: 2146943 - RNA, 19 nt, Artificial Sequence
  Description of Artificial Sequence: Synthetic oligonucleotide
gugccgaagaccucgaggc

SEQ ID NO: 2146944 - RNA, 19 nt, Artificial Sequence
  Description of Artificial Sequence: Synthetic oligonucleotide
cuugcaacgccuccgggcc

SEQ ID NO: 2146945 - RNA, 19 nt, Artificial Sequence
  Description of Artificial Sequence: Synthetic oligonucleotide
cauucagccgcacgcagcg

SEQ ID NO: 2146946 - RNA, 19 nt, Artificial Sequence
  Description of Artificial Sequence: Synthetic oligonucleotide
uaggccgugccgaagaccu

SEQ ID NO: 2146947 - RNA, 19 nt, Artificial Sequence
  Description of Artificial Sequence: Synthetic oligonucleotide
aaacggccguucucuagcg

SEQ ID NO: 2146948 - RNA, 19 nt, Artificial Sequence
  Description of Artificial Sequence: Synthetic oligonucleotide
acagccgucucaccgcgcc

SEQ ID NO: 2146949 - RNA, 19 nt, Artificial Sequence
  Description of Artificial Sequence: Synthetic oligonucleotide
aagcgccuuagcuucuccg

SEQ ID NO: 2146950 - RNA, 19 nt, Artificial Sequence
  Description of Artificial Sequence: Synthetic oligonucleotide
uuagcuucuccgcguaggc

SEQ ID NO: 2146951 - RNA, 19 nt, Artificial Sequence
  Description of Artificial Sequence: Synthetic oligonucleotide
gacgcagucgaagaugaag

SEQ ID NO: 2146952 - RNA, 19 nt, Artificial Sequence
  Description of Artificial Sequence: Synthetic oligonucleotide
uaccgcacggccuugguga

SEQ ID NO: 2146953 - RNA, 19 nt, Artificial Sequence
  Description of Artificial Sequence: Synthetic oligonucleotide
uguagcugaaguguggguc

SEQ ID NO: 2146954 - RNA, 19 nt, Artificial Sequence
  Description of Artificial Sequence: Synthetic oligonucleotide
cuugggguccggcacaccg

SEQ ID NO: 2146955 - RNA, 19 nt, Artificial Sequence
  Description of Artificial Sequence: Synthetic oligonucleotide
accacgaccgcgcgcacgc

SEQ ID NO: 2146956 - RNA, 19 nt, Artificial Sequence
  Description of Artificial Sequence: Synthetic oligonucleotide
agucgcucgggccuucgcc

SEQ ID NO: 2146957 - RNA, 19 nt, Artificial Sequence
  Description of Artificial Sequence: Synthetic oligonucleotide
gaugaagcccagucgcuug

SEQ ID NO: 2146958 - RNA, 19 nt, Artificial Sequence
  Description of Artificial Sequence: Synthetic oligonucleotide
ucgaacagcagcgugucca

SEQ ID NO: 2146959 - RNA, 19 nt, Artificial Sequence
  Description of Artificial Sequence: Synthetic oligonucleotide
augauauccgccuggcgcu

SEQ ID NO: 2146960 - RNA, 19 nt, Artificial Sequence
  Description of Artificial Sequence: Synthetic oligonucleotide
agauagagcgcgcugcagu

SEQ ID NO: 2146961 - RNA, 19 nt, Artificial Sequence
  Description of Artificial Sequence: Synthetic oligonucleotide
uuuaaccuugaagggcggg

SEQ ID NO: 2146962 - RNA, 19 nt, Artificial Sequence
  Description of Artificial Sequence: Synthetic oligonucleotide
ugaaacggccguucucuag

SEQ ID NO: 2146963 - RNA, 19 nt, Artificial Sequence
  Description of Artificial Sequence: Synthetic oligonucleotide
acauaaaagucagggacca

SEQ ID NO: 2146964 - RNA, 19 nt, Artificial Sequence
  Description of Artificial Sequence: Synthetic oligonucleotide
aacccaagcgccuuagcuu

SEQ ID NO: 2146965 - RNA, 19 nt, Artificial Sequence
  Description of Artificial Sequence: Synthetic oligonucleotide
uucccgaugauauccgccu

SEQ ID NO: 2146966 - RNA, 19 nt, Artificial Sequence
  Description of Artificial Sequence: Synthetic oligonucleotide
ucuuguacaugcagucacu

SEQ ID NO: 2146967 - RNA, 19 nt, Artificial Sequence
  Description of Artificial Sequence: Synthetic oligonucleotide
acggccguucucuagcggg

SEQ ID NO: 2146968 - RNA, 19 nt, Artificial Sequence
  Description of Artificial Sequence: Synthetic oligonucleotide
cugaagugugggucgaagc

SEQ ID NO: 2146969 - RNA, 19 nt, Artificial Sequence
  Description of Artificial Sequence: Synthetic oligonucleotide
acaccaucgcaaucgaaca

SEQ ID NO: 2146970 - RNA, 19 nt, Artificial Sequence
  Description of Artificial Sequence: Synthetic oligonucleotide
ucuucaggcuacagguggc

SEQ ID NO: 2146971 - RNA, 19 nt, Artificial Sequence
  Description of Artificial Sequence: Synthetic oligonucleotide
uccugggagacgcagucga

SEQ ID NO: 2146972 - RNA, 19 nt, Artificial Sequence
  Description of Artificial Sequence: Synthetic oligonucleotide
ugauaccauacuccuggga

SEQ ID NO: 2146973 - RNA, 19 nt, Artificial Sequence
  Description of Artificial Sequence: Synthetic oligonucleotide
aagcccaccacgaccgcgc

SEQ ID NO: 2146974 - RNA, 19 nt, Artificial Sequence
  Description of Artificial Sequence: Synthetic oligonucleotide
ucaggcuacagguggcgcc

SEQ ID NO: 2146975 - RNA, 19 nt, Artificial Sequence
  Description of Artificial Sequence: Synthetic oligonucleotide
cuucccgaugauauccgcc

SEQ ID NO: 2146976 - RNA, 19 nt, Artificial Sequence
  Description of Artificial Sequence: Synthetic oligonucleotide
auaaaagucagggaccauu

SEQ ID NO: 2146977 - RNA, 19 nt, Artificial Sequence
  Description of Artificial Sequence: Synthetic oligonucleotide
auaccauacuccugggaga

SEQ ID NO: 2146978 - RNA, 19 nt, Artificial Sequence
  Description of Artificial Sequence: Synthetic oligonucleotide
ucuagcgggagccgguugu

SEQ ID NO: 2146979 - RNA, 19 nt, Artificial Sequence
  Description of Artificial Sequence: Synthetic oligonucleotide
gguacccgcaaugaaacgg

SEQ ID NO: 2146980 - RNA, 19 nt, Artificial Sequence
  Description of Artificial Sequence: Synthetic oligonucleotide
aacggugcgcuccggguug

SEQ ID NO: 2146981 - RNA, 19 nt, Artificial Sequence
  Description of Artificial Sequence: Synthetic oligonucleotide
uccggugagggucaggaua

SEQ ID NO: 2146982 - RNA, 19 nt, Artificial Sequence
  Description of Artificial Sequence: Synthetic oligonucleotide
accauaacggugcgcuccg

SEQ ID NO: 2146983 - RNA, 19 nt, Artificial Sequence
  Description of Artificial Sequence: Synthetic oligonucleotide
ugggagacgcagucgaaga

SEQ ID NO: 2146984 - RNA, 19 nt, Artificial Sequence
  Description of Artificial Sequence: Synthetic oligonucleotide
caugaccgaccgcugaccg

SEQ ID NO: 2146985 - RNA, 19 nt, Artificial Sequence
  Description of Artificial Sequence: Synthetic oligonucleotide
aaaggucggcuaugcuguc

SEQ ID NO: 2146986 - RNA, 19 nt, Artificial Sequence
  Description of Artificial Sequence: Synthetic oligonucleotide
cauaacggugcgcuccggg

SEQ ID NO: 2146987 - RNA, 19 nt, Artificial Sequence
  Description of Artificial Sequence: Synthetic oligonucleotide
gucgaagcccaccacgacc

SEQ ID NO: 2146988 - RNA, 19 nt, Artificial Sequence
  Description of Artificial Sequence: Synthetic oligonucleotide
aagaccucgaggcccgcgu

SEQ ID NO: 2146989 - RNA, 19 nt, Artificial Sequence
  Description of Artificial Sequence: Synthetic oligonucleotide
cacacuggcgacacccacg

SEQ ID NO: 2146990 - RNA, 19 nt, Artificial Sequence
  Description of Artificial Sequence: Synthetic oligonucleotide
guggagacuccggugaggg

SEQ ID NO: 2146991 - RNA, 19 nt, Artificial Sequence
  Description of Artificial Sequence: Synthetic oligonucleotide
agucgcuugccgcgggccc

SEQ ID NO: 2146992 - RNA, 19 nt, Artificial Sequence
  Description of Artificial Sequence: Synthetic oligonucleotide
acagcacaccaucgcaauc

SEQ ID NO: 2146993 - RNA, 19 nt, Artificial Sequence
  Description of Artificial Sequence: Synthetic oligonucleotide
aacggccguucucuagcgg

SEQ ID NO: 2146994 - RNA, 19 nt, Artificial Sequence
  Description of Artificial Sequence: Synthetic oligonucleotide
augaccgaccgcugaccgc

SEQ ID NO: 2146995 - RNA, 19 nt, Artificial Sequence
  Description of Artificial Sequence: Synthetic oligonucleotide
auaacggugcgcuccgggu

SEQ ID NO: 2146996 - RNA, 19 nt, Artificial Sequence
  Description of Artificial Sequence: Synthetic oligonucleotide
agcgcgcugcaguaggccg

SEQ ID NO: 2146997 - RNA, 19 nt, Artificial Sequence
  Description of Artificial Sequence: Synthetic oligonucleotide
agcccagucgcuugccgcg

SEQ ID NO: 2146998 - RNA, 19 nt, Artificial Sequence
  Description of Artificial Sequence: Synthetic oligonucleotide
acagccgguacccgcaaug

SEQ ID NO: 2146999 - RNA, 19 nt, Artificial Sequence
  Description of Artificial Sequence: Synthetic oligonucleotide
uaccauacuccugggagac

SEQ ID NO: 2147000 - RNA, 19 nt, Artificial Sequence
  Description of Artificial Sequence: Synthetic oligonucleotide
cauccucaagaguggagac

SEQ ID NO: 2147001 - RNA, 19 nt, Artificial Sequence
  Description of Artificial Sequence: Synthetic oligonucleotide
aucgaacagcagcgugucc

SEQ ID NO: 2147002 - RNA, 19 nt, Artificial Sequence
  Description of Artificial Sequence: Synthetic oligonucleotide
guacaugcagucacuuucc

SEQ ID NO: 2147003 - RNA, 19 nt, Artificial Sequence
  Description of Artificial Sequence: Synthetic oligonucleotide
caccauaacggugcgcucc

SEQ ID NO: 2147004 - RNA, 19 nt, Artificial Sequence
  Description of Artificial Sequence: Synthetic oligonucleotide
acgcagcggacuucgucgc

SEQ ID NO: 2147005 - RNA, 19 nt, Artificial Sequence
  Description of Artificial Sequence: Synthetic oligonucleotide
gcggucucccaccauaacg

SEQ ID NO: 2147006 - RNA, 19 nt, Artificial Sequence
  Description of Artificial Sequence: Synthetic oligonucleotide
gaccgccgaaacccaagcg

SEQ ID NO: 2147007 - RNA, 19 nt, Artificial Sequence
  Description of Artificial Sequence: Synthetic oligonucleotide
uccgcguaggccgugcgag

SEQ ID NO: 2147008 - RNA, 19 nt, Artificial Sequence
  Description of Artificial Sequence: Synthetic oligonucleotide
ugaccgaccgcugaccgcu

SEQ ID NO: 2147009 - RNA, 19 nt, Artificial Sequence
  Description of Artificial Sequence: Synthetic oligonucleotide
gugcgcuccggguugauac

SEQ ID NO: 2147010 - RNA, 19 nt, Artificial Sequence
  Description of Artificial Sequence: Synthetic oligonucleotide
gagacgcagucgaagauga

SEQ ID NO: 2147011 - RNA, 19 nt, Artificial Sequence
  Description of Artificial Sequence: Synthetic oligonucleotide
cuggcgcagauagagcgcg

SEQ ID NO: 2147012 - RNA, 19 nt, Artificial Sequence
  Description of Artificial Sequence: Synthetic oligonucleotide
gaccucgaggcccgcgucg

SEQ ID NO: 2147013 - RNA, 19 nt, Artificial Sequence
  Description of Artificial Sequence: Synthetic oligonucleotide
gaaacccaagcgccuuagc

SEQ ID NO: 2147014 - RNA, 19 nt, Artificial Sequence
  Description of Artificial Sequence: Synthetic oligonucleotide
cacaucggccagcagcacc

SEQ ID NO: 2147015 - RNA, 19 nt, Artificial Sequence
  Description of Artificial Sequence: Synthetic oligonucleotide
acuccgccaugaccgaccg

SEQ ID NO: 2147016 - RNA, 19 nt, Artificial Sequence
  Description of Artificial Sequence: Synthetic oligonucleotide
guacccgcaaugaaacggc

SEQ ID NO: 2147017 - RNA, 19 nt, Artificial Sequence
  Description of Artificial Sequence: Synthetic oligonucleotide
gauagagcgcgcugcagua

SEQ ID NO: 2147018 - RNA, 19 nt, Artificial Sequence
  Description of Artificial Sequence: Synthetic oligonucleotide
ugggguccggcacaccggc

SEQ ID NO: 2147019 - RNA, 19 nt, Artificial Sequence
  Description of Artificial Sequence: Synthetic oligonucleotide
uacccgcaaugaaacggcc

SEQ ID NO: 2147020 - RNA, 19 nt, Artificial Sequence
  Description of Artificial Sequence: Synthetic oligonucleotide
caccaucgcaaucgaacag

SEQ ID NO: 2147021 - RNA, 19 nt, Artificial Sequence
  Description of Artificial Sequence: Synthetic oligonucleotide
ucgccuugcaacgccuccg

SEQ ID NO: 2147022 - RNA, 19 nt, Artificial Sequence
  Description of Artificial Sequence: Synthetic oligonucleotide
cuucaggcuacagguggcg

SEQ ID NO: 2147023 - RNA, 19 nt, Artificial Sequence
  Description of Artificial Sequence: Synthetic oligonucleotide
uuguacaugcagucacuuu

SEQ ID NO: 2147024 - RNA, 19 nt, Artificial Sequence
  Description of Artificial Sequence: Synthetic oligonucleotide
guucucuagcgggagccgg

SEQ ID NO: 2147025 - RNA, 19 nt, Artificial Sequence
  Description of Artificial Sequence: Synthetic oligonucleotide
cuaugcugucaacauaaaa

SEQ ID NO: 2147026 - RNA, 19 nt, Artificial Sequence
  Description of Artificial Sequence: Synthetic oligonucleotide
caucgcaaucgaacagcag

SEQ ID NO: 2147027 - RNA, 19 nt, Artificial Sequence
  Description of Artificial Sequence: Synthetic oligonucleotide
cccacgagcaggcagucgg

SEQ ID NO: 2147028 - RNA, 19 nt, Artificial Sequence
  Description of Artificial Sequence: Synthetic oligonucleotide
ucccgaugauauccgccug

SEQ ID NO: 2147029 - RNA, 19 nt, Artificial Sequence
  Description of Artificial Sequence: Synthetic oligonucleotide
gcaaucgaacagcagcgug

SEQ ID NO: 2147030 - RNA, 19 nt, Artificial Sequence
  Description of Artificial Sequence: Synthetic oligonucleotide
gggccuucgccuugcaacg

SEQ ID NO: 2147031 - RNA, 19 nt, Artificial Sequence
  Description of Artificial Sequence: Synthetic oligonucleotide
cugggagacgcagucgaag

SEQ ID NO: 2147032 - RNA, 19 nt, Artificial Sequence
  Description of Artificial Sequence: Synthetic oligonucleotide
uaacggugcgcuccggguu

SEQ ID NO: 2147033 - RNA, 19 nt, Artificial Sequence
  Description of Artificial Sequence: Synthetic oligonucleotide
uucaggcuacagguggcgc

SEQ ID NO: 2147034 - RNA, 19 nt, Artificial Sequence
  Description of Artificial Sequence: Synthetic oligonucleotide
caggauagucuucaggcua

SEQ ID NO: 2147035 - RNA, 19 nt, Artificial Sequence
  Description of Artificial Sequence: Synthetic oligonucleotide
gaagaccucgaggcccgcg

SEQ ID NO: 2147036 - RNA, 19 nt, Artificial Sequence
  Description of Artificial Sequence: Synthetic oligonucleotide
ugaugaagcccagucgcuu

SEQ ID NO: 2147037 - RNA, 19 nt, Artificial Sequence
  Description of Artificial Sequence: Synthetic oligonucleotide
gauauccgccuggcgcugg

SEQ ID NO: 2147038 - RNA, 19 nt, Artificial Sequence
  Description of Artificial Sequence: Synthetic oligonucleotide
uaggccgugcgagucuugc

SEQ ID NO: 2147039 - RNA, 19 nt, Artificial Sequence
  Description of Artificial Sequence: Synthetic oligonucleotide
ggugaguuucauguagcug

SEQ ID NO: 2147040 - RNA, 19 nt, Artificial Sequence
  Description of Artificial Sequence: Synthetic oligonucleotide
accgaccgcugaccgcugc

SEQ ID NO: 2147041 - RNA, 19 nt, Artificial Sequence
  Description of Artificial Sequence: Synthetic oligonucleotide
cuugaagggcgggcaaaag

SEQ ID NO: 2147042 - RNA, 19 nt, Artificial Sequence
  Description of Artificial Sequence: Synthetic oligonucleotide
ugcgcuccggguugauacc

SEQ ID NO: 2147043 - RNA, 19 nt, Artificial Sequence
  Description of Artificial Sequence: Synthetic oligonucleotide
ccuugcaacgccuccgggc

SEQ ID NO: 2147044 - RNA, 19 nt, Artificial Sequence
  Description of Artificial Sequence: Synthetic oligonucleotide
gucggcuaugcugucaaca

SEQ ID NO: 2147045 - RNA, 19 nt, Artificial Sequence
  Description of Artificial Sequence: Synthetic oligonucleotide
acccgcaaugaaacggccg

SEQ ID NO: 2147046 - RNA, 19 nt, Artificial Sequence
  Description of Artificial Sequence: Synthetic oligonucleotide
auagagcgcgcugcaguag

SEQ ID NO: 2147047 - RNA, 19 nt, Artificial Sequence
  Description of Artificial Sequence: Synthetic oligonucleotide
ggagacgcagucgaagaug

SEQ ID NO: 2147048 - RNA, 19 nt, Artificial Sequence
  Description of Artificial Sequence: Synthetic oligonucleotide
guccauguuggugcccacg

SEQ ID NO: 2147049 - RNA, 19 nt, Artificial Sequence
  Description of Artificial Sequence: Synthetic oligonucleotide
ggcaaaaggucggcuaugc

SEQ ID NO: 2147050 - RNA, 19 nt, Artificial Sequence
  Description of Artificial Sequence: Synthetic oligonucleotide
aaggucggcuaugcuguca

SEQ ID NO: 2147051 - RNA, 19 nt, Artificial Sequence
  Description of Artificial Sequence: Synthetic oligonucleotide
agcgggagccgguugucca

SEQ ID NO: 2147052 - RNA, 19 nt, Artificial Sequence
  Description of Artificial Sequence: Synthetic oligonucleotide
gucucaccgcgccacagca

SEQ ID NO: 2147053 - RNA, 19 nt, Artificial Sequence
  Description of Artificial Sequence: Synthetic oligonucleotide
agcggacuucgucgccgcc

SEQ ID NO: 2147054 - RNA, 19 nt, Artificial Sequence
  Description of Artificial Sequence: Synthetic oligonucleotide
ccgguacccgcaaugaaac

SEQ ID NO: 2147055 - RNA, 19 nt, Artificial Sequence
  Description of Artificial Sequence: Synthetic oligonucleotide
guaccgcacggccuuggug

SEQ ID NO: 2147056 - RNA, 19 nt, Artificial Sequence
  Description of Artificial Sequence: Synthetic oligonucleotide
ugcaguaggccgugccgaa

SEQ ID NO: 2147057 - RNA, 19 nt, Artificial Sequence
  Description of Artificial Sequence: Synthetic oligonucleotide
acggcucgcaccagacagc

SEQ ID NO: 2147058 - RNA, 19 nt, Artificial Sequence
  Description of Artificial Sequence: Synthetic oligonucleotide
cacgaccgcgcgcacgccg

SEQ ID NO: 2147059 - RNA, 19 nt, Artificial Sequence
  Description of Artificial Sequence: Synthetic oligonucleotide
gcccguagagucuccggcg

SEQ ID NO: 2147060 - RNA, 19 nt, Artificial Sequence
  Description of Artificial Sequence: Synthetic oligonucleotide
uugcaacgccuccgggccc

SEQ ID NO: 2147061 - RNA, 19 nt, Artificial Sequence
  Description of Artificial Sequence: Synthetic oligonucleotide
ggccgugcgagucuugcug

SEQ ID NO: 2147062 - RNA, 19 nt, Artificial Sequence
  Description of Artificial Sequence: Synthetic oligonucleotide
ugauauccgccuggcgcug

SEQ ID NO: 2147063 - RNA, 19 nt, Artificial Sequence
  Description of Artificial Sequence: Synthetic oligonucleotide
cuaaggccgggcugcccag

SEQ ID NO: 2147064 - RNA, 19 nt, Artificial Sequence
  Description of Artificial Sequence: Synthetic oligonucleotide
gcgccuuagcuucuccgcg

SEQ ID NO: 2147065 - RNA, 19 nt, Artificial Sequence
  Description of Artificial Sequence: Synthetic oligonucleotide
ccgccgaaacccaagcgcc

SEQ ID NO: 2147066 - RNA, 19 nt, Artificial Sequence
  Description of Artificial Sequence: Synthetic oligonucleotide
agcggcuaggcuucccgau

SEQ ID NO: 2147067 - RNA, 19 nt, Artificial Sequence
  Description of Artificial Sequence: Synthetic oligonucleotide
augaagcggcuaggcuucc

SEQ ID NO: 2147068 - RNA, 19 nt, Artificial Sequence
  Description of Artificial Sequence: Synthetic oligonucleotide
cccgaugauauccgccugg

SEQ ID NO: 2147069 - RNA, 19 nt, Artificial Sequence
  Description of Artificial Sequence: Synthetic oligonucleotide
gagucuccggcgcgcccgg

SEQ ID NO: 2147070 - RNA, 19 nt, Artificial Sequence
  Description of Artificial Sequence: Synthetic oligonucleotide
caagaguggagacuccggu

SEQ ID NO: 2147071 - RNA, 19 nt, Artificial Sequence
  Description of Artificial Sequence: Synthetic oligonucleotide
gagacuccggugaggguca

SEQ ID NO: 2147072 - RNA, 19 nt, Artificial Sequence
  Description of Artificial Sequence: Synthetic oligonucleotide
gcugaagugugggucgaag

SEQ ID NO: 2147073 - RNA, 19 nt, Artificial Sequence
  Description of Artificial Sequence: Synthetic oligonucleotide
accucgaggcccgcgucgg

SEQ ID NO: 2147074 - RNA, 19 nt, Artificial Sequence
  Description of Artificial Sequence: Synthetic oligonucleotide
cacgccggguucgagcggc

SEQ ID NO: 2147075 - RNA, 19 nt, Artificial Sequence
  Description of Artificial Sequence: Synthetic oligonucleotide
ggaccgccgaaacccaagc

SEQ ID NO: 2147076 - RNA, 19 nt, Artificial Sequence
  Description of Artificial Sequence: Synthetic oligonucleotide
ccggguugauaccauacuc

SEQ ID NO: 2147077 - RNA, 19 nt, Artificial Sequence
  Description of Artificial Sequence: Synthetic oligonucleotide
gagcgcgcugcaguaggcc

SEQ ID NO: 2147078 - RNA, 19 nt, Artificial Sequence
  Description of Artificial Sequence: Synthetic oligonucleotide
gcuaaggccgggcugccca

SEQ ID NO: 2147079 - RNA, 19 nt, Artificial Sequence
  Description of Artificial Sequence: Synthetic oligonucleotide
augaaacggccguucucua

SEQ ID NO: 2147080 - RNA, 19 nt, Artificial Sequence
  Description of Artificial Sequence: Synthetic oligonucleotide
guagagucuccggcgcgcc

SEQ ID NO: 2147081 - RNA, 19 nt, Artificial Sequence
  Description of Artificial Sequence: Synthetic oligonucleotide
uggcgcagauagagcgcgc

SEQ ID NO: 2147082 - RNA, 19 nt, Artificial Sequence
  Description of Artificial Sequence: Synthetic oligonucleotide
agucgaagaugaagcggcu

SEQ ID NO: 2147083 - RNA, 19 nt, Artificial Sequence
  Description of Artificial Sequence: Synthetic oligonucleotide
ucaccgcgccacagcacac

SEQ ID NO: 2147084 - RNA, 19 nt, Artificial Sequence
  Description of Artificial Sequence: Synthetic oligonucleotide
ggcuucccgaugauauccg

SEQ ID NO: 2147085 - RNA, 19 nt, Artificial Sequence
  Description of Artificial Sequence: Synthetic oligonucleotide
gucgcuugccgcgggcccg

SEQ ID NO: 2147086 - RNA, 19 nt, Artificial Sequence
  Description of Artificial Sequence: Synthetic oligonucleotide
agcgcccguagagucuccg

SEQ ID NO: 2147087 - RNA, 19 nt, Artificial Sequence
  Description of Artificial Sequence: Synthetic oligonucleotide
cagcggacuucgucgccgc

SEQ ID NO: 2147088 - RNA, 19 nt, Artificial Sequence
  Description of Artificial Sequence: Synthetic oligonucleotide
gcagcggacuucgucgccg

SEQ ID NO: 2147089 - RNA, 19 nt, Artificial Sequence
  Description of Artificial Sequence: Synthetic oligonucleotide
auucagccgcacgcagcgg

SEQ ID NO: 2147090 - RNA, 19 nt, Artificial Sequence
  Description of Artificial Sequence: Synthetic oligonucleotide
cucuagcgggagccgguug

SEQ ID NO: 2147091 - RNA, 19 nt, Artificial Sequence
  Description of Artificial Sequence: Synthetic oligonucleotide
gccgugcgagucuugcugc

SEQ ID NO: 2147092 - RNA, 19 nt, Artificial Sequence
  Description of Artificial Sequence: Synthetic oligonucleotide
agguaccgcacggccuugg

SEQ ID NO: 2147093 - RNA, 19 nt, Artificial Sequence
  Description of Artificial Sequence: Synthetic oligonucleotide
agccgguacccgcaaugaa

SEQ ID NO: 2147094 - RNA, 19 nt, Artificial Sequence
  Description of Artificial Sequence: Synthetic oligonucleotide
gugugggucgaagcccacc

SEQ ID NO: 2147095 - RNA, 19 nt, Artificial Sequence
  Description of Artificial Sequence: Synthetic oligonucleotide
uucgagcggcaccgccagc

SEQ ID NO: 2147096 - RNA, 19 nt, Artificial Sequence
  Description of Artificial Sequence: Synthetic oligonucleotide
ucgggccuucgccuugcaa

SEQ ID NO: 2147097 - RNA, 19 nt, Artificial Sequence
  Description of Artificial Sequence: Synthetic oligonucleotide
acgaccgcgcgcacgccgg

SEQ ID NO: 2147098 - RNA, 19 nt, Artificial Sequence
  Description of Artificial Sequence: Synthetic oligonucleotide
ccguucucuagcgggagcc

SEQ ID NO: 2147099 - RNA, 19 nt, Artificial Sequence
  Description of Artificial Sequence: Synthetic oligonucleotide
gccgcuaaggccgggcugc

SEQ ID NO: 2147100 - RNA, 19 nt, Artificial Sequence
  Description of Artificial Sequence: Synthetic oligonucleotide
gugggucgaagcccaccac

SEQ ID NO: 2147101 - RNA, 19 nt, Artificial Sequence
  Description of Artificial Sequence: Synthetic oligonucleotide
ucggccgcuaaggccgggc

SEQ ID NO: 2147102 - RNA, 19 nt, Artificial Sequence
  Description of Artificial Sequence: Synthetic oligonucleotide
cacaccggccaggcgcugg

SEQ ID NO: 2147103 - RNA, 19 nt, Artificial Sequence
  Description of Artificial Sequence: Synthetic oligonucleotide
gccaugaccgaccgcugac

SEQ ID NO: 2147104 - RNA, 19 nt, Artificial Sequence
  Description of Artificial Sequence: Synthetic oligonucleotide
cccguagagucuccggcgc

SEQ ID NO: 2147105 - RNA, 19 nt, Artificial Sequence
  Description of Artificial Sequence: Synthetic oligonucleotide
gcggacuucgucgccgccg

SEQ ID NO: 2147106 - RNA, 19 nt, Artificial Sequence
  Description of Artificial Sequence: Synthetic oligonucleotide
ugcgagucuugcugcuguu

SEQ ID NO: 2147107 - RNA, 19 nt, Artificial Sequence
  Description of Artificial Sequence: Synthetic oligonucleotide
cgcacgccggguucgagcg

SEQ ID NO: 2147108 - RNA, 19 nt, Artificial Sequence
  Description of Artificial Sequence: Synthetic oligonucleotide
aggccgugcgagucuugcu

SEQ ID NO: 2147109 - RNA, 19 nt, Artificial Sequence
  Description of Artificial Sequence: Synthetic oligonucleotide
ccggguucgagcggcaccg

SEQ ID NO: 2147110 - RNA, 19 nt, Artificial Sequence
  Description of Artificial Sequence: Synthetic oligonucleotide
gacuccggugagggucagg

SEQ ID NO: 2147111 - RNA, 19 nt, Artificial Sequence
  Description of Artificial Sequence: Synthetic oligonucleotide
gccuucgccuugcaacgcc

SEQ ID NO: 2147112 - RNA, 19 nt, Artificial Sequence
  Description of Artificial Sequence: Synthetic oligonucleotide
caccacgaccgcgcgcacg

SEQ ID NO: 2147113 - RNA, 19 nt, Artificial Sequence
  Description of Artificial Sequence: Synthetic oligonucleotide
caccgcgccacagcacacc

SEQ ID NO: 2147114 - RNA, 19 nt, Artificial Sequence
  Description of Artificial Sequence: Synthetic oligonucleotide
gcggcuaggcuucccgaug

SEQ ID NO: 2147115 - RNA, 19 nt, Artificial Sequence
  Description of Artificial Sequence: Synthetic oligonucleotide
ccaucgcaaucgaacagca

SEQ ID NO: 2147116 - RNA, 19 nt, Artificial Sequence
  Description of Artificial Sequence: Synthetic oligonucleotide
agacagccgguacccgcaa

SEQ ID NO: 2147117 - RNA, 19 nt, Artificial Sequence
  Description of Artificial Sequence: Synthetic oligonucleotide
cacagccgucucaccgcgc

SEQ ID NO: 2147118 - RNA, 19 nt, Artificial Sequence
  Description of Artificial Sequence: Synthetic oligonucleotide
cuggcgacacccacggccu

SEQ ID NO: 2147119 - RNA, 19 nt, Artificial Sequence
  Description of Artificial Sequence: Synthetic oligonucleotide
ggguucgagcggcaccgcc

SEQ ID NO: 2147120 - RNA, 19 nt, Artificial Sequence
  Description of Artificial Sequence: Synthetic oligonucleotide
gucgcucgggccuucgccu

SEQ ID NO: 2147121 - RNA, 19 nt, Artificial Sequence
  Description of Artificial Sequence: Synthetic oligonucleotide
ggguccggcacaccggcca

SEQ ID NO: 2147122 - RNA, 19 nt, Artificial Sequence
  Description of Artificial Sequence: Synthetic oligonucleotide
gucgaagaugaagcggcua

SEQ ID NO: 2147123 - RNA, 19 nt, Artificial Sequence
  Description of Artificial Sequence: Synthetic oligonucleotide
gcaaugaaacggccguucu

SEQ ID NO: 2147124 - RNA, 19 nt, Artificial Sequence
  Description of Artificial Sequence: Synthetic oligonucleotide
cuagcgggagccgguuguc

SEQ ID NO: 2147125 - RNA, 19 nt, Artificial Sequence
  Description of Artificial Sequence: Synthetic oligonucleotide
gguucgagcggcaccgcca

SEQ ID NO: 2147126 - RNA, 19 nt, Artificial Sequence
  Description of Artificial Sequence: Synthetic oligonucleotide
cacuuuccugauuaaucuu

SEQ ID NO: 2147127 - RNA, 19 nt, Artificial Sequence
  Description of Artificial Sequence: Synthetic oligonucleotide
cgaugauauccgccuggcg

SEQ ID NO: 2147128 - RNA, 19 nt, Artificial Sequence
  Description of Artificial Sequence: Synthetic oligonucleotide
gggucgaagcccaccacga

SEQ ID NO: 2147129 - RNA, 19 nt, Artificial Sequence
  Description of Artificial Sequence: Synthetic oligonucleotide
ccguagagucuccggcgcg

SEQ ID NO: 2147130 - RNA, 19 nt, Artificial Sequence
  Description of Artificial Sequence: Synthetic oligonucleotide
gggcaaaaggucggcuaug

SEQ ID NO: 2147131 - RNA, 19 nt, Artificial Sequence
  Description of Artificial Sequence: Synthetic oligonucleotide
gcacgcagcggacuucguc

SEQ ID NO: 2147132 - RNA, 19 nt, Artificial Sequence
  Description of Artificial Sequence: Synthetic oligonucleotide
gccgguacccgcaaugaaa

SEQ ID NO: 2147133 - RNA, 19 nt, Artificial Sequence
  Description of Artificial Sequence: Synthetic oligonucleotide
gcgcccguagagucuccgg

SEQ ID NO: 2147134 - RNA, 19 nt, Artificial Sequence
  Description of Artificial Sequence: Synthetic oligonucleotide
ccaugaccgaccgcugacc

SEQ ID NO: 2147135 - RNA, 19 nt, Artificial Sequence
  Description of Artificial Sequence: Synthetic oligonucleotide
gccguucucuagcgggagc

SEQ ID NO: 2147136 - RNA, 19 nt, Artificial Sequence
  Description of Artificial Sequence: Synthetic oligonucleotide
gcgagucuugcugcuguug

SEQ ID NO: 2147137 - RNA, 19 nt, Artificial Sequence
  Description of Artificial Sequence: Synthetic oligonucleotide
gcgcacgccggguucgagc

SEQ ID NO: 2147138 - RNA, 19 nt, Artificial Sequence
  Description of Artificial Sequence: Synthetic oligonucleotide
ggccgcuaaggccgggcug

SEQ ID NO: 2147139 - RNA, 19 nt, Artificial Sequence
  Description of Artificial Sequence: Synthetic oligonucleotide
agucuccggcgcgcccggc

SEQ ID NO: 2147140 - RNA, 19 nt, Artificial Sequence
  Description of Artificial Sequence: Synthetic oligonucleotide
ucgcuugccgcgggcccgc

SEQ ID NO: 2147141 - RNA, 19 nt, Artificial Sequence
  Description of Artificial Sequence: Synthetic oligonucleotide
cgcccguagagucuccggc

SEQ ID NO: 2147142 - RNA, 19 nt, Artificial Sequence
  Description of Artificial Sequence: Synthetic oligonucleotide
ccaccggaccgccgaaacc

SEQ ID NO: 2147143 - RNA, 19 nt, Artificial Sequence
  Description of Artificial Sequence: Synthetic oligonucleotide
ucgggccccaccggaccgc

SEQ ID NO: 2147144 - RNA, 19 nt, Artificial Sequence
  Description of Artificial Sequence: Synthetic oligonucleotide
gcgggcaaaaggucggcua

SEQ ID NO: 2147145 - RNA, 19 nt, Artificial Sequence
  Description of Artificial Sequence: Synthetic oligonucleotide
cccgcucggcauucagccg

SEQ ID NO: 2147146 - RNA, 19 nt, Artificial Sequence
  Description of Artificial Sequence: Synthetic oligonucleotide
cgcaaugaaacggccguuc

SEQ ID NO: 2147147 - RNA, 19 nt, Artificial Sequence
  Description of Artificial Sequence: Synthetic oligonucleotide
ggcggucucccaccauaac

SEQ ID NO: 2147148 - RNA, 19 nt, Artificial Sequence
  Description of Artificial Sequence: Synthetic oligonucleotide
cgguacccgcaaugaaacg

SEQ ID NO: 2147149 - RNA, 19 nt, Artificial Sequence
  Description of Artificial Sequence: Synthetic oligonucleotide
cccaccggaccgccgaaac

SEQ ID NO: 2147150 - RNA, 19 nt, Artificial Sequence
  Description of Artificial Sequence: Synthetic oligonucleotide
cguagagucuccggcgcgc

SEQ ID NO: 2147151 - RNA, 19 nt, Artificial Sequence
  Description of Artificial Sequence: Synthetic oligonucleotide
gaggcccgcgucgggcccc

SEQ ID NO: 2147152 - RNA, 19 nt, Artificial Sequence
  Description of Artificial Sequence: Synthetic oligonucleotide
agcugaagugugggucgaa

SEQ ID NO: 2147153 - RNA, 19 nt, Artificial Sequence
  Description of Artificial Sequence: Synthetic oligonucleotide
cuccgcguaggccgugcga

SEQ ID NO: 2147154 - RNA, 19 nt, Artificial Sequence
  Description of Artificial Sequence: Synthetic oligonucleotide
cccaccauaacggugcgcu

SEQ ID NO: 2147155 - RNA, 19 nt, Artificial Sequence
  Description of Artificial Sequence: Synthetic oligonucleotide
gcccaggaggaugucugug

SEQ ID NO: 2147156 - RNA, 19 nt, Artificial Sequence
  Description of Artificial Sequence: Synthetic oligonucleotide
accggaccgccgaaaccca

SEQ ID NO: 2147157 - RNA, 19 nt, Artificial Sequence
  Description of Artificial Sequence: Synthetic oligonucleotide
ggauagucuucaggcuaca

SEQ ID NO: 2147158 - RNA, 19 nt, Artificial Sequence
  Description of Artificial Sequence: Synthetic oligonucleotide
agacuccggugagggucag

SEQ ID NO: 2147159 - RNA, 19 nt, Artificial Sequence
  Description of Artificial Sequence: Synthetic oligonucleotide
cgaaacccaagcgccuuag

SEQ ID NO: 2147160 - RNA, 19 nt, Artificial Sequence
  Description of Artificial Sequence: Synthetic oligonucleotide
gccagccagucgcucgggc

SEQ ID NO: 2147161 - RNA, 19 nt, Artificial Sequence
  Description of Artificial Sequence: Synthetic oligonucleotide
guaggccgugcgagucuug

SEQ ID NO: 2147162 - RNA, 19 nt, Artificial Sequence
  Description of Artificial Sequence: Synthetic oligonucleotide
agucgggcugcugcaggua

SEQ ID NO: 2147163 - RNA, 19 nt, Artificial Sequence
  Description of Artificial Sequence: Synthetic oligonucleotide
ggucggcuaugcugucaac

SEQ ID NO: 2147164 - RNA, 19 nt, Artificial Sequence
  Description of Artificial Sequence: Synthetic oligonucleotide
gcagcgcccguagagucuc

SEQ ID NO: 2147165 - RNA, 19 nt, Artificial Sequence
  Description of Artificial Sequence: Synthetic oligonucleotide
cccgcaaugaaacggccgu

SEQ ID NO: 2147166 - RNA, 19 nt, Artificial Sequence
  Description of Artificial Sequence: Synthetic oligonucleotide
cgccuugcaacgccuccgg

SEQ ID NO: 2147167 - RNA, 19 nt, Artificial Sequence
  Description of Artificial Sequence: Synthetic oligonucleotide
cagcgcccguagagucucc

SEQ ID NO: 2147168 - RNA, 19 nt, Artificial Sequence
  Description of Artificial Sequence: Synthetic oligonucleotide
cggaccgccgaaacccaag

SEQ ID NO: 2147169 - RNA, 19 nt, Artificial Sequence
  Description of Artificial Sequence: Synthetic oligonucleotide
ggcccgcucggcauucagc

SEQ ID NO: 2147170 - RNA, 19 nt, Artificial Sequence
  Description of Artificial Sequence: Synthetic oligonucleotide
aggccgugccgaagaccuc

SEQ ID NO: 2147171 - RNA, 19 nt, Artificial Sequence
  Description of Artificial Sequence: Synthetic oligonucleotide
cguucucuagcgggagccg

SEQ ID NO: 2147172 - RNA, 19 nt, Artificial Sequence
  Description of Artificial Sequence: Synthetic oligonucleotide
caccggccaggcgcuggcg

SEQ ID NO: 2147173 - RNA, 19 nt, Artificial Sequence
  Description of Artificial Sequence: Synthetic oligonucleotide
ccaccauaacggugcgcuc

SEQ ID NO: 2147174 - RNA, 19 nt, Artificial Sequence
  Description of Artificial Sequence: Synthetic oligonucleotide
gaccgaccgcugaccgcug

SEQ ID NO: 2147175 - RNA, 19 nt, Artificial Sequence
  Description of Artificial Sequence: Synthetic oligonucleotide
cacccacggccuccagcuc

SEQ ID NO: 2147176 - RNA, 19 nt, Artificial Sequence
  Description of Artificial Sequence: Synthetic oligonucleotide
ggccuucgccuugcaacgc

SEQ ID NO: 2147177 - RNA, 19 nt, Artificial Sequence
  Description of Artificial Sequence: Synthetic oligonucleotide
cggcucgcaccagacagcc

SEQ ID NO: 2147178 - RNA, 19 nt, Artificial Sequence
  Description of Artificial Sequence: Synthetic oligonucleotide
cccagucgcuugccgcggg

SEQ ID NO: 2147179 - RNA, 19 nt, Artificial Sequence
  Description of Artificial Sequence: Synthetic oligonucleotide
ggcucgcaccagacagccg

SEQ ID NO: 2147180 - RNA, 19 nt, Artificial Sequence
  Description of Artificial Sequence: Synthetic oligonucleotide
gcccagucgcuugccgcgg

SEQ ID NO: 2147181 - RNA, 19 nt, Artificial Sequence
  Description of Artificial Sequence: Synthetic oligonucleotide
gacagccgguacccgcaau

SEQ ID NO: 2147182 - RNA, 19 nt, Artificial Sequence
  Description of Artificial Sequence: Synthetic oligonucleotide
acggugcgcuccggguuga

SEQ ID NO: 2147183 - RNA, 19 nt, Artificial Sequence
  Description of Artificial Sequence: Synthetic oligonucleotide
cucggccgcuaaggccggg

SEQ ID NO: 2147184 - RNA, 19 nt, Artificial Sequence
  Description of Artificial Sequence: Synthetic oligonucleotide
ccauaacggugcgcuccgg

SEQ ID NO: 2147185 - RNA, 19 nt, Artificial Sequence
  Description of Artificial Sequence: Synthetic oligonucleotide
cgucgggccccaccggacc

SEQ ID NO: 2147186 - RNA, 19 nt, Artificial Sequence
  Description of Artificial Sequence: Synthetic oligonucleotide
gggcgggcaaaaggucggc

SEQ ID NO: 2147187 - RNA, 19 nt, Artificial Sequence
  Description of Artificial Sequence: Synthetic oligonucleotide
ggcgcagauagagcgcgcu

SEQ ID NO: 2147188 - RNA, 19 nt, Artificial Sequence
  Description of Artificial Sequence: Synthetic oligonucleotide
agccagucgcucgggccuu

SEQ ID NO: 2147189 - RNA, 19 nt, Artificial Sequence
  Description of Artificial Sequence: Synthetic oligonucleotide
gguaccgcacggccuuggu

SEQ ID NO: 2147190 - RNA, 19 nt, Artificial Sequence
  Description of Artificial Sequence: Synthetic oligonucleotide
ccucgaggcccgcgucggg

SEQ ID NO: 2147191 - RNA, 19 nt, Artificial Sequence
  Description of Artificial Sequence: Synthetic oligonucleotide
ccaagcgccuuagcuucuc

SEQ ID NO: 2147192 - RNA, 19 nt, Artificial Sequence
  Description of Artificial Sequence: Synthetic oligonucleotide
ccgugccgaagaccucgag

SEQ ID NO: 2147193 - RNA, 19 nt, Artificial Sequence
  Description of Artificial Sequence: Synthetic oligonucleotide
gcucggccgcuaaggccgg

SEQ ID NO: 2147194 - RNA, 19 nt, Artificial Sequence
  Description of Artificial Sequence: Synthetic oligonucleotide
cggcuaggcuucccgauga

SEQ ID NO: 2147195 - RNA, 19 nt, Artificial Sequence
  Description of Artificial Sequence: Synthetic oligonucleotide
ccgccaugaccgaccgcug

SEQ ID NO: 2147196 - RNA, 19 nt, Artificial Sequence
  Description of Artificial Sequence: Synthetic oligonucleotide
aggcgcuggcgcagauaga

SEQ ID NO: 2147197 - RNA, 19 nt, Artificial Sequence
  Description of Artificial Sequence: Synthetic oligonucleotide
cuccggcgcgcccggcaca

SEQ ID NO: 2147198 - RNA, 19 nt, Artificial Sequence
  Description of Artificial Sequence: Synthetic oligonucleotide
cgcguaggccgugcgaguc

SEQ ID NO: 2147199 - RNA, 19 nt, Artificial Sequence
  Description of Artificial Sequence: Synthetic oligonucleotide
ccuucgccuugcaacgccu

SEQ ID NO: 2147200 - RNA, 19 nt, Artificial Sequence
  Description of Artificial Sequence: Synthetic oligonucleotide
gcgacacccacggccucca

SEQ ID NO: 2147201 - RNA, 19 nt, Artificial Sequence
  Description of Artificial Sequence: Synthetic oligonucleotide
uggcgcccaggaggauguc

SEQ ID NO: 2147202 - RNA, 19 nt, Artificial Sequence
  Description of Artificial Sequence: Synthetic oligonucleotide
gcguaggccgugcgagucu

SEQ ID NO: 2147203 - RNA, 19 nt, Artificial Sequence
  Description of Artificial Sequence: Synthetic oligonucleotide
ccgacuccgccaugaccga

SEQ ID NO: 2147204 - RNA, 19 nt, Artificial Sequence
  Description of Artificial Sequence: Synthetic oligonucleotide
gcccggcacagccgucuca

SEQ ID NO: 2147205 - RNA, 19 nt, Artificial Sequence
  Description of Artificial Sequence: Synthetic oligonucleotide
ccgaaacccaagcgccuua

SEQ ID NO: 2147206 - RNA, 19 nt, Artificial Sequence
  Description of Artificial Sequence: Synthetic oligonucleotide
ggcgggcaaaaggucggcu

SEQ ID NO: 2147207 - RNA, 19 nt, Artificial Sequence
  Description of Artificial Sequence: Synthetic oligonucleotide
ccacaucggccagcagcac

SEQ ID NO: 2147208 - RNA, 19 nt, Artificial Sequence
  Description of Artificial Sequence: Synthetic oligonucleotide
cgcgcgcacgccggguucg

SEQ ID NO: 2147209 - RNA, 19 nt, Artificial Sequence
  Description of Artificial Sequence: Synthetic oligonucleotide
cggccguucucuagcggga

SEQ ID NO: 2147210 - RNA, 19 nt, Artificial Sequence
  Description of Artificial Sequence: Synthetic oligonucleotide
agguggcgcccaggaggau

SEQ ID NO: 2147211 - RNA, 19 nt, Artificial Sequence
  Description of Artificial Sequence: Synthetic oligonucleotide
ggccuccgacuccgccaug

SEQ ID NO: 2147212 - RNA, 19 nt, Artificial Sequence
  Description of Artificial Sequence: Synthetic oligonucleotide
ccgcuaaggccgggcugcc

SEQ ID NO: 2147213 - RNA, 19 nt, Artificial Sequence
  Description of Artificial Sequence: Synthetic oligonucleotide
gaccgcgcgcacgccgggu

SEQ ID NO: 2147214 - RNA, 19 nt, Artificial Sequence
  Description of Artificial Sequence: Synthetic oligonucleotide
cgggcaaaaggucggcuau

SEQ ID NO: 2147215 - RNA, 19 nt, Artificial Sequence
  Description of Artificial Sequence: Synthetic oligonucleotide
gccgugccgaagaccucga

SEQ ID NO: 2147216 - RNA, 19 nt, Artificial Sequence
  Description of Artificial Sequence: Synthetic oligonucleotide
cgcgcugcaguaggccgug

SEQ ID NO: 2147217 - RNA, 19 nt, Artificial Sequence
  Description of Artificial Sequence: Synthetic oligonucleotide
gccgaaacccaagcgccuu

SEQ ID NO: 2147218 - RNA, 19 nt, Artificial Sequence
  Description of Artificial Sequence: Synthetic oligonucleotide
gcgggagccgguuguccau

SEQ ID NO: 2147219 - RNA, 19 nt, Artificial Sequence
  Description of Artificial Sequence: Synthetic oligonucleotide
cgggagccgguuguccaug

SEQ ID NO: 2147220 - RNA, 19 nt, Artificial Sequence
  Description of Artificial Sequence: Synthetic oligonucleotide
caacgccuccgggcccaca

SEQ ID NO: 2147221 - RNA, 19 nt, Artificial Sequence
  Description of Artificial Sequence: Synthetic oligonucleotide
cgcuaaggccgggcugccc

SEQ ID NO: 2147222 - RNA, 19 nt, Artificial Sequence
  Description of Artificial Sequence: Synthetic oligonucleotide
cgaccgcgcgcacgccggg

SEQ ID NO: 2147223 - RNA, 19 nt, Artificial Sequence
  Description of Artificial Sequence: Synthetic oligonucleotide
ccggaccgccgaaacccaa

SEQ ID NO: 2147224 - RNA, 19 nt, Artificial Sequence
  Description of Artificial Sequence: Synthetic oligonucleotide
cgccuuagcuucuccgcgu

SEQ ID NO: 2147225 - RNA, 19 nt, Artificial Sequence
  Description of Artificial Sequence: Synthetic oligonucleotide
ccacgaccgcgcgcacgcc

SEQ ID NO: 2147226 - RNA, 19 nt, Artificial Sequence
  Description of Artificial Sequence: Synthetic oligonucleotide
cgaagaccucgaggcccgc

SEQ ID NO: 2147227 - RNA, 19 nt, Artificial Sequence
  Description of Artificial Sequence: Synthetic oligonucleotide
ccgugcgagucuugcugcu

SEQ ID NO: 2147228 - RNA, 19 nt, Artificial Sequence
  Description of Artificial Sequence: Synthetic oligonucleotide
gcgcugcaguaggccgugc

SEQ ID NO: 2147229 - RNA, 19 nt, Artificial Sequence
  Description of Artificial Sequence: Synthetic oligonucleotide
gcaacgccuccgggcccac

SEQ ID NO: 2147230 - RNA, 19 nt, Artificial Sequence
  Description of Artificial Sequence: Synthetic oligonucleotide
cgcaaucgaacagcagcgu

SEQ ID NO: 2147231 - RNA, 19 nt, Artificial Sequence
  Description of Artificial Sequence: Synthetic oligonucleotide
cgccgaaacccaagcgccu

SEQ ID NO: 2147232 - RNA, 19 nt, Artificial Sequence
  Description of Artificial Sequence: Synthetic oligonucleotide
cggguucgagcggcaccgc

SEQ ID NO: 2147233 - RNA, 19 nt, Artificial Sequence
  Description of Artificial Sequence: Synthetic oligonucleotide
ccgcguaggccgugcgagu

SEQ ID NO: 2147234 - RNA, 19 nt, Artificial Sequence
  Description of Artificial Sequence: Synthetic oligonucleotide
cgcgcacgccggguucgag

SEQ ID NO: 2147235 - RNA, 19 nt, Artificial Sequence
  Description of Artificial Sequence: Synthetic oligonucleotide
gcgcgcacgccggguucga

SEQ ID NO: 2147236 - RNA, 19 nt, Artificial Sequence
  Description of Artificial Sequence: Synthetic oligonucleotide
ccgcaaugaaacggccguu

SEQ ID NO: 2147237 - RNA, 19 nt, Artificial Sequence
  Description of Artificial Sequence: Synthetic oligonucleotide
cgcgcccggcacagccguc

SEQ ID NO: 2147238 - RNA, 19 nt, Artificial Sequence
  Description of Artificial Sequence: Synthetic oligonucleotide
cguaggccgugcgagucuu

SEQ ID NO: 2147239 - RNA, 19 nt, Artificial Sequence
  Description of Artificial Sequence: Synthetic oligonucleotide
cggccgcuaaggccgggcu

SEQ ID NO: 2147240 - RNA, 19 nt, Artificial Sequence
  Description of Artificial Sequence: Synthetic oligonucleotide
ccaggcggucucccaccau

SEQ ID NO: 2147241 - RNA, 19 nt, Artificial Sequence
  Description of Artificial Sequence: Synthetic oligonucleotide
cgcacgcagcggacuucgu

SEQ ID NO: 2147242 - RNA, 19 nt, Artificial Sequence
  Description of Artificial Sequence: Synthetic oligonucleotide
cgucgccgccggccuccga

SEQ ID NO: 2147243 - RNA, 19 nt, Artificial Sequence
  Description of Artificial Sequence: Synthetic oligonucleotide
cggugcgcuccggguugau

SEQ ID NO: 2147244 - RNA, 19 nt, Artificial Sequence
  Description of Artificial Sequence: Synthetic oligonucleotide
auagacacacccuagacac

SEQ ID NO: 2147245 - RNA, 19 nt, Artificial Sequence
  Description of Artificial Sequence: Synthetic oligonucleotide
cuaagugacgcaaugaugg

SEQ ID NO: 2147246 - RNA, 19 nt, Artificial Sequence
  Description of Artificial Sequence: Synthetic oligonucleotide
uccaugauuagcaaggucc

SEQ ID NO: 2147247 - RNA, 19 nt, Artificial Sequence
  Description of Artificial Sequence: Synthetic oligonucleotide
aacacaaacucucugucag

SEQ ID NO: 2147248 - RNA, 19 nt, Artificial Sequence
  Description of Artificial Sequence: Synthetic oligonucleotide
guuauauccucucugaugc

SEQ ID NO: 2147249 - RNA, 19 nt, Artificial Sequence
  Description of Artificial Sequence: Synthetic oligonucleotide
uugaguaaguguaaggaag

SEQ ID NO: 2147250 - RNA, 19 nt, Artificial Sequence
  Description of Artificial Sequence: Synthetic oligonucleotide
uugcggauaaguuauaucc

SEQ ID NO: 2147251 - RNA, 19 nt, Artificial Sequence
  Description of Artificial Sequence: Synthetic oligonucleotide
aagauuucauucccaauuc

SEQ ID NO: 2147252 - RNA, 19 nt, Artificial Sequence
  Description of Artificial Sequence: Synthetic oligonucleotide
uuuuagaagauuucauucc

SEQ ID NO: 2147253 - RNA, 19 nt, Artificial Sequence
  Description of Artificial Sequence: Synthetic oligonucleotide
uguucugauauuuuagaag

SEQ ID NO: 2147254 - RNA, 19 nt, Artificial Sequence
  Description of Artificial Sequence: Synthetic oligonucleotide
uaaagauugcacagcaagg

SEQ ID NO: 2147255 - RNA, 19 nt, Artificial Sequence
  Description of Artificial Sequence: Synthetic oligonucleotide
aaaacuaagugacgcaaug

SEQ ID NO: 2147256 - RNA, 19 nt, Artificial Sequence
  Description of Artificial Sequence: Synthetic oligonucleotide
ugaggguucaucaucacug

SEQ ID NO: 2147257 - RNA, 19 nt, Artificial Sequence
  Description of Artificial Sequence: Synthetic oligonucleotide
aauucaagccaugggaugg

SEQ ID NO: 2147258 - RNA, 19 nt, Artificial Sequence
  Description of Artificial Sequence: Synthetic oligonucleotide
aaugcggcucuucagagug

SEQ ID NO: 2147259 - RNA, 19 nt, Artificial Sequence
  Description of Artificial Sequence: Synthetic oligonucleotide
ucuuuuguccuccauguug

SEQ ID NO: 2147260 - RNA, 19 nt, Artificial Sequence
  Description of Artificial Sequence: Synthetic oligonucleotide
gcugauuucauacacaccc

SEQ ID NO: 2147261 - RNA, 19 nt, Artificial Sequence
  Description of Artificial Sequence: Synthetic oligonucleotide
ugauucuugaguaagugua

SEQ ID NO: 2147262 - RNA, 19 nt, Artificial Sequence
  Description of Artificial Sequence: Synthetic oligonucleotide
auaaguuauauccucucug

SEQ ID NO: 2147263 - RNA, 19 nt, Artificial Sequence
  Description of Artificial Sequence: Synthetic oligonucleotide
uuagguuuacucuugguuc

SEQ ID NO: 2147264 - RNA, 19 nt, Artificial Sequence
  Description of Artificial Sequence: Synthetic oligonucleotide
guucugauauuuuagaaga

SEQ ID NO: 2147265 - RNA, 19 nt, Artificial Sequence
  Description of Artificial Sequence: Synthetic oligonucleotide
gauauuuuagaagauuuca

SEQ ID NO: 2147266 - RNA, 19 nt, Artificial Sequence
  Description of Artificial Sequence: Synthetic oligonucleotide
ugaguaaguguaaggaagc

SEQ ID NO: 2147267 - RNA, 19 nt, Artificial Sequence
  Description of Artificial Sequence: Synthetic oligonucleotide
uccauagugauucuugagu

SEQ ID NO: 2147268 - RNA, 19 nt, Artificial Sequence
  Description of Artificial Sequence: Synthetic oligonucleotide
caucucaaaaguucgagug

SEQ ID NO: 2147269 - RNA, 19 nt, Artificial Sequence
  Description of Artificial Sequence: Synthetic oligonucleotide
uuuacucuugguucucugg

SEQ ID NO: 2147270 - RNA, 19 nt, Artificial Sequence
  Description of Artificial Sequence: Synthetic oligonucleotide
ucuugaguaaguguaagga

SEQ ID NO: 2147271 - RNA, 19 nt, Artificial Sequence
  Description of Artificial Sequence: Synthetic oligonucleotide
aaagguuagguuuacucuu

SEQ ID NO: 2147272 - RNA, 19 nt, Artificial Sequence
  Description of Artificial Sequence: Synthetic oligonucleotide
aggcugauuucauacacac

SEQ ID NO: 2147273 - RNA, 19 nt, Artificial Sequence
  Description of Artificial Sequence: Synthetic oligonucleotide
aguuauauccucucugaug

SEQ ID NO: 2147274 - RNA, 19 nt, Artificial Sequence
  Description of Artificial Sequence: Synthetic oligonucleotide
guauguauagucuccauuc

SEQ ID NO: 2147275 - RNA, 19 nt, Artificial Sequence
  Description of Artificial Sequence: Synthetic oligonucleotide
aacuaagugacgcaaugau

SEQ ID NO: 2147276 - RNA, 19 nt, Artificial Sequence
  Description of Artificial Sequence: Synthetic oligonucleotide
aaguguaaggaagcucucc

SEQ ID NO: 2147277 - RNA, 19 nt, Artificial Sequence
  Description of Artificial Sequence: Synthetic oligonucleotide
uaaaugguccgaaagguua

SEQ ID NO: 2147278 - RNA, 19 nt, Artificial Sequence
  Description of Artificial Sequence: Synthetic oligonucleotide
uucuugaguaaguguaagg

SEQ ID NO: 2147279 - RNA, 19 nt, Artificial Sequence
  Description of Artificial Sequence: Synthetic oligonucleotide
aaaaguucgaguggcacca

SEQ ID NO: 2147280 - RNA, 19 nt, Artificial Sequence
  Description of Artificial Sequence: Synthetic oligonucleotide
aacuuugcagacacguccc

SEQ ID NO: 2147281 - RNA, 19 nt, Artificial Sequence
  Description of Artificial Sequence: Synthetic oligonucleotide
aucucaaaaguucgagugg

SEQ ID NO: 2147282 - RNA, 19 nt, Artificial Sequence
  Description of Artificial Sequence: Synthetic oligonucleotide
auagucuccauucucuuca

SEQ ID NO: 2147283 - RNA, 19 nt, Artificial Sequence
  Description of Artificial Sequence: Synthetic oligonucleotide
ggauaaaugguccgaaagg

SEQ ID NO: 2147284 - RNA, 19 nt, Artificial Sequence
  Description of Artificial Sequence: Synthetic oligonucleotide
ugauauuuuagaagauuuc

SEQ ID NO: 2147285 - RNA, 19 nt, Artificial Sequence
  Description of Artificial Sequence: Synthetic oligonucleotide
ucgaguggcaccaaaacua

SEQ ID NO: 2147286 - RNA, 19 nt, Artificial Sequence
  Description of Artificial Sequence: Synthetic oligonucleotide
uuagcaaggucccaugauc

SEQ ID NO: 2147287 - RNA, 19 nt, Artificial Sequence
  Description of Artificial Sequence: Synthetic oligonucleotide
uaucuucacucuuuccacg

SEQ ID NO: 2147288 - RNA, 19 nt, Artificial Sequence
  Description of Artificial Sequence: Synthetic oligonucleotide
uuggguuccauagugauuc

SEQ ID NO: 2147289 - RNA, 19 nt, Artificial Sequence
  Description of Artificial Sequence: Synthetic oligonucleotide
ucauucccaauucaagcca

SEQ ID NO: 2147290 - RNA, 19 nt, Artificial Sequence
  Description of Artificial Sequence: Synthetic oligonucleotide
acucuuuccacguauguau

SEQ ID NO: 2147291 - RNA, 19 nt, Artificial Sequence
  Description of Artificial Sequence: Synthetic oligonucleotide
auagugauucuugaguaag

SEQ ID NO: 2147292 - RNA, 19 nt, Artificial Sequence
  Description of Artificial Sequence: Synthetic oligonucleotide
gacauccugacaaaggcgc

SEQ ID NO: 2147293 - RNA, 19 nt, Artificial Sequence
  Description of Artificial Sequence: Synthetic oligonucleotide
uucauacacacccucccug

SEQ ID NO: 2147294 - RNA, 19 nt, Artificial Sequence
  Description of Artificial Sequence: Synthetic oligonucleotide
uauguauagucuccauucu

SEQ ID NO: 2147295 - RNA, 19 nt, Artificial Sequence
  Description of Artificial Sequence: Synthetic oligonucleotide
aaagcuuucuguucugaua

SEQ ID NO: 2147296 - RNA, 19 nt, Artificial Sequence
  Description of Artificial Sequence: Synthetic oligonucleotide
caaaaguucgaguggcacc

SEQ ID NO: 2147297 - RNA, 19 nt, Artificial Sequence
  Description of Artificial Sequence: Synthetic oligonucleotide
aguccgcuuguguagcucc

SEQ ID NO: 2147298 - RNA, 19 nt, Artificial Sequence
  Description of Artificial Sequence: Synthetic oligonucleotide
gauauagacacacccuaga

SEQ ID NO: 2147299 - RNA, 19 nt, Artificial Sequence
  Description of Artificial Sequence: Synthetic oligonucleotide
gacacgucccaucaccagg

SEQ ID NO: 2147300 - RNA, 19 nt, Artificial Sequence
  Description of Artificial Sequence: Synthetic oligonucleotide
uccuucaaguccacaaagc

SEQ ID NO: 2147301 - RNA, 19 nt, Artificial Sequence
  Description of Artificial Sequence: Synthetic oligonucleotide
ucccaauucaagccauggg

SEQ ID NO: 2147302 - RNA, 19 nt, Artificial Sequence
  Description of Artificial Sequence: Synthetic oligonucleotide
caaaggcgcuccaauaucc

SEQ ID NO: 2147303 - RNA, 19 nt, Artificial Sequence
  Description of Artificial Sequence: Synthetic oligonucleotide
acaaaggcgcuccaauauc

SEQ ID NO: 2147304 - RNA, 19 nt, Artificial Sequence
  Description of Artificial Sequence: Synthetic oligonucleotide
uaagugacgcaaugauggg

SEQ ID NO: 2147305 - RNA, 19 nt, Artificial Sequence
  Description of Artificial Sequence: Synthetic oligonucleotide
aagugacgcaaugaugggg

SEQ ID NO: 2147306 - RNA, 19 nt, Artificial Sequence
  Description of Artificial Sequence: Synthetic oligonucleotide
aguaaguguaaggaagcuc

SEQ ID NO: 2147307 - RNA, 19 nt, Artificial Sequence
  Description of Artificial Sequence: Synthetic oligonucleotide
gacgcaaugauggggaagc

SEQ ID NO: 2147308 - RNA, 19 nt, Artificial Sequence
  Description of Artificial Sequence: Synthetic oligonucleotide
uaaggaagcucuccauacc

SEQ ID NO: 2147309 - RNA, 19 nt, Artificial Sequence
  Description of Artificial Sequence: Synthetic oligonucleotide
ucuuuccacguauguauag

SEQ ID NO: 2147310 - RNA, 19 nt, Artificial Sequence
  Description of Artificial Sequence: Synthetic oligonucleotide
guaaggaagcucuccauac

SEQ ID NO: 2147311 - RNA, 19 nt, Artificial Sequence
  Description of Artificial Sequence: Synthetic oligonucleotide
uguguagcuccuuccauga

SEQ ID NO: 2147312 - RNA, 19 nt, Artificial Sequence
  Description of Artificial Sequence: Synthetic oligonucleotide
agacacacccuagacacac

SEQ ID NO: 2147313 - RNA, 19 nt, Artificial Sequence
  Description of Artificial Sequence: Synthetic oligonucleotide
ccuuccaugauuagcaagg

SEQ ID NO: 2147314 - RNA, 19 nt, Artificial Sequence
  Description of Artificial Sequence: Synthetic oligonucleotide
uauauccucucugaugccc

SEQ ID NO: 2147315 - RNA, 19 nt, Artificial Sequence
  Description of Artificial Sequence: Synthetic oligonucleotide
gauuucauacacacccucc

SEQ ID NO: 2147316 - RNA, 19 nt, Artificial Sequence
  Description of Artificial Sequence: Synthetic oligonucleotide
uguaaggaagcucuccaua

SEQ ID NO: 2147317 - RNA, 19 nt, Artificial Sequence
  Description of Artificial Sequence: Synthetic oligonucleotide
ucaaugcggcucuucagag

SEQ ID NO: 2147318 - RNA, 19 nt, Artificial Sequence
  Description of Artificial Sequence: Synthetic oligonucleotide
uguaagucuugguugcgga

SEQ ID NO: 2147319 - RNA, 19 nt, Artificial Sequence
  Description of Artificial Sequence: Synthetic oligonucleotide
uguccgcacaaccagcuga

SEQ ID NO: 2147320 - RNA, 19 nt, Artificial Sequence
  Description of Artificial Sequence: Synthetic oligonucleotide
uccucucugaugcccaucc

SEQ ID NO: 2147321 - RNA, 19 nt, Artificial Sequence
  Description of Artificial Sequence: Synthetic oligonucleotide
aaacuaagugacgcaauga

SEQ ID NO: 2147322 - RNA, 19 nt, Artificial Sequence
  Description of Artificial Sequence: Synthetic oligonucleotide
agcugaggcucuuugaaca

SEQ ID NO: 2147323 - RNA, 19 nt, Artificial Sequence
  Description of Artificial Sequence: Synthetic oligonucleotide
gaaagguuagguuuacucu

SEQ ID NO: 2147324 - RNA, 19 nt, Artificial Sequence
  Description of Artificial Sequence: Synthetic oligonucleotide
gaagauuucauucccaauu

SEQ ID NO: 2147325 - RNA, 19 nt, Artificial Sequence
  Description of Artificial Sequence: Synthetic oligonucleotide
ucccugucaaucacucugg

SEQ ID NO: 2147326 - RNA, 19 nt, Artificial Sequence
  Description of Artificial Sequence: Synthetic oligonucleotide
ugcggauaaguuauauccu

SEQ ID NO: 2147327 - RNA, 19 nt, Artificial Sequence
  Description of Artificial Sequence: Synthetic oligonucleotide
aaaugguccgaaagguuag

SEQ ID NO: 2147328 - RNA, 19 nt, Artificial Sequence
  Description of Artificial Sequence: Synthetic oligonucleotide
gguaucuucacucuuucca

SEQ ID NO: 2147329 - RNA, 19 nt, Artificial Sequence
  Description of Artificial Sequence: Synthetic oligonucleotide
uccacguauguauagucuc

SEQ ID NO: 2147330 - RNA, 19 nt, Artificial Sequence
  Description of Artificial Sequence: Synthetic oligonucleotide
auuccuugggcacucggug

SEQ ID NO: 2147331 - RNA, 19 nt, Artificial Sequence
  Description of Artificial Sequence: Synthetic oligonucleotide
uuucauacacacccucccu

SEQ ID NO: 2147332 - RNA, 19 nt, Artificial Sequence
  Description of Artificial Sequence: Synthetic oligonucleotide
cagugauaaacuuugcaga

SEQ ID NO: 2147333 - RNA, 19 nt, Artificial Sequence
  Description of Artificial Sequence: Synthetic oligonucleotide
caccaaaacuaagugacgc

SEQ ID NO: 2147334 - RNA, 19 nt, Artificial Sequence
  Description of Artificial Sequence: Synthetic oligonucleotide
cuucagagugcacaguaug

SEQ ID NO: 2147335 - RNA, 19 nt, Artificial Sequence
  Description of Artificial Sequence: Synthetic oligonucleotide
aaguuauauccucucugau

SEQ ID NO: 2147336 - RNA, 19 nt, Artificial Sequence
  Description of Artificial Sequence: Synthetic oligonucleotide
agugauucuugaguaagug

SEQ ID NO: 2147337 - RNA, 19 nt, Artificial Sequence
  Description of Artificial Sequence: Synthetic oligonucleotide
aaggcgcuccaauauccag

SEQ ID NO: 2147338 - RNA, 19 nt, Artificial Sequence
  Description of Artificial Sequence: Synthetic oligonucleotide
ugggaaagaugguuccuag

SEQ ID NO: 2147339 - RNA, 19 nt, Artificial Sequence
  Description of Artificial Sequence: Synthetic oligonucleotide
uuuccacguauguauaguc

SEQ ID NO: 2147340 - RNA, 19 nt, Artificial Sequence
  Description of Artificial Sequence: Synthetic oligonucleotide
uuccacguauguauagucu

SEQ ID NO: 2147341 - RNA, 19 nt, Artificial Sequence
  Description of Artificial Sequence: Synthetic oligonucleotide
uaaacuuugcagacacguc

SEQ ID NO: 2147342 - RNA, 19 nt, Artificial Sequence
  Description of Artificial Sequence: Synthetic oligonucleotide
caguguucuucucaaugcg

SEQ ID NO: 2147343 - RNA, 19 nt, Artificial Sequence
  Description of Artificial Sequence: Synthetic oligonucleotide
cucccugucaaucacucug

SEQ ID NO: 2147344 - RNA, 19 nt, Artificial Sequence
  Description of Artificial Sequence: Synthetic oligonucleotide
uauuccuugggcacucggu

SEQ ID NO: 2147345 - RNA, 19 nt, Artificial Sequence
  Description of Artificial Sequence: Synthetic oligonucleotide
acccuagacacaccugugg

SEQ ID NO: 2147346 - RNA, 19 nt, Artificial Sequence
  Description of Artificial Sequence: Synthetic oligonucleotide
ugauuagcaaggucccaug

SEQ ID NO: 2147347 - RNA, 19 nt, Artificial Sequence
  Description of Artificial Sequence: Synthetic oligonucleotide
aaugguccgaaagguuagg

SEQ ID NO: 2147348 - RNA, 19 nt, Artificial Sequence
  Description of Artificial Sequence: Synthetic oligonucleotide
accucagugauaaacuuug

SEQ ID NO: 2147349 - RNA, 19 nt, Artificial Sequence
  Description of Artificial Sequence: Synthetic oligonucleotide
ggcaccaaaacuaagugac

SEQ ID NO: 2147350 - RNA, 19 nt, Artificial Sequence
  Description of Artificial Sequence: Synthetic oligonucleotide
caauucaagccaugggaug

SEQ ID NO: 2147351 - RNA, 19 nt, Artificial Sequence
  Description of Artificial Sequence: Synthetic oligonucleotide
ucccgguaaagauugcaca

SEQ ID NO: 2147352 - RNA, 19 nt, Artificial Sequence
  Description of Artificial Sequence: Synthetic oligonucleotide
uggcaccaaaacuaaguga

SEQ ID NO: 2147353 - RNA, 19 nt, Artificial Sequence
  Description of Artificial Sequence: Synthetic oligonucleotide
ugggaugguuaccuggcug

SEQ ID NO: 2147354 - RNA, 19 nt, Artificial Sequence
  Description of Artificial Sequence: Synthetic oligonucleotide
uugcagacacgucccauca

SEQ ID NO: 2147355 - RNA, 19 nt, Artificial Sequence
  Description of Artificial Sequence: Synthetic oligonucleotide
cuucaaguccacaaagcca

SEQ ID NO: 2147356 - RNA, 19 nt, Artificial Sequence
  Description of Artificial Sequence: Synthetic oligonucleotide
aguguucuucucaaugcgg

SEQ ID NO: 2147357 - RNA, 19 nt, Artificial Sequence
  Description of Artificial Sequence: Synthetic oligonucleotide
auucuugaguaaguguaag

SEQ ID NO: 2147358 - RNA, 19 nt, Artificial Sequence
  Description of Artificial Sequence: Synthetic oligonucleotide
ccaggauauagacacaccc

SEQ ID NO: 2147359 - RNA, 19 nt, Artificial Sequence
  Description of Artificial Sequence: Synthetic oligonucleotide
gauaaacuuugcagacacg

SEQ ID NO: 2147360 - RNA, 19 nt, Artificial Sequence
  Description of Artificial Sequence: Synthetic oligonucleotide
guaaguguaaggaagcucu

SEQ ID NO: 2147361 - RNA, 19 nt, Artificial Sequence
  Description of Artificial Sequence: Synthetic oligonucleotide
accaaaacuaagugacgca

SEQ ID NO: 2147362 - RNA, 19 nt, Artificial Sequence
  Description of Artificial Sequence: Synthetic oligonucleotide
uuugcagacacgucccauc

SEQ ID NO: 2147363 - RNA, 19 nt, Artificial Sequence
  Description of Artificial Sequence: Synthetic oligonucleotide
ucugaugcccauccucugu

SEQ ID NO: 2147364 - RNA, 19 nt, Artificial Sequence
  Description of Artificial Sequence: Synthetic oligonucleotide
aguaggcuggcucuuggca

SEQ ID NO: 2147365 - RNA, 19 nt, Artificial Sequence
  Description of Artificial Sequence: Synthetic oligonucleotide
uagugauucuugaguaagu

SEQ ID NO: 2147366 - RNA, 19 nt, Artificial Sequence
  Description of Artificial Sequence: Synthetic oligonucleotide
auauuuuagaagauuucau

SEQ ID NO: 2147367 - RNA, 19 nt, Artificial Sequence
  Description of Artificial Sequence: Synthetic oligonucleotide
aguggcaccaaaacuaagu

SEQ ID NO: 2147368 - RNA, 19 nt, Artificial Sequence
  Description of Artificial Sequence: Synthetic oligonucleotide
gauaaguuauauccucucu

SEQ ID NO: 2147369 - RNA, 19 nt, Artificial Sequence
  Description of Artificial Sequence: Synthetic oligonucleotide
ugucaaucacucuggguuc

SEQ ID NO: 2147370 - RNA, 19 nt, Artificial Sequence
  Description of Artificial Sequence: Synthetic oligonucleotide
acucggugcugccaguccg

SEQ ID NO: 2147371 - RNA, 19 nt, Artificial Sequence
  Description of Artificial Sequence: Synthetic oligonucleotide
gauccagugguaucuucac

SEQ ID NO: 2147372 - RNA, 19 nt, Artificial Sequence
  Description of Artificial Sequence: Synthetic oligonucleotide
agguuagguuuacucuugg

SEQ ID NO: 2147373 - RNA, 19 nt, Artificial Sequence
  Description of Artificial Sequence: Synthetic oligonucleotide
ucaaguccacaaagccagg

SEQ ID NO: 2147374 - RNA, 19 nt, Artificial Sequence
  Description of Artificial Sequence: Synthetic oligonucleotide
uggggucuggauaaauggu

SEQ ID NO: 2147375 - RNA, 19 nt, Artificial Sequence
  Description of Artificial Sequence: Synthetic oligonucleotide
gggacauccugacaaaggc

SEQ ID NO: 2147376 - RNA, 19 nt, Artificial Sequence
  Description of Artificial Sequence: Synthetic oligonucleotide
auuagcaaggucccaugau

SEQ ID NO: 2147377 - RNA, 19 nt, Artificial Sequence
  Description of Artificial Sequence: Synthetic oligonucleotide
ucuugguugcggauaaguu

SEQ ID NO: 2147378 - RNA, 19 nt, Artificial Sequence
  Description of Artificial Sequence: Synthetic oligonucleotide
aagguuagguuuacucuug

SEQ ID NO: 2147379 - RNA, 19 nt, Artificial Sequence
  Description of Artificial Sequence: Synthetic oligonucleotide
aucuucacucuuuccacgu

SEQ ID NO: 2147380 - RNA, 19 nt, Artificial Sequence
  Description of Artificial Sequence: Synthetic oligonucleotide
cuugaguaaguguaaggaa

SEQ ID NO: 2147381 - RNA, 19 nt, Artificial Sequence
  Description of Artificial Sequence: Synthetic oligonucleotide
acuaagugacgcaaugaug

SEQ ID NO: 2147382 - RNA, 19 nt, Artificial Sequence
  Description of Artificial Sequence: Synthetic oligonucleotide
aagccaugggaugguuacc

SEQ ID NO: 2147383 - RNA, 19 nt, Artificial Sequence
  Description of Artificial Sequence: Synthetic oligonucleotide
guucgaguggcaccaaaac

SEQ ID NO: 2147384 - RNA, 19 nt, Artificial Sequence
  Description of Artificial Sequence: Synthetic oligonucleotide
agugacgcaaugaugggga

SEQ ID NO: 2147385 - RNA, 19 nt, Artificial Sequence
  Description of Artificial Sequence: Synthetic oligonucleotide
ugugccaguccacacuguc

SEQ ID NO: 2147386 - RNA, 19 nt, Artificial Sequence
  Description of Artificial Sequence: Synthetic oligonucleotide
uuauauccucucugaugcc

SEQ ID NO: 2147387 - RNA, 19 nt, Artificial Sequence
  Description of Artificial Sequence: Synthetic oligonucleotide
cauaccaugcuguaagucu

SEQ ID NO: 2147388 - RNA, 19 nt, Artificial Sequence
  Description of Artificial Sequence: Synthetic oligonucleotide
uccaauauccagucagcuu

SEQ ID NO: 2147389 - RNA, 19 nt, Artificial Sequence
  Description of Artificial Sequence: Synthetic oligonucleotide
ucuucagagugcacaguau

SEQ ID NO: 2147390 - RNA, 19 nt, Artificial Sequence
  Description of Artificial Sequence: Synthetic oligonucleotide
agauugcacagcaaggagu

SEQ ID NO: 2147391 - RNA, 19 nt, Artificial Sequence
  Description of Artificial Sequence: Synthetic oligonucleotide
cuugguugcggauaaguua

SEQ ID NO: 2147392 - RNA, 19 nt, Artificial Sequence
  Description of Artificial Sequence: Synthetic oligonucleotide
cucuugguucucuggagug

SEQ ID NO: 2147393 - RNA, 19 nt, Artificial Sequence
  Description of Artificial Sequence: Synthetic oligonucleotide
ucuggauaaaugguccgaa

SEQ ID NO: 2147394 - RNA, 19 nt, Artificial Sequence
  Description of Artificial Sequence: Synthetic oligonucleotide
auacacacccucccuguca

SEQ ID NO: 2147395 - RNA, 19 nt, Artificial Sequence
  Description of Artificial Sequence: Synthetic oligonucleotide
guugcggauaaguuauauc

SEQ ID NO: 2147396 - RNA, 19 nt, Artificial Sequence
  Description of Artificial Sequence: Synthetic oligonucleotide
aaggucccaugauccagug

SEQ ID NO: 2147397 - RNA, 19 nt, Artificial Sequence
  Description of Artificial Sequence: Synthetic oligonucleotide
guauuccuugggcacucgg

SEQ ID NO: 2147398 - RNA, 19 nt, Artificial Sequence
  Description of Artificial Sequence: Synthetic oligonucleotide
ucuuggcaggagcagccca

SEQ ID NO: 2147399 - RNA, 19 nt, Artificial Sequence
  Description of Artificial Sequence: Synthetic oligonucleotide
uaaguguaaggaagcucuc

SEQ ID NO: 2147400 - RNA, 19 nt, Artificial Sequence
  Description of Artificial Sequence: Synthetic oligonucleotide
ugguaucuucacucuuucc

SEQ ID NO: 2147401 - RNA, 19 nt, Artificial Sequence
  Description of Artificial Sequence: Synthetic oligonucleotide
guuuacucuugguucucug

SEQ ID NO: 2147402 - RNA, 19 nt, Artificial Sequence
  Description of Artificial Sequence: Synthetic oligonucleotide
ugacaaaggcgcuccaaua

SEQ ID NO: 2147403 - RNA, 19 nt, Artificial Sequence
  Description of Artificial Sequence: Synthetic oligonucleotide
acaguaugggaugccagug

SEQ ID NO: 2147404 - RNA, 19 nt, Artificial Sequence
  Description of Artificial Sequence: Synthetic oligonucleotide
uaccaugcuguaagucuug

SEQ ID NO: 2147405 - RNA, 19 nt, Artificial Sequence
  Description of Artificial Sequence: Synthetic oligonucleotide
ggucuggauaaaugguccg

SEQ ID NO: 2147406 - RNA, 19 nt, Artificial Sequence
  Description of Artificial Sequence: Synthetic oligonucleotide
gaagguguggccaguguuc

SEQ ID NO: 2147407 - RNA, 19 nt, Artificial Sequence
  Description of Artificial Sequence: Synthetic oligonucleotide
gaugguuccuagcagcagu

SEQ ID NO: 2147408 - RNA, 19 nt, Artificial Sequence
  Description of Artificial Sequence: Synthetic oligonucleotide
cuguaagucuugguugcgg

SEQ ID NO: 2147409 - RNA, 19 nt, Artificial Sequence
  Description of Artificial Sequence: Synthetic oligonucleotide
guuagguuuacucuugguu

SEQ ID NO: 2147410 - RNA, 19 nt, Artificial Sequence
  Description of Artificial Sequence: Synthetic oligonucleotide
gacaggcugauuucauaca

SEQ ID NO: 2147411 - RNA, 19 nt, Artificial Sequence
  Description of Artificial Sequence: Synthetic oligonucleotide
gguuccauagugauucuug

SEQ ID NO: 2147412 - RNA, 19 nt, Artificial Sequence
  Description of Artificial Sequence: Synthetic oligonucleotide
uggggaagcuccccaguga

SEQ ID NO: 2147413 - RNA, 19 nt, Artificial Sequence
  Description of Artificial Sequence: Synthetic oligonucleotide
ugacgcaaugauggggaag

SEQ ID NO: 2147414 - RNA, 19 nt, Artificial Sequence
  Description of Artificial Sequence: Synthetic oligonucleotide
caaggaguugaaggugugg

SEQ ID NO: 2147415 - RNA, 19 nt, Artificial Sequence
  Description of Artificial Sequence: Synthetic oligonucleotide
cugucaaucacucuggguu

SEQ ID NO: 2147416 - RNA, 19 nt, Artificial Sequence
  Description of Artificial Sequence: Synthetic oligonucleotide
augauuagcaaggucccau

SEQ ID NO: 2147417 - RNA, 19 nt, Artificial Sequence
  Description of Artificial Sequence: Synthetic oligonucleotide
gguuccuagcagcaguacc

SEQ ID NO: 2147418 - RNA, 19 nt, Artificial Sequence
  Description of Artificial Sequence: Synthetic oligonucleotide
ggauaaguuauauccucuc

SEQ ID NO: 2147419 - RNA, 19 nt, Artificial Sequence
  Description of Artificial Sequence: Synthetic oligonucleotide
ggagugguauuccuugggc

SEQ ID NO: 2147420 - RNA, 19 nt, Artificial Sequence
  Description of Artificial Sequence: Synthetic oligonucleotide
uccauaccaugcuguaagu

SEQ ID NO: 2147421 - RNA, 19 nt, Artificial Sequence
  Description of Artificial Sequence: Synthetic oligonucleotide
ucaagccaugggaugguua

SEQ ID NO: 2147422 - RNA, 19 nt, Artificial Sequence
  Description of Artificial Sequence: Synthetic oligonucleotide
ccaugauuagcaagguccc

SEQ ID NO: 2147423 - RNA, 19 nt, Artificial Sequence
  Description of Artificial Sequence: Synthetic oligonucleotide
ucucuggagugguauuccu

SEQ ID NO: 2147424 - RNA, 19 nt, Artificial Sequence
  Description of Artificial Sequence: Synthetic oligonucleotide
auccucuguuuccagggga

SEQ ID NO: 2147425 - RNA, 19 nt, Artificial Sequence
  Description of Artificial Sequence: Synthetic oligonucleotide
gacaaaggcgcuccaauau

SEQ ID NO: 2147426 - RNA, 19 nt, Artificial Sequence
  Description of Artificial Sequence: Synthetic oligonucleotide
aucacugugccaguccaca

SEQ ID NO: 2147427 - RNA, 19 nt, Artificial Sequence
  Description of Artificial Sequence: Synthetic oligonucleotide
aaaggcgcuccaauaucca

SEQ ID NO: 2147428 - RNA, 19 nt, Artificial Sequence
  Description of Artificial Sequence: Synthetic oligonucleotide
cauagugauucuugaguaa

SEQ ID NO: 2147429 - RNA, 19 nt, Artificial Sequence
  Description of Artificial Sequence: Synthetic oligonucleotide
ggauauagacacacccuag

SEQ ID NO: 2147430 - RNA, 19 nt, Artificial Sequence
  Description of Artificial Sequence: Synthetic oligonucleotide
gaugguuaccuggcugggc

SEQ ID NO: 2147431 - RNA, 19 nt, Artificial Sequence
  Description of Artificial Sequence: Synthetic oligonucleotide
cccgguaaagauugcacag

SEQ ID NO: 2147432 - RNA, 19 nt, Artificial Sequence
  Description of Artificial Sequence: Synthetic oligonucleotide
ggcucuucagagugcacag

SEQ ID NO: 2147433 - RNA, 19 nt, Artificial Sequence
  Description of Artificial Sequence: Synthetic oligonucleotide
ugguccgaaagguuagguu

SEQ ID NO: 2147434 - RNA, 19 nt, Artificial Sequence
  Description of Artificial Sequence: Synthetic oligonucleotide
uuccaggggacauccugac

SEQ ID NO: 2147435 - RNA, 19 nt, Artificial Sequence
  Description of Artificial Sequence: Synthetic oligonucleotide
gugguaucuucacucuuuc

SEQ ID NO: 2147436 - RNA, 19 nt, Artificial Sequence
  Description of Artificial Sequence: Synthetic oligonucleotide
agccaugggaugguuaccu

SEQ ID NO: 2147437 - RNA, 19 nt, Artificial Sequence
  Description of Artificial Sequence: Synthetic oligonucleotide
cagagugcacaguauggga

SEQ ID NO: 2147438 - RNA, 19 nt, Artificial Sequence
  Description of Artificial Sequence: Synthetic oligonucleotide
caaucacucuggguucugg

SEQ ID NO: 2147439 - RNA, 19 nt, Artificial Sequence
  Description of Artificial Sequence: Synthetic oligonucleotide
auaaaugguccgaaagguu

SEQ ID NO: 2147440 - RNA, 19 nt, Artificial Sequence
  Description of Artificial Sequence: Synthetic oligonucleotide
ucuucacucuuuccacgua

SEQ ID NO: 2147441 - RNA, 19 nt, Artificial Sequence
  Description of Artificial Sequence: Synthetic oligonucleotide
gugauucuugaguaagugu

SEQ ID NO: 2147442 - RNA, 19 nt, Artificial Sequence
  Description of Artificial Sequence: Synthetic oligonucleotide
gcggauaaguuauauccuc

SEQ ID NO: 2147443 - RNA, 19 nt, Artificial Sequence
  Description of Artificial Sequence: Synthetic oligonucleotide
uccuucucaucccgguaaa

SEQ ID NO: 2147444 - RNA, 19 nt, Artificial Sequence
  Description of Artificial Sequence: Synthetic oligonucleotide
cccaauucaagccauggga

SEQ ID NO: 2147445 - RNA, 19 nt, Artificial Sequence
  Description of Artificial Sequence: Synthetic oligonucleotide
gugauaaacuuugcagaca

SEQ ID NO: 2147446 - RNA, 19 nt, Artificial Sequence
  Description of Artificial Sequence: Synthetic oligonucleotide
ggggaagcuccccagugag

SEQ ID NO: 2147447 - RNA, 19 nt, Artificial Sequence
  Description of Artificial Sequence: Synthetic oligonucleotide
agugguaucuucacucuuu

SEQ ID NO: 2147448 - RNA, 19 nt, Artificial Sequence
  Description of Artificial Sequence: Synthetic oligonucleotide
uccaggggacauccugaca

SEQ ID NO: 2147449 - RNA, 19 nt, Artificial Sequence
  Description of Artificial Sequence: Synthetic oligonucleotide
gggucuggauaaauggucc

SEQ ID NO: 2147450 - RNA, 19 nt, Artificial Sequence
  Description of Artificial Sequence: Synthetic oligonucleotide
gggaaagaugguuccuagc

SEQ ID NO: 2147451 - RNA, 19 nt, Artificial Sequence
  Description of Artificial Sequence: Synthetic oligonucleotide
ccacguauguauagucucc

SEQ ID NO: 2147452 - RNA, 19 nt, Artificial Sequence
  Description of Artificial Sequence: Synthetic oligonucleotide
ggggacauccugacaaagg

SEQ ID NO: 2147453 - RNA, 19 nt, Artificial Sequence
  Description of Artificial Sequence: Synthetic oligonucleotide
cccuagacacaccuguggg

SEQ ID NO: 2147454 - RNA, 19 nt, Artificial Sequence
  Description of Artificial Sequence: Synthetic oligonucleotide
ucaucccgguaaagauugc

SEQ ID NO: 2147455 - RNA, 19 nt, Artificial Sequence
  Description of Artificial Sequence: Synthetic oligonucleotide
acgucccaucaccaggaug

SEQ ID NO: 2147456 - RNA, 19 nt, Artificial Sequence
  Description of Artificial Sequence: Synthetic oligonucleotide
gcuuccuucaaguccacaa

SEQ ID NO: 2147457 - RNA, 19 nt, Artificial Sequence
  Description of Artificial Sequence: Synthetic oligonucleotide
gauugcacagcaaggaguu

SEQ ID NO: 2147458 - RNA, 19 nt, Artificial Sequence
  Description of Artificial Sequence: Synthetic oligonucleotide
agguuuacucuugguucuc

SEQ ID NO: 2147459 - RNA, 19 nt, Artificial Sequence
  Description of Artificial Sequence: Synthetic oligonucleotide
caguaggcuggcucuuggc

SEQ ID NO: 2147460 - RNA, 19 nt, Artificial Sequence
  Description of Artificial Sequence: Synthetic oligonucleotide
caggauauagacacacccu

SEQ ID NO: 2147461 - RNA, 19 nt, Artificial Sequence
  Description of Artificial Sequence: Synthetic oligonucleotide
cucaaaaguucgaguggca

SEQ ID NO: 2147462 - RNA, 19 nt, Artificial Sequence
  Description of Artificial Sequence: Synthetic oligonucleotide
acuguccuucucaucccgg

SEQ ID NO: 2147463 - RNA, 19 nt, Artificial Sequence
  Description of Artificial Sequence: Synthetic oligonucleotide
auaccaugcuguaagucuu

SEQ ID NO: 2147464 - RNA, 19 nt, Artificial Sequence
  Description of Artificial Sequence: Synthetic oligonucleotide
ucccaugauccagugguau

SEQ ID NO: 2147465 - RNA, 19 nt, Artificial Sequence
  Description of Artificial Sequence: Synthetic oligonucleotide
augggaugguuaccuggcu

SEQ ID NO: 2147466 - RNA, 19 nt, Artificial Sequence
  Description of Artificial Sequence: Synthetic oligonucleotide
gaguggcaccaaaacuaag

SEQ ID NO: 2147467 - RNA, 19 nt, Artificial Sequence
  Description of Artificial Sequence: Synthetic oligonucleotide
acguauguauagucuccau

SEQ ID NO: 2147468 - RNA, 19 nt, Artificial Sequence
  Description of Artificial Sequence: Synthetic oligonucleotide
cucggugcugccaguccgc

SEQ ID NO: 2147469 - RNA, 19 nt, Artificial Sequence
  Description of Artificial Sequence: Synthetic oligonucleotide
aguucgaguggcaccaaaa

SEQ ID NO: 2147470 - RNA, 19 nt, Artificial Sequence
  Description of Artificial Sequence: Synthetic oligonucleotide
uguuuccaggggacauccu

SEQ ID NO: 2147471 - RNA, 19 nt, Artificial Sequence
  Description of Artificial Sequence: Synthetic oligonucleotide
ccacaaagccaggauauag

SEQ ID NO: 2147472 - RNA, 19 nt, Artificial Sequence
  Description of Artificial Sequence: Synthetic oligonucleotide
cacacccuagacacaccug

SEQ ID NO: 2147473 - RNA, 19 nt, Artificial Sequence
  Description of Artificial Sequence: Synthetic oligonucleotide
ucaaucacucuggguucug

SEQ ID NO: 2147474 - RNA, 19 nt, Artificial Sequence
  Description of Artificial Sequence: Synthetic oligonucleotide
cacccuagacacaccugug

SEQ ID NO: 2147475 - RNA, 19 nt, Artificial Sequence
  Description of Artificial Sequence: Synthetic oligonucleotide
auauccagucagcuuccuu

SEQ ID NO: 2147476 - RNA, 19 nt, Artificial Sequence
  Description of Artificial Sequence: Synthetic oligonucleotide
gcaguaggcuggcucuugg

SEQ ID NO: 2147477 - RNA, 19 nt, Artificial Sequence
  Description of Artificial Sequence: Synthetic oligonucleotide
auucaagccaugggauggu

SEQ ID NO: 2147478 - RNA, 19 nt, Artificial Sequence
  Description of Artificial Sequence: Synthetic oligonucleotide
cuggauaaaugguccgaaa

SEQ ID NO: 2147479 - RNA, 19 nt, Artificial Sequence
  Description of Artificial Sequence: Synthetic oligonucleotide
gguccgaaagguuagguuu

SEQ ID NO: 2147480 - RNA, 19 nt, Artificial Sequence
  Description of Artificial Sequence: Synthetic oligonucleotide
cacacccucccugucaauc

SEQ ID NO: 2147481 - RNA, 19 nt, Artificial Sequence
  Description of Artificial Sequence: Synthetic oligonucleotide
cauccugacaaaggcgcuc

SEQ ID NO: 2147482 - RNA, 19 nt, Artificial Sequence
  Description of Artificial Sequence: Synthetic oligonucleotide
gucuggauaaaugguccga

SEQ ID NO: 2147483 - RNA, 19 nt, Artificial Sequence
  Description of Artificial Sequence: Synthetic oligonucleotide
gcaccaaaacuaagugacg

SEQ ID NO: 2147484 - RNA, 19 nt, Artificial Sequence
  Description of Artificial Sequence: Synthetic oligonucleotide
augguccgaaagguuaggu

SEQ ID NO: 2147485 - RNA, 19 nt, Artificial Sequence
  Description of Artificial Sequence: Synthetic oligonucleotide
acacgucccaucaccagga

SEQ ID NO: 2147486 - RNA, 19 nt, Artificial Sequence
  Description of Artificial Sequence: Synthetic oligonucleotide
gaggauuggguuccauagu

SEQ ID NO: 2147487 - RNA, 19 nt, Artificial Sequence
  Description of Artificial Sequence: Synthetic oligonucleotide
gugaggauuggguuccaua

SEQ ID NO: 2147488 - RNA, 19 nt, Artificial Sequence
  Description of Artificial Sequence: Synthetic oligonucleotide
gaggguucaucaucacugu

SEQ ID NO: 2147489 - RNA, 19 nt, Artificial Sequence
  Description of Artificial Sequence: Synthetic oligonucleotide
cacucggugcugccagucc

SEQ ID NO: 2147490 - RNA, 19 nt, Artificial Sequence
  Description of Artificial Sequence: Synthetic oligonucleotide
cucccuguacgcgggcucg

SEQ ID NO: 2147491 - RNA, 19 nt, Artificial Sequence
  Description of Artificial Sequence: Synthetic oligonucleotide
gcuuguguagcuccuucca

SEQ ID NO: 2147492 - RNA, 19 nt, Artificial Sequence
  Description of Artificial Sequence: Synthetic oligonucleotide
ugguauuccuugggcacuc

SEQ ID NO: 2147493 - RNA, 19 nt, Artificial Sequence
  Description of Artificial Sequence: Synthetic oligonucleotide
ugcccuggugucugggaaa

SEQ ID NO: 2147494 - RNA, 19 nt, Artificial Sequence
  Description of Artificial Sequence: Synthetic oligonucleotide
cuugggcacucggugcugc

SEQ ID NO: 2147495 - RNA, 19 nt, Artificial Sequence
  Description of Artificial Sequence: Synthetic oligonucleotide
uccgcacaaccagcugagg

SEQ ID NO: 2147496 - RNA, 19 nt, Artificial Sequence
  Description of Artificial Sequence: Synthetic oligonucleotide
cacguauguauagucucca

SEQ ID NO: 2147497 - RNA, 19 nt, Artificial Sequence
  Description of Artificial Sequence: Synthetic oligonucleotide
uauccucucugaugcccau

SEQ ID NO: 2147498 - RNA, 19 nt, Artificial Sequence
  Description of Artificial Sequence: Synthetic oligonucleotide
gaguaaguguaaggaagcu

SEQ ID NO: 2147499 - RNA, 19 nt, Artificial Sequence
  Description of Artificial Sequence: Synthetic oligonucleotide
auucccaauucaagccaug

SEQ ID NO: 2147500 - RNA, 19 nt, Artificial Sequence
  Description of Artificial Sequence: Synthetic oligonucleotide
caaaacuaagugacgcaau

SEQ ID NO: 2147501 - RNA, 19 nt, Artificial Sequence
  Description of Artificial Sequence: Synthetic oligonucleotide
ccauagugauucuugagua

SEQ ID NO: 2147502 - RNA, 19 nt, Artificial Sequence
  Description of Artificial Sequence: Synthetic oligonucleotide
ccaggcucccuguacgcgg

SEQ ID NO: 2147503 - RNA, 19 nt, Artificial Sequence
  Description of Artificial Sequence: Synthetic oligonucleotide
ccgcacaaccagcugaggc

SEQ ID NO: 2147504 - RNA, 19 nt, Artificial Sequence
  Description of Artificial Sequence: Synthetic oligonucleotide
uugggcacucggugcugcc

SEQ ID NO: 2147505 - RNA, 19 nt, Artificial Sequence
  Description of Artificial Sequence: Synthetic oligonucleotide
cucgccgucuuuuguccuc

SEQ ID NO: 2147506 - RNA, 19 nt, Artificial Sequence
  Description of Artificial Sequence: Synthetic oligonucleotide
aggcgcuccaauauccagu

SEQ ID NO: 2147507 - RNA, 19 nt, Artificial Sequence
  Description of Artificial Sequence: Synthetic oligonucleotide
uccacaaagccaggauaua

SEQ ID NO: 2147508 - RNA, 19 nt, Artificial Sequence
  Description of Artificial Sequence: Synthetic oligonucleotide
uggguuccauagugauucu

SEQ ID NO: 2147509 - RNA, 19 nt, Artificial Sequence
  Description of Artificial Sequence: Synthetic oligonucleotide
gugacaggcugauuucaua

SEQ ID NO: 2147510 - RNA, 19 nt, Artificial Sequence
  Description of Artificial Sequence: Synthetic oligonucleotide
ugguuccuagcagcaguac

SEQ ID NO: 2147511 - RNA, 19 nt, Artificial Sequence
  Description of Artificial Sequence: Synthetic oligonucleotide
ccaggggacauccugacaa

SEQ ID NO: 2147512 - RNA, 19 nt, Artificial Sequence
  Description of Artificial Sequence: Synthetic oligonucleotide
gugaggguucaucaucacu

SEQ ID NO: 2147513 - RNA, 19 nt, Artificial Sequence
  Description of Artificial Sequence: Synthetic oligonucleotide
ccgucuuuuguccuccaug

SEQ ID NO: 2147514 - RNA, 19 nt, Artificial Sequence
  Description of Artificial Sequence: Synthetic oligonucleotide
caucccgguaaagauugca

SEQ ID NO: 2147515 - RNA, 19 nt, Artificial Sequence
  Description of Artificial Sequence: Synthetic oligonucleotide
uugguucucuggaguggua

SEQ ID NO: 2147516 - RNA, 19 nt, Artificial Sequence
  Description of Artificial Sequence: Synthetic oligonucleotide
ggaugguuaccuggcuggg

SEQ ID NO: 2147517 - RNA, 19 nt, Artificial Sequence
  Description of Artificial Sequence: Synthetic oligonucleotide
gcuccaauauccagucagc

SEQ ID NO: 2147518 - RNA, 19 nt, Artificial Sequence
  Description of Artificial Sequence: Synthetic oligonucleotide
cucuuuccacguauguaua

SEQ ID NO: 2147519 - RNA, 19 nt, Artificial Sequence
  Description of Artificial Sequence: Synthetic oligonucleotide
auuggguuccauagugauu

SEQ ID NO: 2147520 - RNA, 19 nt, Artificial Sequence
  Description of Artificial Sequence: Synthetic oligonucleotide
gcuguaagucuugguugcg

SEQ ID NO: 2147521 - RNA, 19 nt, Artificial Sequence
  Description of Artificial Sequence: Synthetic oligonucleotide
aaaguucgaguggcaccaa

SEQ ID NO: 2147522 - RNA, 19 nt, Artificial Sequence
  Description of Artificial Sequence: Synthetic oligonucleotide
cuuucuguucugauauuuu

SEQ ID NO: 2147523 - RNA, 19 nt, Artificial Sequence
  Description of Artificial Sequence: Synthetic oligonucleotide
aggcucccuguacgcgggc

SEQ ID NO: 2147524 - RNA, 19 nt, Artificial Sequence
  Description of Artificial Sequence: Synthetic oligonucleotide
caugauuagcaagguccca

SEQ ID NO: 2147525 - RNA, 19 nt, Artificial Sequence
  Description of Artificial Sequence: Synthetic oligonucleotide
guccacaaagccaggauau

SEQ ID NO: 2147526 - RNA, 19 nt, Artificial Sequence
  Description of Artificial Sequence: Synthetic oligonucleotide
caguugcugcuccuugcuc

SEQ ID NO: 2147527 - RNA, 19 nt, Artificial Sequence
  Description of Artificial Sequence: Synthetic oligonucleotide
ccgguaaagauugcacagc

SEQ ID NO: 2147528 - RNA, 19 nt, Artificial Sequence
  Description of Artificial Sequence: Synthetic oligonucleotide
acauccugacaaaggcgcu

SEQ ID NO: 2147529 - RNA, 19 nt, Artificial Sequence
  Description of Artificial Sequence: Synthetic oligonucleotide
gucuugguugcggauaagu

SEQ ID NO: 2147530 - RNA, 19 nt, Artificial Sequence
  Description of Artificial Sequence: Synthetic oligonucleotide
cugccaguccgcuugugua

SEQ ID NO: 2147531 - RNA, 19 nt, Artificial Sequence
  Description of Artificial Sequence: Synthetic oligonucleotide
gggcacucggugcugccag

SEQ ID NO: 2147532 - RNA, 19 nt, Artificial Sequence
  Description of Artificial Sequence: Synthetic oligonucleotide
cuuuccacguauguauagu

SEQ ID NO: 2147533 - RNA, 19 nt, Artificial Sequence
  Description of Artificial Sequence: Synthetic oligonucleotide
cuucacucuuuccacguau

SEQ ID NO: 2147534 - RNA, 19 nt, Artificial Sequence
  Description of Artificial Sequence: Synthetic oligonucleotide
cuguccgcacaaccagcug

SEQ ID NO: 2147535 - RNA, 19 nt, Artificial Sequence
  Description of Artificial Sequence: Synthetic oligonucleotide
ugggcacucggugcugcca

SEQ ID NO: 2147536 - RNA, 19 nt, Artificial Sequence
  Description of Artificial Sequence: Synthetic oligonucleotide
ggcugauuucauacacacc

SEQ ID NO: 2147537 - RNA, 19 nt, Artificial Sequence
  Description of Artificial Sequence: Synthetic oligonucleotide
ugguugcggauaaguuaua

SEQ ID NO: 2147538 - RNA, 19 nt, Artificial Sequence
  Description of Artificial Sequence: Synthetic oligonucleotide
ccaaaacuaagugacgcaa

SEQ ID NO: 2147539 - RNA, 19 nt, Artificial Sequence
  Description of Artificial Sequence: Synthetic oligonucleotide
cucuccauaccaugcugua

SEQ ID NO: 2147540 - RNA, 19 nt, Artificial Sequence
  Description of Artificial Sequence: Synthetic oligonucleotide
gcacaguaugggaugccag

SEQ ID NO: 2147541 - RNA, 19 nt, Artificial Sequence
  Description of Artificial Sequence: Synthetic oligonucleotide
guaagucuugguugcggau

SEQ ID NO: 2147542 - RNA, 19 nt, Artificial Sequence
  Description of Artificial Sequence: Synthetic oligonucleotide
caaggucccaugauccagu

SEQ ID NO: 2147543 - RNA, 19 nt, Artificial Sequence
  Description of Artificial Sequence: Synthetic oligonucleotide
aggaagcucuccauaccau

SEQ ID NO: 2147544 - RNA, 19 nt, Artificial Sequence
  Description of Artificial Sequence: Synthetic oligonucleotide
cauucccaauucaagccau

SEQ ID NO: 2147545 - RNA, 19 nt, Artificial Sequence
  Description of Artificial Sequence: Synthetic oligonucleotide
uucaagccaugggaugguu

SEQ ID NO: 2147546 - RNA, 19 nt, Artificial Sequence
  Description of Artificial Sequence: Synthetic oligonucleotide
guccgaaagguuagguuua

SEQ ID NO: 2147547 - RNA, 19 nt, Artificial Sequence
  Description of Artificial Sequence: Synthetic oligonucleotide
ggauuggguuccauaguga

SEQ ID NO: 2147548 - RNA, 19 nt, Artificial Sequence
  Description of Artificial Sequence: Synthetic oligonucleotide
cuugcuccuccaggccugc

SEQ ID NO: 2147549 - RNA, 19 nt, Artificial Sequence
  Description of Artificial Sequence: Synthetic oligonucleotide
augguuccuagcagcagua

SEQ ID NO: 2147550 - RNA, 19 nt, Artificial Sequence
  Description of Artificial Sequence: Synthetic oligonucleotide
gguauuccuugggcacucg

SEQ ID NO: 2147551 - RNA, 19 nt, Artificial Sequence
  Description of Artificial Sequence: Synthetic oligonucleotide
cugaggcucuuugaacaca

SEQ ID NO: 2147552 - RNA, 19 nt, Artificial Sequence
  Description of Artificial Sequence: Synthetic oligonucleotide
cccaugauccagugguauc

SEQ ID NO: 2147553 - RNA, 19 nt, Artificial Sequence
  Description of Artificial Sequence: Synthetic oligonucleotide
cuuguguagcuccuuccau

SEQ ID NO: 2147554 - RNA, 19 nt, Artificial Sequence
  Description of Artificial Sequence: Synthetic oligonucleotide
gguaaagauugcacagcaa

SEQ ID NO: 2147555 - RNA, 19 nt, Artificial Sequence
  Description of Artificial Sequence: Synthetic oligonucleotide
gggaugccagugaggauug

SEQ ID NO: 2147556 - RNA, 19 nt, Artificial Sequence
  Description of Artificial Sequence: Synthetic oligonucleotide
cccugucaaucacucuggg

SEQ ID NO: 2147557 - RNA, 19 nt, Artificial Sequence
  Description of Artificial Sequence: Synthetic oligonucleotide
cuccaauauccagucagcu

SEQ ID NO: 2147558 - RNA, 19 nt, Artificial Sequence
  Description of Artificial Sequence: Synthetic oligonucleotide
gccaggauauagacacacc

SEQ ID NO: 2147559 - RNA, 19 nt, Artificial Sequence
  Description of Artificial Sequence: Synthetic oligonucleotide
cugucaggcaguugcugcu

SEQ ID NO: 2147560 - RNA, 19 nt, Artificial Sequence
  Description of Artificial Sequence: Synthetic oligonucleotide
ccauaccaugcuguaaguc

SEQ ID NO: 2147561 - RNA, 19 nt, Artificial Sequence
  Description of Artificial Sequence: Synthetic oligonucleotide
cgguaaagauugcacagca

SEQ ID NO: 2147562 - RNA, 19 nt, Artificial Sequence
  Description of Artificial Sequence: Synthetic oligonucleotide
ccaauucaagccaugggau

SEQ ID NO: 2147563 - RNA, 19 nt, Artificial Sequence
  Description of Artificial Sequence: Synthetic oligonucleotide
gugacgcaaugauggggaa

SEQ ID NO: 2147564 - RNA, 19 nt, Artificial Sequence
  Description of Artificial Sequence: Synthetic oligonucleotide
ucggugcugccaguccgcu

SEQ ID NO: 2147565 - RNA, 19 nt, Artificial Sequence
  Description of Artificial Sequence: Synthetic oligonucleotide
ccuguacgcgggcucgccg

SEQ ID NO: 2147566 - RNA, 19 nt, Artificial Sequence
  Description of Artificial Sequence: Synthetic oligonucleotide
aguaccuggcugggcagua

SEQ ID NO: 2147567 - RNA, 19 nt, Artificial Sequence
  Description of Artificial Sequence: Synthetic oligonucleotide
gccaugggaugguuaccug

SEQ ID NO: 2147568 - RNA, 19 nt, Artificial Sequence
  Description of Artificial Sequence: Synthetic oligonucleotide
gaagcuccccagugagggu

SEQ ID NO: 2147569 - RNA, 19 nt, Artificial Sequence
  Description of Artificial Sequence: Synthetic oligonucleotide
caccucagugauaaacuuu

SEQ ID NO: 2147570 - RNA, 19 nt, Artificial Sequence
  Description of Artificial Sequence: Synthetic oligonucleotide
gggcucgccgucuuuuguc

SEQ ID NO: 2147571 - RNA, 19 nt, Artificial Sequence
  Description of Artificial Sequence: Synthetic oligonucleotide
ccucaucucaaaaguucga

SEQ ID NO: 2147572 - RNA, 19 nt, Artificial Sequence
  Description of Artificial Sequence: Synthetic oligonucleotide
gucaaucacucuggguucu

SEQ ID NO: 2147573 - RNA, 19 nt, Artificial Sequence
  Description of Artificial Sequence: Synthetic oligonucleotide
cugcccuggugucugggaa

SEQ ID NO: 2147574 - RNA, 19 nt, Artificial Sequence
  Description of Artificial Sequence: Synthetic oligonucleotide
ggguucuggggcuguccgc

SEQ ID NO: 2147575 - RNA, 19 nt, Artificial Sequence
  Description of Artificial Sequence: Synthetic oligonucleotide
uacgcgggcucgccgucuu

SEQ ID NO: 2147576 - RNA, 19 nt, Artificial Sequence
  Description of Artificial Sequence: Synthetic oligonucleotide
caggggacauccugacaaa

SEQ ID NO: 2147577 - RNA, 19 nt, Artificial Sequence
  Description of Artificial Sequence: Synthetic oligonucleotide
caguccgcuuguguagcuc

SEQ ID NO: 2147578 - RNA, 19 nt, Artificial Sequence
  Description of Artificial Sequence: Synthetic oligonucleotide
acgcaaugauggggaagcu

SEQ ID NO: 2147579 - RNA, 19 nt, Artificial Sequence
  Description of Artificial Sequence: Synthetic oligonucleotide
gcccuggugucugggaaag

SEQ ID NO: 2147580 - RNA, 19 nt, Artificial Sequence
  Description of Artificial Sequence: Synthetic oligonucleotide
cuuccaugauuagcaaggu

SEQ ID NO: 2147581 - RNA, 19 nt, Artificial Sequence
  Description of Artificial Sequence: Synthetic oligonucleotide
caaugcggcucuucagagu

SEQ ID NO: 2147582 - RNA, 19 nt, Artificial Sequence
  Description of Artificial Sequence: Synthetic oligonucleotide
gugguauuccuugggcacu

SEQ ID NO: 2147583 - RNA, 19 nt, Artificial Sequence
  Description of Artificial Sequence: Synthetic oligonucleotide
ucccuguacgcgggcucgc

SEQ ID NO: 2147584 - RNA, 19 nt, Artificial Sequence
  Description of Artificial Sequence: Synthetic oligonucleotide
gccaguccgcuuguguagc

SEQ ID NO: 2147585 - RNA, 19 nt, Artificial Sequence
  Description of Artificial Sequence: Synthetic oligonucleotide
cagcaguaccuggcugggc

SEQ ID NO: 2147586 - RNA, 19 nt, Artificial Sequence
  Description of Artificial Sequence: Synthetic oligonucleotide
cgucuuuuguccuccaugu

SEQ ID NO: 2147587 - RNA, 19 nt, Artificial Sequence
  Description of Artificial Sequence: Synthetic oligonucleotide
ggcaguaggcuggcucuug

SEQ ID NO: 2147588 - RNA, 19 nt, Artificial Sequence
  Description of Artificial Sequence: Synthetic oligonucleotide
ugcugccaguccgcuugug

SEQ ID NO: 2147589 - RNA, 19 nt, Artificial Sequence
  Description of Artificial Sequence: Synthetic oligonucleotide
cuguacgcgggcucgccgu

SEQ ID NO: 2147590 - RNA, 19 nt, Artificial Sequence
  Description of Artificial Sequence: Synthetic oligonucleotide
gcccaggcucccuguacgc

SEQ ID NO: 2147591 - RNA, 19 nt, Artificial Sequence
  Description of Artificial Sequence: Synthetic oligonucleotide
acacacccucccugucaau

SEQ ID NO: 2147592 - RNA, 19 nt, Artificial Sequence
  Description of Artificial Sequence: Synthetic oligonucleotide
cugaugcccauccucuguu

SEQ ID NO: 2147593 - RNA, 19 nt, Artificial Sequence
  Description of Artificial Sequence: Synthetic oligonucleotide
gguugcggauaaguuauau

SEQ ID NO: 2147594 - RNA, 19 nt, Artificial Sequence
  Description of Artificial Sequence: Synthetic oligonucleotide
gcucccuguacgcgggcuc

SEQ ID NO: 2147595 - RNA, 19 nt, Artificial Sequence
  Description of Artificial Sequence: Synthetic oligonucleotide
gucuuuuguccuccauguu

SEQ ID NO: 2147596 - RNA, 19 nt, Artificial Sequence
  Description of Artificial Sequence: Synthetic oligonucleotide
cccaggcucccuguacgcg

SEQ ID NO: 2147597 - RNA, 19 nt, Artificial Sequence
  Description of Artificial Sequence: Synthetic oligonucleotide
ccgcuuguguagcuccuuc

SEQ ID NO: 2147598 - RNA, 19 nt, Artificial Sequence
  Description of Artificial Sequence: Synthetic oligonucleotide
ccuagacacaccugugggu

SEQ ID NO: 2147599 - RNA, 19 nt, Artificial Sequence
  Description of Artificial Sequence: Synthetic oligonucleotide
gcugccaguccgcuugugu

SEQ ID NO: 2147600 - RNA, 19 nt, Artificial Sequence
  Description of Artificial Sequence: Synthetic oligonucleotide
cggauaaguuauauccucu

SEQ ID NO: 2147601 - RNA, 19 nt, Artificial Sequence
  Description of Artificial Sequence: Synthetic oligonucleotide
cgcaaugauggggaagcuc

SEQ ID NO: 2147602 - RNA, 19 nt, Artificial Sequence
  Description of Artificial Sequence: Synthetic oligonucleotide
gcgggcucgccgucuuuug

SEQ ID NO: 2147603 - RNA, 19 nt, Artificial Sequence
  Description of Artificial Sequence: Synthetic oligonucleotide
cgcacaaccagcugaggcu

SEQ ID NO: 2147604 - RNA, 19 nt, Artificial Sequence
  Description of Artificial Sequence: Synthetic oligonucleotide
ggaugcuccucuggggucu

SEQ ID NO: 2147605 - RNA, 19 nt, Artificial Sequence
  Description of Artificial Sequence: Synthetic oligonucleotide
cacaaccagcugaggcucu

SEQ ID NO: 2147606 - RNA, 19 nt, Artificial Sequence
  Description of Artificial Sequence: Synthetic oligonucleotide
cagugguaucuucacucuu

SEQ ID NO: 2147607 - RNA, 19 nt, Artificial Sequence
  Description of Artificial Sequence: Synthetic oligonucleotide
gcuguccgcacaaccagcu

SEQ ID NO: 2147608 - RNA, 19 nt, Artificial Sequence
  Description of Artificial Sequence: Synthetic oligonucleotide
gggagaggggcugcuaggu

SEQ ID NO: 2147609 - RNA, 19 nt, Artificial Sequence
  Description of Artificial Sequence: Synthetic oligonucleotide
gcacucggugcugccaguc

SEQ ID NO: 2147610 - RNA, 19 nt, Artificial Sequence
  Description of Artificial Sequence: Synthetic oligonucleotide
cguauguauagucuccauu

SEQ ID NO: 2147611 - RNA, 19 nt, Artificial Sequence
  Description of Artificial Sequence: Synthetic oligonucleotide
ccugacaaaggcgcuccaa

SEQ ID NO: 2147612 - RNA, 19 nt, Artificial Sequence
  Description of Artificial Sequence: Synthetic oligonucleotide
gcgcuccaauauccaguca

SEQ ID NO: 2147613 - RNA, 19 nt, Artificial Sequence
  Description of Artificial Sequence: Synthetic oligonucleotide
cccuguacgcgggcucgcc

SEQ ID NO: 2147614 - RNA, 19 nt, Artificial Sequence
  Description of Artificial Sequence: Synthetic oligonucleotide
cucuggggucuggauaaau

SEQ ID NO: 2147615 - RNA, 19 nt, Artificial Sequence
  Description of Artificial Sequence: Synthetic oligonucleotide
cagugaggauuggguucca

SEQ ID NO: 2147616 - RNA, 19 nt, Artificial Sequence
  Description of Artificial Sequence: Synthetic oligonucleotide
ccaugcuguaagucuuggu

SEQ ID NO: 2147617 - RNA, 19 nt, Artificial Sequence
  Description of Artificial Sequence: Synthetic oligonucleotide
cccagugaggguucaucau

SEQ ID NO: 2147618 - RNA, 19 nt, Artificial Sequence
  Description of Artificial Sequence: Synthetic oligonucleotide
gcucgccgucuuuuguccu

SEQ ID NO: 2147619 - RNA, 19 nt, Artificial Sequence
  Description of Artificial Sequence: Synthetic oligonucleotide
acgcgggcucgccgucuuu

SEQ ID NO: 2147620 - RNA, 19 nt, Artificial Sequence
  Description of Artificial Sequence: Synthetic oligonucleotide
guacgcgggcucgccgucu

SEQ ID NO: 2147621 - RNA, 19 nt, Artificial Sequence
  Description of Artificial Sequence: Synthetic oligonucleotide
ggcacucggugcugccagu

SEQ ID NO: 2147622 - RNA, 19 nt, Artificial Sequence
  Description of Artificial Sequence: Synthetic oligonucleotide
cacgucccaucaccaggau

SEQ ID NO: 2147623 - RNA, 19 nt, Artificial Sequence
  Description of Artificial Sequence: Synthetic oligonucleotide
gccgucuuuuguccuccau

SEQ ID NO: 2147624 - RNA, 19 nt, Artificial Sequence
  Description of Artificial Sequence: Synthetic oligonucleotide
gcggcucuucagagugcac

SEQ ID NO: 2147625 - RNA, 19 nt, Artificial Sequence
  Description of Artificial Sequence: Synthetic oligonucleotide
ccucccugucaaucacucu

SEQ ID NO: 2147626 - RNA, 19 nt, Artificial Sequence
  Description of Artificial Sequence: Synthetic oligonucleotide
caaccagcugaggcucuuu

SEQ ID NO: 2147627 - RNA, 19 nt, Artificial Sequence
  Description of Artificial Sequence: Synthetic oligonucleotide
ggcucccuguacgcgggcu

SEQ ID NO: 2147628 - RNA, 19 nt, Artificial Sequence
  Description of Artificial Sequence: Synthetic oligonucleotide
ccgaaagguuagguuuacu

SEQ ID NO: 2147629 - RNA, 19 nt, Artificial Sequence
  Description of Artificial Sequence: Synthetic oligonucleotide
ccucuggggucuggauaaa

SEQ ID NO: 2147630 - RNA, 19 nt, Artificial Sequence
  Description of Artificial Sequence: Synthetic oligonucleotide
cgccgucuuuuguccucca

SEQ ID NO: 2147631 - RNA, 19 nt, Artificial Sequence
  Description of Artificial Sequence: Synthetic oligonucleotide
cgggcucgccgucuuuugu

SEQ ID NO: 2147632 - RNA, 19 nt, Artificial Sequence
  Description of Artificial Sequence: Synthetic oligonucleotide
cgcgggcucgccgucuuuu

SEQ ID NO: 2147633 - RNA, 19 nt, Artificial Sequence
  Description of Artificial Sequence: Synthetic oligonucleotide
uuauuauuccagaagaagg

SEQ ID NO: 2147634 - RNA, 19 nt, Artificial Sequence
  Description of Artificial Sequence: Synthetic oligonucleotide
aauguugcuagagaagucc

SEQ ID NO: 2147635 - RNA, 19 nt, Artificial Sequence
  Description of Artificial Sequence: Synthetic oligonucleotide
acaggaaucacuuuccaac

SEQ ID NO: 2147636 - RNA, 19 nt, Artificial Sequence
  Description of Artificial Sequence: Synthetic oligonucleotide
ucauauugcaagcaggaag

SEQ ID NO: 2147637 - RNA, 19 nt, Artificial Sequence
  Description of Artificial Sequence: Synthetic oligonucleotide
uguuccaacuucaacagag

SEQ ID NO: 2147638 - RNA, 19 nt, Artificial Sequence
  Description of Artificial Sequence: Synthetic oligonucleotide
aaauguuguguuuuccuuc

SEQ ID NO: 2147639 - RNA, 19 nt, Artificial Sequence
  Description of Artificial Sequence: Synthetic oligonucleotide
cauaacaggaaucacaaac

SEQ ID NO: 2147640 - RNA, 19 nt, Artificial Sequence
  Description of Artificial Sequence: Synthetic oligonucleotide
uuuauuauuccagaagaag

SEQ ID NO: 2147641 - RNA, 19 nt, Artificial Sequence
  Description of Artificial Sequence: Synthetic oligonucleotide
ugaacagguauucuguucc

SEQ ID NO: 2147642 - RNA, 19 nt, Artificial Sequence
  Description of Artificial Sequence: Synthetic oligonucleotide
agcgauaccaccuucaugu

SEQ ID NO: 2147643 - RNA, 19 nt, Artificial Sequence
  Description of Artificial Sequence: Synthetic oligonucleotide
cauauugcaagcaggaagc

SEQ ID NO: 2147644 - RNA, 19 nt, Artificial Sequence
  Description of Artificial Sequence: Synthetic oligonucleotide
aacgaaagcauguugagua

SEQ ID NO: 2147645 - RNA, 19 nt, Artificial Sequence
  Description of Artificial Sequence: Synthetic oligonucleotide
aacuucaacagagugaucu

SEQ ID NO: 2147646 - RNA, 19 nt, Artificial Sequence
  Description of Artificial Sequence: Synthetic oligonucleotide
uugaguauccauaucauau

SEQ ID NO: 2147647 - RNA, 19 nt, Artificial Sequence
  Description of Artificial Sequence: Synthetic oligonucleotide
aacagagugaucugucccg

SEQ ID NO: 2147648 - RNA, 19 nt, Artificial Sequence
  Description of Artificial Sequence: Synthetic oligonucleotide
uguguagcagacaucaccc

SEQ ID NO: 2147649 - RNA, 19 nt, Artificial Sequence
  Description of Artificial Sequence: Synthetic oligonucleotide
acaaacucggaccuggaac

SEQ ID NO: 2147650 - RNA, 19 nt, Artificial Sequence
  Description of Artificial Sequence: Synthetic oligonucleotide
aaaggagaaguguccggcc

SEQ ID NO: 2147651 - RNA, 19 nt, Artificial Sequence
  Description of Artificial Sequence: Synthetic oligonucleotide
agaaaauccaguugccagg

SEQ ID NO: 2147652 - RNA, 19 nt, Artificial Sequence
  Description of Artificial Sequence: Synthetic oligonucleotide
aacucgaagcccaugaccg

SEQ ID NO: 2147653 - RNA, 19 nt, Artificial Sequence
  Description of Artificial Sequence: Synthetic oligonucleotide
cuucaugaaauguugcuag

SEQ ID NO: 2147654 - RNA, 19 nt, Artificial Sequence
  Description of Artificial Sequence: Synthetic oligonucleotide
aauguuguguuuuccuuca

SEQ ID NO: 2147655 - RNA, 19 nt, Artificial Sequence
  Description of Artificial Sequence: Synthetic oligonucleotide
agaaguccgaucuucaucu

SEQ ID NO: 2147656 - RNA, 19 nt, Artificial Sequence
  Description of Artificial Sequence: Synthetic oligonucleotide
ugaugcuguugucagaugc

SEQ ID NO: 2147657 - RNA, 19 nt, Artificial Sequence
  Description of Artificial Sequence: Synthetic oligonucleotide
auguugaguauccauauca

SEQ ID NO: 2147658 - RNA, 19 nt, Artificial Sequence
  Description of Artificial Sequence: Synthetic oligonucleotide
aguaaucaccaacgaaagc

SEQ ID NO: 2147659 - RNA, 19 nt, Artificial Sequence
  Description of Artificial Sequence: Synthetic oligonucleotide
ugcuagagaaguccgaucu

SEQ ID NO: 2147660 - RNA, 19 nt, Artificial Sequence
  Description of Artificial Sequence: Synthetic oligonucleotide
uuuacaacucgaucugucc

SEQ ID NO: 2147661 - RNA, 19 nt, Artificial Sequence
  Description of Artificial Sequence: Synthetic oligonucleotide
aacucgaucugucccacag

SEQ ID NO: 2147662 - RNA, 19 nt, Artificial Sequence
  Description of Artificial Sequence: Synthetic oligonucleotide
aggaaucacaaacucggac

SEQ ID NO: 2147663 - RNA, 19 nt, Artificial Sequence
  Description of Artificial Sequence: Synthetic oligonucleotide
ucccgaguaaucaccaacg

SEQ ID NO: 2147664 - RNA, 19 nt, Artificial Sequence
  Description of Artificial Sequence: Synthetic oligonucleotide
uuacaacucgaucuguccc

SEQ ID NO: 2147665 - RNA, 19 nt, Artificial Sequence
  Description of Artificial Sequence: Synthetic oligonucleotide
aacaggaaucacaaacucg

SEQ ID NO: 2147666 - RNA, 19 nt, Artificial Sequence
  Description of Artificial Sequence: Synthetic oligonucleotide
cauaucauauugcaagcag

SEQ ID NO: 2147667 - RNA, 19 nt, Artificial Sequence
  Description of Artificial Sequence: Synthetic oligonucleotide
agaguaaccguugaauggg

SEQ ID NO: 2147668 - RNA, 19 nt, Artificial Sequence
  Description of Artificial Sequence: Synthetic oligonucleotide
gauaccaccuucauguccc

SEQ ID NO: 2147669 - RNA, 19 nt, Artificial Sequence
  Description of Artificial Sequence: Synthetic oligonucleotide
ugcaaucccaccauccgag

SEQ ID NO: 2147670 - RNA, 19 nt, Artificial Sequence
  Description of Artificial Sequence: Synthetic oligonucleotide
gucgugauaacugaacagg

SEQ ID NO: 2147671 - RNA, 19 nt, Artificial Sequence
  Description of Artificial Sequence: Synthetic oligonucleotide
acagguauucuguuccaac

SEQ ID NO: 2147672 - RNA, 19 nt, Artificial Sequence
  Description of Artificial Sequence: Synthetic oligonucleotide
cuugcaauguccauggaca

SEQ ID NO: 2147673 - RNA, 19 nt, Artificial Sequence
  Description of Artificial Sequence: Synthetic oligonucleotide
cuuugauggagucauaaca

SEQ ID NO: 2147674 - RNA, 19 nt, Artificial Sequence
  Description of Artificial Sequence: Synthetic oligonucleotide
ggaaucacaaacucggacc

SEQ ID NO: 2147675 - RNA, 19 nt, Artificial Sequence
  Description of Artificial Sequence: Synthetic oligonucleotide
aucacuuuccaaccacugg

SEQ ID NO: 2147676 - RNA, 19 nt, Artificial Sequence
  Description of Artificial Sequence: Synthetic oligonucleotide
uccauaucauauugcaagc

SEQ ID NO: 2147677 - RNA, 19 nt, Artificial Sequence
  Description of Artificial Sequence: Synthetic oligonucleotide
gaagugacggccaagcaug

SEQ ID NO: 2147678 - RNA, 19 nt, Artificial Sequence
  Description of Artificial Sequence: Synthetic oligonucleotide
augaccggguaacuggacc

SEQ ID NO: 2147679 - RNA, 19 nt, Artificial Sequence
  Description of Artificial Sequence: Synthetic oligonucleotide
ugaaaggagaaguguccgg

SEQ ID NO: 2147680 - RNA, 19 nt, Artificial Sequence
  Description of Artificial Sequence: Synthetic oligonucleotide
gugcugaucacccacucgg

SEQ ID NO: 2147681 - RNA, 19 nt, Artificial Sequence
  Description of Artificial Sequence: Synthetic oligonucleotide
auaucauauugcaagcagg

SEQ ID NO: 2147682 - RNA, 19 nt, Artificial Sequence
  Description of Artificial Sequence: Synthetic oligonucleotide
cugcuaacauccauguucc

SEQ ID NO: 2147683 - RNA, 19 nt, Artificial Sequence
  Description of Artificial Sequence: Synthetic oligonucleotide
uuccaacuucaacagagug

SEQ ID NO: 2147684 - RNA, 19 nt, Artificial Sequence
  Description of Artificial Sequence: Synthetic oligonucleotide
ucaugaaauguugcuagag

SEQ ID NO: 2147685 - RNA, 19 nt, Artificial Sequence
  Description of Artificial Sequence: Synthetic oligonucleotide
acugcaaucccaccauccg

SEQ ID NO: 2147686 - RNA, 19 nt, Artificial Sequence
  Description of Artificial Sequence: Synthetic oligonucleotide
guauccauaucauauugca

SEQ ID NO: 2147687 - RNA, 19 nt, Artificial Sequence
  Description of Artificial Sequence: Synthetic oligonucleotide
ugaccggguaacuggaccg

SEQ ID NO: 2147688 - RNA, 19 nt, Artificial Sequence
  Description of Artificial Sequence: Synthetic oligonucleotide
gaaagcauguugaguaucc

SEQ ID NO: 2147689 - RNA, 19 nt, Artificial Sequence
  Description of Artificial Sequence: Synthetic oligonucleotide
uaacaggaaucacaaacuc

SEQ ID NO: 2147690 - RNA, 19 nt, Artificial Sequence
  Description of Artificial Sequence: Synthetic oligonucleotide
gaacucgaagcccaugacc

SEQ ID NO: 2147691 - RNA, 19 nt, Artificial Sequence
  Description of Artificial Sequence: Synthetic oligonucleotide
uuuccaaccacuggggagc

SEQ ID NO: 2147692 - RNA, 19 nt, Artificial Sequence
  Description of Artificial Sequence: Synthetic oligonucleotide
uguuccacacugcaauccc

SEQ ID NO: 2147693 - RNA, 19 nt, Artificial Sequence
  Description of Artificial Sequence: Synthetic oligonucleotide
uggaacucgaagcccauga

SEQ ID NO: 2147694 - RNA, 19 nt, Artificial Sequence
  Description of Artificial Sequence: Synthetic oligonucleotide
ucaguggggagaaaaucca

SEQ ID NO: 2147695 - RNA, 19 nt, Artificial Sequence
  Description of Artificial Sequence: Synthetic oligonucleotide
gaguaaucaccaacgaaag

SEQ ID NO: 2147696 - RNA, 19 nt, Artificial Sequence
  Description of Artificial Sequence: Synthetic oligonucleotide
ggggagaaaauccaguugc

SEQ ID NO: 2147697 - RNA, 19 nt, Artificial Sequence
  Description of Artificial Sequence: Synthetic oligonucleotide
gaaaggagaaguguccggc

SEQ ID NO: 2147698 - RNA, 19 nt, Artificial Sequence
  Description of Artificial Sequence: Synthetic oligonucleotide
agugacugcacucugucau

SEQ ID NO: 2147699 - RNA, 19 nt, Artificial Sequence
  Description of Artificial Sequence: Synthetic oligonucleotide
ucccauaucuuuacaacuc

SEQ ID NO: 2147700 - RNA, 19 nt, Artificial Sequence
  Description of Artificial Sequence: Synthetic oligonucleotide
aagcccaugaccggguaac

SEQ ID NO: 2147701 - RNA, 19 nt, Artificial Sequence
  Description of Artificial Sequence: Synthetic oligonucleotide
aaauguugcuagagaaguc

SEQ ID NO: 2147702 - RNA, 19 nt, Artificial Sequence
  Description of Artificial Sequence: Synthetic oligonucleotide
cuaacauccauguuccaca

SEQ ID NO: 2147703 - RNA, 19 nt, Artificial Sequence
  Description of Artificial Sequence: Synthetic oligonucleotide
auaacaggaaucacaaacu

SEQ ID NO: 2147704 - RNA, 19 nt, Artificial Sequence
  Description of Artificial Sequence: Synthetic oligonucleotide
caccacgggagucauaucc

SEQ ID NO: 2147705 - RNA, 19 nt, Artificial Sequence
  Description of Artificial Sequence: Synthetic oligonucleotide
aacugaacagguauucugu

SEQ ID NO: 2147706 - RNA, 19 nt, Artificial Sequence
  Description of Artificial Sequence: Synthetic oligonucleotide
uaaccguugaauggggucc

SEQ ID NO: 2147707 - RNA, 19 nt, Artificial Sequence
  Description of Artificial Sequence: Synthetic oligonucleotide
cuuuccaaccacuggggag

SEQ ID NO: 2147708 - RNA, 19 nt, Artificial Sequence
  Description of Artificial Sequence: Synthetic oligonucleotide
ucauaucccauaucuuuac

SEQ ID NO: 2147709 - RNA, 19 nt, Artificial Sequence
  Description of Artificial Sequence: Synthetic oligonucleotide
ucgugauaacugaacaggu

SEQ ID NO: 2147710 - RNA, 19 nt, Artificial Sequence
  Description of Artificial Sequence: Synthetic oligonucleotide
gaaaauccaguugccaggc

SEQ ID NO: 2147711 - RNA, 19 nt, Artificial Sequence
  Description of Artificial Sequence: Synthetic oligonucleotide
uguugaguauccauaucau

SEQ ID NO: 2147712 - RNA, 19 nt, Artificial Sequence
  Description of Artificial Sequence: Synthetic oligonucleotide
auaucccauaucuuuacaa

SEQ ID NO: 2147713 - RNA, 19 nt, Artificial Sequence
  Description of Artificial Sequence: Synthetic oligonucleotide
auugcaagcaggaagccca

SEQ ID NO: 2147714 - RNA, 19 nt, Artificial Sequence
  Description of Artificial Sequence: Synthetic oligonucleotide
cuucgugucccacaucugc

SEQ ID NO: 2147715 - RNA, 19 nt, Artificial Sequence
  Description of Artificial Sequence: Synthetic oligonucleotide
agcauguucccacugcgug

SEQ ID NO: 2147716 - RNA, 19 nt, Artificial Sequence
  Description of Artificial Sequence: Synthetic oligonucleotide
ugcacauccagcucacaca

SEQ ID NO: 2147717 - RNA, 19 nt, Artificial Sequence
  Description of Artificial Sequence: Synthetic oligonucleotide
caagcauguucccacugcg

SEQ ID NO: 2147718 - RNA, 19 nt, Artificial Sequence
  Description of Artificial Sequence: Synthetic oligonucleotide
uacaacucgaucuguccca

SEQ ID NO: 2147719 - RNA, 19 nt, Artificial Sequence
  Description of Artificial Sequence: Synthetic oligonucleotide
agaagugacggccaagcau

SEQ ID NO: 2147720 - RNA, 19 nt, Artificial Sequence
  Description of Artificial Sequence: Synthetic oligonucleotide
uguugucagaugcuccuga

SEQ ID NO: 2147721 - RNA, 19 nt, Artificial Sequence
  Description of Artificial Sequence: Synthetic oligonucleotide
agucauaacaggaaucaca

SEQ ID NO: 2147722 - RNA, 19 nt, Artificial Sequence
  Description of Artificial Sequence: Synthetic oligonucleotide
caacagagugaucuguccc

SEQ ID NO: 2147723 - RNA, 19 nt, Artificial Sequence
  Description of Artificial Sequence: Synthetic oligonucleotide
caggagacaagcugccucg

SEQ ID NO: 2147724 - RNA, 19 nt, Artificial Sequence
  Description of Artificial Sequence: Synthetic oligonucleotide
aagcauguugaguauccau

SEQ ID NO: 2147725 - RNA, 19 nt, Artificial Sequence
  Description of Artificial Sequence: Synthetic oligonucleotide
ucauggugucccugaaagg

SEQ ID NO: 2147726 - RNA, 19 nt, Artificial Sequence
  Description of Artificial Sequence: Synthetic oligonucleotide
ucccacaucugcuuuauua

SEQ ID NO: 2147727 - RNA, 19 nt, Artificial Sequence
  Description of Artificial Sequence: Synthetic oligonucleotide
cauccgaggagcaggagac

SEQ ID NO: 2147728 - RNA, 19 nt, Artificial Sequence
  Description of Artificial Sequence: Synthetic oligonucleotide
ugacggccaagcauguucc

SEQ ID NO: 2147729 - RNA, 19 nt, Artificial Sequence
  Description of Artificial Sequence: Synthetic oligonucleotide
ugaucacccacucggcagc

SEQ ID NO: 2147730 - RNA, 19 nt, Artificial Sequence
  Description of Artificial Sequence: Synthetic oligonucleotide
agaagaguaaccguugaau

SEQ ID NO: 2147731 - RNA, 19 nt, Artificial Sequence
  Description of Artificial Sequence: Synthetic oligonucleotide
aaucacuuuccaaccacug

SEQ ID NO: 2147732 - RNA, 19 nt, Artificial Sequence
  Description of Artificial Sequence: Synthetic oligonucleotide
cugaaaggagaaguguccg

SEQ ID NO: 2147733 - RNA, 19 nt, Artificial Sequence
  Description of Artificial Sequence: Synthetic oligonucleotide
uagagaaguccgaucuuca

SEQ ID NO: 2147734 - RNA, 19 nt, Artificial Sequence
  Description of Artificial Sequence: Synthetic oligonucleotide
uggagucauaacaggaauc

SEQ ID NO: 2147735 - RNA, 19 nt, Artificial Sequence
  Description of Artificial Sequence: Synthetic oligonucleotide
aaccguugaaugggguccc

SEQ ID NO: 2147736 - RNA, 19 nt, Artificial Sequence
  Description of Artificial Sequence: Synthetic oligonucleotide
aucugucccgaguaaucac

SEQ ID NO: 2147737 - RNA, 19 nt, Artificial Sequence
  Description of Artificial Sequence: Synthetic oligonucleotide
ugagggucgugauaacuga

SEQ ID NO: 2147738 - RNA, 19 nt, Artificial Sequence
  Description of Artificial Sequence: Synthetic oligonucleotide
auauugcaagcaggaagcc

SEQ ID NO: 2147739 - RNA, 19 nt, Artificial Sequence
  Description of Artificial Sequence: Synthetic oligonucleotide
aacuggaccgcuugcugcu

SEQ ID NO: 2147740 - RNA, 19 nt, Artificial Sequence
  Description of Artificial Sequence: Synthetic oligonucleotide
gaagaagggcugcucacac

SEQ ID NO: 2147741 - RNA, 19 nt, Artificial Sequence
  Description of Artificial Sequence: Synthetic oligonucleotide
ucucuauguguaacagccc

SEQ ID NO: 2147742 - RNA, 19 nt, Artificial Sequence
  Description of Artificial Sequence: Synthetic oligonucleotide
aagcgauaccaccuucaug

SEQ ID NO: 2147743 - RNA, 19 nt, Artificial Sequence
  Description of Artificial Sequence: Synthetic oligonucleotide
gagaaguccgaucuucauc

SEQ ID NO: 2147744 - RNA, 19 nt, Artificial Sequence
  Description of Artificial Sequence: Synthetic oligonucleotide
uauugcaagcaggaagccc

SEQ ID NO: 2147745 - RNA, 19 nt, Artificial Sequence
  Description of Artificial Sequence: Synthetic oligonucleotide
cugaucacccacucggcag

SEQ ID NO: 2147746 - RNA, 19 nt, Artificial Sequence
  Description of Artificial Sequence: Synthetic oligonucleotide
ugaguauccauaucauauu

SEQ ID NO: 2147747 - RNA, 19 nt, Artificial Sequence
  Description of Artificial Sequence: Synthetic oligonucleotide
ugucccacaggucaccauc

SEQ ID NO: 2147748 - RNA, 19 nt, Artificial Sequence
  Description of Artificial Sequence: Synthetic oligonucleotide
uguugcuagagaaguccga

SEQ ID NO: 2147749 - RNA, 19 nt, Artificial Sequence
  Description of Artificial Sequence: Synthetic oligonucleotide
cagugaugcugucucaacc

SEQ ID NO: 2147750 - RNA, 19 nt, Artificial Sequence
  Description of Artificial Sequence: Synthetic oligonucleotide
aucacccaucuccaggauc

SEQ ID NO: 2147751 - RNA, 19 nt, Artificial Sequence
  Description of Artificial Sequence: Synthetic oligonucleotide
auggacauaugggaaaugu

SEQ ID NO: 2147752 - RNA, 19 nt, Artificial Sequence
  Description of Artificial Sequence: Synthetic oligonucleotide
caggacgcgaagaagugac

SEQ ID NO: 2147753 - RNA, 19 nt, Artificial Sequence
  Description of Artificial Sequence: Synthetic oligonucleotide
ugacugcacucugucaugg

SEQ ID NO: 2147754 - RNA, 19 nt, Artificial Sequence
  Description of Artificial Sequence: Synthetic oligonucleotide
auggagucauaacaggaau

SEQ ID NO: 2147755 - RNA, 19 nt, Artificial Sequence
  Description of Artificial Sequence: Synthetic oligonucleotide
accaacgaaagcauguuga

SEQ ID NO: 2147756 - RNA, 19 nt, Artificial Sequence
  Description of Artificial Sequence: Synthetic oligonucleotide
aaguguccggccuuuccga

SEQ ID NO: 2147757 - RNA, 19 nt, Artificial Sequence
  Description of Artificial Sequence: Synthetic oligonucleotide
cuuuauuauuccagaagaa

SEQ ID NO: 2147758 - RNA, 19 nt, Artificial Sequence
  Description of Artificial Sequence: Synthetic oligonucleotide
ucggaccuggaacucgaag

SEQ ID NO: 2147759 - RNA, 19 nt, Artificial Sequence
  Description of Artificial Sequence: Synthetic oligonucleotide
uugucagaugcuccugaga

SEQ ID NO: 2147760 - RNA, 19 nt, Artificial Sequence
  Description of Artificial Sequence: Synthetic oligonucleotide
guugaauggggucccacca

SEQ ID NO: 2147761 - RNA, 19 nt, Artificial Sequence
  Description of Artificial Sequence: Synthetic oligonucleotide
gacgcgaagaagugacggc

SEQ ID NO: 2147762 - RNA, 19 nt, Artificial Sequence
  Description of Artificial Sequence: Synthetic oligonucleotide
uucgugucccacaucugcu

SEQ ID NO: 2147763 - RNA, 19 nt, Artificial Sequence
  Description of Artificial Sequence: Synthetic oligonucleotide
uaacauccauguuccacac

SEQ ID NO: 2147764 - RNA, 19 nt, Artificial Sequence
  Description of Artificial Sequence: Synthetic oligonucleotide
agagugaucugucccgagu

SEQ ID NO: 2147765 - RNA, 19 nt, Artificial Sequence
  Description of Artificial Sequence: Synthetic oligonucleotide
ugagacguugguuucucua

SEQ ID NO: 2147766 - RNA, 19 nt, Artificial Sequence
  Description of Artificial Sequence: Synthetic oligonucleotide
ggagucauaucccauaucu

SEQ ID NO: 2147767 - RNA, 19 nt, Artificial Sequence
  Description of Artificial Sequence: Synthetic oligonucleotide
ggucgugauaacugaacag

SEQ ID NO: 2147768 - RNA, 19 nt, Artificial Sequence
  Description of Artificial Sequence: Synthetic oligonucleotide
cugcagguagcacagugac

SEQ ID NO: 2147769 - RNA, 19 nt, Artificial Sequence
  Description of Artificial Sequence: Synthetic oligonucleotide
ugucucaaccccagcgucu

SEQ ID NO: 2147770 - RNA, 19 nt, Artificial Sequence
  Description of Artificial Sequence: Synthetic oligonucleotide
guaaccguugaaugggguc

SEQ ID NO: 2147771 - RNA, 19 nt, Artificial Sequence
  Description of Artificial Sequence: Synthetic oligonucleotide
gugauaacugaacagguau

SEQ ID NO: 2147772 - RNA, 19 nt, Artificial Sequence
  Description of Artificial Sequence: Synthetic oligonucleotide
gaucaguggggagaaaauc

SEQ ID NO: 2147773 - RNA, 19 nt, Artificial Sequence
  Description of Artificial Sequence: Synthetic oligonucleotide
aucaccaacgaaagcaugu

SEQ ID NO: 2147774 - RNA, 19 nt, Artificial Sequence
  Description of Artificial Sequence: Synthetic oligonucleotide
aaucaccaacgaaagcaug

SEQ ID NO: 2147775 - RNA, 19 nt, Artificial Sequence
  Description of Artificial Sequence: Synthetic oligonucleotide
auaacugaacagguauucu

SEQ ID NO: 2147776 - RNA, 19 nt, Artificial Sequence
  Description of Artificial Sequence: Synthetic oligonucleotide
uccugagaagaguaaccgu

SEQ ID NO: 2147777 - RNA, 19 nt, Artificial Sequence
  Description of Artificial Sequence: Synthetic oligonucleotide
aaagcauguugaguaucca

SEQ ID NO: 2147778 - RNA, 19 nt, Artificial Sequence
  Description of Artificial Sequence: Synthetic oligonucleotide
gauggagucauaacaggaa

SEQ ID NO: 2147779 - RNA, 19 nt, Artificial Sequence
  Description of Artificial Sequence: Synthetic oligonucleotide
aaaauccaguugccaggcu

SEQ ID NO: 2147780 - RNA, 19 nt, Artificial Sequence
  Description of Artificial Sequence: Synthetic oligonucleotide
agacguugguuucucuaug

SEQ ID NO: 2147781 - RNA, 19 nt, Artificial Sequence
  Description of Artificial Sequence: Synthetic oligonucleotide
ccgaucuucaucuuugaug

SEQ ID NO: 2147782 - RNA, 19 nt, Artificial Sequence
  Description of Artificial Sequence: Synthetic oligonucleotide
accacgggagucauauccc

SEQ ID NO: 2147783 - RNA, 19 nt, Artificial Sequence
  Description of Artificial Sequence: Synthetic oligonucleotide
auguugcuagagaaguccg

SEQ ID NO: 2147784 - RNA, 19 nt, Artificial Sequence
  Description of Artificial Sequence: Synthetic oligonucleotide
gaguaaccguugaaugggg

SEQ ID NO: 2147785 - RNA, 19 nt, Artificial Sequence
  Description of Artificial Sequence: Synthetic oligonucleotide
aguccgaucuucaucuuug

SEQ ID NO: 2147786 - RNA, 19 nt, Artificial Sequence
  Description of Artificial Sequence: Synthetic oligonucleotide
uggacauaugggaaauguu

SEQ ID NO: 2147787 - RNA, 19 nt, Artificial Sequence
  Description of Artificial Sequence: Synthetic oligonucleotide
uaugggaaauguuguguuu

SEQ ID NO: 2147788 - RNA, 19 nt, Artificial Sequence
  Description of Artificial Sequence: Synthetic oligonucleotide
agggucgugauaacugaac

SEQ ID NO: 2147789 - RNA, 19 nt, Artificial Sequence
  Description of Artificial Sequence: Synthetic oligonucleotide
gugacggccaagcauguuc

SEQ ID NO: 2147790 - RNA, 19 nt, Artificial Sequence
  Description of Artificial Sequence: Synthetic oligonucleotide
acucgaucugucccacagg

SEQ ID NO: 2147791 - RNA, 19 nt, Artificial Sequence
  Description of Artificial Sequence: Synthetic oligonucleotide
uuuugagacguugguuucu

SEQ ID NO: 2147792 - RNA, 19 nt, Artificial Sequence
  Description of Artificial Sequence: Synthetic oligonucleotide
aaguccgaucuucaucuuu

SEQ ID NO: 2147793 - RNA, 19 nt, Artificial Sequence
  Description of Artificial Sequence: Synthetic oligonucleotide
acucgaagcccaugaccgg

SEQ ID NO: 2147794 - RNA, 19 nt, Artificial Sequence
  Description of Artificial Sequence: Synthetic oligonucleotide
gcucacacacuugucaugg

SEQ ID NO: 2147795 - RNA, 19 nt, Artificial Sequence
  Description of Artificial Sequence: Synthetic oligonucleotide
aacauccauguuccacacu

SEQ ID NO: 2147796 - RNA, 19 nt, Artificial Sequence
  Description of Artificial Sequence: Synthetic oligonucleotide
gugaugcugucucaacccc

SEQ ID NO: 2147797 - RNA, 19 nt, Artificial Sequence
  Description of Artificial Sequence: Synthetic oligonucleotide
cucaaccccagcgucuucg

SEQ ID NO: 2147798 - RNA, 19 nt, Artificial Sequence
  Description of Artificial Sequence: Synthetic oligonucleotide
ugccucgugagcugcaggu

SEQ ID NO: 2147799 - RNA, 19 nt, Artificial Sequence
  Description of Artificial Sequence: Synthetic oligonucleotide
aucccaccauccgaggagc

SEQ ID NO: 2147800 - RNA, 19 nt, Artificial Sequence
  Description of Artificial Sequence: Synthetic oligonucleotide
agcacagugacugcacucu

SEQ ID NO: 2147801 - RNA, 19 nt, Artificial Sequence
  Description of Artificial Sequence: Synthetic oligonucleotide
ugggaaauguuguguuuuc

SEQ ID NO: 2147802 - RNA, 19 nt, Artificial Sequence
  Description of Artificial Sequence: Synthetic oligonucleotide
ugcugaucacccacucggc

SEQ ID NO: 2147803 - RNA, 19 nt, Artificial Sequence
  Description of Artificial Sequence: Synthetic oligonucleotide
agguauucuguuccaacuu

SEQ ID NO: 2147804 - RNA, 19 nt, Artificial Sequence
  Description of Artificial Sequence: Synthetic oligonucleotide
acggccugcccacacuuuc

SEQ ID NO: 2147805 - RNA, 19 nt, Artificial Sequence
  Description of Artificial Sequence: Synthetic oligonucleotide
gaucugucccgaguaauca

SEQ ID NO: 2147806 - RNA, 19 nt, Artificial Sequence
  Description of Artificial Sequence: Synthetic oligonucleotide
acaacucgaucugucccac

SEQ ID NO: 2147807 - RNA, 19 nt, Artificial Sequence
  Description of Artificial Sequence: Synthetic oligonucleotide
gguauucuguuccaacuuc

SEQ ID NO: 2147808 - RNA, 19 nt, Artificial Sequence
  Description of Artificial Sequence: Synthetic oligonucleotide
augcuguugucagaugcuc

SEQ ID NO: 2147809 - RNA, 19 nt, Artificial Sequence
  Description of Artificial Sequence: Synthetic oligonucleotide
acguugguuucucuaugug

SEQ ID NO: 2147810 - RNA, 19 nt, Artificial Sequence
  Description of Artificial Sequence: Synthetic oligonucleotide
gugcacauccagcucacac

SEQ ID NO: 2147811 - RNA, 19 nt, Artificial Sequence
  Description of Artificial Sequence: Synthetic oligonucleotide
ucccugaaaggagaagugu

SEQ ID NO: 2147812 - RNA, 19 nt, Artificial Sequence
  Description of Artificial Sequence: Synthetic oligonucleotide
gucccgaguaaucaccaac

SEQ ID NO: 2147813 - RNA, 19 nt, Artificial Sequence
  Description of Artificial Sequence: Synthetic oligonucleotide
ugcuccugagaagaguaac

SEQ ID NO: 2147814 - RNA, 19 nt, Artificial Sequence
  Description of Artificial Sequence: Synthetic oligonucleotide
gaaauguuguguuuuccuu

SEQ ID NO: 2147815 - RNA, 19 nt, Artificial Sequence
  Description of Artificial Sequence: Synthetic oligonucleotide
cucgaagcccaugaccggg

SEQ ID NO: 2147816 - RNA, 19 nt, Artificial Sequence
  Description of Artificial Sequence: Synthetic oligonucleotide
gaugcuccugagaagagua

SEQ ID NO: 2147817 - RNA, 19 nt, Artificial Sequence
  Description of Artificial Sequence: Synthetic oligonucleotide
uugcaagcaggaagcccag

SEQ ID NO: 2147818 - RNA, 19 nt, Artificial Sequence
  Description of Artificial Sequence: Synthetic oligonucleotide
ucuucgugucccacaucug

SEQ ID NO: 2147819 - RNA, 19 nt, Artificial Sequence
  Description of Artificial Sequence: Synthetic oligonucleotide
caguggggagaaaauccag

SEQ ID NO: 2147820 - RNA, 19 nt, Artificial Sequence
  Description of Artificial Sequence: Synthetic oligonucleotide
ugggcugaagaggauggca

SEQ ID NO: 2147821 - RNA, 19 nt, Artificial Sequence
  Description of Artificial Sequence: Synthetic oligonucleotide
cccauaucuuuacaacucg

SEQ ID NO: 2147822 - RNA, 19 nt, Artificial Sequence
  Description of Artificial Sequence: Synthetic oligonucleotide
agagaaguccgaucuucau

SEQ ID NO: 2147823 - RNA, 19 nt, Artificial Sequence
  Description of Artificial Sequence: Synthetic oligonucleotide
gucuucgugucccacaucu

SEQ ID NO: 2147824 - RNA, 19 nt, Artificial Sequence
  Description of Artificial Sequence: Synthetic oligonucleotide
guugaguauccauaucaua

SEQ ID NO: 2147825 - RNA, 19 nt, Artificial Sequence
  Description of Artificial Sequence: Synthetic oligonucleotide
uggggagccucuucucugc

SEQ ID NO: 2147826 - RNA, 19 nt, Artificial Sequence
  Description of Artificial Sequence: Synthetic oligonucleotide
caaacucggaccuggaacu

SEQ ID NO: 2147827 - RNA, 19 nt, Artificial Sequence
  Description of Artificial Sequence: Synthetic oligonucleotide
aucugucccacaggucacc

SEQ ID NO: 2147828 - RNA, 19 nt, Artificial Sequence
  Description of Artificial Sequence: Synthetic oligonucleotide
cauguucccacugcgugug

SEQ ID NO: 2147829 - RNA, 19 nt, Artificial Sequence
  Description of Artificial Sequence: Synthetic oligonucleotide
ggacgcgaagaagugacgg

SEQ ID NO: 2147830 - RNA, 19 nt, Artificial Sequence
  Description of Artificial Sequence: Synthetic oligonucleotide
gaauggggucccaccaaag

SEQ ID NO: 2147831 - RNA, 19 nt, Artificial Sequence
  Description of Artificial Sequence: Synthetic oligonucleotide
aguggggagaaaauccagu

SEQ ID NO: 2147832 - RNA, 19 nt, Artificial Sequence
  Description of Artificial Sequence: Synthetic oligonucleotide
gaacagguauucuguucca

SEQ ID NO: 2147833 - RNA, 19 nt, Artificial Sequence
  Description of Artificial Sequence: Synthetic oligonucleotide
ugcagguagcacagugacu

SEQ ID NO: 2147834 - RNA, 19 nt, Artificial Sequence
  Description of Artificial Sequence: Synthetic oligonucleotide
uccgaucuucaucuuugau

SEQ ID NO: 2147835 - RNA, 19 nt, Artificial Sequence
  Description of Artificial Sequence: Synthetic oligonucleotide
gagugaucugucccgagua

SEQ ID NO: 2147836 - RNA, 19 nt, Artificial Sequence
  Description of Artificial Sequence: Synthetic oligonucleotide
ucacaaacucggaccugga

SEQ ID NO: 2147837 - RNA, 19 nt, Artificial Sequence
  Description of Artificial Sequence: Synthetic oligonucleotide
cucgugagcugcagguagc

SEQ ID NO: 2147838 - RNA, 19 nt, Artificial Sequence
  Description of Artificial Sequence: Synthetic oligonucleotide
caaaggcaagcgauaccac

SEQ ID NO: 2147839 - RNA, 19 nt, Artificial Sequence
  Description of Artificial Sequence: Synthetic oligonucleotide
agcauguugaguauccaua

SEQ ID NO: 2147840 - RNA, 19 nt, Artificial Sequence
  Description of Artificial Sequence: Synthetic oligonucleotide
aacagguauucuguuccaa

SEQ ID NO: 2147841 - RNA, 19 nt, Artificial Sequence
  Description of Artificial Sequence: Synthetic oligonucleotide
acgaaagcauguugaguau

SEQ ID NO: 2147842 - RNA, 19 nt, Artificial Sequence
  Description of Artificial Sequence: Synthetic oligonucleotide
gguuucucuauguguaaca

SEQ ID NO: 2147843 - RNA, 19 nt, Artificial Sequence
  Description of Artificial Sequence: Synthetic oligonucleotide
cgaguaaucaccaacgaaa

SEQ ID NO: 2147844 - RNA, 19 nt, Artificial Sequence
  Description of Artificial Sequence: Synthetic oligonucleotide
ucccaccaaaggcaagcga

SEQ ID NO: 2147845 - RNA, 19 nt, Artificial Sequence
  Description of Artificial Sequence: Synthetic oligonucleotide
caccaacgaaagcauguug

SEQ ID NO: 2147846 - RNA, 19 nt, Artificial Sequence
  Description of Artificial Sequence: Synthetic oligonucleotide
ccaacgaaagcauguugag

SEQ ID NO: 2147847 - RNA, 19 nt, Artificial Sequence
  Description of Artificial Sequence: Synthetic oligonucleotide
aguugccaggcugcagccc

SEQ ID NO: 2147848 - RNA, 19 nt, Artificial Sequence
  Description of Artificial Sequence: Synthetic oligonucleotide
gagucauaacaggaaucac

SEQ ID NO: 2147849 - RNA, 19 nt, Artificial Sequence
  Description of Artificial Sequence: Synthetic oligonucleotide
caccaaaggcaagcgauac

SEQ ID NO: 2147850 - RNA, 19 nt, Artificial Sequence
  Description of Artificial Sequence: Synthetic oligonucleotide
gugacugcacucugucaug

SEQ ID NO: 2147851 - RNA, 19 nt, Artificial Sequence
  Description of Artificial Sequence: Synthetic oligonucleotide
caguccccuugcaaugucc

SEQ ID NO: 2147852 - RNA, 19 nt, Artificial Sequence
  Description of Artificial Sequence: Synthetic oligonucleotide
guagcagacaucacccauc

SEQ ID NO: 2147853 - RNA, 19 nt, Artificial Sequence
  Description of Artificial Sequence: Synthetic oligonucleotide
uccgaggagcaggagacaa

SEQ ID NO: 2147854 - RNA, 19 nt, Artificial Sequence
  Description of Artificial Sequence: Synthetic oligonucleotide
cugucucaaccccagcguc

SEQ ID NO: 2147855 - RNA, 19 nt, Artificial Sequence
  Description of Artificial Sequence: Synthetic oligonucleotide
gcuaacauccauguuccac

SEQ ID NO: 2147856 - RNA, 19 nt, Artificial Sequence
  Description of Artificial Sequence: Synthetic oligonucleotide
ccuugcaauguccauggac

SEQ ID NO: 2147857 - RNA, 19 nt, Artificial Sequence
  Description of Artificial Sequence: Synthetic oligonucleotide
ccccuugcaauguccaugg

SEQ ID NO: 2147858 - RNA, 19 nt, Artificial Sequence
  Description of Artificial Sequence: Synthetic oligonucleotide
ggaaauguuguguuuuccu

SEQ ID NO: 2147859 - RNA, 19 nt, Artificial Sequence
  Description of Artificial Sequence: Synthetic oligonucleotide
cuggggagccucuucucug

SEQ ID NO: 2147860 - RNA, 19 nt, Artificial Sequence
  Description of Artificial Sequence: Synthetic oligonucleotide
gacguugguuucucuaugu

SEQ ID NO: 2147861 - RNA, 19 nt, Artificial Sequence
  Description of Artificial Sequence: Synthetic oligonucleotide
aagcauguucccacugcgu

SEQ ID NO: 2147862 - RNA, 19 nt, Artificial Sequence
  Description of Artificial Sequence: Synthetic oligonucleotide
gagacguugguuucucuau

SEQ ID NO: 2147863 - RNA, 19 nt, Artificial Sequence
  Description of Artificial Sequence: Synthetic oligonucleotide
caguugccaggcugcagcc

SEQ ID NO: 2147864 - RNA, 19 nt, Artificial Sequence
  Description of Artificial Sequence: Synthetic oligonucleotide
cucacacacuugucauggc

SEQ ID NO: 2147865 - RNA, 19 nt, Artificial Sequence
  Description of Artificial Sequence: Synthetic oligonucleotide
cauaugggaaauguugugu

SEQ ID NO: 2147866 - RNA, 19 nt, Artificial Sequence
  Description of Artificial Sequence: Synthetic oligonucleotide
ucaccaacgaaagcauguu

SEQ ID NO: 2147867 - RNA, 19 nt, Artificial Sequence
  Description of Artificial Sequence: Synthetic oligonucleotide
ucgaucugucccacagguc

SEQ ID NO: 2147868 - RNA, 19 nt, Artificial Sequence
  Description of Artificial Sequence: Synthetic oligonucleotide
uugagacguugguuucucu

SEQ ID NO: 2147869 - RNA, 19 nt, Artificial Sequence
  Description of Artificial Sequence: Synthetic oligonucleotide
caugaccggguaacuggac

SEQ ID NO: 2147870 - RNA, 19 nt, Artificial Sequence
  Description of Artificial Sequence: Synthetic oligonucleotide
cagguauucuguuccaacu

SEQ ID NO: 2147871 - RNA, 19 nt, Artificial Sequence
  Description of Artificial Sequence: Synthetic oligonucleotide
ggucccaccaaaggcaagc

SEQ ID NO: 2147872 - RNA, 19 nt, Artificial Sequence
  Description of Artificial Sequence: Synthetic oligonucleotide
ccaagcauguucccacugc

SEQ ID NO: 2147873 - RNA, 19 nt, Artificial Sequence
  Description of Artificial Sequence: Synthetic oligonucleotide
ucaaccccagcgucuucgu

SEQ ID NO: 2147874 - RNA, 19 nt, Artificial Sequence
  Description of Artificial Sequence: Synthetic oligonucleotide
aguaaccguugaauggggu

SEQ ID NO: 2147875 - RNA, 19 nt, Artificial Sequence
  Description of Artificial Sequence: Synthetic oligonucleotide
gaagcccaggacgcgaaga

SEQ ID NO: 2147876 - RNA, 19 nt, Artificial Sequence
  Description of Artificial Sequence: Synthetic oligonucleotide
uccggccuuuccgaugucc

SEQ ID NO: 2147877 - RNA, 19 nt, Artificial Sequence
  Description of Artificial Sequence: Synthetic oligonucleotide
cagguagcacagugacugc

SEQ ID NO: 2147878 - RNA, 19 nt, Artificial Sequence
  Description of Artificial Sequence: Synthetic oligonucleotide
acuucccgcagacggccug

SEQ ID NO: 2147879 - RNA, 19 nt, Artificial Sequence
  Description of Artificial Sequence: Synthetic oligonucleotide
gacggccaagcauguuccc

SEQ ID NO: 2147880 - RNA, 19 nt, Artificial Sequence
  Description of Artificial Sequence: Synthetic oligonucleotide
ugcuaacauccauguucca

SEQ ID NO: 2147881 - RNA, 19 nt, Artificial Sequence
  Description of Artificial Sequence: Synthetic oligonucleotide
gaugcuguugucagaugcu

SEQ ID NO: 2147882 - RNA, 19 nt, Artificial Sequence
  Description of Artificial Sequence: Synthetic oligonucleotide
ugcaauguccauggacaua

SEQ ID NO: 2147883 - RNA, 19 nt, Artificial Sequence
  Description of Artificial Sequence: Synthetic oligonucleotide
cugucccgaguaaucacca

SEQ ID NO: 2147884 - RNA, 19 nt, Artificial Sequence
  Description of Artificial Sequence: Synthetic oligonucleotide
ugucccgaguaaucaccaa

SEQ ID NO: 2147885 - RNA, 19 nt, Artificial Sequence
  Description of Artificial Sequence: Synthetic oligonucleotide
caaucccaccauccgagga

SEQ ID NO: 2147886 - RNA, 19 nt, Artificial Sequence
  Description of Artificial Sequence: Synthetic oligonucleotide
ugucccacaucugcuuuau

SEQ ID NO: 2147887 - RNA, 19 nt, Artificial Sequence
  Description of Artificial Sequence: Synthetic oligonucleotide
ggaacucgaagcccaugac

SEQ ID NO: 2147888 - RNA, 19 nt, Artificial Sequence
  Description of Artificial Sequence: Synthetic oligonucleotide
cugcaaucccaccauccga

SEQ ID NO: 2147889 - RNA, 19 nt, Artificial Sequence
  Description of Artificial Sequence: Synthetic oligonucleotide
aggagaaguguccggccuu

SEQ ID NO: 2147890 - RNA, 19 nt, Artificial Sequence
  Description of Artificial Sequence: Synthetic oligonucleotide
agaggauggcagacacccg

SEQ ID NO: 2147891 - RNA, 19 nt, Artificial Sequence
  Description of Artificial Sequence: Synthetic oligonucleotide
gaagcccaugaccggguaa

SEQ ID NO: 2147892 - RNA, 19 nt, Artificial Sequence
  Description of Artificial Sequence: Synthetic oligonucleotide
aguguccggccuuuccgau

SEQ ID NO: 2147893 - RNA, 19 nt, Artificial Sequence
  Description of Artificial Sequence: Synthetic oligonucleotide
gaccggguaacuggaccgc

SEQ ID NO: 2147894 - RNA, 19 nt, Artificial Sequence
  Description of Artificial Sequence: Synthetic oligonucleotide
cugugcugaucacccacuc

SEQ ID NO: 2147895 - RNA, 19 nt, Artificial Sequence
  Description of Artificial Sequence: Synthetic oligonucleotide
aggacgcgaagaagugacg

SEQ ID NO: 2147896 - RNA, 19 nt, Artificial Sequence
  Description of Artificial Sequence: Synthetic oligonucleotide
ccucgugagcugcagguag

SEQ ID NO: 2147897 - RNA, 19 nt, Artificial Sequence
  Description of Artificial Sequence: Synthetic oligonucleotide
aguccccuugcaaugucca

SEQ ID NO: 2147898 - RNA, 19 nt, Artificial Sequence
  Description of Artificial Sequence: Synthetic oligonucleotide
caggaaucacaaacucgga

SEQ ID NO: 2147899 - RNA, 19 nt, Artificial Sequence
  Description of Artificial Sequence: Synthetic oligonucleotide
aagugacggccaagcaugu

SEQ ID NO: 2147900 - RNA, 19 nt, Artificial Sequence
  Description of Artificial Sequence: Synthetic oligonucleotide
cgaucugucccacagguca

SEQ ID NO: 2147901 - RNA, 19 nt, Artificial Sequence
  Description of Artificial Sequence: Synthetic oligonucleotide
uuccaaccacuggggagcc

SEQ ID NO: 2147902 - RNA, 19 nt, Artificial Sequence
  Description of Artificial Sequence: Synthetic oligonucleotide
ggagccucuucucugcuaa

SEQ ID NO: 2147903 - RNA, 19 nt, Artificial Sequence
  Description of Artificial Sequence: Synthetic oligonucleotide
agacggccugcccacacuu

SEQ ID NO: 2147904 - RNA, 19 nt, Artificial Sequence
  Description of Artificial Sequence: Synthetic oligonucleotide
ucccaccauccgaggagca

SEQ ID NO: 2147905 - RNA, 19 nt, Artificial Sequence
  Description of Artificial Sequence: Synthetic oligonucleotide
guguccggccuuuccgaug

SEQ ID NO: 2147906 - RNA, 19 nt, Artificial Sequence
  Description of Artificial Sequence: Synthetic oligonucleotide
acggccaagcauguuccca

SEQ ID NO: 2147907 - RNA, 19 nt, Artificial Sequence
  Description of Artificial Sequence: Synthetic oligonucleotide
agcccaggacgcgaagaag

SEQ ID NO: 2147908 - RNA, 19 nt, Artificial Sequence
  Description of Artificial Sequence: Synthetic oligonucleotide
cguugaauggggucccacc

SEQ ID NO: 2147909 - RNA, 19 nt, Artificial Sequence
  Description of Artificial Sequence: Synthetic oligonucleotide
guugcuagagaaguccgau

SEQ ID NO: 2147910 - RNA, 19 nt, Artificial Sequence
  Description of Artificial Sequence: Synthetic oligonucleotide
ccaccauccgaggagcagg

SEQ ID NO: 2147911 - RNA, 19 nt, Artificial Sequence
  Description of Artificial Sequence: Synthetic oligonucleotide
cgauaccaccuucaugucc

SEQ ID NO: 2147912 - RNA, 19 nt, Artificial Sequence
  Description of Artificial Sequence: Synthetic oligonucleotide
auguuguguuuuccuucau

SEQ ID NO: 2147913 - RNA, 19 nt, Artificial Sequence
  Description of Artificial Sequence: Synthetic oligonucleotide
guagcacagugacugcacu

SEQ ID NO: 2147914 - RNA, 19 nt, Artificial Sequence
  Description of Artificial Sequence: Synthetic oligonucleotide
gaccaggcuggccugugua

SEQ ID NO: 2147915 - RNA, 19 nt, Artificial Sequence
  Description of Artificial Sequence: Synthetic oligonucleotide
ccauaucuuuacaacucga

SEQ ID NO: 2147916 - RNA, 19 nt, Artificial Sequence
  Description of Artificial Sequence: Synthetic oligonucleotide
acucggaccuggaacucga

SEQ ID NO: 2147917 - RNA, 19 nt, Artificial Sequence
  Description of Artificial Sequence: Synthetic oligonucleotide
cuucccgcagacggccugc

SEQ ID NO: 2147918 - RNA, 19 nt, Artificial Sequence
  Description of Artificial Sequence: Synthetic oligonucleotide
ugugcacauccagcucaca

SEQ ID NO: 2147919 - RNA, 19 nt, Artificial Sequence
  Description of Artificial Sequence: Synthetic oligonucleotide
cacaaacucggaccuggaa

SEQ ID NO: 2147920 - RNA, 19 nt, Artificial Sequence
  Description of Artificial Sequence: Synthetic oligonucleotide
ccagaagaagggcugcuca

SEQ ID NO: 2147921 - RNA, 19 nt, Artificial Sequence
  Description of Artificial Sequence: Synthetic oligonucleotide
gagggucgugauaacugaa

SEQ ID NO: 2147922 - RNA, 19 nt, Artificial Sequence
  Description of Artificial Sequence: Synthetic oligonucleotide
cuggaacucgaagcccaug

SEQ ID NO: 2147923 - RNA, 19 nt, Artificial Sequence
  Description of Artificial Sequence: Synthetic oligonucleotide
ucccgcagacggccugccc

SEQ ID NO: 2147924 - RNA, 19 nt, Artificial Sequence
  Description of Artificial Sequence: Synthetic oligonucleotide
ccggccuuuccgauguccc

SEQ ID NO: 2147925 - RNA, 19 nt, Artificial Sequence
  Description of Artificial Sequence: Synthetic oligonucleotide
caccauccgaggagcagga

SEQ ID NO: 2147926 - RNA, 19 nt, Artificial Sequence
  Description of Artificial Sequence: Synthetic oligonucleotide
gcaagcgauaccaccuuca

SEQ ID NO: 2147927 - RNA, 19 nt, Artificial Sequence
  Description of Artificial Sequence: Synthetic oligonucleotide
cccaggacgcgaagaagug

SEQ ID NO: 2147928 - RNA, 19 nt, Artificial Sequence
  Description of Artificial Sequence: Synthetic oligonucleotide
caacgaaagcauguugagu

SEQ ID NO: 2147929 - RNA, 19 nt, Artificial Sequence
  Description of Artificial Sequence: Synthetic oligonucleotide
gcacuucccgcagacggcc

SEQ ID NO: 2147930 - RNA, 19 nt, Artificial Sequence
  Description of Artificial Sequence: Synthetic oligonucleotide
ccauaucauauugcaagca

SEQ ID NO: 2147931 - RNA, 19 nt, Artificial Sequence
  Description of Artificial Sequence: Synthetic oligonucleotide
gggagucauaucccauauc

SEQ ID NO: 2147932 - RNA, 19 nt, Artificial Sequence
  Description of Artificial Sequence: Synthetic oligonucleotide
ccacugcgugugcacaucc

SEQ ID NO: 2147933 - RNA, 19 nt, Artificial Sequence
  Description of Artificial Sequence: Synthetic oligonucleotide
cacacugcaaucccaccau

SEQ ID NO: 2147934 - RNA, 19 nt, Artificial Sequence
  Description of Artificial Sequence: Synthetic oligonucleotide
ccauccgaggagcaggaga

SEQ ID NO: 2147935 - RNA, 19 nt, Artificial Sequence
  Description of Artificial Sequence: Synthetic oligonucleotide
accggguaacuggaccgcu

SEQ ID NO: 2147936 - RNA, 19 nt, Artificial Sequence
  Description of Artificial Sequence: Synthetic oligonucleotide
cccagcgucuucguguccc

SEQ ID NO: 2147937 - RNA, 19 nt, Artificial Sequence
  Description of Artificial Sequence: Synthetic oligonucleotide
aggagacaagcugccucgu

SEQ ID NO: 2147938 - RNA, 19 nt, Artificial Sequence
  Description of Artificial Sequence: Synthetic oligonucleotide
ccauguuccacacugcaau

SEQ ID NO: 2147939 - RNA, 19 nt, Artificial Sequence
  Description of Artificial Sequence: Synthetic oligonucleotide
acccaucuccaggaucagu

SEQ ID NO: 2147940 - RNA, 19 nt, Artificial Sequence
  Description of Artificial Sequence: Synthetic oligonucleotide
accauccgaggagcaggag

SEQ ID NO: 2147941 - RNA, 19 nt, Artificial Sequence
  Description of Artificial Sequence: Synthetic oligonucleotide
gcugucucaaccccagcgu

SEQ ID NO: 2147942 - RNA, 19 nt, Artificial Sequence
  Description of Artificial Sequence: Synthetic oligonucleotide
ccaaccacuggggagccuc

SEQ ID NO: 2147943 - RNA, 19 nt, Artificial Sequence
  Description of Artificial Sequence: Synthetic oligonucleotide
gagucauaucccauaucuu

SEQ ID NO: 2147944 - RNA, 19 nt, Artificial Sequence
  Description of Artificial Sequence: Synthetic oligonucleotide
caagcgauaccaccuucau

SEQ ID NO: 2147945 - RNA, 19 nt, Artificial Sequence
  Description of Artificial Sequence: Synthetic oligonucleotide
ccgaguaaucaccaacgaa

SEQ ID NO: 2147946 - RNA, 19 nt, Artificial Sequence
  Description of Artificial Sequence: Synthetic oligonucleotide
caggaagcccaggacgcga

SEQ ID NO: 2147947 - RNA, 19 nt, Artificial Sequence
  Description of Artificial Sequence: Synthetic oligonucleotide
auccgaggagcaggagaca

SEQ ID NO: 2147948 - RNA, 19 nt, Artificial Sequence
  Description of Artificial Sequence: Synthetic oligonucleotide
ccuguguagcagacaucac

SEQ ID NO: 2147949 - RNA, 19 nt, Artificial Sequence
  Description of Artificial Sequence: Synthetic oligonucleotide
agcccaugaccggguaacu

SEQ ID NO: 2147950 - RNA, 19 nt, Artificial Sequence
  Description of Artificial Sequence: Synthetic oligonucleotide
ccaugaccggguaacugga

SEQ ID NO: 2147951 - RNA, 19 nt, Artificial Sequence
  Description of Artificial Sequence: Synthetic oligonucleotide
cucggcagcugggcugaag

SEQ ID NO: 2147952 - RNA, 19 nt, Artificial Sequence
  Description of Artificial Sequence: Synthetic oligonucleotide
caacucgaucugucccaca

SEQ ID NO: 2147953 - RNA, 19 nt, Artificial Sequence
  Description of Artificial Sequence: Synthetic oligonucleotide
cgaaagcauguugaguauc

SEQ ID NO: 2147954 - RNA, 19 nt, Artificial Sequence
  Description of Artificial Sequence: Synthetic oligonucleotide
gcauguucccacugcgugu

SEQ ID NO: 2147955 - RNA, 19 nt, Artificial Sequence
  Description of Artificial Sequence: Synthetic oligonucleotide
gcccaugaccggguaacug

SEQ ID NO: 2147956 - RNA, 19 nt, Artificial Sequence
  Description of Artificial Sequence: Synthetic oligonucleotide
cacccaucuccaggaucag

SEQ ID NO: 2147957 - RNA, 19 nt, Artificial Sequence
  Description of Artificial Sequence: Synthetic oligonucleotide
gcagacggccugcccacac

SEQ ID NO: 2147958 - RNA, 19 nt, Artificial Sequence
  Description of Artificial Sequence: Synthetic oligonucleotide
cgugauaacugaacaggua

SEQ ID NO: 2147959 - RNA, 19 nt, Artificial Sequence
  Description of Artificial Sequence: Synthetic oligonucleotide
caccaucaguccccuugca

SEQ ID NO: 2147960 - RNA, 19 nt, Artificial Sequence
  Description of Artificial Sequence: Synthetic oligonucleotide
gcgaagaagugacggccaa

SEQ ID NO: 2147961 - RNA, 19 nt, Artificial Sequence
  Description of Artificial Sequence: Synthetic oligonucleotide
agugacggccaagcauguu

SEQ ID NO: 2147962 - RNA, 19 nt, Artificial Sequence
  Description of Artificial Sequence: Synthetic oligonucleotide
cagcccaccacgggaguca

SEQ ID NO: 2147963 - RNA, 19 nt, Artificial Sequence
  Description of Artificial Sequence: Synthetic oligonucleotide
cccgaguaaucaccaacga

SEQ ID NO: 2147964 - RNA, 19 nt, Artificial Sequence
  Description of Artificial Sequence: Synthetic oligonucleotide
gaaguccgaucuucaucuu

SEQ ID NO: 2147965 - RNA, 19 nt, Artificial Sequence
  Description of Artificial Sequence: Synthetic oligonucleotide
accguugaaugggguccca

SEQ ID NO: 2147966 - RNA, 19 nt, Artificial Sequence
  Description of Artificial Sequence: Synthetic oligonucleotide
gccuuuccgaugucccaca

SEQ ID NO: 2147967 - RNA, 19 nt, Artificial Sequence
  Description of Artificial Sequence: Synthetic oligonucleotide
cguugguuucucuaugugu

SEQ ID NO: 2147968 - RNA, 19 nt, Artificial Sequence
  Description of Artificial Sequence: Synthetic oligonucleotide
ccacgggagucauauccca

SEQ ID NO: 2147969 - RNA, 19 nt, Artificial Sequence
  Description of Artificial Sequence: Synthetic oligonucleotide
cagcgucuucgugucccac

SEQ ID NO: 2147970 - RNA, 19 nt, Artificial Sequence
  Description of Artificial Sequence: Synthetic oligonucleotide
gaucacccacucggcagcu

SEQ ID NO: 2147971 - RNA, 19 nt, Artificial Sequence
  Description of Artificial Sequence: Synthetic oligonucleotide
cccgcagacggccugccca

SEQ ID NO: 2147972 - RNA, 19 nt, Artificial Sequence
  Description of Artificial Sequence: Synthetic oligonucleotide
cccaccauccgaggagcag

SEQ ID NO: 2147973 - RNA, 19 nt, Artificial Sequence
  Description of Artificial Sequence: Synthetic oligonucleotide
ggaucaguggggagaaaau

SEQ ID NO: 2147974 - RNA, 19 nt, Artificial Sequence
  Description of Artificial Sequence: Synthetic oligonucleotide
augucccuugagggucgug

SEQ ID NO: 2147975 - RNA, 19 nt, Artificial Sequence
  Description of Artificial Sequence: Synthetic oligonucleotide
cacgggagucauaucccau

SEQ ID NO: 2147976 - RNA, 19 nt, Artificial Sequence
  Description of Artificial Sequence: Synthetic oligonucleotide
gcacucugucauggugucc

SEQ ID NO: 2147977 - RNA, 19 nt, Artificial Sequence
  Description of Artificial Sequence: Synthetic oligonucleotide
cucggaccuggaacucgaa

SEQ ID NO: 2147978 - RNA, 19 nt, Artificial Sequence
  Description of Artificial Sequence: Synthetic oligonucleotide
ccgcagacggccugcccac

SEQ ID NO: 2147979 - RNA, 19 nt, Artificial Sequence
  Description of Artificial Sequence: Synthetic oligonucleotide
cacauccagcucacacacu

SEQ ID NO: 2147980 - RNA, 19 nt, Artificial Sequence
  Description of Artificial Sequence: Synthetic oligonucleotide
cgcgaagaagugacggcca

SEQ ID NO: 2147981 - RNA, 19 nt, Artificial Sequence
  Description of Artificial Sequence: Synthetic oligonucleotide
agcccaccacgggagucau

SEQ ID NO: 2147982 - RNA, 19 nt, Artificial Sequence
  Description of Artificial Sequence: Synthetic oligonucleotide
gcuagagaaguccgaucuu

SEQ ID NO: 2147983 - RNA, 19 nt, Artificial Sequence
  Description of Artificial Sequence: Synthetic oligonucleotide
ccaggacgcgaagaaguga

SEQ ID NO: 2147984 - RNA, 19 nt, Artificial Sequence
  Description of Artificial Sequence: Synthetic oligonucleotide
ccguugaauggggucccac

SEQ ID NO: 2147985 - RNA, 19 nt, Artificial Sequence
  Description of Artificial Sequence: Synthetic oligonucleotide
cacacuugucauggccugu

SEQ ID NO: 2147986 - RNA, 19 nt, Artificial Sequence
  Description of Artificial Sequence: Synthetic oligonucleotide
cagacggccugcccacacu

SEQ ID NO: 2147987 - RNA, 19 nt, Artificial Sequence
  Description of Artificial Sequence: Synthetic oligonucleotide
ccacaucugcuuuauuauu

SEQ ID NO: 2147988 - RNA, 19 nt, Artificial Sequence
  Description of Artificial Sequence: Synthetic oligonucleotide
cccacugcgugugcacauc

SEQ ID NO: 2147989 - RNA, 19 nt, Artificial Sequence
  Description of Artificial Sequence: Synthetic oligonucleotide
ggauggcagacacccgguu

SEQ ID NO: 2147990 - RNA, 19 nt, Artificial Sequence
  Description of Artificial Sequence: Synthetic oligonucleotide
cacuucccgcagacggccu

SEQ ID NO: 2147991 - RNA, 19 nt, Artificial Sequence
  Description of Artificial Sequence: Synthetic oligonucleotide
cugucccacaggucaccau

SEQ ID NO: 2147992 - RNA, 19 nt, Artificial Sequence
  Description of Artificial Sequence: Synthetic oligonucleotide
ggagaaguguccggccuuu

SEQ ID NO: 2147993 - RNA, 19 nt, Artificial Sequence
  Description of Artificial Sequence: Synthetic oligonucleotide
ccaccacgggagucauauc

SEQ ID NO: 2147994 - RNA, 19 nt, Artificial Sequence
  Description of Artificial Sequence: Synthetic oligonucleotide
guccggccuuuccgauguc

SEQ ID NO: 2147995 - RNA, 19 nt, Artificial Sequence
  Description of Artificial Sequence: Synthetic oligonucleotide
gacggccugcccacacuuu

SEQ ID NO: 2147996 - RNA, 19 nt, Artificial Sequence
  Description of Artificial Sequence: Synthetic oligonucleotide
ccccagcgucuucgugucc

SEQ ID NO: 2147997 - RNA, 19 nt, Artificial Sequence
  Description of Artificial Sequence: Synthetic oligonucleotide
gccucgugagcugcaggua

SEQ ID NO: 2147998 - RNA, 19 nt, Artificial Sequence
  Description of Artificial Sequence: Synthetic oligonucleotide
cccuugcaauguccaugga

SEQ ID NO: 2147999 - RNA, 19 nt, Artificial Sequence
  Description of Artificial Sequence: Synthetic oligonucleotide
cccacucggcagcugggcu

SEQ ID NO: 2148000 - RNA, 19 nt, Artificial Sequence
  Description of Artificial Sequence: Synthetic oligonucleotide
acucggcagcugggcugaa

SEQ ID NO: 2148001 - RNA, 19 nt, Artificial Sequence
  Description of Artificial Sequence: Synthetic oligonucleotide
ccuuuccgaugucccacau

SEQ ID NO: 2148002 - RNA, 19 nt, Artificial Sequence
  Description of Artificial Sequence: Synthetic oligonucleotide
ccggguaacuggaccgcuu

SEQ ID NO: 2148003 - RNA, 19 nt, Artificial Sequence
  Description of Artificial Sequence: Synthetic oligonucleotide
cgcagacggccugcccaca

SEQ ID NO: 2148004 - RNA, 19 nt, Artificial Sequence
  Description of Artificial Sequence: Synthetic oligonucleotide
gcccaccacgggagucaua

SEQ ID NO: 2148005 - RNA, 19 nt, Artificial Sequence
  Description of Artificial Sequence: Synthetic oligonucleotide
uguauaucuacccagagaa

SEQ ID NO: 2148006 - RNA, 19 nt, Artificial Sequence
  Description of Artificial Sequence: Synthetic oligonucleotide
uguucuuacauccucaugu

SEQ ID NO: 2148007 - RNA, 19 nt, Artificial Sequence
  Description of Artificial Sequence: Synthetic oligonucleotide
aaggaaggguagcugaucc

SEQ ID NO: 2148008 - RNA, 19 nt, Artificial Sequence
  Description of Artificial Sequence: Synthetic oligonucleotide
auauucacaaccaauuugc

SEQ ID NO: 2148009 - RNA, 19 nt, Artificial Sequence
  Description of Artificial Sequence: Synthetic oligonucleotide
acauaugaauacuucauuc

SEQ ID NO: 2148010 - RNA, 19 nt, Artificial Sequence
  Description of Artificial Sequence: Synthetic oligonucleotide
aaagucggggaguucaugg

SEQ ID NO: 2148011 - RNA, 19 nt, Artificial Sequence
  Description of Artificial Sequence: Synthetic oligonucleotide
agaaacccagcuuacagcg

SEQ ID NO: 2148012 - RNA, 19 nt, Artificial Sequence
  Description of Artificial Sequence: Synthetic oligonucleotide
auuacacuuguauaucuac

SEQ ID NO: 2148013 - RNA, 19 nt, Artificial Sequence
  Description of Artificial Sequence: Synthetic oligonucleotide
aacacauaugaauacuuca

SEQ ID NO: 2148014 - RNA, 19 nt, Artificial Sequence
  Description of Artificial Sequence: Synthetic oligonucleotide
uucaguguugugcugacag

SEQ ID NO: 2148015 - RNA, 19 nt, Artificial Sequence
  Description of Artificial Sequence: Synthetic oligonucleotide
ucaugugcugauaaaaucu

SEQ ID NO: 2148016 - RNA, 19 nt, Artificial Sequence
  Description of Artificial Sequence: Synthetic oligonucleotide
uauuuucacauugaccucg

SEQ ID NO: 2148017 - RNA, 19 nt, Artificial Sequence
  Description of Artificial Sequence: Synthetic oligonucleotide
ucuuacauccucaugucca

SEQ ID NO: 2148018 - RNA, 19 nt, Artificial Sequence
  Description of Artificial Sequence: Synthetic oligonucleotide
ugaggauugggcaagugca

SEQ ID NO: 2148019 - RNA, 19 nt, Artificial Sequence
  Description of Artificial Sequence: Synthetic oligonucleotide
uacacuuguauaucuaccc

SEQ ID NO: 2148020 - RNA, 19 nt, Artificial Sequence
  Description of Artificial Sequence: Synthetic oligonucleotide
ugcagagaaucccuguucg

SEQ ID NO: 2148021 - RNA, 19 nt, Artificial Sequence
  Description of Artificial Sequence: Synthetic oligonucleotide
uuugcaagcaucuggggca

SEQ ID NO: 2148022 - RNA, 19 nt, Artificial Sequence
  Description of Artificial Sequence: Synthetic oligonucleotide
ugagccuuuaucaugugcu

SEQ ID NO: 2148023 - RNA, 19 nt, Artificial Sequence
  Description of Artificial Sequence: Synthetic oligonucleotide
ugugcugauaaaaucuuga

SEQ ID NO: 2148024 - RNA, 19 nt, Artificial Sequence
  Description of Artificial Sequence: Synthetic oligonucleotide
uuuuaacacauaugaauac

SEQ ID NO: 2148025 - RNA, 19 nt, Artificial Sequence
  Description of Artificial Sequence: Synthetic oligonucleotide
aucaugugcugauaaaauc

SEQ ID NO: 2148026 - RNA, 19 nt, Artificial Sequence
  Description of Artificial Sequence: Synthetic oligonucleotide
cuuacauucacauuuaccu

SEQ ID NO: 2148027 - RNA, 19 nt, Artificial Sequence
  Description of Artificial Sequence: Synthetic oligonucleotide
uugcuagggucacagacgg

SEQ ID NO: 2148028 - RNA, 19 nt, Artificial Sequence
  Description of Artificial Sequence: Synthetic oligonucleotide
agccguacucuccaaagcc

SEQ ID NO: 2148029 - RNA, 19 nt, Artificial Sequence
  Description of Artificial Sequence: Synthetic oligonucleotide
uuacacuuguauaucuacc

SEQ ID NO: 2148030 - RNA, 19 nt, Artificial Sequence
  Description of Artificial Sequence: Synthetic oligonucleotide
uaugaauacuucauuccac

SEQ ID NO: 2148031 - RNA, 19 nt, Artificial Sequence
  Description of Artificial Sequence: Synthetic oligonucleotide
uuuccuaacacuuguuccu

SEQ ID NO: 2148032 - RNA, 19 nt, Artificial Sequence
  Description of Artificial Sequence: Synthetic oligonucleotide
caaaacuuuucauauucac

SEQ ID NO: 2148033 - RNA, 19 nt, Artificial Sequence
  Description of Artificial Sequence: Synthetic oligonucleotide
uucacauugaccucggcau

SEQ ID NO: 2148034 - RNA, 19 nt, Artificial Sequence
  Description of Artificial Sequence: Synthetic oligonucleotide
guagaaacccagcuuacag

SEQ ID NO: 2148035 - RNA, 19 nt, Artificial Sequence
  Description of Artificial Sequence: Synthetic oligonucleotide
uuuaacacauaugaauacu

SEQ ID NO: 2148036 - RNA, 19 nt, Artificial Sequence
  Description of Artificial Sequence: Synthetic oligonucleotide
acuucauuccacagaaugc

SEQ ID NO: 2148037 - RNA, 19 nt, Artificial Sequence
  Description of Artificial Sequence: Synthetic oligonucleotide
uugaggauugggcaagugc

SEQ ID NO: 2148038 - RNA, 19 nt, Artificial Sequence
  Description of Artificial Sequence: Synthetic oligonucleotide
uuugucgacuguaagacuu

SEQ ID NO: 2148039 - RNA, 19 nt, Artificial Sequence
  Description of Artificial Sequence: Synthetic oligonucleotide
aguuuugucgacuguaaga

SEQ ID NO: 2148040 - RNA, 19 nt, Artificial Sequence
  Description of Artificial Sequence: Synthetic oligonucleotide
gauacaguguucucuugcc

SEQ ID NO: 2148041 - RNA, 19 nt, Artificial Sequence
  Description of Artificial Sequence: Synthetic oligonucleotide
ugacaguuguugcagacac

SEQ ID NO: 2148042 - RNA, 19 nt, Artificial Sequence
  Description of Artificial Sequence: Synthetic oligonucleotide
ucagcacuacugcugaugc

SEQ ID NO: 2148043 - RNA, 19 nt, Artificial Sequence
  Description of Artificial Sequence: Synthetic oligonucleotide
cuucauuccacagaaugcc

SEQ ID NO: 2148044 - RNA, 19 nt, Artificial Sequence
  Description of Artificial Sequence: Synthetic oligonucleotide
uuguauaucuacccagaga

SEQ ID NO: 2148045 - RNA, 19 nt, Artificial Sequence
  Description of Artificial Sequence: Synthetic oligonucleotide
ugaauacuucauuccacag

SEQ ID NO: 2148046 - RNA, 19 nt, Artificial Sequence
  Description of Artificial Sequence: Synthetic oligonucleotide
acugaguugaaaggaaggg

SEQ ID NO: 2148047 - RNA, 19 nt, Artificial Sequence
  Description of Artificial Sequence: Synthetic oligonucleotide
cuuugcaagcaucuggggc

SEQ ID NO: 2148048 - RNA, 19 nt, Artificial Sequence
  Description of Artificial Sequence: Synthetic oligonucleotide
ucacugaguugaaaggaag

SEQ ID NO: 2148049 - RNA, 19 nt, Artificial Sequence
  Description of Artificial Sequence: Synthetic oligonucleotide
caugguaccauucuacauc

SEQ ID NO: 2148050 - RNA, 19 nt, Artificial Sequence
  Description of Artificial Sequence: Synthetic oligonucleotide
uauuccaguuucauuuuga

SEQ ID NO: 2148051 - RNA, 19 nt, Artificial Sequence
  Description of Artificial Sequence: Synthetic oligonucleotide
acggucacugaguugaaag

SEQ ID NO: 2148052 - RNA, 19 nt, Artificial Sequence
  Description of Artificial Sequence: Synthetic oligonucleotide
uucugcacucguuaggagc

SEQ ID NO: 2148053 - RNA, 19 nt, Artificial Sequence
  Description of Artificial Sequence: Synthetic oligonucleotide
ucuucaguuuugucgacug

SEQ ID NO: 2148054 - RNA, 19 nt, Artificial Sequence
  Description of Artificial Sequence: Synthetic oligonucleotide
uaacacauaugaauacuuc

SEQ ID NO: 2148055 - RNA, 19 nt, Artificial Sequence
  Description of Artificial Sequence: Synthetic oligonucleotide
gauccaacuggauggcagg

SEQ ID NO: 2148056 - RNA, 19 nt, Artificial Sequence
  Description of Artificial Sequence: Synthetic oligonucleotide
uaucaugugcugauaaaau

SEQ ID NO: 2148057 - RNA, 19 nt, Artificial Sequence
  Description of Artificial Sequence: Synthetic oligonucleotide
cauugcuagggucacagac

SEQ ID NO: 2148058 - RNA, 19 nt, Artificial Sequence
  Description of Artificial Sequence: Synthetic oligonucleotide
uuaucaugugcugauaaaa

SEQ ID NO: 2148059 - RNA, 19 nt, Artificial Sequence
  Description of Artificial Sequence: Synthetic oligonucleotide
uauucacaaccaauuugcc

SEQ ID NO: 2148060 - RNA, 19 nt, Artificial Sequence
  Description of Artificial Sequence: Synthetic oligonucleotide
guuuugucgacuguaagac

SEQ ID NO: 2148061 - RNA, 19 nt, Artificial Sequence
  Description of Artificial Sequence: Synthetic oligonucleotide
aguugaaaggaaggguagc

SEQ ID NO: 2148062 - RNA, 19 nt, Artificial Sequence
  Description of Artificial Sequence: Synthetic oligonucleotide
gaauacuucauuccacaga

SEQ ID NO: 2148063 - RNA, 19 nt, Artificial Sequence
  Description of Artificial Sequence: Synthetic oligonucleotide
acauuuaccugagugucgg

SEQ ID NO: 2148064 - RNA, 19 nt, Artificial Sequence
  Description of Artificial Sequence: Synthetic oligonucleotide
aaggguagcugauccaacu

SEQ ID NO: 2148065 - RNA, 19 nt, Artificial Sequence
  Description of Artificial Sequence: Synthetic oligonucleotide
cacugaguugaaaggaagg

SEQ ID NO: 2148066 - RNA, 19 nt, Artificial Sequence
  Description of Artificial Sequence: Synthetic oligonucleotide
uuguccaggacucuggaua

SEQ ID NO: 2148067 - RNA, 19 nt, Artificial Sequence
  Description of Artificial Sequence: Synthetic oligonucleotide
aggcuuugcaagcaucugg

SEQ ID NO: 2148068 - RNA, 19 nt, Artificial Sequence
  Description of Artificial Sequence: Synthetic oligonucleotide
uuaccugagugucggagug

SEQ ID NO: 2148069 - RNA, 19 nt, Artificial Sequence
  Description of Artificial Sequence: Synthetic oligonucleotide
acaguguucucuugccucg

SEQ ID NO: 2148070 - RNA, 19 nt, Artificial Sequence
  Description of Artificial Sequence: Synthetic oligonucleotide
caagagcugguuuccagcg

SEQ ID NO: 2148071 - RNA, 19 nt, Artificial Sequence
  Description of Artificial Sequence: Synthetic oligonucleotide
aucuacccagagaagagcc

SEQ ID NO: 2148072 - RNA, 19 nt, Artificial Sequence
  Description of Artificial Sequence: Synthetic oligonucleotide
cacuuguauaucuacccag

SEQ ID NO: 2148073 - RNA, 19 nt, Artificial Sequence
  Description of Artificial Sequence: Synthetic oligonucleotide
caguaucccaccaugcacc

SEQ ID NO: 2148074 - RNA, 19 nt, Artificial Sequence
  Description of Artificial Sequence: Synthetic oligonucleotide
auucacaaccaauuugccu

SEQ ID NO: 2148075 - RNA, 19 nt, Artificial Sequence
  Description of Artificial Sequence: Synthetic oligonucleotide
ugugcugacaguuguugca

SEQ ID NO: 2148076 - RNA, 19 nt, Artificial Sequence
  Description of Artificial Sequence: Synthetic oligonucleotide
uguucucuugccucguaag

SEQ ID NO: 2148077 - RNA, 19 nt, Artificial Sequence
  Description of Artificial Sequence: Synthetic oligonucleotide
uucuuacauccucaugucc

SEQ ID NO: 2148078 - RNA, 19 nt, Artificial Sequence
  Description of Artificial Sequence: Synthetic oligonucleotide
uggagauggaaagucgggg

SEQ ID NO: 2148079 - RNA, 19 nt, Artificial Sequence
  Description of Artificial Sequence: Synthetic oligonucleotide
uucaugguaccauucuaca

SEQ ID NO: 2148080 - RNA, 19 nt, Artificial Sequence
  Description of Artificial Sequence: Synthetic oligonucleotide
aaaggaaggguagcugauc

SEQ ID NO: 2148081 - RNA, 19 nt, Artificial Sequence
  Description of Artificial Sequence: Synthetic oligonucleotide
ugcacuugcagguucugca

SEQ ID NO: 2148082 - RNA, 19 nt, Artificial Sequence
  Description of Artificial Sequence: Synthetic oligonucleotide
cagcuuacagcgcugacag

SEQ ID NO: 2148083 - RNA, 19 nt, Artificial Sequence
  Description of Artificial Sequence: Synthetic oligonucleotide
auugcuagggucacagacg

SEQ ID NO: 2148084 - RNA, 19 nt, Artificial Sequence
  Description of Artificial Sequence: Synthetic oligonucleotide
ugugcuucacaccuccacu

SEQ ID NO: 2148085 - RNA, 19 nt, Artificial Sequence
  Description of Artificial Sequence: Synthetic oligonucleotide
ugcugauaaaaucuugauu

SEQ ID NO: 2148086 - RNA, 19 nt, Artificial Sequence
  Description of Artificial Sequence: Synthetic oligonucleotide
uugugugcuucacaccucc

SEQ ID NO: 2148087 - RNA, 19 nt, Artificial Sequence
  Description of Artificial Sequence: Synthetic oligonucleotide
caugugagccuuuaucaug

SEQ ID NO: 2148088 - RNA, 19 nt, Artificial Sequence
  Description of Artificial Sequence: Synthetic oligonucleotide
augucgaagugacaggugu

SEQ ID NO: 2148089 - RNA, 19 nt, Artificial Sequence
  Description of Artificial Sequence: Synthetic oligonucleotide
accgcuucgauucccugac

SEQ ID NO: 2148090 - RNA, 19 nt, Artificial Sequence
  Description of Artificial Sequence: Synthetic oligonucleotide
acaguuguugcagacacca

SEQ ID NO: 2148091 - RNA, 19 nt, Artificial Sequence
  Description of Artificial Sequence: Synthetic oligonucleotide
gucacagacggucacugag

SEQ ID NO: 2148092 - RNA, 19 nt, Artificial Sequence
  Description of Artificial Sequence: Synthetic oligonucleotide
cuuguauaucuacccagag

SEQ ID NO: 2148093 - RNA, 19 nt, Artificial Sequence
  Description of Artificial Sequence: Synthetic oligonucleotide
acucuuauuguguggagau

SEQ ID NO: 2148094 - RNA, 19 nt, Artificial Sequence
  Description of Artificial Sequence: Synthetic oligonucleotide
augguaccauucuacauca

SEQ ID NO: 2148095 - RNA, 19 nt, Artificial Sequence
  Description of Artificial Sequence: Synthetic oligonucleotide
uuuaccugagugucggagu

SEQ ID NO: 2148096 - RNA, 19 nt, Artificial Sequence
  Description of Artificial Sequence: Synthetic oligonucleotide
ucugcagccguacucucca

SEQ ID NO: 2148097 - RNA, 19 nt, Artificial Sequence
  Description of Artificial Sequence: Synthetic oligonucleotide
ucacauuuaccugaguguc

SEQ ID NO: 2148098 - RNA, 19 nt, Artificial Sequence
  Description of Artificial Sequence: Synthetic oligonucleotide
ugaggucacgguagaaacc

SEQ ID NO: 2148099 - RNA, 19 nt, Artificial Sequence
  Description of Artificial Sequence: Synthetic oligonucleotide
cugaggucacgguagaaac

SEQ ID NO: 2148100 - RNA, 19 nt, Artificial Sequence
  Description of Artificial Sequence: Synthetic oligonucleotide
uggaaagucggggaguuca

SEQ ID NO: 2148101 - RNA, 19 nt, Artificial Sequence
  Description of Artificial Sequence: Synthetic oligonucleotide
ugaugcagucuccugugug

SEQ ID NO: 2148102 - RNA, 19 nt, Artificial Sequence
  Description of Artificial Sequence: Synthetic oligonucleotide
cuuacauccucauguccag

SEQ ID NO: 2148103 - RNA, 19 nt, Artificial Sequence
  Description of Artificial Sequence: Synthetic oligonucleotide
ugagugucggagugcagag

SEQ ID NO: 2148104 - RNA, 19 nt, Artificial Sequence
  Description of Artificial Sequence: Synthetic oligonucleotide
gagaagagccuuugugugc

SEQ ID NO: 2148105 - RNA, 19 nt, Artificial Sequence
  Description of Artificial Sequence: Synthetic oligonucleotide
ucacgguagaaacccagcu

SEQ ID NO: 2148106 - RNA, 19 nt, Artificial Sequence
  Description of Artificial Sequence: Synthetic oligonucleotide
accauucuacaucagcacu

SEQ ID NO: 2148107 - RNA, 19 nt, Artificial Sequence
  Description of Artificial Sequence: Synthetic oligonucleotide
auuuaccugagugucggag

SEQ ID NO: 2148108 - RNA, 19 nt, Artificial Sequence
  Description of Artificial Sequence: Synthetic oligonucleotide
uccagcgcuggacaaaacu

SEQ ID NO: 2148109 - RNA, 19 nt, Artificial Sequence
  Description of Artificial Sequence: Synthetic oligonucleotide
cacauuuaccugagugucg

SEQ ID NO: 2148110 - RNA, 19 nt, Artificial Sequence
  Description of Artificial Sequence: Synthetic oligonucleotide
agaagggucuccugagguc

SEQ ID NO: 2148111 - RNA, 19 nt, Artificial Sequence
  Description of Artificial Sequence: Synthetic oligonucleotide
acagugcuguccuucagug

SEQ ID NO: 2148112 - RNA, 19 nt, Artificial Sequence
  Description of Artificial Sequence: Synthetic oligonucleotide
acaaccaauuugccuguuc

SEQ ID NO: 2148113 - RNA, 19 nt, Artificial Sequence
  Description of Artificial Sequence: Synthetic oligonucleotide
auauuccaguuucauuuug

SEQ ID NO: 2148114 - RNA, 19 nt, Artificial Sequence
  Description of Artificial Sequence: Synthetic oligonucleotide
ugaugucgaagugacaggu

SEQ ID NO: 2148115 - RNA, 19 nt, Artificial Sequence
  Description of Artificial Sequence: Synthetic oligonucleotide
uaccauucuacaucagcac

SEQ ID NO: 2148116 - RNA, 19 nt, Artificial Sequence
  Description of Artificial Sequence: Synthetic oligonucleotide
agugucggagugcagagaa

SEQ ID NO: 2148117 - RNA, 19 nt, Artificial Sequence
  Description of Artificial Sequence: Synthetic oligonucleotide
acgguagaaacccagcuua

SEQ ID NO: 2148118 - RNA, 19 nt, Artificial Sequence
  Description of Artificial Sequence: Synthetic oligonucleotide
gaguugaaaggaaggguag

SEQ ID NO: 2148119 - RNA, 19 nt, Artificial Sequence
  Description of Artificial Sequence: Synthetic oligonucleotide
acacuuguauaucuaccca

SEQ ID NO: 2148120 - RNA, 19 nt, Artificial Sequence
  Description of Artificial Sequence: Synthetic oligonucleotide
uugggguuuccuaacacuu

SEQ ID NO: 2148121 - RNA, 19 nt, Artificial Sequence
  Description of Artificial Sequence: Synthetic oligonucleotide
uggauugaggauugggcaa

SEQ ID NO: 2148122 - RNA, 19 nt, Artificial Sequence
  Description of Artificial Sequence: Synthetic oligonucleotide
uaucuacccagagaagagc

SEQ ID NO: 2148123 - RNA, 19 nt, Artificial Sequence
  Description of Artificial Sequence: Synthetic oligonucleotide
gucgaagugacaggugucg

SEQ ID NO: 2148124 - RNA, 19 nt, Artificial Sequence
  Description of Artificial Sequence: Synthetic oligonucleotide
auaucuacccagagaagag

SEQ ID NO: 2148125 - RNA, 19 nt, Artificial Sequence
  Description of Artificial Sequence: Synthetic oligonucleotide
aggauugggcaagugcagc

SEQ ID NO: 2148126 - RNA, 19 nt, Artificial Sequence
  Description of Artificial Sequence: Synthetic oligonucleotide
cuuacagcgcugacagugc

SEQ ID NO: 2148127 - RNA, 19 nt, Artificial Sequence
  Description of Artificial Sequence: Synthetic oligonucleotide
uguccaggacucuggauac

SEQ ID NO: 2148128 - RNA, 19 nt, Artificial Sequence
  Description of Artificial Sequence: Synthetic oligonucleotide
uugaccucggcaugugagc

SEQ ID NO: 2148129 - RNA, 19 nt, Artificial Sequence
  Description of Artificial Sequence: Synthetic oligonucleotide
ucacauugaccucggcaug

SEQ ID NO: 2148130 - RNA, 19 nt, Artificial Sequence
  Description of Artificial Sequence: Synthetic oligonucleotide
accauugcuagggucacag

SEQ ID NO: 2148131 - RNA, 19 nt, Artificial Sequence
  Description of Artificial Sequence: Synthetic oligonucleotide
agguucugcacucguuagg

SEQ ID NO: 2148132 - RNA, 19 nt, Artificial Sequence
  Description of Artificial Sequence: Synthetic oligonucleotide
cuggauugaggauugggca

SEQ ID NO: 2148133 - RNA, 19 nt, Artificial Sequence
  Description of Artificial Sequence: Synthetic oligonucleotide
guaccauucuacaucagca

SEQ ID NO: 2148134 - RNA, 19 nt, Artificial Sequence
  Description of Artificial Sequence: Synthetic oligonucleotide
ucguaagaucuucaguuuu

SEQ ID NO: 2148135 - RNA, 19 nt, Artificial Sequence
  Description of Artificial Sequence: Synthetic oligonucleotide
uccagcuacaagguacucc

SEQ ID NO: 2148136 - RNA, 19 nt, Artificial Sequence
  Description of Artificial Sequence: Synthetic oligonucleotide
uuuugucgacuguaagacu

SEQ ID NO: 2148137 - RNA, 19 nt, Artificial Sequence
  Description of Artificial Sequence: Synthetic oligonucleotide
agcuacaagguacuccaga

SEQ ID NO: 2148138 - RNA, 19 nt, Artificial Sequence
  Description of Artificial Sequence: Synthetic oligonucleotide
ugggguuuccuaacacuug

SEQ ID NO: 2148139 - RNA, 19 nt, Artificial Sequence
  Description of Artificial Sequence: Synthetic oligonucleotide
auugaccucggcaugugag

SEQ ID NO: 2148140 - RNA, 19 nt, Artificial Sequence
  Description of Artificial Sequence: Synthetic oligonucleotide
agaaucccuguucgucccc

SEQ ID NO: 2148141 - RNA, 19 nt, Artificial Sequence
  Description of Artificial Sequence: Synthetic oligonucleotide
ugucggagugcagagaauc

SEQ ID NO: 2148142 - RNA, 19 nt, Artificial Sequence
  Description of Artificial Sequence: Synthetic oligonucleotide
aagucggggaguucauggu

SEQ ID NO: 2148143 - RNA, 19 nt, Artificial Sequence
  Description of Artificial Sequence: Synthetic oligonucleotide
guucaugguaccauucuac

SEQ ID NO: 2148144 - RNA, 19 nt, Artificial Sequence
  Description of Artificial Sequence: Synthetic oligonucleotide
uucaguuuugucgacugua

SEQ ID NO: 2148145 - RNA, 19 nt, Artificial Sequence
  Description of Artificial Sequence: Synthetic oligonucleotide
ucaugguaccauucuacau

SEQ ID NO: 2148146 - RNA, 19 nt, Artificial Sequence
  Description of Artificial Sequence: Synthetic oligonucleotide
uucacaccuccacugcuac

SEQ ID NO: 2148147 - RNA, 19 nt, Artificial Sequence
  Description of Artificial Sequence: Synthetic oligonucleotide
ggauacaguguucucuugc

SEQ ID NO: 2148148 - RNA, 19 nt, Artificial Sequence
  Description of Artificial Sequence: Synthetic oligonucleotide
ugguuuccagcgcuggaca

SEQ ID NO: 2148149 - RNA, 19 nt, Artificial Sequence
  Description of Artificial Sequence: Synthetic oligonucleotide
ugccucguaagaucuucag

SEQ ID NO: 2148150 - RNA, 19 nt, Artificial Sequence
  Description of Artificial Sequence: Synthetic oligonucleotide
ucauuccacagaaugccuu

SEQ ID NO: 2148151 - RNA, 19 nt, Artificial Sequence
  Description of Artificial Sequence: Synthetic oligonucleotide
guugugcugacaguuguug

SEQ ID NO: 2148152 - RNA, 19 nt, Artificial Sequence
  Description of Artificial Sequence: Synthetic oligonucleotide
ggcaugugagccuuuauca

SEQ ID NO: 2148153 - RNA, 19 nt, Artificial Sequence
  Description of Artificial Sequence: Synthetic oligonucleotide
ucacucuuauuguguggag

SEQ ID NO: 2148154 - RNA, 19 nt, Artificial Sequence
  Description of Artificial Sequence: Synthetic oligonucleotide
auucccugacgccucccac

SEQ ID NO: 2148155 - RNA, 19 nt, Artificial Sequence
  Description of Artificial Sequence: Synthetic oligonucleotide
ccuuacauucacauuuacc

SEQ ID NO: 2148156 - RNA, 19 nt, Artificial Sequence
  Description of Artificial Sequence: Synthetic oligonucleotide
ggguagcugauccaacugg

SEQ ID NO: 2148157 - RNA, 19 nt, Artificial Sequence
  Description of Artificial Sequence: Synthetic oligonucleotide
gagccuuuaucaugugcug

SEQ ID NO: 2148158 - RNA, 19 nt, Artificial Sequence
  Description of Artificial Sequence: Synthetic oligonucleotide
cauccucauguccagcuac

SEQ ID NO: 2148159 - RNA, 19 nt, Artificial Sequence
  Description of Artificial Sequence: Synthetic oligonucleotide
acacauaugaauacuucau

SEQ ID NO: 2148160 - RNA, 19 nt, Artificial Sequence
  Description of Artificial Sequence: Synthetic oligonucleotide
ucggcaugcccauugcacu

SEQ ID NO: 2148161 - RNA, 19 nt, Artificial Sequence
  Description of Artificial Sequence: Synthetic oligonucleotide
ggucggcucacucuuauug

SEQ ID NO: 2148162 - RNA, 19 nt, Artificial Sequence
  Description of Artificial Sequence: Synthetic oligonucleotide
ccuggauugaggauugggc

SEQ ID NO: 2148163 - RNA, 19 nt, Artificial Sequence
  Description of Artificial Sequence: Synthetic oligonucleotide
cuccagaccuggauugagg

SEQ ID NO: 2148164 - RNA, 19 nt, Artificial Sequence
  Description of Artificial Sequence: Synthetic oligonucleotide
ugcaugacucuucucccaa

SEQ ID NO: 2148165 - RNA, 19 nt, Artificial Sequence
  Description of Artificial Sequence: Synthetic oligonucleotide
ucggagugcagagaauccc

SEQ ID NO: 2148166 - RNA, 19 nt, Artificial Sequence
  Description of Artificial Sequence: Synthetic oligonucleotide
cagacggucacugaguuga

SEQ ID NO: 2148167 - RNA, 19 nt, Artificial Sequence
  Description of Artificial Sequence: Synthetic oligonucleotide
guucuuacauccucauguc

SEQ ID NO: 2148168 - RNA, 19 nt, Artificial Sequence
  Description of Artificial Sequence: Synthetic oligonucleotide
aggguagcugauccaacug

SEQ ID NO: 2148169 - RNA, 19 nt, Artificial Sequence
  Description of Artificial Sequence: Synthetic oligonucleotide
aaccaauuugccuguucuu

SEQ ID NO: 2148170 - RNA, 19 nt, Artificial Sequence
  Description of Artificial Sequence: Synthetic oligonucleotide
agugacaggugucggcaug

SEQ ID NO: 2148171 - RNA, 19 nt, Artificial Sequence
  Description of Artificial Sequence: Synthetic oligonucleotide
gcuuacagcgcugacagug

SEQ ID NO: 2148172 - RNA, 19 nt, Artificial Sequence
  Description of Artificial Sequence: Synthetic oligonucleotide
ucgaagugacaggugucgg

SEQ ID NO: 2148173 - RNA, 19 nt, Artificial Sequence
  Description of Artificial Sequence: Synthetic oligonucleotide
uuauuguguggagauggaa

SEQ ID NO: 2148174 - RNA, 19 nt, Artificial Sequence
  Description of Artificial Sequence: Synthetic oligonucleotide
ucacaaccaauuugccugu

SEQ ID NO: 2148175 - RNA, 19 nt, Artificial Sequence
  Description of Artificial Sequence: Synthetic oligonucleotide
aguucaugguaccauucua

SEQ ID NO: 2148176 - RNA, 19 nt, Artificial Sequence
  Description of Artificial Sequence: Synthetic oligonucleotide
gugagccuuuaucaugugc

SEQ ID NO: 2148177 - RNA, 19 nt, Artificial Sequence
  Description of Artificial Sequence: Synthetic oligonucleotide
ugacgccucccacacguug

SEQ ID NO: 2148178 - RNA, 19 nt, Artificial Sequence
  Description of Artificial Sequence: Synthetic oligonucleotide
acuuguauaucuacccaga

SEQ ID NO: 2148179 - RNA, 19 nt, Artificial Sequence
  Description of Artificial Sequence: Synthetic oligonucleotide
ugaccucggcaugugagcc

SEQ ID NO: 2148180 - RNA, 19 nt, Artificial Sequence
  Description of Artificial Sequence: Synthetic oligonucleotide
guguggagauggaaagucg

SEQ ID NO: 2148181 - RNA, 19 nt, Artificial Sequence
  Description of Artificial Sequence: Synthetic oligonucleotide
uuuucacauugaccucggc

SEQ ID NO: 2148182 - RNA, 19 nt, Artificial Sequence
  Description of Artificial Sequence: Synthetic oligonucleotide
aguuucauuuugaggucuc

SEQ ID NO: 2148183 - RNA, 19 nt, Artificial Sequence
  Description of Artificial Sequence: Synthetic oligonucleotide
uuacagcgcugacagugcu

SEQ ID NO: 2148184 - RNA, 19 nt, Artificial Sequence
  Description of Artificial Sequence: Synthetic oligonucleotide
acacguugaugucgaagug

SEQ ID NO: 2148185 - RNA, 19 nt, Artificial Sequence
  Description of Artificial Sequence: Synthetic oligonucleotide
ugcagacaccaccgcuucg

SEQ ID NO: 2148186 - RNA, 19 nt, Artificial Sequence
  Description of Artificial Sequence: Synthetic oligonucleotide
gguuuccuaacacuuguuc

SEQ ID NO: 2148187 - RNA, 19 nt, Artificial Sequence
  Description of Artificial Sequence: Synthetic oligonucleotide
gaggauugggcaagugcag

SEQ ID NO: 2148188 - RNA, 19 nt, Artificial Sequence
  Description of Artificial Sequence: Synthetic oligonucleotide
uuugugugcuucacaccuc

SEQ ID NO: 2148189 - RNA, 19 nt, Artificial Sequence
  Description of Artificial Sequence: Synthetic oligonucleotide
uguuccuuacauucacauu

SEQ ID NO: 2148190 - RNA, 19 nt, Artificial Sequence
  Description of Artificial Sequence: Synthetic oligonucleotide
acauucacauuuaccugag

SEQ ID NO: 2148191 - RNA, 19 nt, Artificial Sequence
  Description of Artificial Sequence: Synthetic oligonucleotide
guauaucuacccagagaag

SEQ ID NO: 2148192 - RNA, 19 nt, Artificial Sequence
  Description of Artificial Sequence: Synthetic oligonucleotide
cuacugcugaugcagucuc

SEQ ID NO: 2148193 - RNA, 19 nt, Artificial Sequence
  Description of Artificial Sequence: Synthetic oligonucleotide
gauaugcaugacucuucuc

SEQ ID NO: 2148194 - RNA, 19 nt, Artificial Sequence
  Description of Artificial Sequence: Synthetic oligonucleotide
uggauacaguguucucuug

SEQ ID NO: 2148195 - RNA, 19 nt, Artificial Sequence
  Description of Artificial Sequence: Synthetic oligonucleotide
uugccucguaagaucuuca

SEQ ID NO: 2148196 - RNA, 19 nt, Artificial Sequence
  Description of Artificial Sequence: Synthetic oligonucleotide
caagugcagccucuguuug

SEQ ID NO: 2148197 - RNA, 19 nt, Artificial Sequence
  Description of Artificial Sequence: Synthetic oligonucleotide
agagccuuugugugcuuca

SEQ ID NO: 2148198 - RNA, 19 nt, Artificial Sequence
  Description of Artificial Sequence: Synthetic oligonucleotide
gaugucgaagugacaggug

SEQ ID NO: 2148199 - RNA, 19 nt, Artificial Sequence
  Description of Artificial Sequence: Synthetic oligonucleotide
cacacguugaugucgaagu

SEQ ID NO: 2148200 - RNA, 19 nt, Artificial Sequence
  Description of Artificial Sequence: Synthetic oligonucleotide
cagagaaucccuguucguc

SEQ ID NO: 2148201 - RNA, 19 nt, Artificial Sequence
  Description of Artificial Sequence: Synthetic oligonucleotide
ugucggcaugcccauugca

SEQ ID NO: 2148202 - RNA, 19 nt, Artificial Sequence
  Description of Artificial Sequence: Synthetic oligonucleotide
ggauugggcaagugcagcc

SEQ ID NO: 2148203 - RNA, 19 nt, Artificial Sequence
  Description of Artificial Sequence: Synthetic oligonucleotide
gacaggugucggcaugccc

SEQ ID NO: 2148204 - RNA, 19 nt, Artificial Sequence
  Description of Artificial Sequence: Synthetic oligonucleotide
augccuugggguuuccuaa

SEQ ID NO: 2148205 - RNA, 19 nt, Artificial Sequence
  Description of Artificial Sequence: Synthetic oligonucleotide
acagcgcugacagugcugu

SEQ ID NO: 2148206 - RNA, 19 nt, Artificial Sequence
  Description of Artificial Sequence: Synthetic oligonucleotide
cucacucuuauugugugga

SEQ ID NO: 2148207 - RNA, 19 nt, Artificial Sequence
  Description of Artificial Sequence: Synthetic oligonucleotide
ucccugacgccucccacac

SEQ ID NO: 2148208 - RNA, 19 nt, Artificial Sequence
  Description of Artificial Sequence: Synthetic oligonucleotide
augcaugacucuucuccca

SEQ ID NO: 2148209 - RNA, 19 nt, Artificial Sequence
  Description of Artificial Sequence: Synthetic oligonucleotide
cuuauuguguggagaugga

SEQ ID NO: 2148210 - RNA, 19 nt, Artificial Sequence
  Description of Artificial Sequence: Synthetic oligonucleotide
ggagauggaaagucgggga

SEQ ID NO: 2148211 - RNA, 19 nt, Artificial Sequence
  Description of Artificial Sequence: Synthetic oligonucleotide
gaaagucggggaguucaug

SEQ ID NO: 2148212 - RNA, 19 nt, Artificial Sequence
  Description of Artificial Sequence: Synthetic oligonucleotide
caauuugccuguucuuaca

SEQ ID NO: 2148213 - RNA, 19 nt, Artificial Sequence
  Description of Artificial Sequence: Synthetic oligonucleotide
caugacucuucucccaaga

SEQ ID NO: 2148214 - RNA, 19 nt, Artificial Sequence
  Description of Artificial Sequence: Synthetic oligonucleotide
guucugcacucguuaggag

SEQ ID NO: 2148215 - RNA, 19 nt, Artificial Sequence
  Description of Artificial Sequence: Synthetic oligonucleotide
aagugacaggugucggcau

SEQ ID NO: 2148216 - RNA, 19 nt, Artificial Sequence
  Description of Artificial Sequence: Synthetic oligonucleotide
uugggcaagugcagccucu

SEQ ID NO: 2148217 - RNA, 19 nt, Artificial Sequence
  Description of Artificial Sequence: Synthetic oligonucleotide
cagccguacucuccaaagc

SEQ ID NO: 2148218 - RNA, 19 nt, Artificial Sequence
  Description of Artificial Sequence: Synthetic oligonucleotide
cuugcagguucugcacucg

SEQ ID NO: 2148219 - RNA, 19 nt, Artificial Sequence
  Description of Artificial Sequence: Synthetic oligonucleotide
gaguucaugguaccauucu

SEQ ID NO: 2148220 - RNA, 19 nt, Artificial Sequence
  Description of Artificial Sequence: Synthetic oligonucleotide
ucggggaguucaugguacc

SEQ ID NO: 2148221 - RNA, 19 nt, Artificial Sequence
  Description of Artificial Sequence: Synthetic oligonucleotide
cuuguuccuuacauucaca

SEQ ID NO: 2148222 - RNA, 19 nt, Artificial Sequence
  Description of Artificial Sequence: Synthetic oligonucleotide
cauuacacuuguauaucua

SEQ ID NO: 2148223 - RNA, 19 nt, Artificial Sequence
  Description of Artificial Sequence: Synthetic oligonucleotide
ggugucggcaugcccauug

SEQ ID NO: 2148224 - RNA, 19 nt, Artificial Sequence
  Description of Artificial Sequence: Synthetic oligonucleotide
uuacauccucauguccagc

SEQ ID NO: 2148225 - RNA, 19 nt, Artificial Sequence
  Description of Artificial Sequence: Synthetic oligonucleotide
acagacggucacugaguug

SEQ ID NO: 2148226 - RNA, 19 nt, Artificial Sequence
  Description of Artificial Sequence: Synthetic oligonucleotide
augugcugauaaaaucuug

SEQ ID NO: 2148227 - RNA, 19 nt, Artificial Sequence
  Description of Artificial Sequence: Synthetic oligonucleotide
gugcagagaaucccuguuc

SEQ ID NO: 2148228 - RNA, 19 nt, Artificial Sequence
  Description of Artificial Sequence: Synthetic oligonucleotide
aggaaggguagcugaucca

SEQ ID NO: 2148229 - RNA, 19 nt, Artificial Sequence
  Description of Artificial Sequence: Synthetic oligonucleotide
auucuacaucagcacuacu

SEQ ID NO: 2148230 - RNA, 19 nt, Artificial Sequence
  Description of Artificial Sequence: Synthetic oligonucleotide
ucgauucccugacgccucc

SEQ ID NO: 2148231 - RNA, 19 nt, Artificial Sequence
  Description of Artificial Sequence: Synthetic oligonucleotide
ccaauuugccuguucuuac

SEQ ID NO: 2148232 - RNA, 19 nt, Artificial Sequence
  Description of Artificial Sequence: Synthetic oligonucleotide
uugcacuugcagguucugc

SEQ ID NO: 2148233 - RNA, 19 nt, Artificial Sequence
  Description of Artificial Sequence: Synthetic oligonucleotide
ugcuacuugcacucucuuu

SEQ ID NO: 2148234 - RNA, 19 nt, Artificial Sequence
  Description of Artificial Sequence: Synthetic oligonucleotide
cuaacacuuguuccuuaca

SEQ ID NO: 2148235 - RNA, 19 nt, Artificial Sequence
  Description of Artificial Sequence: Synthetic oligonucleotide
ugcagccguacucuccaaa

SEQ ID NO: 2148236 - RNA, 19 nt, Artificial Sequence
  Description of Artificial Sequence: Synthetic oligonucleotide
uugcagguucugcacucgu

SEQ ID NO: 2148237 - RNA, 19 nt, Artificial Sequence
  Description of Artificial Sequence: Synthetic oligonucleotide
uugucgacuguaagacuuu

SEQ ID NO: 2148238 - RNA, 19 nt, Artificial Sequence
  Description of Artificial Sequence: Synthetic oligonucleotide
gauucccugacgccuccca

SEQ ID NO: 2148239 - RNA, 19 nt, Artificial Sequence
  Description of Artificial Sequence: Synthetic oligonucleotide
gcugaugcagucuccugug

SEQ ID NO: 2148240 - RNA, 19 nt, Artificial Sequence
  Description of Artificial Sequence: Synthetic oligonucleotide
agggcagucaccauugcua

SEQ ID NO: 2148241 - RNA, 19 nt, Artificial Sequence
  Description of Artificial Sequence: Synthetic oligonucleotide
agccuuuaucaugugcuga

SEQ ID NO: 2148242 - RNA, 19 nt, Artificial Sequence
  Description of Artificial Sequence: Synthetic oligonucleotide
acugcuacuugcacucucu

SEQ ID NO: 2148243 - RNA, 19 nt, Artificial Sequence
  Description of Artificial Sequence: Synthetic oligonucleotide
cacuuguuccuuacauuca

SEQ ID NO: 2148244 - RNA, 19 nt, Artificial Sequence
  Description of Artificial Sequence: Synthetic oligonucleotide
gucggcaugcccauugcac

SEQ ID NO: 2148245 - RNA, 19 nt, Artificial Sequence
  Description of Artificial Sequence: Synthetic oligonucleotide
gucacgguagaaacccagc

SEQ ID NO: 2148246 - RNA, 19 nt, Artificial Sequence
  Description of Artificial Sequence: Synthetic oligonucleotide
cacuacugcugaugcaguc

SEQ ID NO: 2148247 - RNA, 19 nt, Artificial Sequence
  Description of Artificial Sequence: Synthetic oligonucleotide
guugaaaggaaggguagcu

SEQ ID NO: 2148248 - RNA, 19 nt, Artificial Sequence
  Description of Artificial Sequence: Synthetic oligonucleotide
gcucacucuuauugugugg

SEQ ID NO: 2148249 - RNA, 19 nt, Artificial Sequence
  Description of Artificial Sequence: Synthetic oligonucleotide
gaaggguagcugauccaac

SEQ ID NO: 2148250 - RNA, 19 nt, Artificial Sequence
  Description of Artificial Sequence: Synthetic oligonucleotide
guacucuccaaagccccag

SEQ ID NO: 2148251 - RNA, 19 nt, Artificial Sequence
  Description of Artificial Sequence: Synthetic oligonucleotide
agucggggaguucauggua

SEQ ID NO: 2148252 - RNA, 19 nt, Artificial Sequence
  Description of Artificial Sequence: Synthetic oligonucleotide
gcagagaagggucuccuga

SEQ ID NO: 2148253 - RNA, 19 nt, Artificial Sequence
  Description of Artificial Sequence: Synthetic oligonucleotide
ccuaacacuuguuccuuac

SEQ ID NO: 2148254 - RNA, 19 nt, Artificial Sequence
  Description of Artificial Sequence: Synthetic oligonucleotide
acuccagaccuggauugag

SEQ ID NO: 2148255 - RNA, 19 nt, Artificial Sequence
  Description of Artificial Sequence: Synthetic oligonucleotide
caccuccacugcuacuugc

SEQ ID NO: 2148256 - RNA, 19 nt, Artificial Sequence
  Description of Artificial Sequence: Synthetic oligonucleotide
gucggagugcagagaaucc

SEQ ID NO: 2148257 - RNA, 19 nt, Artificial Sequence
  Description of Artificial Sequence: Synthetic oligonucleotide
gucacaguguggcccugcc

SEQ ID NO: 2148258 - RNA, 19 nt, Artificial Sequence
  Description of Artificial Sequence: Synthetic oligonucleotide
gcuagggucacagacgguc

SEQ ID NO: 2148259 - RNA, 19 nt, Artificial Sequence
  Description of Artificial Sequence: Synthetic oligonucleotide
gugacaggugucggcaugc

SEQ ID NO: 2148260 - RNA, 19 nt, Artificial Sequence
  Description of Artificial Sequence: Synthetic oligonucleotide
gucggggaguucaugguac

SEQ ID NO: 2148261 - RNA, 19 nt, Artificial Sequence
  Description of Artificial Sequence: Synthetic oligonucleotide
cuagggucacagacgguca

SEQ ID NO: 2148262 - RNA, 19 nt, Artificial Sequence
  Description of Artificial Sequence: Synthetic oligonucleotide
ccaguaucccaccaugcac

SEQ ID NO: 2148263 - RNA, 19 nt, Artificial Sequence
  Description of Artificial Sequence: Synthetic oligonucleotide
uccuaacacuuguuccuua

SEQ ID NO: 2148264 - RNA, 19 nt, Artificial Sequence
  Description of Artificial Sequence: Synthetic oligonucleotide
ugcacucguuaggagcccc

SEQ ID NO: 2148265 - RNA, 19 nt, Artificial Sequence
  Description of Artificial Sequence: Synthetic oligonucleotide
gguucugcacucguuagga

SEQ ID NO: 2148266 - RNA, 19 nt, Artificial Sequence
  Description of Artificial Sequence: Synthetic oligonucleotide
gcuucgauucccugacgcc

SEQ ID NO: 2148267 - RNA, 19 nt, Artificial Sequence
  Description of Artificial Sequence: Synthetic oligonucleotide
cacucuuauuguguggaga

SEQ ID NO: 2148268 - RNA, 19 nt, Artificial Sequence
  Description of Artificial Sequence: Synthetic oligonucleotide
ggucacgguagaaacccag

SEQ ID NO: 2148269 - RNA, 19 nt, Artificial Sequence
  Description of Artificial Sequence: Synthetic oligonucleotide
ccguacucuccaaagcccc

SEQ ID NO: 2148270 - RNA, 19 nt, Artificial Sequence
  Description of Artificial Sequence: Synthetic oligonucleotide
uacuccagaccuggauuga

SEQ ID NO: 2148271 - RNA, 19 nt, Artificial Sequence
  Description of Artificial Sequence: Synthetic oligonucleotide
cucuggauacaguguucuc

SEQ ID NO: 2148272 - RNA, 19 nt, Artificial Sequence
  Description of Artificial Sequence: Synthetic oligonucleotide
uucccaggucggcucacuc

SEQ ID NO: 2148273 - RNA, 19 nt, Artificial Sequence
  Description of Artificial Sequence: Synthetic oligonucleotide
ugucacaguguggcccugc

SEQ ID NO: 2148274 - RNA, 19 nt, Artificial Sequence
  Description of Artificial Sequence: Synthetic oligonucleotide
uacccagagaagagccuuu

SEQ ID NO: 2148275 - RNA, 19 nt, Artificial Sequence
  Description of Artificial Sequence: Synthetic oligonucleotide
uaccugagugucggagugc

SEQ ID NO: 2148276 - RNA, 19 nt, Artificial Sequence
  Description of Artificial Sequence: Synthetic oligonucleotide
ccuuugugugcuucacacc

SEQ ID NO: 2148277 - RNA, 19 nt, Artificial Sequence
  Description of Artificial Sequence: Synthetic oligonucleotide
guaagaucuucaguuuugu

SEQ ID NO: 2148278 - RNA, 19 nt, Artificial Sequence
  Description of Artificial Sequence: Synthetic oligonucleotide
cacugcuacuugcacucuc

SEQ ID NO: 2148279 - RNA, 19 nt, Artificial Sequence
  Description of Artificial Sequence: Synthetic oligonucleotide
auugcacuugcagguucug

SEQ ID NO: 2148280 - RNA, 19 nt, Artificial Sequence
  Description of Artificial Sequence: Synthetic oligonucleotide
ucacaccuccacugcuacu

SEQ ID NO: 2148281 - RNA, 19 nt, Artificial Sequence
  Description of Artificial Sequence: Synthetic oligonucleotide
agaaugccuugggguuucc

SEQ ID NO: 2148282 - RNA, 19 nt, Artificial Sequence
  Description of Artificial Sequence: Synthetic oligonucleotide
auggaaagucggggaguuc

SEQ ID NO: 2148283 - RNA, 19 nt, Artificial Sequence
  Description of Artificial Sequence: Synthetic oligonucleotide
acauugaccucggcaugug

SEQ ID NO: 2148284 - RNA, 19 nt, Artificial Sequence
  Description of Artificial Sequence: Synthetic oligonucleotide
gucuccugaggucacggua

SEQ ID NO: 2148285 - RNA, 19 nt, Artificial Sequence
  Description of Artificial Sequence: Synthetic oligonucleotide
ucggcaugugagccuuuau

SEQ ID NO: 2148286 - RNA, 19 nt, Artificial Sequence
  Description of Artificial Sequence: Synthetic oligonucleotide
gagugcagagaaucccugu

SEQ ID NO: 2148287 - RNA, 19 nt, Artificial Sequence
  Description of Artificial Sequence: Synthetic oligonucleotide
caggcuugcaagggcaguc

SEQ ID NO: 2148288 - RNA, 19 nt, Artificial Sequence
  Description of Artificial Sequence: Synthetic oligonucleotide
cuucacaccuccacugcua

SEQ ID NO: 2148289 - RNA, 19 nt, Artificial Sequence
  Description of Artificial Sequence: Synthetic oligonucleotide
gacgccucccacacguuga

SEQ ID NO: 2148290 - RNA, 19 nt, Artificial Sequence
  Description of Artificial Sequence: Synthetic oligonucleotide
guguucucuugccucguaa

SEQ ID NO: 2148291 - RNA, 19 nt, Artificial Sequence
  Description of Artificial Sequence: Synthetic oligonucleotide
auccaacuggauggcagga

SEQ ID NO: 2148292 - RNA, 19 nt, Artificial Sequence
  Description of Artificial Sequence: Synthetic oligonucleotide
cacauaugaauacuucauu

SEQ ID NO: 2148293 - RNA, 19 nt, Artificial Sequence
  Description of Artificial Sequence: Synthetic oligonucleotide
uccucauguccagcuacaa

SEQ ID NO: 2148294 - RNA, 19 nt, Artificial Sequence
  Description of Artificial Sequence: Synthetic oligonucleotide
cugaguugaaaggaagggu

SEQ ID NO: 2148295 - RNA, 19 nt, Artificial Sequence
  Description of Artificial Sequence: Synthetic oligonucleotide
aacccagcuuacagcgcug

SEQ ID NO: 2148296 - RNA, 19 nt, Artificial Sequence
  Description of Artificial Sequence: Synthetic oligonucleotide
gccaccccaggcuugcaag

SEQ ID NO: 2148297 - RNA, 19 nt, Artificial Sequence
  Description of Artificial Sequence: Synthetic oligonucleotide
ggaaggguagcugauccaa

SEQ ID NO: 2148298 - RNA, 19 nt, Artificial Sequence
  Description of Artificial Sequence: Synthetic oligonucleotide
gcacuugcagguucugcac

SEQ ID NO: 2148299 - RNA, 19 nt, Artificial Sequence
  Description of Artificial Sequence: Synthetic oligonucleotide
accuccacugcuacuugca

SEQ ID NO: 2148300 - RNA, 19 nt, Artificial Sequence
  Description of Artificial Sequence: Synthetic oligonucleotide
caccgcuucgauucccuga

SEQ ID NO: 2148301 - RNA, 19 nt, Artificial Sequence
  Description of Artificial Sequence: Synthetic oligonucleotide
ugcuagggucacagacggu

SEQ ID NO: 2148302 - RNA, 19 nt, Artificial Sequence
  Description of Artificial Sequence: Synthetic oligonucleotide
aguguucucuugccucgua

SEQ ID NO: 2148303 - RNA, 19 nt, Artificial Sequence
  Description of Artificial Sequence: Synthetic oligonucleotide
cuucgauucccugacgccu

SEQ ID NO: 2148304 - RNA, 19 nt, Artificial Sequence
  Description of Artificial Sequence: Synthetic oligonucleotide
ggagugcagagaaucccug

SEQ ID NO: 2148305 - RNA, 19 nt, Artificial Sequence
  Description of Artificial Sequence: Synthetic oligonucleotide
aagguacuccagaccugga

SEQ ID NO: 2148306 - RNA, 19 nt, Artificial Sequence
  Description of Artificial Sequence: Synthetic oligonucleotide
cauugcacuugcagguucu

SEQ ID NO: 2148307 - RNA, 19 nt, Artificial Sequence
  Description of Artificial Sequence: Synthetic oligonucleotide
gucggcucacucuuauugu

SEQ ID NO: 2148308 - RNA, 19 nt, Artificial Sequence
  Description of Artificial Sequence: Synthetic oligonucleotide
cauugaccucggcauguga

SEQ ID NO: 2148309 - RNA, 19 nt, Artificial Sequence
  Description of Artificial Sequence: Synthetic oligonucleotide
gccguacucuccaaagccc

SEQ ID NO: 2148310 - RNA, 19 nt, Artificial Sequence
  Description of Artificial Sequence: Synthetic oligonucleotide
agccccaguaucccaccau

SEQ ID NO: 2148311 - RNA, 19 nt, Artificial Sequence
  Description of Artificial Sequence: Synthetic oligonucleotide
cgcuucgauucccugacgc

SEQ ID NO: 2148312 - RNA, 19 nt, Artificial Sequence
  Description of Artificial Sequence: Synthetic oligonucleotide
agcgcuggacaaaacuuuu

SEQ ID NO: 2148313 - RNA, 19 nt, Artificial Sequence
  Description of Artificial Sequence: Synthetic oligonucleotide
aggcuugcaagggcaguca

SEQ ID NO: 2148314 - RNA, 19 nt, Artificial Sequence
  Description of Artificial Sequence: Synthetic oligonucleotide
gcugauccaacuggauggc

SEQ ID NO: 2148315 - RNA, 19 nt, Artificial Sequence
  Description of Artificial Sequence: Synthetic oligonucleotide
agcuuacagcgcugacagu

SEQ ID NO: 2148316 - RNA, 19 nt, Artificial Sequence
  Description of Artificial Sequence: Synthetic oligonucleotide
gcugacagugcuguccuuc

SEQ ID NO: 2148317 - RNA, 19 nt, Artificial Sequence
  Description of Artificial Sequence: Synthetic oligonucleotide
gcuugcaagggcagucacc

SEQ ID NO: 2148318 - RNA, 19 nt, Artificial Sequence
  Description of Artificial Sequence: Synthetic oligonucleotide
guuuccagcgcuggacaaa

SEQ ID NO: 2148319 - RNA, 19 nt, Artificial Sequence
  Description of Artificial Sequence: Synthetic oligonucleotide
cauuuaccugagugucgga

SEQ ID NO: 2148320 - RNA, 19 nt, Artificial Sequence
  Description of Artificial Sequence: Synthetic oligonucleotide
ccaccccaggcuugcaagg

SEQ ID NO: 2148321 - RNA, 19 nt, Artificial Sequence
  Description of Artificial Sequence: Synthetic oligonucleotide
ccacacguugaugucgaag

SEQ ID NO: 2148322 - RNA, 19 nt, Artificial Sequence
  Description of Artificial Sequence: Synthetic oligonucleotide
gagugucggagugcagaga

SEQ ID NO: 2148323 - RNA, 19 nt, Artificial Sequence
  Description of Artificial Sequence: Synthetic oligonucleotide
accaugcaccugucacagu

SEQ ID NO: 2148324 - RNA, 19 nt, Artificial Sequence
  Description of Artificial Sequence: Synthetic oligonucleotide
acccagcuuacagcgcuga

SEQ ID NO: 2148325 - RNA, 19 nt, Artificial Sequence
  Description of Artificial Sequence: Synthetic oligonucleotide
ggcuugcaagggcagucac

SEQ ID NO: 2148326 - RNA, 19 nt, Artificial Sequence
  Description of Artificial Sequence: Synthetic oligonucleotide
uugcaagggcagucaccau

SEQ ID NO: 2148327 - RNA, 19 nt, Artificial Sequence
  Description of Artificial Sequence: Synthetic oligonucleotide
cugcacucguuaggagccc

SEQ ID NO: 2148328 - RNA, 19 nt, Artificial Sequence
  Description of Artificial Sequence: Synthetic oligonucleotide
caguuucauuuugaggucu

SEQ ID NO: 2148329 - RNA, 19 nt, Artificial Sequence
  Description of Artificial Sequence: Synthetic oligonucleotide
auacuucauuccacagaau

SEQ ID NO: 2148330 - RNA, 19 nt, Artificial Sequence
  Description of Artificial Sequence: Synthetic oligonucleotide
gacggucacugaguugaaa

SEQ ID NO: 2148331 - RNA, 19 nt, Artificial Sequence
  Description of Artificial Sequence: Synthetic oligonucleotide
caugcaccugucacagugu

SEQ ID NO: 2148332 - RNA, 19 nt, Artificial Sequence
  Description of Artificial Sequence: Synthetic oligonucleotide
cagcacuacugcugaugca

SEQ ID NO: 2148333 - RNA, 19 nt, Artificial Sequence
  Description of Artificial Sequence: Synthetic oligonucleotide
accucggcaugugagccuu

SEQ ID NO: 2148334 - RNA, 19 nt, Artificial Sequence
  Description of Artificial Sequence: Synthetic oligonucleotide
acgccucccacacguugau

SEQ ID NO: 2148335 - RNA, 19 nt, Artificial Sequence
  Description of Artificial Sequence: Synthetic oligonucleotide
cacauugaccucggcaugu

SEQ ID NO: 2148336 - RNA, 19 nt, Artificial Sequence
  Description of Artificial Sequence: Synthetic oligonucleotide
caccaccgcuucgauuccc

SEQ ID NO: 2148337 - RNA, 19 nt, Artificial Sequence
  Description of Artificial Sequence: Synthetic oligonucleotide
cggcaugugagccuuuauc

SEQ ID NO: 2148338 - RNA, 19 nt, Artificial Sequence
  Description of Artificial Sequence: Synthetic oligonucleotide
caugcccauugcacuugca

SEQ ID NO: 2148339 - RNA, 19 nt, Artificial Sequence
  Description of Artificial Sequence: Synthetic oligonucleotide
cccaguaucccaccaugca

SEQ ID NO: 2148340 - RNA, 19 nt, Artificial Sequence
  Description of Artificial Sequence: Synthetic oligonucleotide
guaucccaccaugcaccug

SEQ ID NO: 2148341 - RNA, 19 nt, Artificial Sequence
  Description of Artificial Sequence: Synthetic oligonucleotide
cacuugcagguucugcacu

SEQ ID NO: 2148342 - RNA, 19 nt, Artificial Sequence
  Description of Artificial Sequence: Synthetic oligonucleotide
cugauccaacuggauggca

SEQ ID NO: 2148343 - RNA, 19 nt, Artificial Sequence
  Description of Artificial Sequence: Synthetic oligonucleotide
cacgguagaaacccagcuu

SEQ ID NO: 2148344 - RNA, 19 nt, Artificial Sequence
  Description of Artificial Sequence: Synthetic oligonucleotide
gcaugugagccuuuaucau

SEQ ID NO: 2148345 - RNA, 19 nt, Artificial Sequence
  Description of Artificial Sequence: Synthetic oligonucleotide
gaccucggcaugugagccu

SEQ ID NO: 2148346 - RNA, 19 nt, Artificial Sequence
  Description of Artificial Sequence: Synthetic oligonucleotide
aggucggcucacucuuauu

SEQ ID NO: 2148347 - RNA, 19 nt, Artificial Sequence
  Description of Artificial Sequence: Synthetic oligonucleotide
ccagcuuacagcgcugaca

SEQ ID NO: 2148348 - RNA, 19 nt, Artificial Sequence
  Description of Artificial Sequence: Synthetic oligonucleotide
cacaccuccacugcuacuu

SEQ ID NO: 2148349 - RNA, 19 nt, Artificial Sequence
  Description of Artificial Sequence: Synthetic oligonucleotide
cuucaguguugugcugaca

SEQ ID NO: 2148350 - RNA, 19 nt, Artificial Sequence
  Description of Artificial Sequence: Synthetic oligonucleotide
cagcgcuggacaaaacuuu

SEQ ID NO: 2148351 - RNA, 19 nt, Artificial Sequence
  Description of Artificial Sequence: Synthetic oligonucleotide
gccuugggguuuccuaaca

SEQ ID NO: 2148352 - RNA, 19 nt, Artificial Sequence
  Description of Artificial Sequence: Synthetic oligonucleotide
cacagacggucacugaguu

SEQ ID NO: 2148353 - RNA, 19 nt, Artificial Sequence
  Description of Artificial Sequence: Synthetic oligonucleotide
ggcaagugcagccucuguu

SEQ ID NO: 2148354 - RNA, 19 nt, Artificial Sequence
  Description of Artificial Sequence: Synthetic oligonucleotide
ugcaagcaucuggggcaga

SEQ ID NO: 2148355 - RNA, 19 nt, Artificial Sequence
  Description of Artificial Sequence: Synthetic oligonucleotide
gccucguaagaucuucagu

SEQ ID NO: 2148356 - RNA, 19 nt, Artificial Sequence
  Description of Artificial Sequence: Synthetic oligonucleotide
ccugaggucacgguagaaa

SEQ ID NO: 2148357 - RNA, 19 nt, Artificial Sequence
  Description of Artificial Sequence: Synthetic oligonucleotide
cuacccagagaagagccuu

SEQ ID NO: 2148358 - RNA, 19 nt, Artificial Sequence
  Description of Artificial Sequence: Synthetic oligonucleotide
ccaaagccccaguauccca

SEQ ID NO: 2148359 - RNA, 19 nt, Artificial Sequence
  Description of Artificial Sequence: Synthetic oligonucleotide
cugaugcagucuccugugu

SEQ ID NO: 2148360 - RNA, 19 nt, Artificial Sequence
  Description of Artificial Sequence: Synthetic oligonucleotide
guccagcuacaagguacuc

SEQ ID NO: 2148361 - RNA, 19 nt, Artificial Sequence
  Description of Artificial Sequence: Synthetic oligonucleotide
gcagagaaucccuguucgu

SEQ ID NO: 2148362 - RNA, 19 nt, Artificial Sequence
  Description of Artificial Sequence: Synthetic oligonucleotide
gcgcuggacaaaacuuuuc

SEQ ID NO: 2148363 - RNA, 19 nt, Artificial Sequence
  Description of Artificial Sequence: Synthetic oligonucleotide
cugucacaguguggcccug

SEQ ID NO: 2148364 - RNA, 19 nt, Artificial Sequence
  Description of Artificial Sequence: Synthetic oligonucleotide
cucggcaugugagccuuua

SEQ ID NO: 2148365 - RNA, 19 nt, Artificial Sequence
  Description of Artificial Sequence: Synthetic oligonucleotide
ccagcgcuggacaaaacuu

SEQ ID NO: 2148366 - RNA, 19 nt, Artificial Sequence
  Description of Artificial Sequence: Synthetic oligonucleotide
cccagcuuacagcgcugac

SEQ ID NO: 2148367 - RNA, 19 nt, Artificial Sequence
  Description of Artificial Sequence: Synthetic oligonucleotide
gcgcugacagugcuguccu

SEQ ID NO: 2148368 - RNA, 19 nt, Artificial Sequence
  Description of Artificial Sequence: Synthetic oligonucleotide
caggucggcucacucuuau

SEQ ID NO: 2148369 - RNA, 19 nt, Artificial Sequence
  Description of Artificial Sequence: Synthetic oligonucleotide
agacggucacugaguugaa

SEQ ID NO: 2148370 - RNA, 19 nt, Artificial Sequence
  Description of Artificial Sequence: Synthetic oligonucleotide
ggggaguucaugguaccau

SEQ ID NO: 2148371 - RNA, 19 nt, Artificial Sequence
  Description of Artificial Sequence: Synthetic oligonucleotide
ccgcuucgauucccugacg

SEQ ID NO: 2148372 - RNA, 19 nt, Artificial Sequence
  Description of Artificial Sequence: Synthetic oligonucleotide
cguacucuccaaagcccca

SEQ ID NO: 2148373 - RNA, 19 nt, Artificial Sequence
  Description of Artificial Sequence: Synthetic oligonucleotide
caggugucggcaugcccau

SEQ ID NO: 2148374 - RNA, 19 nt, Artificial Sequence
  Description of Artificial Sequence: Synthetic oligonucleotide
ccauucccaggucggcuca

SEQ ID NO: 2148375 - RNA, 19 nt, Artificial Sequence
  Description of Artificial Sequence: Synthetic oligonucleotide
ggucuccugaggucacggu

SEQ ID NO: 2148376 - RNA, 19 nt, Artificial Sequence
  Description of Artificial Sequence: Synthetic oligonucleotide
ccauugcuagggucacaga

SEQ ID NO: 2148377 - RNA, 19 nt, Artificial Sequence
  Description of Artificial Sequence: Synthetic oligonucleotide
cugcagccguacucuccaa

SEQ ID NO: 2148378 - RNA, 19 nt, Artificial Sequence
  Description of Artificial Sequence: Synthetic oligonucleotide
caucagcacuacugcugau

SEQ ID NO: 2148379 - RNA, 19 nt, Artificial Sequence
  Description of Artificial Sequence: Synthetic oligonucleotide
cccugacgccucccacacg

SEQ ID NO: 2148380 - RNA, 19 nt, Artificial Sequence
  Description of Artificial Sequence: Synthetic oligonucleotide
cccugccaccccaggcuug

SEQ ID NO: 2148381 - RNA, 19 nt, Artificial Sequence
  Description of Artificial Sequence: Synthetic oligonucleotide
cggagugcagagaaucccu

SEQ ID NO: 2148382 - RNA, 19 nt, Artificial Sequence
  Description of Artificial Sequence: Synthetic oligonucleotide
ggaaagucggggaguucau

SEQ ID NO: 2148383 - RNA, 19 nt, Artificial Sequence
  Description of Artificial Sequence: Synthetic oligonucleotide
caguguucucuugccucgu

SEQ ID NO: 2148384 - RNA, 19 nt, Artificial Sequence
  Description of Artificial Sequence: Synthetic oligonucleotide
gugucggagugcagagaau

SEQ ID NO: 2148385 - RNA, 19 nt, Artificial Sequence
  Description of Artificial Sequence: Synthetic oligonucleotide
aggugucggcaugcccauu

SEQ ID NO: 2148386 - RNA, 19 nt, Artificial Sequence
  Description of Artificial Sequence: Synthetic oligonucleotide
ccagaccuggauugaggau

SEQ ID NO: 2148387 - RNA, 19 nt, Artificial Sequence
  Description of Artificial Sequence: Synthetic oligonucleotide
ccaggacucuggauacagu

SEQ ID NO: 2148388 - RNA, 19 nt, Artificial Sequence
  Description of Artificial Sequence: Synthetic oligonucleotide
cccagagaagagccuuugu

SEQ ID NO: 2148389 - RNA, 19 nt, Artificial Sequence
  Description of Artificial Sequence: Synthetic oligonucleotide
cccaggucggcucacucuu

SEQ ID NO: 2148390 - RNA, 19 nt, Artificial Sequence
  Description of Artificial Sequence: Synthetic oligonucleotide
cgauucccugacgccuccc

SEQ ID NO: 2148391 - RNA, 19 nt, Artificial Sequence
  Description of Artificial Sequence: Synthetic oligonucleotide
ggguuuccuaacacuuguu

SEQ ID NO: 2148392 - RNA, 19 nt, Artificial Sequence
  Description of Artificial Sequence: Synthetic oligonucleotide
cugacgccucccacacguu

SEQ ID NO: 2148393 - RNA, 19 nt, Artificial Sequence
  Description of Artificial Sequence: Synthetic oligonucleotide
cacaaccaauuugccuguu

SEQ ID NO: 2148394 - RNA, 19 nt, Artificial Sequence
  Description of Artificial Sequence: Synthetic oligonucleotide
ccaggucggcucacucuua

SEQ ID NO: 2148395 - RNA, 19 nt, Artificial Sequence
  Description of Artificial Sequence: Synthetic oligonucleotide
cggggaguucaugguacca

SEQ ID NO: 2148396 - RNA, 19 nt, Artificial Sequence
  Description of Artificial Sequence: Synthetic oligonucleotide
cugccaccccaggcuugca

SEQ ID NO: 2148397 - RNA, 19 nt, Artificial Sequence
  Description of Artificial Sequence: Synthetic oligonucleotide
cccacacguugaugucgaa

SEQ ID NO: 2148398 - RNA, 19 nt, Artificial Sequence
  Description of Artificial Sequence: Synthetic oligonucleotide
ccaggcuugcaagggcagu

SEQ ID NO: 2148399 - RNA, 19 nt, Artificial Sequence
  Description of Artificial Sequence: Synthetic oligonucleotide
ccccauucccaggucggcu

SEQ ID NO: 2148400 - RNA, 19 nt, Artificial Sequence
  Description of Artificial Sequence: Synthetic oligonucleotide
cccauugcacuugcagguu

SEQ ID NO: 2148401 - RNA, 19 nt, Artificial Sequence
  Description of Artificial Sequence: Synthetic oligonucleotide
cggcaugcccauugcacuu

SEQ ID NO: 2148402 - RNA, 19 nt, Artificial Sequence
  Description of Artificial Sequence: Synthetic oligonucleotide
ccucggcaugugagccuuu

SEQ ID NO: 2148403 - RNA, 19 nt, Artificial Sequence
  Description of Artificial Sequence: Synthetic oligonucleotide
uuuuguauggauaagaggc

SEQ ID NO: 2148404 - RNA, 19 nt, Artificial Sequence
  Description of Artificial Sequence: Synthetic oligonucleotide
ucaucaucgacaauuauag

SEQ ID NO: 2148405 - RNA, 19 nt, Artificial Sequence
  Description of Artificial Sequence: Synthetic oligonucleotide
ucagaauagagcaagaggu

SEQ ID NO: 2148406 - RNA, 19 nt, Artificial Sequence
  Description of Artificial Sequence: Synthetic oligonucleotide
uaguaagccagguagaagg

SEQ ID NO: 2148407 - RNA, 19 nt, Artificial Sequence
  Description of Artificial Sequence: Synthetic oligonucleotide
ugauauguaaauucuguag

SEQ ID NO: 2148408 - RNA, 19 nt, Artificial Sequence
  Description of Artificial Sequence: Synthetic oligonucleotide
ucuaggagaaccaaugcag

SEQ ID NO: 2148409 - RNA, 19 nt, Artificial Sequence
  Description of Artificial Sequence: Synthetic oligonucleotide
aguaagacucaccaggucg

SEQ ID NO: 2148410 - RNA, 19 nt, Artificial Sequence
  Description of Artificial Sequence: Synthetic oligonucleotide
ucaucgacaauuauagaag

SEQ ID NO: 2148411 - RNA, 19 nt, Artificial Sequence
  Description of Artificial Sequence: Synthetic oligonucleotide
uggguaguaagccagguag

SEQ ID NO: 2148412 - RNA, 19 nt, Artificial Sequence
  Description of Artificial Sequence: Synthetic oligonucleotide
auuauuugggguuggcagc

SEQ ID NO: 2148413 - RNA, 19 nt, Artificial Sequence
  Description of Artificial Sequence: Synthetic oligonucleotide
uguaaauucuguagaaaug

SEQ ID NO: 2148414 - RNA, 19 nt, Artificial Sequence
  Description of Artificial Sequence: Synthetic oligonucleotide
uguuccugcagccuggacg

SEQ ID NO: 2148415 - RNA, 19 nt, Artificial Sequence
  Description of Artificial Sequence: Synthetic oligonucleotide
gauauucuggccuucauca

SEQ ID NO: 2148416 - RNA, 19 nt, Artificial Sequence
  Description of Artificial Sequence: Synthetic oligonucleotide
uaugacgaugauauucugg

SEQ ID NO: 2148417 - RNA, 19 nt, Artificial Sequence
  Description of Artificial Sequence: Synthetic oligonucleotide
aagcagauuugcuccagcc

SEQ ID NO: 2148418 - RNA, 19 nt, Artificial Sequence
  Description of Artificial Sequence: Synthetic oligonucleotide
uccagguuuauuauuuggg

SEQ ID NO: 2148419 - RNA, 19 nt, Artificial Sequence
  Description of Artificial Sequence: Synthetic oligonucleotide
gacaaauuuggguaguaag

SEQ ID NO: 2148420 - RNA, 19 nt, Artificial Sequence
  Description of Artificial Sequence: Synthetic oligonucleotide
caauuauagaagcagcucc

SEQ ID NO: 2148421 - RNA, 19 nt, Artificial Sequence
  Description of Artificial Sequence: Synthetic oligonucleotide
acaaauuuggguaguaagc

SEQ ID NO: 2148422 - RNA, 19 nt, Artificial Sequence
  Description of Artificial Sequence: Synthetic oligonucleotide
uucaguauucaaaagcaga

SEQ ID NO: 2148423 - RNA, 19 nt, Artificial Sequence
  Description of Artificial Sequence: Synthetic oligonucleotide
ucuuccaaggacaaauuug

SEQ ID NO: 2148424 - RNA, 19 nt, Artificial Sequence
  Description of Artificial Sequence: Synthetic oligonucleotide
ugaacaauguuuucacucc

SEQ ID NO: 2148425 - RNA, 19 nt, Artificial Sequence
  Description of Artificial Sequence: Synthetic oligonucleotide
uuggcaaacgcgaaguaag

SEQ ID NO: 2148426 - RNA, 19 nt, Artificial Sequence
  Description of Artificial Sequence: Synthetic oligonucleotide
ugugcuuuggaacaggcuc

SEQ ID NO: 2148427 - RNA, 19 nt, Artificial Sequence
  Description of Artificial Sequence: Synthetic oligonucleotide
uuggagaggguauagaacu

SEQ ID NO: 2148428 - RNA, 19 nt, Artificial Sequence
  Description of Artificial Sequence: Synthetic oligonucleotide
uugagcauuucuuccaagg

SEQ ID NO: 2148429 - RNA, 19 nt, Artificial Sequence
  Description of Artificial Sequence: Synthetic oligonucleotide
aucaucgacaauuauagaa

SEQ ID NO: 2148430 - RNA, 19 nt, Artificial Sequence
  Description of Artificial Sequence: Synthetic oligonucleotide
uaaaaucucagccucacuu

SEQ ID NO: 2148431 - RNA, 19 nt, Artificial Sequence
  Description of Artificial Sequence: Synthetic oligonucleotide
auuauucacugcaaggccc

SEQ ID NO: 2148432 - RNA, 19 nt, Artificial Sequence
  Description of Artificial Sequence: Synthetic oligonucleotide
gauugaacaauguuuucac

SEQ ID NO: 2148433 - RNA, 19 nt, Artificial Sequence
  Description of Artificial Sequence: Synthetic oligonucleotide
ucgacaauuauagaagcag

SEQ ID NO: 2148434 - RNA, 19 nt, Artificial Sequence
  Description of Artificial Sequence: Synthetic oligonucleotide
aguauucaaaagcagauuu

SEQ ID NO: 2148435 - RNA, 19 nt, Artificial Sequence
  Description of Artificial Sequence: Synthetic oligonucleotide
gauuauucacugcaaggcc

SEQ ID NO: 2148436 - RNA, 19 nt, Artificial Sequence
  Description of Artificial Sequence: Synthetic oligonucleotide
uuauucacugcaaggcccg

SEQ ID NO: 2148437 - RNA, 19 nt, Artificial Sequence
  Description of Artificial Sequence: Synthetic oligonucleotide
uguaaucauugccaaaaga

SEQ ID NO: 2148438 - RNA, 19 nt, Artificial Sequence
  Description of Artificial Sequence: Synthetic oligonucleotide
ucaguauucaaaagcagau

SEQ ID NO: 2148439 - RNA, 19 nt, Artificial Sequence
  Description of Artificial Sequence: Synthetic oligonucleotide
uaaggugaugaccacgacc

SEQ ID NO: 2148440 - RNA, 19 nt, Artificial Sequence
  Description of Artificial Sequence: Synthetic oligonucleotide
gucuucaguauucaaaagc

SEQ ID NO: 2148441 - RNA, 19 nt, Artificial Sequence
  Description of Artificial Sequence: Synthetic oligonucleotide
aauuuggguaguaagccag

SEQ ID NO: 2148442 - RNA, 19 nt, Artificial Sequence
  Description of Artificial Sequence: Synthetic oligonucleotide
agcacaacacauuggagag

SEQ ID NO: 2148443 - RNA, 19 nt, Artificial Sequence
  Description of Artificial Sequence: Synthetic oligonucleotide
gaugccuucgcuccaagcc

SEQ ID NO: 2148444 - RNA, 19 nt, Artificial Sequence
  Description of Artificial Sequence: Synthetic oligonucleotide
aaauuuggguaguaagcca

SEQ ID NO: 2148445 - RNA, 19 nt, Artificial Sequence
  Description of Artificial Sequence: Synthetic oligonucleotide
auguaaauucuguagaaau

SEQ ID NO: 2148446 - RNA, 19 nt, Artificial Sequence
  Description of Artificial Sequence: Synthetic oligonucleotide
ugcagcacaacacauugga

SEQ ID NO: 2148447 - RNA, 19 nt, Artificial Sequence
  Description of Artificial Sequence: Synthetic oligonucleotide
uaaucauugccaaaagaau

SEQ ID NO: 2148448 - RNA, 19 nt, Artificial Sequence
  Description of Artificial Sequence: Synthetic oligonucleotide
uucuaggagaaccaaugca

SEQ ID NO: 2148449 - RNA, 19 nt, Artificial Sequence
  Description of Artificial Sequence: Synthetic oligonucleotide
caaauuuggguaguaagcc

SEQ ID NO: 2148450 - RNA, 19 nt, Artificial Sequence
  Description of Artificial Sequence: Synthetic oligonucleotide
acccgugguauccacagcc

SEQ ID NO: 2148451 - RNA, 19 nt, Artificial Sequence
  Description of Artificial Sequence: Synthetic oligonucleotide
aaugugcuuuggaacaggc

SEQ ID NO: 2148452 - RNA, 19 nt, Artificial Sequence
  Description of Artificial Sequence: Synthetic oligonucleotide
aacuuauguccguggauag

SEQ ID NO: 2148453 - RNA, 19 nt, Artificial Sequence
  Description of Artificial Sequence: Synthetic oligonucleotide
aggucggucaugcaggaac

SEQ ID NO: 2148454 - RNA, 19 nt, Artificial Sequence
  Description of Artificial Sequence: Synthetic oligonucleotide
aauucuguagaaaugugau

SEQ ID NO: 2148455 - RNA, 19 nt, Artificial Sequence
  Description of Artificial Sequence: Synthetic oligonucleotide
aucacuuuggcucugcuaa

SEQ ID NO: 2148456 - RNA, 19 nt, Artificial Sequence
  Description of Artificial Sequence: Synthetic oligonucleotide
uggucugauauguaaauuc

SEQ ID NO: 2148457 - RNA, 19 nt, Artificial Sequence
  Description of Artificial Sequence: Synthetic oligonucleotide
acuauggaugccuucgcuc

SEQ ID NO: 2148458 - RNA, 19 nt, Artificial Sequence
  Description of Artificial Sequence: Synthetic oligonucleotide
acaauuauagaagcagcuc

SEQ ID NO: 2148459 - RNA, 19 nt, Artificial Sequence
  Description of Artificial Sequence: Synthetic oligonucleotide
gaacccaccaccaccaccg

SEQ ID NO: 2148460 - RNA, 19 nt, Artificial Sequence
  Description of Artificial Sequence: Synthetic oligonucleotide
auuugcuccagccacuaug

SEQ ID NO: 2148461 - RNA, 19 nt, Artificial Sequence
  Description of Artificial Sequence: Synthetic oligonucleotide
aacaggcuccgucugugac

SEQ ID NO: 2148462 - RNA, 19 nt, Artificial Sequence
  Description of Artificial Sequence: Synthetic oligonucleotide
agaauagagcaagagguag

SEQ ID NO: 2148463 - RNA, 19 nt, Artificial Sequence
  Description of Artificial Sequence: Synthetic oligonucleotide
ucggauuauucacugcaag

SEQ ID NO: 2148464 - RNA, 19 nt, Artificial Sequence
  Description of Artificial Sequence: Synthetic oligonucleotide
caaacgcgaaguaagacuc

SEQ ID NO: 2148465 - RNA, 19 nt, Artificial Sequence
  Description of Artificial Sequence: Synthetic oligonucleotide
uccaaggacaaauuugggu

SEQ ID NO: 2148466 - RNA, 19 nt, Artificial Sequence
  Description of Artificial Sequence: Synthetic oligonucleotide
uuugcuccagccacuauga

SEQ ID NO: 2148467 - RNA, 19 nt, Artificial Sequence
  Description of Artificial Sequence: Synthetic oligonucleotide
aaaacuuauguccguggau

SEQ ID NO: 2148468 - RNA, 19 nt, Artificial Sequence
  Description of Artificial Sequence: Synthetic oligonucleotide
cuauggaugccuucgcucc

SEQ ID NO: 2148469 - RNA, 19 nt, Artificial Sequence
  Description of Artificial Sequence: Synthetic oligonucleotide
aauuauagaagcagcuccu

SEQ ID NO: 2148470 - RNA, 19 nt, Artificial Sequence
  Description of Artificial Sequence: Synthetic oligonucleotide
caucgacaauuauagaagc

SEQ ID NO: 2148471 - RNA, 19 nt, Artificial Sequence
  Description of Artificial Sequence: Synthetic oligonucleotide
guaaucauugccaaaagaa

SEQ ID NO: 2148472 - RNA, 19 nt, Artificial Sequence
  Description of Artificial Sequence: Synthetic oligonucleotide
agucggauuauucacugca

SEQ ID NO: 2148473 - RNA, 19 nt, Artificial Sequence
  Description of Artificial Sequence: Synthetic oligonucleotide
caugcaggaacccaccacc

SEQ ID NO: 2148474 - RNA, 19 nt, Artificial Sequence
  Description of Artificial Sequence: Synthetic oligonucleotide
ugucacacauccugaagcc

SEQ ID NO: 2148475 - RNA, 19 nt, Artificial Sequence
  Description of Artificial Sequence: Synthetic oligonucleotide
auugccaaaagaaucuuug

SEQ ID NO: 2148476 - RNA, 19 nt, Artificial Sequence
  Description of Artificial Sequence: Synthetic oligonucleotide
aacgcgaaguaagacucac

SEQ ID NO: 2148477 - RNA, 19 nt, Artificial Sequence
  Description of Artificial Sequence: Synthetic oligonucleotide
acugcugcgggccauuguc

SEQ ID NO: 2148478 - RNA, 19 nt, Artificial Sequence
  Description of Artificial Sequence: Synthetic oligonucleotide
cuaggagaaccaaugcagc

SEQ ID NO: 2148479 - RNA, 19 nt, Artificial Sequence
  Description of Artificial Sequence: Synthetic oligonucleotide
uuauagaagcagcuccugu

SEQ ID NO: 2148480 - RNA, 19 nt, Artificial Sequence
  Description of Artificial Sequence: Synthetic oligonucleotide
aaacuuauguccguggaua

SEQ ID NO: 2148481 - RNA, 19 nt, Artificial Sequence
  Description of Artificial Sequence: Synthetic oligonucleotide
auuggagaggguauagaac

SEQ ID NO: 2148482 - RNA, 19 nt, Artificial Sequence
  Description of Artificial Sequence: Synthetic oligonucleotide
ugggaaugugcuuuggaac

SEQ ID NO: 2148483 - RNA, 19 nt, Artificial Sequence
  Description of Artificial Sequence: Synthetic oligonucleotide
ucagucggauuauucacug

SEQ ID NO: 2148484 - RNA, 19 nt, Artificial Sequence
  Description of Artificial Sequence: Synthetic oligonucleotide
ucgaguuggcagaucauca

SEQ ID NO: 2148485 - RNA, 19 nt, Artificial Sequence
  Description of Artificial Sequence: Synthetic oligonucleotide
agaaccaaugcagccuucc

SEQ ID NO: 2148486 - RNA, 19 nt, Artificial Sequence
  Description of Artificial Sequence: Synthetic oligonucleotide
cauccugaagccccuaagg

SEQ ID NO: 2148487 - RNA, 19 nt, Artificial Sequence
  Description of Artificial Sequence: Synthetic oligonucleotide
caauguuuucacuccacug

SEQ ID NO: 2148488 - RNA, 19 nt, Artificial Sequence
  Description of Artificial Sequence: Synthetic oligonucleotide
uccugaagccccuaaggug

SEQ ID NO: 2148489 - RNA, 19 nt, Artificial Sequence
  Description of Artificial Sequence: Synthetic oligonucleotide
uauucuggccuucaucauc

SEQ ID NO: 2148490 - RNA, 19 nt, Artificial Sequence
  Description of Artificial Sequence: Synthetic oligonucleotide
cacacuauggaugccuucg

SEQ ID NO: 2148491 - RNA, 19 nt, Artificial Sequence
  Description of Artificial Sequence: Synthetic oligonucleotide
uuggcagaucaucacuuug

SEQ ID NO: 2148492 - RNA, 19 nt, Artificial Sequence
  Description of Artificial Sequence: Synthetic oligonucleotide
aaccuugcacacuauggau

SEQ ID NO: 2148493 - RNA, 19 nt, Artificial Sequence
  Description of Artificial Sequence: Synthetic oligonucleotide
aguugcugggcugauuucg

SEQ ID NO: 2148494 - RNA, 19 nt, Artificial Sequence
  Description of Artificial Sequence: Synthetic oligonucleotide
ggauuauucacugcaaggc

SEQ ID NO: 2148495 - RNA, 19 nt, Artificial Sequence
  Description of Artificial Sequence: Synthetic oligonucleotide
auguaaucauugccaaaag

SEQ ID NO: 2148496 - RNA, 19 nt, Artificial Sequence
  Description of Artificial Sequence: Synthetic oligonucleotide
augccuucgcuccaagccg

SEQ ID NO: 2148497 - RNA, 19 nt, Artificial Sequence
  Description of Artificial Sequence: Synthetic oligonucleotide
agccgagcagcuuggacac

SEQ ID NO: 2148498 - RNA, 19 nt, Artificial Sequence
  Description of Artificial Sequence: Synthetic oligonucleotide
acacuauggaugccuucgc

SEQ ID NO: 2148499 - RNA, 19 nt, Artificial Sequence
  Description of Artificial Sequence: Synthetic oligonucleotide
guaagacucaccaggucgg

SEQ ID NO: 2148500 - RNA, 19 nt, Artificial Sequence
  Description of Artificial Sequence: Synthetic oligonucleotide
cagguagaaggccagugcc

SEQ ID NO: 2148501 - RNA, 19 nt, Artificial Sequence
  Description of Artificial Sequence: Synthetic oligonucleotide
ugggcugauuucgaguugg

SEQ ID NO: 2148502 - RNA, 19 nt, Artificial Sequence
  Description of Artificial Sequence: Synthetic oligonucleotide
ucuaggucagcgguggcag

SEQ ID NO: 2148503 - RNA, 19 nt, Artificial Sequence
  Description of Artificial Sequence: Synthetic oligonucleotide
auugaacaauguuuucacu

SEQ ID NO: 2148504 - RNA, 19 nt, Artificial Sequence
  Description of Artificial Sequence: Synthetic oligonucleotide
uggauaagaggccuguguu

SEQ ID NO: 2148505 - RNA, 19 nt, Artificial Sequence
  Description of Artificial Sequence: Synthetic oligonucleotide
aguaagccagguagaaggc

SEQ ID NO: 2148506 - RNA, 19 nt, Artificial Sequence
  Description of Artificial Sequence: Synthetic oligonucleotide
uuuauuauuugggguuggc

SEQ ID NO: 2148507 - RNA, 19 nt, Artificial Sequence
  Description of Artificial Sequence: Synthetic oligonucleotide
aaucuuugccaaccuugca

SEQ ID NO: 2148508 - RNA, 19 nt, Artificial Sequence
  Description of Artificial Sequence: Synthetic oligonucleotide
agaucaucacuuuggcucu

SEQ ID NO: 2148509 - RNA, 19 nt, Artificial Sequence
  Description of Artificial Sequence: Synthetic oligonucleotide
agccuucccagccucaguc

SEQ ID NO: 2148510 - RNA, 19 nt, Artificial Sequence
  Description of Artificial Sequence: Synthetic oligonucleotide
aaaagcagauuugcuccag

SEQ ID NO: 2148511 - RNA, 19 nt, Artificial Sequence
  Description of Artificial Sequence: Synthetic oligonucleotide
agucagaauagagcaagag

SEQ ID NO: 2148512 - RNA, 19 nt, Artificial Sequence
  Description of Artificial Sequence: Synthetic oligonucleotide
guucuaggagaaccaaugc

SEQ ID NO: 2148513 - RNA, 19 nt, Artificial Sequence
  Description of Artificial Sequence: Synthetic oligonucleotide
gacgaugauauucuggccu

SEQ ID NO: 2148514 - RNA, 19 nt, Artificial Sequence
  Description of Artificial Sequence: Synthetic oligonucleotide
ugugggaaugugcuuugga

SEQ ID NO: 2148515 - RNA, 19 nt, Artificial Sequence
  Description of Artificial Sequence: Synthetic oligonucleotide
uugcagcacaacacauugg

SEQ ID NO: 2148516 - RNA, 19 nt, Artificial Sequence
  Description of Artificial Sequence: Synthetic oligonucleotide
aaguugcugggcugauuuc

SEQ ID NO: 2148517 - RNA, 19 nt, Artificial Sequence
  Description of Artificial Sequence: Synthetic oligonucleotide
cagcagucagaauagagca

SEQ ID NO: 2148518 - RNA, 19 nt, Artificial Sequence
  Description of Artificial Sequence: Synthetic oligonucleotide
guauucaaaagcagauuug

SEQ ID NO: 2148519 - RNA, 19 nt, Artificial Sequence
  Description of Artificial Sequence: Synthetic oligonucleotide
cagcacaacacauuggaga

SEQ ID NO: 2148520 - RNA, 19 nt, Artificial Sequence
  Description of Artificial Sequence: Synthetic oligonucleotide
ccagguuuauuauuugggg

SEQ ID NO: 2148521 - RNA, 19 nt, Artificial Sequence
  Description of Artificial Sequence: Synthetic oligonucleotide
uguuuucacuccacugcug

SEQ ID NO: 2148522 - RNA, 19 nt, Artificial Sequence
  Description of Artificial Sequence: Synthetic oligonucleotide
ugcuaaugacacuggcugc

SEQ ID NO: 2148523 - RNA, 19 nt, Artificial Sequence
  Description of Artificial Sequence: Synthetic oligonucleotide
uuguauggauaagaggccu

SEQ ID NO: 2148524 - RNA, 19 nt, Artificial Sequence
  Description of Artificial Sequence: Synthetic oligonucleotide
uccguggauaguuucucca

SEQ ID NO: 2148525 - RNA, 19 nt, Artificial Sequence
  Description of Artificial Sequence: Synthetic oligonucleotide
uuuggcaaacgcgaaguaa

SEQ ID NO: 2148526 - RNA, 19 nt, Artificial Sequence
  Description of Artificial Sequence: Synthetic oligonucleotide
auccugaagccccuaaggu

SEQ ID NO: 2148527 - RNA, 19 nt, Artificial Sequence
  Description of Artificial Sequence: Synthetic oligonucleotide
uccaagccgagcagcuugg

SEQ ID NO: 2148528 - RNA, 19 nt, Artificial Sequence
  Description of Artificial Sequence: Synthetic oligonucleotide
aagaaucuuugccaaccuu

SEQ ID NO: 2148529 - RNA, 19 nt, Artificial Sequence
  Description of Artificial Sequence: Synthetic oligonucleotide
gaacaauguuuucacucca

SEQ ID NO: 2148530 - RNA, 19 nt, Artificial Sequence
  Description of Artificial Sequence: Synthetic oligonucleotide
aacacauuggagaggguau

SEQ ID NO: 2148531 - RNA, 19 nt, Artificial Sequence
  Description of Artificial Sequence: Synthetic oligonucleotide
gaaugugcuuuggaacagg

SEQ ID NO: 2148532 - RNA, 19 nt, Artificial Sequence
  Description of Artificial Sequence: Synthetic oligonucleotide
guuuauuauuugggguugg

SEQ ID NO: 2148533 - RNA, 19 nt, Artificial Sequence
  Description of Artificial Sequence: Synthetic oligonucleotide
gccaaaagaaucuuugcca

SEQ ID NO: 2148534 - RNA, 19 nt, Artificial Sequence
  Description of Artificial Sequence: Synthetic oligonucleotide
agccccuaaggugaugacc

SEQ ID NO: 2148535 - RNA, 19 nt, Artificial Sequence
  Description of Artificial Sequence: Synthetic oligonucleotide
uggagaggguauagaacug

SEQ ID NO: 2148536 - RNA, 19 nt, Artificial Sequence
  Description of Artificial Sequence: Synthetic oligonucleotide
uuugggguuggcagcaguc

SEQ ID NO: 2148537 - RNA, 19 nt, Artificial Sequence
  Description of Artificial Sequence: Synthetic oligonucleotide
cugauuucgaguuggcaga

SEQ ID NO: 2148538 - RNA, 19 nt, Artificial Sequence
  Description of Artificial Sequence: Synthetic oligonucleotide
ccaaccuugcacacuaugg

SEQ ID NO: 2148539 - RNA, 19 nt, Artificial Sequence
  Description of Artificial Sequence: Synthetic oligonucleotide
cuuuggaacaggcuccguc

SEQ ID NO: 2148540 - RNA, 19 nt, Artificial Sequence
  Description of Artificial Sequence: Synthetic oligonucleotide
uugccaaccuugcacacua

SEQ ID NO: 2148541 - RNA, 19 nt, Artificial Sequence
  Description of Artificial Sequence: Synthetic oligonucleotide
acgaaacugucaccagcac

SEQ ID NO: 2148542 - RNA, 19 nt, Artificial Sequence
  Description of Artificial Sequence: Synthetic oligonucleotide
gaaccaaugcagccuuccc

SEQ ID NO: 2148543 - RNA, 19 nt, Artificial Sequence
  Description of Artificial Sequence: Synthetic oligonucleotide
gucugugacagugucacac

SEQ ID NO: 2148544 - RNA, 19 nt, Artificial Sequence
  Description of Artificial Sequence: Synthetic oligonucleotide
uccccguucuaggagaacc

SEQ ID NO: 2148545 - RNA, 19 nt, Artificial Sequence
  Description of Artificial Sequence: Synthetic oligonucleotide
cauuggagaggguauagaa

SEQ ID NO: 2148546 - RNA, 19 nt, Artificial Sequence
  Description of Artificial Sequence: Synthetic oligonucleotide
aagccccuaaggugaugac

SEQ ID NO: 2148547 - RNA, 19 nt, Artificial Sequence
  Description of Artificial Sequence: Synthetic oligonucleotide
gcagccuggacgcugauug

SEQ ID NO: 2148548 - RNA, 19 nt, Artificial Sequence
  Description of Artificial Sequence: Synthetic oligonucleotide
uggcaaacgcgaaguaaga

SEQ ID NO: 2148549 - RNA, 19 nt, Artificial Sequence
  Description of Artificial Sequence: Synthetic oligonucleotide
gacaauuauagaagcagcu

SEQ ID NO: 2148550 - RNA, 19 nt, Artificial Sequence
  Description of Artificial Sequence: Synthetic oligonucleotide
ugugacagugucacacauc

SEQ ID NO: 2148551 - RNA, 19 nt, Artificial Sequence
  Description of Artificial Sequence: Synthetic oligonucleotide
gcagauuugcuccagccac

SEQ ID NO: 2148552 - RNA, 19 nt, Artificial Sequence
  Description of Artificial Sequence: Synthetic oligonucleotide
uucgcuccaagccgagcag

SEQ ID NO: 2148553 - RNA, 19 nt, Artificial Sequence
  Description of Artificial Sequence: Synthetic oligonucleotide
cugauugcagcaaugaaau

SEQ ID NO: 2148554 - RNA, 19 nt, Artificial Sequence
  Description of Artificial Sequence: Synthetic oligonucleotide
uucgaguuggcagaucauc

SEQ ID NO: 2148555 - RNA, 19 nt, Artificial Sequence
  Description of Artificial Sequence: Synthetic oligonucleotide
cacgaaacugucaccagca

SEQ ID NO: 2148556 - RNA, 19 nt, Artificial Sequence
  Description of Artificial Sequence: Synthetic oligonucleotide
ugcuuuggaacaggcuccg

SEQ ID NO: 2148557 - RNA, 19 nt, Artificial Sequence
  Description of Artificial Sequence: Synthetic oligonucleotide
aaacugucaccagcacccg

SEQ ID NO: 2148558 - RNA, 19 nt, Artificial Sequence
  Description of Artificial Sequence: Synthetic oligonucleotide
ggugaugaccacgaccugg

SEQ ID NO: 2148559 - RNA, 19 nt, Artificial Sequence
  Description of Artificial Sequence: Synthetic oligonucleotide
uauggaugccuucgcucca

SEQ ID NO: 2148560 - RNA, 19 nt, Artificial Sequence
  Description of Artificial Sequence: Synthetic oligonucleotide
gggaaugugcuuuggaaca

SEQ ID NO: 2148561 - RNA, 19 nt, Artificial Sequence
  Description of Artificial Sequence: Synthetic oligonucleotide
cucugcuaaugacacuggc

SEQ ID NO: 2148562 - RNA, 19 nt, Artificial Sequence
  Description of Artificial Sequence: Synthetic oligonucleotide
auucuguagaaaugugauu

SEQ ID NO: 2148563 - RNA, 19 nt, Artificial Sequence
  Description of Artificial Sequence: Synthetic oligonucleotide
guaguaagccagguagaag

SEQ ID NO: 2148564 - RNA, 19 nt, Artificial Sequence
  Description of Artificial Sequence: Synthetic oligonucleotide
ggauugaacaauguuuuca

SEQ ID NO: 2148565 - RNA, 19 nt, Artificial Sequence
  Description of Artificial Sequence: Synthetic oligonucleotide
uggauugaacaauguuuuc

SEQ ID NO: 2148566 - RNA, 19 nt, Artificial Sequence
  Description of Artificial Sequence: Synthetic oligonucleotide
aacccaccaccaccaccgc

SEQ ID NO: 2148567 - RNA, 19 nt, Artificial Sequence
  Description of Artificial Sequence: Synthetic oligonucleotide
auuuggguaguaagccagg

SEQ ID NO: 2148568 - RNA, 19 nt, Artificial Sequence
  Description of Artificial Sequence: Synthetic oligonucleotide
aucaucacuuuggcucugc

SEQ ID NO: 2148569 - RNA, 19 nt, Artificial Sequence
  Description of Artificial Sequence: Synthetic oligonucleotide
uuuuggcaaacgcgaagua

SEQ ID NO: 2148570 - RNA, 19 nt, Artificial Sequence
  Description of Artificial Sequence: Synthetic oligonucleotide
caaccuugcacacuaugga

SEQ ID NO: 2148571 - RNA, 19 nt, Artificial Sequence
  Description of Artificial Sequence: Synthetic oligonucleotide
ugcugcgggccauugucag

SEQ ID NO: 2148572 - RNA, 19 nt, Artificial Sequence
  Description of Artificial Sequence: Synthetic oligonucleotide
ccuugcacacuauggaugc

SEQ ID NO: 2148573 - RNA, 19 nt, Artificial Sequence
  Description of Artificial Sequence: Synthetic oligonucleotide
uuuggguaguaagccaggu

SEQ ID NO: 2148574 - RNA, 19 nt, Artificial Sequence
  Description of Artificial Sequence: Synthetic oligonucleotide
cuaugacgaugauauucug

SEQ ID NO: 2148575 - RNA, 19 nt, Artificial Sequence
  Description of Artificial Sequence: Synthetic oligonucleotide
gaugauauucuggccuuca

SEQ ID NO: 2148576 - RNA, 19 nt, Artificial Sequence
  Description of Artificial Sequence: Synthetic oligonucleotide
agcuggauugaacaauguu

SEQ ID NO: 2148577 - RNA, 19 nt, Artificial Sequence
  Description of Artificial Sequence: Synthetic oligonucleotide
gaagccccuaaggugauga

SEQ ID NO: 2148578 - RNA, 19 nt, Artificial Sequence
  Description of Artificial Sequence: Synthetic oligonucleotide
acugcaaggcccguuaaaa

SEQ ID NO: 2148579 - RNA, 19 nt, Artificial Sequence
  Description of Artificial Sequence: Synthetic oligonucleotide
ggagaggguauagaacugg

SEQ ID NO: 2148580 - RNA, 19 nt, Artificial Sequence
  Description of Artificial Sequence: Synthetic oligonucleotide
cugcgggccauugucaggg

SEQ ID NO: 2148581 - RNA, 19 nt, Artificial Sequence
  Description of Artificial Sequence: Synthetic oligonucleotide
ggcucugcuaaugacacug

SEQ ID NO: 2148582 - RNA, 19 nt, Artificial Sequence
  Description of Artificial Sequence: Synthetic oligonucleotide
cuguguuccugcagccugg

SEQ ID NO: 2148583 - RNA, 19 nt, Artificial Sequence
  Description of Artificial Sequence: Synthetic oligonucleotide
cugauauguaaauucugua

SEQ ID NO: 2148584 - RNA, 19 nt, Artificial Sequence
  Description of Artificial Sequence: Synthetic oligonucleotide
uugcagcaaugaaauuuga

SEQ ID NO: 2148585 - RNA, 19 nt, Artificial Sequence
  Description of Artificial Sequence: Synthetic oligonucleotide
gaaguugcugggcugauuu

SEQ ID NO: 2148586 - RNA, 19 nt, Artificial Sequence
  Description of Artificial Sequence: Synthetic oligonucleotide
gguuuauuauuugggguug

SEQ ID NO: 2148587 - RNA, 19 nt, Artificial Sequence
  Description of Artificial Sequence: Synthetic oligonucleotide
uaagaggccuguguuccug

SEQ ID NO: 2148588 - RNA, 19 nt, Artificial Sequence
  Description of Artificial Sequence: Synthetic oligonucleotide
aacugucaccagcacccgu

SEQ ID NO: 2148589 - RNA, 19 nt, Artificial Sequence
  Description of Artificial Sequence: Synthetic oligonucleotide
uuggguaguaagccaggua

SEQ ID NO: 2148590 - RNA, 19 nt, Artificial Sequence
  Description of Artificial Sequence: Synthetic oligonucleotide
accuugcacacuauggaug

SEQ ID NO: 2148591 - RNA, 19 nt, Artificial Sequence
  Description of Artificial Sequence: Synthetic oligonucleotide
uuugccaaccuugcacacu

SEQ ID NO: 2148592 - RNA, 19 nt, Artificial Sequence
  Description of Artificial Sequence: Synthetic oligonucleotide
auagagcaagagguagguc

SEQ ID NO: 2148593 - RNA, 19 nt, Artificial Sequence
  Description of Artificial Sequence: Synthetic oligonucleotide
aucgacaauuauagaagca

SEQ ID NO: 2148594 - RNA, 19 nt, Artificial Sequence
  Description of Artificial Sequence: Synthetic oligonucleotide
uccgucugugacaguguca

SEQ ID NO: 2148595 - RNA, 19 nt, Artificial Sequence
  Description of Artificial Sequence: Synthetic oligonucleotide
gccuugacugcuucugugg

SEQ ID NO: 2148596 - RNA, 19 nt, Artificial Sequence
  Description of Artificial Sequence: Synthetic oligonucleotide
acugucaccagcacccgug

SEQ ID NO: 2148597 - RNA, 19 nt, Artificial Sequence
  Description of Artificial Sequence: Synthetic oligonucleotide
gugaugaccacgaccuggc

SEQ ID NO: 2148598 - RNA, 19 nt, Artificial Sequence
  Description of Artificial Sequence: Synthetic oligonucleotide
cggauuauucacugcaagg

SEQ ID NO: 2148599 - RNA, 19 nt, Artificial Sequence
  Description of Artificial Sequence: Synthetic oligonucleotide
cuuugccaaccuugcacac

SEQ ID NO: 2148600 - RNA, 19 nt, Artificial Sequence
  Description of Artificial Sequence: Synthetic oligonucleotide
ugcaggaacccaccaccac

SEQ ID NO: 2148601 - RNA, 19 nt, Artificial Sequence
  Description of Artificial Sequence: Synthetic oligonucleotide
cacauuggagaggguauag

SEQ ID NO: 2148602 - RNA, 19 nt, Artificial Sequence
  Description of Artificial Sequence: Synthetic oligonucleotide
cuucgcuccaagccgagca

SEQ ID NO: 2148603 - RNA, 19 nt, Artificial Sequence
  Description of Artificial Sequence: Synthetic oligonucleotide
uugcugggcugauuucgag

SEQ ID NO: 2148604 - RNA, 19 nt, Artificial Sequence
  Description of Artificial Sequence: Synthetic oligonucleotide
cguucuaggagaaccaaug

SEQ ID NO: 2148605 - RNA, 19 nt, Artificial Sequence
  Description of Artificial Sequence: Synthetic oligonucleotide
ggcagaucaucacuuuggc

SEQ ID NO: 2148606 - RNA, 19 nt, Artificial Sequence
  Description of Artificial Sequence: Synthetic oligonucleotide
uuauguccguggauaguuu

SEQ ID NO: 2148607 - RNA, 19 nt, Artificial Sequence
  Description of Artificial Sequence: Synthetic oligonucleotide
gccacuaugacgaugauau

SEQ ID NO: 2148608 - RNA, 19 nt, Artificial Sequence
  Description of Artificial Sequence: Synthetic oligonucleotide
ccaaggacaaauuugggua

SEQ ID NO: 2148609 - RNA, 19 nt, Artificial Sequence
  Description of Artificial Sequence: Synthetic oligonucleotide
gaaguaagacucaccaggu

SEQ ID NO: 2148610 - RNA, 19 nt, Artificial Sequence
  Description of Artificial Sequence: Synthetic oligonucleotide
auauucuggccuucaucau

SEQ ID NO: 2148611 - RNA, 19 nt, Artificial Sequence
  Description of Artificial Sequence: Synthetic oligonucleotide
uuucgaguuggcagaucau

SEQ ID NO: 2148612 - RNA, 19 nt, Artificial Sequence
  Description of Artificial Sequence: Synthetic oligonucleotide
gguagaaggccagugcccc

SEQ ID NO: 2148613 - RNA, 19 nt, Artificial Sequence
  Description of Artificial Sequence: Synthetic oligonucleotide
gacgcugauugcagcaaug

SEQ ID NO: 2148614 - RNA, 19 nt, Artificial Sequence
  Description of Artificial Sequence: Synthetic oligonucleotide
ugguuggcaccuuuuccuc

SEQ ID NO: 2148615 - RNA, 19 nt, Artificial Sequence
  Description of Artificial Sequence: Synthetic oligonucleotide
caggcuccgucugugacag

SEQ ID NO: 2148616 - RNA, 19 nt, Artificial Sequence
  Description of Artificial Sequence: Synthetic oligonucleotide
cagucggauuauucacugc

SEQ ID NO: 2148617 - RNA, 19 nt, Artificial Sequence
  Description of Artificial Sequence: Synthetic oligonucleotide
cagguuuauuauuuggggu

SEQ ID NO: 2148618 - RNA, 19 nt, Artificial Sequence
  Description of Artificial Sequence: Synthetic oligonucleotide
auaagaggccuguguuccu

SEQ ID NO: 2148619 - RNA, 19 nt, Artificial Sequence
  Description of Artificial Sequence: Synthetic oligonucleotide
augauauucuggccuucau

SEQ ID NO: 2148620 - RNA, 19 nt, Artificial Sequence
  Description of Artificial Sequence: Synthetic oligonucleotide
cuuggacacacugguuggc

SEQ ID NO: 2148621 - RNA, 19 nt, Artificial Sequence
  Description of Artificial Sequence: Synthetic oligonucleotide
ucggucaugcaggaaccca

SEQ ID NO: 2148622 - RNA, 19 nt, Artificial Sequence
  Description of Artificial Sequence: Synthetic oligonucleotide
aaacgcgaaguaagacuca

SEQ ID NO: 2148623 - RNA, 19 nt, Artificial Sequence
  Description of Artificial Sequence: Synthetic oligonucleotide
gaguuggcagaucaucacu

SEQ ID NO: 2148624 - RNA, 19 nt, Artificial Sequence
  Description of Artificial Sequence: Synthetic oligonucleotide
ugcacacuauggaugccuu

SEQ ID NO: 2148625 - RNA, 19 nt, Artificial Sequence
  Description of Artificial Sequence: Synthetic oligonucleotide
cacuccacugcugcgggcc

SEQ ID NO: 2148626 - RNA, 19 nt, Artificial Sequence
  Description of Artificial Sequence: Synthetic oligonucleotide
ugaugaccacgaccuggca

SEQ ID NO: 2148627 - RNA, 19 nt, Artificial Sequence
  Description of Artificial Sequence: Synthetic oligonucleotide
acgcgaaguaagacucacc

SEQ ID NO: 2148628 - RNA, 19 nt, Artificial Sequence
  Description of Artificial Sequence: Synthetic oligonucleotide
ccucagucggauuauucac

SEQ ID NO: 2148629 - RNA, 19 nt, Artificial Sequence
  Description of Artificial Sequence: Synthetic oligonucleotide
aggagcuggauugaacaau

SEQ ID NO: 2148630 - RNA, 19 nt, Artificial Sequence
  Description of Artificial Sequence: Synthetic oligonucleotide
aggcccguuaaaaucucag

SEQ ID NO: 2148631 - RNA, 19 nt, Artificial Sequence
  Description of Artificial Sequence: Synthetic oligonucleotide
gucacacauccugaagccc

SEQ ID NO: 2148632 - RNA, 19 nt, Artificial Sequence
  Description of Artificial Sequence: Synthetic oligonucleotide
aguuggcagaucaucacuu

SEQ ID NO: 2148633 - RNA, 19 nt, Artificial Sequence
  Description of Artificial Sequence: Synthetic oligonucleotide
agccucagucggauuauuc

SEQ ID NO: 2148634 - RNA, 19 nt, Artificial Sequence
  Description of Artificial Sequence: Synthetic oligonucleotide
caagccgagcagcuuggac

SEQ ID NO: 2148635 - RNA, 19 nt, Artificial Sequence
  Description of Artificial Sequence: Synthetic oligonucleotide
gcgaaguaagacucaccag

SEQ ID NO: 2148636 - RNA, 19 nt, Artificial Sequence
  Description of Artificial Sequence: Synthetic oligonucleotide
gaugaccacgaccuggcau

SEQ ID NO: 2148637 - RNA, 19 nt, Artificial Sequence
  Description of Artificial Sequence: Synthetic oligonucleotide
gcacccgugguauccacag

SEQ ID NO: 2148638 - RNA, 19 nt, Artificial Sequence
  Description of Artificial Sequence: Synthetic oligonucleotide
acgcugauugcagcaauga

SEQ ID NO: 2148639 - RNA, 19 nt, Artificial Sequence
  Description of Artificial Sequence: Synthetic oligonucleotide
ccuaaggugaugaccacga

SEQ ID NO: 2148640 - RNA, 19 nt, Artificial Sequence
  Description of Artificial Sequence: Synthetic oligonucleotide
gcaaacgcgaaguaagacu

SEQ ID NO: 2148641 - RNA, 19 nt, Artificial Sequence
  Description of Artificial Sequence: Synthetic oligonucleotide
ggaaugugcuuuggaacag

SEQ ID NO: 2148642 - RNA, 19 nt, Artificial Sequence
  Description of Artificial Sequence: Synthetic oligonucleotide
agccucacuuucauugcag

SEQ ID NO: 2148643 - RNA, 19 nt, Artificial Sequence
  Description of Artificial Sequence: Synthetic oligonucleotide
ucacugcaaggcccguuaa

SEQ ID NO: 2148644 - RNA, 19 nt, Artificial Sequence
  Description of Artificial Sequence: Synthetic oligonucleotide
ugauugcagcaaugaaauu

SEQ ID NO: 2148645 - RNA, 19 nt, Artificial Sequence
  Description of Artificial Sequence: Synthetic oligonucleotide
ccacgaaacugucaccagc

SEQ ID NO: 2148646 - RNA, 19 nt, Artificial Sequence
  Description of Artificial Sequence: Synthetic oligonucleotide
gggucuaggucagcggugg

SEQ ID NO: 2148647 - RNA, 19 nt, Artificial Sequence
  Description of Artificial Sequence: Synthetic oligonucleotide
ggaacccaccaccaccacc

SEQ ID NO: 2148648 - RNA, 19 nt, Artificial Sequence
  Description of Artificial Sequence: Synthetic oligonucleotide
uaagacucaccaggucggu

SEQ ID NO: 2148649 - RNA, 19 nt, Artificial Sequence
  Description of Artificial Sequence: Synthetic oligonucleotide
gccucagucggauuauuca

SEQ ID NO: 2148650 - RNA, 19 nt, Artificial Sequence
  Description of Artificial Sequence: Synthetic oligonucleotide
cgaaacugucaccagcacc

SEQ ID NO: 2148651 - RNA, 19 nt, Artificial Sequence
  Description of Artificial Sequence: Synthetic oligonucleotide
caucaucgacaauuauaga

SEQ ID NO: 2148652 - RNA, 19 nt, Artificial Sequence
  Description of Artificial Sequence: Synthetic oligonucleotide
augacacuggcugccuucu

SEQ ID NO: 2148653 - RNA, 19 nt, Artificial Sequence
  Description of Artificial Sequence: Synthetic oligonucleotide
cuccgucugugacaguguc

SEQ ID NO: 2148654 - RNA, 19 nt, Artificial Sequence
  Description of Artificial Sequence: Synthetic oligonucleotide
ugaccacgaccuggcaucc

SEQ ID NO: 2148655 - RNA, 19 nt, Artificial Sequence
  Description of Artificial Sequence: Synthetic oligonucleotide
gucaccagcacccguggua

SEQ ID NO: 2148656 - RNA, 19 nt, Artificial Sequence
  Description of Artificial Sequence: Synthetic oligonucleotide
aaggcccguuaaaaucuca

SEQ ID NO: 2148657 - RNA, 19 nt, Artificial Sequence
  Description of Artificial Sequence: Synthetic oligonucleotide
auguccguggauaguuucu

SEQ ID NO: 2148658 - RNA, 19 nt, Artificial Sequence
  Description of Artificial Sequence: Synthetic oligonucleotide
agagcaagagguaggucuu

SEQ ID NO: 2148659 - RNA, 19 nt, Artificial Sequence
  Description of Artificial Sequence: Synthetic oligonucleotide
ccuguguuccugcagccug

SEQ ID NO: 2148660 - RNA, 19 nt, Artificial Sequence
  Description of Artificial Sequence: Synthetic oligonucleotide
uggacgcugauugcagcaa

SEQ ID NO: 2148661 - RNA, 19 nt, Artificial Sequence
  Description of Artificial Sequence: Synthetic oligonucleotide
cagucagaauagagcaaga

SEQ ID NO: 2148662 - RNA, 19 nt, Artificial Sequence
  Description of Artificial Sequence: Synthetic oligonucleotide
gccaaccuugcacacuaug

SEQ ID NO: 2148663 - RNA, 19 nt, Artificial Sequence
  Description of Artificial Sequence: Synthetic oligonucleotide
ccgucugugacagugucac

SEQ ID NO: 2148664 - RNA, 19 nt, Artificial Sequence
  Description of Artificial Sequence: Synthetic oligonucleotide
cuuauguccguggauaguu

SEQ ID NO: 2148665 - RNA, 19 nt, Artificial Sequence
  Description of Artificial Sequence: Synthetic oligonucleotide
ggcaaacgcgaaguaagac

SEQ ID NO: 2148666 - RNA, 19 nt, Artificial Sequence
  Description of Artificial Sequence: Synthetic oligonucleotide
gccccuaaggugaugacca

SEQ ID NO: 2148667 - RNA, 19 nt, Artificial Sequence
  Description of Artificial Sequence: Synthetic oligonucleotide
ggucugauauguaaauucu

SEQ ID NO: 2148668 - RNA, 19 nt, Artificial Sequence
  Description of Artificial Sequence: Synthetic oligonucleotide
gcuggauugaacaauguuu

SEQ ID NO: 2148669 - RNA, 19 nt, Artificial Sequence
  Description of Artificial Sequence: Synthetic oligonucleotide
gguauccacagccuugacu

SEQ ID NO: 2148670 - RNA, 19 nt, Artificial Sequence
  Description of Artificial Sequence: Synthetic oligonucleotide
gcucuggucugauauguaa

SEQ ID NO: 2148671 - RNA, 19 nt, Artificial Sequence
  Description of Artificial Sequence: Synthetic oligonucleotide
cucccgggcuccccggacg

SEQ ID NO: 2148672 - RNA, 19 nt, Artificial Sequence
  Description of Artificial Sequence: Synthetic oligonucleotide
gauuucgaguuggcagauc

SEQ ID NO: 2148673 - RNA, 19 nt, Artificial Sequence
  Description of Artificial Sequence: Synthetic oligonucleotide
cagccuggacgcugauugc

SEQ ID NO: 2148674 - RNA, 19 nt, Artificial Sequence
  Description of Artificial Sequence: Synthetic oligonucleotide
acacauuggagaggguaua

SEQ ID NO: 2148675 - RNA, 19 nt, Artificial Sequence
  Description of Artificial Sequence: Synthetic oligonucleotide
guauggauaagaggccugu

SEQ ID NO: 2148676 - RNA, 19 nt, Artificial Sequence
  Description of Artificial Sequence: Synthetic oligonucleotide
cgcgaaguaagacucacca

SEQ ID NO: 2148677 - RNA, 19 nt, Artificial Sequence
  Description of Artificial Sequence: Synthetic oligonucleotide
gcaaugaaauuugaucucu

SEQ ID NO: 2148678 - RNA, 19 nt, Artificial Sequence
  Description of Artificial Sequence: Synthetic oligonucleotide
gucuaggucagcgguggca

SEQ ID NO: 2148679 - RNA, 19 nt, Artificial Sequence
  Description of Artificial Sequence: Synthetic oligonucleotide
ggucggucaugcaggaacc

SEQ ID NO: 2148680 - RNA, 19 nt, Artificial Sequence
  Description of Artificial Sequence: Synthetic oligonucleotide
ggauaguuucuccaguuuu

SEQ ID NO: 2148681 - RNA, 19 nt, Artificial Sequence
  Description of Artificial Sequence: Synthetic oligonucleotide
ccuggcauccccguucuag

SEQ ID NO: 2148682 - RNA, 19 nt, Artificial Sequence
  Description of Artificial Sequence: Synthetic oligonucleotide
uucccagccucagucggau

SEQ ID NO: 2148683 - RNA, 19 nt, Artificial Sequence
  Description of Artificial Sequence: Synthetic oligonucleotide
gccuucccagccucagucg

SEQ ID NO: 2148684 - RNA, 19 nt, Artificial Sequence
  Description of Artificial Sequence: Synthetic oligonucleotide
ccuguugcagcagcucugg

SEQ ID NO: 2148685 - RNA, 19 nt, Artificial Sequence
  Description of Artificial Sequence: Synthetic oligonucleotide
ggucaugcaggaacccacc

SEQ ID NO: 2148686 - RNA, 19 nt, Artificial Sequence
  Description of Artificial Sequence: Synthetic oligonucleotide
gcagcacaacacauuggag

SEQ ID NO: 2148687 - RNA, 19 nt, Artificial Sequence
  Description of Artificial Sequence: Synthetic oligonucleotide
aggacaaauuuggguagua

SEQ ID NO: 2148688 - RNA, 19 nt, Artificial Sequence
  Description of Artificial Sequence: Synthetic oligonucleotide
uggcucugcuaaugacacu

SEQ ID NO: 2148689 - RNA, 19 nt, Artificial Sequence
  Description of Artificial Sequence: Synthetic oligonucleotide
gucagggcuuccagagaag

SEQ ID NO: 2148690 - RNA, 19 nt, Artificial Sequence
  Description of Artificial Sequence: Synthetic oligonucleotide
augcaggaacccaccacca

SEQ ID NO: 2148691 - RNA, 19 nt, Artificial Sequence
  Description of Artificial Sequence: Synthetic oligonucleotide
cgugguauccacagccuug

SEQ ID NO: 2148692 - RNA, 19 nt, Artificial Sequence
  Description of Artificial Sequence: Synthetic oligonucleotide
gcauccccguucuaggaga

SEQ ID NO: 2148693 - RNA, 19 nt, Artificial Sequence
  Description of Artificial Sequence: Synthetic oligonucleotide
gucggucaugcaggaaccc

SEQ ID NO: 2148694 - RNA, 19 nt, Artificial Sequence
  Description of Artificial Sequence: Synthetic oligonucleotide
agccacuaugacgaugaua

SEQ ID NO: 2148695 - RNA, 19 nt, Artificial Sequence
  Description of Artificial Sequence: Synthetic oligonucleotide
agcaagagguaggucuuuu

SEQ ID NO: 2148696 - RNA, 19 nt, Artificial Sequence
  Description of Artificial Sequence: Synthetic oligonucleotide
cccuaaggugaugaccacg

SEQ ID NO: 2148697 - RNA, 19 nt, Artificial Sequence
  Description of Artificial Sequence: Synthetic oligonucleotide
cagugucacacauccugaa

SEQ ID NO: 2148698 - RNA, 19 nt, Artificial Sequence
  Description of Artificial Sequence: Synthetic oligonucleotide
gucggauuauucacugcaa

SEQ ID NO: 2148699 - RNA, 19 nt, Artificial Sequence
  Description of Artificial Sequence: Synthetic oligonucleotide
auccccguucuaggagaac

SEQ ID NO: 2148700 - RNA, 19 nt, Artificial Sequence
  Description of Artificial Sequence: Synthetic oligonucleotide
cagccucacuuucauugca

SEQ ID NO: 2148701 - RNA, 19 nt, Artificial Sequence
  Description of Artificial Sequence: Synthetic oligonucleotide
gcugcgggccauugucagg

SEQ ID NO: 2148702 - RNA, 19 nt, Artificial Sequence
  Description of Artificial Sequence: Synthetic oligonucleotide
gcucugcuaaugacacugg

SEQ ID NO: 2148703 - RNA, 19 nt, Artificial Sequence
  Description of Artificial Sequence: Synthetic oligonucleotide
cgaguuggcagaucaucac

SEQ ID NO: 2148704 - RNA, 19 nt, Artificial Sequence
  Description of Artificial Sequence: Synthetic oligonucleotide
cacccgugguauccacagc

SEQ ID NO: 2148705 - RNA, 19 nt, Artificial Sequence
  Description of Artificial Sequence: Synthetic oligonucleotide
ggacaaauuuggguaguaa

SEQ ID NO: 2148706 - RNA, 19 nt, Artificial Sequence
  Description of Artificial Sequence: Synthetic oligonucleotide
gcaaggcccguuaaaaucu

SEQ ID NO: 2148707 - RNA, 19 nt, Artificial Sequence
  Description of Artificial Sequence: Synthetic oligonucleotide
caaugaaauuugaucucuu

SEQ ID NO: 2148708 - RNA, 19 nt, Artificial Sequence
  Description of Artificial Sequence: Synthetic oligonucleotide
gagaaccaaugcagccuuc

SEQ ID NO: 2148709 - RNA, 19 nt, Artificial Sequence
  Description of Artificial Sequence: Synthetic oligonucleotide
cugcugcgggccauuguca

SEQ ID NO: 2148710 - RNA, 19 nt, Artificial Sequence
  Description of Artificial Sequence: Synthetic oligonucleotide
cccguuaaaaucucagccu

SEQ ID NO: 2148711 - RNA, 19 nt, Artificial Sequence
  Description of Artificial Sequence: Synthetic oligonucleotide
guuggcagaucaucacuuu

SEQ ID NO: 2148712 - RNA, 19 nt, Artificial Sequence
  Description of Artificial Sequence: Synthetic oligonucleotide
uccccggacgccgccauua

SEQ ID NO: 2148713 - RNA, 19 nt, Artificial Sequence
  Description of Artificial Sequence: Synthetic oligonucleotide
ugccaaccuugcacacuau

SEQ ID NO: 2148714 - RNA, 19 nt, Artificial Sequence
  Description of Artificial Sequence: Synthetic oligonucleotide
cacuauggaugccuucgcu

SEQ ID NO: 2148715 - RNA, 19 nt, Artificial Sequence
  Description of Artificial Sequence: Synthetic oligonucleotide
ugacacuggcugccuucuu

SEQ ID NO: 2148716 - RNA, 19 nt, Artificial Sequence
  Description of Artificial Sequence: Synthetic oligonucleotide
cccacgaaacugucaccag

SEQ ID NO: 2148717 - RNA, 19 nt, Artificial Sequence
  Description of Artificial Sequence: Synthetic oligonucleotide
auggaugccuucgcuccaa

SEQ ID NO: 2148718 - RNA, 19 nt, Artificial Sequence
  Description of Artificial Sequence: Synthetic oligonucleotide
cacugcaaggcccguuaaa

SEQ ID NO: 2148719 - RNA, 19 nt, Artificial Sequence
  Description of Artificial Sequence: Synthetic oligonucleotide
ggguaguaagccagguaga

SEQ ID NO: 2148720 - RNA, 19 nt, Artificial Sequence
  Description of Artificial Sequence: Synthetic oligonucleotide
ggagaaccaaugcagccuu

SEQ ID NO: 2148721 - RNA, 19 nt, Artificial Sequence
  Description of Artificial Sequence: Synthetic oligonucleotide
cauccccguucuaggagaa

SEQ ID NO: 2148722 - RNA, 19 nt, Artificial Sequence
  Description of Artificial Sequence: Synthetic oligonucleotide
ggcugauuucgaguuggca

SEQ ID NO: 2148723 - RNA, 19 nt, Artificial Sequence
  Description of Artificial Sequence: Synthetic oligonucleotide
acgaccuggcauccccguu

SEQ ID NO: 2148724 - RNA, 19 nt, Artificial Sequence
  Description of Artificial Sequence: Synthetic oligonucleotide
cguuaaaaucucagccuca

SEQ ID NO: 2148725 - RNA, 19 nt, Artificial Sequence
  Description of Artificial Sequence: Synthetic oligonucleotide
cugcaaggcccguuaaaau

SEQ ID NO: 2148726 - RNA, 19 nt, Artificial Sequence
  Description of Artificial Sequence: Synthetic oligonucleotide
cugugacagugucacacau

SEQ ID NO: 2148727 - RNA, 19 nt, Artificial Sequence
  Description of Artificial Sequence: Synthetic oligonucleotide
gccuggacgcugauugcag

SEQ ID NO: 2148728 - RNA, 19 nt, Artificial Sequence
  Description of Artificial Sequence: Synthetic oligonucleotide
gaccacgaccuggcauccc

SEQ ID NO: 2148729 - RNA, 19 nt, Artificial Sequence
  Description of Artificial Sequence: Synthetic oligonucleotide
gcacacuauggaugccuuc

SEQ ID NO: 2148730 - RNA, 19 nt, Artificial Sequence
  Description of Artificial Sequence: Synthetic oligonucleotide
ccgagcagcuuggacacac

SEQ ID NO: 2148731 - RNA, 19 nt, Artificial Sequence
  Description of Artificial Sequence: Synthetic oligonucleotide
gauuugcuccagccacuau

SEQ ID NO: 2148732 - RNA, 19 nt, Artificial Sequence
  Description of Artificial Sequence: Synthetic oligonucleotide
ggggucuaggucagcggug

SEQ ID NO: 2148733 - RNA, 19 nt, Artificial Sequence
  Description of Artificial Sequence: Synthetic oligonucleotide
gagcuggauugaacaaugu

SEQ ID NO: 2148734 - RNA, 19 nt, Artificial Sequence
  Description of Artificial Sequence: Synthetic oligonucleotide
acacugguuggcaccuuuu

SEQ ID NO: 2148735 - RNA, 19 nt, Artificial Sequence
  Description of Artificial Sequence: Synthetic oligonucleotide
ccggacgccgccauuacua

SEQ ID NO: 2148736 - RNA, 19 nt, Artificial Sequence
  Description of Artificial Sequence: Synthetic oligonucleotide
cuggucugauauguaaauu

SEQ ID NO: 2148737 - RNA, 19 nt, Artificial Sequence
  Description of Artificial Sequence: Synthetic oligonucleotide
caccagcacccgugguauc

SEQ ID NO: 2148738 - RNA, 19 nt, Artificial Sequence
  Description of Artificial Sequence: Synthetic oligonucleotide
cgaccuggcauccccguuc

SEQ ID NO: 2148739 - RNA, 19 nt, Artificial Sequence
  Description of Artificial Sequence: Synthetic oligonucleotide
gggcugauuucgaguuggc

SEQ ID NO: 2148740 - RNA, 19 nt, Artificial Sequence
  Description of Artificial Sequence: Synthetic oligonucleotide
ccccguucuaggagaacca

SEQ ID NO: 2148741 - RNA, 19 nt, Artificial Sequence
  Description of Artificial Sequence: Synthetic oligonucleotide
gggccauugucagggcuuc

SEQ ID NO: 2148742 - RNA, 19 nt, Artificial Sequence
  Description of Artificial Sequence: Synthetic oligonucleotide
ccccuaaggugaugaccac

SEQ ID NO: 2148743 - RNA, 19 nt, Artificial Sequence
  Description of Artificial Sequence: Synthetic oligonucleotide
gccacggccucccgggcuc

SEQ ID NO: 2148744 - RNA, 19 nt, Artificial Sequence
  Description of Artificial Sequence: Synthetic oligonucleotide
cacgaccuggcauccccgu

SEQ ID NO: 2148745 - RNA, 19 nt, Artificial Sequence
  Description of Artificial Sequence: Synthetic oligonucleotide
cacacugguuggcaccuuu

SEQ ID NO: 2148746 - RNA, 19 nt, Artificial Sequence
  Description of Artificial Sequence: Synthetic oligonucleotide
ggccucccgggcuccccgg

SEQ ID NO: 2148747 - RNA, 19 nt, Artificial Sequence
  Description of Artificial Sequence: Synthetic oligonucleotide
ggacgcugauugcagcaau

SEQ ID NO: 2148748 - RNA, 19 nt, Artificial Sequence
  Description of Artificial Sequence: Synthetic oligonucleotide
cugaagccccuaaggugau

SEQ ID NO: 2148749 - RNA, 19 nt, Artificial Sequence
  Description of Artificial Sequence: Synthetic oligonucleotide
ggccauugucagggcuucc

SEQ ID NO: 2148750 - RNA, 19 nt, Artificial Sequence
  Description of Artificial Sequence: Synthetic oligonucleotide
acacacugguuggcaccuu

SEQ ID NO: 2148751 - RNA, 19 nt, Artificial Sequence
  Description of Artificial Sequence: Synthetic oligonucleotide
cguggauaguuucuccagu

SEQ ID NO: 2148752 - RNA, 19 nt, Artificial Sequence
  Description of Artificial Sequence: Synthetic oligonucleotide
gccuucgcuccaagccgag

SEQ ID NO: 2148753 - RNA, 19 nt, Artificial Sequence
  Description of Artificial Sequence: Synthetic oligonucleotide
cgcugauugcagcaaugaa

SEQ ID NO: 2148754 - RNA, 19 nt, Artificial Sequence
  Description of Artificial Sequence: Synthetic oligonucleotide
cgaugauauucuggccuuc

SEQ ID NO: 2148755 - RNA, 19 nt, Artificial Sequence
  Description of Artificial Sequence: Synthetic oligonucleotide
accuggcauccccguucua

SEQ ID NO: 2148756 - RNA, 19 nt, Artificial Sequence
  Description of Artificial Sequence: Synthetic oligonucleotide
aggcuccgucugugacagu

SEQ ID NO: 2148757 - RNA, 19 nt, Artificial Sequence
  Description of Artificial Sequence: Synthetic oligonucleotide
cccguucuaggagaaccaa

SEQ ID NO: 2148758 - RNA, 19 nt, Artificial Sequence
  Description of Artificial Sequence: Synthetic oligonucleotide
cagccuucccagccucagu

SEQ ID NO: 2148759 - RNA, 19 nt, Artificial Sequence
  Description of Artificial Sequence: Synthetic oligonucleotide
gcgggccauugucagggcu

SEQ ID NO: 2148760 - RNA, 19 nt, Artificial Sequence
  Description of Artificial Sequence: Synthetic oligonucleotide
cccgugguauccacagccu

SEQ ID NO: 2148761 - RNA, 19 nt, Artificial Sequence
  Description of Artificial Sequence: Synthetic oligonucleotide
ccccggacgccgccauuac

SEQ ID NO: 2148762 - RNA, 19 nt, Artificial Sequence
  Description of Artificial Sequence: Synthetic oligonucleotide
cggccucccgggcuccccg

SEQ ID NO: 2148763 - RNA, 19 nt, Artificial Sequence
  Description of Artificial Sequence: Synthetic oligonucleotide
gccucccgggcuccccgga

SEQ ID NO: 2148764 - RNA, 19 nt, Artificial Sequence
  Description of Artificial Sequence: Synthetic oligonucleotide
cagccacuaugacgaugau

SEQ ID NO: 2148765 - RNA, 19 nt, Artificial Sequence
  Description of Artificial Sequence: Synthetic oligonucleotide
ccaagccgagcagcuugga

SEQ ID NO: 2148766 - RNA, 19 nt, Artificial Sequence
  Description of Artificial Sequence: Synthetic oligonucleotide
ccgugguauccacagccuu

SEQ ID NO: 2148767 - RNA, 19 nt, Artificial Sequence
  Description of Artificial Sequence: Synthetic oligonucleotide
gccgagcagcuuggacaca

SEQ ID NO: 2148768 - RNA, 19 nt, Artificial Sequence
  Description of Artificial Sequence: Synthetic oligonucleotide
ccacuaugacgaugauauu

SEQ ID NO: 2148769 - RNA, 19 nt, Artificial Sequence
  Description of Artificial Sequence: Synthetic oligonucleotide
cccggacgccgccauuacu

SEQ ID NO: 2148770 - RNA, 19 nt, Artificial Sequence
  Description of Artificial Sequence: Synthetic oligonucleotide
gcgguggcaggagcuggau

SEQ ID NO: 2148771 - RNA, 19 nt, Artificial Sequence
  Description of Artificial Sequence: Synthetic oligonucleotide
aaucaugucgcccaccugc

SEQ ID NO: 2148772 - RNA, 19 nt, Artificial Sequence
  Description of Artificial Sequence: Synthetic oligonucleotide
uuauugugcaggaagacgg

SEQ ID NO: 2148773 - RNA, 19 nt, Artificial Sequence
  Description of Artificial Sequence: Synthetic oligonucleotide
uaaucggucaccuuuagcc

SEQ ID NO: 2148774 - RNA, 19 nt, Artificial Sequence
  Description of Artificial Sequence: Synthetic oligonucleotide
acuuugcagauauaggugc

SEQ ID NO: 2148775 - RNA, 19 nt, Artificial Sequence
  Description of Artificial Sequence: Synthetic oligonucleotide
ugcuguaggaaaaggaugg

SEQ ID NO: 2148776 - RNA, 19 nt, Artificial Sequence
  Description of Artificial Sequence: Synthetic oligonucleotide
gauauaggugcucagcagg

SEQ ID NO: 2148777 - RNA, 19 nt, Artificial Sequence
  Description of Artificial Sequence: Synthetic oligonucleotide
agcuugucgaaucuugucc

SEQ ID NO: 2148778 - RNA, 19 nt, Artificial Sequence
  Description of Artificial Sequence: Synthetic oligonucleotide
agugcuuuggcuccaacgg

SEQ ID NO: 2148779 - RNA, 19 nt, Artificial Sequence
  Description of Artificial Sequence: Synthetic oligonucleotide
ucaaacucaggcuuggucu

SEQ ID NO: 2148780 - RNA, 19 nt, Artificial Sequence
  Description of Artificial Sequence: Synthetic oligonucleotide
aauguugucggcaaagucu

SEQ ID NO: 2148781 - RNA, 19 nt, Artificial Sequence
  Description of Artificial Sequence: Synthetic oligonucleotide
agaaaugccccauaggacu

SEQ ID NO: 2148782 - RNA, 19 nt, Artificial Sequence
  Description of Artificial Sequence: Synthetic oligonucleotide
aaucccuugaaucucuccu

SEQ ID NO: 2148783 - RNA, 19 nt, Artificial Sequence
  Description of Artificial Sequence: Synthetic oligonucleotide
agacuuugcagauauaggu

SEQ ID NO: 2148784 - RNA, 19 nt, Artificial Sequence
  Description of Artificial Sequence: Synthetic oligonucleotide
uacaccuuagacuugcuca

SEQ ID NO: 2148785 - RNA, 19 nt, Artificial Sequence
  Description of Artificial Sequence: Synthetic oligonucleotide
ucaagcaucaguccgucca

SEQ ID NO: 2148786 - RNA, 19 nt, Artificial Sequence
  Description of Artificial Sequence: Synthetic oligonucleotide
ucauugaaucccuugaauc

SEQ ID NO: 2148787 - RNA, 19 nt, Artificial Sequence
  Description of Artificial Sequence: Synthetic oligonucleotide
ucuucuagugcuuuggcuc

SEQ ID NO: 2148788 - RNA, 19 nt, Artificial Sequence
  Description of Artificial Sequence: Synthetic oligonucleotide
ugguuuucugagcuugucg

SEQ ID NO: 2148789 - RNA, 19 nt, Artificial Sequence
  Description of Artificial Sequence: Synthetic oligonucleotide
gucaccuuuagccagcugc

SEQ ID NO: 2148790 - RNA, 19 nt, Artificial Sequence
  Description of Artificial Sequence: Synthetic oligonucleotide
ugugcucccgguaggagcg

SEQ ID NO: 2148791 - RNA, 19 nt, Artificial Sequence
  Description of Artificial Sequence: Synthetic oligonucleotide
caagacuuugcagauauag

SEQ ID NO: 2148792 - RNA, 19 nt, Artificial Sequence
  Description of Artificial Sequence: Synthetic oligonucleotide
caccugaucaaacucaggc

SEQ ID NO: 2148793 - RNA, 19 nt, Artificial Sequence
  Description of Artificial Sequence: Synthetic oligonucleotide
ugggucauucuuaauguug

SEQ ID NO: 2148794 - RNA, 19 nt, Artificial Sequence
  Description of Artificial Sequence: Synthetic oligonucleotide
guaguuguaguuauugugc

SEQ ID NO: 2148795 - RNA, 19 nt, Artificial Sequence
  Description of Artificial Sequence: Synthetic oligonucleotide
ugcacaguucuucaaggcc

SEQ ID NO: 2148796 - RNA, 19 nt, Artificial Sequence
  Description of Artificial Sequence: Synthetic oligonucleotide
uguuguacucuuugucugg

SEQ ID NO: 2148797 - RNA, 19 nt, Artificial Sequence
  Description of Artificial Sequence: Synthetic oligonucleotide
ucaccuuuagccagcugcg

SEQ ID NO: 2148798 - RNA, 19 nt, Artificial Sequence
  Description of Artificial Sequence: Synthetic oligonucleotide
uaguuauugugcaggaaga

SEQ ID NO: 2148799 - RNA, 19 nt, Artificial Sequence
  Description of Artificial Sequence: Synthetic oligonucleotide
ucugggucauucuuaaugu

SEQ ID NO: 2148800 - RNA, 19 nt, Artificial Sequence
  Description of Artificial Sequence: Synthetic oligonucleotide
ugcagaaaugccccauagg

SEQ ID NO: 2148801 - RNA, 19 nt, Artificial Sequence
  Description of Artificial Sequence: Synthetic oligonucleotide
agaggugucgaaaagccgg

SEQ ID NO: 2148802 - RNA, 19 nt, Artificial Sequence
  Description of Artificial Sequence: Synthetic oligonucleotide
guuauugugcaggaagacg

SEQ ID NO: 2148803 - RNA, 19 nt, Artificial Sequence
  Description of Artificial Sequence: Synthetic oligonucleotide
aagaccgugagcacugugg

SEQ ID NO: 2148804 - RNA, 19 nt, Artificial Sequence
  Description of Artificial Sequence: Synthetic oligonucleotide
uagugcuuuggcuccaacg

SEQ ID NO: 2148805 - RNA, 19 nt, Artificial Sequence
  Description of Artificial Sequence: Synthetic oligonucleotide
caggcuggaacacagguag

SEQ ID NO: 2148806 - RNA, 19 nt, Artificial Sequence
  Description of Artificial Sequence: Synthetic oligonucleotide
ucuccuuaaucaccugccg

SEQ ID NO: 2148807 - RNA, 19 nt, Artificial Sequence
  Description of Artificial Sequence: Synthetic oligonucleotide
uguggagaagucguggcgg

SEQ ID NO: 2148808 - RNA, 19 nt, Artificial Sequence
  Description of Artificial Sequence: Synthetic oligonucleotide
cauaccugugcagaaaugc

SEQ ID NO: 2148809 - RNA, 19 nt, Artificial Sequence
  Description of Artificial Sequence: Synthetic oligonucleotide
uuagacuugcucagcaagu

SEQ ID NO: 2148810 - RNA, 19 nt, Artificial Sequence
  Description of Artificial Sequence: Synthetic oligonucleotide
ucucuccuuaaucaccugc

SEQ ID NO: 2148811 - RNA, 19 nt, Artificial Sequence
  Description of Artificial Sequence: Synthetic oligonucleotide
aaucggucaccuuuagcca

SEQ ID NO: 2148812 - RNA, 19 nt, Artificial Sequence
  Description of Artificial Sequence: Synthetic oligonucleotide
agucuucuagugcuuuggc

SEQ ID NO: 2148813 - RNA, 19 nt, Artificial Sequence
  Description of Artificial Sequence: Synthetic oligonucleotide
ucggcaaagucuucuagug

SEQ ID NO: 2148814 - RNA, 19 nt, Artificial Sequence
  Description of Artificial Sequence: Synthetic oligonucleotide
auugaaucccuugaaucuc

SEQ ID NO: 2148815 - RNA, 19 nt, Artificial Sequence
  Description of Artificial Sequence: Synthetic oligonucleotide
agauauaggugcucagcag

SEQ ID NO: 2148816 - RNA, 19 nt, Artificial Sequence
  Description of Artificial Sequence: Synthetic oligonucleotide
augugcucccgguaggagc

SEQ ID NO: 2148817 - RNA, 19 nt, Artificial Sequence
  Description of Artificial Sequence: Synthetic oligonucleotide
ugcagguugcccaagacuu

SEQ ID NO: 2148818 - RNA, 19 nt, Artificial Sequence
  Description of Artificial Sequence: Synthetic oligonucleotide
cuuaauguugucggcaaag

SEQ ID NO: 2148819 - RNA, 19 nt, Artificial Sequence
  Description of Artificial Sequence: Synthetic oligonucleotide
uguacucuuugucuggguc

SEQ ID NO: 2148820 - RNA, 19 nt, Artificial Sequence
  Description of Artificial Sequence: Synthetic oligonucleotide
ucauacaccuuagacuugc

SEQ ID NO: 2148821 - RNA, 19 nt, Artificial Sequence
  Description of Artificial Sequence: Synthetic oligonucleotide
cuugaaucucuccuuaauc

SEQ ID NO: 2148822 - RNA, 19 nt, Artificial Sequence
  Description of Artificial Sequence: Synthetic oligonucleotide
agacucuucucugagaugu

SEQ ID NO: 2148823 - RNA, 19 nt, Artificial Sequence
  Description of Artificial Sequence: Synthetic oligonucleotide
aguuauugugcaggaagac

SEQ ID NO: 2148824 - RNA, 19 nt, Artificial Sequence
  Description of Artificial Sequence: Synthetic oligonucleotide
auauaggugcucagcaggc

SEQ ID NO: 2148825 - RNA, 19 nt, Artificial Sequence
  Description of Artificial Sequence: Synthetic oligonucleotide
aagucguggcggaugaugg

SEQ ID NO: 2148826 - RNA, 19 nt, Artificial Sequence
  Description of Artificial Sequence: Synthetic oligonucleotide
auaccugugcagaaaugcc

SEQ ID NO: 2148827 - RNA, 19 nt, Artificial Sequence
  Description of Artificial Sequence: Synthetic oligonucleotide
cucuccuuaaucaccugcc

SEQ ID NO: 2148828 - RNA, 19 nt, Artificial Sequence
  Description of Artificial Sequence: Synthetic oligonucleotide
auacaccuuagacuugcuc

SEQ ID NO: 2148829 - RNA, 19 nt, Artificial Sequence
  Description of Artificial Sequence: Synthetic oligonucleotide
ucgaaaagccggucaauca

SEQ ID NO: 2148830 - RNA, 19 nt, Artificial Sequence
  Description of Artificial Sequence: Synthetic oligonucleotide
ggugacagccaccagcugg

SEQ ID NO: 2148831 - RNA, 19 nt, Artificial Sequence
  Description of Artificial Sequence: Synthetic oligonucleotide
cuucuagugcuuuggcucc

SEQ ID NO: 2148832 - RNA, 19 nt, Artificial Sequence
  Description of Artificial Sequence: Synthetic oligonucleotide
uguaaucggucaccuuuag

SEQ ID NO: 2148833 - RNA, 19 nt, Artificial Sequence
  Description of Artificial Sequence: Synthetic oligonucleotide
uccacacgguacuugaugu

SEQ ID NO: 2148834 - RNA, 19 nt, Artificial Sequence
  Description of Artificial Sequence: Synthetic oligonucleotide
ugaucaaacucaggcuugg

SEQ ID NO: 2148835 - RNA, 19 nt, Artificial Sequence
  Description of Artificial Sequence: Synthetic oligonucleotide
cauucuuaauguugucggc

SEQ ID NO: 2148836 - RNA, 19 nt, Artificial Sequence
  Description of Artificial Sequence: Synthetic oligonucleotide
gaagacggcacucagggcu

SEQ ID NO: 2148837 - RNA, 19 nt, Artificial Sequence
  Description of Artificial Sequence: Synthetic oligonucleotide
acagguagacucuucucug

SEQ ID NO: 2148838 - RNA, 19 nt, Artificial Sequence
  Description of Artificial Sequence: Synthetic oligonucleotide
ugggaggccagcauggcac

SEQ ID NO: 2148839 - RNA, 19 nt, Artificial Sequence
  Description of Artificial Sequence: Synthetic oligonucleotide
gaucuggaucugcugcucg

SEQ ID NO: 2148840 - RNA, 19 nt, Artificial Sequence
  Description of Artificial Sequence: Synthetic oligonucleotide
gagcucgugaacugugccg

SEQ ID NO: 2148841 - RNA, 19 nt, Artificial Sequence
  Description of Artificial Sequence: Synthetic oligonucleotide
ugucggcaaagucuucuag

SEQ ID NO: 2148842 - RNA, 19 nt, Artificial Sequence
  Description of Artificial Sequence: Synthetic oligonucleotide
cuugacgccaggcuggaac

SEQ ID NO: 2148843 - RNA, 19 nt, Artificial Sequence
  Description of Artificial Sequence: Synthetic oligonucleotide
uugaaucccuugaaucucu

SEQ ID NO: 2148844 - RNA, 19 nt, Artificial Sequence
  Description of Artificial Sequence: Synthetic oligonucleotide
ugagcucgugaacugugcc

SEQ ID NO: 2148845 - RNA, 19 nt, Artificial Sequence
  Description of Artificial Sequence: Synthetic oligonucleotide
agacuugcucagcaaguuc

SEQ ID NO: 2148846 - RNA, 19 nt, Artificial Sequence
  Description of Artificial Sequence: Synthetic oligonucleotide
uccaacggucuccauggag

SEQ ID NO: 2148847 - RNA, 19 nt, Artificial Sequence
  Description of Artificial Sequence: Synthetic oligonucleotide
aucauugaaucccuugaau

SEQ ID NO: 2148848 - RNA, 19 nt, Artificial Sequence
  Description of Artificial Sequence: Synthetic oligonucleotide
aaacucaggcuuggucugc

SEQ ID NO: 2148849 - RNA, 19 nt, Artificial Sequence
  Description of Artificial Sequence: Synthetic oligonucleotide
gauggcguugcuugugagc

SEQ ID NO: 2148850 - RNA, 19 nt, Artificial Sequence
  Description of Artificial Sequence: Synthetic oligonucleotide
cauggaggugaugaggccg

SEQ ID NO: 2148851 - RNA, 19 nt, Artificial Sequence
  Description of Artificial Sequence: Synthetic oligonucleotide
gcagaaaugccccauagga

SEQ ID NO: 2148852 - RNA, 19 nt, Artificial Sequence
  Description of Artificial Sequence: Synthetic oligonucleotide
cagaaaugccccauaggac

SEQ ID NO: 2148853 - RNA, 19 nt, Artificial Sequence
  Description of Artificial Sequence: Synthetic oligonucleotide
uggaacacagguagacucu

SEQ ID NO: 2148854 - RNA, 19 nt, Artificial Sequence
  Description of Artificial Sequence: Synthetic oligonucleotide
aucggucaccuuuagccag

SEQ ID NO: 2148855 - RNA, 19 nt, Artificial Sequence
  Description of Artificial Sequence: Synthetic oligonucleotide
uuguaguuauugugcagga

SEQ ID NO: 2148856 - RNA, 19 nt, Artificial Sequence
  Description of Artificial Sequence: Synthetic oligonucleotide
auugccauaccugugcaga

SEQ ID NO: 2148857 - RNA, 19 nt, Artificial Sequence
  Description of Artificial Sequence: Synthetic oligonucleotide
cuguaggaaaaggauggcg

SEQ ID NO: 2148858 - RNA, 19 nt, Artificial Sequence
  Description of Artificial Sequence: Synthetic oligonucleotide
cugggugacagccaccagc

SEQ ID NO: 2148859 - RNA, 19 nt, Artificial Sequence
  Description of Artificial Sequence: Synthetic oligonucleotide
ugccccauaggacuccuug

SEQ ID NO: 2148860 - RNA, 19 nt, Artificial Sequence
  Description of Artificial Sequence: Synthetic oligonucleotide
ugagcuugucgaaucuugu

SEQ ID NO: 2148861 - RNA, 19 nt, Artificial Sequence
  Description of Artificial Sequence: Synthetic oligonucleotide
uuaaucaccugccgcuccu

SEQ ID NO: 2148862 - RNA, 19 nt, Artificial Sequence
  Description of Artificial Sequence: Synthetic oligonucleotide
aaaggauggcguugcuugu

SEQ ID NO: 2148863 - RNA, 19 nt, Artificial Sequence
  Description of Artificial Sequence: Synthetic oligonucleotide
gcuccaacggucuccaugg

SEQ ID NO: 2148864 - RNA, 19 nt, Artificial Sequence
  Description of Artificial Sequence: Synthetic oligonucleotide
uugcuugugagcucgugaa

SEQ ID NO: 2148865 - RNA, 19 nt, Artificial Sequence
  Description of Artificial Sequence: Synthetic oligonucleotide
ucugaaucuugcacaguuc

SEQ ID NO: 2148866 - RNA, 19 nt, Artificial Sequence
  Description of Artificial Sequence: Synthetic oligonucleotide
gaaaagccggucaaucaug

SEQ ID NO: 2148867 - RNA, 19 nt, Artificial Sequence
  Description of Artificial Sequence: Synthetic oligonucleotide
guucuuggugcucggcucg

SEQ ID NO: 2148868 - RNA, 19 nt, Artificial Sequence
  Description of Artificial Sequence: Synthetic oligonucleotide
uguagcugguggccgaaga

SEQ ID NO: 2148869 - RNA, 19 nt, Artificial Sequence
  Description of Artificial Sequence: Synthetic oligonucleotide
agccggucaaucaugucgc

SEQ ID NO: 2148870 - RNA, 19 nt, Artificial Sequence
  Description of Artificial Sequence: Synthetic oligonucleotide
accugaucaaacucaggcu

SEQ ID NO: 2148871 - RNA, 19 nt, Artificial Sequence
  Description of Artificial Sequence: Synthetic oligonucleotide
guugcccaagacuuugcag

SEQ ID NO: 2148872 - RNA, 19 nt, Artificial Sequence
  Description of Artificial Sequence: Synthetic oligonucleotide
cugagcuugucgaaucuug

SEQ ID NO: 2148873 - RNA, 19 nt, Artificial Sequence
  Description of Artificial Sequence: Synthetic oligonucleotide
aaaagccggucaaucaugu

SEQ ID NO: 2148874 - RNA, 19 nt, Artificial Sequence
  Description of Artificial Sequence: Synthetic oligonucleotide
aggauguaguuguaguuau

SEQ ID NO: 2148875 - RNA, 19 nt, Artificial Sequence
  Description of Artificial Sequence: Synthetic oligonucleotide
cuccuuaaucaccugccgc

SEQ ID NO: 2148876 - RNA, 19 nt, Artificial Sequence
  Description of Artificial Sequence: Synthetic oligonucleotide
cucgaugugcucccgguag

SEQ ID NO: 2148877 - RNA, 19 nt, Artificial Sequence
  Description of Artificial Sequence: Synthetic oligonucleotide
aggguucuuggugaagggc

SEQ ID NO: 2148878 - RNA, 19 nt, Artificial Sequence
  Description of Artificial Sequence: Synthetic oligonucleotide
uuaggcauguuguacucuu

SEQ ID NO: 2148879 - RNA, 19 nt, Artificial Sequence
  Description of Artificial Sequence: Synthetic oligonucleotide
gaaucccuugaaucucucc

SEQ ID NO: 2148880 - RNA, 19 nt, Artificial Sequence
  Description of Artificial Sequence: Synthetic oligonucleotide
cugaucaaacucaggcuug

SEQ ID NO: 2148881 - RNA, 19 nt, Artificial Sequence
  Description of Artificial Sequence: Synthetic oligonucleotide
ugcagauauaggugcucag

SEQ ID NO: 2148882 - RNA, 19 nt, Artificial Sequence
  Description of Artificial Sequence: Synthetic oligonucleotide
ugcuuuggcuccaacgguc

SEQ ID NO: 2148883 - RNA, 19 nt, Artificial Sequence
  Description of Artificial Sequence: Synthetic oligonucleotide
aauggcccaggccuucuga

SEQ ID NO: 2148884 - RNA, 19 nt, Artificial Sequence
  Description of Artificial Sequence: Synthetic oligonucleotide
cuuaaucaccugccgcucc

SEQ ID NO: 2148885 - RNA, 19 nt, Artificial Sequence
  Description of Artificial Sequence: Synthetic oligonucleotide
gaagucguggcggaugaug

SEQ ID NO: 2148886 - RNA, 19 nt, Artificial Sequence
  Description of Artificial Sequence: Synthetic oligonucleotide
caaacucaggcuuggucug

SEQ ID NO: 2148887 - RNA, 19 nt, Artificial Sequence
  Description of Artificial Sequence: Synthetic oligonucleotide
uuuggcuccaacggucucc

SEQ ID NO: 2148888 - RNA, 19 nt, Artificial Sequence
  Description of Artificial Sequence: Synthetic oligonucleotide
auaggugcucagcaggcgu

SEQ ID NO: 2148889 - RNA, 19 nt, Artificial Sequence
  Description of Artificial Sequence: Synthetic oligonucleotide
aaucaccugccgcuccuug

SEQ ID NO: 2148890 - RNA, 19 nt, Artificial Sequence
  Description of Artificial Sequence: Synthetic oligonucleotide
cagauauaggugcucagca

SEQ ID NO: 2148891 - RNA, 19 nt, Artificial Sequence
  Description of Artificial Sequence: Synthetic oligonucleotide
cuugugagcucgugaacug

SEQ ID NO: 2148892 - RNA, 19 nt, Artificial Sequence
  Description of Artificial Sequence: Synthetic oligonucleotide
cagaggugucgaaaagccg

SEQ ID NO: 2148893 - RNA, 19 nt, Artificial Sequence
  Description of Artificial Sequence: Synthetic oligonucleotide
uucugagcuugucgaaucu

SEQ ID NO: 2148894 - RNA, 19 nt, Artificial Sequence
  Description of Artificial Sequence: Synthetic oligonucleotide
gaggugaugaggccgggca

SEQ ID NO: 2148895 - RNA, 19 nt, Artificial Sequence
  Description of Artificial Sequence: Synthetic oligonucleotide
auggcguugcuugugagcu

SEQ ID NO: 2148896 - RNA, 19 nt, Artificial Sequence
  Description of Artificial Sequence: Synthetic oligonucleotide
uugacgccaggcuggaaca

SEQ ID NO: 2148897 - RNA, 19 nt, Artificial Sequence
  Description of Artificial Sequence: Synthetic oligonucleotide
ucuuaauguugucggcaaa

SEQ ID NO: 2148898 - RNA, 19 nt, Artificial Sequence
  Description of Artificial Sequence: Synthetic oligonucleotide
cauguuguacucuuugucu

SEQ ID NO: 2148899 - RNA, 19 nt, Artificial Sequence
  Description of Artificial Sequence: Synthetic oligonucleotide
gagcuugacgccaggcugg

SEQ ID NO: 2148900 - RNA, 19 nt, Artificial Sequence
  Description of Artificial Sequence: Synthetic oligonucleotide
agcacuguggagaagucgu

SEQ ID NO: 2148901 - RNA, 19 nt, Artificial Sequence
  Description of Artificial Sequence: Synthetic oligonucleotide
guaaucggucaccuuuagc

SEQ ID NO: 2148902 - RNA, 19 nt, Artificial Sequence
  Description of Artificial Sequence: Synthetic oligonucleotide
gagcacuguggagaagucg

SEQ ID NO: 2148903 - RNA, 19 nt, Artificial Sequence
  Description of Artificial Sequence: Synthetic oligonucleotide
guacuugauguacuucuca

SEQ ID NO: 2148904 - RNA, 19 nt, Artificial Sequence
  Description of Artificial Sequence: Synthetic oligonucleotide
accuuuagccagcugcgcu

SEQ ID NO: 2148905 - RNA, 19 nt, Artificial Sequence
  Description of Artificial Sequence: Synthetic oligonucleotide
guacucuuugucuggguca

SEQ ID NO: 2148906 - RNA, 19 nt, Artificial Sequence
  Description of Artificial Sequence: Synthetic oligonucleotide
gcuugucgaaucuuguccc

SEQ ID NO: 2148907 - RNA, 19 nt, Artificial Sequence
  Description of Artificial Sequence: Synthetic oligonucleotide
cuugucccggagcuugacg

SEQ ID NO: 2148908 - RNA, 19 nt, Artificial Sequence
  Description of Artificial Sequence: Synthetic oligonucleotide
guugcuugugagcucguga

SEQ ID NO: 2148909 - RNA, 19 nt, Artificial Sequence
  Description of Artificial Sequence: Synthetic oligonucleotide
cucugagauguaaucgguc

SEQ ID NO: 2148910 - RNA, 19 nt, Artificial Sequence
  Description of Artificial Sequence: Synthetic oligonucleotide
gaacugugccguccuuagg

SEQ ID NO: 2148911 - RNA, 19 nt, Artificial Sequence
  Description of Artificial Sequence: Synthetic oligonucleotide
cacacgguacuugauguac

SEQ ID NO: 2148912 - RNA, 19 nt, Artificial Sequence
  Description of Artificial Sequence: Synthetic oligonucleotide
ggagcuugacgccaggcug

SEQ ID NO: 2148913 - RNA, 19 nt, Artificial Sequence
  Description of Artificial Sequence: Synthetic oligonucleotide
aaggauggcguugcuugug

SEQ ID NO: 2148914 - RNA, 19 nt, Artificial Sequence
  Description of Artificial Sequence: Synthetic oligonucleotide
ugaggugccgcaggauggg

SEQ ID NO: 2148915 - RNA, 19 nt, Artificial Sequence
  Description of Artificial Sequence: Synthetic oligonucleotide
cagggcuggguccucauac

SEQ ID NO: 2148916 - RNA, 19 nt, Artificial Sequence
  Description of Artificial Sequence: Synthetic oligonucleotide
gagcuugucgaaucuuguc

SEQ ID NO: 2148917 - RNA, 19 nt, Artificial Sequence
  Description of Artificial Sequence: Synthetic oligonucleotide
cucgcugugcccuggagca

SEQ ID NO: 2148918 - RNA, 19 nt, Artificial Sequence
  Description of Artificial Sequence: Synthetic oligonucleotide
guagacucuucucugagau

SEQ ID NO: 2148919 - RNA, 19 nt, Artificial Sequence
  Description of Artificial Sequence: Synthetic oligonucleotide
cuuuagccagcugcgcugg

SEQ ID NO: 2148920 - RNA, 19 nt, Artificial Sequence
  Description of Artificial Sequence: Synthetic oligonucleotide
aggccgggcagcuuguucu

SEQ ID NO: 2148921 - RNA, 19 nt, Artificial Sequence
  Description of Artificial Sequence: Synthetic oligonucleotide
uggccgaagagcugguuuc

SEQ ID NO: 2148922 - RNA, 19 nt, Artificial Sequence
  Description of Artificial Sequence: Synthetic oligonucleotide
gcguuugcugaacucagag

SEQ ID NO: 2148923 - RNA, 19 nt, Artificial Sequence
  Description of Artificial Sequence: Synthetic oligonucleotide
ugcuugugagcucgugaac

SEQ ID NO: 2148924 - RNA, 19 nt, Artificial Sequence
  Description of Artificial Sequence: Synthetic oligonucleotide
agcaccugaucaaacucag

SEQ ID NO: 2148925 - RNA, 19 nt, Artificial Sequence
  Description of Artificial Sequence: Synthetic oligonucleotide
uguccggaauggcccaggc

SEQ ID NO: 2148926 - RNA, 19 nt, Artificial Sequence
  Description of Artificial Sequence: Synthetic oligonucleotide
ucgugaacugugccguccu

SEQ ID NO: 2148927 - RNA, 19 nt, Artificial Sequence
  Description of Artificial Sequence: Synthetic oligonucleotide
uuggucugcuugaggugcc

SEQ ID NO: 2148928 - RNA, 19 nt, Artificial Sequence
  Description of Artificial Sequence: Synthetic oligonucleotide
gaagaccgugagcacugug

SEQ ID NO: 2148929 - RNA, 19 nt, Artificial Sequence
  Description of Artificial Sequence: Synthetic oligonucleotide
gcagaggugucgaaaagcc

SEQ ID NO: 2148930 - RNA, 19 nt, Artificial Sequence
  Description of Artificial Sequence: Synthetic oligonucleotide
ggcaaagucuucuagugcu

SEQ ID NO: 2148931 - RNA, 19 nt, Artificial Sequence
  Description of Artificial Sequence: Synthetic oligonucleotide
auaggacuccuugaccaug

SEQ ID NO: 2148932 - RNA, 19 nt, Artificial Sequence
  Description of Artificial Sequence: Synthetic oligonucleotide
ucagcaggcguuugcugaa

SEQ ID NO: 2148933 - RNA, 19 nt, Artificial Sequence
  Description of Artificial Sequence: Synthetic oligonucleotide
agcucgugaacugugccgu

SEQ ID NO: 2148934 - RNA, 19 nt, Artificial Sequence
  Description of Artificial Sequence: Synthetic oligonucleotide
ucaggcagaggugucgaaa

SEQ ID NO: 2148935 - RNA, 19 nt, Artificial Sequence
  Description of Artificial Sequence: Synthetic oligonucleotide
ugcucgaugugcucccggu

SEQ ID NO: 2148936 - RNA, 19 nt, Artificial Sequence
  Description of Artificial Sequence: Synthetic oligonucleotide
gucgaaaagccggucaauc

SEQ ID NO: 2148937 - RNA, 19 nt, Artificial Sequence
  Description of Artificial Sequence: Synthetic oligonucleotide
gaccgugagcacuguggag

SEQ ID NO: 2148938 - RNA, 19 nt, Artificial Sequence
  Description of Artificial Sequence: Synthetic oligonucleotide
auugugcaggaagacggca

SEQ ID NO: 2148939 - RNA, 19 nt, Artificial Sequence
  Description of Artificial Sequence: Synthetic oligonucleotide
aggauggcguugcuuguga

SEQ ID NO: 2148940 - RNA, 19 nt, Artificial Sequence
  Description of Artificial Sequence: Synthetic oligonucleotide
acgguacuugauguacuuc

SEQ ID NO: 2148941 - RNA, 19 nt, Artificial Sequence
  Description of Artificial Sequence: Synthetic oligonucleotide
ugagcacuguggagaaguc

SEQ ID NO: 2148942 - RNA, 19 nt, Artificial Sequence
  Description of Artificial Sequence: Synthetic oligonucleotide
aagacggcacucagggcug

SEQ ID NO: 2148943 - RNA, 19 nt, Artificial Sequence
  Description of Artificial Sequence: Synthetic oligonucleotide
gaugugcucccgguaggag

SEQ ID NO: 2148944 - RNA, 19 nt, Artificial Sequence
  Description of Artificial Sequence: Synthetic oligonucleotide
cagacacaauguucucccc

SEQ ID NO: 2148945 - RNA, 19 nt, Artificial Sequence
  Description of Artificial Sequence: Synthetic oligonucleotide
gccaucauugaaucccuug

SEQ ID NO: 2148946 - RNA, 19 nt, Artificial Sequence
  Description of Artificial Sequence: Synthetic oligonucleotide
ggcguugcuugugagcucg

SEQ ID NO: 2148947 - RNA, 19 nt, Artificial Sequence
  Description of Artificial Sequence: Synthetic oligonucleotide
ccauaggacuccuugacca

SEQ ID NO: 2148948 - RNA, 19 nt, Artificial Sequence
  Description of Artificial Sequence: Synthetic oligonucleotide
ggagcaccugaucaaacuc

SEQ ID NO: 2148949 - RNA, 19 nt, Artificial Sequence
  Description of Artificial Sequence: Synthetic oligonucleotide
caucauugaaucccuugaa

SEQ ID NO: 2148950 - RNA, 19 nt, Artificial Sequence
  Description of Artificial Sequence: Synthetic oligonucleotide
gcucagcaaguucagcugc

SEQ ID NO: 2148951 - RNA, 19 nt, Artificial Sequence
  Description of Artificial Sequence: Synthetic oligonucleotide
cucgugaacugugccgucc

SEQ ID NO: 2148952 - RNA, 19 nt, Artificial Sequence
  Description of Artificial Sequence: Synthetic oligonucleotide
uugccauaccugugcagaa

SEQ ID NO: 2148953 - RNA, 19 nt, Artificial Sequence
  Description of Artificial Sequence: Synthetic oligonucleotide
ggugucgaaaagccgguca

SEQ ID NO: 2148954 - RNA, 19 nt, Artificial Sequence
  Description of Artificial Sequence: Synthetic oligonucleotide
uucuuggugaagggcacau

SEQ ID NO: 2148955 - RNA, 19 nt, Artificial Sequence
  Description of Artificial Sequence: Synthetic oligonucleotide
cuuguucuuggugcucggc

SEQ ID NO: 2148956 - RNA, 19 nt, Artificial Sequence
  Description of Artificial Sequence: Synthetic oligonucleotide
cacagguagacucuucucu

SEQ ID NO: 2148957 - RNA, 19 nt, Artificial Sequence
  Description of Artificial Sequence: Synthetic oligonucleotide
aucccuugaaucucuccuu

SEQ ID NO: 2148958 - RNA, 19 nt, Artificial Sequence
  Description of Artificial Sequence: Synthetic oligonucleotide
guccuuaggcauguuguac

SEQ ID NO: 2148959 - RNA, 19 nt, Artificial Sequence
  Description of Artificial Sequence: Synthetic oligonucleotide
gguaggagcgcucagcagu

SEQ ID NO: 2148960 - RNA, 19 nt, Artificial Sequence
  Description of Artificial Sequence: Synthetic oligonucleotide
aaugccccauaggacuccu

SEQ ID NO: 2148961 - RNA, 19 nt, Artificial Sequence
  Description of Artificial Sequence: Synthetic oligonucleotide
aacucaggcuuggucugcu

SEQ ID NO: 2148962 - RNA, 19 nt, Artificial Sequence
  Description of Artificial Sequence: Synthetic oligonucleotide
ggcuccaacggucuccaug

SEQ ID NO: 2148963 - RNA, 19 nt, Artificial Sequence
  Description of Artificial Sequence: Synthetic oligonucleotide
uugucccucugcucugugu

SEQ ID NO: 2148964 - RNA, 19 nt, Artificial Sequence
  Description of Artificial Sequence: Synthetic oligonucleotide
agguugcccaagacuuugc

SEQ ID NO: 2148965 - RNA, 19 nt, Artificial Sequence
  Description of Artificial Sequence: Synthetic oligonucleotide
uggcagcagacacaauguu

SEQ ID NO: 2148966 - RNA, 19 nt, Artificial Sequence
  Description of Artificial Sequence: Synthetic oligonucleotide
cucaagcaucaguccgucc

SEQ ID NO: 2148967 - RNA, 19 nt, Artificial Sequence
  Description of Artificial Sequence: Synthetic oligonucleotide
gugucgaaaagccggucaa

SEQ ID NO: 2148968 - RNA, 19 nt, Artificial Sequence
  Description of Artificial Sequence: Synthetic oligonucleotide
cuuggugcucggcucgcug

SEQ ID NO: 2148969 - RNA, 19 nt, Artificial Sequence
  Description of Artificial Sequence: Synthetic oligonucleotide
uugucggcaaagucuucua

SEQ ID NO: 2148970 - RNA, 19 nt, Artificial Sequence
  Description of Artificial Sequence: Synthetic oligonucleotide
acccgcugucuccuggaag

SEQ ID NO: 2148971 - RNA, 19 nt, Artificial Sequence
  Description of Artificial Sequence: Synthetic oligonucleotide
agcaggcguuugcugaacu

SEQ ID NO: 2148972 - RNA, 19 nt, Artificial Sequence
  Description of Artificial Sequence: Synthetic oligonucleotide
ucucaggguucuuggugaa

SEQ ID NO: 2148973 - RNA, 19 nt, Artificial Sequence
  Description of Artificial Sequence: Synthetic oligonucleotide
ggcagggucaggcagaggu

SEQ ID NO: 2148974 - RNA, 19 nt, Artificial Sequence
  Description of Artificial Sequence: Synthetic oligonucleotide
ccccucaagcaucaguccg

SEQ ID NO: 2148975 - RNA, 19 nt, Artificial Sequence
  Description of Artificial Sequence: Synthetic oligonucleotide
ggcacauugccauaccugu

SEQ ID NO: 2148976 - RNA, 19 nt, Artificial Sequence
  Description of Artificial Sequence: Synthetic oligonucleotide
ggaugauggcuuuccuggc

SEQ ID NO: 2148977 - RNA, 19 nt, Artificial Sequence
  Description of Artificial Sequence: Synthetic oligonucleotide
gucggcaaagucuucuagu

SEQ ID NO: 2148978 - RNA, 19 nt, Artificial Sequence
  Description of Artificial Sequence: Synthetic oligonucleotide
aggcguuugcugaacucag

SEQ ID NO: 2148979 - RNA, 19 nt, Artificial Sequence
  Description of Artificial Sequence: Synthetic oligonucleotide
acucuucucugagauguaa

SEQ ID NO: 2148980 - RNA, 19 nt, Artificial Sequence
  Description of Artificial Sequence: Synthetic oligonucleotide
gagauguaaucggucaccu

SEQ ID NO: 2148981 - RNA, 19 nt, Artificial Sequence
  Description of Artificial Sequence: Synthetic oligonucleotide
ugucgaaaagccggucaau

SEQ ID NO: 2148982 - RNA, 19 nt, Artificial Sequence
  Description of Artificial Sequence: Synthetic oligonucleotide
agauguaaucggucaccuu

SEQ ID NO: 2148983 - RNA, 19 nt, Artificial Sequence
  Description of Artificial Sequence: Synthetic oligonucleotide
uguugucggcaaagucuuc

SEQ ID NO: 2148984 - RNA, 19 nt, Artificial Sequence
  Description of Artificial Sequence: Synthetic oligonucleotide
ccaucauugaaucccuuga

SEQ ID NO: 2148985 - RNA, 19 nt, Artificial Sequence
  Description of Artificial Sequence: Synthetic oligonucleotide
ucugagcuugucgaaucuu

SEQ ID NO: 2148986 - RNA, 19 nt, Artificial Sequence
  Description of Artificial Sequence: Synthetic oligonucleotide
uaggcauguuguacucuuu

SEQ ID NO: 2148987 - RNA, 19 nt, Artificial Sequence
  Description of Artificial Sequence: Synthetic oligonucleotide
uguguccggaauggcccag

SEQ ID NO: 2148988 - RNA, 19 nt, Artificial Sequence
  Description of Artificial Sequence: Synthetic oligonucleotide
caggcguuugcugaacuca

SEQ ID NO: 2148989 - RNA, 19 nt, Artificial Sequence
  Description of Artificial Sequence: Synthetic oligonucleotide
gugagcucgugaacugugc

SEQ ID NO: 2148990 - RNA, 19 nt, Artificial Sequence
  Description of Artificial Sequence: Synthetic oligonucleotide
ggguucuuggugaagggca

SEQ ID NO: 2148991 - RNA, 19 nt, Artificial Sequence
  Description of Artificial Sequence: Synthetic oligonucleotide
caaucaugucgcccaccug

SEQ ID NO: 2148992 - RNA, 19 nt, Artificial Sequence
  Description of Artificial Sequence: Synthetic oligonucleotide
gcggaugauggcuuuccug

SEQ ID NO: 2148993 - RNA, 19 nt, Artificial Sequence
  Description of Artificial Sequence: Synthetic oligonucleotide
ugccauaccugugcagaaa

SEQ ID NO: 2148994 - RNA, 19 nt, Artificial Sequence
  Description of Artificial Sequence: Synthetic oligonucleotide
cuuugcagauauaggugcu

SEQ ID NO: 2148995 - RNA, 19 nt, Artificial Sequence
  Description of Artificial Sequence: Synthetic oligonucleotide
gugacagccaccagcugga

SEQ ID NO: 2148996 - RNA, 19 nt, Artificial Sequence
  Description of Artificial Sequence: Synthetic oligonucleotide
gcugcgcugguagaucugg

SEQ ID NO: 2148997 - RNA, 19 nt, Artificial Sequence
  Description of Artificial Sequence: Synthetic oligonucleotide
uuuagccagcugcgcuggu

SEQ ID NO: 2148998 - RNA, 19 nt, Artificial Sequence
  Description of Artificial Sequence: Synthetic oligonucleotide
uucuagugcuuuggcucca

SEQ ID NO: 2148999 - RNA, 19 nt, Artificial Sequence
  Description of Artificial Sequence: Synthetic oligonucleotide
guugucggcaaagucuucu

SEQ ID NO: 2149000 - RNA, 19 nt, Artificial Sequence
  Description of Artificial Sequence: Synthetic oligonucleotide
cccauaggacuccuugacc

SEQ ID NO: 2149001 - RNA, 19 nt, Artificial Sequence
  Description of Artificial Sequence: Synthetic oligonucleotide
cuagugcuuuggcuccaac

SEQ ID NO: 2149002 - RNA, 19 nt, Artificial Sequence
  Description of Artificial Sequence: Synthetic oligonucleotide
acacgguacuugauguacu

SEQ ID NO: 2149003 - RNA, 19 nt, Artificial Sequence
  Description of Artificial Sequence: Synthetic oligonucleotide
caccuuagacuugcucagc

SEQ ID NO: 2149004 - RNA, 19 nt, Artificial Sequence
  Description of Artificial Sequence: Synthetic oligonucleotide
auguaaucggucaccuuua

SEQ ID NO: 2149005 - RNA, 19 nt, Artificial Sequence
  Description of Artificial Sequence: Synthetic oligonucleotide
guaggagcgcucagcaguc

SEQ ID NO: 2149006 - RNA, 19 nt, Artificial Sequence
  Description of Artificial Sequence: Synthetic oligonucleotide
accaugguuuucugagcuu

SEQ ID NO: 2149007 - RNA, 19 nt, Artificial Sequence
  Description of Artificial Sequence: Synthetic oligonucleotide
gggaagaccgugagcacug

SEQ ID NO: 2149008 - RNA, 19 nt, Artificial Sequence
  Description of Artificial Sequence: Synthetic oligonucleotide
gcuggguccucauacaccu

SEQ ID NO: 2149009 - RNA, 19 nt, Artificial Sequence
  Description of Artificial Sequence: Synthetic oligonucleotide
cguuugcugaacucagagc

SEQ ID NO: 2149010 - RNA, 19 nt, Artificial Sequence
  Description of Artificial Sequence: Synthetic oligonucleotide
acuggcagggucaggcaga

SEQ ID NO: 2149011 - RNA, 19 nt, Artificial Sequence
  Description of Artificial Sequence: Synthetic oligonucleotide
ucguggcggaugauggcuu

SEQ ID NO: 2149012 - RNA, 19 nt, Artificial Sequence
  Description of Artificial Sequence: Synthetic oligonucleotide
acgccaggcuggaacacag

SEQ ID NO: 2149013 - RNA, 19 nt, Artificial Sequence
  Description of Artificial Sequence: Synthetic oligonucleotide
gggcacauugccauaccug

SEQ ID NO: 2149014 - RNA, 19 nt, Artificial Sequence
  Description of Artificial Sequence: Synthetic oligonucleotide
cgcucagcagucuucuggg

SEQ ID NO: 2149015 - RNA, 19 nt, Artificial Sequence
  Description of Artificial Sequence: Synthetic oligonucleotide
caccuuuagccagcugcgc

SEQ ID NO: 2149016 - RNA, 19 nt, Artificial Sequence
  Description of Artificial Sequence: Synthetic oligonucleotide
gugcucggcucgcugugcc

SEQ ID NO: 2149017 - RNA, 19 nt, Artificial Sequence
  Description of Artificial Sequence: Synthetic oligonucleotide
ucccgguaggagcgcucag

SEQ ID NO: 2149018 - RNA, 19 nt, Artificial Sequence
  Description of Artificial Sequence: Synthetic oligonucleotide
agcugguuucuugggcuug

SEQ ID NO: 2149019 - RNA, 19 nt, Artificial Sequence
  Description of Artificial Sequence: Synthetic oligonucleotide
ggcccaggccuucugaauc

SEQ ID NO: 2149020 - RNA, 19 nt, Artificial Sequence
  Description of Artificial Sequence: Synthetic oligonucleotide
cuuuggcuccaacggucuc

SEQ ID NO: 2149021 - RNA, 19 nt, Artificial Sequence
  Description of Artificial Sequence: Synthetic oligonucleotide
ccuuaggcauguuguacuc

SEQ ID NO: 2149022 - RNA, 19 nt, Artificial Sequence
  Description of Artificial Sequence: Synthetic oligonucleotide
gaggccgggcagcuuguuc

SEQ ID NO: 2149023 - RNA, 19 nt, Artificial Sequence
  Description of Artificial Sequence: Synthetic oligonucleotide
ucuagugcuuuggcuccaa

SEQ ID NO: 2149024 - RNA, 19 nt, Artificial Sequence
  Description of Artificial Sequence: Synthetic oligonucleotide
cuugucccucugcucugug

SEQ ID NO: 2149025 - RNA, 19 nt, Artificial Sequence
  Description of Artificial Sequence: Synthetic oligonucleotide
gccguccuuaggcauguug

SEQ ID NO: 2149026 - RNA, 19 nt, Artificial Sequence
  Description of Artificial Sequence: Synthetic oligonucleotide
ccgaagagcugguuucuug

SEQ ID NO: 2149027 - RNA, 19 nt, Artificial Sequence
  Description of Artificial Sequence: Synthetic oligonucleotide
aggagcgcucagcagucuu

SEQ ID NO: 2149028 - RNA, 19 nt, Artificial Sequence
  Description of Artificial Sequence: Synthetic oligonucleotide
ccccauaggacuccuugac

SEQ ID NO: 2149029 - RNA, 19 nt, Artificial Sequence
  Description of Artificial Sequence: Synthetic oligonucleotide
gcuguaggaaaaggauggc

SEQ ID NO: 2149030 - RNA, 19 nt, Artificial Sequence
  Description of Artificial Sequence: Synthetic oligonucleotide
gacgccaggcuggaacaca

SEQ ID NO: 2149031 - RNA, 19 nt, Artificial Sequence
  Description of Artificial Sequence: Synthetic oligonucleotide
guguccggaauggcccagg

SEQ ID NO: 2149032 - RNA, 19 nt, Artificial Sequence
  Description of Artificial Sequence: Synthetic oligonucleotide
gcccuggagcaccugauca

SEQ ID NO: 2149033 - RNA, 19 nt, Artificial Sequence
  Description of Artificial Sequence: Synthetic oligonucleotide
agggucaggcagagguguc

SEQ ID NO: 2149034 - RNA, 19 nt, Artificial Sequence
  Description of Artificial Sequence: Synthetic oligonucleotide
ggucaaucaugucgcccac

SEQ ID NO: 2149035 - RNA, 19 nt, Artificial Sequence
  Description of Artificial Sequence: Synthetic oligonucleotide
cuugucgaaucuugucccu

SEQ ID NO: 2149036 - RNA, 19 nt, Artificial Sequence
  Description of Artificial Sequence: Synthetic oligonucleotide
ugacgccaggcuggaacac

SEQ ID NO: 2149037 - RNA, 19 nt, Artificial Sequence
  Description of Artificial Sequence: Synthetic oligonucleotide
cuuugucugggucauucuu

SEQ ID NO: 2149038 - RNA, 19 nt, Artificial Sequence
  Description of Artificial Sequence: Synthetic oligonucleotide
ccauaccugugcagaaaug

SEQ ID NO: 2149039 - RNA, 19 nt, Artificial Sequence
  Description of Artificial Sequence: Synthetic oligonucleotide
gacggcacucagggcuggg

SEQ ID NO: 2149040 - RNA, 19 nt, Artificial Sequence
  Description of Artificial Sequence: Synthetic oligonucleotide
cuguguccggaauggccca

SEQ ID NO: 2149041 - RNA, 19 nt, Artificial Sequence
  Description of Artificial Sequence: Synthetic oligonucleotide
gcuugugagcucgugaacu

SEQ ID NO: 2149042 - RNA, 19 nt, Artificial Sequence
  Description of Artificial Sequence: Synthetic oligonucleotide
gugcuuuggcuccaacggu

SEQ ID NO: 2149043 - RNA, 19 nt, Artificial Sequence
  Description of Artificial Sequence: Synthetic oligonucleotide
gguccucauacaccuuaga

SEQ ID NO: 2149044 - RNA, 19 nt, Artificial Sequence
  Description of Artificial Sequence: Synthetic oligonucleotide
uggcguugcuugugagcuc

SEQ ID NO: 2149045 - RNA, 19 nt, Artificial Sequence
  Description of Artificial Sequence: Synthetic oligonucleotide
ggguccucauacaccuuag

SEQ ID NO: 2149046 - RNA, 19 nt, Artificial Sequence
  Description of Artificial Sequence: Synthetic oligonucleotide
gaggugucgaaaagccggu

SEQ ID NO: 2149047 - RNA, 19 nt, Artificial Sequence
  Description of Artificial Sequence: Synthetic oligonucleotide
gcaccugaucaaacucagg

SEQ ID NO: 2149048 - RNA, 19 nt, Artificial Sequence
  Description of Artificial Sequence: Synthetic oligonucleotide
ggugccgcaggauggggaa

SEQ ID NO: 2149049 - RNA, 19 nt, Artificial Sequence
  Description of Artificial Sequence: Synthetic oligonucleotide
cggcaaagucuucuagugc

SEQ ID NO: 2149050 - RNA, 19 nt, Artificial Sequence
  Description of Artificial Sequence: Synthetic oligonucleotide
gucguggcggaugauggcu

SEQ ID NO: 2149051 - RNA, 19 nt, Artificial Sequence
  Description of Artificial Sequence: Synthetic oligonucleotide
cuguagcugguggccgaag

SEQ ID NO: 2149052 - RNA, 19 nt, Artificial Sequence
  Description of Artificial Sequence: Synthetic oligonucleotide
cauaggacuccuugaccau

SEQ ID NO: 2149053 - RNA, 19 nt, Artificial Sequence
  Description of Artificial Sequence: Synthetic oligonucleotide
gcacauugccauaccugug

SEQ ID NO: 2149054 - RNA, 19 nt, Artificial Sequence
  Description of Artificial Sequence: Synthetic oligonucleotide
aggugccgcaggaugggga

SEQ ID NO: 2149055 - RNA, 19 nt, Artificial Sequence
  Description of Artificial Sequence: Synthetic oligonucleotide
uaggagcgcucagcagucu

SEQ ID NO: 2149056 - RNA, 19 nt, Artificial Sequence
  Description of Artificial Sequence: Synthetic oligonucleotide
agcuugacgccaggcugga

SEQ ID NO: 2149057 - RNA, 19 nt, Artificial Sequence
  Description of Artificial Sequence: Synthetic oligonucleotide
gaucaaacucaggcuuggu

SEQ ID NO: 2149058 - RNA, 19 nt, Artificial Sequence
  Description of Artificial Sequence: Synthetic oligonucleotide
gucuucugggugacagcca

SEQ ID NO: 2149059 - RNA, 19 nt, Artificial Sequence
  Description of Artificial Sequence: Synthetic oligonucleotide
ccggucaaucaugucgccc

SEQ ID NO: 2149060 - RNA, 19 nt, Artificial Sequence
  Description of Artificial Sequence: Synthetic oligonucleotide
cucggcucgcugugcccug

SEQ ID NO: 2149061 - RNA, 19 nt, Artificial Sequence
  Description of Artificial Sequence: Synthetic oligonucleotide
cagcagucuucugggugac

SEQ ID NO: 2149062 - RNA, 19 nt, Artificial Sequence
  Description of Artificial Sequence: Synthetic oligonucleotide
gccccauaggacuccuuga

SEQ ID NO: 2149063 - RNA, 19 nt, Artificial Sequence
  Description of Artificial Sequence: Synthetic oligonucleotide
gccaggcuggaacacaggu

SEQ ID NO: 2149064 - RNA, 19 nt, Artificial Sequence
  Description of Artificial Sequence: Synthetic oligonucleotide
ggaggugaugaggccgggc

SEQ ID NO: 2149065 - RNA, 19 nt, Artificial Sequence
  Description of Artificial Sequence: Synthetic oligonucleotide
acggcacucagggcugggu

SEQ ID NO: 2149066 - RNA, 19 nt, Artificial Sequence
  Description of Artificial Sequence: Synthetic oligonucleotide
gucccggagcuugacgcca

SEQ ID NO: 2149067 - RNA, 19 nt, Artificial Sequence
  Description of Artificial Sequence: Synthetic oligonucleotide
gggacuugaggauguaguu

SEQ ID NO: 2149068 - RNA, 19 nt, Artificial Sequence
  Description of Artificial Sequence: Synthetic oligonucleotide
uggcagggucaggcagagg

SEQ ID NO: 2149069 - RNA, 19 nt, Artificial Sequence
  Description of Artificial Sequence: Synthetic oligonucleotide
cacgguacuugauguacuu

SEQ ID NO: 2149070 - RNA, 19 nt, Artificial Sequence
  Description of Artificial Sequence: Synthetic oligonucleotide
gccauaccugugcagaaau

SEQ ID NO: 2149071 - RNA, 19 nt, Artificial Sequence
  Description of Artificial Sequence: Synthetic oligonucleotide
ggucaggcagaggugucga

SEQ ID NO: 2149072 - RNA, 19 nt, Artificial Sequence
  Description of Artificial Sequence: Synthetic oligonucleotide
ggucugcuugaggugccgc

SEQ ID NO: 2149073 - RNA, 19 nt, Artificial Sequence
  Description of Artificial Sequence: Synthetic oligonucleotide
cagcugcgcugguagaucu

SEQ ID NO: 2149074 - RNA, 19 nt, Artificial Sequence
  Description of Artificial Sequence: Synthetic oligonucleotide
ccguccuuaggcauguugu

SEQ ID NO: 2149075 - RNA, 19 nt, Artificial Sequence
  Description of Artificial Sequence: Synthetic oligonucleotide
cagcaggcguuugcugaac

SEQ ID NO: 2149076 - RNA, 19 nt, Artificial Sequence
  Description of Artificial Sequence: Synthetic oligonucleotide
cauacaccuuagacuugcu

SEQ ID NO: 2149077 - RNA, 19 nt, Artificial Sequence
  Description of Artificial Sequence: Synthetic oligonucleotide
gugccgcaggauggggaag

SEQ ID NO: 2149078 - RNA, 19 nt, Artificial Sequence
  Description of Artificial Sequence: Synthetic oligonucleotide
cucccgguaggagcgcuca

SEQ ID NO: 2149079 - RNA, 19 nt, Artificial Sequence
  Description of Artificial Sequence: Synthetic oligonucleotide
aggcuggaacacagguaga

SEQ ID NO: 2149080 - RNA, 19 nt, Artificial Sequence
  Description of Artificial Sequence: Synthetic oligonucleotide
ggcucgcugugcccuggag

SEQ ID NO: 2149081 - RNA, 19 nt, Artificial Sequence
  Description of Artificial Sequence: Synthetic oligonucleotide
gccggucaaucaugucgcc

SEQ ID NO: 2149082 - RNA, 19 nt, Artificial Sequence
  Description of Artificial Sequence: Synthetic oligonucleotide
ccgguaggagcgcucagca

SEQ ID NO: 2149083 - RNA, 19 nt, Artificial Sequence
  Description of Artificial Sequence: Synthetic oligonucleotide
agaagucguggcggaugau

SEQ ID NO: 2149084 - RNA, 19 nt, Artificial Sequence
  Description of Artificial Sequence: Synthetic oligonucleotide
cugggucauucuuaauguu

SEQ ID NO: 2149085 - RNA, 19 nt, Artificial Sequence
  Description of Artificial Sequence: Synthetic oligonucleotide
augaggccgggcagcuugu

SEQ ID NO: 2149086 - RNA, 19 nt, Artificial Sequence
  Description of Artificial Sequence: Synthetic oligonucleotide
ccucaagcaucaguccguc

SEQ ID NO: 2149087 - RNA, 19 nt, Artificial Sequence
  Description of Artificial Sequence: Synthetic oligonucleotide
ggggaagaccgugagcacu

SEQ ID NO: 2149088 - RNA, 19 nt, Artificial Sequence
  Description of Artificial Sequence: Synthetic oligonucleotide
cuccaacggucuccaugga

SEQ ID NO: 2149089 - RNA, 19 nt, Artificial Sequence
  Description of Artificial Sequence: Synthetic oligonucleotide
cgaaaagccggucaaucau

SEQ ID NO: 2149090 - RNA, 19 nt, Artificial Sequence
  Description of Artificial Sequence: Synthetic oligonucleotide
ccagcugcgcugguagauc

SEQ ID NO: 2149091 - RNA, 19 nt, Artificial Sequence
  Description of Artificial Sequence: Synthetic oligonucleotide
gcucgugaacugugccguc

SEQ ID NO: 2149092 - RNA, 19 nt, Artificial Sequence
  Description of Artificial Sequence: Synthetic oligonucleotide
ccggagcuugacgccaggc

SEQ ID NO: 2149093 - RNA, 19 nt, Artificial Sequence
  Description of Artificial Sequence: Synthetic oligonucleotide
ugaggccgggcagcuuguu

SEQ ID NO: 2149094 - RNA, 19 nt, Artificial Sequence
  Description of Artificial Sequence: Synthetic oligonucleotide
cccuugaaucucuccuuaa

SEQ ID NO: 2149095 - RNA, 19 nt, Artificial Sequence
  Description of Artificial Sequence: Synthetic oligonucleotide
cgguaggagcgcucagcag

SEQ ID NO: 2149096 - RNA, 19 nt, Artificial Sequence
  Description of Artificial Sequence: Synthetic oligonucleotide
gcuuuggcuccaacggucu

SEQ ID NO: 2149097 - RNA, 19 nt, Artificial Sequence
  Description of Artificial Sequence: Synthetic oligonucleotide
acucuuugucugggucauu

SEQ ID NO: 2149098 - RNA, 19 nt, Artificial Sequence
  Description of Artificial Sequence: Synthetic oligonucleotide
uggcuccaacggucuccau

SEQ ID NO: 2149099 - RNA, 19 nt, Artificial Sequence
  Description of Artificial Sequence: Synthetic oligonucleotide
ccgugagcacuguggagaa

SEQ ID NO: 2149100 - RNA, 19 nt, Artificial Sequence
  Description of Artificial Sequence: Synthetic oligonucleotide
ggcggaugauggcuuuccu

SEQ ID NO: 2149101 - RNA, 19 nt, Artificial Sequence
  Description of Artificial Sequence: Synthetic oligonucleotide
cccggagcuugacgccagg

SEQ ID NO: 2149102 - RNA, 19 nt, Artificial Sequence
  Description of Artificial Sequence: Synthetic oligonucleotide
ccaccugcuccacacggua

SEQ ID NO: 2149103 - RNA, 19 nt, Artificial Sequence
  Description of Artificial Sequence: Synthetic oligonucleotide
cacucagggcuggguccuc

SEQ ID NO: 2149104 - RNA, 19 nt, Artificial Sequence
  Description of Artificial Sequence: Synthetic oligonucleotide
cguccuuaggcauguugua

SEQ ID NO: 2149105 - RNA, 19 nt, Artificial Sequence
  Description of Artificial Sequence: Synthetic oligonucleotide
ggauguaguuguaguuauu

SEQ ID NO: 2149106 - RNA, 19 nt, Artificial Sequence
  Description of Artificial Sequence: Synthetic oligonucleotide
cucagggcuggguccucau

SEQ ID NO: 2149107 - RNA, 19 nt, Artificial Sequence
  Description of Artificial Sequence: Synthetic oligonucleotide
ccaagacuuugcagauaua

SEQ ID NO: 2149108 - RNA, 19 nt, Artificial Sequence
  Description of Artificial Sequence: Synthetic oligonucleotide
ggaauggcccaggccuucu

SEQ ID NO: 2149109 - RNA, 19 nt, Artificial Sequence
  Description of Artificial Sequence: Synthetic oligonucleotide
cgcccaccugcuccacacg

SEQ ID NO: 2149110 - RNA, 19 nt, Artificial Sequence
  Description of Artificial Sequence: Synthetic oligonucleotide
gcucggcucgcugugcccu

SEQ ID NO: 2149111 - RNA, 19 nt, Artificial Sequence
  Description of Artificial Sequence: Synthetic oligonucleotide
augccccauaggacuccuu

SEQ ID NO: 2149112 - RNA, 19 nt, Artificial Sequence
  Description of Artificial Sequence: Synthetic oligonucleotide
ggaagaccgugagcacugu

SEQ ID NO: 2149113 - RNA, 19 nt, Artificial Sequence
  Description of Artificial Sequence: Synthetic oligonucleotide
ccgcugucuccuggaaguc

SEQ ID NO: 2149114 - RNA, 19 nt, Artificial Sequence
  Description of Artificial Sequence: Synthetic oligonucleotide
gcucccgguaggagcgcuc

SEQ ID NO: 2149115 - RNA, 19 nt, Artificial Sequence
  Description of Artificial Sequence: Synthetic oligonucleotide
cggagcuugacgccaggcu

SEQ ID NO: 2149116 - RNA, 19 nt, Artificial Sequence
  Description of Artificial Sequence: Synthetic oligonucleotide
ugccguccuuaggcauguu

SEQ ID NO: 2149117 - RNA, 19 nt, Artificial Sequence
  Description of Artificial Sequence: Synthetic oligonucleotide
gcuccacacgguacuugau

SEQ ID NO: 2149118 - RNA, 19 nt, Artificial Sequence
  Description of Artificial Sequence: Synthetic oligonucleotide
ggccaucauugaaucccuu

SEQ ID NO: 2149119 - RNA, 19 nt, Artificial Sequence
  Description of Artificial Sequence: Synthetic oligonucleotide
ccggaauggcccaggccuu

SEQ ID NO: 2149120 - RNA, 19 nt, Artificial Sequence
  Description of Artificial Sequence: Synthetic oligonucleotide
cguggcggaugauggcuuu

SEQ ID NO: 2149121 - RNA, 19 nt, Artificial Sequence
  Description of Artificial Sequence: Synthetic oligonucleotide
cgugaacugugccguccuu

SEQ ID NO: 2149122 - RNA, 19 nt, Artificial Sequence
  Description of Artificial Sequence: Synthetic oligonucleotide
ugcuaguacggaaagagcg

SEQ ID NO: 2149123 - RNA, 19 nt, Artificial Sequence
  Description of Artificial Sequence: Synthetic oligonucleotide
aaugacuucugguugaugu

SEQ ID NO: 2149124 - RNA, 19 nt, Artificial Sequence
  Description of Artificial Sequence: Synthetic oligonucleotide
agcuguagaacccagagag

SEQ ID NO: 2149125 - RNA, 19 nt, Artificial Sequence
  Description of Artificial Sequence: Synthetic oligonucleotide
cuuguggugauucaaauac

SEQ ID NO: 2149126 - RNA, 19 nt, Artificial Sequence
  Description of Artificial Sequence: Synthetic oligonucleotide
aucccuggggucuagaacc

SEQ ID NO: 2149127 - RNA, 19 nt, Artificial Sequence
  Description of Artificial Sequence: Synthetic oligonucleotide
acuaugcagcuucacaugc

SEQ ID NO: 2149128 - RNA, 19 nt, Artificial Sequence
  Description of Artificial Sequence: Synthetic oligonucleotide
gaauuguagguacuggcgg

SEQ ID NO: 2149129 - RNA, 19 nt, Artificial Sequence
  Description of Artificial Sequence: Synthetic oligonucleotide
uuaaaguugaaggacuucc

SEQ ID NO: 2149130 - RNA, 19 nt, Artificial Sequence
  Description of Artificial Sequence: Synthetic oligonucleotide
uuagagucagaagaggagg

SEQ ID NO: 2149131 - RNA, 19 nt, Artificial Sequence
  Description of Artificial Sequence: Synthetic oligonucleotide
uggugauucaaauacugcc

SEQ ID NO: 2149132 - RNA, 19 nt, Artificial Sequence
  Description of Artificial Sequence: Synthetic oligonucleotide
aguagacugggccugacuc

SEQ ID NO: 2149133 - RNA, 19 nt, Artificial Sequence
  Description of Artificial Sequence: Synthetic oligonucleotide
aggacuagacuccaaagag

SEQ ID NO: 2149134 - RNA, 19 nt, Artificial Sequence
  Description of Artificial Sequence: Synthetic oligonucleotide
ucuguggaugacaagguug

SEQ ID NO: 2149135 - RNA, 19 nt, Artificial Sequence
  Description of Artificial Sequence: Synthetic oligonucleotide
ucuccugaguccaaucugg

SEQ ID NO: 2149136 - RNA, 19 nt, Artificial Sequence
  Description of Artificial Sequence: Synthetic oligonucleotide
ucggugccaauuuagagag

SEQ ID NO: 2149137 - RNA, 19 nt, Artificial Sequence
  Description of Artificial Sequence: Synthetic oligonucleotide
aaaguugaaggacuuccca

SEQ ID NO: 2149138 - RNA, 19 nt, Artificial Sequence
  Description of Artificial Sequence: Synthetic oligonucleotide
gagaauuguagguacuggc

SEQ ID NO: 2149139 - RNA, 19 nt, Artificial Sequence
  Description of Artificial Sequence: Synthetic oligonucleotide
uuuagagaggccuucugac

SEQ ID NO: 2149140 - RNA, 19 nt, Artificial Sequence
  Description of Artificial Sequence: Synthetic oligonucleotide
uuagagaggccuucugacg

SEQ ID NO: 2149141 - RNA, 19 nt, Artificial Sequence
  Description of Artificial Sequence: Synthetic oligonucleotide
uuggcuucgcaguagacug

SEQ ID NO: 2149142 - RNA, 19 nt, Artificial Sequence
  Description of Artificial Sequence: Synthetic oligonucleotide
uuuugcugcagugagcugc

SEQ ID NO: 2149143 - RNA, 19 nt, Artificial Sequence
  Description of Artificial Sequence: Synthetic oligonucleotide
gacuagggagaauuguagg

SEQ ID NO: 2149144 - RNA, 19 nt, Artificial Sequence
  Description of Artificial Sequence: Synthetic oligonucleotide
uaggacuagacuccaaaga

SEQ ID NO: 2149145 - RNA, 19 nt, Artificial Sequence
  Description of Artificial Sequence: Synthetic oligonucleotide
uccuacugaguucuagccg

SEQ ID NO: 2149146 - RNA, 19 nt, Artificial Sequence
  Description of Artificial Sequence: Synthetic oligonucleotide
gugauucaaauacugccgg

SEQ ID NO: 2149147 - RNA, 19 nt, Artificial Sequence
  Description of Artificial Sequence: Synthetic oligonucleotide
agugaacccacauaucuca

SEQ ID NO: 2149148 - RNA, 19 nt, Artificial Sequence
  Description of Artificial Sequence: Synthetic oligonucleotide
gauccuuccacagccaggg

SEQ ID NO: 2149149 - RNA, 19 nt, Artificial Sequence
  Description of Artificial Sequence: Synthetic oligonucleotide
aagcguuugccacagaauu

SEQ ID NO: 2149150 - RNA, 19 nt, Artificial Sequence
  Description of Artificial Sequence: Synthetic oligonucleotide
acaagguugcugcuaguac

SEQ ID NO: 2149151 - RNA, 19 nt, Artificial Sequence
  Description of Artificial Sequence: Synthetic oligonucleotide
aaauacugccgguuggaga

SEQ ID NO: 2149152 - RNA, 19 nt, Artificial Sequence
  Description of Artificial Sequence: Synthetic oligonucleotide
ucugacgacaagugaaccc

SEQ ID NO: 2149153 - RNA, 19 nt, Artificial Sequence
  Description of Artificial Sequence: Synthetic oligonucleotide
cuucccacaagcuggcucg

SEQ ID NO: 2149154 - RNA, 19 nt, Artificial Sequence
  Description of Artificial Sequence: Synthetic oligonucleotide
agaauuguagguacuggcg

SEQ ID NO: 2149155 - RNA, 19 nt, Artificial Sequence
  Description of Artificial Sequence: Synthetic oligonucleotide
uagagaggccuucugacga

SEQ ID NO: 2149156 - RNA, 19 nt, Artificial Sequence
  Description of Artificial Sequence: Synthetic oligonucleotide
ucagaagaggaggaaaggc

SEQ ID NO: 2149157 - RNA, 19 nt, Artificial Sequence
  Description of Artificial Sequence: Synthetic oligonucleotide
acuagggagaauuguaggu

SEQ ID NO: 2149158 - RNA, 19 nt, Artificial Sequence
  Description of Artificial Sequence: Synthetic oligonucleotide
ucacuaugcagcuucacau

SEQ ID NO: 2149159 - RNA, 19 nt, Artificial Sequence
  Description of Artificial Sequence: Synthetic oligonucleotide
cuuaggaacaucugguuca

SEQ ID NO: 2149160 - RNA, 19 nt, Artificial Sequence
  Description of Artificial Sequence: Synthetic oligonucleotide
cuagacuccaaagagccag

SEQ ID NO: 2149161 - RNA, 19 nt, Artificial Sequence
  Description of Artificial Sequence: Synthetic oligonucleotide
gacacuaggacuagacucc

SEQ ID NO: 2149162 - RNA, 19 nt, Artificial Sequence
  Description of Artificial Sequence: Synthetic oligonucleotide
augacaagguugcugcuag

SEQ ID NO: 2149163 - RNA, 19 nt, Artificial Sequence
  Description of Artificial Sequence: Synthetic oligonucleotide
acugucuggcuucucaaag

SEQ ID NO: 2149164 - RNA, 19 nt, Artificial Sequence
  Description of Artificial Sequence: Synthetic oligonucleotide
uguugaaggggcaggauua

SEQ ID NO: 2149165 - RNA, 19 nt, Artificial Sequence
  Description of Artificial Sequence: Synthetic oligonucleotide
aggacuucccacaagcugg

SEQ ID NO: 2149166 - RNA, 19 nt, Artificial Sequence
  Description of Artificial Sequence: Synthetic oligonucleotide
gaagucgcaaggcaucagc

SEQ ID NO: 2149167 - RNA, 19 nt, Artificial Sequence
  Description of Artificial Sequence: Synthetic oligonucleotide
ucugagggguccuacugag

SEQ ID NO: 2149168 - RNA, 19 nt, Artificial Sequence
  Description of Artificial Sequence: Synthetic oligonucleotide
gauuagagucagaagagga

SEQ ID NO: 2149169 - RNA, 19 nt, Artificial Sequence
  Description of Artificial Sequence: Synthetic oligonucleotide
ggugauucaaauacugccg

SEQ ID NO: 2149170 - RNA, 19 nt, Artificial Sequence
  Description of Artificial Sequence: Synthetic oligonucleotide
uuagguguguggguaacag

SEQ ID NO: 2149171 - RNA, 19 nt, Artificial Sequence
  Description of Artificial Sequence: Synthetic oligonucleotide
aagugaacccacauaucuc

SEQ ID NO: 2149172 - RNA, 19 nt, Artificial Sequence
  Description of Artificial Sequence: Synthetic oligonucleotide
agacucggucauuugcagc

SEQ ID NO: 2149173 - RNA, 19 nt, Artificial Sequence
  Description of Artificial Sequence: Synthetic oligonucleotide
gauugcagggguucagcag

SEQ ID NO: 2149174 - RNA, 19 nt, Artificial Sequence
  Description of Artificial Sequence: Synthetic oligonucleotide
uggcuuaggaacaucuggu

SEQ ID NO: 2149175 - RNA, 19 nt, Artificial Sequence
  Description of Artificial Sequence: Synthetic oligonucleotide
cuucgcaguagacugggcc

SEQ ID NO: 2149176 - RNA, 19 nt, Artificial Sequence
  Description of Artificial Sequence: Synthetic oligonucleotide
aucacuaugcagcuucaca

SEQ ID NO: 2149177 - RNA, 19 nt, Artificial Sequence
  Description of Artificial Sequence: Synthetic oligonucleotide
cuaggacuagacuccaaag

SEQ ID NO: 2149178 - RNA, 19 nt, Artificial Sequence
  Description of Artificial Sequence: Synthetic oligonucleotide
uagggagaauuguagguac

SEQ ID NO: 2149179 - RNA, 19 nt, Artificial Sequence
  Description of Artificial Sequence: Synthetic oligonucleotide
gagaagauccuuccacagc

SEQ ID NO: 2149180 - RNA, 19 nt, Artificial Sequence
  Description of Artificial Sequence: Synthetic oligonucleotide
ugcagcucuacagaggucu

SEQ ID NO: 2149181 - RNA, 19 nt, Artificial Sequence
  Description of Artificial Sequence: Synthetic oligonucleotide
ugccaauuuagagaggccu

SEQ ID NO: 2149182 - RNA, 19 nt, Artificial Sequence
  Description of Artificial Sequence: Synthetic oligonucleotide
uguagaacccagagaggca

SEQ ID NO: 2149183 - RNA, 19 nt, Artificial Sequence
  Description of Artificial Sequence: Synthetic oligonucleotide
ugcgucggugccaauuuag

SEQ ID NO: 2149184 - RNA, 19 nt, Artificial Sequence
  Description of Artificial Sequence: Synthetic oligonucleotide
uucacagauguagucccgg

SEQ ID NO: 2149185 - RNA, 19 nt, Artificial Sequence
  Description of Artificial Sequence: Synthetic oligonucleotide
gguaucacuaugcagcuuc

SEQ ID NO: 2149186 - RNA, 19 nt, Artificial Sequence
  Description of Artificial Sequence: Synthetic oligonucleotide
ccggguaucacuaugcagc

SEQ ID NO: 2149187 - RNA, 19 nt, Artificial Sequence
  Description of Artificial Sequence: Synthetic oligonucleotide
gguuguaaagagcuggcug

SEQ ID NO: 2149188 - RNA, 19 nt, Artificial Sequence
  Description of Artificial Sequence: Synthetic oligonucleotide
aguacggaaagagcgagca

SEQ ID NO: 2149189 - RNA, 19 nt, Artificial Sequence
  Description of Artificial Sequence: Synthetic oligonucleotide
ugacuucugguugaugugc

SEQ ID NO: 2149190 - RNA, 19 nt, Artificial Sequence
  Description of Artificial Sequence: Synthetic oligonucleotide
ucacagauguagucccggg

SEQ ID NO: 2149191 - RNA, 19 nt, Artificial Sequence
  Description of Artificial Sequence: Synthetic oligonucleotide
aggauuagagucagaagag

SEQ ID NO: 2149192 - RNA, 19 nt, Artificial Sequence
  Description of Artificial Sequence: Synthetic oligonucleotide
caaagagccaggugacucc

SEQ ID NO: 2149193 - RNA, 19 nt, Artificial Sequence
  Description of Artificial Sequence: Synthetic oligonucleotide
uuugcugcagugagcugcc

SEQ ID NO: 2149194 - RNA, 19 nt, Artificial Sequence
  Description of Artificial Sequence: Synthetic oligonucleotide
cuucugacgacaagugaac

SEQ ID NO: 2149195 - RNA, 19 nt, Artificial Sequence
  Description of Artificial Sequence: Synthetic oligonucleotide
ugagggguccuacugaguu

SEQ ID NO: 2149196 - RNA, 19 nt, Artificial Sequence
  Description of Artificial Sequence: Synthetic oligonucleotide
gaacaucugguucacuguc

SEQ ID NO: 2149197 - RNA, 19 nt, Artificial Sequence
  Description of Artificial Sequence: Synthetic oligonucleotide
agagcgagcacagaauuca

SEQ ID NO: 2149198 - RNA, 19 nt, Artificial Sequence
  Description of Artificial Sequence: Synthetic oligonucleotide
agaaccccagguuguaaag

SEQ ID NO: 2149199 - RNA, 19 nt, Artificial Sequence
  Description of Artificial Sequence: Synthetic oligonucleotide
agucgcaaggcaucagcuc

SEQ ID NO: 2149200 - RNA, 19 nt, Artificial Sequence
  Description of Artificial Sequence: Synthetic oligonucleotide
acuaggacuagacuccaaa

SEQ ID NO: 2149201 - RNA, 19 nt, Artificial Sequence
  Description of Artificial Sequence: Synthetic oligonucleotide
gaugucagagcagcuguag

SEQ ID NO: 2149202 - RNA, 19 nt, Artificial Sequence
  Description of Artificial Sequence: Synthetic oligonucleotide
aaggacuagggagaauugu

SEQ ID NO: 2149203 - RNA, 19 nt, Artificial Sequence
  Description of Artificial Sequence: Synthetic oligonucleotide
aagagcgagcacagaauuc

SEQ ID NO: 2149204 - RNA, 19 nt, Artificial Sequence
  Description of Artificial Sequence: Synthetic oligonucleotide
ucaaauacugccgguugga

SEQ ID NO: 2149205 - RNA, 19 nt, Artificial Sequence
  Description of Artificial Sequence: Synthetic oligonucleotide
cagagacucggucauuugc

SEQ ID NO: 2149206 - RNA, 19 nt, Artificial Sequence
  Description of Artificial Sequence: Synthetic oligonucleotide
gagacucggucauuugcag

SEQ ID NO: 2149207 - RNA, 19 nt, Artificial Sequence
  Description of Artificial Sequence: Synthetic oligonucleotide
gucggugccaauuuagaga

SEQ ID NO: 2149208 - RNA, 19 nt, Artificial Sequence
  Description of Artificial Sequence: Synthetic oligonucleotide
aauucacaggggaagcgca

SEQ ID NO: 2149209 - RNA, 19 nt, Artificial Sequence
  Description of Artificial Sequence: Synthetic oligonucleotide
guccuacugaguucuagcc

SEQ ID NO: 2149210 - RNA, 19 nt, Artificial Sequence
  Description of Artificial Sequence: Synthetic oligonucleotide
cagggguucagcagcagag

SEQ ID NO: 2149211 - RNA, 19 nt, Artificial Sequence
  Description of Artificial Sequence: Synthetic oligonucleotide
uguagucccggguaucacu

SEQ ID NO: 2149212 - RNA, 19 nt, Artificial Sequence
  Description of Artificial Sequence: Synthetic oligonucleotide
uuguggugauucaaauacu

SEQ ID NO: 2149213 - RNA, 19 nt, Artificial Sequence
  Description of Artificial Sequence: Synthetic oligonucleotide
uugcugcuaguacggaaag

SEQ ID NO: 2149214 - RNA, 19 nt, Artificial Sequence
  Description of Artificial Sequence: Synthetic oligonucleotide
gcuggcaucacugaguggc

SEQ ID NO: 2149215 - RNA, 19 nt, Artificial Sequence
  Description of Artificial Sequence: Synthetic oligonucleotide
cugaguccaaucugggcag

SEQ ID NO: 2149216 - RNA, 19 nt, Artificial Sequence
  Description of Artificial Sequence: Synthetic oligonucleotide
cugucuggcuucucaaagc

SEQ ID NO: 2149217 - RNA, 19 nt, Artificial Sequence
  Description of Artificial Sequence: Synthetic oligonucleotide
cuaguacggaaagagcgag

SEQ ID NO: 2149218 - RNA, 19 nt, Artificial Sequence
  Description of Artificial Sequence: Synthetic oligonucleotide
acaaggacuagggagaauu

SEQ ID NO: 2149219 - RNA, 19 nt, Artificial Sequence
  Description of Artificial Sequence: Synthetic oligonucleotide
gcugcuaguacggaaagag

SEQ ID NO: 2149220 - RNA, 19 nt, Artificial Sequence
  Description of Artificial Sequence: Synthetic oligonucleotide
ugauucaaauacugccggu

SEQ ID NO: 2149221 - RNA, 19 nt, Artificial Sequence
  Description of Artificial Sequence: Synthetic oligonucleotide
cagguuguaaagagcuggc

SEQ ID NO: 2149222 - RNA, 19 nt, Artificial Sequence
  Description of Artificial Sequence: Synthetic oligonucleotide
agagaggccuucugacgac

SEQ ID NO: 2149223 - RNA, 19 nt, Artificial Sequence
  Description of Artificial Sequence: Synthetic oligonucleotide
auuugcagcucuacagagg

SEQ ID NO: 2149224 - RNA, 19 nt, Artificial Sequence
  Description of Artificial Sequence: Synthetic oligonucleotide
cugguugaugugcugguac

SEQ ID NO: 2149225 - RNA, 19 nt, Artificial Sequence
  Description of Artificial Sequence: Synthetic oligonucleotide
ggucuagaaccccagguug

SEQ ID NO: 2149226 - RNA, 19 nt, Artificial Sequence
  Description of Artificial Sequence: Synthetic oligonucleotide
gagcacagaauucacagau

SEQ ID NO: 2149227 - RNA, 19 nt, Artificial Sequence
  Description of Artificial Sequence: Synthetic oligonucleotide
cuagccgcaccucagcuuc

SEQ ID NO: 2149228 - RNA, 19 nt, Artificial Sequence
  Description of Artificial Sequence: Synthetic oligonucleotide
uagaaccccagguuguaaa

SEQ ID NO: 2149229 - RNA, 19 nt, Artificial Sequence
  Description of Artificial Sequence: Synthetic oligonucleotide
ucccagguuggcuucgcag

SEQ ID NO: 2149230 - RNA, 19 nt, Artificial Sequence
  Description of Artificial Sequence: Synthetic oligonucleotide
agauugcagggguucagca

SEQ ID NO: 2149231 - RNA, 19 nt, Artificial Sequence
  Description of Artificial Sequence: Synthetic oligonucleotide
guagacugggccugacucc

SEQ ID NO: 2149232 - RNA, 19 nt, Artificial Sequence
  Description of Artificial Sequence: Synthetic oligonucleotide
cacuaugcagcuucacaug

SEQ ID NO: 2149233 - RNA, 19 nt, Artificial Sequence
  Description of Artificial Sequence: Synthetic oligonucleotide
agcacaaggacuagggaga

SEQ ID NO: 2149234 - RNA, 19 nt, Artificial Sequence
  Description of Artificial Sequence: Synthetic oligonucleotide
gaggcaagaacagcacaag

SEQ ID NO: 2149235 - RNA, 19 nt, Artificial Sequence
  Description of Artificial Sequence: Synthetic oligonucleotide
cugcuaguacggaaagagc

SEQ ID NO: 2149236 - RNA, 19 nt, Artificial Sequence
  Description of Artificial Sequence: Synthetic oligonucleotide
aucacugaguggcucuuca

SEQ ID NO: 2149237 - RNA, 19 nt, Artificial Sequence
  Description of Artificial Sequence: Synthetic oligonucleotide
uucuagccgcaccucagcu

SEQ ID NO: 2149238 - RNA, 19 nt, Artificial Sequence
  Description of Artificial Sequence: Synthetic oligonucleotide
ugggcaguauccucauccc

SEQ ID NO: 2149239 - RNA, 19 nt, Artificial Sequence
  Description of Artificial Sequence: Synthetic oligonucleotide
uaguacggaaagagcgagc

SEQ ID NO: 2149240 - RNA, 19 nt, Artificial Sequence
  Description of Artificial Sequence: Synthetic oligonucleotide
gguuggguggcuuuugcug

SEQ ID NO: 2149241 - RNA, 19 nt, Artificial Sequence
  Description of Artificial Sequence: Synthetic oligonucleotide
ggauuagagucagaagagg

SEQ ID NO: 2149242 - RNA, 19 nt, Artificial Sequence
  Description of Artificial Sequence: Synthetic oligonucleotide
uccugaguccaaucugggc

SEQ ID NO: 2149243 - RNA, 19 nt, Artificial Sequence
  Description of Artificial Sequence: Synthetic oligonucleotide
guggauucgucuguggaug

SEQ ID NO: 2149244 - RNA, 19 nt, Artificial Sequence
  Description of Artificial Sequence: Synthetic oligonucleotide
aaagagccaggugacuccu

SEQ ID NO: 2149245 - RNA, 19 nt, Artificial Sequence
  Description of Artificial Sequence: Synthetic oligonucleotide
acccagagaggcaagaaca

SEQ ID NO: 2149246 - RNA, 19 nt, Artificial Sequence
  Description of Artificial Sequence: Synthetic oligonucleotide
uucugacgacaagugaacc

SEQ ID NO: 2149247 - RNA, 19 nt, Artificial Sequence
  Description of Artificial Sequence: Synthetic oligonucleotide
gacuccaaagagccaggug

SEQ ID NO: 2149248 - RNA, 19 nt, Artificial Sequence
  Description of Artificial Sequence: Synthetic oligonucleotide
aaagcguuugccacagaau

SEQ ID NO: 2149249 - RNA, 19 nt, Artificial Sequence
  Description of Artificial Sequence: Synthetic oligonucleotide
ggaaagagcgagcacagaa

SEQ ID NO: 2149250 - RNA, 19 nt, Artificial Sequence
  Description of Artificial Sequence: Synthetic oligonucleotide
ggagaauuguagguacugg

SEQ ID NO: 2149251 - RNA, 19 nt, Artificial Sequence
  Description of Artificial Sequence: Synthetic oligonucleotide
uggcuucgcaguagacugg

SEQ ID NO: 2149252 - RNA, 19 nt, Artificial Sequence
  Description of Artificial Sequence: Synthetic oligonucleotide
acaagugaacccacauauc

SEQ ID NO: 2149253 - RNA, 19 nt, Artificial Sequence
  Description of Artificial Sequence: Synthetic oligonucleotide
aacaucugguucacuguca

SEQ ID NO: 2149254 - RNA, 19 nt, Artificial Sequence
  Description of Artificial Sequence: Synthetic oligonucleotide
agcucuacagaggucugag

SEQ ID NO: 2149255 - RNA, 19 nt, Artificial Sequence
  Description of Artificial Sequence: Synthetic oligonucleotide
aagucgcaaggcaucagcu

SEQ ID NO: 2149256 - RNA, 19 nt, Artificial Sequence
  Description of Artificial Sequence: Synthetic oligonucleotide
caaggacuagggagaauug

SEQ ID NO: 2149257 - RNA, 19 nt, Artificial Sequence
  Description of Artificial Sequence: Synthetic oligonucleotide
acgacaagugaacccacau

SEQ ID NO: 2149258 - RNA, 19 nt, Artificial Sequence
  Description of Artificial Sequence: Synthetic oligonucleotide
gagauugcagggguucagc

SEQ ID NO: 2149259 - RNA, 19 nt, Artificial Sequence
  Description of Artificial Sequence: Synthetic oligonucleotide
agagacucggucauuugca

SEQ ID NO: 2149260 - RNA, 19 nt, Artificial Sequence
  Description of Artificial Sequence: Synthetic oligonucleotide
uuaggaacaucugguucac

SEQ ID NO: 2149261 - RNA, 19 nt, Artificial Sequence
  Description of Artificial Sequence: Synthetic oligonucleotide
gguccuacugaguucuagc

SEQ ID NO: 2149262 - RNA, 19 nt, Artificial Sequence
  Description of Artificial Sequence: Synthetic oligonucleotide
ucucugaaucccugggguc

SEQ ID NO: 2149263 - RNA, 19 nt, Artificial Sequence
  Description of Artificial Sequence: Synthetic oligonucleotide
cagaaugacuucugguuga

SEQ ID NO: 2149264 - RNA, 19 nt, Artificial Sequence
  Description of Artificial Sequence: Synthetic oligonucleotide
gucucugcaugcuugcguc

SEQ ID NO: 2149265 - RNA, 19 nt, Artificial Sequence
  Description of Artificial Sequence: Synthetic oligonucleotide
uguagguacuggcgggauc

SEQ ID NO: 2149266 - RNA, 19 nt, Artificial Sequence
  Description of Artificial Sequence: Synthetic oligonucleotide
cugacgacaagugaaccca

SEQ ID NO: 2149267 - RNA, 19 nt, Artificial Sequence
  Description of Artificial Sequence: Synthetic oligonucleotide
gaucucucccuccuuaggu

SEQ ID NO: 2149268 - RNA, 19 nt, Artificial Sequence
  Description of Artificial Sequence: Synthetic oligonucleotide
gauucgucuguggaugaca

SEQ ID NO: 2149269 - RNA, 19 nt, Artificial Sequence
  Description of Artificial Sequence: Synthetic oligonucleotide
gaaaggcuuggccccucag

SEQ ID NO: 2149270 - RNA, 19 nt, Artificial Sequence
  Description of Artificial Sequence: Synthetic oligonucleotide
agcagagacacuaggacua

SEQ ID NO: 2149271 - RNA, 19 nt, Artificial Sequence
  Description of Artificial Sequence: Synthetic oligonucleotide
agucccggguaucacuaug

SEQ ID NO: 2149272 - RNA, 19 nt, Artificial Sequence
  Description of Artificial Sequence: Synthetic oligonucleotide
ggacuagggagaauuguag

SEQ ID NO: 2149273 - RNA, 19 nt, Artificial Sequence
  Description of Artificial Sequence: Synthetic oligonucleotide
uggauucgucuguggauga

SEQ ID NO: 2149274 - RNA, 19 nt, Artificial Sequence
  Description of Artificial Sequence: Synthetic oligonucleotide
ugacgacaagugaacccac

SEQ ID NO: 2149275 - RNA, 19 nt, Artificial Sequence
  Description of Artificial Sequence: Synthetic oligonucleotide
gaguucuagccgcaccuca

SEQ ID NO: 2149276 - RNA, 19 nt, Artificial Sequence
  Description of Artificial Sequence: Synthetic oligonucleotide
agauguagucccggguauc

SEQ ID NO: 2149277 - RNA, 19 nt, Artificial Sequence
  Description of Artificial Sequence: Synthetic oligonucleotide
aggggaagcgcagggcagc

SEQ ID NO: 2149278 - RNA, 19 nt, Artificial Sequence
  Description of Artificial Sequence: Synthetic oligonucleotide
guucuagccgcaccucagc

SEQ ID NO: 2149279 - RNA, 19 nt, Artificial Sequence
  Description of Artificial Sequence: Synthetic oligonucleotide
gcaggauuagagucagaag

SEQ ID NO: 2149280 - RNA, 19 nt, Artificial Sequence
  Description of Artificial Sequence: Synthetic oligonucleotide
ucccggguaucacuaugca

SEQ ID NO: 2149281 - RNA, 19 nt, Artificial Sequence
  Description of Artificial Sequence: Synthetic oligonucleotide
ggcaagaacagcacaagga

SEQ ID NO: 2149282 - RNA, 19 nt, Artificial Sequence
  Description of Artificial Sequence: Synthetic oligonucleotide
gcaguauccucaucccagg

SEQ ID NO: 2149283 - RNA, 19 nt, Artificial Sequence
  Description of Artificial Sequence: Synthetic oligonucleotide
agggguccuacugaguucu

SEQ ID NO: 2149284 - RNA, 19 nt, Artificial Sequence
  Description of Artificial Sequence: Synthetic oligonucleotide
gcuuaggaacaucugguuc

SEQ ID NO: 2149285 - RNA, 19 nt, Artificial Sequence
  Description of Artificial Sequence: Synthetic oligonucleotide
auuguagguacuggcggga

SEQ ID NO: 2149286 - RNA, 19 nt, Artificial Sequence
  Description of Artificial Sequence: Synthetic oligonucleotide
guugaaggggcaggauuag

SEQ ID NO: 2149287 - RNA, 19 nt, Artificial Sequence
  Description of Artificial Sequence: Synthetic oligonucleotide
ugaugucagagcagcugua

SEQ ID NO: 2149288 - RNA, 19 nt, Artificial Sequence
  Description of Artificial Sequence: Synthetic oligonucleotide
ucccuccuuaggugugugg

SEQ ID NO: 2149289 - RNA, 19 nt, Artificial Sequence
  Description of Artificial Sequence: Synthetic oligonucleotide
guacuggcgggaucucucc

SEQ ID NO: 2149290 - RNA, 19 nt, Artificial Sequence
  Description of Artificial Sequence: Synthetic oligonucleotide
uugcagggguucagcagca

SEQ ID NO: 2149291 - RNA, 19 nt, Artificial Sequence
  Description of Artificial Sequence: Synthetic oligonucleotide
ggacuagacuccaaagagc

SEQ ID NO: 2149292 - RNA, 19 nt, Artificial Sequence
  Description of Artificial Sequence: Synthetic oligonucleotide
gucgcaaggcaucagcucu

SEQ ID NO: 2149293 - RNA, 19 nt, Artificial Sequence
  Description of Artificial Sequence: Synthetic oligonucleotide
gagacacuaggacuagacu

SEQ ID NO: 2149294 - RNA, 19 nt, Artificial Sequence
  Description of Artificial Sequence: Synthetic oligonucleotide
gagucagaagaggaggaaa

SEQ ID NO: 2149295 - RNA, 19 nt, Artificial Sequence
  Description of Artificial Sequence: Synthetic oligonucleotide
ggaucucucccuccuuagg

SEQ ID NO: 2149296 - RNA, 19 nt, Artificial Sequence
  Description of Artificial Sequence: Synthetic oligonucleotide
guaacaggggauggaggug

SEQ ID NO: 2149297 - RNA, 19 nt, Artificial Sequence
  Description of Artificial Sequence: Synthetic oligonucleotide
ugacucccagggcugucca

SEQ ID NO: 2149298 - RNA, 19 nt, Artificial Sequence
  Description of Artificial Sequence: Synthetic oligonucleotide
uccagagacucggucauuu

SEQ ID NO: 2149299 - RNA, 19 nt, Artificial Sequence
  Description of Artificial Sequence: Synthetic oligonucleotide
auguagucccggguaucac

SEQ ID NO: 2149300 - RNA, 19 nt, Artificial Sequence
  Description of Artificial Sequence: Synthetic oligonucleotide
ucugcaugcuugcgucggu

SEQ ID NO: 2149301 - RNA, 19 nt, Artificial Sequence
  Description of Artificial Sequence: Synthetic oligonucleotide
agguggcuuaggaacaucu

SEQ ID NO: 2149302 - RNA, 19 nt, Artificial Sequence
  Description of Artificial Sequence: Synthetic oligonucleotide
uuggccccucaggagauug

SEQ ID NO: 2149303 - RNA, 19 nt, Artificial Sequence
  Description of Artificial Sequence: Synthetic oligonucleotide
auucacaggggaagcgcag

SEQ ID NO: 2149304 - RNA, 19 nt, Artificial Sequence
  Description of Artificial Sequence: Synthetic oligonucleotide
gacaagguugcugcuagua

SEQ ID NO: 2149305 - RNA, 19 nt, Artificial Sequence
  Description of Artificial Sequence: Synthetic oligonucleotide
ucaggagauugcagggguu

SEQ ID NO: 2149306 - RNA, 19 nt, Artificial Sequence
  Description of Artificial Sequence: Synthetic oligonucleotide
gaaugacuucugguugaug

SEQ ID NO: 2149307 - RNA, 19 nt, Artificial Sequence
  Description of Artificial Sequence: Synthetic oligonucleotide
gauucaaauacugccgguu

SEQ ID NO: 2149308 - RNA, 19 nt, Artificial Sequence
  Description of Artificial Sequence: Synthetic oligonucleotide
ucuagccgcaccucagcuu

SEQ ID NO: 2149309 - RNA, 19 nt, Artificial Sequence
  Description of Artificial Sequence: Synthetic oligonucleotide
gaaccccagguuguaaaga

SEQ ID NO: 2149310 - RNA, 19 nt, Artificial Sequence
  Description of Artificial Sequence: Synthetic oligonucleotide
uugaaggggcaggauuaga

SEQ ID NO: 2149311 - RNA, 19 nt, Artificial Sequence
  Description of Artificial Sequence: Synthetic oligonucleotide
ucuagaaccccagguugua

SEQ ID NO: 2149312 - RNA, 19 nt, Artificial Sequence
  Description of Artificial Sequence: Synthetic oligonucleotide
aggacuagggagaauugua

SEQ ID NO: 2149313 - RNA, 19 nt, Artificial Sequence
  Description of Artificial Sequence: Synthetic oligonucleotide
caggagauugcagggguuc

SEQ ID NO: 2149314 - RNA, 19 nt, Artificial Sequence
  Description of Artificial Sequence: Synthetic oligonucleotide
agguuguaaagagcuggcu

SEQ ID NO: 2149315 - RNA, 19 nt, Artificial Sequence
  Description of Artificial Sequence: Synthetic oligonucleotide
ccuucugacgacaagugaa

SEQ ID NO: 2149316 - RNA, 19 nt, Artificial Sequence
  Description of Artificial Sequence: Synthetic oligonucleotide
cuagggagaauuguaggua

SEQ ID NO: 2149317 - RNA, 19 nt, Artificial Sequence
  Description of Artificial Sequence: Synthetic oligonucleotide
auucgucuguggaugacaa

SEQ ID NO: 2149318 - RNA, 19 nt, Artificial Sequence
  Description of Artificial Sequence: Synthetic oligonucleotide
ucgcaaggcaucagcucuc

SEQ ID NO: 2149319 - RNA, 19 nt, Artificial Sequence
  Description of Artificial Sequence: Synthetic oligonucleotide
aggugacuccugugugggg

SEQ ID NO: 2149320 - RNA, 19 nt, Artificial Sequence
  Description of Artificial Sequence: Synthetic oligonucleotide
gucccggguaucacuaugc

SEQ ID NO: 2149321 - RNA, 19 nt, Artificial Sequence
  Description of Artificial Sequence: Synthetic oligonucleotide
guagguacuggcgggaucu

SEQ ID NO: 2149322 - RNA, 19 nt, Artificial Sequence
  Description of Artificial Sequence: Synthetic oligonucleotide
gagggguccuacugaguuc

SEQ ID NO: 2149323 - RNA, 19 nt, Artificial Sequence
  Description of Artificial Sequence: Synthetic oligonucleotide
ugcugcuaguacggaaaga

SEQ ID NO: 2149324 - RNA, 19 nt, Artificial Sequence
  Description of Artificial Sequence: Synthetic oligonucleotide
uacagaggucugagggguc

SEQ ID NO: 2149325 - RNA, 19 nt, Artificial Sequence
  Description of Artificial Sequence: Synthetic oligonucleotide
gaaagagcgagcacagaau

SEQ ID NO: 2149326 - RNA, 19 nt, Artificial Sequence
  Description of Artificial Sequence: Synthetic oligonucleotide
cugacucccagggcugucc

SEQ ID NO: 2149327 - RNA, 19 nt, Artificial Sequence
  Description of Artificial Sequence: Synthetic oligonucleotide
cuuuugcugcagugagcug

SEQ ID NO: 2149328 - RNA, 19 nt, Artificial Sequence
  Description of Artificial Sequence: Synthetic oligonucleotide
ugaguucuagccgcaccuc

SEQ ID NO: 2149329 - RNA, 19 nt, Artificial Sequence
  Description of Artificial Sequence: Synthetic oligonucleotide
uacugccgguuggagaaga

SEQ ID NO: 2149330 - RNA, 19 nt, Artificial Sequence
  Description of Artificial Sequence: Synthetic oligonucleotide
ugacaagguugcugcuagu

SEQ ID NO: 2149331 - RNA, 19 nt, Artificial Sequence
  Description of Artificial Sequence: Synthetic oligonucleotide
ggcuucgcaguagacuggg

SEQ ID NO: 2149332 - RNA, 19 nt, Artificial Sequence
  Description of Artificial Sequence: Synthetic oligonucleotide
guuggcuucgcaguagacu

SEQ ID NO: 2149333 - RNA, 19 nt, Artificial Sequence
  Description of Artificial Sequence: Synthetic oligonucleotide
gacgacaagugaacccaca

SEQ ID NO: 2149334 - RNA, 19 nt, Artificial Sequence
  Description of Artificial Sequence: Synthetic oligonucleotide
ggguaacaggggauggagg

SEQ ID NO: 2149335 - RNA, 19 nt, Artificial Sequence
  Description of Artificial Sequence: Synthetic oligonucleotide
agaaugacuucugguugau

SEQ ID NO: 2149336 - RNA, 19 nt, Artificial Sequence
  Description of Artificial Sequence: Synthetic oligonucleotide
gcuguagaacccagagagg

SEQ ID NO: 2149337 - RNA, 19 nt, Artificial Sequence
  Description of Artificial Sequence: Synthetic oligonucleotide
ucggucauuugcagcucua

SEQ ID NO: 2149338 - RNA, 19 nt, Artificial Sequence
  Description of Artificial Sequence: Synthetic oligonucleotide
cugaguucuagccgcaccu

SEQ ID NO: 2149339 - RNA, 19 nt, Artificial Sequence
  Description of Artificial Sequence: Synthetic oligonucleotide
acucggucauuugcagcuc

SEQ ID NO: 2149340 - RNA, 19 nt, Artificial Sequence
  Description of Artificial Sequence: Synthetic oligonucleotide
acacuaggacuagacucca

SEQ ID NO: 2149341 - RNA, 19 nt, Artificial Sequence
  Description of Artificial Sequence: Synthetic oligonucleotide
ucaaagcguuugccacaga

SEQ ID NO: 2149342 - RNA, 19 nt, Artificial Sequence
  Description of Artificial Sequence: Synthetic oligonucleotide
ucggggcagcagaaugacu

SEQ ID NO: 2149343 - RNA, 19 nt, Artificial Sequence
  Description of Artificial Sequence: Synthetic oligonucleotide
agcgagcacagaauucaca

SEQ ID NO: 2149344 - RNA, 19 nt, Artificial Sequence
  Description of Artificial Sequence: Synthetic oligonucleotide
aggagauugcagggguuca

SEQ ID NO: 2149345 - RNA, 19 nt, Artificial Sequence
  Description of Artificial Sequence: Synthetic oligonucleotide
cagggcuguccagagacuc

SEQ ID NO: 2149346 - RNA, 19 nt, Artificial Sequence
  Description of Artificial Sequence: Synthetic oligonucleotide
gcguuugccacagaauuca

SEQ ID NO: 2149347 - RNA, 19 nt, Artificial Sequence
  Description of Artificial Sequence: Synthetic oligonucleotide
caucugguucacugucauc

SEQ ID NO: 2149348 - RNA, 19 nt, Artificial Sequence
  Description of Artificial Sequence: Synthetic oligonucleotide
uucccacaagcuggcucgg

SEQ ID NO: 2149349 - RNA, 19 nt, Artificial Sequence
  Description of Artificial Sequence: Synthetic oligonucleotide
agacuccaaagagccaggu

SEQ ID NO: 2149350 - RNA, 19 nt, Artificial Sequence
  Description of Artificial Sequence: Synthetic oligonucleotide
cccuccuuagguguguggg

SEQ ID NO: 2149351 - RNA, 19 nt, Artificial Sequence
  Description of Artificial Sequence: Synthetic oligonucleotide
cacaggggaagcgcagggc

SEQ ID NO: 2149352 - RNA, 19 nt, Artificial Sequence
  Description of Artificial Sequence: Synthetic oligonucleotide
acuagacuccaaagagcca

SEQ ID NO: 2149353 - RNA, 19 nt, Artificial Sequence
  Description of Artificial Sequence: Synthetic oligonucleotide
ccaaagagccaggugacuc

SEQ ID NO: 2149354 - RNA, 19 nt, Artificial Sequence
  Description of Artificial Sequence: Synthetic oligonucleotide
agggagaauuguagguacu

SEQ ID NO: 2149355 - RNA, 19 nt, Artificial Sequence
  Description of Artificial Sequence: Synthetic oligonucleotide
cugcagugagcugccacac

SEQ ID NO: 2149356 - RNA, 19 nt, Artificial Sequence
  Description of Artificial Sequence: Synthetic oligonucleotide
ucccacaagcuggcucggg

SEQ ID NO: 2149357 - RNA, 19 nt, Artificial Sequence
  Description of Artificial Sequence: Synthetic oligonucleotide
ggugacuccugugugggga

SEQ ID NO: 2149358 - RNA, 19 nt, Artificial Sequence
  Description of Artificial Sequence: Synthetic oligonucleotide
cccacaagcuggcucgggg

SEQ ID NO: 2149359 - RNA, 19 nt, Artificial Sequence
  Description of Artificial Sequence: Synthetic oligonucleotide
gcuaguacggaaagagcga

SEQ ID NO: 2149360 - RNA, 19 nt, Artificial Sequence
  Description of Artificial Sequence: Synthetic oligonucleotide
uugcgucggugccaauuua

SEQ ID NO: 2149361 - RNA, 19 nt, Artificial Sequence
  Description of Artificial Sequence: Synthetic oligonucleotide
ccacaagcuggcucggggc

SEQ ID NO: 2149362 - RNA, 19 nt, Artificial Sequence
  Description of Artificial Sequence: Synthetic oligonucleotide
gcaugcuugcgucggugcc

SEQ ID NO: 2149363 - RNA, 19 nt, Artificial Sequence
  Description of Artificial Sequence: Synthetic oligonucleotide
cucaggagauugcaggggu

SEQ ID NO: 2149364 - RNA, 19 nt, Artificial Sequence
  Description of Artificial Sequence: Synthetic oligonucleotide
gugaacccacauaucucac

SEQ ID NO: 2149365 - RNA, 19 nt, Artificial Sequence
  Description of Artificial Sequence: Synthetic oligonucleotide
uuguagguacuggcgggau

SEQ ID NO: 2149366 - RNA, 19 nt, Artificial Sequence
  Description of Artificial Sequence: Synthetic oligonucleotide
gguggcuuaggaacaucug

SEQ ID NO: 2149367 - RNA, 19 nt, Artificial Sequence
  Description of Artificial Sequence: Synthetic oligonucleotide
cagcuguagaacccagaga

SEQ ID NO: 2149368 - RNA, 19 nt, Artificial Sequence
  Description of Artificial Sequence: Synthetic oligonucleotide
cuacugaguucuagccgca

SEQ ID NO: 2149369 - RNA, 19 nt, Artificial Sequence
  Description of Artificial Sequence: Synthetic oligonucleotide
cuacagaggucugaggggu

SEQ ID NO: 2149370 - RNA, 19 nt, Artificial Sequence
  Description of Artificial Sequence: Synthetic oligonucleotide
uggguggcuuuugcugcag

SEQ ID NO: 2149371 - RNA, 19 nt, Artificial Sequence
  Description of Artificial Sequence: Synthetic oligonucleotide
ccaauuuagagaggccuuc

SEQ ID NO: 2149372 - RNA, 19 nt, Artificial Sequence
  Description of Artificial Sequence: Synthetic oligonucleotide
ugaguccaaucugggcagu

SEQ ID NO: 2149373 - RNA, 19 nt, Artificial Sequence
  Description of Artificial Sequence: Synthetic oligonucleotide
guaucacuaugcagcuuca

SEQ ID NO: 2149374 - RNA, 19 nt, Artificial Sequence
  Description of Artificial Sequence: Synthetic oligonucleotide
agcaggguuggguggcuuu

SEQ ID NO: 2149375 - RNA, 19 nt, Artificial Sequence
  Description of Artificial Sequence: Synthetic oligonucleotide
uggcgggaucucucccucc

SEQ ID NO: 2149376 - RNA, 19 nt, Artificial Sequence
  Description of Artificial Sequence: Synthetic oligonucleotide
cccggguaucacuaugcag

SEQ ID NO: 2149377 - RNA, 19 nt, Artificial Sequence
  Description of Artificial Sequence: Synthetic oligonucleotide
cgucggugccaauuuagag

SEQ ID NO: 2149378 - RNA, 19 nt, Artificial Sequence
  Description of Artificial Sequence: Synthetic oligonucleotide
aagagccaggugacuccug

SEQ ID NO: 2149379 - RNA, 19 nt, Artificial Sequence
  Description of Artificial Sequence: Synthetic oligonucleotide
gagaggccuucugacgaca

SEQ ID NO: 2149380 - RNA, 19 nt, Artificial Sequence
  Description of Artificial Sequence: Synthetic oligonucleotide
gcuguccagagacucgguc

SEQ ID NO: 2149381 - RNA, 19 nt, Artificial Sequence
  Description of Artificial Sequence: Synthetic oligonucleotide
auacugccgguuggagaag

SEQ ID NO: 2149382 - RNA, 19 nt, Artificial Sequence
  Description of Artificial Sequence: Synthetic oligonucleotide
gguacuggcgggaucucuc

SEQ ID NO: 2149383 - RNA, 19 nt, Artificial Sequence
  Description of Artificial Sequence: Synthetic oligonucleotide
ggcagcagaaugacuucug

SEQ ID NO: 2149384 - RNA, 19 nt, Artificial Sequence
  Description of Artificial Sequence: Synthetic oligonucleotide
aucccagguuggcuucgca

SEQ ID NO: 2149385 - RNA, 19 nt, Artificial Sequence
  Description of Artificial Sequence: Synthetic oligonucleotide
agguacuggcgggaucucu

SEQ ID NO: 2149386 - RNA, 19 nt, Artificial Sequence
  Description of Artificial Sequence: Synthetic oligonucleotide
ggguccuacugaguucuag

SEQ ID NO: 2149387 - RNA, 19 nt, Artificial Sequence
  Description of Artificial Sequence: Synthetic oligonucleotide
uagucccggguaucacuau

SEQ ID NO: 2149388 - RNA, 19 nt, Artificial Sequence
  Description of Artificial Sequence: Synthetic oligonucleotide
gucuagaaccccagguugu

SEQ ID NO: 2149389 - RNA, 19 nt, Artificial Sequence
  Description of Artificial Sequence: Synthetic oligonucleotide
cuguugaaggggcaggauu

SEQ ID NO: 2149390 - RNA, 19 nt, Artificial Sequence
  Description of Artificial Sequence: Synthetic oligonucleotide
gguccaugggcuggcauca

SEQ ID NO: 2149391 - RNA, 19 nt, Artificial Sequence
  Description of Artificial Sequence: Synthetic oligonucleotide
cuccuuaggugugugggua

SEQ ID NO: 2149392 - RNA, 19 nt, Artificial Sequence
  Description of Artificial Sequence: Synthetic oligonucleotide
cacagauguagucccgggu

SEQ ID NO: 2149393 - RNA, 19 nt, Artificial Sequence
  Description of Artificial Sequence: Synthetic oligonucleotide
ggacuucccacaagcuggc

SEQ ID NO: 2149394 - RNA, 19 nt, Artificial Sequence
  Description of Artificial Sequence: Synthetic oligonucleotide
gagguggcuuaggaacauc

SEQ ID NO: 2149395 - RNA, 19 nt, Artificial Sequence
  Description of Artificial Sequence: Synthetic oligonucleotide
ggaagucgcaaggcaucag

SEQ ID NO: 2149396 - RNA, 19 nt, Artificial Sequence
  Description of Artificial Sequence: Synthetic oligonucleotide
ggcuuuugcugcagugagc

SEQ ID NO: 2149397 - RNA, 19 nt, Artificial Sequence
  Description of Artificial Sequence: Synthetic oligonucleotide
gggcaguauccucauccca

SEQ ID NO: 2149398 - RNA, 19 nt, Artificial Sequence
  Description of Artificial Sequence: Synthetic oligonucleotide
cugaaucccuggggucuag

SEQ ID NO: 2149399 - RNA, 19 nt, Artificial Sequence
  Description of Artificial Sequence: Synthetic oligonucleotide
augcuugcgucggugccaa

SEQ ID NO: 2149400 - RNA, 19 nt, Artificial Sequence
  Description of Artificial Sequence: Synthetic oligonucleotide
gcagggguucagcagcaga

SEQ ID NO: 2149401 - RNA, 19 nt, Artificial Sequence
  Description of Artificial Sequence: Synthetic oligonucleotide
ccccagguuguaaagagcu

SEQ ID NO: 2149402 - RNA, 19 nt, Artificial Sequence
  Description of Artificial Sequence: Synthetic oligonucleotide
cuagaaccccagguuguaa

SEQ ID NO: 2149403 - RNA, 19 nt, Artificial Sequence
  Description of Artificial Sequence: Synthetic oligonucleotide
agguugcugcuaguacgga

SEQ ID NO: 2149404 - RNA, 19 nt, Artificial Sequence
  Description of Artificial Sequence: Synthetic oligonucleotide
cuugcgucggugccaauuu

SEQ ID NO: 2149405 - RNA, 19 nt, Artificial Sequence
  Description of Artificial Sequence: Synthetic oligonucleotide
gggaagucgcaaggcauca

SEQ ID NO: 2149406 - RNA, 19 nt, Artificial Sequence
  Description of Artificial Sequence: Synthetic oligonucleotide
ggggauggagguggcuuag

SEQ ID NO: 2149407 - RNA, 19 nt, Artificial Sequence
  Description of Artificial Sequence: Synthetic oligonucleotide
gucuguggaugacaagguu

SEQ ID NO: 2149408 - RNA, 19 nt, Artificial Sequence
  Description of Artificial Sequence: Synthetic oligonucleotide
cagauguagucccggguau

SEQ ID NO: 2149409 - RNA, 19 nt, Artificial Sequence
  Description of Artificial Sequence: Synthetic oligonucleotide
ggauucgucuguggaugac

SEQ ID NO: 2149410 - RNA, 19 nt, Artificial Sequence
  Description of Artificial Sequence: Synthetic oligonucleotide
ggaaaggcuuggccccuca

SEQ ID NO: 2149411 - RNA, 19 nt, Artificial Sequence
  Description of Artificial Sequence: Synthetic oligonucleotide
uagguacuggcgggaucuc

SEQ ID NO: 2149412 - RNA, 19 nt, Artificial Sequence
  Description of Artificial Sequence: Synthetic oligonucleotide
cgguuggagaagauccuuc

SEQ ID NO: 2149413 - RNA, 19 nt, Artificial Sequence
  Description of Artificial Sequence: Synthetic oligonucleotide
agccgcaccucagcuucug

SEQ ID NO: 2149414 - RNA, 19 nt, Artificial Sequence
  Description of Artificial Sequence: Synthetic oligonucleotide
gaguccaaucugggcagua

SEQ ID NO: 2149415 - RNA, 19 nt, Artificial Sequence
  Description of Artificial Sequence: Synthetic oligonucleotide
cucccuccuuaggugugug

SEQ ID NO: 2149416 - RNA, 19 nt, Artificial Sequence
  Description of Artificial Sequence: Synthetic oligonucleotide
cacuaggacuagacuccaa

SEQ ID NO: 2149417 - RNA, 19 nt, Artificial Sequence
  Description of Artificial Sequence: Synthetic oligonucleotide
cagcucuacagaggucuga

SEQ ID NO: 2149418 - RNA, 19 nt, Artificial Sequence
  Description of Artificial Sequence: Synthetic oligonucleotide
ggcuuaggaacaucugguu

SEQ ID NO: 2149419 - RNA, 19 nt, Artificial Sequence
  Description of Artificial Sequence: Synthetic oligonucleotide
gcucggggcagcagaauga

SEQ ID NO: 2149420 - RNA, 19 nt, Artificial Sequence
  Description of Artificial Sequence: Synthetic oligonucleotide
gcagcucuacagaggucug

SEQ ID NO: 2149421 - RNA, 19 nt, Artificial Sequence
  Description of Artificial Sequence: Synthetic oligonucleotide
caguagacugggccugacu

SEQ ID NO: 2149422 - RNA, 19 nt, Artificial Sequence
  Description of Artificial Sequence: Synthetic oligonucleotide
guagguccaugggcuggca

SEQ ID NO: 2149423 - RNA, 19 nt, Artificial Sequence
  Description of Artificial Sequence: Synthetic oligonucleotide
gcgucggugccaauuuaga

SEQ ID NO: 2149424 - RNA, 19 nt, Artificial Sequence
  Description of Artificial Sequence: Synthetic oligonucleotide
cugagggguccuacugagu

SEQ ID NO: 2149425 - RNA, 19 nt, Artificial Sequence
  Description of Artificial Sequence: Synthetic oligonucleotide
ggguuggguggcuuuugcu

SEQ ID NO: 2149426 - RNA, 19 nt, Artificial Sequence
  Description of Artificial Sequence: Synthetic oligonucleotide
ggcgggaucucucccuccu

SEQ ID NO: 2149427 - RNA, 19 nt, Artificial Sequence
  Description of Artificial Sequence: Synthetic oligonucleotide
gcacaaggacuagggagaa

SEQ ID NO: 2149428 - RNA, 19 nt, Artificial Sequence
  Description of Artificial Sequence: Synthetic oligonucleotide
guccaugggcuggcaucac

SEQ ID NO: 2149429 - RNA, 19 nt, Artificial Sequence
  Description of Artificial Sequence: Synthetic oligonucleotide
cggucauuugcagcucuac

SEQ ID NO: 2149430 - RNA, 19 nt, Artificial Sequence
  Description of Artificial Sequence: Synthetic oligonucleotide
gccaauuuagagaggccuu

SEQ ID NO: 2149431 - RNA, 19 nt, Artificial Sequence
  Description of Artificial Sequence: Synthetic oligonucleotide
cgacaagugaacccacaua

SEQ ID NO: 2149432 - RNA, 19 nt, Artificial Sequence
  Description of Artificial Sequence: Synthetic oligonucleotide
cggugccaauuuagagagg

SEQ ID NO: 2149433 - RNA, 19 nt, Artificial Sequence
  Description of Artificial Sequence: Synthetic oligonucleotide
ggggaagcgcagggcagca

SEQ ID NO: 2149434 - RNA, 19 nt, Artificial Sequence
  Description of Artificial Sequence: Synthetic oligonucleotide
cggggcagcagaaugacuu

SEQ ID NO: 2149435 - RNA, 19 nt, Artificial Sequence
  Description of Artificial Sequence: Synthetic oligonucleotide
ccuccuuaggugugugggu

SEQ ID NO: 2149436 - RNA, 19 nt, Artificial Sequence
  Description of Artificial Sequence: Synthetic oligonucleotide
gccgcaccucagcuucuga

SEQ ID NO: 2149437 - RNA, 19 nt, Artificial Sequence
  Description of Artificial Sequence: Synthetic oligonucleotide
ggagguggcuuaggaacau

SEQ ID NO: 2149438 - RNA, 19 nt, Artificial Sequence
  Description of Artificial Sequence: Synthetic oligonucleotide
gcuugcgucggugccaauu

SEQ ID NO: 2149439 - RNA, 19 nt, Artificial Sequence
  Description of Artificial Sequence: Synthetic oligonucleotide
gccgguuggagaagauccu

SEQ ID NO: 2149440 - RNA, 19 nt, Artificial Sequence
  Description of Artificial Sequence: Synthetic oligonucleotide
cggguaucacuaugcagcu

SEQ ID NO: 2149441 - RNA, 19 nt, Artificial Sequence
  Description of Artificial Sequence: Synthetic oligonucleotide
cacaaggacuagggagaau

SEQ ID NO: 2149442 - RNA, 19 nt, Artificial Sequence
  Description of Artificial Sequence: Synthetic oligonucleotide
ccgcaccucagcuucugau

SEQ ID NO: 2149443 - RNA, 19 nt, Artificial Sequence
  Description of Artificial Sequence: Synthetic oligonucleotide
gcaucacugaguggcucuu

SEQ ID NO: 2149444 - RNA, 19 nt, Artificial Sequence
  Description of Artificial Sequence: Synthetic oligonucleotide
ggguaucacuaugcagcuu

SEQ ID NO: 2149445 - RNA, 19 nt, Artificial Sequence
  Description of Artificial Sequence: Synthetic oligonucleotide
cuuggccccucaggagauu

SEQ ID NO: 2149446 - RNA, 19 nt, Artificial Sequence
  Description of Artificial Sequence: Synthetic oligonucleotide
gccugacucccagggcugu

SEQ ID NO: 2149447 - RNA, 19 nt, Artificial Sequence
  Description of Artificial Sequence: Synthetic oligonucleotide
ccgguuggagaagauccuu

SEQ ID NO: 2149448 - RNA, 19 nt, Artificial Sequence
  Description of Artificial Sequence: Synthetic oligonucleotide
gcgggaucucucccuccuu

SEQ ID NO: 2149449 - RNA, 19 nt, Artificial Sequence
  Description of Artificial Sequence: Synthetic oligonucleotide
gggguccuacugaguucua

SEQ ID NO: 2149450 - RNA, 19 nt, Artificial Sequence
  Description of Artificial Sequence: Synthetic oligonucleotide
aaugguauagguaaaaguc

SEQ ID NO: 2149451 - RNA, 19 nt, Artificial Sequence
  Description of Artificial Sequence: Synthetic oligonucleotide
aaaggugggaaccugagug

SEQ ID NO: 2149452 - RNA, 19 nt, Artificial Sequence
  Description of Artificial Sequence: Synthetic oligonucleotide
augaaucugguguagauac

SEQ ID NO: 2149453 - RNA, 19 nt, Artificial Sequence
  Description of Artificial Sequence: Synthetic oligonucleotide
uaaaagucgagccagcccc

SEQ ID NO: 2149454 - RNA, 19 nt, Artificial Sequence
  Description of Artificial Sequence: Synthetic oligonucleotide
auuggcaugaaucuggugu

SEQ ID NO: 2149455 - RNA, 19 nt, Artificial Sequence
  Description of Artificial Sequence: Synthetic oligonucleotide
acggcugauacucugaugg

SEQ ID NO: 2149456 - RNA, 19 nt, Artificial Sequence
  Description of Artificial Sequence: Synthetic oligonucleotide
agcaccugaauacacaagg

SEQ ID NO: 2149457 - RNA, 19 nt, Artificial Sequence
  Description of Artificial Sequence: Synthetic oligonucleotide
acacauguuggccagagag

SEQ ID NO: 2149458 - RNA, 19 nt, Artificial Sequence
  Description of Artificial Sequence: Synthetic oligonucleotide
cuaguaagcaccugaauac

SEQ ID NO: 2149459 - RNA, 19 nt, Artificial Sequence
  Description of Artificial Sequence: Synthetic oligonucleotide
acagauaccucacggacgg

SEQ ID NO: 2149460 - RNA, 19 nt, Artificial Sequence
  Description of Artificial Sequence: Synthetic oligonucleotide
auaggggaccucuagagag

SEQ ID NO: 2149461 - RNA, 19 nt, Artificial Sequence
  Description of Artificial Sequence: Synthetic oligonucleotide
ugcucugugaccauagucu

SEQ ID NO: 2149462 - RNA, 19 nt, Artificial Sequence
  Description of Artificial Sequence: Synthetic oligonucleotide
aagucuguccacuggaaug

SEQ ID NO: 2149463 - RNA, 19 nt, Artificial Sequence
  Description of Artificial Sequence: Synthetic oligonucleotide
ugagugaccacccuccagc

SEQ ID NO: 2149464 - RNA, 19 nt, Artificial Sequence
  Description of Artificial Sequence: Synthetic oligonucleotide
guugugaggacacacccgg

SEQ ID NO: 2149465 - RNA, 19 nt, Artificial Sequence
  Description of Artificial Sequence: Synthetic oligonucleotide
cugaugauuggcaugaauc

SEQ ID NO: 2149466 - RNA, 19 nt, Artificial Sequence
  Description of Artificial Sequence: Synthetic oligonucleotide
ugucacuucacgccgacug

SEQ ID NO: 2149467 - RNA, 19 nt, Artificial Sequence
  Description of Artificial Sequence: Synthetic oligonucleotide
agucgagccagccccaucc

SEQ ID NO: 2149468 - RNA, 19 nt, Artificial Sequence
  Description of Artificial Sequence: Synthetic oligonucleotide
ugaugauuggcaugaaucu

SEQ ID NO: 2149469 - RNA, 19 nt, Artificial Sequence
  Description of Artificial Sequence: Synthetic oligonucleotide
cuuuaggaagguuuccacg

SEQ ID NO: 2149470 - RNA, 19 nt, Artificial Sequence
  Description of Artificial Sequence: Synthetic oligonucleotide
cucacuagggcccaggggc

SEQ ID NO: 2149471 - RNA, 19 nt, Artificial Sequence
  Description of Artificial Sequence: Synthetic oligonucleotide
agucacagauaccucacgg

SEQ ID NO: 2149472 - RNA, 19 nt, Artificial Sequence
  Description of Artificial Sequence: Synthetic oligonucleotide
agauccaaggcagaggaac

SEQ ID NO: 2149473 - RNA, 19 nt, Artificial Sequence
  Description of Artificial Sequence: Synthetic oligonucleotide
acuaguaagcaccugaaua

SEQ ID NO: 2149474 - RNA, 19 nt, Artificial Sequence
  Description of Artificial Sequence: Synthetic oligonucleotide
ugguauagguaaaagucga

SEQ ID NO: 2149475 - RNA, 19 nt, Artificial Sequence
  Description of Artificial Sequence: Synthetic oligonucleotide
agauaggggaccucuagag

SEQ ID NO: 2149476 - RNA, 19 nt, Artificial Sequence
  Description of Artificial Sequence: Synthetic oligonucleotide
aaugucacuucacgccgac

SEQ ID NO: 2149477 - RNA, 19 nt, Artificial Sequence
  Description of Artificial Sequence: Synthetic oligonucleotide
uguagauacugcauucgga

SEQ ID NO: 2149478 - RNA, 19 nt, Artificial Sequence
  Description of Artificial Sequence: Synthetic oligonucleotide
uagguaaaagucgagccag

SEQ ID NO: 2149479 - RNA, 19 nt, Artificial Sequence
  Description of Artificial Sequence: Synthetic oligonucleotide
uguugugaggacacacccg

SEQ ID NO: 2149480 - RNA, 19 nt, Artificial Sequence
  Description of Artificial Sequence: Synthetic oligonucleotide
uuccacgaggcucacaggc

SEQ ID NO: 2149481 - RNA, 19 nt, Artificial Sequence
  Description of Artificial Sequence: Synthetic oligonucleotide
augguauagguaaaagucg

SEQ ID NO: 2149482 - RNA, 19 nt, Artificial Sequence
  Description of Artificial Sequence: Synthetic oligonucleotide
agauacugcauucggaggu

SEQ ID NO: 2149483 - RNA, 19 nt, Artificial Sequence
  Description of Artificial Sequence: Synthetic oligonucleotide
auagguaaaagucgagcca

SEQ ID NO: 2149484 - RNA, 19 nt, Artificial Sequence
  Description of Artificial Sequence: Synthetic oligonucleotide
auacacaagguccagcccu

SEQ ID NO: 2149485 - RNA, 19 nt, Artificial Sequence
  Description of Artificial Sequence: Synthetic oligonucleotide
cuuacgacagucacagcag

SEQ ID NO: 2149486 - RNA, 19 nt, Artificial Sequence
  Description of Artificial Sequence: Synthetic oligonucleotide
uguagacggaggcagguac

SEQ ID NO: 2149487 - RNA, 19 nt, Artificial Sequence
  Description of Artificial Sequence: Synthetic oligonucleotide
augauuggcaugaaucugg

SEQ ID NO: 2149488 - RNA, 19 nt, Artificial Sequence
  Description of Artificial Sequence: Synthetic oligonucleotide
agcgucuccagauagggga

SEQ ID NO: 2149489 - RNA, 19 nt, Artificial Sequence
  Description of Artificial Sequence: Synthetic oligonucleotide
aaccugagugaccacccuc

SEQ ID NO: 2149490 - RNA, 19 nt, Artificial Sequence
  Description of Artificial Sequence: Synthetic oligonucleotide
aucgguaccaucuggggcu

SEQ ID NO: 2149491 - RNA, 19 nt, Artificial Sequence
  Description of Artificial Sequence: Synthetic oligonucleotide
ugugcgcuugcacaggggc

SEQ ID NO: 2149492 - RNA, 19 nt, Artificial Sequence
  Description of Artificial Sequence: Synthetic oligonucleotide
ucggcaaggagccacugca

SEQ ID NO: 2149493 - RNA, 19 nt, Artificial Sequence
  Description of Artificial Sequence: Synthetic oligonucleotide
aguuucugggcccuuacga

SEQ ID NO: 2149494 - RNA, 19 nt, Artificial Sequence
  Description of Artificial Sequence: Synthetic oligonucleotide
agucacagcagcauucucg

SEQ ID NO: 2149495 - RNA, 19 nt, Artificial Sequence
  Description of Artificial Sequence: Synthetic oligonucleotide
guauagguaaaagucgagc

SEQ ID NO: 2149496 - RNA, 19 nt, Artificial Sequence
  Description of Artificial Sequence: Synthetic oligonucleotide
ugacaucgguaccaucugg

SEQ ID NO: 2149497 - RNA, 19 nt, Artificial Sequence
  Description of Artificial Sequence: Synthetic oligonucleotide
aagcaguuccugaugauug

SEQ ID NO: 2149498 - RNA, 19 nt, Artificial Sequence
  Description of Artificial Sequence: Synthetic oligonucleotide
uaagcaccugaauacacaa

SEQ ID NO: 2149499 - RNA, 19 nt, Artificial Sequence
  Description of Artificial Sequence: Synthetic oligonucleotide
ucugugaccauagucugca

SEQ ID NO: 2149500 - RNA, 19 nt, Artificial Sequence
  Description of Artificial Sequence: Synthetic oligonucleotide
cacagauaccucacggacg

SEQ ID NO: 2149501 - RNA, 19 nt, Artificial Sequence
  Description of Artificial Sequence: Synthetic oligonucleotide
ugcauccgucugaugaugg

SEQ ID NO: 2149502 - RNA, 19 nt, Artificial Sequence
  Description of Artificial Sequence: Synthetic oligonucleotide
ugugaggacacacccggga

SEQ ID NO: 2149503 - RNA, 19 nt, Artificial Sequence
  Description of Artificial Sequence: Synthetic oligonucleotide
guaaaagucgagccagccc

SEQ ID NO: 2149504 - RNA, 19 nt, Artificial Sequence
  Description of Artificial Sequence: Synthetic oligonucleotide
gacaucgguaccaucuggg

SEQ ID NO: 2149505 - RNA, 19 nt, Artificial Sequence
  Description of Artificial Sequence: Synthetic oligonucleotide
ucucacuagggcccagggg

SEQ ID NO: 2149506 - RNA, 19 nt, Artificial Sequence
  Description of Artificial Sequence: Synthetic oligonucleotide
cacauguuggccagagagg

SEQ ID NO: 2149507 - RNA, 19 nt, Artificial Sequence
  Description of Artificial Sequence: Synthetic oligonucleotide
uucugggcccuuacgacag

SEQ ID NO: 2149508 - RNA, 19 nt, Artificial Sequence
  Description of Artificial Sequence: Synthetic oligonucleotide
ggcaaugucacuucacgcc

SEQ ID NO: 2149509 - RNA, 19 nt, Artificial Sequence
  Description of Artificial Sequence: Synthetic oligonucleotide
uccacuggaaugguauagg

SEQ ID NO: 2149510 - RNA, 19 nt, Artificial Sequence
  Description of Artificial Sequence: Synthetic oligonucleotide
ugggcccuacacauguugg

SEQ ID NO: 2149511 - RNA, 19 nt, Artificial Sequence
  Description of Artificial Sequence: Synthetic oligonucleotide
acaucgguaccaucugggg

SEQ ID NO: 2149512 - RNA, 19 nt, Artificial Sequence
  Description of Artificial Sequence: Synthetic oligonucleotide
aaggugggaaccugaguga

SEQ ID NO: 2149513 - RNA, 19 nt, Artificial Sequence
  Description of Artificial Sequence: Synthetic oligonucleotide
accccucuugcuuagggag

SEQ ID NO: 2149514 - RNA, 19 nt, Artificial Sequence
  Description of Artificial Sequence: Synthetic oligonucleotide
uugacaucgguaccaucug

SEQ ID NO: 2149515 - RNA, 19 nt, Artificial Sequence
  Description of Artificial Sequence: Synthetic oligonucleotide
uuucugggcccuuacgaca

SEQ ID NO: 2149516 - RNA, 19 nt, Artificial Sequence
  Description of Artificial Sequence: Synthetic oligonucleotide
cauggucacuggcaggucg

SEQ ID NO: 2149517 - RNA, 19 nt, Artificial Sequence
  Description of Artificial Sequence: Synthetic oligonucleotide
acccgggaagcgcagacac

SEQ ID NO: 2149518 - RNA, 19 nt, Artificial Sequence
  Description of Artificial Sequence: Synthetic oligonucleotide
ugugaccauagucugcauc

SEQ ID NO: 2149519 - RNA, 19 nt, Artificial Sequence
  Description of Artificial Sequence: Synthetic oligonucleotide
ucuugcuuagggagguuga

SEQ ID NO: 2149520 - RNA, 19 nt, Artificial Sequence
  Description of Artificial Sequence: Synthetic oligonucleotide
ugccacucucacuagggcc

SEQ ID NO: 2149521 - RNA, 19 nt, Artificial Sequence
  Description of Artificial Sequence: Synthetic oligonucleotide
augauggcauggugggccc

SEQ ID NO: 2149522 - RNA, 19 nt, Artificial Sequence
  Description of Artificial Sequence: Synthetic oligonucleotide
caccucucgaagcaguucc

SEQ ID NO: 2149523 - RNA, 19 nt, Artificial Sequence
  Description of Artificial Sequence: Synthetic oligonucleotide
cauucggaggucagguggg

SEQ ID NO: 2149524 - RNA, 19 nt, Artificial Sequence
  Description of Artificial Sequence: Synthetic oligonucleotide
gcaaugucacuucacgccg

SEQ ID NO: 2149525 - RNA, 19 nt, Artificial Sequence
  Description of Artificial Sequence: Synthetic oligonucleotide
cuuggaucuccacagccug

SEQ ID NO: 2149526 - RNA, 19 nt, Artificial Sequence
  Description of Artificial Sequence: Synthetic oligonucleotide
auucucggcaaggagccac

SEQ ID NO: 2149527 - RNA, 19 nt, Artificial Sequence
  Description of Artificial Sequence: Synthetic oligonucleotide
uugcucugugaccauaguc

SEQ ID NO: 2149528 - RNA, 19 nt, Artificial Sequence
  Description of Artificial Sequence: Synthetic oligonucleotide
cacuuggaucuccacagcc

SEQ ID NO: 2149529 - RNA, 19 nt, Artificial Sequence
  Description of Artificial Sequence: Synthetic oligonucleotide
ucgagcaugccacucucac

SEQ ID NO: 2149530 - RNA, 19 nt, Artificial Sequence
  Description of Artificial Sequence: Synthetic oligonucleotide
gcauucggaggucaggugg

SEQ ID NO: 2149531 - RNA, 19 nt, Artificial Sequence
  Description of Artificial Sequence: Synthetic oligonucleotide
gagcaugccacucucacua

SEQ ID NO: 2149532 - RNA, 19 nt, Artificial Sequence
  Description of Artificial Sequence: Synthetic oligonucleotide
gaccucuagagagucgagg

SEQ ID NO: 2149533 - RNA, 19 nt, Artificial Sequence
  Description of Artificial Sequence: Synthetic oligonucleotide
acuguucuccaguguacag

SEQ ID NO: 2149534 - RNA, 19 nt, Artificial Sequence
  Description of Artificial Sequence: Synthetic oligonucleotide
ggaacuaguaagcaccuga

SEQ ID NO: 2149535 - RNA, 19 nt, Artificial Sequence
  Description of Artificial Sequence: Synthetic oligonucleotide
caucgguaccaucuggggc

SEQ ID NO: 2149536 - RNA, 19 nt, Artificial Sequence
  Description of Artificial Sequence: Synthetic oligonucleotide
agcauguccacugugcgcu

SEQ ID NO: 2149537 - RNA, 19 nt, Artificial Sequence
  Description of Artificial Sequence: Synthetic oligonucleotide
ugauuggcaugaaucuggu

SEQ ID NO: 2149538 - RNA, 19 nt, Artificial Sequence
  Description of Artificial Sequence: Synthetic oligonucleotide
ucccugagacuguagaaaa

SEQ ID NO: 2149539 - RNA, 19 nt, Artificial Sequence
  Description of Artificial Sequence: Synthetic oligonucleotide
uacgacagucacagcagca

SEQ ID NO: 2149540 - RNA, 19 nt, Artificial Sequence
  Description of Artificial Sequence: Synthetic oligonucleotide
gagugaccacccuccagcg

SEQ ID NO: 2149541 - RNA, 19 nt, Artificial Sequence
  Description of Artificial Sequence: Synthetic oligonucleotide
auagucugcauccgucuga

SEQ ID NO: 2149542 - RNA, 19 nt, Artificial Sequence
  Description of Artificial Sequence: Synthetic oligonucleotide
agugaccacccuccagcgc

SEQ ID NO: 2149543 - RNA, 19 nt, Artificial Sequence
  Description of Artificial Sequence: Synthetic oligonucleotide
ggggcaaugucacuucacg

SEQ ID NO: 2149544 - RNA, 19 nt, Artificial Sequence
  Description of Artificial Sequence: Synthetic oligonucleotide
aguuccugaugauuggcau

SEQ ID NO: 2149545 - RNA, 19 nt, Artificial Sequence
  Description of Artificial Sequence: Synthetic oligonucleotide
cuguucuccaguguacagg

SEQ ID NO: 2149546 - RNA, 19 nt, Artificial Sequence
  Description of Artificial Sequence: Synthetic oligonucleotide
aggucuuuaggaagguuuc

SEQ ID NO: 2149547 - RNA, 19 nt, Artificial Sequence
  Description of Artificial Sequence: Synthetic oligonucleotide
gauaggggaccucuagaga

SEQ ID NO: 2149548 - RNA, 19 nt, Artificial Sequence
  Description of Artificial Sequence: Synthetic oligonucleotide
agggagcgucuccagauag

SEQ ID NO: 2149549 - RNA, 19 nt, Artificial Sequence
  Description of Artificial Sequence: Synthetic oligonucleotide
cagguuguugugaggacac

SEQ ID NO: 2149550 - RNA, 19 nt, Artificial Sequence
  Description of Artificial Sequence: Synthetic oligonucleotide
guuucugggcccuuacgac

SEQ ID NO: 2149551 - RNA, 19 nt, Artificial Sequence
  Description of Artificial Sequence: Synthetic oligonucleotide
acucugauggaugcuguag

SEQ ID NO: 2149552 - RNA, 19 nt, Artificial Sequence
  Description of Artificial Sequence: Synthetic oligonucleotide
uuggcaugaaucuggugua

SEQ ID NO: 2149553 - RNA, 19 nt, Artificial Sequence
  Description of Artificial Sequence: Synthetic oligonucleotide
cucacggacggugagguug

SEQ ID NO: 2149554 - RNA, 19 nt, Artificial Sequence
  Description of Artificial Sequence: Synthetic oligonucleotide
cuacuguucuccaguguac

SEQ ID NO: 2149555 - RNA, 19 nt, Artificial Sequence
  Description of Artificial Sequence: Synthetic oligonucleotide
cuucacgccgacugccugg

SEQ ID NO: 2149556 - RNA, 19 nt, Artificial Sequence
  Description of Artificial Sequence: Synthetic oligonucleotide
aagcgcagacacugcagca

SEQ ID NO: 2149557 - RNA, 19 nt, Artificial Sequence
  Description of Artificial Sequence: Synthetic oligonucleotide
gguguagauacugcauucg

SEQ ID NO: 2149558 - RNA, 19 nt, Artificial Sequence
  Description of Artificial Sequence: Synthetic oligonucleotide
ugaccauagucugcauccg

SEQ ID NO: 2149559 - RNA, 19 nt, Artificial Sequence
  Description of Artificial Sequence: Synthetic oligonucleotide
ucggaggucaggugggcug

SEQ ID NO: 2149560 - RNA, 19 nt, Artificial Sequence
  Description of Artificial Sequence: Synthetic oligonucleotide
uggcaggucgagcaugcca

SEQ ID NO: 2149561 - RNA, 19 nt, Artificial Sequence
  Description of Artificial Sequence: Synthetic oligonucleotide
agauaccucacggacggug

SEQ ID NO: 2149562 - RNA, 19 nt, Artificial Sequence
  Description of Artificial Sequence: Synthetic oligonucleotide
gguuuuggcaggucuuuag

SEQ ID NO: 2149563 - RNA, 19 nt, Artificial Sequence
  Description of Artificial Sequence: Synthetic oligonucleotide
gaggacacacccgggaagc

SEQ ID NO: 2149564 - RNA, 19 nt, Artificial Sequence
  Description of Artificial Sequence: Synthetic oligonucleotide
gugaccacccuccagcgca

SEQ ID NO: 2149565 - RNA, 19 nt, Artificial Sequence
  Description of Artificial Sequence: Synthetic oligonucleotide
ucugcauccgucugaugau

SEQ ID NO: 2149566 - RNA, 19 nt, Artificial Sequence
  Description of Artificial Sequence: Synthetic oligonucleotide
ggaggcagguacuuggccc

SEQ ID NO: 2149567 - RNA, 19 nt, Artificial Sequence
  Description of Artificial Sequence: Synthetic oligonucleotide
acugcauucggaggucagg

SEQ ID NO: 2149568 - RNA, 19 nt, Artificial Sequence
  Description of Artificial Sequence: Synthetic oligonucleotide
acacccgggaagcgcagac

SEQ ID NO: 2149569 - RNA, 19 nt, Artificial Sequence
  Description of Artificial Sequence: Synthetic oligonucleotide
uacuguucuccaguguaca

SEQ ID NO: 2149570 - RNA, 19 nt, Artificial Sequence
  Description of Artificial Sequence: Synthetic oligonucleotide
uggagccuugggcagcuug

SEQ ID NO: 2149571 - RNA, 19 nt, Artificial Sequence
  Description of Artificial Sequence: Synthetic oligonucleotide
aagucgagccagccccauc

SEQ ID NO: 2149572 - RNA, 19 nt, Artificial Sequence
  Description of Artificial Sequence: Synthetic oligonucleotide
agcagcauucucggcaagg

SEQ ID NO: 2149573 - RNA, 19 nt, Artificial Sequence
  Description of Artificial Sequence: Synthetic oligonucleotide
aggugggaaccugagugac

SEQ ID NO: 2149574 - RNA, 19 nt, Artificial Sequence
  Description of Artificial Sequence: Synthetic oligonucleotide
agccacugcaggguggcgc

SEQ ID NO: 2149575 - RNA, 19 nt, Artificial Sequence
  Description of Artificial Sequence: Synthetic oligonucleotide
cauagucugcauccgucug

SEQ ID NO: 2149576 - RNA, 19 nt, Artificial Sequence
  Description of Artificial Sequence: Synthetic oligonucleotide
uccacgaggcucacaggca

SEQ ID NO: 2149577 - RNA, 19 nt, Artificial Sequence
  Description of Artificial Sequence: Synthetic oligonucleotide
gagguugacaucgguacca

SEQ ID NO: 2149578 - RNA, 19 nt, Artificial Sequence
  Description of Artificial Sequence: Synthetic oligonucleotide
gacagucacagcagcauuc

SEQ ID NO: 2149579 - RNA, 19 nt, Artificial Sequence
  Description of Artificial Sequence: Synthetic oligonucleotide
gucacagauaccucacgga

SEQ ID NO: 2149580 - RNA, 19 nt, Artificial Sequence
  Description of Artificial Sequence: Synthetic oligonucleotide
ugagagggagcgucuccag

SEQ ID NO: 2149581 - RNA, 19 nt, Artificial Sequence
  Description of Artificial Sequence: Synthetic oligonucleotide
gauuggcaugaaucuggug

SEQ ID NO: 2149582 - RNA, 19 nt, Artificial Sequence
  Description of Artificial Sequence: Synthetic oligonucleotide
gagguugagagggagcguc

SEQ ID NO: 2149583 - RNA, 19 nt, Artificial Sequence
  Description of Artificial Sequence: Synthetic oligonucleotide
guugagagggagcgucucc

SEQ ID NO: 2149584 - RNA, 19 nt, Artificial Sequence
  Description of Artificial Sequence: Synthetic oligonucleotide
ucacggacggugagguuga

SEQ ID NO: 2149585 - RNA, 19 nt, Artificial Sequence
  Description of Artificial Sequence: Synthetic oligonucleotide
agguaaaagucgagccagc

SEQ ID NO: 2149586 - RNA, 19 nt, Artificial Sequence
  Description of Artificial Sequence: Synthetic oligonucleotide
ucacgcagugucugcaccu

SEQ ID NO: 2149587 - RNA, 19 nt, Artificial Sequence
  Description of Artificial Sequence: Synthetic oligonucleotide
ugcauucggaggucaggug

SEQ ID NO: 2149588 - RNA, 19 nt, Artificial Sequence
  Description of Artificial Sequence: Synthetic oligonucleotide
cuacacauguuggccagag

SEQ ID NO: 2149589 - RNA, 19 nt, Artificial Sequence
  Description of Artificial Sequence: Synthetic oligonucleotide
cucgaagcaguuccugaug

SEQ ID NO: 2149590 - RNA, 19 nt, Artificial Sequence
  Description of Artificial Sequence: Synthetic oligonucleotide
ccuuacgacagucacagca

SEQ ID NO: 2149591 - RNA, 19 nt, Artificial Sequence
  Description of Artificial Sequence: Synthetic oligonucleotide
ggagcgucuccagauaggg

SEQ ID NO: 2149592 - RNA, 19 nt, Artificial Sequence
  Description of Artificial Sequence: Synthetic oligonucleotide
gccccauccagauccaagg

SEQ ID NO: 2149593 - RNA, 19 nt, Artificial Sequence
  Description of Artificial Sequence: Synthetic oligonucleotide
auaccucacggacggugag

SEQ ID NO: 2149594 - RNA, 19 nt, Artificial Sequence
  Description of Artificial Sequence: Synthetic oligonucleotide
uaggggaccucuagagagu

SEQ ID NO: 2149595 - RNA, 19 nt, Artificial Sequence
  Description of Artificial Sequence: Synthetic oligonucleotide
gcccuuacgacagucacag

SEQ ID NO: 2149596 - RNA, 19 nt, Artificial Sequence
  Description of Artificial Sequence: Synthetic oligonucleotide
ugcuacuguucuccagugu

SEQ ID NO: 2149597 - RNA, 19 nt, Artificial Sequence
  Description of Artificial Sequence: Synthetic oligonucleotide
uucacgccgacugccuggg

SEQ ID NO: 2149598 - RNA, 19 nt, Artificial Sequence
  Description of Artificial Sequence: Synthetic oligonucleotide
cagcuggucacgcaguguc

SEQ ID NO: 2149599 - RNA, 19 nt, Artificial Sequence
  Description of Artificial Sequence: Synthetic oligonucleotide
ucgagccagccccauccag

SEQ ID NO: 2149600 - RNA, 19 nt, Artificial Sequence
  Description of Artificial Sequence: Synthetic oligonucleotide
agcgccagcuggcucacug

SEQ ID NO: 2149601 - RNA, 19 nt, Artificial Sequence
  Description of Artificial Sequence: Synthetic oligonucleotide
ucugcaccucucgaagcag

SEQ ID NO: 2149602 - RNA, 19 nt, Artificial Sequence
  Description of Artificial Sequence: Synthetic oligonucleotide
cacgccgacugccugggcc

SEQ ID NO: 2149603 - RNA, 19 nt, Artificial Sequence
  Description of Artificial Sequence: Synthetic oligonucleotide
gauaccucacggacgguga

SEQ ID NO: 2149604 - RNA, 19 nt, Artificial Sequence
  Description of Artificial Sequence: Synthetic oligonucleotide
gugggaaccugagugacca

SEQ ID NO: 2149605 - RNA, 19 nt, Artificial Sequence
  Description of Artificial Sequence: Synthetic oligonucleotide
gauacugcauucggagguc

SEQ ID NO: 2149606 - RNA, 19 nt, Artificial Sequence
  Description of Artificial Sequence: Synthetic oligonucleotide
uaccucacggacggugagg

SEQ ID NO: 2149607 - RNA, 19 nt, Artificial Sequence
  Description of Artificial Sequence: Synthetic oligonucleotide
gugggcccuacacauguug

SEQ ID NO: 2149608 - RNA, 19 nt, Artificial Sequence
  Description of Artificial Sequence: Synthetic oligonucleotide
cucugauggaugcuguaga

SEQ ID NO: 2149609 - RNA, 19 nt, Artificial Sequence
  Description of Artificial Sequence: Synthetic oligonucleotide
ggcagaggaacuaguaagc

SEQ ID NO: 2149610 - RNA, 19 nt, Artificial Sequence
  Description of Artificial Sequence: Synthetic oligonucleotide
agagaggagcucuccacuu

SEQ ID NO: 2149611 - RNA, 19 nt, Artificial Sequence
  Description of Artificial Sequence: Synthetic oligonucleotide
gguauagguaaaagucgag

SEQ ID NO: 2149612 - RNA, 19 nt, Artificial Sequence
  Description of Artificial Sequence: Synthetic oligonucleotide
gucacgcagugucugcacc

SEQ ID NO: 2149613 - RNA, 19 nt, Artificial Sequence
  Description of Artificial Sequence: Synthetic oligonucleotide
cucuugcuuagggagguug

SEQ ID NO: 2149614 - RNA, 19 nt, Artificial Sequence
  Description of Artificial Sequence: Synthetic oligonucleotide
cuggaugggcccgugcggg

SEQ ID NO: 2149615 - RNA, 19 nt, Artificial Sequence
  Description of Artificial Sequence: Synthetic oligonucleotide
aggggaccucuagagaguc

SEQ ID NO: 2149616 - RNA, 19 nt, Artificial Sequence
  Description of Artificial Sequence: Synthetic oligonucleotide
uggcaugaaucugguguag

SEQ ID NO: 2149617 - RNA, 19 nt, Artificial Sequence
  Description of Artificial Sequence: Synthetic oligonucleotide
aggucgagcaugccacucu

SEQ ID NO: 2149618 - RNA, 19 nt, Artificial Sequence
  Description of Artificial Sequence: Synthetic oligonucleotide
aagcugcuacuguucucca

SEQ ID NO: 2149619 - RNA, 19 nt, Artificial Sequence
  Description of Artificial Sequence: Synthetic oligonucleotide
gacauggucacuggcaggu

SEQ ID NO: 2149620 - RNA, 19 nt, Artificial Sequence
  Description of Artificial Sequence: Synthetic oligonucleotide
uccgucugaugauggcaug

SEQ ID NO: 2149621 - RNA, 19 nt, Artificial Sequence
  Description of Artificial Sequence: Synthetic oligonucleotide
cugagugaccacccuccag

SEQ ID NO: 2149622 - RNA, 19 nt, Artificial Sequence
  Description of Artificial Sequence: Synthetic oligonucleotide
uucucggcaaggagccacu

SEQ ID NO: 2149623 - RNA, 19 nt, Artificial Sequence
  Description of Artificial Sequence: Synthetic oligonucleotide
cugcuacuguucuccagug

SEQ ID NO: 2149624 - RNA, 19 nt, Artificial Sequence
  Description of Artificial Sequence: Synthetic oligonucleotide
gucugcaccucucgaagca

SEQ ID NO: 2149625 - RNA, 19 nt, Artificial Sequence
  Description of Artificial Sequence: Synthetic oligonucleotide
gggcaaugucacuucacgc

SEQ ID NO: 2149626 - RNA, 19 nt, Artificial Sequence
  Description of Artificial Sequence: Synthetic oligonucleotide
aagguccagcccuggucca

SEQ ID NO: 2149627 - RNA, 19 nt, Artificial Sequence
  Description of Artificial Sequence: Synthetic oligonucleotide
agcaugccacucucacuag

SEQ ID NO: 2149628 - RNA, 19 nt, Artificial Sequence
  Description of Artificial Sequence: Synthetic oligonucleotide
ugaccacccuccagcgcag

SEQ ID NO: 2149629 - RNA, 19 nt, Artificial Sequence
  Description of Artificial Sequence: Synthetic oligonucleotide
ugggccaagucuguccacu

SEQ ID NO: 2149630 - RNA, 19 nt, Artificial Sequence
  Description of Artificial Sequence: Synthetic oligonucleotide
cucggcaaggagccacugc

SEQ ID NO: 2149631 - RNA, 19 nt, Artificial Sequence
  Description of Artificial Sequence: Synthetic oligonucleotide
cuggucacgcagugucugc

SEQ ID NO: 2149632 - RNA, 19 nt, Artificial Sequence
  Description of Artificial Sequence: Synthetic oligonucleotide
gguuguugugaggacacac

SEQ ID NO: 2149633 - RNA, 19 nt, Artificial Sequence
  Description of Artificial Sequence: Synthetic oligonucleotide
cacgaggcucacaggcagg

SEQ ID NO: 2149634 - RNA, 19 nt, Artificial Sequence
  Description of Artificial Sequence: Synthetic oligonucleotide
aggggcaaugucacuucac

SEQ ID NO: 2149635 - RNA, 19 nt, Artificial Sequence
  Description of Artificial Sequence: Synthetic oligonucleotide
gcuacuguucuccagugua

SEQ ID NO: 2149636 - RNA, 19 nt, Artificial Sequence
  Description of Artificial Sequence: Synthetic oligonucleotide
acgacagucacagcagcau

SEQ ID NO: 2149637 - RNA, 19 nt, Artificial Sequence
  Description of Artificial Sequence: Synthetic oligonucleotide
aggagcucuccacuuggau

SEQ ID NO: 2149638 - RNA, 19 nt, Artificial Sequence
  Description of Artificial Sequence: Synthetic oligonucleotide
accucacggacggugaggu

SEQ ID NO: 2149639 - RNA, 19 nt, Artificial Sequence
  Description of Artificial Sequence: Synthetic oligonucleotide
uccagauaggggaccucua

SEQ ID NO: 2149640 - RNA, 19 nt, Artificial Sequence
  Description of Artificial Sequence: Synthetic oligonucleotide
caaggcagaggaacuagua

SEQ ID NO: 2149641 - RNA, 19 nt, Artificial Sequence
  Description of Artificial Sequence: Synthetic oligonucleotide
gaccccucuugcuuaggga

SEQ ID NO: 2149642 - RNA, 19 nt, Artificial Sequence
  Description of Artificial Sequence: Synthetic oligonucleotide
ggaaccugagugaccaccc

SEQ ID NO: 2149643 - RNA, 19 nt, Artificial Sequence
  Description of Artificial Sequence: Synthetic oligonucleotide
uagucugcauccgucugau

SEQ ID NO: 2149644 - RNA, 19 nt, Artificial Sequence
  Description of Artificial Sequence: Synthetic oligonucleotide
uggucacgcagugucugca

SEQ ID NO: 2149645 - RNA, 19 nt, Artificial Sequence
  Description of Artificial Sequence: Synthetic oligonucleotide
cauggugggcccuacacau

SEQ ID NO: 2149646 - RNA, 19 nt, Artificial Sequence
  Description of Artificial Sequence: Synthetic oligonucleotide
gggaaccugagugaccacc

SEQ ID NO: 2149647 - RNA, 19 nt, Artificial Sequence
  Description of Artificial Sequence: Synthetic oligonucleotide
cugugcgcuugcacagggg

SEQ ID NO: 2149648 - RNA, 19 nt, Artificial Sequence
  Description of Artificial Sequence: Synthetic oligonucleotide
ccucuagagagucgagggg

SEQ ID NO: 2149649 - RNA, 19 nt, Artificial Sequence
  Description of Artificial Sequence: Synthetic oligonucleotide
ggcagcuugcucugugacc

SEQ ID NO: 2149650 - RNA, 19 nt, Artificial Sequence
  Description of Artificial Sequence: Synthetic oligonucleotide
cacuggaaugguauaggua

SEQ ID NO: 2149651 - RNA, 19 nt, Artificial Sequence
  Description of Artificial Sequence: Synthetic oligonucleotide
aggcagaccccucuugcuu

SEQ ID NO: 2149652 - RNA, 19 nt, Artificial Sequence
  Description of Artificial Sequence: Synthetic oligonucleotide
caggucuuuaggaagguuu

SEQ ID NO: 2149653 - RNA, 19 nt, Artificial Sequence
  Description of Artificial Sequence: Synthetic oligonucleotide
ggcaggucgagcaugccac

SEQ ID NO: 2149654 - RNA, 19 nt, Artificial Sequence
  Description of Artificial Sequence: Synthetic oligonucleotide
gauggaugcuguagacgga

SEQ ID NO: 2149655 - RNA, 19 nt, Artificial Sequence
  Description of Artificial Sequence: Synthetic oligonucleotide
caugaaucugguguagaua

SEQ ID NO: 2149656 - RNA, 19 nt, Artificial Sequence
  Description of Artificial Sequence: Synthetic oligonucleotide
cauccgucugaugauggca

SEQ ID NO: 2149657 - RNA, 19 nt, Artificial Sequence
  Description of Artificial Sequence: Synthetic oligonucleotide
cagcgcaguucugagcagc

SEQ ID NO: 2149658 - RNA, 19 nt, Artificial Sequence
  Description of Artificial Sequence: Synthetic oligonucleotide
caaugucacuucacgccga

SEQ ID NO: 2149659 - RNA, 19 nt, Artificial Sequence
  Description of Artificial Sequence: Synthetic oligonucleotide
aggaacuaguaagcaccug

SEQ ID NO: 2149660 - RNA, 19 nt, Artificial Sequence
  Description of Artificial Sequence: Synthetic oligonucleotide
gggcucaagucagucacag

SEQ ID NO: 2149661 - RNA, 19 nt, Artificial Sequence
  Description of Artificial Sequence: Synthetic oligonucleotide
aaagucgagccagccccau

SEQ ID NO: 2149662 - RNA, 19 nt, Artificial Sequence
  Description of Artificial Sequence: Synthetic oligonucleotide
aggacaguuucugggcccu

SEQ ID NO: 2149663 - RNA, 19 nt, Artificial Sequence
  Description of Artificial Sequence: Synthetic oligonucleotide
cccgaagggaggcagcgcc

SEQ ID NO: 2149664 - RNA, 19 nt, Artificial Sequence
  Description of Artificial Sequence: Synthetic oligonucleotide
cuggaaugguauagguaaa

SEQ ID NO: 2149665 - RNA, 19 nt, Artificial Sequence
  Description of Artificial Sequence: Synthetic oligonucleotide
auccgucugaugauggcau

SEQ ID NO: 2149666 - RNA, 19 nt, Artificial Sequence
  Description of Artificial Sequence: Synthetic oligonucleotide
ggcccuacacauguuggcc

SEQ ID NO: 2149667 - RNA, 19 nt, Artificial Sequence
  Description of Artificial Sequence: Synthetic oligonucleotide
uucggaggucaggugggcu

SEQ ID NO: 2149668 - RNA, 19 nt, Artificial Sequence
  Description of Artificial Sequence: Synthetic oligonucleotide
cuccaguguacagguggcc

SEQ ID NO: 2149669 - RNA, 19 nt, Artificial Sequence
  Description of Artificial Sequence: Synthetic oligonucleotide
cugcauccgucugaugaug

SEQ ID NO: 2149670 - RNA, 19 nt, Artificial Sequence
  Description of Artificial Sequence: Synthetic oligonucleotide
uggucacuggcaggucgag

SEQ ID NO: 2149671 - RNA, 19 nt, Artificial Sequence
  Description of Artificial Sequence: Synthetic oligonucleotide
uggcccgaagggaggcagc

SEQ ID NO: 2149672 - RNA, 19 nt, Artificial Sequence
  Description of Artificial Sequence: Synthetic oligonucleotide
gaccauagucugcauccgu

SEQ ID NO: 2149673 - RNA, 19 nt, Artificial Sequence
  Description of Artificial Sequence: Synthetic oligonucleotide
gggcccuacacauguuggc

SEQ ID NO: 2149674 - RNA, 19 nt, Artificial Sequence
  Description of Artificial Sequence: Synthetic oligonucleotide
gaggaacuaguaagcaccu

SEQ ID NO: 2149675 - RNA, 19 nt, Artificial Sequence
  Description of Artificial Sequence: Synthetic oligonucleotide
gggcccuuacgacagucac

SEQ ID NO: 2149676 - RNA, 19 nt, Artificial Sequence
  Description of Artificial Sequence: Synthetic oligonucleotide
caguucugagcagcacggc

SEQ ID NO: 2149677 - RNA, 19 nt, Artificial Sequence
  Description of Artificial Sequence: Synthetic oligonucleotide
acgcagugucugcaccucu

SEQ ID NO: 2149678 - RNA, 19 nt, Artificial Sequence
  Description of Artificial Sequence: Synthetic oligonucleotide
cccuacacauguuggccag

SEQ ID NO: 2149679 - RNA, 19 nt, Artificial Sequence
  Description of Artificial Sequence: Synthetic oligonucleotide
uggcauggugggcccuaca

SEQ ID NO: 2149680 - RNA, 19 nt, Artificial Sequence
  Description of Artificial Sequence: Synthetic oligonucleotide
gcauccgucugaugauggc

SEQ ID NO: 2149681 - RNA, 19 nt, Artificial Sequence
  Description of Artificial Sequence: Synthetic oligonucleotide
ugcggggcucaagucaguc

SEQ ID NO: 2149682 - RNA, 19 nt, Artificial Sequence
  Description of Artificial Sequence: Synthetic oligonucleotide
aggcagcgccagcuggcuc

SEQ ID NO: 2149683 - RNA, 19 nt, Artificial Sequence
  Description of Artificial Sequence: Synthetic oligonucleotide
ucgguaccaucuggggcug

SEQ ID NO: 2149684 - RNA, 19 nt, Artificial Sequence
  Description of Artificial Sequence: Synthetic oligonucleotide
agacggaggcagguacuug

SEQ ID NO: 2149685 - RNA, 19 nt, Artificial Sequence
  Description of Artificial Sequence: Synthetic oligonucleotide
cugguguagauacugcauu

SEQ ID NO: 2149686 - RNA, 19 nt, Artificial Sequence
  Description of Artificial Sequence: Synthetic oligonucleotide
gcaggguggcgcugcaaag

SEQ ID NO: 2149687 - RNA, 19 nt, Artificial Sequence
  Description of Artificial Sequence: Synthetic oligonucleotide
agucugcauccgucugaug

SEQ ID NO: 2149688 - RNA, 19 nt, Artificial Sequence
  Description of Artificial Sequence: Synthetic oligonucleotide
ccccucuugcuuagggagg

SEQ ID NO: 2149689 - RNA, 19 nt, Artificial Sequence
  Description of Artificial Sequence: Synthetic oligonucleotide
ccgucugaugauggcaugg

SEQ ID NO: 2149690 - RNA, 19 nt, Artificial Sequence
  Description of Artificial Sequence: Synthetic oligonucleotide
ccgggaagcgcagacacug

SEQ ID NO: 2149691 - RNA, 19 nt, Artificial Sequence
  Description of Artificial Sequence: Synthetic oligonucleotide
uguccacugugcgcuugca

SEQ ID NO: 2149692 - RNA, 19 nt, Artificial Sequence
  Description of Artificial Sequence: Synthetic oligonucleotide
acggugagguugacaucgg

SEQ ID NO: 2149693 - RNA, 19 nt, Artificial Sequence
  Description of Artificial Sequence: Synthetic oligonucleotide
auccaaggcagaggaacua

SEQ ID NO: 2149694 - RNA, 19 nt, Artificial Sequence
  Description of Artificial Sequence: Synthetic oligonucleotide
cagucacagcagcauucuc

SEQ ID NO: 2149695 - RNA, 19 nt, Artificial Sequence
  Description of Artificial Sequence: Synthetic oligonucleotide
guggcgcugcaaagguggg

SEQ ID NO: 2149696 - RNA, 19 nt, Artificial Sequence
  Description of Artificial Sequence: Synthetic oligonucleotide
agcgcaguucugagcagca

SEQ ID NO: 2149697 - RNA, 19 nt, Artificial Sequence
  Description of Artificial Sequence: Synthetic oligonucleotide
gggagcgucuccagauagg

SEQ ID NO: 2149698 - RNA, 19 nt, Artificial Sequence
  Description of Artificial Sequence: Synthetic oligonucleotide
gcuggucacgcagugucug

SEQ ID NO: 2149699 - RNA, 19 nt, Artificial Sequence
  Description of Artificial Sequence: Synthetic oligonucleotide
gaaccugagugaccacccu

SEQ ID NO: 2149700 - RNA, 19 nt, Artificial Sequence
  Description of Artificial Sequence: Synthetic oligonucleotide
gagggagcgucuccagaua

SEQ ID NO: 2149701 - RNA, 19 nt, Artificial Sequence
  Description of Artificial Sequence: Synthetic oligonucleotide
ccgugcagguuguugugag

SEQ ID NO: 2149702 - RNA, 19 nt, Artificial Sequence
  Description of Artificial Sequence: Synthetic oligonucleotide
ggacacacccgggaagcgc

SEQ ID NO: 2149703 - RNA, 19 nt, Artificial Sequence
  Description of Artificial Sequence: Synthetic oligonucleotide
gcccuacacauguuggcca

SEQ ID NO: 2149704 - RNA, 19 nt, Artificial Sequence
  Description of Artificial Sequence: Synthetic oligonucleotide
cagagaggagcucuccacu

SEQ ID NO: 2149705 - RNA, 19 nt, Artificial Sequence
  Description of Artificial Sequence: Synthetic oligonucleotide
ggucacgcagugucugcac

SEQ ID NO: 2149706 - RNA, 19 nt, Artificial Sequence
  Description of Artificial Sequence: Synthetic oligonucleotide
agguugacaucgguaccau

SEQ ID NO: 2149707 - RNA, 19 nt, Artificial Sequence
  Description of Artificial Sequence: Synthetic oligonucleotide
cggggcucaagucagucac

SEQ ID NO: 2149708 - RNA, 19 nt, Artificial Sequence
  Description of Artificial Sequence: Synthetic oligonucleotide
cgugcggggcucaagucag

SEQ ID NO: 2149709 - RNA, 19 nt, Artificial Sequence
  Description of Artificial Sequence: Synthetic oligonucleotide
gacaguuucugggcccuua

SEQ ID NO: 2149710 - RNA, 19 nt, Artificial Sequence
  Description of Artificial Sequence: Synthetic oligonucleotide
ggugggaaccugagugacc

SEQ ID NO: 2149711 - RNA, 19 nt, Artificial Sequence
  Description of Artificial Sequence: Synthetic oligonucleotide
agguugagagggagcgucu

SEQ ID NO: 2149712 - RNA, 19 nt, Artificial Sequence
  Description of Artificial Sequence: Synthetic oligonucleotide
cuagggcccaggggcaaug

SEQ ID NO: 2149713 - RNA, 19 nt, Artificial Sequence
  Description of Artificial Sequence: Synthetic oligonucleotide
cagugucugcaccucucga

SEQ ID NO: 2149714 - RNA, 19 nt, Artificial Sequence
  Description of Artificial Sequence: Synthetic oligonucleotide
caagucuguccacuggaau

SEQ ID NO: 2149715 - RNA, 19 nt, Artificial Sequence
  Description of Artificial Sequence: Synthetic oligonucleotide
ccuccagcgcaguucugag

SEQ ID NO: 2149716 - RNA, 19 nt, Artificial Sequence
  Description of Artificial Sequence: Synthetic oligonucleotide
caggucgagcaugccacuc

SEQ ID NO: 2149717 - RNA, 19 nt, Artificial Sequence
  Description of Artificial Sequence: Synthetic oligonucleotide
agguuuccacgaggcucac

SEQ ID NO: 2149718 - RNA, 19 nt, Artificial Sequence
  Description of Artificial Sequence: Synthetic oligonucleotide
cacgcagugucugcaccuc

SEQ ID NO: 2149719 - RNA, 19 nt, Artificial Sequence
  Description of Artificial Sequence: Synthetic oligonucleotide
caggggcaaugucacuuca

SEQ ID NO: 2149720 - RNA, 19 nt, Artificial Sequence
  Description of Artificial Sequence: Synthetic oligonucleotide
ggcgcugcaaaggugggaa

SEQ ID NO: 2149721 - RNA, 19 nt, Artificial Sequence
  Description of Artificial Sequence: Synthetic oligonucleotide
ugauggcauggugggcccu

SEQ ID NO: 2149722 - RNA, 19 nt, Artificial Sequence
  Description of Artificial Sequence: Synthetic oligonucleotide
ggcaugaaucugguguaga

SEQ ID NO: 2149723 - RNA, 19 nt, Artificial Sequence
  Description of Artificial Sequence: Synthetic oligonucleotide
gauggcauggugggcccua

SEQ ID NO: 2149724 - RNA, 19 nt, Artificial Sequence
  Description of Artificial Sequence: Synthetic oligonucleotide
acggacggugagguugaca

SEQ ID NO: 2149725 - RNA, 19 nt, Artificial Sequence
  Description of Artificial Sequence: Synthetic oligonucleotide
cugcauucggaggucaggu

SEQ ID NO: 2149726 - RNA, 19 nt, Artificial Sequence
  Description of Artificial Sequence: Synthetic oligonucleotide
ccacuuggaucuccacagc

SEQ ID NO: 2149727 - RNA, 19 nt, Artificial Sequence
  Description of Artificial Sequence: Synthetic oligonucleotide
augucacuucacgccgacu

SEQ ID NO: 2149728 - RNA, 19 nt, Artificial Sequence
  Description of Artificial Sequence: Synthetic oligonucleotide
caggcacgcagggcgcccg

SEQ ID NO: 2149729 - RNA, 19 nt, Artificial Sequence
  Description of Artificial Sequence: Synthetic oligonucleotide
ucacgccgacugccugggc

SEQ ID NO: 2149730 - RNA, 19 nt, Artificial Sequence
  Description of Artificial Sequence: Synthetic oligonucleotide
cacccaccaccucccugag

SEQ ID NO: 2149731 - RNA, 19 nt, Artificial Sequence
  Description of Artificial Sequence: Synthetic oligonucleotide
gguugagagggagcgucuc

SEQ ID NO: 2149732 - RNA, 19 nt, Artificial Sequence
  Description of Artificial Sequence: Synthetic oligonucleotide
ggcagaccccucuugcuua

SEQ ID NO: 2149733 - RNA, 19 nt, Artificial Sequence
  Description of Artificial Sequence: Synthetic oligonucleotide
gugcacagcuggucacgca

SEQ ID NO: 2149734 - RNA, 19 nt, Artificial Sequence
  Description of Artificial Sequence: Synthetic oligonucleotide
accacccuccagcgcaguu

SEQ ID NO: 2149735 - RNA, 19 nt, Artificial Sequence
  Description of Artificial Sequence: Synthetic oligonucleotide
guagacggaggcagguacu

SEQ ID NO: 2149736 - RNA, 19 nt, Artificial Sequence
  Description of Artificial Sequence: Synthetic oligonucleotide
cagauccaaggcagaggaa

SEQ ID NO: 2149737 - RNA, 19 nt, Artificial Sequence
  Description of Artificial Sequence: Synthetic oligonucleotide
ggucacuggcaggucgagc

SEQ ID NO: 2149738 - RNA, 19 nt, Artificial Sequence
  Description of Artificial Sequence: Synthetic oligonucleotide
gugcgcuugcacaggggca

SEQ ID NO: 2149739 - RNA, 19 nt, Artificial Sequence
  Description of Artificial Sequence: Synthetic oligonucleotide
cuugcucugugaccauagu

SEQ ID NO: 2149740 - RNA, 19 nt, Artificial Sequence
  Description of Artificial Sequence: Synthetic oligonucleotide
gucgagcaugccacucuca

SEQ ID NO: 2149741 - RNA, 19 nt, Artificial Sequence
  Description of Artificial Sequence: Synthetic oligonucleotide
gcacgcagggcgcccgugc

SEQ ID NO: 2149742 - RNA, 19 nt, Artificial Sequence
  Description of Artificial Sequence: Synthetic oligonucleotide
gaugggcccgugcggggcu

SEQ ID NO: 2149743 - RNA, 19 nt, Artificial Sequence
  Description of Artificial Sequence: Synthetic oligonucleotide
ggacggugagguugacauc

SEQ ID NO: 2149744 - RNA, 19 nt, Artificial Sequence
  Description of Artificial Sequence: Synthetic oligonucleotide
gcccgugcagguuguugug

SEQ ID NO: 2149745 - RNA, 19 nt, Artificial Sequence
  Description of Artificial Sequence: Synthetic oligonucleotide
cugcaccucucgaagcagu

SEQ ID NO: 2149746 - RNA, 19 nt, Artificial Sequence
  Description of Artificial Sequence: Synthetic oligonucleotide
ggccagagaggagcucucc

SEQ ID NO: 2149747 - RNA, 19 nt, Artificial Sequence
  Description of Artificial Sequence: Synthetic oligonucleotide
cacuucacgccgacugccu

SEQ ID NO: 2149748 - RNA, 19 nt, Artificial Sequence
  Description of Artificial Sequence: Synthetic oligonucleotide
ccaagucuguccacuggaa

SEQ ID NO: 2149749 - RNA, 19 nt, Artificial Sequence
  Description of Artificial Sequence: Synthetic oligonucleotide
ccucccugagacuguagaa

SEQ ID NO: 2149750 - RNA, 19 nt, Artificial Sequence
  Description of Artificial Sequence: Synthetic oligonucleotide
cuggcucacugccaggguu

SEQ ID NO: 2149751 - RNA, 19 nt, Artificial Sequence
  Description of Artificial Sequence: Synthetic oligonucleotide
ggcccuuacgacagucaca

SEQ ID NO: 2149752 - RNA, 19 nt, Artificial Sequence
  Description of Artificial Sequence: Synthetic oligonucleotide
augggcccgugcggggcuc

SEQ ID NO: 2149753 - RNA, 19 nt, Artificial Sequence
  Description of Artificial Sequence: Synthetic oligonucleotide
gcucuccacuuggaucucc

SEQ ID NO: 2149754 - RNA, 19 nt, Artificial Sequence
  Description of Artificial Sequence: Synthetic oligonucleotide
ccagcgcaguucugagcag

SEQ ID NO: 2149755 - RNA, 19 nt, Artificial Sequence
  Description of Artificial Sequence: Synthetic oligonucleotide
aggcagguacuuggcccga

SEQ ID NO: 2149756 - RNA, 19 nt, Artificial Sequence
  Description of Artificial Sequence: Synthetic oligonucleotide
ccgugcggggcucaaguca

SEQ ID NO: 2149757 - RNA, 19 nt, Artificial Sequence
  Description of Artificial Sequence: Synthetic oligonucleotide
gcaccugaauacacaaggu

SEQ ID NO: 2149758 - RNA, 19 nt, Artificial Sequence
  Description of Artificial Sequence: Synthetic oligonucleotide
gagcagcacggcugauacu

SEQ ID NO: 2149759 - RNA, 19 nt, Artificial Sequence
  Description of Artificial Sequence: Synthetic oligonucleotide
cuguagacggaggcaggua

SEQ ID NO: 2149760 - RNA, 19 nt, Artificial Sequence
  Description of Artificial Sequence: Synthetic oligonucleotide
ccacuggaaugguauaggu

SEQ ID NO: 2149761 - RNA, 19 nt, Artificial Sequence
  Description of Artificial Sequence: Synthetic oligonucleotide
aggcacgcagggcgcccgu

SEQ ID NO: 2149762 - RNA, 19 nt, Artificial Sequence
  Description of Artificial Sequence: Synthetic oligonucleotide
cggacggugagguugacau

SEQ ID NO: 2149763 - RNA, 19 nt, Artificial Sequence
  Description of Artificial Sequence: Synthetic oligonucleotide
cacaagguccagcccuggu

SEQ ID NO: 2149764 - RNA, 19 nt, Artificial Sequence
  Description of Artificial Sequence: Synthetic oligonucleotide
gaggcagcgccagcuggcu

SEQ ID NO: 2149765 - RNA, 19 nt, Artificial Sequence
  Description of Artificial Sequence: Synthetic oligonucleotide
gcaccucucgaagcaguuc

SEQ ID NO: 2149766 - RNA, 19 nt, Artificial Sequence
  Description of Artificial Sequence: Synthetic oligonucleotide
ccacccuccagcgcaguuc

SEQ ID NO: 2149767 - RNA, 19 nt, Artificial Sequence
  Description of Artificial Sequence: Synthetic oligonucleotide
gcuguagacggaggcaggu

SEQ ID NO: 2149768 - RNA, 19 nt, Artificial Sequence
  Description of Artificial Sequence: Synthetic oligonucleotide
gcgcugcaaaggugggaac

SEQ ID NO: 2149769 - RNA, 19 nt, Artificial Sequence
  Description of Artificial Sequence: Synthetic oligonucleotide
cacccgggaagcgcagaca

SEQ ID NO: 2149770 - RNA, 19 nt, Artificial Sequence
  Description of Artificial Sequence: Synthetic oligonucleotide
cgggaagcgcagacacugc

SEQ ID NO: 2149771 - RNA, 19 nt, Artificial Sequence
  Description of Artificial Sequence: Synthetic oligonucleotide
ccugagugaccacccucca

SEQ ID NO: 2149772 - RNA, 19 nt, Artificial Sequence
  Description of Artificial Sequence: Synthetic oligonucleotide
cgucuccagauaggggacc

SEQ ID NO: 2149773 - RNA, 19 nt, Artificial Sequence
  Description of Artificial Sequence: Synthetic oligonucleotide
ugggcccgugcggggcuca

SEQ ID NO: 2149774 - RNA, 19 nt, Artificial Sequence
  Description of Artificial Sequence: Synthetic oligonucleotide
cccuuacgacagucacagc

SEQ ID NO: 2149775 - RNA, 19 nt, Artificial Sequence
  Description of Artificial Sequence: Synthetic oligonucleotide
cgcagggcgcccgugcagg

SEQ ID NO: 2149776 - RNA, 19 nt, Artificial Sequence
  Description of Artificial Sequence: Synthetic oligonucleotide
ggccaggcacgcagggcgc

SEQ ID NO: 2149777 - RNA, 19 nt, Artificial Sequence
  Description of Artificial Sequence: Synthetic oligonucleotide
ggggcucaagucagucaca

SEQ ID NO: 2149778 - RNA, 19 nt, Artificial Sequence
  Description of Artificial Sequence: Synthetic oligonucleotide
cccgugcggggcucaaguc

SEQ ID NO: 2149779 - RNA, 19 nt, Artificial Sequence
  Description of Artificial Sequence: Synthetic oligonucleotide
gcgcccgugcagguuguug

SEQ ID NO: 2149780 - RNA, 19 nt, Artificial Sequence
  Description of Artificial Sequence: Synthetic oligonucleotide
ccgaagggaggcagcgcca

SEQ ID NO: 2149781 - RNA, 19 nt, Artificial Sequence
  Description of Artificial Sequence: Synthetic oligonucleotide
gcccgugcggggcucaagu

SEQ ID NO: 2149782 - RNA, 19 nt, Artificial Sequence
  Description of Artificial Sequence: Synthetic oligonucleotide
gcgcaguucugagcagcac

SEQ ID NO: 2149783 - RNA, 19 nt, Artificial Sequence
  Description of Artificial Sequence: Synthetic oligonucleotide
ccaguguacagguggccau

SEQ ID NO: 2149784 - RNA, 19 nt, Artificial Sequence
  Description of Artificial Sequence: Synthetic oligonucleotide
gccaggcacgcagggcgcc

SEQ ID NO: 2149785 - RNA, 19 nt, Artificial Sequence
  Description of Artificial Sequence: Synthetic oligonucleotide
cacggacggugagguugac

SEQ ID NO: 2149786 - RNA, 19 nt, Artificial Sequence
  Description of Artificial Sequence: Synthetic oligonucleotide
gcccgaagggaggcagcgc

SEQ ID NO: 2149787 - RNA, 19 nt, Artificial Sequence
  Description of Artificial Sequence: Synthetic oligonucleotide
ccuggauggaggacaguuu

SEQ ID NO: 2149788 - RNA, 19 nt, Artificial Sequence
  Description of Artificial Sequence: Synthetic oligonucleotide
cugugaccauagucugcau

SEQ ID NO: 2149789 - RNA, 19 nt, Artificial Sequence
  Description of Artificial Sequence: Synthetic oligonucleotide
ggcacgcagggcgcccgug

SEQ ID NO: 2149790 - RNA, 19 nt, Artificial Sequence
  Description of Artificial Sequence: Synthetic oligonucleotide
ccuacacauguuggccaga

SEQ ID NO: 2149791 - RNA, 19 nt, Artificial Sequence
  Description of Artificial Sequence: Synthetic oligonucleotide
cggcugauacucugaugga

SEQ ID NO: 2149792 - RNA, 19 nt, Artificial Sequence
  Description of Artificial Sequence: Synthetic oligonucleotide
cccuggauggaggacaguu

SEQ ID NO: 2149793 - RNA, 19 nt, Artificial Sequence
  Description of Artificial Sequence: Synthetic oligonucleotide
ggcccgugcggggcucaag

SEQ ID NO: 2149794 - RNA, 19 nt, Artificial Sequence
  Description of Artificial Sequence: Synthetic oligonucleotide
cccucuugcuuagggaggu

SEQ ID NO: 2149795 - RNA, 19 nt, Artificial Sequence
  Description of Artificial Sequence: Synthetic oligonucleotide
gaccacccuccagcgcagu

SEQ ID NO: 2149796 - RNA, 19 nt, Artificial Sequence
  Description of Artificial Sequence: Synthetic oligonucleotide
cgcccgugcagguuguugu

SEQ ID NO: 2149797 - RNA, 19 nt, Artificial Sequence
  Description of Artificial Sequence: Synthetic oligonucleotide
cagauaccucacggacggu

SEQ ID NO: 2149798 - RNA, 19 nt, Artificial Sequence
  Description of Artificial Sequence: Synthetic oligonucleotide
cgacugccugggccaaguc

SEQ ID NO: 2149799 - RNA, 19 nt, Artificial Sequence
  Description of Artificial Sequence: Synthetic oligonucleotide
cgaagcaguuccugaugau

SEQ ID NO: 2149800 - RNA, 19 nt, Artificial Sequence
  Description of Artificial Sequence: Synthetic oligonucleotide
gugcggggcucaagucagu

SEQ ID NO: 2149801 - RNA, 19 nt, Artificial Sequence
  Description of Artificial Sequence: Synthetic oligonucleotide
gcagggcgcccgugcaggu

SEQ ID NO: 2149802 - RNA, 19 nt, Artificial Sequence
  Description of Artificial Sequence: Synthetic oligonucleotide
cccgggaagcgcagacacu

SEQ ID NO: 2149803 - RNA, 19 nt, Artificial Sequence
  Description of Artificial Sequence: Synthetic oligonucleotide
ggcucacugccaggguuuu

SEQ ID NO: 2149804 - RNA, 19 nt, Artificial Sequence
  Description of Artificial Sequence: Synthetic oligonucleotide
ccgacugccugggccaagu

SEQ ID NO: 2149805 - RNA, 19 nt, Artificial Sequence
  Description of Artificial Sequence: Synthetic oligonucleotide
ggugggcccuacacauguu

SEQ ID NO: 2149806 - RNA, 19 nt, Artificial Sequence
  Description of Artificial Sequence: Synthetic oligonucleotide
ggacaguuucugggcccuu

SEQ ID NO: 2149807 - RNA, 19 nt, Artificial Sequence
  Description of Artificial Sequence: Synthetic oligonucleotide
ccucacggacggugagguu

SEQ ID NO: 2149808 - RNA, 19 nt, Artificial Sequence
  Description of Artificial Sequence: Synthetic oligonucleotide
gggcgcccgugcagguugu

SEQ ID NO: 2149809 - RNA, 19 nt, Artificial Sequence
  Description of Artificial Sequence: Synthetic oligonucleotide
gggcccgugcggggcucaa

SEQ ID NO: 2149810 - RNA, 19 nt, Artificial Sequence
  Description of Artificial Sequence: Synthetic oligonucleotide
ccucuugcuuagggagguu

SEQ ID NO: 2149811 - RNA, 19 nt, Artificial Sequence
  Description of Artificial Sequence: Synthetic oligonucleotide
cagcgccagcuggcucacu

SEQ ID NO: 2149812 - RNA, 19 nt, Artificial Sequence
  Description of Artificial Sequence: Synthetic oligonucleotide
cgccgacugccugggccaa

SEQ ID NO: 2149813 - RNA, 19 nt, Artificial Sequence
  Description of Artificial Sequence: Synthetic oligonucleotide
ggcgcccgugcagguuguu

SEQ ID NO: 2149814 - RNA, 19 nt, Artificial Sequence
  Description of Artificial Sequence: Synthetic oligonucleotide
aaagguauuaaauagagag

SEQ ID NO: 2149815 - RNA, 19 nt, Artificial Sequence
  Description of Artificial Sequence: Synthetic oligonucleotide
ucaauuuuauaacucaagg

SEQ ID NO: 2149816 - RNA, 19 nt, Artificial Sequence
  Description of Artificial Sequence: Synthetic oligonucleotide
auaaccaaugcacagaagg

SEQ ID NO: 2149817 - RNA, 19 nt, Artificial Sequence
  Description of Artificial Sequence: Synthetic oligonucleotide
aagauuacaggcugaauac

SEQ ID NO: 2149818 - RNA, 19 nt, Artificial Sequence
  Description of Artificial Sequence: Synthetic oligonucleotide
cuuuccauaauuaaugucc

SEQ ID NO: 2149819 - RNA, 19 nt, Artificial Sequence
  Description of Artificial Sequence: Synthetic oligonucleotide
aaugauugagacuacauau

SEQ ID NO: 2149820 - RNA, 19 nt, Artificial Sequence
  Description of Artificial Sequence: Synthetic oligonucleotide
auuaacacucugcagauac

SEQ ID NO: 2149821 - RNA, 19 nt, Artificial Sequence
  Description of Artificial Sequence: Synthetic oligonucleotide
aaucucaacagggacaugc

SEQ ID NO: 2149822 - RNA, 19 nt, Artificial Sequence
  Description of Artificial Sequence: Synthetic oligonucleotide
ugaaagguauuaaauagag

SEQ ID NO: 2149823 - RNA, 19 nt, Artificial Sequence
  Description of Artificial Sequence: Synthetic oligonucleotide
ugugaugugaccaagugga

SEQ ID NO: 2149824 - RNA, 19 nt, Artificial Sequence
  Description of Artificial Sequence: Synthetic oligonucleotide
agaaggacugcacaggucc

SEQ ID NO: 2149825 - RNA, 19 nt, Artificial Sequence
  Description of Artificial Sequence: Synthetic oligonucleotide
uuuaaguaaugauugagac

SEQ ID NO: 2149826 - RNA, 19 nt, Artificial Sequence
  Description of Artificial Sequence: Synthetic oligonucleotide
uauuucaaggucaugauau

SEQ ID NO: 2149827 - RNA, 19 nt, Artificial Sequence
  Description of Artificial Sequence: Synthetic oligonucleotide
agguauuaaauagagaggg

SEQ ID NO: 2149828 - RNA, 19 nt, Artificial Sequence
  Description of Artificial Sequence: Synthetic oligonucleotide
ugagaauggagcaaagugc

SEQ ID NO: 2149829 - RNA, 19 nt, Artificial Sequence
  Description of Artificial Sequence: Synthetic oligonucleotide
uauuaaauagagagggcag

SEQ ID NO: 2149830 - RNA, 19 nt, Artificial Sequence
  Description of Artificial Sequence: Synthetic oligonucleotide
aauggugcaagguguuugc

SEQ ID NO: 2149831 - RNA, 19 nt, Artificial Sequence
  Description of Artificial Sequence: Synthetic oligonucleotide
uuuuauaacucaaggcugc

SEQ ID NO: 2149832 - RNA, 19 nt, Artificial Sequence
  Description of Artificial Sequence: Synthetic oligonucleotide
ccuauuaguacauauaucc

SEQ ID NO: 2149833 - RNA, 19 nt, Artificial Sequence
  Description of Artificial Sequence: Synthetic oligonucleotide
gauuuucccgccuuguucg

SEQ ID NO: 2149834 - RNA, 19 nt, Artificial Sequence
  Description of Artificial Sequence: Synthetic oligonucleotide
augucacaagauuacaggc

SEQ ID NO: 2149835 - RNA, 19 nt, Artificial Sequence
  Description of Artificial Sequence: Synthetic oligonucleotide
caauuuuauaacucaaggc

SEQ ID NO: 2149836 - RNA, 19 nt, Artificial Sequence
  Description of Artificial Sequence: Synthetic oligonucleotide
aaagcagugugcucaugcc

SEQ ID NO: 2149837 - RNA, 19 nt, Artificial Sequence
  Description of Artificial Sequence: Synthetic oligonucleotide
uauaacucaaggcugcuga

SEQ ID NO: 2149838 - RNA, 19 nt, Artificial Sequence
  Description of Artificial Sequence: Synthetic oligonucleotide
uaaucaaaugcaaaugccu

SEQ ID NO: 2149839 - RNA, 19 nt, Artificial Sequence
  Description of Artificial Sequence: Synthetic oligonucleotide
aaauagagagggcagguga

SEQ ID NO: 2149840 - RNA, 19 nt, Artificial Sequence
  Description of Artificial Sequence: Synthetic oligonucleotide
aagauugucauuugcuuca

SEQ ID NO: 2149841 - RNA, 19 nt, Artificial Sequence
  Description of Artificial Sequence: Synthetic oligonucleotide
  modified_base (3)..(3): a, c, u, g, unknown or other
ugnggaaauccucaagucc

SEQ ID NO: 2149842 - RNA, 19 nt, Artificial Sequence
  Description of Artificial Sequence: Synthetic oligonucleotide
uugagacuacauaugaaag

SEQ ID NO: 2149843 - RNA, 19 nt, Artificial Sequence
  Description of Artificial Sequence: Synthetic oligonucleotide
aauaaguggaaaacugcac

SEQ ID NO: 2149844 - RNA, 19 nt, Artificial Sequence
  Description of Artificial Sequence: Synthetic oligonucleotide
ugaaggagcaccuccauug

SEQ ID NO: 2149845 - RNA, 19 nt, Artificial Sequence
  Description of Artificial Sequence: Synthetic oligonucleotide
uggcauuucuccaaaauga

SEQ ID NO: 2149846 - RNA, 19 nt, Artificial Sequence
  Description of Artificial Sequence: Synthetic oligonucleotide
ugauugagacuacauauga

SEQ ID NO: 2149847 - RNA, 19 nt, Artificial Sequence
  Description of Artificial Sequence: Synthetic oligonucleotide
ucugauaaccaaugcacag

SEQ ID NO: 2149848 - RNA, 19 nt, Artificial Sequence
  Description of Artificial Sequence: Synthetic oligonucleotide
aaggucaugauaucaccag

SEQ ID NO: 2149849 - RNA, 19 nt, Artificial Sequence
  Description of Artificial Sequence: Synthetic oligonucleotide
aaugaaggcagaaacuaag

SEQ ID NO: 2149850 - RNA, 19 nt, Artificial Sequence
  Description of Artificial Sequence: Synthetic oligonucleotide
aagguguuugcgaucagcc

SEQ ID NO: 2149851 - RNA, 19 nt, Artificial Sequence
  Description of Artificial Sequence: Synthetic oligonucleotide
auugagacuacauaugaaa

SEQ ID NO: 2149852 - RNA, 19 nt, Artificial Sequence
  Description of Artificial Sequence: Synthetic oligonucleotide
aagguauuaaauagagagg

SEQ ID NO: 2149853 - RNA, 19 nt, Artificial Sequence
  Description of Artificial Sequence: Synthetic oligonucleotide
aaccaaugcacagaaggac

SEQ ID NO: 2149854 - RNA, 19 nt, Artificial Sequence
  Description of Artificial Sequence: Synthetic oligonucleotide
uaaguggaaaacugcacag

SEQ ID NO: 2149855 - RNA, 19 nt, Artificial Sequence
  Description of Artificial Sequence: Synthetic oligonucleotide
auuaucugggccaaaguac

SEQ ID NO: 2149856 - RNA, 19 nt, Artificial Sequence
  Description of Artificial Sequence: Synthetic oligonucleotide
ugagacgugauuuucccgc

SEQ ID NO: 2149857 - RNA, 19 nt, Artificial Sequence
  Description of Artificial Sequence: Synthetic oligonucleotide
gaauaaucaaaugcaaaug

SEQ ID NO: 2149858 - RNA, 19 nt, Artificial Sequence
  Description of Artificial Sequence: Synthetic oligonucleotide
uaccauaagaacucugugc

SEQ ID NO: 2149859 - RNA, 19 nt, Artificial Sequence
  Description of Artificial Sequence: Synthetic oligonucleotide
uauggauucaggguguuag

SEQ ID NO: 2149860 - RNA, 19 nt, Artificial Sequence
  Description of Artificial Sequence: Synthetic oligonucleotide
uuaaguaaugauugagacu

SEQ ID NO: 2149861 - RNA, 19 nt, Artificial Sequence
  Description of Artificial Sequence: Synthetic oligonucleotide
uaauuaauguccuuugaua

SEQ ID NO: 2149862 - RNA, 19 nt, Artificial Sequence
  Description of Artificial Sequence: Synthetic oligonucleotide
uguucgugaaagcagugug

SEQ ID NO: 2149863 - RNA, 19 nt, Artificial Sequence
  Description of Artificial Sequence: Synthetic oligonucleotide
uauuaucugggccaaagua

SEQ ID NO: 2149864 - RNA, 19 nt, Artificial Sequence
  Description of Artificial Sequence: Synthetic oligonucleotide
uugaauaaucaaaugcaaa

SEQ ID NO: 2149865 - RNA, 19 nt, Artificial Sequence
  Description of Artificial Sequence: Synthetic oligonucleotide
agaauucaguuuuccauuc

SEQ ID NO: 2149866 - RNA, 19 nt, Artificial Sequence
  Description of Artificial Sequence: Synthetic oligonucleotide
auuaaauagagagggcagg

SEQ ID NO: 2149867 - RNA, 19 nt, Artificial Sequence
  Description of Artificial Sequence: Synthetic oligonucleotide
cucaauuuuauaacucaag

SEQ ID NO: 2149868 - RNA, 19 nt, Artificial Sequence
  Description of Artificial Sequence: Synthetic oligonucleotide
gaugagaacaagcuaugac

SEQ ID NO: 2149869 - RNA, 19 nt, Artificial Sequence
  Description of Artificial Sequence: Synthetic oligonucleotide
cauaugaaagcuccugggg

SEQ ID NO: 2149870 - RNA, 19 nt, Artificial Sequence
  Description of Artificial Sequence: Synthetic oligonucleotide
gacuacauaugaaagcucc

SEQ ID NO: 2149871 - RNA, 19 nt, Artificial Sequence
  Description of Artificial Sequence: Synthetic oligonucleotide
auaauuaauguccuuugau

SEQ ID NO: 2149872 - RNA, 19 nt, Artificial Sequence
  Description of Artificial Sequence: Synthetic oligonucleotide
ugccuauuaguacauauau

SEQ ID NO: 2149873 - RNA, 19 nt, Artificial Sequence
  Description of Artificial Sequence: Synthetic oligonucleotide
ugauaaccaaugcacagaa

SEQ ID NO: 2149874 - RNA, 19 nt, Artificial Sequence
  Description of Artificial Sequence: Synthetic oligonucleotide
gauucaggguguuagcuac

SEQ ID NO: 2149875 - RNA, 19 nt, Artificial Sequence
  Description of Artificial Sequence: Synthetic oligonucleotide
aaauaaaucucaacaggga

SEQ ID NO: 2149876 - RNA, 19 nt, Artificial Sequence
  Description of Artificial Sequence: Synthetic oligonucleotide
uaaugauugagacuacaua

SEQ ID NO: 2149877 - RNA, 19 nt, Artificial Sequence
  Description of Artificial Sequence: Synthetic oligonucleotide
agucagguauuucaagguc

SEQ ID NO: 2149878 - RNA, 19 nt, Artificial Sequence
  Description of Artificial Sequence: Synthetic oligonucleotide
accaguauuaucugggcca

SEQ ID NO: 2149879 - RNA, 19 nt, Artificial Sequence
  Description of Artificial Sequence: Synthetic oligonucleotide
augugaugugaccaagugg

SEQ ID NO: 2149880 - RNA, 19 nt, Artificial Sequence
  Description of Artificial Sequence: Synthetic oligonucleotide
agaacaagcuaugacuuuc

SEQ ID NO: 2149881 - RNA, 19 nt, Artificial Sequence
  Description of Artificial Sequence: Synthetic oligonucleotide
uuagcuacccaacuccacu

SEQ ID NO: 2149882 - RNA, 19 nt, Artificial Sequence
  Description of Artificial Sequence: Synthetic oligonucleotide
agugcaaagcucugcauug

SEQ ID NO: 2149883 - RNA, 19 nt, Artificial Sequence
  Description of Artificial Sequence: Synthetic oligonucleotide
acugaugucacaagauuac

SEQ ID NO: 2149884 - RNA, 19 nt, Artificial Sequence
  Description of Artificial Sequence: Synthetic oligonucleotide
ucaaggucaugauaucacc

SEQ ID NO: 2149885 - RNA, 19 nt, Artificial Sequence
  Description of Artificial Sequence: Synthetic oligonucleotide
ugggacaagaaaaugugau

SEQ ID NO: 2149886 - RNA, 19 nt, Artificial Sequence
  Description of Artificial Sequence: Synthetic oligonucleotide
uucugauaaccaaugcaca

SEQ ID NO: 2149887 - RNA, 19 nt, Artificial Sequence
  Description of Artificial Sequence: Synthetic oligonucleotide
uggaauuugcaccaggcuu

SEQ ID NO: 2149888 - RNA, 19 nt, Artificial Sequence
  Description of Artificial Sequence: Synthetic oligonucleotide
ggaaaacuggauuuggcag

SEQ ID NO: 2149889 - RNA, 19 nt, Artificial Sequence
  Description of Artificial Sequence: Synthetic oligonucleotide
ugcuucaugguauggauuc

SEQ ID NO: 2149890 - RNA, 19 nt, Artificial Sequence
  Description of Artificial Sequence: Synthetic oligonucleotide
gguguuugcgaucagccgg

SEQ ID NO: 2149891 - RNA, 19 nt, Artificial Sequence
  Description of Artificial Sequence: Synthetic oligonucleotide
ugaaggcagaaacuaaguc

SEQ ID NO: 2149892 - RNA, 19 nt, Artificial Sequence
  Description of Artificial Sequence: Synthetic oligonucleotide
gucacaagauuacaggcug

SEQ ID NO: 2149893 - RNA, 19 nt, Artificial Sequence
  Description of Artificial Sequence: Synthetic oligonucleotide
uaguacauauauccuucag

SEQ ID NO: 2149894 - RNA, 19 nt, Artificial Sequence
  Description of Artificial Sequence: Synthetic oligonucleotide
uggagcaaagugcucacca

SEQ ID NO: 2149895 - RNA, 19 nt, Artificial Sequence
  Description of Artificial Sequence: Synthetic oligonucleotide
caacucauuaacacucugc

SEQ ID NO: 2149896 - RNA, 19 nt, Artificial Sequence
  Description of Artificial Sequence: Synthetic oligonucleotide
gacaagaaaaugugaugug

SEQ ID NO: 2149897 - RNA, 19 nt, Artificial Sequence
  Description of Artificial Sequence: Synthetic oligonucleotide
uacccaacuccacucacag

SEQ ID NO: 2149898 - RNA, 19 nt, Artificial Sequence
  Description of Artificial Sequence: Synthetic oligonucleotide
gaauaaguggaaaacugca

SEQ ID NO: 2149899 - RNA, 19 nt, Artificial Sequence
  Description of Artificial Sequence: Synthetic oligonucleotide
agauuacaggcugaauacc

SEQ ID NO: 2149900 - RNA, 19 nt, Artificial Sequence
  Description of Artificial Sequence: Synthetic oligonucleotide
uacugaugucacaagauua

SEQ ID NO: 2149901 - RNA, 19 nt, Artificial Sequence
  Description of Artificial Sequence: Synthetic oligonucleotide
aguauuaucugggccaaag

SEQ ID NO: 2149902 - RNA, 19 nt, Artificial Sequence
  Description of Artificial Sequence: Synthetic oligonucleotide
uuugcgaucagccggucau

SEQ ID NO: 2149903 - RNA, 19 nt, Artificial Sequence
  Description of Artificial Sequence: Synthetic oligonucleotide
acauacugaugucacaaga

SEQ ID NO: 2149904 - RNA, 19 nt, Artificial Sequence
  Description of Artificial Sequence: Synthetic oligonucleotide
aaccggugggauuuuaagu

SEQ ID NO: 2149905 - RNA, 19 nt, Artificial Sequence
  Description of Artificial Sequence: Synthetic oligonucleotide
agaacucugugccuauuag

SEQ ID NO: 2149906 - RNA, 19 nt, Artificial Sequence
  Description of Artificial Sequence: Synthetic oligonucleotide
ugauuuucccgccuuguuc

SEQ ID NO: 2149907 - RNA, 19 nt, Artificial Sequence
  Description of Artificial Sequence: Synthetic oligonucleotide
ugcaaaaccugcuggggug

SEQ ID NO: 2149908 - RNA, 19 nt, Artificial Sequence
  Description of Artificial Sequence: Synthetic oligonucleotide
  modified_base (2)..(2): a, c, u, g, unknown or other
gnggaaauccucaagucca

SEQ ID NO: 2149909 - RNA, 19 nt, Artificial Sequence
  Description of Artificial Sequence: Synthetic oligonucleotide
uuacaggcugaauaccacc

SEQ ID NO: 2149910 - RNA, 19 nt, Artificial Sequence
  Description of Artificial Sequence: Synthetic oligonucleotide
uuaaauagagagggcaggu

SEQ ID NO: 2149911 - RNA, 19 nt, Artificial Sequence
  Description of Artificial Sequence: Synthetic oligonucleotide
caagcuaugacuuuccaua

SEQ ID NO: 2149912 - RNA, 19 nt, Artificial Sequence
  Description of Artificial Sequence: Synthetic oligonucleotide
  modified_base (11)..(11): a, c, u, g, unknown or other
caugcugcugnggaaaucc

SEQ ID NO: 2149913 - RNA, 19 nt, Artificial Sequence
  Description of Artificial Sequence: Synthetic oligonucleotide
cugaauaccacccgugcac

SEQ ID NO: 2149914 - RNA, 19 nt, Artificial Sequence
  Description of Artificial Sequence: Synthetic oligonucleotide
uaccaauggugcaaggugu

SEQ ID NO: 2149915 - RNA, 19 nt, Artificial Sequence
  Description of Artificial Sequence: Synthetic oligonucleotide
auggauucaggguguuagc

SEQ ID NO: 2149916 - RNA, 19 nt, Artificial Sequence
  Description of Artificial Sequence: Synthetic oligonucleotide
ugugccuauuaguacauau

SEQ ID NO: 2149917 - RNA, 19 nt, Artificial Sequence
  Description of Artificial Sequence: Synthetic oligonucleotide
uguugacaccccaagcaca

SEQ ID NO: 2149918 - RNA, 19 nt, Artificial Sequence
  Description of Artificial Sequence: Synthetic oligonucleotide
ugacaccccaagcacauac

SEQ ID NO: 2149919 - RNA, 19 nt, Artificial Sequence
  Description of Artificial Sequence: Synthetic oligonucleotide
uuaguacauauauccuuca

SEQ ID NO: 2149920 - RNA, 19 nt, Artificial Sequence
  Description of Artificial Sequence: Synthetic oligonucleotide
aaucaaaugcaaaugccuu

SEQ ID NO: 2149921 - RNA, 19 nt, Artificial Sequence
  Description of Artificial Sequence: Synthetic oligonucleotide
cuggcauuucuccaaaaug

SEQ ID NO: 2149922 - RNA, 19 nt, Artificial Sequence
  Description of Artificial Sequence: Synthetic oligonucleotide
cauauauccuucagaugag

SEQ ID NO: 2149923 - RNA, 19 nt, Artificial Sequence
  Description of Artificial Sequence: Synthetic oligonucleotide
gaaaaugugaugugaccaa

SEQ ID NO: 2149924 - RNA, 19 nt, Artificial Sequence
  Description of Artificial Sequence: Synthetic oligonucleotide
gaaggagcaccuccauugg

SEQ ID NO: 2149925 - RNA, 19 nt, Artificial Sequence
  Description of Artificial Sequence: Synthetic oligonucleotide
caagauuacaggcugaaua

SEQ ID NO: 2149926 - RNA, 19 nt, Artificial Sequence
  Description of Artificial Sequence: Synthetic oligonucleotide
uccauaauuaauguccuuu

SEQ ID NO: 2149927 - RNA, 19 nt, Artificial Sequence
  Description of Artificial Sequence: Synthetic oligonucleotide
ugaauaccacccgugcacg

SEQ ID NO: 2149928 - RNA, 19 nt, Artificial Sequence
  Description of Artificial Sequence: Synthetic oligonucleotide
aagucaagcaguguccccu

SEQ ID NO: 2149929 - RNA, 19 nt, Artificial Sequence
  Description of Artificial Sequence: Synthetic oligonucleotide
gauuacaggcugaauacca

SEQ ID NO: 2149930 - RNA, 19 nt, Artificial Sequence
  Description of Artificial Sequence: Synthetic oligonucleotide
aaaugccuuuuagcaaugg

SEQ ID NO: 2149931 - RNA, 19 nt, Artificial Sequence
  Description of Artificial Sequence: Synthetic oligonucleotide
auaucaccaguauuaucug

SEQ ID NO: 2149932 - RNA, 19 nt, Artificial Sequence
  Description of Artificial Sequence: Synthetic oligonucleotide
guacauauauccuucagau

SEQ ID NO: 2149933 - RNA, 19 nt, Artificial Sequence
  Description of Artificial Sequence: Synthetic oligonucleotide
aacaagcuaugacuuucca

SEQ ID NO: 2149934 - RNA, 19 nt, Artificial Sequence
  Description of Artificial Sequence: Synthetic oligonucleotide
cuggaaaacuggauuuggc

SEQ ID NO: 2149935 - RNA, 19 nt, Artificial Sequence
  Description of Artificial Sequence: Synthetic oligonucleotide
  modified_base (6)..(6): a, c, u, g, unknown or other
ugcugnggaaauccucaag

SEQ ID NO: 2149936 - RNA, 19 nt, Artificial Sequence
  Description of Artificial Sequence: Synthetic oligonucleotide
auuacaggcugaauaccac

SEQ ID NO: 2149937 - RNA, 19 nt, Artificial Sequence
  Description of Artificial Sequence: Synthetic oligonucleotide
aucauccuaagauugucau

SEQ ID NO: 2149938 - RNA, 19 nt, Artificial Sequence
  Description of Artificial Sequence: Synthetic oligonucleotide
aacucugugccuauuagua

SEQ ID NO: 2149939 - RNA, 19 nt, Artificial Sequence
  Description of Artificial Sequence: Synthetic oligonucleotide
aagcuaugacuuuccauaa

SEQ ID NO: 2149940 - RNA, 19 nt, Artificial Sequence
  Description of Artificial Sequence: Synthetic oligonucleotide
ucauuugcuucaugguaug

SEQ ID NO: 2149941 - RNA, 19 nt, Artificial Sequence
  Description of Artificial Sequence: Synthetic oligonucleotide
aaagugcucaccaacucau

SEQ ID NO: 2149942 - RNA, 19 nt, Artificial Sequence
  Description of Artificial Sequence: Synthetic oligonucleotide
  modified_base (4)..(4): a, c, u, g, unknown or other
cugnggaaauccucaaguc

SEQ ID NO: 2149943 - RNA, 19 nt, Artificial Sequence
  Description of Artificial Sequence: Synthetic oligonucleotide
uaaauagagagggcaggug

SEQ ID NO: 2149944 - RNA, 19 nt, Artificial Sequence
  Description of Artificial Sequence: Synthetic oligonucleotide
gagacuacauaugaaagcu

SEQ ID NO: 2149945 - RNA, 19 nt, Artificial Sequence
  Description of Artificial Sequence: Synthetic oligonucleotide
uucgugaaagcagugugcu

SEQ ID NO: 2149946 - RNA, 19 nt, Artificial Sequence
  Description of Artificial Sequence: Synthetic oligonucleotide
gcagauacuggaaaacugg

SEQ ID NO: 2149947 - RNA, 19 nt, Artificial Sequence
  Description of Artificial Sequence: Synthetic oligonucleotide
guggacaguagacaugcug

SEQ ID NO: 2149948 - RNA, 19 nt, Artificial Sequence
  Description of Artificial Sequence: Synthetic oligonucleotide
acagaaggacugcacaggu

SEQ ID NO: 2149949 - RNA, 19 nt, Artificial Sequence
  Description of Artificial Sequence: Synthetic oligonucleotide
agugugcucaugccacucg

SEQ ID NO: 2149950 - RNA, 19 nt, Artificial Sequence
  Description of Artificial Sequence: Synthetic oligonucleotide
auacugaugucacaagauu

SEQ ID NO: 2149951 - RNA, 19 nt, Artificial Sequence
  Description of Artificial Sequence: Synthetic oligonucleotide
ugaugugaccaaguggaca

SEQ ID NO: 2149952 - RNA, 19 nt, Artificial Sequence
  Description of Artificial Sequence: Synthetic oligonucleotide
cuacauaugaaagcuccug

SEQ ID NO: 2149953 - RNA, 19 nt, Artificial Sequence
  Description of Artificial Sequence: Synthetic oligonucleotide
cuaccauaagaacucugug

SEQ ID NO: 2149954 - RNA, 19 nt, Artificial Sequence
  Description of Artificial Sequence: Synthetic oligonucleotide
gagcaaagugcucaccaac

SEQ ID NO: 2149955 - RNA, 19 nt, Artificial Sequence
  Description of Artificial Sequence: Synthetic oligonucleotide
ggaauaaguggaaaacugc

SEQ ID NO: 2149956 - RNA, 19 nt, Artificial Sequence
  Description of Artificial Sequence: Synthetic oligonucleotide
acugcaaaaccugcugggg

SEQ ID NO: 2149957 - RNA, 19 nt, Artificial Sequence
  Description of Artificial Sequence: Synthetic oligonucleotide
aaaugugaugugaccaagu

SEQ ID NO: 2149958 - RNA, 19 nt, Artificial Sequence
  Description of Artificial Sequence: Synthetic oligonucleotide
accggugggauuuuaagua

SEQ ID NO: 2149959 - RNA, 19 nt, Artificial Sequence
  Description of Artificial Sequence: Synthetic oligonucleotide
aaaugaaggcagaaacuaa

SEQ ID NO: 2149960 - RNA, 19 nt, Artificial Sequence
  Description of Artificial Sequence: Synthetic oligonucleotide
gaauaccacccgugcacgg

SEQ ID NO: 2149961 - RNA, 19 nt, Artificial Sequence
  Description of Artificial Sequence: Synthetic oligonucleotide
cucuccuugaauaaucaaa

SEQ ID NO: 2149962 - RNA, 19 nt, Artificial Sequence
  Description of Artificial Sequence: Synthetic oligonucleotide
aguaaugauugagacuaca

SEQ ID NO: 2149963 - RNA, 19 nt, Artificial Sequence
  Description of Artificial Sequence: Synthetic oligonucleotide
ugcacgguuccuaccauaa

SEQ ID NO: 2149964 - RNA, 19 nt, Artificial Sequence
  Description of Artificial Sequence: Synthetic oligonucleotide
uuaacacucugcagauacu

SEQ ID NO: 2149965 - RNA, 19 nt, Artificial Sequence
  Description of Artificial Sequence: Synthetic oligonucleotide
gguucugauaaccaaugca

SEQ ID NO: 2149966 - RNA, 19 nt, Artificial Sequence
  Description of Artificial Sequence: Synthetic oligonucleotide
uuauaacucaaggcugcug

SEQ ID NO: 2149967 - RNA, 19 nt, Artificial Sequence
  Description of Artificial Sequence: Synthetic oligonucleotide
aaguaaugauugagacuac

SEQ ID NO: 2149968 - RNA, 19 nt, Artificial Sequence
  Description of Artificial Sequence: Synthetic oligonucleotide
aaguggaaaacugcacaga

SEQ ID NO: 2149969 - RNA, 19 nt, Artificial Sequence
  Description of Artificial Sequence: Synthetic oligonucleotide
ucacaagauuacaggcuga

SEQ ID NO: 2149970 - RNA, 19 nt, Artificial Sequence
  Description of Artificial Sequence: Synthetic oligonucleotide
aaacuggcauuucuccaaa

SEQ ID NO: 2149971 - RNA, 19 nt, Artificial Sequence
  Description of Artificial Sequence: Synthetic oligonucleotide
cagaugagaacaagcuaug

SEQ ID NO: 2149972 - RNA, 19 nt, Artificial Sequence
  Description of Artificial Sequence: Synthetic oligonucleotide
ugauaucaccaguauuauc

SEQ ID NO: 2149973 - RNA, 19 nt, Artificial Sequence
  Description of Artificial Sequence: Synthetic oligonucleotide
aguaccaauggugcaaggu

SEQ ID NO: 2149974 - RNA, 19 nt, Artificial Sequence
  Description of Artificial Sequence: Synthetic oligonucleotide
cuucagaugagaacaagcu

SEQ ID NO: 2149975 - RNA, 19 nt, Artificial Sequence
  Description of Artificial Sequence: Synthetic oligonucleotide
ugguauggauucagggugu

SEQ ID NO: 2149976 - RNA, 19 nt, Artificial Sequence
  Description of Artificial Sequence: Synthetic oligonucleotide
uccuaccauaagaacucug

SEQ ID NO: 2149977 - RNA, 19 nt, Artificial Sequence
  Description of Artificial Sequence: Synthetic oligonucleotide
cacagaaggacugcacagg

SEQ ID NO: 2149978 - RNA, 19 nt, Artificial Sequence
  Description of Artificial Sequence: Synthetic oligonucleotide
uggugcaagguguuugcga

SEQ ID NO: 2149979 - RNA, 19 nt, Artificial Sequence
  Description of Artificial Sequence: Synthetic oligonucleotide
acgugagacgugauuuucc

SEQ ID NO: 2149980 - RNA, 19 nt, Artificial Sequence
  Description of Artificial Sequence: Synthetic oligonucleotide
gaaagguauuaaauagaga

SEQ ID NO: 2149981 - RNA, 19 nt, Artificial Sequence
  Description of Artificial Sequence: Synthetic oligonucleotide
caccaguauuaucugggcc

SEQ ID NO: 2149982 - RNA, 19 nt, Artificial Sequence
  Description of Artificial Sequence: Synthetic oligonucleotide
uuuauaacucaaggcugcu

SEQ ID NO: 2149983 - RNA, 19 nt, Artificial Sequence
  Description of Artificial Sequence: Synthetic oligonucleotide
cuugagugcaaagcucugc

SEQ ID NO: 2149984 - RNA, 19 nt, Artificial Sequence
  Description of Artificial Sequence: Synthetic oligonucleotide
gugagacgugauuuucccg

SEQ ID NO: 2149985 - RNA, 19 nt, Artificial Sequence
  Description of Artificial Sequence: Synthetic oligonucleotide
aauaccacccgugcacggu

SEQ ID NO: 2149986 - RNA, 19 nt, Artificial Sequence
  Description of Artificial Sequence: Synthetic oligonucleotide
caaggucaugauaucacca

SEQ ID NO: 2149987 - RNA, 19 nt, Artificial Sequence
  Description of Artificial Sequence: Synthetic oligonucleotide
gcaggugaaaugaaggcag

SEQ ID NO: 2149988 - RNA, 19 nt, Artificial Sequence
  Description of Artificial Sequence: Synthetic oligonucleotide
uuucccgccuuguucguga

SEQ ID NO: 2149989 - RNA, 19 nt, Artificial Sequence
  Description of Artificial Sequence: Synthetic oligonucleotide
uaacucaaggcugcugaug

SEQ ID NO: 2149990 - RNA, 19 nt, Artificial Sequence
  Description of Artificial Sequence: Synthetic oligonucleotide
gagacgugauuuucccgcc

SEQ ID NO: 2149991 - RNA, 19 nt, Artificial Sequence
  Description of Artificial Sequence: Synthetic oligonucleotide
ucaaggcugcugaugacuu

SEQ ID NO: 2149992 - RNA, 19 nt, Artificial Sequence
  Description of Artificial Sequence: Synthetic oligonucleotide
guguugacaccccaagcac

SEQ ID NO: 2149993 - RNA, 19 nt, Artificial Sequence
  Description of Artificial Sequence: Synthetic oligonucleotide
gagaauggagcaaagugcu

SEQ ID NO: 2149994 - RNA, 19 nt, Artificial Sequence
  Description of Artificial Sequence: Synthetic oligonucleotide
cuucaugguauggauucag

SEQ ID NO: 2149995 - RNA, 19 nt, Artificial Sequence
  Description of Artificial Sequence: Synthetic oligonucleotide
aggucaugauaucaccagu

SEQ ID NO: 2149996 - RNA, 19 nt, Artificial Sequence
  Description of Artificial Sequence: Synthetic oligonucleotide
uucaggguguuagcuaccc

SEQ ID NO: 2149997 - RNA, 19 nt, Artificial Sequence
  Description of Artificial Sequence: Synthetic oligonucleotide
gauaaccaaugcacagaag

SEQ ID NO: 2149998 - RNA, 19 nt, Artificial Sequence
  Description of Artificial Sequence: Synthetic oligonucleotide
ucucucucuccuugaauaa

SEQ ID NO: 2149999 - RNA, 19 nt, Artificial Sequence
  Description of Artificial Sequence: Synthetic oligonucleotide
aggacgugggacaagaaaa

SEQ ID NO: 2150000 - RNA, 19 nt, Artificial Sequence
  Description of Artificial Sequence: Synthetic oligonucleotide
gacuuuccauaauuaaugu

SEQ ID NO: 2150001 - RNA, 19 nt, Artificial Sequence
  Description of Artificial Sequence: Synthetic oligonucleotide
uuucacgugagacgugauu

SEQ ID NO: 2150002 - RNA, 19 nt, Artificial Sequence
  Description of Artificial Sequence: Synthetic oligonucleotide
cacgguuccuaccauaaga

SEQ ID NO: 2150003 - RNA, 19 nt, Artificial Sequence
  Description of Artificial Sequence: Synthetic oligonucleotide
acucaaggcugcugaugac

SEQ ID NO: 2150004 - RNA, 19 nt, Artificial Sequence
  Description of Artificial Sequence: Synthetic oligonucleotide
uuuggcagguucugauaac

SEQ ID NO: 2150005 - RNA, 19 nt, Artificial Sequence
  Description of Artificial Sequence: Synthetic oligonucleotide
cuuguucgugaaagcagug

SEQ ID NO: 2150006 - RNA, 19 nt, Artificial Sequence
  Description of Artificial Sequence: Synthetic oligonucleotide
gaucauccuaagauuguca

SEQ ID NO: 2150007 - RNA, 19 nt, Artificial Sequence
  Description of Artificial Sequence: Synthetic oligonucleotide
acuccacucacaggggaac

SEQ ID NO: 2150008 - RNA, 19 nt, Artificial Sequence
  Description of Artificial Sequence: Synthetic oligonucleotide
ucugcauugacagccuuuu

SEQ ID NO: 2150009 - RNA, 19 nt, Artificial Sequence
  Description of Artificial Sequence: Synthetic oligonucleotide
gagggcaggugaaaugaag

SEQ ID NO: 2150010 - RNA, 19 nt, Artificial Sequence
  Description of Artificial Sequence: Synthetic oligonucleotide
caagguguuugcgaucagc

SEQ ID NO: 2150011 - RNA, 19 nt, Artificial Sequence
  Description of Artificial Sequence: Synthetic oligonucleotide
accaaguggacaguagaca

SEQ ID NO: 2150012 - RNA, 19 nt, Artificial Sequence
  Description of Artificial Sequence: Synthetic oligonucleotide
agacuacauaugaaagcuc

SEQ ID NO: 2150013 - RNA, 19 nt, Artificial Sequence
  Description of Artificial Sequence: Synthetic oligonucleotide
cucaaguccagucagguau

SEQ ID NO: 2150014 - RNA, 19 nt, Artificial Sequence
  Description of Artificial Sequence: Synthetic oligonucleotide
uguccccugaaggagcacc

SEQ ID NO: 2150015 - RNA, 19 nt, Artificial Sequence
  Description of Artificial Sequence: Synthetic oligonucleotide
caauggugcaagguguuug

SEQ ID NO: 2150016 - RNA, 19 nt, Artificial Sequence
  Description of Artificial Sequence: Synthetic oligonucleotide
acgugggacaagaaaaugu

SEQ ID NO: 2150017 - RNA, 19 nt, Artificial Sequence
  Description of Artificial Sequence: Synthetic oligonucleotide
gaggacgugggacaagaaa

SEQ ID NO: 2150018 - RNA, 19 nt, Artificial Sequence
  Description of Artificial Sequence: Synthetic oligonucleotide
  modified_base (9)..(9): a, c, u, g, unknown or other
ugcugcugnggaaauccuc

SEQ ID NO: 2150019 - RNA, 19 nt, Artificial Sequence
  Description of Artificial Sequence: Synthetic oligonucleotide
aggguguuagcuacccaac

SEQ ID NO: 2150020 - RNA, 19 nt, Artificial Sequence
  Description of Artificial Sequence: Synthetic oligonucleotide
auaagaacucugugccuau

SEQ ID NO: 2150021 - RNA, 19 nt, Artificial Sequence
  Description of Artificial Sequence: Synthetic oligonucleotide
gguauuaaauagagagggc

SEQ ID NO: 2150022 - RNA, 19 nt, Artificial Sequence
  Description of Artificial Sequence: Synthetic oligonucleotide
gauugagacuacauaugaa

SEQ ID NO: 2150023 - RNA, 19 nt, Artificial Sequence
  Description of Artificial Sequence: Synthetic oligonucleotide
gguccugaggggcucagag

SEQ ID NO: 2150024 - RNA, 19 nt, Artificial Sequence
  Description of Artificial Sequence: Synthetic oligonucleotide
auaacucaaggcugcugau

SEQ ID NO: 2150025 - RNA, 19 nt, Artificial Sequence
  Description of Artificial Sequence: Synthetic oligonucleotide
agaugagaacaagcuauga

SEQ ID NO: 2150026 - RNA, 19 nt, Artificial Sequence
  Description of Artificial Sequence: Synthetic oligonucleotide
ucauccuaagauugucauu

SEQ ID NO: 2150027 - RNA, 19 nt, Artificial Sequence
  Description of Artificial Sequence: Synthetic oligonucleotide
caguguccccugaaggagc

SEQ ID NO: 2150028 - RNA, 19 nt, Artificial Sequence
  Description of Artificial Sequence: Synthetic oligonucleotide
gguguuagcuacccaacuc

SEQ ID NO: 2150029 - RNA, 19 nt, Artificial Sequence
  Description of Artificial Sequence: Synthetic oligonucleotide
caagcacauacugauguca

SEQ ID NO: 2150030 - RNA, 19 nt, Artificial Sequence
  Description of Artificial Sequence: Synthetic oligonucleotide
auucaggguguuagcuacc

SEQ ID NO: 2150031 - RNA, 19 nt, Artificial Sequence
  Description of Artificial Sequence: Synthetic oligonucleotide
ggccaaaguaccaauggug

SEQ ID NO: 2150032 - RNA, 19 nt, Artificial Sequence
  Description of Artificial Sequence: Synthetic oligonucleotide
ucaaguccagucagguauu

SEQ ID NO: 2150033 - RNA, 19 nt, Artificial Sequence
  Description of Artificial Sequence: Synthetic oligonucleotide
ggacaagaaaaugugaugu

SEQ ID NO: 2150034 - RNA, 19 nt, Artificial Sequence
  Description of Artificial Sequence: Synthetic oligonucleotide
gauuuggcagguucugaua

SEQ ID NO: 2150035 - RNA, 19 nt, Artificial Sequence
  Description of Artificial Sequence: Synthetic oligonucleotide
agcuuccugaggaauaagu

SEQ ID NO: 2150036 - RNA, 19 nt, Artificial Sequence
  Description of Artificial Sequence: Synthetic oligonucleotide
cugggccaaaguaccaaug

SEQ ID NO: 2150037 - RNA, 19 nt, Artificial Sequence
  Description of Artificial Sequence: Synthetic oligonucleotide
ugagugcaaagcucugcau

SEQ ID NO: 2150038 - RNA, 19 nt, Artificial Sequence
  Description of Artificial Sequence: Synthetic oligonucleotide
cugauaaccaaugcacaga

SEQ ID NO: 2150039 - RNA, 19 nt, Artificial Sequence
  Description of Artificial Sequence: Synthetic oligonucleotide
acccgugcacgguuccuac

SEQ ID NO: 2150040 - RNA, 19 nt, Artificial Sequence
  Description of Artificial Sequence: Synthetic oligonucleotide
cauaagaacucugugccua

SEQ ID NO: 2150041 - RNA, 19 nt, Artificial Sequence
  Description of Artificial Sequence: Synthetic oligonucleotide
caaaguaccaauggugcaa

SEQ ID NO: 2150042 - RNA, 19 nt, Artificial Sequence
  Description of Artificial Sequence: Synthetic oligonucleotide
cagcauucaaaucccacaa

SEQ ID NO: 2150043 - RNA, 19 nt, Artificial Sequence
  Description of Artificial Sequence: Synthetic oligonucleotide
uugucucucucuccuugaa

SEQ ID NO: 2150044 - RNA, 19 nt, Artificial Sequence
  Description of Artificial Sequence: Synthetic oligonucleotide
caggguguuagcuacccaa

SEQ ID NO: 2150045 - RNA, 19 nt, Artificial Sequence
  Description of Artificial Sequence: Synthetic oligonucleotide
acuacauaugaaagcuccu

SEQ ID NO: 2150046 - RNA, 19 nt, Artificial Sequence
  Description of Artificial Sequence: Synthetic oligonucleotide
ucaggguguuagcuaccca

SEQ ID NO: 2150047 - RNA, 19 nt, Artificial Sequence
  Description of Artificial Sequence: Synthetic oligonucleotide
cuaagauugucauuugcuu

SEQ ID NO: 2150048 - RNA, 19 nt, Artificial Sequence
  Description of Artificial Sequence: Synthetic oligonucleotide
ggugccugagaauggagca

SEQ ID NO: 2150049 - RNA, 19 nt, Artificial Sequence
  Description of Artificial Sequence: Synthetic oligonucleotide
ugccugagaauggagcaaa

SEQ ID NO: 2150050 - RNA, 19 nt, Artificial Sequence
  Description of Artificial Sequence: Synthetic oligonucleotide
cauccuaagauugucauuu

SEQ ID NO: 2150051 - RNA, 19 nt, Artificial Sequence
  Description of Artificial Sequence: Synthetic oligonucleotide
agcuacccaacuccacuca

SEQ ID NO: 2150052 - RNA, 19 nt, Artificial Sequence
  Description of Artificial Sequence: Synthetic oligonucleotide
gaaucuccuggaauuugca

SEQ ID NO: 2150053 - RNA, 19 nt, Artificial Sequence
  Description of Artificial Sequence: Synthetic oligonucleotide
cuggggugccugagaaugg

SEQ ID NO: 2150054 - RNA, 19 nt, Artificial Sequence
  Description of Artificial Sequence: Synthetic oligonucleotide
augaucauccuaagauugu

SEQ ID NO: 2150055 - RNA, 19 nt, Artificial Sequence
  Description of Artificial Sequence: Synthetic oligonucleotide
aagcuuccugaggaauaag

SEQ ID NO: 2150056 - RNA, 19 nt, Artificial Sequence
  Description of Artificial Sequence: Synthetic oligonucleotide
ugaggggcucagaggacgu

SEQ ID NO: 2150057 - RNA, 19 nt, Artificial Sequence
  Description of Artificial Sequence: Synthetic oligonucleotide
ggcugaauaccacccgugc

SEQ ID NO: 2150058 - RNA, 19 nt, Artificial Sequence
  Description of Artificial Sequence: Synthetic oligonucleotide
agcuaugacuuuccauaau

SEQ ID NO: 2150059 - RNA, 19 nt, Artificial Sequence
  Description of Artificial Sequence: Synthetic oligonucleotide
agauacuggaaaacuggau

SEQ ID NO: 2150060 - RNA, 19 nt, Artificial Sequence
  Description of Artificial Sequence: Synthetic oligonucleotide
acccaacuccacucacagg

SEQ ID NO: 2150061 - RNA, 19 nt, Artificial Sequence
  Description of Artificial Sequence: Synthetic oligonucleotide
gcuuccugaggaauaagug

SEQ ID NO: 2150062 - RNA, 19 nt, Artificial Sequence
  Description of Artificial Sequence: Synthetic oligonucleotide
acgugauuuucccgccuug

SEQ ID NO: 2150063 - RNA, 19 nt, Artificial Sequence
  Description of Artificial Sequence: Synthetic oligonucleotide
auggugcaagguguuugcg

SEQ ID NO: 2150064 - RNA, 19 nt, Artificial Sequence
  Description of Artificial Sequence: Synthetic oligonucleotide
ucacgugagacgugauuuu

SEQ ID NO: 2150065 - RNA, 19 nt, Artificial Sequence
  Description of Artificial Sequence: Synthetic oligonucleotide
gugaccaaguggacaguag

SEQ ID NO: 2150066 - RNA, 19 nt, Artificial Sequence
  Description of Artificial Sequence: Synthetic oligonucleotide
agcaccuccauuggcacaa

SEQ ID NO: 2150067 - RNA, 19 nt, Artificial Sequence
  Description of Artificial Sequence: Synthetic oligonucleotide
gugcucaccaacucauuaa

SEQ ID NO: 2150068 - RNA, 19 nt, Artificial Sequence
  Description of Artificial Sequence: Synthetic oligonucleotide
aauuugcaccaggcuugag

SEQ ID NO: 2150069 - RNA, 19 nt, Artificial Sequence
  Description of Artificial Sequence: Synthetic oligonucleotide
agacgugauuuucccgccu

SEQ ID NO: 2150070 - RNA, 19 nt, Artificial Sequence
  Description of Artificial Sequence: Synthetic oligonucleotide
gcagagaauucaguuuucc

SEQ ID NO: 2150071 - RNA, 19 nt, Artificial Sequence
  Description of Artificial Sequence: Synthetic oligonucleotide
aaaaccugcuggggugccu

SEQ ID NO: 2150072 - RNA, 19 nt, Artificial Sequence
  Description of Artificial Sequence: Synthetic oligonucleotide
cagaaggacugcacagguc

SEQ ID NO: 2150073 - RNA, 19 nt, Artificial Sequence
  Description of Artificial Sequence: Synthetic oligonucleotide
guuagcuacccaacuccac

SEQ ID NO: 2150074 - RNA, 19 nt, Artificial Sequence
  Description of Artificial Sequence: Synthetic oligonucleotide
uuuucccgccuuguucgug

SEQ ID NO: 2150075 - RNA, 19 nt, Artificial Sequence
  Description of Artificial Sequence: Synthetic oligonucleotide
cugcacagaaucuccugga

SEQ ID NO: 2150076 - RNA, 19 nt, Artificial Sequence
  Description of Artificial Sequence: Synthetic oligonucleotide
guaaugauugagacuacau

SEQ ID NO: 2150077 - RNA, 19 nt, Artificial Sequence
  Description of Artificial Sequence: Synthetic oligonucleotide
cuacccaacuccacucaca

SEQ ID NO: 2150078 - RNA, 19 nt, Artificial Sequence
  Description of Artificial Sequence: Synthetic oligonucleotide
uggggugccugagaaugga

SEQ ID NO: 2150079 - RNA, 19 nt, Artificial Sequence
  Description of Artificial Sequence: Synthetic oligonucleotide
guauuaucugggccaaagu

SEQ ID NO: 2150080 - RNA, 19 nt, Artificial Sequence
  Description of Artificial Sequence: Synthetic oligonucleotide
auuuucccgccuuguucgu

SEQ ID NO: 2150081 - RNA, 19 nt, Artificial Sequence
  Description of Artificial Sequence: Synthetic oligonucleotide
ucagaggacgugggacaag

SEQ ID NO: 2150082 - RNA, 19 nt, Artificial Sequence
  Description of Artificial Sequence: Synthetic oligonucleotide
gggauuuuaaguaaugauu

SEQ ID NO: 2150083 - RNA, 19 nt, Artificial Sequence
  Description of Artificial Sequence: Synthetic oligonucleotide
auccucaaguccagucagg

SEQ ID NO: 2150084 - RNA, 19 nt, Artificial Sequence
  Description of Artificial Sequence: Synthetic oligonucleotide
uuccuaccauaagaacucu

SEQ ID NO: 2150085 - RNA, 19 nt, Artificial Sequence
  Description of Artificial Sequence: Synthetic oligonucleotide
gugggacaagaaaauguga

SEQ ID NO: 2150086 - RNA, 19 nt, Artificial Sequence
  Description of Artificial Sequence: Synthetic oligonucleotide
gucaugauaucaccaguau

SEQ ID NO: 2150087 - RNA, 19 nt, Artificial Sequence
  Description of Artificial Sequence: Synthetic oligonucleotide
cacgugagacgugauuuuc

SEQ ID NO: 2150088 - RNA, 19 nt, Artificial Sequence
  Description of Artificial Sequence: Synthetic oligonucleotide
aggggaaccggugggauuu

SEQ ID NO: 2150089 - RNA, 19 nt, Artificial Sequence
  Description of Artificial Sequence: Synthetic oligonucleotide
gccuuuuagcaauggcagc

SEQ ID NO: 2150090 - RNA, 19 nt, Artificial Sequence
  Description of Artificial Sequence: Synthetic oligonucleotide
cugaugucacaagauuaca

SEQ ID NO: 2150091 - RNA, 19 nt, Artificial Sequence
  Description of Artificial Sequence: Synthetic oligonucleotide
  modified_base (8)..(8): a, c, u, g, unknown or other
gcugcugnggaaauccuca

SEQ ID NO: 2150092 - RNA, 19 nt, Artificial Sequence
  Description of Artificial Sequence: Synthetic oligonucleotide
guuugcgaucagccgguca

SEQ ID NO: 2150093 - RNA, 19 nt, Artificial Sequence
  Description of Artificial Sequence: Synthetic oligonucleotide
auaccacccgugcacgguu

SEQ ID NO: 2150094 - RNA, 19 nt, Artificial Sequence
  Description of Artificial Sequence: Synthetic oligonucleotide
aggcugaauaccacccgug

SEQ ID NO: 2150095 - RNA, 19 nt, Artificial Sequence
  Description of Artificial Sequence: Synthetic oligonucleotide
cuccacucacaggggaacc

SEQ ID NO: 2150096 - RNA, 19 nt, Artificial Sequence
  Description of Artificial Sequence: Synthetic oligonucleotide
aucugggccaaaguaccaa

SEQ ID NO: 2150097 - RNA, 19 nt, Artificial Sequence
  Description of Artificial Sequence: Synthetic oligonucleotide
caaaaccugcuggggugcc

SEQ ID NO: 2150098 - RNA, 19 nt, Artificial Sequence
  Description of Artificial Sequence: Synthetic oligonucleotide
ggcagguucugauaaccaa

SEQ ID NO: 2150099 - RNA, 19 nt, Artificial Sequence
  Description of Artificial Sequence: Synthetic oligonucleotide
cccgccuuguucgugaaag

SEQ ID NO: 2150100 - RNA, 19 nt, Artificial Sequence
  Description of Artificial Sequence: Synthetic oligonucleotide
aguguccccugaaggagca

SEQ ID NO: 2150101 - RNA, 19 nt, Artificial Sequence
  Description of Artificial Sequence: Synthetic oligonucleotide
gugccuauuaguacauaua

SEQ ID NO: 2150102 - RNA, 19 nt, Artificial Sequence
  Description of Artificial Sequence: Synthetic oligonucleotide
ggauucaggguguuagcua

SEQ ID NO: 2150103 - RNA, 19 nt, Artificial Sequence
  Description of Artificial Sequence: Synthetic oligonucleotide
ggugcaagguguuugcgau

SEQ ID NO: 2150104 - RNA, 19 nt, Artificial Sequence
  Description of Artificial Sequence: Synthetic oligonucleotide
ggcucagaggacgugggac

SEQ ID NO: 2150105 - RNA, 19 nt, Artificial Sequence
  Description of Artificial Sequence: Synthetic oligonucleotide
ccuaccauaagaacucugu

SEQ ID NO: 2150106 - RNA, 19 nt, Artificial Sequence
  Description of Artificial Sequence: Synthetic oligonucleotide
ccaacucauuaacacucug

SEQ ID NO: 2150107 - RNA, 19 nt, Artificial Sequence
  Description of Artificial Sequence: Synthetic oligonucleotide
uaccacccgugcacgguuc

SEQ ID NO: 2150108 - RNA, 19 nt, Artificial Sequence
  Description of Artificial Sequence: Synthetic oligonucleotide
  modified_base (7)..(7): a, c, u, g, unknown or other
cugcugnggaaauccucaa

SEQ ID NO: 2150109 - RNA, 19 nt, Artificial Sequence
  Description of Artificial Sequence: Synthetic oligonucleotide
gucauccaugaucauccua

SEQ ID NO: 2150110 - RNA, 19 nt, Artificial Sequence
  Description of Artificial Sequence: Synthetic oligonucleotide
uaagaacucugugccuauu

SEQ ID NO: 2150111 - RNA, 19 nt, Artificial Sequence
  Description of Artificial Sequence: Synthetic oligonucleotide
ggugcagagaauucaguuu

SEQ ID NO: 2150112 - RNA, 19 nt, Artificial Sequence
  Description of Artificial Sequence: Synthetic oligonucleotide
gccuauuaguacauauauc

SEQ ID NO: 2150113 - RNA, 19 nt, Artificial Sequence
  Description of Artificial Sequence: Synthetic oligonucleotide
gugaugugaccaaguggac

SEQ ID NO: 2150114 - RNA, 19 nt, Artificial Sequence
  Description of Artificial Sequence: Synthetic oligonucleotide
ggagcaaagugcucaccaa

SEQ ID NO: 2150115 - RNA, 19 nt, Artificial Sequence
  Description of Artificial Sequence: Synthetic oligonucleotide
gcuacccaacuccacucac

SEQ ID NO: 2150116 - RNA, 19 nt, Artificial Sequence
  Description of Artificial Sequence: Synthetic oligonucleotide
gugcaagguguuugcgauc

SEQ ID NO: 2150117 - RNA, 19 nt, Artificial Sequence
  Description of Artificial Sequence: Synthetic oligonucleotide
cugcaaaaccugcuggggu

SEQ ID NO: 2150118 - RNA, 19 nt, Artificial Sequence
  Description of Artificial Sequence: Synthetic oligonucleotide
caaaugcaaaugccuuuua

SEQ ID NO: 2150119 - RNA, 19 nt, Artificial Sequence
  Description of Artificial Sequence: Synthetic oligonucleotide
ccaagcacauacugauguc

SEQ ID NO: 2150120 - RNA, 19 nt, Artificial Sequence
  Description of Artificial Sequence: Synthetic oligonucleotide
cagguauuucaaggucaug

SEQ ID NO: 2150121 - RNA, 19 nt, Artificial Sequence
  Description of Artificial Sequence: Synthetic oligonucleotide
cugcagauacuggaaaacu

SEQ ID NO: 2150122 - RNA, 19 nt, Artificial Sequence
  Description of Artificial Sequence: Synthetic oligonucleotide
guugacaccccaagcacau

SEQ ID NO: 2150123 - RNA, 19 nt, Artificial Sequence
  Description of Artificial Sequence: Synthetic oligonucleotide
cucaaggcugcugaugacu

SEQ ID NO: 2150124 - RNA, 19 nt, Artificial Sequence
  Description of Artificial Sequence: Synthetic oligonucleotide
ugcuggggugccugagaau

SEQ ID NO: 2150125 - RNA, 19 nt, Artificial Sequence
  Description of Artificial Sequence: Synthetic oligonucleotide
accaauggugcaagguguu

SEQ ID NO: 2150126 - RNA, 19 nt, Artificial Sequence
  Description of Artificial Sequence: Synthetic oligonucleotide
gcaaagcucugcauugaca

SEQ ID NO: 2150127 - RNA, 19 nt, Artificial Sequence
  Description of Artificial Sequence: Synthetic oligonucleotide
gugcaaagcucugcauuga

SEQ ID NO: 2150128 - RNA, 19 nt, Artificial Sequence
  Description of Artificial Sequence: Synthetic oligonucleotide
gacgugauuuucccgccuu

SEQ ID NO: 2150129 - RNA, 19 nt, Artificial Sequence
  Description of Artificial Sequence: Synthetic oligonucleotide
cagugugcucaugccacuc

SEQ ID NO: 2150130 - RNA, 19 nt, Artificial Sequence
  Description of Artificial Sequence: Synthetic oligonucleotide
cccaagcacauacugaugu

SEQ ID NO: 2150131 - RNA, 19 nt, Artificial Sequence
  Description of Artificial Sequence: Synthetic oligonucleotide
gcacgguuccuaccauaag

SEQ ID NO: 2150132 - RNA, 19 nt, Artificial Sequence
  Description of Artificial Sequence: Synthetic oligonucleotide
ggggcucagaggacguggg

SEQ ID NO: 2150133 - RNA, 19 nt, Artificial Sequence
  Description of Artificial Sequence: Synthetic oligonucleotide
uugcgaucagccggucauc

SEQ ID NO: 2150134 - RNA, 19 nt, Artificial Sequence
  Description of Artificial Sequence: Synthetic oligonucleotide
caggcugaauaccacccgu

SEQ ID NO: 2150135 - RNA, 19 nt, Artificial Sequence
  Description of Artificial Sequence: Synthetic oligonucleotide
ggcuucacagaggugcaga

SEQ ID NO: 2150136 - RNA, 19 nt, Artificial Sequence
  Description of Artificial Sequence: Synthetic oligonucleotide
ccuuguucgugaaagcagu

SEQ ID NO: 2150137 - RNA, 19 nt, Artificial Sequence
  Description of Artificial Sequence: Synthetic oligonucleotide
uguuugcgaucagccgguc

SEQ ID NO: 2150138 - RNA, 19 nt, Artificial Sequence
  Description of Artificial Sequence: Synthetic oligonucleotide
gaaggacugcacagguccu

SEQ ID NO: 2150139 - RNA, 19 nt, Artificial Sequence
  Description of Artificial Sequence: Synthetic oligonucleotide
ucccgccuuguucgugaaa

SEQ ID NO: 2150140 - RNA, 19 nt, Artificial Sequence
  Description of Artificial Sequence: Synthetic oligonucleotide
gcucaccaacucauuaaca

SEQ ID NO: 2150141 - RNA, 19 nt, Artificial Sequence
  Description of Artificial Sequence: Synthetic oligonucleotide
cucagaggacgugggacaa

SEQ ID NO: 2150142 - RNA, 19 nt, Artificial Sequence
  Description of Artificial Sequence: Synthetic oligonucleotide
gacaccccaagcacauacu

SEQ ID NO: 2150143 - RNA, 19 nt, Artificial Sequence
  Description of Artificial Sequence: Synthetic oligonucleotide
gggccaaaguaccaauggu

SEQ ID NO: 2150144 - RNA, 19 nt, Artificial Sequence
  Description of Artificial Sequence: Synthetic oligonucleotide
guguuugcgaucagccggu

SEQ ID NO: 2150145 - RNA, 19 nt, Artificial Sequence
  Description of Artificial Sequence: Synthetic oligonucleotide
gugauuuucccgccuuguu

SEQ ID NO: 2150146 - RNA, 19 nt, Artificial Sequence
  Description of Artificial Sequence: Synthetic oligonucleotide
gugccugagaauggagcaa

SEQ ID NO: 2150147 - RNA, 19 nt, Artificial Sequence
  Description of Artificial Sequence: Synthetic oligonucleotide
gugcacgguuccuaccaua

SEQ ID NO: 2150148 - RNA, 19 nt, Artificial Sequence
  Description of Artificial Sequence: Synthetic oligonucleotide
ggguguuagcuacccaacu

SEQ ID NO: 2150149 - RNA, 19 nt, Artificial Sequence
  Description of Artificial Sequence: Synthetic oligonucleotide
uugacaccccaagcacaua

SEQ ID NO: 2150150 - RNA, 19 nt, Artificial Sequence
  Description of Artificial Sequence: Synthetic oligonucleotide
cauuaacacucugcagaua

SEQ ID NO: 2150151 - RNA, 19 nt, Artificial Sequence
  Description of Artificial Sequence: Synthetic oligonucleotide
guauggauucaggguguua

SEQ ID NO: 2150152 - RNA, 19 nt, Artificial Sequence
  Description of Artificial Sequence: Synthetic oligonucleotide
gcaagguguuugcgaucag

SEQ ID NO: 2150153 - RNA, 19 nt, Artificial Sequence
  Description of Artificial Sequence: Synthetic oligonucleotide
ccgccuuguucgugaaagc

SEQ ID NO: 2150154 - RNA, 19 nt, Artificial Sequence
  Description of Artificial Sequence: Synthetic oligonucleotide
agaggacgugggacaagaa

SEQ ID NO: 2150155 - RNA, 19 nt, Artificial Sequence
  Description of Artificial Sequence: Synthetic oligonucleotide
gcagguucugauaaccaau

SEQ ID NO: 2150156 - RNA, 19 nt, Artificial Sequence
  Description of Artificial Sequence: Synthetic oligonucleotide
ggaaccggugggauuuuaa

SEQ ID NO: 2150157 - RNA, 19 nt, Artificial Sequence
  Description of Artificial Sequence: Synthetic oligonucleotide
ccgugcacgguuccuacca

SEQ ID NO: 2150158 - RNA, 19 nt, Artificial Sequence
  Description of Artificial Sequence: Synthetic oligonucleotide
ccggugggauuuuaaguaa

SEQ ID NO: 2150159 - RNA, 19 nt, Artificial Sequence
  Description of Artificial Sequence: Synthetic oligonucleotide
ccugaggaauaaguggaaa

SEQ ID NO: 2150160 - RNA, 19 nt, Artificial Sequence
  Description of Artificial Sequence: Synthetic oligonucleotide
cccgugcacgguuccuacc

SEQ ID NO: 2150161 - RNA, 19 nt, Artificial Sequence
  Description of Artificial Sequence: Synthetic oligonucleotide
cucucucuccuugaauaau

SEQ ID NO: 2150162 - RNA, 19 nt, Artificial Sequence
  Description of Artificial Sequence: Synthetic oligonucleotide
ggacgugggacaagaaaau

SEQ ID NO: 2150163 - RNA, 19 nt, Artificial Sequence
  Description of Artificial Sequence: Synthetic oligonucleotide
gcgaucagccggucaucca

SEQ ID NO: 2150164 - RNA, 19 nt, Artificial Sequence
  Description of Artificial Sequence: Synthetic oligonucleotide
ccauaagaacucugugccu

SEQ ID NO: 2150165 - RNA, 19 nt, Artificial Sequence
  Description of Artificial Sequence: Synthetic oligonucleotide
guccccugaaggagcaccu

SEQ ID NO: 2150166 - RNA, 19 nt, Artificial Sequence
  Description of Artificial Sequence: Synthetic oligonucleotide
caguauuaucugggccaaa

SEQ ID NO: 2150167 - RNA, 19 nt, Artificial Sequence
  Description of Artificial Sequence: Synthetic oligonucleotide
guguccccugaaggagcac

SEQ ID NO: 2150168 - RNA, 19 nt, Artificial Sequence
  Description of Artificial Sequence: Synthetic oligonucleotide
ccucaaguccagucaggua

SEQ ID NO: 2150169 - RNA, 19 nt, Artificial Sequence
  Description of Artificial Sequence: Synthetic oligonucleotide
cacccgugcacgguuccua

SEQ ID NO: 2150170 - RNA, 19 nt, Artificial Sequence
  Description of Artificial Sequence: Synthetic oligonucleotide
caaguccagucagguauuu

SEQ ID NO: 2150171 - RNA, 19 nt, Artificial Sequence
  Description of Artificial Sequence: Synthetic oligonucleotide
gguauggauucaggguguu

SEQ ID NO: 2150172 - RNA, 19 nt, Artificial Sequence
  Description of Artificial Sequence: Synthetic oligonucleotide
cgaucagccggucauccau

SEQ ID NO: 2150173 - RNA, 19 nt, Artificial Sequence
  Description of Artificial Sequence: Synthetic oligonucleotide
cgugauuuucccgccuugu

SEQ ID NO: 2150174 - RNA, 19 nt, Artificial Sequence
  Description of Artificial Sequence: Synthetic oligonucleotide
gggaaccggugggauuuua

SEQ ID NO: 2150175 - RNA, 19 nt, Artificial Sequence
  Description of Artificial Sequence: Synthetic oligonucleotide
cggugggauuuuaaguaau

SEQ ID NO: 2150176 - RNA, 19 nt, Artificial Sequence
  Description of Artificial Sequence: Synthetic oligonucleotide
cgugcacgguuccuaccau

SEQ ID NO: 2150177 - RNA, 19 nt, Artificial Sequence
  Description of Artificial Sequence: Synthetic oligonucleotide
ggggaaccggugggauuuu

SEQ ID NO: 2150178 - RNA, 19 nt, Artificial Sequence
  Description of Artificial Sequence: Synthetic oligonucleotide
aauucccacacuuaggugg

SEQ ID NO: 2150179 - RNA, 19 nt, Artificial Sequence
  Description of Artificial Sequence: Synthetic oligonucleotide
aacaaggugguucacagac

SEQ ID NO: 2150180 - RNA, 19 nt, Artificial Sequence
  Description of Artificial Sequence: Synthetic oligonucleotide
aaaccagugauuuuacuac

SEQ ID NO: 2150181 - RNA, 19 nt, Artificial Sequence
  Description of Artificial Sequence: Synthetic oligonucleotide
gauuaggucauaaacaugg

SEQ ID NO: 2150182 - RNA, 19 nt, Artificial Sequence
  Description of Artificial Sequence: Synthetic oligonucleotide
uuuaagaccaaucaauaug

SEQ ID NO: 2150183 - RNA, 19 nt, Artificial Sequence
  Description of Artificial Sequence: Synthetic oligonucleotide
uuaaagucuucucaaaugc

SEQ ID NO: 2150184 - RNA, 19 nt, Artificial Sequence
  Description of Artificial Sequence: Synthetic oligonucleotide
acuacaguuucauaaacac

SEQ ID NO: 2150185 - RNA, 19 nt, Artificial Sequence
  Description of Artificial Sequence: Synthetic oligonucleotide
uaaaauuccaucuccaaca

SEQ ID NO: 2150186 - RNA, 19 nt, Artificial Sequence
  Description of Artificial Sequence: Synthetic oligonucleotide
auuacauaaaauuccaucu

SEQ ID NO: 2150187 - RNA, 19 nt, Artificial Sequence
  Description of Artificial Sequence: Synthetic oligonucleotide
agaccaaucaauauguucc

SEQ ID NO: 2150188 - RNA, 19 nt, Artificial Sequence
  Description of Artificial Sequence: Synthetic oligonucleotide
aguagcuuuauccagagca

SEQ ID NO: 2150189 - RNA, 19 nt, Artificial Sequence
  Description of Artificial Sequence: Synthetic oligonucleotide
aacaauaacaaggcagugc

SEQ ID NO: 2150190 - RNA, 19 nt, Artificial Sequence
  Description of Artificial Sequence: Synthetic oligonucleotide
uuaagaccaaucaauaugu

SEQ ID NO: 2150191 - RNA, 19 nt, Artificial Sequence
  Description of Artificial Sequence: Synthetic oligonucleotide
aucauuugugcucaugacc

SEQ ID NO: 2150192 - RNA, 19 nt, Artificial Sequence
  Description of Artificial Sequence: Synthetic oligonucleotide
aagaccaaucaauauguuc

SEQ ID NO: 2150193 - RNA, 19 nt, Artificial Sequence
  Description of Artificial Sequence: Synthetic oligonucleotide
auagguauuacauaaaauu

SEQ ID NO: 2150194 - RNA, 19 nt, Artificial Sequence
  Description of Artificial Sequence: Synthetic oligonucleotide
aagguuuagaucucuuaac

SEQ ID NO: 2150195 - RNA, 19 nt, Artificial Sequence
  Description of Artificial Sequence: Synthetic oligonucleotide
ucuagauauaucuccagag

SEQ ID NO: 2150196 - RNA, 19 nt, Artificial Sequence
  Description of Artificial Sequence: Synthetic oligonucleotide
uauaauugguguuaaaguc

SEQ ID NO: 2150197 - RNA, 19 nt, Artificial Sequence
  Description of Artificial Sequence: Synthetic oligonucleotide
gaaugauuaggucauaaac

SEQ ID NO: 2150198 - RNA, 19 nt, Artificial Sequence
  Description of Artificial Sequence: Synthetic oligonucleotide
aaagucucaugacuaacuc

SEQ ID NO: 2150199 - RNA, 19 nt, Artificial Sequence
  Description of Artificial Sequence: Synthetic oligonucleotide
aguagcuuuacuucacccc

SEQ ID NO: 2150200 - RNA, 19 nt, Artificial Sequence
  Description of Artificial Sequence: Synthetic oligonucleotide
aaaggaguggcagucagac

SEQ ID NO: 2150201 - RNA, 19 nt, Artificial Sequence
  Description of Artificial Sequence: Synthetic oligonucleotide
aacugucuaauauuuaaga

SEQ ID NO: 2150202 - RNA, 19 nt, Artificial Sequence
  Description of Artificial Sequence: Synthetic oligonucleotide
ugcuaauucagggagaucc

SEQ ID NO: 2150203 - RNA, 19 nt, Artificial Sequence
  Description of Artificial Sequence: Synthetic oligonucleotide
aauaacaaggcagugcuca

SEQ ID NO: 2150204 - RNA, 19 nt, Artificial Sequence
  Description of Artificial Sequence: Synthetic oligonucleotide
uuaacaaggugguucacag

SEQ ID NO: 2150205 - RNA, 19 nt, Artificial Sequence
  Description of Artificial Sequence: Synthetic oligonucleotide
uauccaaugcuaauucagg

SEQ ID NO: 2150206 - RNA, 19 nt, Artificial Sequence
  Description of Artificial Sequence: Synthetic oligonucleotide
uaacuaucaauauagguau

SEQ ID NO: 2150207 - RNA, 19 nt, Artificial Sequence
  Description of Artificial Sequence: Synthetic oligonucleotide
uagaaaaguagcuuaucag

SEQ ID NO: 2150208 - RNA, 19 nt, Artificial Sequence
  Description of Artificial Sequence: Synthetic oligonucleotide
acaauaacaaggcagugcu

SEQ ID NO: 2150209 - RNA, 19 nt, Artificial Sequence
  Description of Artificial Sequence: Synthetic oligonucleotide
uagguauuacauaaaauuc

SEQ ID NO: 2150210 - RNA, 19 nt, Artificial Sequence
  Description of Artificial Sequence: Synthetic oligonucleotide
gaucucuuaacauuuccgc

SEQ ID NO: 2150211 - RNA, 19 nt, Artificial Sequence
  Description of Artificial Sequence: Synthetic oligonucleotide
aaaguagcuuaucagaauu

SEQ ID NO: 2150212 - RNA, 19 nt, Artificial Sequence
  Description of Artificial Sequence: Synthetic oligonucleotide
uguccuugaaagaaaggag

SEQ ID NO: 2150213 - RNA, 19 nt, Artificial Sequence
  Description of Artificial Sequence: Synthetic oligonucleotide
uccuuuguaacuaucaaua

SEQ ID NO: 2150214 - RNA, 19 nt, Artificial Sequence
  Description of Artificial Sequence: Synthetic oligonucleotide
caaugcaaaacuuggaaug

SEQ ID NO: 2150215 - RNA, 19 nt, Artificial Sequence
  Description of Artificial Sequence: Synthetic oligonucleotide
uuuagaucucuuaacauuu

SEQ ID NO: 2150216 - RNA, 19 nt, Artificial Sequence
  Description of Artificial Sequence: Synthetic oligonucleotide
aguagcuuaucagaauucc

SEQ ID NO: 2150217 - RNA, 19 nt, Artificial Sequence
  Description of Artificial Sequence: Synthetic oligonucleotide
uaucaaaugacuucuccac

SEQ ID NO: 2150218 - RNA, 19 nt, Artificial Sequence
  Description of Artificial Sequence: Synthetic oligonucleotide
guuaaagucuucucaaaug

SEQ ID NO: 2150219 - RNA, 19 nt, Artificial Sequence
  Description of Artificial Sequence: Synthetic oligonucleotide
uaacugucuaauauuuaag

SEQ ID NO: 2150220 - RNA, 19 nt, Artificial Sequence
  Description of Artificial Sequence: Synthetic oligonucleotide
ugaaagaaaggaguggcag

SEQ ID NO: 2150221 - RNA, 19 nt, Artificial Sequence
  Description of Artificial Sequence: Synthetic oligonucleotide
cuaauauuuaagaccaauc

SEQ ID NO: 2150222 - RNA, 19 nt, Artificial Sequence
  Description of Artificial Sequence: Synthetic oligonucleotide
agaauucccacacuuaggu

SEQ ID NO: 2150223 - RNA, 19 nt, Artificial Sequence
  Description of Artificial Sequence: Synthetic oligonucleotide
agggagauccuucagcaac

SEQ ID NO: 2150224 - RNA, 19 nt, Artificial Sequence
  Description of Artificial Sequence: Synthetic oligonucleotide
uagcuuaucagaauuccca

SEQ ID NO: 2150225 - RNA, 19 nt, Artificial Sequence
  Description of Artificial Sequence: Synthetic oligonucleotide
uuagaugucauuucccggu

SEQ ID NO: 2150226 - RNA, 19 nt, Artificial Sequence
  Description of Artificial Sequence: Synthetic oligonucleotide
ucuaggaguauccaaugcu

SEQ ID NO: 2150227 - RNA, 19 nt, Artificial Sequence
  Description of Artificial Sequence: Synthetic oligonucleotide
cuuaucagaauucccacac

SEQ ID NO: 2150228 - RNA, 19 nt, Artificial Sequence
  Description of Artificial Sequence: Synthetic oligonucleotide
aaaguauauauggugugug

SEQ ID NO: 2150229 - RNA, 19 nt, Artificial Sequence
  Description of Artificial Sequence: Synthetic oligonucleotide
uacucagaagcacaguagc

SEQ ID NO: 2150230 - RNA, 19 nt, Artificial Sequence
  Description of Artificial Sequence: Synthetic oligonucleotide
ucuuuaacaaggugguuca

SEQ ID NO: 2150231 - RNA, 19 nt, Artificial Sequence
  Description of Artificial Sequence: Synthetic oligonucleotide
augauuaggucauaaacau

SEQ ID NO: 2150232 - RNA, 19 nt, Artificial Sequence
  Description of Artificial Sequence: Synthetic oligonucleotide
uacucuuguauaauuggug

SEQ ID NO: 2150233 - RNA, 19 nt, Artificial Sequence
  Description of Artificial Sequence: Synthetic oligonucleotide
cuugaaagaaaggaguggc

SEQ ID NO: 2150234 - RNA, 19 nt, Artificial Sequence
  Description of Artificial Sequence: Synthetic oligonucleotide
ucuggcaaugaacuggccc

SEQ ID NO: 2150235 - RNA, 19 nt, Artificial Sequence
  Description of Artificial Sequence: Synthetic oligonucleotide
aguuucauaaacacaguuc

SEQ ID NO: 2150236 - RNA, 19 nt, Artificial Sequence
  Description of Artificial Sequence: Synthetic oligonucleotide
uuaggucauaaacauggca

SEQ ID NO: 2150237 - RNA, 19 nt, Artificial Sequence
  Description of Artificial Sequence: Synthetic oligonucleotide
caauauguucccuggaaag

SEQ ID NO: 2150238 - RNA, 19 nt, Artificial Sequence
  Description of Artificial Sequence: Synthetic oligonucleotide
auccaaugcuaauucaggg

SEQ ID NO: 2150239 - RNA, 19 nt, Artificial Sequence
  Description of Artificial Sequence: Synthetic oligonucleotide
uacucuuuaagcagcauau

SEQ ID NO: 2150240 - RNA, 19 nt, Artificial Sequence
  Description of Artificial Sequence: Synthetic oligonucleotide
ugguguuaaagucuucuca

SEQ ID NO: 2150241 - RNA, 19 nt, Artificial Sequence
  Description of Artificial Sequence: Synthetic oligonucleotide
aaagucuucucaaaugcug

SEQ ID NO: 2150242 - RNA, 19 nt, Artificial Sequence
  Description of Artificial Sequence: Synthetic oligonucleotide
caauauagguauuacauaa

SEQ ID NO: 2150243 - RNA, 19 nt, Artificial Sequence
  Description of Artificial Sequence: Synthetic oligonucleotide
uauagguauuacauaaaau

SEQ ID NO: 2150244 - RNA, 19 nt, Artificial Sequence
  Description of Artificial Sequence: Synthetic oligonucleotide
uccuugaaagaaaggagug

SEQ ID NO: 2150245 - RNA, 19 nt, Artificial Sequence
  Description of Artificial Sequence: Synthetic oligonucleotide
caaggugguucacagaccg

SEQ ID NO: 2150246 - RNA, 19 nt, Artificial Sequence
  Description of Artificial Sequence: Synthetic oligonucleotide
auauagguauuacauaaaa

SEQ ID NO: 2150247 - RNA, 19 nt, Artificial Sequence
  Description of Artificial Sequence: Synthetic oligonucleotide
agcuuaucagaauucccac

SEQ ID NO: 2150248 - RNA, 19 nt, Artificial Sequence
  Description of Artificial Sequence: Synthetic oligonucleotide
uggcacuuagaaaaguagc

SEQ ID NO: 2150249 - RNA, 19 nt, Artificial Sequence
  Description of Artificial Sequence: Synthetic oligonucleotide
uucuagauauaucuccaga

SEQ ID NO: 2150250 - RNA, 19 nt, Artificial Sequence
  Description of Artificial Sequence: Synthetic oligonucleotide
aaguauauauggugugugu

SEQ ID NO: 2150251 - RNA, 19 nt, Artificial Sequence
  Description of Artificial Sequence: Synthetic oligonucleotide
aaaguacucuuguauaauu

SEQ ID NO: 2150252 - RNA, 19 nt, Artificial Sequence
  Description of Artificial Sequence: Synthetic oligonucleotide
auauuuaagaccaaucaau

SEQ ID NO: 2150253 - RNA, 19 nt, Artificial Sequence
  Description of Artificial Sequence: Synthetic oligonucleotide
aacacuguccuugaaagaa

SEQ ID NO: 2150254 - RNA, 19 nt, Artificial Sequence
  Description of Artificial Sequence: Synthetic oligonucleotide
cuaacuaaagcuuuguaua

SEQ ID NO: 2150255 - RNA, 19 nt, Artificial Sequence
  Description of Artificial Sequence: Synthetic oligonucleotide
uagaucucuuaacauuucc

SEQ ID NO: 2150256 - RNA, 19 nt, Artificial Sequence
  Description of Artificial Sequence: Synthetic oligonucleotide
guaacuaucaauauaggua

SEQ ID NO: 2150257 - RNA, 19 nt, Artificial Sequence
  Description of Artificial Sequence: Synthetic oligonucleotide
caaaacuuggaaugauuag

SEQ ID NO: 2150258 - RNA, 19 nt, Artificial Sequence
  Description of Artificial Sequence: Synthetic oligonucleotide
agguuuagaucucuuaaca

SEQ ID NO: 2150259 - RNA, 19 nt, Artificial Sequence
  Description of Artificial Sequence: Synthetic oligonucleotide
uauaucuccagagagcaaa

SEQ ID NO: 2150260 - RNA, 19 nt, Artificial Sequence
  Description of Artificial Sequence: Synthetic oligonucleotide
aucaaugcaaaacuuggaa

SEQ ID NO: 2150261 - RNA, 19 nt, Artificial Sequence
  Description of Artificial Sequence: Synthetic oligonucleotide
acaaaaguauauauggugu

SEQ ID NO: 2150262 - RNA, 19 nt, Artificial Sequence
  Description of Artificial Sequence: Synthetic oligonucleotide
cuuagaugucauuucccgg

SEQ ID NO: 2150263 - RNA, 19 nt, Artificial Sequence
  Description of Artificial Sequence: Synthetic oligonucleotide
uauaaaccagugauuuuac

SEQ ID NO: 2150264 - RNA, 19 nt, Artificial Sequence
  Description of Artificial Sequence: Synthetic oligonucleotide
aaacuuggaaugauuaggu

SEQ ID NO: 2150265 - RNA, 19 nt, Artificial Sequence
  Description of Artificial Sequence: Synthetic oligonucleotide
ucaauauguucccuggaaa

SEQ ID NO: 2150266 - RNA, 19 nt, Artificial Sequence
  Description of Artificial Sequence: Synthetic oligonucleotide
ucucaagacaaaaguauau

SEQ ID NO: 2150267 - RNA, 19 nt, Artificial Sequence
  Description of Artificial Sequence: Synthetic oligonucleotide
aauauguucccuggaaaga

SEQ ID NO: 2150268 - RNA, 19 nt, Artificial Sequence
  Description of Artificial Sequence: Synthetic oligonucleotide
augaccgucccacagaggu

SEQ ID NO: 2150269 - RNA, 19 nt, Artificial Sequence
  Description of Artificial Sequence: Synthetic oligonucleotide
aggaguggcagucagacau

SEQ ID NO: 2150270 - RNA, 19 nt, Artificial Sequence
  Description of Artificial Sequence: Synthetic oligonucleotide
aaaagucucaugacuaacu

SEQ ID NO: 2150271 - RNA, 19 nt, Artificial Sequence
  Description of Artificial Sequence: Synthetic oligonucleotide
ucaaugcaaaacuuggaau

SEQ ID NO: 2150272 - RNA, 19 nt, Artificial Sequence
  Description of Artificial Sequence: Synthetic oligonucleotide
ucaauauagguauuacaua

SEQ ID NO: 2150273 - RNA, 19 nt, Artificial Sequence
  Description of Artificial Sequence: Synthetic oligonucleotide
uuuguauaaaccagugauu

SEQ ID NO: 2150274 - RNA, 19 nt, Artificial Sequence
  Description of Artificial Sequence: Synthetic oligonucleotide
gacaucaaugcaaaacuug

SEQ ID NO: 2150275 - RNA, 19 nt, Artificial Sequence
  Description of Artificial Sequence: Synthetic oligonucleotide
ucuaauauuuaagaccaau

SEQ ID NO: 2150276 - RNA, 19 nt, Artificial Sequence
  Description of Artificial Sequence: Synthetic oligonucleotide
uuguauaaaccagugauuu

SEQ ID NO: 2150277 - RNA, 19 nt, Artificial Sequence
  Description of Artificial Sequence: Synthetic oligonucleotide
ugucauuucccggugacug

SEQ ID NO: 2150278 - RNA, 19 nt, Artificial Sequence
  Description of Artificial Sequence: Synthetic oligonucleotide
guacacaaucuacaguucc

SEQ ID NO: 2150279 - RNA, 19 nt, Artificial Sequence
  Description of Artificial Sequence: Synthetic oligonucleotide
ucauuugugucuccgugcu

SEQ ID NO: 2150280 - RNA, 19 nt, Artificial Sequence
  Description of Artificial Sequence: Synthetic oligonucleotide
aaucaauauguucccugga

SEQ ID NO: 2150281 - RNA, 19 nt, Artificial Sequence
  Description of Artificial Sequence: Synthetic oligonucleotide
auuuccgcaaccucauuug

SEQ ID NO: 2150282 - RNA, 19 nt, Artificial Sequence
  Description of Artificial Sequence: Synthetic oligonucleotide
ugugucuauuccccaaagc

SEQ ID NO: 2150283 - RNA, 19 nt, Artificial Sequence
  Description of Artificial Sequence: Synthetic oligonucleotide
ugauuaggucauaaacaug

SEQ ID NO: 2150284 - RNA, 19 nt, Artificial Sequence
  Description of Artificial Sequence: Synthetic oligonucleotide
ucuauuccccaaagcacag

SEQ ID NO: 2150285 - RNA, 19 nt, Artificial Sequence
  Description of Artificial Sequence: Synthetic oligonucleotide
uuuaacaaggugguucaca

SEQ ID NO: 2150286 - RNA, 19 nt, Artificial Sequence
  Description of Artificial Sequence: Synthetic oligonucleotide
gaggcaaaacuacaguuuc

SEQ ID NO: 2150287 - RNA, 19 nt, Artificial Sequence
  Description of Artificial Sequence: Synthetic oligonucleotide
aaguacucuuguauaauug

SEQ ID NO: 2150288 - RNA, 19 nt, Artificial Sequence
  Description of Artificial Sequence: Synthetic oligonucleotide
gugucuauuccccaaagca

SEQ ID NO: 2150289 - RNA, 19 nt, Artificial Sequence
  Description of Artificial Sequence: Synthetic oligonucleotide
uauauggugugugugugug

SEQ ID NO: 2150290 - RNA, 19 nt, Artificial Sequence
  Description of Artificial Sequence: Synthetic oligonucleotide
aaugcuaauucagggagau

SEQ ID NO: 2150291 - RNA, 19 nt, Artificial Sequence
  Description of Artificial Sequence: Synthetic oligonucleotide
aguauauauggugugugug

SEQ ID NO: 2150292 - RNA, 19 nt, Artificial Sequence
  Description of Artificial Sequence: Synthetic oligonucleotide
ucaaucucuuuaacaaggu

SEQ ID NO: 2150293 - RNA, 19 nt, Artificial Sequence
  Description of Artificial Sequence: Synthetic oligonucleotide
ugaacuggcccaccaacug

SEQ ID NO: 2150294 - RNA, 19 nt, Artificial Sequence
  Description of Artificial Sequence: Synthetic oligonucleotide
guauccaaugcuaauucag

SEQ ID NO: 2150295 - RNA, 19 nt, Artificial Sequence
  Description of Artificial Sequence: Synthetic oligonucleotide
aaguagcuuaucagaauuc

SEQ ID NO: 2150296 - RNA, 19 nt, Artificial Sequence
  Description of Artificial Sequence: Synthetic oligonucleotide
agaucucuuaacauuuccg

SEQ ID NO: 2150297 - RNA, 19 nt, Artificial Sequence
  Description of Artificial Sequence: Synthetic oligonucleotide
uucucaagacaaaaguaua

SEQ ID NO: 2150298 - RNA, 19 nt, Artificial Sequence
  Description of Artificial Sequence: Synthetic oligonucleotide
gcuuagaugucauuucccg

SEQ ID NO: 2150299 - RNA, 19 nt, Artificial Sequence
  Description of Artificial Sequence: Synthetic oligonucleotide
aacuacaguuucauaaaca

SEQ ID NO: 2150300 - RNA, 19 nt, Artificial Sequence
  Description of Artificial Sequence: Synthetic oligonucleotide
gaguauccaaugcuaauuc

SEQ ID NO: 2150301 - RNA, 19 nt, Artificial Sequence
  Description of Artificial Sequence: Synthetic oligonucleotide
ugcucuaggaguauccaau

SEQ ID NO: 2150302 - RNA, 19 nt, Artificial Sequence
  Description of Artificial Sequence: Synthetic oligonucleotide
cucuuuaacaaggugguuc

SEQ ID NO: 2150303 - RNA, 19 nt, Artificial Sequence
  Description of Artificial Sequence: Synthetic oligonucleotide
uccgcaaccucauuugugu

SEQ ID NO: 2150304 - RNA, 19 nt, Artificial Sequence
  Description of Artificial Sequence: Synthetic oligonucleotide
agcucuggcaaugaacugg

SEQ ID NO: 2150305 - RNA, 19 nt, Artificial Sequence
  Description of Artificial Sequence: Synthetic oligonucleotide
gaaaaguagcuuaucagaa

SEQ ID NO: 2150306 - RNA, 19 nt, Artificial Sequence
  Description of Artificial Sequence: Synthetic oligonucleotide
ucuuguauaauugguguua

SEQ ID NO: 2150307 - RNA, 19 nt, Artificial Sequence
  Description of Artificial Sequence: Synthetic oligonucleotide
uauggugugugugugugug

SEQ ID NO: 2150308 - RNA, 19 nt, Artificial Sequence
  Description of Artificial Sequence: Synthetic oligonucleotide
uaguagcuuuacuucaccc

SEQ ID NO: 2150309 - RNA, 19 nt, Artificial Sequence
  Description of Artificial Sequence: Synthetic oligonucleotide
aaacacuguccuugaaaga

SEQ ID NO: 2150310 - RNA, 19 nt, Artificial Sequence
  Description of Artificial Sequence: Synthetic oligonucleotide
uauguucccuggaaagaug

SEQ ID NO: 2150311 - RNA, 19 nt, Artificial Sequence
  Description of Artificial Sequence: Synthetic oligonucleotide
aucaauauguucccuggaa

SEQ ID NO: 2150312 - RNA, 19 nt, Artificial Sequence
  Description of Artificial Sequence: Synthetic oligonucleotide
uacuucaccccuaacuaaa

SEQ ID NO: 2150313 - RNA, 19 nt, Artificial Sequence
  Description of Artificial Sequence: Synthetic oligonucleotide
uacuuaacugucuaauauu

SEQ ID NO: 2150314 - RNA, 19 nt, Artificial Sequence
  Description of Artificial Sequence: Synthetic oligonucleotide
uagccuguacacaaucuac

SEQ ID NO: 2150315 - RNA, 19 nt, Artificial Sequence
  Description of Artificial Sequence: Synthetic oligonucleotide
cucuuuaagcagcauauca

SEQ ID NO: 2150316 - RNA, 19 nt, Artificial Sequence
  Description of Artificial Sequence: Synthetic oligonucleotide
aaacaauaacaaggcagug

SEQ ID NO: 2150317 - RNA, 19 nt, Artificial Sequence
  Description of Artificial Sequence: Synthetic oligonucleotide
agucuucucaaaugcuguc

SEQ ID NO: 2150318 - RNA, 19 nt, Artificial Sequence
  Description of Artificial Sequence: Synthetic oligonucleotide
ucuagccuguacacaaucu

SEQ ID NO: 2150319 - RNA, 19 nt, Artificial Sequence
  Description of Artificial Sequence: Synthetic oligonucleotide
aagggccgaggacacugcc

SEQ ID NO: 2150320 - RNA, 19 nt, Artificial Sequence
  Description of Artificial Sequence: Synthetic oligonucleotide
ugccaauacaggcacucca

SEQ ID NO: 2150321 - RNA, 19 nt, Artificial Sequence
  Description of Artificial Sequence: Synthetic oligonucleotide
cagaauucccacacuuagg

SEQ ID NO: 2150322 - RNA, 19 nt, Artificial Sequence
  Description of Artificial Sequence: Synthetic oligonucleotide
aguauccaaugcuaauuca

SEQ ID NO: 2150323 - RNA, 19 nt, Artificial Sequence
  Description of Artificial Sequence: Synthetic oligonucleotide
auuaggucauaaacauggc

SEQ ID NO: 2150324 - RNA, 19 nt, Artificial Sequence
  Description of Artificial Sequence: Synthetic oligonucleotide
uuccuuuguaacuaucaau

SEQ ID NO: 2150325 - RNA, 19 nt, Artificial Sequence
  Description of Artificial Sequence: Synthetic oligonucleotide
aggucauaaacauggcacu

SEQ ID NO: 2150326 - RNA, 19 nt, Artificial Sequence
  Description of Artificial Sequence: Synthetic oligonucleotide
ucuuaacauuuccgcaacc

SEQ ID NO: 2150327 - RNA, 19 nt, Artificial Sequence
  Description of Artificial Sequence: Synthetic oligonucleotide
aucaaaugacuucuccaca

SEQ ID NO: 2150328 - RNA, 19 nt, Artificial Sequence
  Description of Artificial Sequence: Synthetic oligonucleotide
aaccucauuugugucuccg

SEQ ID NO: 2150329 - RNA, 19 nt, Artificial Sequence
  Description of Artificial Sequence: Synthetic oligonucleotide
aauauagguauuacauaaa

SEQ ID NO: 2150330 - RNA, 19 nt, Artificial Sequence
  Description of Artificial Sequence: Synthetic oligonucleotide
ucuccgugcucaaaguacu

SEQ ID NO: 2150331 - RNA, 19 nt, Artificial Sequence
  Description of Artificial Sequence: Synthetic oligonucleotide
agcuuagaugucauuuccc

SEQ ID NO: 2150332 - RNA, 19 nt, Artificial Sequence
  Description of Artificial Sequence: Synthetic oligonucleotide
acugccaauacaggcacuc

SEQ ID NO: 2150333 - RNA, 19 nt, Artificial Sequence
  Description of Artificial Sequence: Synthetic oligonucleotide
cacucuucaucucaccaag

SEQ ID NO: 2150334 - RNA, 19 nt, Artificial Sequence
  Description of Artificial Sequence: Synthetic oligonucleotide
cuaucaauauagguauuac

SEQ ID NO: 2150335 - RNA, 19 nt, Artificial Sequence
  Description of Artificial Sequence: Synthetic oligonucleotide
guauaaaccagugauuuua

SEQ ID NO: 2150336 - RNA, 19 nt, Artificial Sequence
  Description of Artificial Sequence: Synthetic oligonucleotide
uuagaucucuuaacauuuc

SEQ ID NO: 2150337 - RNA, 19 nt, Artificial Sequence
  Description of Artificial Sequence: Synthetic oligonucleotide
auaacaaggcagugcucag

SEQ ID NO: 2150338 - RNA, 19 nt, Artificial Sequence
  Description of Artificial Sequence: Synthetic oligonucleotide
aaauacucuuuaagcagca

SEQ ID NO: 2150339 - RNA, 19 nt, Artificial Sequence
  Description of Artificial Sequence: Synthetic oligonucleotide
caccauuuacuuaacuguc

SEQ ID NO: 2150340 - RNA, 19 nt, Artificial Sequence
  Description of Artificial Sequence: Synthetic oligonucleotide
caaaugcugucucauccag

SEQ ID NO: 2150341 - RNA, 19 nt, Artificial Sequence
  Description of Artificial Sequence: Synthetic oligonucleotide
ucuucaucucaccaagguu

SEQ ID NO: 2150342 - RNA, 19 nt, Artificial Sequence
  Description of Artificial Sequence: Synthetic oligonucleotide
ugcaaaacuuggaaugauu

SEQ ID NO: 2150343 - RNA, 19 nt, Artificial Sequence
  Description of Artificial Sequence: Synthetic oligonucleotide
uuauccagagcagcucuag

SEQ ID NO: 2150344 - RNA, 19 nt, Artificial Sequence
  Description of Artificial Sequence: Synthetic oligonucleotide
cucuaggaguauccaaugc

SEQ ID NO: 2150345 - RNA, 19 nt, Artificial Sequence
  Description of Artificial Sequence: Synthetic oligonucleotide
uuacuucaccccuaacuaa

SEQ ID NO: 2150346 - RNA, 19 nt, Artificial Sequence
  Description of Artificial Sequence: Synthetic oligonucleotide
gugugugugugucuauucc

SEQ ID NO: 2150347 - RNA, 19 nt, Artificial Sequence
  Description of Artificial Sequence: Synthetic oligonucleotide
caucauuugugcucaugac

SEQ ID NO: 2150348 - RNA, 19 nt, Artificial Sequence
  Description of Artificial Sequence: Synthetic oligonucleotide
aucucuuuaacaagguggu

SEQ ID NO: 2150349 - RNA, 19 nt, Artificial Sequence
  Description of Artificial Sequence: Synthetic oligonucleotide
auuugugcucaugaccguc

SEQ ID NO: 2150350 - RNA, 19 nt, Artificial Sequence
  Description of Artificial Sequence: Synthetic oligonucleotide
guaguagcuuuacuucacc

SEQ ID NO: 2150351 - RNA, 19 nt, Artificial Sequence
  Description of Artificial Sequence: Synthetic oligonucleotide
auggcacuuagaaaaguag

SEQ ID NO: 2150352 - RNA, 19 nt, Artificial Sequence
  Description of Artificial Sequence: Synthetic oligonucleotide
caaucucuuuaacaaggug

SEQ ID NO: 2150353 - RNA, 19 nt, Artificial Sequence
  Description of Artificial Sequence: Synthetic oligonucleotide
aguuccuuuguaacuauca

SEQ ID NO: 2150354 - RNA, 19 nt, Artificial Sequence
  Description of Artificial Sequence: Synthetic oligonucleotide
ugugugucuauuccccaaa

SEQ ID NO: 2150355 - RNA, 19 nt, Artificial Sequence
  Description of Artificial Sequence: Synthetic oligonucleotide
aucuacaguuccuuuguaa

SEQ ID NO: 2150356 - RNA, 19 nt, Artificial Sequence
  Description of Artificial Sequence: Synthetic oligonucleotide
uuccgcaaccucauuugug

SEQ ID NO: 2150357 - RNA, 19 nt, Artificial Sequence
  Description of Artificial Sequence: Synthetic oligonucleotide
uacaguuccuuuguaacua

SEQ ID NO: 2150358 - RNA, 19 nt, Artificial Sequence
  Description of Artificial Sequence: Synthetic oligonucleotide
caauacaggcacuccacuc

SEQ ID NO: 2150359 - RNA, 19 nt, Artificial Sequence
  Description of Artificial Sequence: Synthetic oligonucleotide
uguauaaaccagugauuuu

SEQ ID NO: 2150360 - RNA, 19 nt, Artificial Sequence
  Description of Artificial Sequence: Synthetic oligonucleotide
cucuuaacauuuccgcaac

SEQ ID NO: 2150361 - RNA, 19 nt, Artificial Sequence
  Description of Artificial Sequence: Synthetic oligonucleotide
acuuaacugucuaauauuu

SEQ ID NO: 2150362 - RNA, 19 nt, Artificial Sequence
  Description of Artificial Sequence: Synthetic oligonucleotide
acuaucaauauagguauua

SEQ ID NO: 2150363 - RNA, 19 nt, Artificial Sequence
  Description of Artificial Sequence: Synthetic oligonucleotide
acauaaaauuccaucucca

SEQ ID NO: 2150364 - RNA, 19 nt, Artificial Sequence
  Description of Artificial Sequence: Synthetic oligonucleotide
gccaccauuuacuuaacug

SEQ ID NO: 2150365 - RNA, 19 nt, Artificial Sequence
  Description of Artificial Sequence: Synthetic oligonucleotide
gaggucagaaagcagcuua

SEQ ID NO: 2150366 - RNA, 19 nt, Artificial Sequence
  Description of Artificial Sequence: Synthetic oligonucleotide
ugugugugugugucuauuc

SEQ ID NO: 2150367 - RNA, 19 nt, Artificial Sequence
  Description of Artificial Sequence: Synthetic oligonucleotide
auauauggugugugugugu

SEQ ID NO: 2150368 - RNA, 19 nt, Artificial Sequence
  Description of Artificial Sequence: Synthetic oligonucleotide
uuuccgcaaccucauuugu

SEQ ID NO: 2150369 - RNA, 19 nt, Artificial Sequence
  Description of Artificial Sequence: Synthetic oligonucleotide
guagcuuaucagaauuccc

SEQ ID NO: 2150370 - RNA, 19 nt, Artificial Sequence
  Description of Artificial Sequence: Synthetic oligonucleotide
acacuuaggugguuacucu

SEQ ID NO: 2150371 - RNA, 19 nt, Artificial Sequence
  Description of Artificial Sequence: Synthetic oligonucleotide
agacaaaaguauauauggu

SEQ ID NO: 2150372 - RNA, 19 nt, Artificial Sequence
  Description of Artificial Sequence: Synthetic oligonucleotide
ugguucacagaccgcugcc

SEQ ID NO: 2150373 - RNA, 19 nt, Artificial Sequence
  Description of Artificial Sequence: Synthetic oligonucleotide
ggacacugccaauacaggc

SEQ ID NO: 2150374 - RNA, 19 nt, Artificial Sequence
  Description of Artificial Sequence: Synthetic oligonucleotide
gguguuaaagucuucucaa

SEQ ID NO: 2150375 - RNA, 19 nt, Artificial Sequence
  Description of Artificial Sequence: Synthetic oligonucleotide
aaugacuucuccacaucau

SEQ ID NO: 2150376 - RNA, 19 nt, Artificial Sequence
  Description of Artificial Sequence: Synthetic oligonucleotide
uggaaugauuaggucauaa

SEQ ID NO: 2150377 - RNA, 19 nt, Artificial Sequence
  Description of Artificial Sequence: Synthetic oligonucleotide
guuuagaucucuuaacauu

SEQ ID NO: 2150378 - RNA, 19 nt, Artificial Sequence
  Description of Artificial Sequence: Synthetic oligonucleotide
auauguucccuggaaagau

SEQ ID NO: 2150379 - RNA, 19 nt, Artificial Sequence
  Description of Artificial Sequence: Synthetic oligonucleotide
uucaucucaccaagguuua

SEQ ID NO: 2150380 - RNA, 19 nt, Artificial Sequence
  Description of Artificial Sequence: Synthetic oligonucleotide
gucuauuccccaaagcaca

SEQ ID NO: 2150381 - RNA, 19 nt, Artificial Sequence
  Description of Artificial Sequence: Synthetic oligonucleotide
cagucagacaucaaugcaa

SEQ ID NO: 2150382 - RNA, 19 nt, Artificial Sequence
  Description of Artificial Sequence: Synthetic oligonucleotide
uaaacacaguucuccuggu

SEQ ID NO: 2150383 - RNA, 19 nt, Artificial Sequence
  Description of Artificial Sequence: Synthetic oligonucleotide
agcagcuuagaugucauuu

SEQ ID NO: 2150384 - RNA, 19 nt, Artificial Sequence
  Description of Artificial Sequence: Synthetic oligonucleotide
guagcuuuacuucaccccu

SEQ ID NO: 2150385 - RNA, 19 nt, Artificial Sequence
  Description of Artificial Sequence: Synthetic oligonucleotide
ucaugacuaacucgucuuu

SEQ ID NO: 2150386 - RNA, 19 nt, Artificial Sequence
  Description of Artificial Sequence: Synthetic oligonucleotide
aaggugguucacagaccgc

SEQ ID NO: 2150387 - RNA, 19 nt, Artificial Sequence
  Description of Artificial Sequence: Synthetic oligonucleotide
uaacaaggugguucacaga

SEQ ID NO: 2150388 - RNA, 19 nt, Artificial Sequence
  Description of Artificial Sequence: Synthetic oligonucleotide
aagaaaggaguggcaguca

SEQ ID NO: 2150389 - RNA, 19 nt, Artificial Sequence
  Description of Artificial Sequence: Synthetic oligonucleotide
uuuauccagagcagcucua

SEQ ID NO: 2150390 - RNA, 19 nt, Artificial Sequence
  Description of Artificial Sequence: Synthetic oligonucleotide
aagcagcauaucaaucucu

SEQ ID NO: 2150391 - RNA, 19 nt, Artificial Sequence
  Description of Artificial Sequence: Synthetic oligonucleotide
aggaguauccaaugcuaau

SEQ ID NO: 2150392 - RNA, 19 nt, Artificial Sequence
  Description of Artificial Sequence: Synthetic oligonucleotide
ugucuccgugcucaaagua

SEQ ID NO: 2150393 - RNA, 19 nt, Artificial Sequence
  Description of Artificial Sequence: Synthetic oligonucleotide
gugugucuauuccccaaag

SEQ ID NO: 2150394 - RNA, 19 nt, Artificial Sequence
  Description of Artificial Sequence: Synthetic oligonucleotide
uaagaccaaucaauauguu

SEQ ID NO: 2150395 - RNA, 19 nt, Artificial Sequence
  Description of Artificial Sequence: Synthetic oligonucleotide
uucacagaccgcugcccgc

SEQ ID NO: 2150396 - RNA, 19 nt, Artificial Sequence
  Description of Artificial Sequence: Synthetic oligonucleotide
guuccuuuguaacuaucaa

SEQ ID NO: 2150397 - RNA, 19 nt, Artificial Sequence
  Description of Artificial Sequence: Synthetic oligonucleotide
aauacucuuuaagcagcau

SEQ ID NO: 2150398 - RNA, 19 nt, Artificial Sequence
  Description of Artificial Sequence: Synthetic oligonucleotide
aaggaguggcagucagaca

SEQ ID NO: 2150399 - RNA, 19 nt, Artificial Sequence
  Description of Artificial Sequence: Synthetic oligonucleotide
ccccuuuagacauacucag

SEQ ID NO: 2150400 - RNA, 19 nt, Artificial Sequence
  Description of Artificial Sequence: Synthetic oligonucleotide
gccuguacacaaucuacag

SEQ ID NO: 2150401 - RNA, 19 nt, Artificial Sequence
  Description of Artificial Sequence: Synthetic oligonucleotide
agaggcaaaacuacaguuu

SEQ ID NO: 2150402 - RNA, 19 nt, Artificial Sequence
  Description of Artificial Sequence: Synthetic oligonucleotide
uuaggugguuacucuuaaa

SEQ ID NO: 2150403 - RNA, 19 nt, Artificial Sequence
  Description of Artificial Sequence: Synthetic oligonucleotide
agcuuuauccagagcagcu

SEQ ID NO: 2150404 - RNA, 19 nt, Artificial Sequence
  Description of Artificial Sequence: Synthetic oligonucleotide
cauggcacuuagaaaagua

SEQ ID NO: 2150405 - RNA, 19 nt, Artificial Sequence
  Description of Artificial Sequence: Synthetic oligonucleotide
aggacacugccaauacagg

SEQ ID NO: 2150406 - RNA, 19 nt, Artificial Sequence
  Description of Artificial Sequence: Synthetic oligonucleotide
uccccaaagcacagcauuu

SEQ ID NO: 2150407 - RNA, 19 nt, Artificial Sequence
  Description of Artificial Sequence: Synthetic oligonucleotide
ucaccaagguuuagaucuc

SEQ ID NO: 2150408 - RNA, 19 nt, Artificial Sequence
  Description of Artificial Sequence: Synthetic oligonucleotide
ccuugaaagaaaggagugg

SEQ ID NO: 2150409 - RNA, 19 nt, Artificial Sequence
  Description of Artificial Sequence: Synthetic oligonucleotide
auuucccggugacuggccu

SEQ ID NO: 2150410 - RNA, 19 nt, Artificial Sequence
  Description of Artificial Sequence: Synthetic oligonucleotide
ucacagaccgcugcccgcc

SEQ ID NO: 2150411 - RNA, 19 nt, Artificial Sequence
  Description of Artificial Sequence: Synthetic oligonucleotide
auauggugugugugugugu

SEQ ID NO: 2150412 - RNA, 19 nt, Artificial Sequence
  Description of Artificial Sequence: Synthetic oligonucleotide
aggucagaaagcagcuuag

SEQ ID NO: 2150413 - RNA, 19 nt, Artificial Sequence
  Description of Artificial Sequence: Synthetic oligonucleotide
caauaacaaggcagugcuc

SEQ ID NO: 2150414 - RNA, 19 nt, Artificial Sequence
  Description of Artificial Sequence: Synthetic oligonucleotide
agcuuuacuucaccccuaa

SEQ ID NO: 2150415 - RNA, 19 nt, Artificial Sequence
  Description of Artificial Sequence: Synthetic oligonucleotide
uguucccuggaaagaugaa

SEQ ID NO: 2150416 - RNA, 19 nt, Artificial Sequence
  Description of Artificial Sequence: Synthetic oligonucleotide
gugcucagcuucuagauau

SEQ ID NO: 2150417 - RNA, 19 nt, Artificial Sequence
  Description of Artificial Sequence: Synthetic oligonucleotide
ugguguguguguguguguc

SEQ ID NO: 2150418 - RNA, 19 nt, Artificial Sequence
  Description of Artificial Sequence: Synthetic oligonucleotide
ccacacacugucuuugcgc

SEQ ID NO: 2150419 - RNA, 19 nt, Artificial Sequence
  Description of Artificial Sequence: Synthetic oligonucleotide
ccuuuagacauacucagaa

SEQ ID NO: 2150420 - RNA, 19 nt, Artificial Sequence
  Description of Artificial Sequence: Synthetic oligonucleotide
ggaaugauuaggucauaaa

SEQ ID NO: 2150421 - RNA, 19 nt, Artificial Sequence
  Description of Artificial Sequence: Synthetic oligonucleotide
cuuuauccagagcagcucu

SEQ ID NO: 2150422 - RNA, 19 nt, Artificial Sequence
  Description of Artificial Sequence: Synthetic oligonucleotide
cucaagacaaaaguauaua

SEQ ID NO: 2150423 - RNA, 19 nt, Artificial Sequence
  Description of Artificial Sequence: Synthetic oligonucleotide
cauuucccggugacuggcc

SEQ ID NO: 2150424 - RNA, 19 nt, Artificial Sequence
  Description of Artificial Sequence: Synthetic oligonucleotide
gugcucaugaccgucccac

SEQ ID NO: 2150425 - RNA, 19 nt, Artificial Sequence
  Description of Artificial Sequence: Synthetic oligonucleotide
caaucuacaguuccuuugu

SEQ ID NO: 2150426 - RNA, 19 nt, Artificial Sequence
  Description of Artificial Sequence: Synthetic oligonucleotide
cuuaacauuuccgcaaccu

SEQ ID NO: 2150427 - RNA, 19 nt, Artificial Sequence
  Description of Artificial Sequence: Synthetic oligonucleotide
cauaaacauggcacuuaga

SEQ ID NO: 2150428 - RNA, 19 nt, Artificial Sequence
  Description of Artificial Sequence: Synthetic oligonucleotide
agaagcacaguagcuuuau

SEQ ID NO: 2150429 - RNA, 19 nt, Artificial Sequence
  Description of Artificial Sequence: Synthetic oligonucleotide
cuagccuguacacaaucua

SEQ ID NO: 2150430 - RNA, 19 nt, Artificial Sequence
  Description of Artificial Sequence: Synthetic oligonucleotide
ucaucucaccaagguuuag

SEQ ID NO: 2150431 - RNA, 19 nt, Artificial Sequence
  Description of Artificial Sequence: Synthetic oligonucleotide
cuccacucuucaucucacc

SEQ ID NO: 2150432 - RNA, 19 nt, Artificial Sequence
  Description of Artificial Sequence: Synthetic oligonucleotide
uccccucaagggccgagga

SEQ ID NO: 2150433 - RNA, 19 nt, Artificial Sequence
  Description of Artificial Sequence: Synthetic oligonucleotide
cuuaggugguuacucuuaa

SEQ ID NO: 2150434 - RNA, 19 nt, Artificial Sequence
  Description of Artificial Sequence: Synthetic oligonucleotide
gucagaaagcagcuuagau

SEQ ID NO: 2150435 - RNA, 19 nt, Artificial Sequence
  Description of Artificial Sequence: Synthetic oligonucleotide
auacaggcacuccacucuu

SEQ ID NO: 2150436 - RNA, 19 nt, Artificial Sequence
  Description of Artificial Sequence: Synthetic oligonucleotide
gcuuuguauaaaccaguga

SEQ ID NO: 2150437 - RNA, 19 nt, Artificial Sequence
  Description of Artificial Sequence: Synthetic oligonucleotide
gcucaugaccgucccacag

SEQ ID NO: 2150438 - RNA, 19 nt, Artificial Sequence
  Description of Artificial Sequence: Synthetic oligonucleotide
uagcuuuacuucaccccua

SEQ ID NO: 2150439 - RNA, 19 nt, Artificial Sequence
  Description of Artificial Sequence: Synthetic oligonucleotide
accaaucaauauguucccu

SEQ ID NO: 2150440 - RNA, 19 nt, Artificial Sequence
  Description of Artificial Sequence: Synthetic oligonucleotide
acacaaucuacaguuccuu

SEQ ID NO: 2150441 - RNA, 19 nt, Artificial Sequence
  Description of Artificial Sequence: Synthetic oligonucleotide
gcaaaacuuggaaugauua

SEQ ID NO: 2150442 - RNA, 19 nt, Artificial Sequence
  Description of Artificial Sequence: Synthetic oligonucleotide
agacaucaaugcaaaacuu

SEQ ID NO: 2150443 - RNA, 19 nt, Artificial Sequence
  Description of Artificial Sequence: Synthetic oligonucleotide
gcuuaucagaauucccaca

SEQ ID NO: 2150444 - RNA, 19 nt, Artificial Sequence
  Description of Artificial Sequence: Synthetic oligonucleotide
ugcucaugaccgucccaca

SEQ ID NO: 2150445 - RNA, 19 nt, Artificial Sequence
  Description of Artificial Sequence: Synthetic oligonucleotide
uuugugucuccgugcucaa

SEQ ID NO: 2150446 - RNA, 19 nt, Artificial Sequence
  Description of Artificial Sequence: Synthetic oligonucleotide
ugugugugugugugucuau

SEQ ID NO: 2150447 - RNA, 19 nt, Artificial Sequence
  Description of Artificial Sequence: Synthetic oligonucleotide
aacuaucaauauagguauu

SEQ ID NO: 2150448 - RNA, 19 nt, Artificial Sequence
  Description of Artificial Sequence: Synthetic oligonucleotide
caucucaccaagguuuaga

SEQ ID NO: 2150449 - RNA, 19 nt, Artificial Sequence
  Description of Artificial Sequence: Synthetic oligonucleotide
auucccacacuuagguggu

SEQ ID NO: 2150450 - RNA, 19 nt, Artificial Sequence
  Description of Artificial Sequence: Synthetic oligonucleotide
agcagcauaucaaucucuu

SEQ ID NO: 2150451 - RNA, 19 nt, Artificial Sequence
  Description of Artificial Sequence: Synthetic oligonucleotide
ccucauuugugucuccgug

SEQ ID NO: 2150452 - RNA, 19 nt, Artificial Sequence
  Description of Artificial Sequence: Synthetic oligonucleotide
auccagaggcaaaacuaca

SEQ ID NO: 2150453 - RNA, 19 nt, Artificial Sequence
  Description of Artificial Sequence: Synthetic oligonucleotide
augcaaaacuuggaaugau

SEQ ID NO: 2150454 - RNA, 19 nt, Artificial Sequence
  Description of Artificial Sequence: Synthetic oligonucleotide
caagggccgaggacacugc

SEQ ID NO: 2150455 - RNA, 19 nt, Artificial Sequence
  Description of Artificial Sequence: Synthetic oligonucleotide
ugaccgucccacagagguc

SEQ ID NO: 2150456 - RNA, 19 nt, Artificial Sequence
  Description of Artificial Sequence: Synthetic oligonucleotide
auggugugugugugugugu

SEQ ID NO: 2150457 - RNA, 19 nt, Artificial Sequence
  Description of Artificial Sequence: Synthetic oligonucleotide
gucauaaacauggcacuua

SEQ ID NO: 2150458 - RNA, 19 nt, Artificial Sequence
  Description of Artificial Sequence: Synthetic oligonucleotide
aucagaauucccacacuua

SEQ ID NO: 2150459 - RNA, 19 nt, Artificial Sequence
  Description of Artificial Sequence: Synthetic oligonucleotide
gaacuggcccaccaacugu

SEQ ID NO: 2150460 - RNA, 19 nt, Artificial Sequence
  Description of Artificial Sequence: Synthetic oligonucleotide
caguagcuuuauccagagc

SEQ ID NO: 2150461 - RNA, 19 nt, Artificial Sequence
  Description of Artificial Sequence: Synthetic oligonucleotide
uaucuccagagagcaaaua

SEQ ID NO: 2150462 - RNA, 19 nt, Artificial Sequence
  Description of Artificial Sequence: Synthetic oligonucleotide
acuuaggugguuacucuua

SEQ ID NO: 2150463 - RNA, 19 nt, Artificial Sequence
  Description of Artificial Sequence: Synthetic oligonucleotide
cucauccagaggcaaaacu

SEQ ID NO: 2150464 - RNA, 19 nt, Artificial Sequence
  Description of Artificial Sequence: Synthetic oligonucleotide
guacucuuguauaauuggu

SEQ ID NO: 2150465 - RNA, 19 nt, Artificial Sequence
  Description of Artificial Sequence: Synthetic oligonucleotide
caacuguggugcucuagga

SEQ ID NO: 2150466 - RNA, 19 nt, Artificial Sequence
  Description of Artificial Sequence: Synthetic oligonucleotide
augcuaauucagggagauc

SEQ ID NO: 2150467 - RNA, 19 nt, Artificial Sequence
  Description of Artificial Sequence: Synthetic oligonucleotide
ccuaacuaaagcuuuguau

SEQ ID NO: 2150468 - RNA, 19 nt, Artificial Sequence
  Description of Artificial Sequence: Synthetic oligonucleotide
gguuuagaucucuuaacau

SEQ ID NO: 2150469 - RNA, 19 nt, Artificial Sequence
  Description of Artificial Sequence: Synthetic oligonucleotide
accagugauuuuacuacaa

SEQ ID NO: 2150470 - RNA, 19 nt, Artificial Sequence
  Description of Artificial Sequence: Synthetic oligonucleotide
acagaccgcugcccgccuc

SEQ ID NO: 2150471 - RNA, 19 nt, Artificial Sequence
  Description of Artificial Sequence: Synthetic oligonucleotide
caaccucauuugugucucc

SEQ ID NO: 2150472 - RNA, 19 nt, Artificial Sequence
  Description of Artificial Sequence: Synthetic oligonucleotide
aggcaaaacuacaguuuca

SEQ ID NO: 2150473 - RNA, 19 nt, Artificial Sequence
  Description of Artificial Sequence: Synthetic oligonucleotide
ggcacuuagaaaaguagcu

SEQ ID NO: 2150474 - RNA, 19 nt, Artificial Sequence
  Description of Artificial Sequence: Synthetic oligonucleotide
ccaccauuuacuuaacugu

SEQ ID NO: 2150475 - RNA, 19 nt, Artificial Sequence
  Description of Artificial Sequence: Synthetic oligonucleotide
cagaggcaaaacuacaguu

SEQ ID NO: 2150476 - RNA, 19 nt, Artificial Sequence
  Description of Artificial Sequence: Synthetic oligonucleotide
cagcucuggcaaugaacug

SEQ ID NO: 2150477 - RNA, 19 nt, Artificial Sequence
  Description of Artificial Sequence: Synthetic oligonucleotide
gcaaugaacuggcccacca

SEQ ID NO: 2150478 - RNA, 19 nt, Artificial Sequence
  Description of Artificial Sequence: Synthetic oligonucleotide
augucauuucccggugacu

SEQ ID NO: 2150479 - RNA, 19 nt, Artificial Sequence
  Description of Artificial Sequence: Synthetic oligonucleotide
cucaugacuaacucgucuu

SEQ ID NO: 2150480 - RNA, 19 nt, Artificial Sequence
  Description of Artificial Sequence: Synthetic oligonucleotide
gugugugucuauuccccaa

SEQ ID NO: 2150481 - RNA, 19 nt, Artificial Sequence
  Description of Artificial Sequence: Synthetic oligonucleotide
gugcucaaaguacucuugu

SEQ ID NO: 2150482 - RNA, 19 nt, Artificial Sequence
  Description of Artificial Sequence: Synthetic oligonucleotide
gauguuccagccaccauuu

SEQ ID NO: 2150483 - RNA, 19 nt, Artificial Sequence
  Description of Artificial Sequence: Synthetic oligonucleotide
cuccgugcucaaaguacuc

SEQ ID NO: 2150484 - RNA, 19 nt, Artificial Sequence
  Description of Artificial Sequence: Synthetic oligonucleotide
cauuugugucuccgugcuc

SEQ ID NO: 2150485 - RNA, 19 nt, Artificial Sequence
  Description of Artificial Sequence: Synthetic oligonucleotide
gugcucuaggaguauccaa

SEQ ID NO: 2150486 - RNA, 19 nt, Artificial Sequence
  Description of Artificial Sequence: Synthetic oligonucleotide
caguuucauaaacacaguu

SEQ ID NO: 2150487 - RNA, 19 nt, Artificial Sequence
  Description of Artificial Sequence: Synthetic oligonucleotide
ucccacacuuaggugguua

SEQ ID NO: 2150488 - RNA, 19 nt, Artificial Sequence
  Description of Artificial Sequence: Synthetic oligonucleotide
uucccggugacuggccuuc

SEQ ID NO: 2150489 - RNA, 19 nt, Artificial Sequence
  Description of Artificial Sequence: Synthetic oligonucleotide
uuucccggugacuggccuu

SEQ ID NO: 2150490 - RNA, 19 nt, Artificial Sequence
  Description of Artificial Sequence: Synthetic oligonucleotide
caaugaacuggcccaccaa

SEQ ID NO: 2150491 - RNA, 19 nt, Artificial Sequence
  Description of Artificial Sequence: Synthetic oligonucleotide
gcaaccucauuugugucuc

SEQ ID NO: 2150492 - RNA, 19 nt, Artificial Sequence
  Description of Artificial Sequence: Synthetic oligonucleotide
uguggugcucuaggaguau

SEQ ID NO: 2150493 - RNA, 19 nt, Artificial Sequence
  Description of Artificial Sequence: Synthetic oligonucleotide
cccacacacugucuuugcg

SEQ ID NO: 2150494 - RNA, 19 nt, Artificial Sequence
  Description of Artificial Sequence: Synthetic oligonucleotide
cuguggugcucuaggagua

SEQ ID NO: 2150495 - RNA, 19 nt, Artificial Sequence
  Description of Artificial Sequence: Synthetic oligonucleotide
gucagacaucaaugcaaaa

SEQ ID NO: 2150496 - RNA, 19 nt, Artificial Sequence
  Description of Artificial Sequence: Synthetic oligonucleotide
gcuuuauccagagcagcuc

SEQ ID NO: 2150497 - RNA, 19 nt, Artificial Sequence
  Description of Artificial Sequence: Synthetic oligonucleotide
auauaucuccagagagcaa

SEQ ID NO: 2150498 - RNA, 19 nt, Artificial Sequence
  Description of Artificial Sequence: Synthetic oligonucleotide
ggcuuaguaguagcuuuac

SEQ ID NO: 2150499 - RNA, 19 nt, Artificial Sequence
  Description of Artificial Sequence: Synthetic oligonucleotide
gacuggccuuccccucaag

SEQ ID NO: 2150500 - RNA, 19 nt, Artificial Sequence
  Description of Artificial Sequence: Synthetic oligonucleotide
cucuuguauaauugguguu

SEQ ID NO: 2150501 - RNA, 19 nt, Artificial Sequence
  Description of Artificial Sequence: Synthetic oligonucleotide
caaaguacucuuguauaau

SEQ ID NO: 2150502 - RNA, 19 nt, Artificial Sequence
  Description of Artificial Sequence: Synthetic oligonucleotide
uuggaaugauuaggucaua

SEQ ID NO: 2150503 - RNA, 19 nt, Artificial Sequence
  Description of Artificial Sequence: Synthetic oligonucleotide
acauuuccgcaaccucauu

SEQ ID NO: 2150504 - RNA, 19 nt, Artificial Sequence
  Description of Artificial Sequence: Synthetic oligonucleotide
gugugugugugugugucua

SEQ ID NO: 2150505 - RNA, 19 nt, Artificial Sequence
  Description of Artificial Sequence: Synthetic oligonucleotide
ggcaaaacuacaguuucau

SEQ ID NO: 2150506 - RNA, 19 nt, Artificial Sequence
  Description of Artificial Sequence: Synthetic oligonucleotide
acaaggcagugcucagcuu

SEQ ID NO: 2150507 - RNA, 19 nt, Artificial Sequence
  Description of Artificial Sequence: Synthetic oligonucleotide
cccacacuuaggugguuac

SEQ ID NO: 2150508 - RNA, 19 nt, Artificial Sequence
  Description of Artificial Sequence: Synthetic oligonucleotide
cagccaccauuuacuuaac

SEQ ID NO: 2150509 - RNA, 19 nt, Artificial Sequence
  Description of Artificial Sequence: Synthetic oligonucleotide
ggugcucuaggaguaucca

SEQ ID NO: 2150510 - RNA, 19 nt, Artificial Sequence
  Description of Artificial Sequence: Synthetic oligonucleotide
ggugacuggccuuccccuc

SEQ ID NO: 2150511 - RNA, 19 nt, Artificial Sequence
  Description of Artificial Sequence: Synthetic oligonucleotide
gucucaugacuaacucguc

SEQ ID NO: 2150512 - RNA, 19 nt, Artificial Sequence
  Description of Artificial Sequence: Synthetic oligonucleotide
auuccccaaagcacagcau

SEQ ID NO: 2150513 - RNA, 19 nt, Artificial Sequence
  Description of Artificial Sequence: Synthetic oligonucleotide
ggaguauccaaugcuaauu

SEQ ID NO: 2150514 - RNA, 19 nt, Artificial Sequence
  Description of Artificial Sequence: Synthetic oligonucleotide
ggugguucacagaccgcug

SEQ ID NO: 2150515 - RNA, 19 nt, Artificial Sequence
  Description of Artificial Sequence: Synthetic oligonucleotide
ccggugacuggccuucccc

SEQ ID NO: 2150516 - RNA, 19 nt, Artificial Sequence
  Description of Artificial Sequence: Synthetic oligonucleotide
gggccgaggacacugccaa

SEQ ID NO: 2150517 - RNA, 19 nt, Artificial Sequence
  Description of Artificial Sequence: Synthetic oligonucleotide
gucuaauauuuaagaccaa

SEQ ID NO: 2150518 - RNA, 19 nt, Artificial Sequence
  Description of Artificial Sequence: Synthetic oligonucleotide
ccgaggacacugccaauac

SEQ ID NO: 2150519 - RNA, 19 nt, Artificial Sequence
  Description of Artificial Sequence: Synthetic oligonucleotide
ccucaagggccgaggacac

SEQ ID NO: 2150520 - RNA, 19 nt, Artificial Sequence
  Description of Artificial Sequence: Synthetic oligonucleotide
guggugcucuaggaguauc

SEQ ID NO: 2150521 - RNA, 19 nt, Artificial Sequence
  Description of Artificial Sequence: Synthetic oligonucleotide
agggccgaggacacugcca

SEQ ID NO: 2150522 - RNA, 19 nt, Artificial Sequence
  Description of Artificial Sequence: Synthetic oligonucleotide
gugucuccgugcucaaagu

SEQ ID NO: 2150523 - RNA, 19 nt, Artificial Sequence
  Description of Artificial Sequence: Synthetic oligonucleotide
cacaaucuacaguuccuuu

SEQ ID NO: 2150524 - RNA, 19 nt, Artificial Sequence
  Description of Artificial Sequence: Synthetic oligonucleotide
cauuugugcucaugaccgu

SEQ ID NO: 2150525 - RNA, 19 nt, Artificial Sequence
  Description of Artificial Sequence: Synthetic oligonucleotide
cccucaagggccgaggaca

SEQ ID NO: 2150526 - RNA, 19 nt, Artificial Sequence
  Description of Artificial Sequence: Synthetic oligonucleotide
ggggcuuaguaguagcuuu

SEQ ID NO: 2150527 - RNA, 19 nt, Artificial Sequence
  Description of Artificial Sequence: Synthetic oligonucleotide
gcuuaguaguagcuuuacu

SEQ ID NO: 2150528 - RNA, 19 nt, Artificial Sequence
  Description of Artificial Sequence: Synthetic oligonucleotide
ccagagagcaaauacucuu

SEQ ID NO: 2150529 - RNA, 19 nt, Artificial Sequence
  Description of Artificial Sequence: Synthetic oligonucleotide
auguuccagccaccauuua

SEQ ID NO: 2150530 - RNA, 19 nt, Artificial Sequence
  Description of Artificial Sequence: Synthetic oligonucleotide
caccccuaacuaaagcuuu

SEQ ID NO: 2150531 - RNA, 19 nt, Artificial Sequence
  Description of Artificial Sequence: Synthetic oligonucleotide
cacuuaggugguuacucuu

SEQ ID NO: 2150532 - RNA, 19 nt, Artificial Sequence
  Description of Artificial Sequence: Synthetic oligonucleotide
cagagcagcucuagccugu

SEQ ID NO: 2150533 - RNA, 19 nt, Artificial Sequence
  Description of Artificial Sequence: Synthetic oligonucleotide
cccuuuagacauacucaga

SEQ ID NO: 2150534 - RNA, 19 nt, Artificial Sequence
  Description of Artificial Sequence: Synthetic oligonucleotide
cagcucuagccuguacaca

SEQ ID NO: 2150535 - RNA, 19 nt, Artificial Sequence
  Description of Artificial Sequence: Synthetic oligonucleotide
cccgccuccagauccccac

SEQ ID NO: 2150536 - RNA, 19 nt, Artificial Sequence
  Description of Artificial Sequence: Synthetic oligonucleotide
caugacuaacucgucuuuu

SEQ ID NO: 2150537 - RNA, 19 nt, Artificial Sequence
  Description of Artificial Sequence: Synthetic oligonucleotide
ugcccgccuccagaucccc

SEQ ID NO: 2150538 - RNA, 19 nt, Artificial Sequence
  Description of Artificial Sequence: Synthetic oligonucleotide
ccuguacacaaucuacagu

SEQ ID NO: 2150539 - RNA, 19 nt, Artificial Sequence
  Description of Artificial Sequence: Synthetic oligonucleotide
aguggcagucagacaucaa

SEQ ID NO: 2150540 - RNA, 19 nt, Artificial Sequence
  Description of Artificial Sequence: Synthetic oligonucleotide
agagcagcucuagccugua

SEQ ID NO: 2150541 - RNA, 19 nt, Artificial Sequence
  Description of Artificial Sequence: Synthetic oligonucleotide
ggugugugugugugugucu

SEQ ID NO: 2150542 - RNA, 19 nt, Artificial Sequence
  Description of Artificial Sequence: Synthetic oligonucleotide
gcuaauucagggagauccu

SEQ ID NO: 2150543 - RNA, 19 nt, Artificial Sequence
  Description of Artificial Sequence: Synthetic oligonucleotide
gggagauccuucagcaacu

SEQ ID NO: 2150544 - RNA, 19 nt, Artificial Sequence
  Description of Artificial Sequence: Synthetic oligonucleotide
ucccggugacuggccuucc

SEQ ID NO: 2150545 - RNA, 19 nt, Artificial Sequence
  Description of Artificial Sequence: Synthetic oligonucleotide
ccgcaaccucauuuguguc

SEQ ID NO: 2150546 - RNA, 19 nt, Artificial Sequence
  Description of Artificial Sequence: Synthetic oligonucleotide
cccuaacuaaagcuuugua

SEQ ID NO: 2150547 - RNA, 19 nt, Artificial Sequence
  Description of Artificial Sequence: Synthetic oligonucleotide
ccaauacaggcacuccacu

SEQ ID NO: 2150548 - RNA, 19 nt, Artificial Sequence
  Description of Artificial Sequence: Synthetic oligonucleotide
gugugugugugugucuauu

SEQ ID NO: 2150549 - RNA, 19 nt, Artificial Sequence
  Description of Artificial Sequence: Synthetic oligonucleotide
accgucccacagaggucag

SEQ ID NO: 2150550 - RNA, 19 nt, Artificial Sequence
  Description of Artificial Sequence: Synthetic oligonucleotide
agaccgcugcccgccucca

SEQ ID NO: 2150551 - RNA, 19 nt, Artificial Sequence
  Description of Artificial Sequence: Synthetic oligonucleotide
ccccucaagggccgaggac

SEQ ID NO: 2150552 - RNA, 19 nt, Artificial Sequence
  Description of Artificial Sequence: Synthetic oligonucleotide
gcucagcuucuagauauau

SEQ ID NO: 2150553 - RNA, 19 nt, Artificial Sequence
  Description of Artificial Sequence: Synthetic oligonucleotide
caggcacuccacucuucau

SEQ ID NO: 2150554 - RNA, 19 nt, Artificial Sequence
  Description of Artificial Sequence: Synthetic oligonucleotide
ccaccaacuguggugcucu

SEQ ID NO: 2150555 - RNA, 19 nt, Artificial Sequence
  Description of Artificial Sequence: Synthetic oligonucleotide
cucaagggccgaggacacu

SEQ ID NO: 2150556 - RNA, 19 nt, Artificial Sequence
  Description of Artificial Sequence: Synthetic oligonucleotide
cacagaccgcugcccgccu

SEQ ID NO: 2150557 - RNA, 19 nt, Artificial Sequence
  Description of Artificial Sequence: Synthetic oligonucleotide
cggugacuggccuuccccu

SEQ ID NO: 2150558 - RNA, 19 nt, Artificial Sequence
  Description of Artificial Sequence: Synthetic oligonucleotide
ccgccuccagauccccaca

SEQ ID NO: 2150559 - RNA, 19 nt, Artificial Sequence
  Description of Artificial Sequence: Synthetic oligonucleotide
ggccgaggacacugccaau

SEQ ID NO: 2150560 - RNA, 19 nt, Artificial Sequence
  Description of Artificial Sequence: Synthetic oligonucleotide
gcccgccuccagaucccca

SEQ ID NO: 2150561 - RNA, 19 nt, Artificial Sequence
  Description of Artificial Sequence: Synthetic oligonucleotide
ccgucccacagaggucaga

SEQ ID NO: 2150562 - RNA, 19 nt, Artificial Sequence
  Description of Artificial Sequence: Synthetic oligonucleotide
auaaauacagccuauggac

SEQ ID NO: 2150563 - RNA, 19 nt, Artificial Sequence
  Description of Artificial Sequence: Synthetic oligonucleotide
auuuauucgauguagauca

SEQ ID NO: 2150564 - RNA, 19 nt, Artificial Sequence
  Description of Artificial Sequence: Synthetic oligonucleotide
gaauccaccagauaaauac

SEQ ID NO: 2150565 - RNA, 19 nt, Artificial Sequence
  Description of Artificial Sequence: Synthetic oligonucleotide
ucaauguacucuuugggcg

SEQ ID NO: 2150566 - RNA, 19 nt, Artificial Sequence
  Description of Artificial Sequence: Synthetic oligonucleotide
aaguaaaugaagaaaacug

SEQ ID NO: 2150567 - RNA, 19 nt, Artificial Sequence
  Description of Artificial Sequence: Synthetic oligonucleotide
aucaauguacucuuugggc

SEQ ID NO: 2150568 - RNA, 19 nt, Artificial Sequence
  Description of Artificial Sequence: Synthetic oligonucleotide
uucgcuucaauuuugacac

SEQ ID NO: 2150569 - RNA, 19 nt, Artificial Sequence
  Description of Artificial Sequence: Synthetic oligonucleotide
aaguggauacuuucagucc

SEQ ID NO: 2150570 - RNA, 19 nt, Artificial Sequence
  Description of Artificial Sequence: Synthetic oligonucleotide
auuagcuauuucuuguagc

SEQ ID NO: 2150571 - RNA, 19 nt, Artificial Sequence
  Description of Artificial Sequence: Synthetic oligonucleotide
uauucgauguagaucauca

SEQ ID NO: 2150572 - RNA, 19 nt, Artificial Sequence
  Description of Artificial Sequence: Synthetic oligonucleotide
agauuguccaaguggauac

SEQ ID NO: 2150573 - RNA, 19 nt, Artificial Sequence
  Description of Artificial Sequence: Synthetic oligonucleotide
agauaaauacagccuaugg

SEQ ID NO: 2150574 - RNA, 19 nt, Artificial Sequence
  Description of Artificial Sequence: Synthetic oligonucleotide
auagugacgaagcaaagug

SEQ ID NO: 2150575 - RNA, 19 nt, Artificial Sequence
  Description of Artificial Sequence: Synthetic oligonucleotide
uguagcauagcuuucuucu

SEQ ID NO: 2150576 - RNA, 19 nt, Artificial Sequence
  Description of Artificial Sequence: Synthetic oligonucleotide
caauuuggaaacuggacgg

SEQ ID NO: 2150577 - RNA, 19 nt, Artificial Sequence
  Description of Artificial Sequence: Synthetic oligonucleotide
uggacggucaaacugaaga

SEQ ID NO: 2150578 - RNA, 19 nt, Artificial Sequence
  Description of Artificial Sequence: Synthetic oligonucleotide
auuugugucaccgaguauc

SEQ ID NO: 2150579 - RNA, 19 nt, Artificial Sequence
  Description of Artificial Sequence: Synthetic oligonucleotide
aaauacagccuauggacug

SEQ ID NO: 2150580 - RNA, 19 nt, Artificial Sequence
  Description of Artificial Sequence: Synthetic oligonucleotide
uuagcuauuucuuguagca

SEQ ID NO: 2150581 - RNA, 19 nt, Artificial Sequence
  Description of Artificial Sequence: Synthetic oligonucleotide
agguguaacaggcauguac

SEQ ID NO: 2150582 - RNA, 19 nt, Artificial Sequence
  Description of Artificial Sequence: Synthetic oligonucleotide
gauaaauacagccuaugga

SEQ ID NO: 2150583 - RNA, 19 nt, Artificial Sequence
  Description of Artificial Sequence: Synthetic oligonucleotide
aggcugaaaacucagcugg

SEQ ID NO: 2150584 - RNA, 19 nt, Artificial Sequence
  Description of Artificial Sequence: Synthetic oligonucleotide
uagucuagagagauaacag

SEQ ID NO: 2150585 - RNA, 19 nt, Artificial Sequence
  Description of Artificial Sequence: Synthetic oligonucleotide
aaacuggacggucaaacug

SEQ ID NO: 2150586 - RNA, 19 nt, Artificial Sequence
  Description of Artificial Sequence: Synthetic oligonucleotide
auaaauucuguuuccaagu

SEQ ID NO: 2150587 - RNA, 19 nt, Artificial Sequence
  Description of Artificial Sequence: Synthetic oligonucleotide
uuucgcuucaauuuugaca

SEQ ID NO: 2150588 - RNA, 19 nt, Artificial Sequence
  Description of Artificial Sequence: Synthetic oligonucleotide
uccaaaaccuuaagcauag

SEQ ID NO: 2150589 - RNA, 19 nt, Artificial Sequence
  Description of Artificial Sequence: Synthetic oligonucleotide
agagagauaacagauuguc

SEQ ID NO: 2150590 - RNA, 19 nt, Artificial Sequence
  Description of Artificial Sequence: Synthetic oligonucleotide
ugugucaccgaguaucggg

SEQ ID NO: 2150591 - RNA, 19 nt, Artificial Sequence
  Description of Artificial Sequence: Synthetic oligonucleotide
uuagucuagagagauaaca

SEQ ID NO: 2150592 - RNA, 19 nt, Artificial Sequence
  Description of Artificial Sequence: Synthetic oligonucleotide
ugguaagucucucauaaac

SEQ ID NO: 2150593 - RNA, 19 nt, Artificial Sequence
  Description of Artificial Sequence: Synthetic oligonucleotide
uuugugucaccgaguaucg

SEQ ID NO: 2150594 - RNA, 19 nt, Artificial Sequence
  Description of Artificial Sequence: Synthetic oligonucleotide
uuuccagggguuccgauag

SEQ ID NO: 2150595 - RNA, 19 nt, Artificial Sequence
  Description of Artificial Sequence: Synthetic oligonucleotide
gacccuaucuuugugaucc

SEQ ID NO: 2150596 - RNA, 19 nt, Artificial Sequence
  Description of Artificial Sequence: Synthetic oligonucleotide
uuugggauaauuccuuccu

SEQ ID NO: 2150597 - RNA, 19 nt, Artificial Sequence
  Description of Artificial Sequence: Synthetic oligonucleotide
aaggcugaaaacucagcug

SEQ ID NO: 2150598 - RNA, 19 nt, Artificial Sequence
  Description of Artificial Sequence: Synthetic oligonucleotide
uucuagguuugucaguugc

SEQ ID NO: 2150599 - RNA, 19 nt, Artificial Sequence
  Description of Artificial Sequence: Synthetic oligonucleotide
uuuugugugagauguggca

SEQ ID NO: 2150600 - RNA, 19 nt, Artificial Sequence
  Description of Artificial Sequence: Synthetic oligonucleotide
uuugugauccaaaaccuua

SEQ ID NO: 2150601 - RNA, 19 nt, Artificial Sequence
  Description of Artificial Sequence: Synthetic oligonucleotide
ucauguucuagguuuguca

SEQ ID NO: 2150602 - RNA, 19 nt, Artificial Sequence
  Description of Artificial Sequence: Synthetic oligonucleotide
ugguaagcagcuuuccagg

SEQ ID NO: 2150603 - RNA, 19 nt, Artificial Sequence
  Description of Artificial Sequence: Synthetic oligonucleotide
uccaaguggauacuuucag

SEQ ID NO: 2150604 - RNA, 19 nt, Artificial Sequence
  Description of Artificial Sequence: Synthetic oligonucleotide
cagccuauggacuggaagg

SEQ ID NO: 2150605 - RNA, 19 nt, Artificial Sequence
  Description of Artificial Sequence: Synthetic oligonucleotide
uguuagguugguaagucuc

SEQ ID NO: 2150606 - RNA, 19 nt, Artificial Sequence
  Description of Artificial Sequence: Synthetic oligonucleotide
ucaaugcucauuauucuuc

SEQ ID NO: 2150607 - RNA, 19 nt, Artificial Sequence
  Description of Artificial Sequence: Synthetic oligonucleotide
auugcuggaacccuuuugu

SEQ ID NO: 2150608 - RNA, 19 nt, Artificial Sequence
  Description of Artificial Sequence: Synthetic oligonucleotide
caaguggauacuuucaguc

SEQ ID NO: 2150609 - RNA, 19 nt, Artificial Sequence
  Description of Artificial Sequence: Synthetic oligonucleotide
auuuugacacuuuucuuga

SEQ ID NO: 2150610 - RNA, 19 nt, Artificial Sequence
  Description of Artificial Sequence: Synthetic oligonucleotide
guaucagcucauuuauucg

SEQ ID NO: 2150611 - RNA, 19 nt, Artificial Sequence
  Description of Artificial Sequence: Synthetic oligonucleotide
aguaaaugaagaaaacugu

SEQ ID NO: 2150612 - RNA, 19 nt, Artificial Sequence
  Description of Artificial Sequence: Synthetic oligonucleotide
uguagaucaucaucuguug

SEQ ID NO: 2150613 - RNA, 19 nt, Artificial Sequence
  Description of Artificial Sequence: Synthetic oligonucleotide
ugcuuccucaaguaaauga

SEQ ID NO: 2150614 - RNA, 19 nt, Artificial Sequence
  Description of Artificial Sequence: Synthetic oligonucleotide
uuugacccggacaucacug

SEQ ID NO: 2150615 - RNA, 19 nt, Artificial Sequence
  Description of Artificial Sequence: Synthetic oligonucleotide
uuuggaaacuggacgguca

SEQ ID NO: 2150616 - RNA, 19 nt, Artificial Sequence
  Description of Artificial Sequence: Synthetic oligonucleotide
aguggauacuuucagucca

SEQ ID NO: 2150617 - RNA, 19 nt, Artificial Sequence
  Description of Artificial Sequence: Synthetic oligonucleotide
acuaguuuacaccucugca

SEQ ID NO: 2150618 - RNA, 19 nt, Artificial Sequence
  Description of Artificial Sequence: Synthetic oligonucleotide
ccaauuuggaaacuggacg

SEQ ID NO: 2150619 - RNA, 19 nt, Artificial Sequence
  Description of Artificial Sequence: Synthetic oligonucleotide
aauacagccuauggacugg

SEQ ID NO: 2150620 - RNA, 19 nt, Artificial Sequence
  Description of Artificial Sequence: Synthetic oligonucleotide
uguggcaccacuguaggcc

SEQ ID NO: 2150621 - RNA, 19 nt, Artificial Sequence
  Description of Artificial Sequence: Synthetic oligonucleotide
accuuaagcauagagucuc

SEQ ID NO: 2150622 - RNA, 19 nt, Artificial Sequence
  Description of Artificial Sequence: Synthetic oligonucleotide
uguaggccaauuuggaaac

SEQ ID NO: 2150623 - RNA, 19 nt, Artificial Sequence
  Description of Artificial Sequence: Synthetic oligonucleotide
uaucuuugugauccaaaac

SEQ ID NO: 2150624 - RNA, 19 nt, Artificial Sequence
  Description of Artificial Sequence: Synthetic oligonucleotide
guugguaagucucucauaa

SEQ ID NO: 2150625 - RNA, 19 nt, Artificial Sequence
  Description of Artificial Sequence: Synthetic oligonucleotide
aguugcaguaacugggcag

SEQ ID NO: 2150626 - RNA, 19 nt, Artificial Sequence
  Description of Artificial Sequence: Synthetic oligonucleotide
uugaggagcuucaggaccc

SEQ ID NO: 2150627 - RNA, 19 nt, Artificial Sequence
  Description of Artificial Sequence: Synthetic oligonucleotide
acagagguggacuuuccag

SEQ ID NO: 2150628 - RNA, 19 nt, Artificial Sequence
  Description of Artificial Sequence: Synthetic oligonucleotide
gagacuuucguuucucgac

SEQ ID NO: 2150629 - RNA, 19 nt, Artificial Sequence
  Description of Artificial Sequence: Synthetic oligonucleotide
gugguaagcagcuuuccag

SEQ ID NO: 2150630 - RNA, 19 nt, Artificial Sequence
  Description of Artificial Sequence: Synthetic oligonucleotide
ugguccaucacuaguuuac

SEQ ID NO: 2150631 - RNA, 19 nt, Artificial Sequence
  Description of Artificial Sequence: Synthetic oligonucleotide
aacucagcuggccauuugu

SEQ ID NO: 2150632 - RNA, 19 nt, Artificial Sequence
  Description of Artificial Sequence: Synthetic oligonucleotide
ucauuuauucgauguagau

SEQ ID NO: 2150633 - RNA, 19 nt, Artificial Sequence
  Description of Artificial Sequence: Synthetic oligonucleotide
ucuguuuagucuagagaga

SEQ ID NO: 2150634 - RNA, 19 nt, Artificial Sequence
  Description of Artificial Sequence: Synthetic oligonucleotide
gugauccaaaaccuuaagc

SEQ ID NO: 2150635 - RNA, 19 nt, Artificial Sequence
  Description of Artificial Sequence: Synthetic oligonucleotide
uucucgaccggccugggga

SEQ ID NO: 2150636 - RNA, 19 nt, Artificial Sequence
  Description of Artificial Sequence: Synthetic oligonucleotide
aucacuaguuuacaccucu

SEQ ID NO: 2150637 - RNA, 19 nt, Artificial Sequence
  Description of Artificial Sequence: Synthetic oligonucleotide
aauuccuuccuguuagguu

SEQ ID NO: 2150638 - RNA, 19 nt, Artificial Sequence
  Description of Artificial Sequence: Synthetic oligonucleotide
ugggauaauuccuuccugu

SEQ ID NO: 2150639 - RNA, 19 nt, Artificial Sequence
  Description of Artificial Sequence: Synthetic oligonucleotide
gacgaagcaaagugauggg

SEQ ID NO: 2150640 - RNA, 19 nt, Artificial Sequence
  Description of Artificial Sequence: Synthetic oligonucleotide
guaaaugaagaaaacuguc

SEQ ID NO: 2150641 - RNA, 19 nt, Artificial Sequence
  Description of Artificial Sequence: Synthetic oligonucleotide
acagccuauggacuggaag

SEQ ID NO: 2150642 - RNA, 19 nt, Artificial Sequence
  Description of Artificial Sequence: Synthetic oligonucleotide
ugcauguuucccuguauca

SEQ ID NO: 2150643 - RNA, 19 nt, Artificial Sequence
  Description of Artificial Sequence: Synthetic oligonucleotide
uccaccagauaaauacagc

SEQ ID NO: 2150644 - RNA, 19 nt, Artificial Sequence
  Description of Artificial Sequence: Synthetic oligonucleotide
cuuuugugugagauguggc

SEQ ID NO: 2150645 - RNA, 19 nt, Artificial Sequence
  Description of Artificial Sequence: Synthetic oligonucleotide
gacuuucguuucucgaccg

SEQ ID NO: 2150646 - RNA, 19 nt, Artificial Sequence
  Description of Artificial Sequence: Synthetic oligonucleotide
accagauaaauacagccua

SEQ ID NO: 2150647 - RNA, 19 nt, Artificial Sequence
  Description of Artificial Sequence: Synthetic oligonucleotide
ugggucuacaccuuuuccu

SEQ ID NO: 2150648 - RNA, 19 nt, Artificial Sequence
  Description of Artificial Sequence: Synthetic oligonucleotide
uagugacgaagcaaaguga

SEQ ID NO: 2150649 - RNA, 19 nt, Artificial Sequence
  Description of Artificial Sequence: Synthetic oligonucleotide
acccggacaucacuguacc

SEQ ID NO: 2150650 - RNA, 19 nt, Artificial Sequence
  Description of Artificial Sequence: Synthetic oligonucleotide
ucuagguuugucaguugca

SEQ ID NO: 2150651 - RNA, 19 nt, Artificial Sequence
  Description of Artificial Sequence: Synthetic oligonucleotide
uaagucucucauaaacauc

SEQ ID NO: 2150652 - RNA, 19 nt, Artificial Sequence
  Description of Artificial Sequence: Synthetic oligonucleotide
cauuuauucgauguagauc

SEQ ID NO: 2150653 - RNA, 19 nt, Artificial Sequence
  Description of Artificial Sequence: Synthetic oligonucleotide
cagagguggacuuuccagc

SEQ ID NO: 2150654 - RNA, 19 nt, Artificial Sequence
  Description of Artificial Sequence: Synthetic oligonucleotide
guaagcagcuuuccagggg

SEQ ID NO: 2150655 - RNA, 19 nt, Artificial Sequence
  Description of Artificial Sequence: Synthetic oligonucleotide
uaucgggaguugcugaaga

SEQ ID NO: 2150656 - RNA, 19 nt, Artificial Sequence
  Description of Artificial Sequence: Synthetic oligonucleotide
uguccaaguggauacuuuc

SEQ ID NO: 2150657 - RNA, 19 nt, Artificial Sequence
  Description of Artificial Sequence: Synthetic oligonucleotide
ugaaaacucagcuggccau

SEQ ID NO: 2150658 - RNA, 19 nt, Artificial Sequence
  Description of Artificial Sequence: Synthetic oligonucleotide
uugggauaauuccuuccug

SEQ ID NO: 2150659 - RNA, 19 nt, Artificial Sequence
  Description of Artificial Sequence: Synthetic oligonucleotide
uagagagauaacagauugu

SEQ ID NO: 2150660 - RNA, 19 nt, Artificial Sequence
  Description of Artificial Sequence: Synthetic oligonucleotide
uuccuguuagguugguaag

SEQ ID NO: 2150661 - RNA, 19 nt, Artificial Sequence
  Description of Artificial Sequence: Synthetic oligonucleotide
ugcuggaacccuuuugugu

SEQ ID NO: 2150662 - RNA, 19 nt, Artificial Sequence
  Description of Artificial Sequence: Synthetic oligonucleotide
uugacagucccguucuugu

SEQ ID NO: 2150663 - RNA, 19 nt, Artificial Sequence
  Description of Artificial Sequence: Synthetic oligonucleotide
uugugauccaaaaccuuaa

SEQ ID NO: 2150664 - RNA, 19 nt, Artificial Sequence
  Description of Artificial Sequence: Synthetic oligonucleotide
gagagauaacagauugucc

SEQ ID NO: 2150665 - RNA, 19 nt, Artificial Sequence
  Description of Artificial Sequence: Synthetic oligonucleotide
uuuugacccggacaucacu

SEQ ID NO: 2150666 - RNA, 19 nt, Artificial Sequence
  Description of Artificial Sequence: Synthetic oligonucleotide
aacuggacggucaaacuga

SEQ ID NO: 2150667 - RNA, 19 nt, Artificial Sequence
  Description of Artificial Sequence: Synthetic oligonucleotide
ucccgcauuucaaugcuca

SEQ ID NO: 2150668 - RNA, 19 nt, Artificial Sequence
  Description of Artificial Sequence: Synthetic oligonucleotide
uguaacaggcauguaccug

SEQ ID NO: 2150669 - RNA, 19 nt, Artificial Sequence
  Description of Artificial Sequence: Synthetic oligonucleotide
gaaggcugaaaacucagcu

SEQ ID NO: 2150670 - RNA, 19 nt, Artificial Sequence
  Description of Artificial Sequence: Synthetic oligonucleotide
uguaccucuggaaguggug

SEQ ID NO: 2150671 - RNA, 19 nt, Artificial Sequence
  Description of Artificial Sequence: Synthetic oligonucleotide
cacuaguuuacaccucugc

SEQ ID NO: 2150672 - RNA, 19 nt, Artificial Sequence
  Description of Artificial Sequence: Synthetic oligonucleotide
aauuuggaaacuggacggu

SEQ ID NO: 2150673 - RNA, 19 nt, Artificial Sequence
  Description of Artificial Sequence: Synthetic oligonucleotide
agagguguaacaggcaugu

SEQ ID NO: 2150674 - RNA, 19 nt, Artificial Sequence
  Description of Artificial Sequence: Synthetic oligonucleotide
agccuauggacuggaaggc

SEQ ID NO: 2150675 - RNA, 19 nt, Artificial Sequence
  Description of Artificial Sequence: Synthetic oligonucleotide
guuccgauagugacgaagc

SEQ ID NO: 2150676 - RNA, 19 nt, Artificial Sequence
  Description of Artificial Sequence: Synthetic oligonucleotide
cuagguuugucaguugcag

SEQ ID NO: 2150677 - RNA, 19 nt, Artificial Sequence
  Description of Artificial Sequence: Synthetic oligonucleotide
aaacaucauguucuagguu

SEQ ID NO: 2150678 - RNA, 19 nt, Artificial Sequence
  Description of Artificial Sequence: Synthetic oligonucleotide
uucuuugggauaauuccuu

SEQ ID NO: 2150679 - RNA, 19 nt, Artificial Sequence
  Description of Artificial Sequence: Synthetic oligonucleotide
gguguaacaggcauguacc

SEQ ID NO: 2150680 - RNA, 19 nt, Artificial Sequence
  Description of Artificial Sequence: Synthetic oligonucleotide
guaccucuggaaguggugg

SEQ ID NO: 2150681 - RNA, 19 nt, Artificial Sequence
  Description of Artificial Sequence: Synthetic oligonucleotide
ugauuagcuauuucuugua

SEQ ID NO: 2150682 - RNA, 19 nt, Artificial Sequence
  Description of Artificial Sequence: Synthetic oligonucleotide
cauaucucaccccuucuuc

SEQ ID NO: 2150683 - RNA, 19 nt, Artificial Sequence
  Description of Artificial Sequence: Synthetic oligonucleotide
ucagcucauuuauucgaug

SEQ ID NO: 2150684 - RNA, 19 nt, Artificial Sequence
  Description of Artificial Sequence: Synthetic oligonucleotide
uccuuucgcuucaauuuug

SEQ ID NO: 2150685 - RNA, 19 nt, Artificial Sequence
  Description of Artificial Sequence: Synthetic oligonucleotide
cuuccuguuagguugguaa

SEQ ID NO: 2150686 - RNA, 19 nt, Artificial Sequence
  Description of Artificial Sequence: Synthetic oligonucleotide
acugucccgcauuucaaug

SEQ ID NO: 2150687 - RNA, 19 nt, Artificial Sequence
  Description of Artificial Sequence: Synthetic oligonucleotide
aauccaccagauaaauaca

SEQ ID NO: 2150688 - RNA, 19 nt, Artificial Sequence
  Description of Artificial Sequence: Synthetic oligonucleotide
aucgggaguugcugaagac

SEQ ID NO: 2150689 - RNA, 19 nt, Artificial Sequence
  Description of Artificial Sequence: Synthetic oligonucleotide
aggucuuggucgcacuggg

SEQ ID NO: 2150690 - RNA, 19 nt, Artificial Sequence
  Description of Artificial Sequence: Synthetic oligonucleotide
cuucaggacccuaucuuug

SEQ ID NO: 2150691 - RNA, 19 nt, Artificial Sequence
  Description of Artificial Sequence: Synthetic oligonucleotide
gucuuggucgcacugggac

SEQ ID NO: 2150692 - RNA, 19 nt, Artificial Sequence
  Description of Artificial Sequence: Synthetic oligonucleotide
cugucccgcauuucaaugc

SEQ ID NO: 2150693 - RNA, 19 nt, Artificial Sequence
  Description of Artificial Sequence: Synthetic oligonucleotide
ugucccgcauuucaaugcu

SEQ ID NO: 2150694 - RNA, 19 nt, Artificial Sequence
  Description of Artificial Sequence: Synthetic oligonucleotide
cuaucuuugugauccaaaa

SEQ ID NO: 2150695 - RNA, 19 nt, Artificial Sequence
  Description of Artificial Sequence: Synthetic oligonucleotide
caccccuucuucaucaaug

SEQ ID NO: 2150696 - RNA, 19 nt, Artificial Sequence
  Description of Artificial Sequence: Synthetic oligonucleotide
cugacuggagugagaagag

SEQ ID NO: 2150697 - RNA, 19 nt, Artificial Sequence
  Description of Artificial Sequence: Synthetic oligonucleotide
uucuguuuccaaguccuga

SEQ ID NO: 2150698 - RNA, 19 nt, Artificial Sequence
  Description of Artificial Sequence: Synthetic oligonucleotide
gauaacagauuguccaagu

SEQ ID NO: 2150699 - RNA, 19 nt, Artificial Sequence
  Description of Artificial Sequence: Synthetic oligonucleotide
aacugucccgcauuucaau

SEQ ID NO: 2150700 - RNA, 19 nt, Artificial Sequence
  Description of Artificial Sequence: Synthetic oligonucleotide
acuuucguuucucgaccgg

SEQ ID NO: 2150701 - RNA, 19 nt, Artificial Sequence
  Description of Artificial Sequence: Synthetic oligonucleotide
cucauuauucuucauaaau

SEQ ID NO: 2150702 - RNA, 19 nt, Artificial Sequence
  Description of Artificial Sequence: Synthetic oligonucleotide
auccaccagauaaauacag

SEQ ID NO: 2150703 - RNA, 19 nt, Artificial Sequence
  Description of Artificial Sequence: Synthetic oligonucleotide
ucugggucuacaccuuuuc

SEQ ID NO: 2150704 - RNA, 19 nt, Artificial Sequence
  Description of Artificial Sequence: Synthetic oligonucleotide
guaccuggaggaaggaggg

SEQ ID NO: 2150705 - RNA, 19 nt, Artificial Sequence
  Description of Artificial Sequence: Synthetic oligonucleotide
uucaggacccuaucuuugu

SEQ ID NO: 2150706 - RNA, 19 nt, Artificial Sequence
  Description of Artificial Sequence: Synthetic oligonucleotide
ucaggacccuaucuuugug

SEQ ID NO: 2150707 - RNA, 19 nt, Artificial Sequence
  Description of Artificial Sequence: Synthetic oligonucleotide
aaacucagcuggccauuug

SEQ ID NO: 2150708 - RNA, 19 nt, Artificial Sequence
  Description of Artificial Sequence: Synthetic oligonucleotide
ggaguugcugaagacagag

SEQ ID NO: 2150709 - RNA, 19 nt, Artificial Sequence
  Description of Artificial Sequence: Synthetic oligonucleotide
gcuggaacccuuuugugug

SEQ ID NO: 2150710 - RNA, 19 nt, Artificial Sequence
  Description of Artificial Sequence: Synthetic oligonucleotide
aucauguucuagguuuguc

SEQ ID NO: 2150711 - RNA, 19 nt, Artificial Sequence
  Description of Artificial Sequence: Synthetic oligonucleotide
cagggguuccgauagugac

SEQ ID NO: 2150712 - RNA, 19 nt, Artificial Sequence
  Description of Artificial Sequence: Synthetic oligonucleotide
ucacuaguuuacaccucug

SEQ ID NO: 2150713 - RNA, 19 nt, Artificial Sequence
  Description of Artificial Sequence: Synthetic oligonucleotide
ucuuggucgcacugggaca

SEQ ID NO: 2150714 - RNA, 19 nt, Artificial Sequence
  Description of Artificial Sequence: Synthetic oligonucleotide
uagguugguaagucucuca

SEQ ID NO: 2150715 - RNA, 19 nt, Artificial Sequence
  Description of Artificial Sequence: Synthetic oligonucleotide
gucaaacugaagaacugac

SEQ ID NO: 2150716 - RNA, 19 nt, Artificial Sequence
  Description of Artificial Sequence: Synthetic oligonucleotide
aaccuuaagcauagagucu

SEQ ID NO: 2150717 - RNA, 19 nt, Artificial Sequence
  Description of Artificial Sequence: Synthetic oligonucleotide
uuggaaacuggacggucaa

SEQ ID NO: 2150718 - RNA, 19 nt, Artificial Sequence
  Description of Artificial Sequence: Synthetic oligonucleotide
guaagucucucauaaacau

SEQ ID NO: 2150719 - RNA, 19 nt, Artificial Sequence
  Description of Artificial Sequence: Synthetic oligonucleotide
cuuucguuucucgaccggc

SEQ ID NO: 2150720 - RNA, 19 nt, Artificial Sequence
  Description of Artificial Sequence: Synthetic oligonucleotide
agcacagagguggacuuuc

SEQ ID NO: 2150721 - RNA, 19 nt, Artificial Sequence
  Description of Artificial Sequence: Synthetic oligonucleotide
agugacgaagcaaagugau

SEQ ID NO: 2150722 - RNA, 19 nt, Artificial Sequence
  Description of Artificial Sequence: Synthetic oligonucleotide
uuguagcauagcuuucuuc

SEQ ID NO: 2150723 - RNA, 19 nt, Artificial Sequence
  Description of Artificial Sequence: Synthetic oligonucleotide
ugggcggagacuuucguuu

SEQ ID NO: 2150724 - RNA, 19 nt, Artificial Sequence
  Description of Artificial Sequence: Synthetic oligonucleotide
uucguuucucgaccggccu

SEQ ID NO: 2150725 - RNA, 19 nt, Artificial Sequence
  Description of Artificial Sequence: Synthetic oligonucleotide
agaaaacugucccgcauuu

SEQ ID NO: 2150726 - RNA, 19 nt, Artificial Sequence
  Description of Artificial Sequence: Synthetic oligonucleotide
gacacucccuucugauuag

SEQ ID NO: 2150727 - RNA, 19 nt, Artificial Sequence
  Description of Artificial Sequence: Synthetic oligonucleotide
acggucaaacugaagaacu

SEQ ID NO: 2150728 - RNA, 19 nt, Artificial Sequence
  Description of Artificial Sequence: Synthetic oligonucleotide
cauaaacaucauguucuag

SEQ ID NO: 2150729 - RNA, 19 nt, Artificial Sequence
  Description of Artificial Sequence: Synthetic oligonucleotide
acuguaggccaauuuggaa

SEQ ID NO: 2150730 - RNA, 19 nt, Artificial Sequence
  Description of Artificial Sequence: Synthetic oligonucleotide
accaugccaguccagcucu

SEQ ID NO: 2150731 - RNA, 19 nt, Artificial Sequence
  Description of Artificial Sequence: Synthetic oligonucleotide
cucaguucaggcccugcag

SEQ ID NO: 2150732 - RNA, 19 nt, Artificial Sequence
  Description of Artificial Sequence: Synthetic oligonucleotide
agguugguaagucucucau

SEQ ID NO: 2150733 - RNA, 19 nt, Artificial Sequence
  Description of Artificial Sequence: Synthetic oligonucleotide
uccgauagugacgaagcaa

SEQ ID NO: 2150734 - RNA, 19 nt, Artificial Sequence
  Description of Artificial Sequence: Synthetic oligonucleotide
gauuugguccaucacuagu

SEQ ID NO: 2150735 - RNA, 19 nt, Artificial Sequence
  Description of Artificial Sequence: Synthetic oligonucleotide
cugaagacagagguguaac

SEQ ID NO: 2150736 - RNA, 19 nt, Artificial Sequence
  Description of Artificial Sequence: Synthetic oligonucleotide
accgaguaucgggaguugc

SEQ ID NO: 2150737 - RNA, 19 nt, Artificial Sequence
  Description of Artificial Sequence: Synthetic oligonucleotide
uuauucgauguagaucauc

SEQ ID NO: 2150738 - RNA, 19 nt, Artificial Sequence
  Description of Artificial Sequence: Synthetic oligonucleotide
uuccgauagugacgaagca

SEQ ID NO: 2150739 - RNA, 19 nt, Artificial Sequence
  Description of Artificial Sequence: Synthetic oligonucleotide
uggauacuuucaguccagg

SEQ ID NO: 2150740 - RNA, 19 nt, Artificial Sequence
  Description of Artificial Sequence: Synthetic oligonucleotide
ggcuucgcugauuuggucc

SEQ ID NO: 2150741 - RNA, 19 nt, Artificial Sequence
  Description of Artificial Sequence: Synthetic oligonucleotide
cagauaaauacagccuaug

SEQ ID NO: 2150742 - RNA, 19 nt, Artificial Sequence
  Description of Artificial Sequence: Synthetic oligonucleotide
uuucucgaccggccugggg

SEQ ID NO: 2150743 - RNA, 19 nt, Artificial Sequence
  Description of Artificial Sequence: Synthetic oligonucleotide
ugucaccgaguaucgggag

SEQ ID NO: 2150744 - RNA, 19 nt, Artificial Sequence
  Description of Artificial Sequence: Synthetic oligonucleotide
gaagaacugacuggaguga

SEQ ID NO: 2150745 - RNA, 19 nt, Artificial Sequence
  Description of Artificial Sequence: Synthetic oligonucleotide
uuugggcggagacuuucgu

SEQ ID NO: 2150746 - RNA, 19 nt, Artificial Sequence
  Description of Artificial Sequence: Synthetic oligonucleotide
uguuuagucuagagagaua

SEQ ID NO: 2150747 - RNA, 19 nt, Artificial Sequence
  Description of Artificial Sequence: Synthetic oligonucleotide
cuuucgcuucaauuuugac

SEQ ID NO: 2150748 - RNA, 19 nt, Artificial Sequence
  Description of Artificial Sequence: Synthetic oligonucleotide
aguaucgggaguugcugaa

SEQ ID NO: 2150749 - RNA, 19 nt, Artificial Sequence
  Description of Artificial Sequence: Synthetic oligonucleotide
cugauuugguccaucacua

SEQ ID NO: 2150750 - RNA, 19 nt, Artificial Sequence
  Description of Artificial Sequence: Synthetic oligonucleotide
cugaaaacucagcuggcca

SEQ ID NO: 2150751 - RNA, 19 nt, Artificial Sequence
  Description of Artificial Sequence: Synthetic oligonucleotide
gucccguucuuguugagga

SEQ ID NO: 2150752 - RNA, 19 nt, Artificial Sequence
  Description of Artificial Sequence: Synthetic oligonucleotide
gcuauuucuuguagcauag

SEQ ID NO: 2150753 - RNA, 19 nt, Artificial Sequence
  Description of Artificial Sequence: Synthetic oligonucleotide
ucgcugauuugguccauca

SEQ ID NO: 2150754 - RNA, 19 nt, Artificial Sequence
  Description of Artificial Sequence: Synthetic oligonucleotide
cugggucuacaccuuuucc

SEQ ID NO: 2150755 - RNA, 19 nt, Artificial Sequence
  Description of Artificial Sequence: Synthetic oligonucleotide
aguccugauucuucugggu

SEQ ID NO: 2150756 - RNA, 19 nt, Artificial Sequence
  Description of Artificial Sequence: Synthetic oligonucleotide
ggauacuuucaguccaggc

SEQ ID NO: 2150757 - RNA, 19 nt, Artificial Sequence
  Description of Artificial Sequence: Synthetic oligonucleotide
ggaaacuggacggucaaac

SEQ ID NO: 2150758 - RNA, 19 nt, Artificial Sequence
  Description of Artificial Sequence: Synthetic oligonucleotide
gaguaucgggaguugcuga

SEQ ID NO: 2150759 - RNA, 19 nt, Artificial Sequence
  Description of Artificial Sequence: Synthetic oligonucleotide
cugauuagcuauuucuugu

SEQ ID NO: 2150760 - RNA, 19 nt, Artificial Sequence
  Description of Artificial Sequence: Synthetic oligonucleotide
uccuguuagguugguaagu

SEQ ID NO: 2150761 - RNA, 19 nt, Artificial Sequence
  Description of Artificial Sequence: Synthetic oligonucleotide
aggacccuaucuuugugau

SEQ ID NO: 2150762 - RNA, 19 nt, Artificial Sequence
  Description of Artificial Sequence: Synthetic oligonucleotide
cugcauguuucccuguauc

SEQ ID NO: 2150763 - RNA, 19 nt, Artificial Sequence
  Description of Artificial Sequence: Synthetic oligonucleotide
uuuccagccuugggcacgg

SEQ ID NO: 2150764 - RNA, 19 nt, Artificial Sequence
  Description of Artificial Sequence: Synthetic oligonucleotide
ccuuuugugugagaugugg

SEQ ID NO: 2150765 - RNA, 19 nt, Artificial Sequence
  Description of Artificial Sequence: Synthetic oligonucleotide
uucuuguagcauagcuuuc

SEQ ID NO: 2150766 - RNA, 19 nt, Artificial Sequence
  Description of Artificial Sequence: Synthetic oligonucleotide
gauagugacgaagcaaagu

SEQ ID NO: 2150767 - RNA, 19 nt, Artificial Sequence
  Description of Artificial Sequence: Synthetic oligonucleotide
agucccguucuuguugagg

SEQ ID NO: 2150768 - RNA, 19 nt, Artificial Sequence
  Description of Artificial Sequence: Synthetic oligonucleotide
cuuuccagccuugggcacg

SEQ ID NO: 2150769 - RNA, 19 nt, Artificial Sequence
  Description of Artificial Sequence: Synthetic oligonucleotide
guagcauagcuuucuucuc

SEQ ID NO: 2150770 - RNA, 19 nt, Artificial Sequence
  Description of Artificial Sequence: Synthetic oligonucleotide
ggccauuugugucaccgag

SEQ ID NO: 2150771 - RNA, 19 nt, Artificial Sequence
  Description of Artificial Sequence: Synthetic oligonucleotide
cuuaagcauagagucucug

SEQ ID NO: 2150772 - RNA, 19 nt, Artificial Sequence
  Description of Artificial Sequence: Synthetic oligonucleotide
uagagucucuggcuucgcu

SEQ ID NO: 2150773 - RNA, 19 nt, Artificial Sequence
  Description of Artificial Sequence: Synthetic oligonucleotide
gguuccgauagugacgaag

SEQ ID NO: 2150774 - RNA, 19 nt, Artificial Sequence
  Description of Artificial Sequence: Synthetic oligonucleotide
guacucuuugggcggagac

SEQ ID NO: 2150775 - RNA, 19 nt, Artificial Sequence
  Description of Artificial Sequence: Synthetic oligonucleotide
acuuuucuugacagucccg

SEQ ID NO: 2150776 - RNA, 19 nt, Artificial Sequence
  Description of Artificial Sequence: Synthetic oligonucleotide
cagagguguaacaggcaug

SEQ ID NO: 2150777 - RNA, 19 nt, Artificial Sequence
  Description of Artificial Sequence: Synthetic oligonucleotide
agcucauuuauucgaugua

SEQ ID NO: 2150778 - RNA, 19 nt, Artificial Sequence
  Description of Artificial Sequence: Synthetic oligonucleotide
agggguuccgauagugacg

SEQ ID NO: 2150779 - RNA, 19 nt, Artificial Sequence
  Description of Artificial Sequence: Synthetic oligonucleotide
uuguccaaguggauacuuu

SEQ ID NO: 2150780 - RNA, 19 nt, Artificial Sequence
  Description of Artificial Sequence: Synthetic oligonucleotide
ccaggcucaguucaggccc

SEQ ID NO: 2150781 - RNA, 19 nt, Artificial Sequence
  Description of Artificial Sequence: Synthetic oligonucleotide
cuuuugacccggacaucac

SEQ ID NO: 2150782 - RNA, 19 nt, Artificial Sequence
  Description of Artificial Sequence: Synthetic oligonucleotide
uuagguugguaagucucuc

SEQ ID NO: 2150783 - RNA, 19 nt, Artificial Sequence
  Description of Artificial Sequence: Synthetic oligonucleotide
uugguaagucucucauaaa

SEQ ID NO: 2150784 - RNA, 19 nt, Artificial Sequence
  Description of Artificial Sequence: Synthetic oligonucleotide
auccaaaaccuuaagcaua

SEQ ID NO: 2150785 - RNA, 19 nt, Artificial Sequence
  Description of Artificial Sequence: Synthetic oligonucleotide
acgaagcaaagugauggga

SEQ ID NO: 2150786 - RNA, 19 nt, Artificial Sequence
  Description of Artificial Sequence: Synthetic oligonucleotide
gcauguaccuggaggaagg

SEQ ID NO: 2150787 - RNA, 19 nt, Artificial Sequence
  Description of Artificial Sequence: Synthetic oligonucleotide
auagagucucuggcuucgc

SEQ ID NO: 2150788 - RNA, 19 nt, Artificial Sequence
  Description of Artificial Sequence: Synthetic oligonucleotide
cacuguaccucuggaagug

SEQ ID NO: 2150789 - RNA, 19 nt, Artificial Sequence
  Description of Artificial Sequence: Synthetic oligonucleotide
uggaacccuuuugugugag

SEQ ID NO: 2150790 - RNA, 19 nt, Artificial Sequence
  Description of Artificial Sequence: Synthetic oligonucleotide
ucccguucuuguugaggag

SEQ ID NO: 2150791 - RNA, 19 nt, Artificial Sequence
  Description of Artificial Sequence: Synthetic oligonucleotide
uugugucaccgaguaucgg

SEQ ID NO: 2150792 - RNA, 19 nt, Artificial Sequence
  Description of Artificial Sequence: Synthetic oligonucleotide
cacuguaggccaauuugga

SEQ ID NO: 2150793 - RNA, 19 nt, Artificial Sequence
  Description of Artificial Sequence: Synthetic oligonucleotide
acacucccuucugauuagc

SEQ ID NO: 2150794 - RNA, 19 nt, Artificial Sequence
  Description of Artificial Sequence: Synthetic oligonucleotide
caucacuaguuuacaccuc

SEQ ID NO: 2150795 - RNA, 19 nt, Artificial Sequence
  Description of Artificial Sequence: Synthetic oligonucleotide
gucuagagagauaacagau

SEQ ID NO: 2150796 - RNA, 19 nt, Artificial Sequence
  Description of Artificial Sequence: Synthetic oligonucleotide
gucgcacugggacauaucu

SEQ ID NO: 2150797 - RNA, 19 nt, Artificial Sequence
  Description of Artificial Sequence: Synthetic oligonucleotide
gacuggagugagaagaggu

SEQ ID NO: 2150798 - RNA, 19 nt, Artificial Sequence
  Description of Artificial Sequence: Synthetic oligonucleotide
aaacugucccgcauuucaa

SEQ ID NO: 2150799 - RNA, 19 nt, Artificial Sequence
  Description of Artificial Sequence: Synthetic oligonucleotide
ccuauggacuggaaggcug

SEQ ID NO: 2150800 - RNA, 19 nt, Artificial Sequence
  Description of Artificial Sequence: Synthetic oligonucleotide
guggauacuuucaguccag

SEQ ID NO: 2150801 - RNA, 19 nt, Artificial Sequence
  Description of Artificial Sequence: Synthetic oligonucleotide
guucuagguuugucaguug

SEQ ID NO: 2150802 - RNA, 19 nt, Artificial Sequence
  Description of Artificial Sequence: Synthetic oligonucleotide
uguacucuuugggcggaga

SEQ ID NO: 2150803 - RNA, 19 nt, Artificial Sequence
  Description of Artificial Sequence: Synthetic oligonucleotide
ucaccgaguaucgggaguu

SEQ ID NO: 2150804 - RNA, 19 nt, Artificial Sequence
  Description of Artificial Sequence: Synthetic oligonucleotide
gacccggacaucacuguac

SEQ ID NO: 2150805 - RNA, 19 nt, Artificial Sequence
  Description of Artificial Sequence: Synthetic oligonucleotide
ugacccggacaucacugua

SEQ ID NO: 2150806 - RNA, 19 nt, Artificial Sequence
  Description of Artificial Sequence: Synthetic oligonucleotide
caggacccuaucuuuguga

SEQ ID NO: 2150807 - RNA, 19 nt, Artificial Sequence
  Description of Artificial Sequence: Synthetic oligonucleotide
ggacacucccuucugauua

SEQ ID NO: 2150808 - RNA, 19 nt, Artificial Sequence
  Description of Artificial Sequence: Synthetic oligonucleotide
caggaauccaccagauaaa

SEQ ID NO: 2150809 - RNA, 19 nt, Artificial Sequence
  Description of Artificial Sequence: Synthetic oligonucleotide
ucccuguaucagcucauuu

SEQ ID NO: 2150810 - RNA, 19 nt, Artificial Sequence
  Description of Artificial Sequence: Synthetic oligonucleotide
caccaugccaguccagcuc

SEQ ID NO: 2150811 - RNA, 19 nt, Artificial Sequence
  Description of Artificial Sequence: Synthetic oligonucleotide
ggucaaacugaagaacuga

SEQ ID NO: 2150812 - RNA, 19 nt, Artificial Sequence
  Description of Artificial Sequence: Synthetic oligonucleotide
ucugaccuuucugugccau

SEQ ID NO: 2150813 - RNA, 19 nt, Artificial Sequence
  Description of Artificial Sequence: Synthetic oligonucleotide
cagcucauuuauucgaugu

SEQ ID NO: 2150814 - RNA, 19 nt, Artificial Sequence
  Description of Artificial Sequence: Synthetic oligonucleotide
auuguccaaguggauacuu

SEQ ID NO: 2150815 - RNA, 19 nt, Artificial Sequence
  Description of Artificial Sequence: Synthetic oligonucleotide
ucaccccuucuucaucaau

SEQ ID NO: 2150816 - RNA, 19 nt, Artificial Sequence
  Description of Artificial Sequence: Synthetic oligonucleotide
gccaauuuggaaacuggac

SEQ ID NO: 2150817 - RNA, 19 nt, Artificial Sequence
  Description of Artificial Sequence: Synthetic oligonucleotide
ggcauguaccuggaggaag

SEQ ID NO: 2150818 - RNA, 19 nt, Artificial Sequence
  Description of Artificial Sequence: Synthetic oligonucleotide
gaacccuuuugugugagau

SEQ ID NO: 2150819 - RNA, 19 nt, Artificial Sequence
  Description of Artificial Sequence: Synthetic oligonucleotide
acucagcuggccauuugug

SEQ ID NO: 2150820 - RNA, 19 nt, Artificial Sequence
  Description of Artificial Sequence: Synthetic oligonucleotide
ggcacggcaggacacuccc

SEQ ID NO: 2150821 - RNA, 19 nt, Artificial Sequence
  Description of Artificial Sequence: Synthetic oligonucleotide
cucccuucugauuagcuau

SEQ ID NO: 2150822 - RNA, 19 nt, Artificial Sequence
  Description of Artificial Sequence: Synthetic oligonucleotide
uugggcggagacuuucguu

SEQ ID NO: 2150823 - RNA, 19 nt, Artificial Sequence
  Description of Artificial Sequence: Synthetic oligonucleotide
ucaggcccugcaggaaucc

SEQ ID NO: 2150824 - RNA, 19 nt, Artificial Sequence
  Description of Artificial Sequence: Synthetic oligonucleotide
ccgauagugacgaagcaaa

SEQ ID NO: 2150825 - RNA, 19 nt, Artificial Sequence
  Description of Artificial Sequence: Synthetic oligonucleotide
guccaaguggauacuuuca

SEQ ID NO: 2150826 - RNA, 19 nt, Artificial Sequence
  Description of Artificial Sequence: Synthetic oligonucleotide
cuuuccagggguuccgaua

SEQ ID NO: 2150827 - RNA, 19 nt, Artificial Sequence
  Description of Artificial Sequence: Synthetic oligonucleotide
cuggacggucaaacugaag

SEQ ID NO: 2150828 - RNA, 19 nt, Artificial Sequence
  Description of Artificial Sequence: Synthetic oligonucleotide
aggacacucccuucugauu

SEQ ID NO: 2150829 - RNA, 19 nt, Artificial Sequence
  Description of Artificial Sequence: Synthetic oligonucleotide
cagauuguccaaguggaua

SEQ ID NO: 2150830 - RNA, 19 nt, Artificial Sequence
  Description of Artificial Sequence: Synthetic oligonucleotide
ugacagucccguucuuguu

SEQ ID NO: 2150831 - RNA, 19 nt, Artificial Sequence
  Description of Artificial Sequence: Synthetic oligonucleotide
gugucaccgaguaucggga

SEQ ID NO: 2150832 - RNA, 19 nt, Artificial Sequence
  Description of Artificial Sequence: Synthetic oligonucleotide
guuagguugguaagucucu

SEQ ID NO: 2150833 - RNA, 19 nt, Artificial Sequence
  Description of Artificial Sequence: Synthetic oligonucleotide
ucucgaccggccuggggau

SEQ ID NO: 2150834 - RNA, 19 nt, Artificial Sequence
  Description of Artificial Sequence: Synthetic oligonucleotide
uacagccuauggacuggaa

SEQ ID NO: 2150835 - RNA, 19 nt, Artificial Sequence
  Description of Artificial Sequence: Synthetic oligonucleotide
cuguuuagucuagagagau

SEQ ID NO: 2150836 - RNA, 19 nt, Artificial Sequence
  Description of Artificial Sequence: Synthetic oligonucleotide
ugggaggucuuggucgcac

SEQ ID NO: 2150837 - RNA, 19 nt, Artificial Sequence
  Description of Artificial Sequence: Synthetic oligonucleotide
guuuucuguuuagucuaga

SEQ ID NO: 2150838 - RNA, 19 nt, Artificial Sequence
  Description of Artificial Sequence: Synthetic oligonucleotide
cagcuuuccagggguuccg

SEQ ID NO: 2150839 - RNA, 19 nt, Artificial Sequence
  Description of Artificial Sequence: Synthetic oligonucleotide
auacagccuauggacugga

SEQ ID NO: 2150840 - RNA, 19 nt, Artificial Sequence
  Description of Artificial Sequence: Synthetic oligonucleotide
gggguuccgauagugacga

SEQ ID NO: 2150841 - RNA, 19 nt, Artificial Sequence
  Description of Artificial Sequence: Synthetic oligonucleotide
ucgcuucaauuuugacacu

SEQ ID NO: 2150842 - RNA, 19 nt, Artificial Sequence
  Description of Artificial Sequence: Synthetic oligonucleotide
uggcuucgcugauuugguc

SEQ ID NO: 2150843 - RNA, 19 nt, Artificial Sequence
  Description of Artificial Sequence: Synthetic oligonucleotide
gcuucgcugauuuggucca

SEQ ID NO: 2150844 - RNA, 19 nt, Artificial Sequence
  Description of Artificial Sequence: Synthetic oligonucleotide
cacagagguggacuuucca

SEQ ID NO: 2150845 - RNA, 19 nt, Artificial Sequence
  Description of Artificial Sequence: Synthetic oligonucleotide
uucgcugauuugguccauc

SEQ ID NO: 2150846 - RNA, 19 nt, Artificial Sequence
  Description of Artificial Sequence: Synthetic oligonucleotide
uggaaacuggacggucaaa

SEQ ID NO: 2150847 - RNA, 19 nt, Artificial Sequence
  Description of Artificial Sequence: Synthetic oligonucleotide
cuccucuuuugacccggac

SEQ ID NO: 2150848 - RNA, 19 nt, Artificial Sequence
  Description of Artificial Sequence: Synthetic oligonucleotide
cucagcuggccauuugugu

SEQ ID NO: 2150849 - RNA, 19 nt, Artificial Sequence
  Description of Artificial Sequence: Synthetic oligonucleotide
cccguucuuguugaggagc

SEQ ID NO: 2150850 - RNA, 19 nt, Artificial Sequence
  Description of Artificial Sequence: Synthetic oligonucleotide
ucgaccggccuggggaucu

SEQ ID NO: 2150851 - RNA, 19 nt, Artificial Sequence
  Description of Artificial Sequence: Synthetic oligonucleotide
caguugcaguaacugggca

SEQ ID NO: 2150852 - RNA, 19 nt, Artificial Sequence
  Description of Artificial Sequence: Synthetic oligonucleotide
cuggaacccuuuuguguga

SEQ ID NO: 2150853 - RNA, 19 nt, Artificial Sequence
  Description of Artificial Sequence: Synthetic oligonucleotide
uuccagggguuccgauagu

SEQ ID NO: 2150854 - RNA, 19 nt, Artificial Sequence
  Description of Artificial Sequence: Synthetic oligonucleotide
ggccaauuuggaaacugga

SEQ ID NO: 2150855 - RNA, 19 nt, Artificial Sequence
  Description of Artificial Sequence: Synthetic oligonucleotide
gcauagagucucuggcuuc

SEQ ID NO: 2150856 - RNA, 19 nt, Artificial Sequence
  Description of Artificial Sequence: Synthetic oligonucleotide
cuccgggugcuguggcacc

SEQ ID NO: 2150857 - RNA, 19 nt, Artificial Sequence
  Description of Artificial Sequence: Synthetic oligonucleotide
uggaggaaggagggcucac

SEQ ID NO: 2150858 - RNA, 19 nt, Artificial Sequence
  Description of Artificial Sequence: Synthetic oligonucleotide
ccuucugauuagcuauuuc

SEQ ID NO: 2150859 - RNA, 19 nt, Artificial Sequence
  Description of Artificial Sequence: Synthetic oligonucleotide
gauuguccaaguggauacu

SEQ ID NO: 2150860 - RNA, 19 nt, Artificial Sequence
  Description of Artificial Sequence: Synthetic oligonucleotide
gaccuuucugugccaucaa

SEQ ID NO: 2150861 - RNA, 19 nt, Artificial Sequence
  Description of Artificial Sequence: Synthetic oligonucleotide
uggucgcacugggacauau

SEQ ID NO: 2150862 - RNA, 19 nt, Artificial Sequence
  Description of Artificial Sequence: Synthetic oligonucleotide
guuucucgaccggccuggg

SEQ ID NO: 2150863 - RNA, 19 nt, Artificial Sequence
  Description of Artificial Sequence: Synthetic oligonucleotide
auguacucuuugggcggag

SEQ ID NO: 2150864 - RNA, 19 nt, Artificial Sequence
  Description of Artificial Sequence: Synthetic oligonucleotide
cgauagugacgaagcaaag

SEQ ID NO: 2150865 - RNA, 19 nt, Artificial Sequence
  Description of Artificial Sequence: Synthetic oligonucleotide
cccuguaucagcucauuua

SEQ ID NO: 2150866 - RNA, 19 nt, Artificial Sequence
  Description of Artificial Sequence: Synthetic oligonucleotide
auguggcagcucuccgggu

SEQ ID NO: 2150867 - RNA, 19 nt, Artificial Sequence
  Description of Artificial Sequence: Synthetic oligonucleotide
gaaaacucagcuggccauu

SEQ ID NO: 2150868 - RNA, 19 nt, Artificial Sequence
  Description of Artificial Sequence: Synthetic oligonucleotide
uucccuguaucagcucauu

SEQ ID NO: 2150869 - RNA, 19 nt, Artificial Sequence
  Description of Artificial Sequence: Synthetic oligonucleotide
gucaccgaguaucgggagu

SEQ ID NO: 2150870 - RNA, 19 nt, Artificial Sequence
  Description of Artificial Sequence: Synthetic oligonucleotide
ccuuucgcuucaauuuuga

SEQ ID NO: 2150871 - RNA, 19 nt, Artificial Sequence
  Description of Artificial Sequence: Synthetic oligonucleotide
gguccaucacuaguuuaca

SEQ ID NO: 2150872 - RNA, 19 nt, Artificial Sequence
  Description of Artificial Sequence: Synthetic oligonucleotide
ccuguaucagcucauuuau

SEQ ID NO: 2150873 - RNA, 19 nt, Artificial Sequence
  Description of Artificial Sequence: Synthetic oligonucleotide
cuguaccucuggaaguggu

SEQ ID NO: 2150874 - RNA, 19 nt, Artificial Sequence
  Description of Artificial Sequence: Synthetic oligonucleotide
cagucccguucuuguugag

SEQ ID NO: 2150875 - RNA, 19 nt, Artificial Sequence
  Description of Artificial Sequence: Synthetic oligonucleotide
cauguaccuggaggaagga

SEQ ID NO: 2150876 - RNA, 19 nt, Artificial Sequence
  Description of Artificial Sequence: Synthetic oligonucleotide
cguuucucgaccggccugg

SEQ ID NO: 2150877 - RNA, 19 nt, Artificial Sequence
  Description of Artificial Sequence: Synthetic oligonucleotide
ggacccuaucuuugugauc

SEQ ID NO: 2150878 - RNA, 19 nt, Artificial Sequence
  Description of Artificial Sequence: Synthetic oligonucleotide
gggucuacaccuuuuccuu

SEQ ID NO: 2150879 - RNA, 19 nt, Artificial Sequence
  Description of Artificial Sequence: Synthetic oligonucleotide
cuuggucgcacugggacau

SEQ ID NO: 2150880 - RNA, 19 nt, Artificial Sequence
  Description of Artificial Sequence: Synthetic oligonucleotide
gcaaagugaugggaggucu

SEQ ID NO: 2150881 - RNA, 19 nt, Artificial Sequence
  Description of Artificial Sequence: Synthetic oligonucleotide
ggaauccaccagauaaaua

SEQ ID NO: 2150882 - RNA, 19 nt, Artificial Sequence
  Description of Artificial Sequence: Synthetic oligonucleotide
gggcggagacuuucguuuc

SEQ ID NO: 2150883 - RNA, 19 nt, Artificial Sequence
  Description of Artificial Sequence: Synthetic oligonucleotide
cgaguaucgggaguugcug

SEQ ID NO: 2150884 - RNA, 19 nt, Artificial Sequence
  Description of Artificial Sequence: Synthetic oligonucleotide
caccgaguaucgggaguug

SEQ ID NO: 2150885 - RNA, 19 nt, Artificial Sequence
  Description of Artificial Sequence: Synthetic oligonucleotide
gcuucaggacccuaucuuu

SEQ ID NO: 2150886 - RNA, 19 nt, Artificial Sequence
  Description of Artificial Sequence: Synthetic oligonucleotide
caaagugaugggaggucuu

SEQ ID NO: 2150887 - RNA, 19 nt, Artificial Sequence
  Description of Artificial Sequence: Synthetic oligonucleotide
cugauugcuggaacccuuu

SEQ ID NO: 2150888 - RNA, 19 nt, Artificial Sequence
  Description of Artificial Sequence: Synthetic oligonucleotide
ccaaguggauacuuucagu

SEQ ID NO: 2150889 - RNA, 19 nt, Artificial Sequence
  Description of Artificial Sequence: Synthetic oligonucleotide
ccagggguuccgauaguga

SEQ ID NO: 2150890 - RNA, 19 nt, Artificial Sequence
  Description of Artificial Sequence: Synthetic oligonucleotide
gucccgcauuucaaugcuc

SEQ ID NO: 2150891 - RNA, 19 nt, Artificial Sequence
  Description of Artificial Sequence: Synthetic oligonucleotide
gcacagagguggacuuucc

SEQ ID NO: 2150892 - RNA, 19 nt, Artificial Sequence
  Description of Artificial Sequence: Synthetic oligonucleotide
ccagauaaauacagccuau

SEQ ID NO: 2150893 - RNA, 19 nt, Artificial Sequence
  Description of Artificial Sequence: Synthetic oligonucleotide
cacggcaggacacucccuu

SEQ ID NO: 2150894 - RNA, 19 nt, Artificial Sequence
  Description of Artificial Sequence: Synthetic oligonucleotide
ccuugggcacggcaggaca

SEQ ID NO: 2150895 - RNA, 19 nt, Artificial Sequence
  Description of Artificial Sequence: Synthetic oligonucleotide
cauuugugucaccgaguau

SEQ ID NO: 2150896 - RNA, 19 nt, Artificial Sequence
  Description of Artificial Sequence: Synthetic oligonucleotide
guaggccaauuuggaaacu

SEQ ID NO: 2150897 - RNA, 19 nt, Artificial Sequence
  Description of Artificial Sequence: Synthetic oligonucleotide
cuuucaguccaggcucagu

SEQ ID NO: 2150898 - RNA, 19 nt, Artificial Sequence
  Description of Artificial Sequence: Synthetic oligonucleotide
gcggagacuuucguuucuc

SEQ ID NO: 2150899 - RNA, 19 nt, Artificial Sequence
  Description of Artificial Sequence: Synthetic oligonucleotide
gagguguaacaggcaugua

SEQ ID NO: 2150900 - RNA, 19 nt, Artificial Sequence
  Description of Artificial Sequence: Synthetic oligonucleotide
gggcacggcaggacacucc

SEQ ID NO: 2150901 - RNA, 19 nt, Artificial Sequence
  Description of Artificial Sequence: Synthetic oligonucleotide
gggaguugcugaagacaga

SEQ ID NO: 2150902 - RNA, 19 nt, Artificial Sequence
  Description of Artificial Sequence: Synthetic oligonucleotide
gcccugcaggaauccacca

SEQ ID NO: 2150903 - RNA, 19 nt, Artificial Sequence
  Description of Artificial Sequence: Synthetic oligonucleotide
uuggucgcacugggacaua

SEQ ID NO: 2150904 - RNA, 19 nt, Artificial Sequence
  Description of Artificial Sequence: Synthetic oligonucleotide
cucgaccggccuggggauc

SEQ ID NO: 2150905 - RNA, 19 nt, Artificial Sequence
  Description of Artificial Sequence: Synthetic oligonucleotide
gaccggccuggggaucuca

SEQ ID NO: 2150906 - RNA, 19 nt, Artificial Sequence
  Description of Artificial Sequence: Synthetic oligonucleotide
ggcggagacuuucguuucu

SEQ ID NO: 2150907 - RNA, 19 nt, Artificial Sequence
  Description of Artificial Sequence: Synthetic oligonucleotide
ccguucuuguugaggagcu

SEQ ID NO: 2150908 - RNA, 19 nt, Artificial Sequence
  Description of Artificial Sequence: Synthetic oligonucleotide
ggucgcacugggacauauc

SEQ ID NO: 2150909 - RNA, 19 nt, Artificial Sequence
  Description of Artificial Sequence: Synthetic oligonucleotide
ccgaguaucgggaguugcu

SEQ ID NO: 2150910 - RNA, 19 nt, Artificial Sequence
  Description of Artificial Sequence: Synthetic oligonucleotide
ccuuaagcauagagucucu

SEQ ID NO: 2150911 - RNA, 19 nt, Artificial Sequence
  Description of Artificial Sequence: Synthetic oligonucleotide
cccuaucuuugugauccaa

SEQ ID NO: 2150912 - RNA, 19 nt, Artificial Sequence
  Description of Artificial Sequence: Synthetic oligonucleotide
gggacauaucucaccccuu

SEQ ID NO: 2150913 - RNA, 19 nt, Artificial Sequence
  Description of Artificial Sequence: Synthetic oligonucleotide
ggcaccacuguaggccaau

SEQ ID NO: 2150914 - RNA, 19 nt, Artificial Sequence
  Description of Artificial Sequence: Synthetic oligonucleotide
ggguuccgauagugacgaa

SEQ ID NO: 2150915 - RNA, 19 nt, Artificial Sequence
  Description of Artificial Sequence: Synthetic oligonucleotide
ccgcauuucaaugcucauu

SEQ ID NO: 2150916 - RNA, 19 nt, Artificial Sequence
  Description of Artificial Sequence: Synthetic oligonucleotide
cccgcauuucaaugcucau

SEQ ID NO: 2150917 - RNA, 19 nt, Artificial Sequence
  Description of Artificial Sequence: Synthetic oligonucleotide
gcacggcaggacacucccu

SEQ ID NO: 2150918 - RNA, 19 nt, Artificial Sequence
  Description of Artificial Sequence: Synthetic oligonucleotide
cgaccggccuggggaucuc

SEQ ID NO: 2150919 - RNA, 19 nt, Artificial Sequence
  Description of Artificial Sequence: Synthetic oligonucleotide
aacgucagaaauuggacag

SEQ ID NO: 2150920 - RNA, 19 nt, Artificial Sequence
  Description of Artificial Sequence: Synthetic oligonucleotide
cuugaugacguccaaaggg

SEQ ID NO: 2150921 - RNA, 19 nt, Artificial Sequence
  Description of Artificial Sequence: Synthetic oligonucleotide
aauuggacagcuccauagc

SEQ ID NO: 2150922 - RNA, 19 nt, Artificial Sequence
  Description of Artificial Sequence: Synthetic oligonucleotide
ucaaacgucagaaauugga

SEQ ID NO: 2150923 - RNA, 19 nt, Artificial Sequence
  Description of Artificial Sequence: Synthetic oligonucleotide
auacaaguugauucuaugg

SEQ ID NO: 2150924 - RNA, 19 nt, Artificial Sequence
  Description of Artificial Sequence: Synthetic oligonucleotide
aguuacuccugauaucugc

SEQ ID NO: 2150925 - RNA, 19 nt, Artificial Sequence
  Description of Artificial Sequence: Synthetic oligonucleotide
gauucuauggagcaguuca

SEQ ID NO: 2150926 - RNA, 19 nt, Artificial Sequence
  Description of Artificial Sequence: Synthetic oligonucleotide
uauggagcaguucagucag

SEQ ID NO: 2150927 - RNA, 19 nt, Artificial Sequence
  Description of Artificial Sequence: Synthetic oligonucleotide
uacaaguugauucuaugga

SEQ ID NO: 2150928 - RNA, 19 nt, Artificial Sequence
  Description of Artificial Sequence: Synthetic oligonucleotide
ucuuguagcaccugcuugg

SEQ ID NO: 2150929 - RNA, 19 nt, Artificial Sequence
  Description of Artificial Sequence: Synthetic oligonucleotide
agcuccauagccuacggac

SEQ ID NO: 2150930 - RNA, 19 nt, Artificial Sequence
  Description of Artificial Sequence: Synthetic oligonucleotide
uagacuugcuucaaggacc

SEQ ID NO: 2150931 - RNA, 19 nt, Artificial Sequence
  Description of Artificial Sequence: Synthetic oligonucleotide
aagagcucguaccagaaga

SEQ ID NO: 2150932 - RNA, 19 nt, Artificial Sequence
  Description of Artificial Sequence: Synthetic oligonucleotide
aaacgucagaaauuggaca

SEQ ID NO: 2150933 - RNA, 19 nt, Artificial Sequence
  Description of Artificial Sequence: Synthetic oligonucleotide
uggaaacggaucuugauga

SEQ ID NO: 2150934 - RNA, 19 nt, Artificial Sequence
  Description of Artificial Sequence: Synthetic oligonucleotide
uugaugacguccaaagggc

SEQ ID NO: 2150935 - RNA, 19 nt, Artificial Sequence
  Description of Artificial Sequence: Synthetic oligonucleotide
ucaaucugaagcuggaaac

SEQ ID NO: 2150936 - RNA, 19 nt, Artificial Sequence
  Description of Artificial Sequence: Synthetic oligonucleotide
uuacagaagagcucguacc

SEQ ID NO: 2150937 - RNA, 19 nt, Artificial Sequence
  Description of Artificial Sequence: Synthetic oligonucleotide
uaugugagggucuugcuga

SEQ ID NO: 2150938 - RNA, 19 nt, Artificial Sequence
  Description of Artificial Sequence: Synthetic oligonucleotide
uguagcaccugcuugguga

SEQ ID NO: 2150939 - RNA, 19 nt, Artificial Sequence
  Description of Artificial Sequence: Synthetic oligonucleotide
ucguagacuugcuucaagg

SEQ ID NO: 2150940 - RNA, 19 nt, Artificial Sequence
  Description of Artificial Sequence: Synthetic oligonucleotide
uugcuauagaucuugggcu

SEQ ID NO: 2150941 - RNA, 19 nt, Artificial Sequence
  Description of Artificial Sequence: Synthetic oligonucleotide
caaguugauucuauggagc

SEQ ID NO: 2150942 - RNA, 19 nt, Artificial Sequence
  Description of Artificial Sequence: Synthetic oligonucleotide
ugcugaugacuccagaccc

SEQ ID NO: 2150943 - RNA, 19 nt, Artificial Sequence
  Description of Artificial Sequence: Synthetic oligonucleotide
uuggaguuacuccugauau

SEQ ID NO: 2150944 - RNA, 19 nt, Artificial Sequence
  Description of Artificial Sequence: Synthetic oligonucleotide
ugcuuuggcgucauagccg

SEQ ID NO: 2150945 - RNA, 19 nt, Artificial Sequence
  Description of Artificial Sequence: Synthetic oligonucleotide
cagccguucaaucugaagc

SEQ ID NO: 2150946 - RNA, 19 nt, Artificial Sequence
  Description of Artificial Sequence: Synthetic oligonucleotide
aauccagacacugauccug

SEQ ID NO: 2150947 - RNA, 19 nt, Artificial Sequence
  Description of Artificial Sequence: Synthetic oligonucleotide
uccagaaagccgcuggucc

SEQ ID NO: 2150948 - RNA, 19 nt, Artificial Sequence
  Description of Artificial Sequence: Synthetic oligonucleotide
uucaaggaccgguagcagg

SEQ ID NO: 2150949 - RNA, 19 nt, Artificial Sequence
  Description of Artificial Sequence: Synthetic oligonucleotide
uccaacuuggaguuacucc

SEQ ID NO: 2150950 - RNA, 19 nt, Artificial Sequence
  Description of Artificial Sequence: Synthetic oligonucleotide
aucgggcacgcucaaaccc

SEQ ID NO: 2150951 - RNA, 19 nt, Artificial Sequence
  Description of Artificial Sequence: Synthetic oligonucleotide
gugguauuuggcuuugggg

SEQ ID NO: 2150952 - RNA, 19 nt, Artificial Sequence
  Description of Artificial Sequence: Synthetic oligonucleotide
aauguccaugaguaucaag

SEQ ID NO: 2150953 - RNA, 19 nt, Artificial Sequence
  Description of Artificial Sequence: Synthetic oligonucleotide
aucacggugggagucaagc

SEQ ID NO: 2150954 - RNA, 19 nt, Artificial Sequence
  Description of Artificial Sequence: Synthetic oligonucleotide
ggugccuucaucuuguagc

SEQ ID NO: 2150955 - RNA, 19 nt, Artificial Sequence
  Description of Artificial Sequence: Synthetic oligonucleotide
caaacgucagaaauuggac

SEQ ID NO: 2150956 - RNA, 19 nt, Artificial Sequence
  Description of Artificial Sequence: Synthetic oligonucleotide
uagccuacggacaggaucu

SEQ ID NO: 2150957 - RNA, 19 nt, Artificial Sequence
  Description of Artificial Sequence: Synthetic oligonucleotide
acagcuaucugucuucacu

SEQ ID NO: 2150958 - RNA, 19 nt, Artificial Sequence
  Description of Artificial Sequence: Synthetic oligonucleotide
agcuaucugucuucacucc

SEQ ID NO: 2150959 - RNA, 19 nt, Artificial Sequence
  Description of Artificial Sequence: Synthetic oligonucleotide
auaugugagggucuugcug

SEQ ID NO: 2150960 - RNA, 19 nt, Artificial Sequence
  Description of Artificial Sequence: Synthetic oligonucleotide
ucuucaaacgucagaaauu

SEQ ID NO: 2150961 - RNA, 19 nt, Artificial Sequence
  Description of Artificial Sequence: Synthetic oligonucleotide
gaaacggaucuugaugacg

SEQ ID NO: 2150962 - RNA, 19 nt, Artificial Sequence
  Description of Artificial Sequence: Synthetic oligonucleotide
aagaucccgugguauuugg

SEQ ID NO: 2150963 - RNA, 19 nt, Artificial Sequence
  Description of Artificial Sequence: Synthetic oligonucleotide
gaacuggcggguuucauac

SEQ ID NO: 2150964 - RNA, 19 nt, Artificial Sequence
  Description of Artificial Sequence: Synthetic oligonucleotide
ucguaccagaagaacauga

SEQ ID NO: 2150965 - RNA, 19 nt, Artificial Sequence
  Description of Artificial Sequence: Synthetic oligonucleotide
ccugauaucugcuuuggcg

SEQ ID NO: 2150966 - RNA, 19 nt, Artificial Sequence
  Description of Artificial Sequence: Synthetic oligonucleotide
aaacggaucuugaugacgu

SEQ ID NO: 2150967 - RNA, 19 nt, Artificial Sequence
  Description of Artificial Sequence: Synthetic oligonucleotide
ucgguccuguacauggucg

SEQ ID NO: 2150968 - RNA, 19 nt, Artificial Sequence
  Description of Artificial Sequence: Synthetic oligonucleotide
aagugugcugagaacuggc

SEQ ID NO: 2150969 - RNA, 19 nt, Artificial Sequence
  Description of Artificial Sequence: Synthetic oligonucleotide
uucaaacgucagaaauugg

SEQ ID NO: 2150970 - RNA, 19 nt, Artificial Sequence
  Description of Artificial Sequence: Synthetic oligonucleotide
guagacuugcuucaaggac

SEQ ID NO: 2150971 - RNA, 19 nt, Artificial Sequence
  Description of Artificial Sequence: Synthetic oligonucleotide
guuacagaagagcucguac

SEQ ID NO: 2150972 - RNA, 19 nt, Artificial Sequence
  Description of Artificial Sequence: Synthetic oligonucleotide
uggagguaugacccagucg

SEQ ID NO: 2150973 - RNA, 19 nt, Artificial Sequence
  Description of Artificial Sequence: Synthetic oligonucleotide
uguagcuacgcaccucgcc

SEQ ID NO: 2150974 - RNA, 19 nt, Artificial Sequence
  Description of Artificial Sequence: Synthetic oligonucleotide
ugcuugauugccugcaaga

SEQ ID NO: 2150975 - RNA, 19 nt, Artificial Sequence
  Description of Artificial Sequence: Synthetic oligonucleotide
acguccaaagggcugauca

SEQ ID NO: 2150976 - RNA, 19 nt, Artificial Sequence
  Description of Artificial Sequence: Synthetic oligonucleotide
ucugaagcuggaaacggau

SEQ ID NO: 2150977 - RNA, 19 nt, Artificial Sequence
  Description of Artificial Sequence: Synthetic oligonucleotide
accaaggggcccucggucc

SEQ ID NO: 2150978 - RNA, 19 nt, Artificial Sequence
  Description of Artificial Sequence: Synthetic oligonucleotide
uggaacgugcccuuuccag

SEQ ID NO: 2150979 - RNA, 19 nt, Artificial Sequence
  Description of Artificial Sequence: Synthetic oligonucleotide
uguccaugaguaucaagcu

SEQ ID NO: 2150980 - RNA, 19 nt, Artificial Sequence
  Description of Artificial Sequence: Synthetic oligonucleotide
uacauggucgacacggcgu

SEQ ID NO: 2150981 - RNA, 19 nt, Artificial Sequence
  Description of Artificial Sequence: Synthetic oligonucleotide
aaacccucccaccugcaga

SEQ ID NO: 2150982 - RNA, 19 nt, Artificial Sequence
  Description of Artificial Sequence: Synthetic oligonucleotide
auagccgaccaucccugcc

SEQ ID NO: 2150983 - RNA, 19 nt, Artificial Sequence
  Description of Artificial Sequence: Synthetic oligonucleotide
acaugaagccgguggagag

SEQ ID NO: 2150984 - RNA, 19 nt, Artificial Sequence
  Description of Artificial Sequence: Synthetic oligonucleotide
ugacaaauccagacacuga

SEQ ID NO: 2150985 - RNA, 19 nt, Artificial Sequence
  Description of Artificial Sequence: Synthetic oligonucleotide
ugcagacgcuucuugaaga

SEQ ID NO: 2150986 - RNA, 19 nt, Artificial Sequence
  Description of Artificial Sequence: Synthetic oligonucleotide
aacuuggaguuacuccuga

SEQ ID NO: 2150987 - RNA, 19 nt, Artificial Sequence
  Description of Artificial Sequence: Synthetic oligonucleotide
acauggucgacacggcguc

SEQ ID NO: 2150988 - RNA, 19 nt, Artificial Sequence
  Description of Artificial Sequence: Synthetic oligonucleotide
cugcuuuggcgucauagcc

SEQ ID NO: 2150989 - RNA, 19 nt, Artificial Sequence
  Description of Artificial Sequence: Synthetic oligonucleotide
ugcuucaaggaccgguagc

SEQ ID NO: 2150990 - RNA, 19 nt, Artificial Sequence
  Description of Artificial Sequence: Synthetic oligonucleotide
uccuuaugcaguggaagag

SEQ ID NO: 2150991 - RNA, 19 nt, Artificial Sequence
  Description of Artificial Sequence: Synthetic oligonucleotide
caggacauccacagggugc

SEQ ID NO: 2150992 - RNA, 19 nt, Artificial Sequence
  Description of Artificial Sequence: Synthetic oligonucleotide
aacaugaagccgguggaga

SEQ ID NO: 2150993 - RNA, 19 nt, Artificial Sequence
  Description of Artificial Sequence: Synthetic oligonucleotide
uccgguccauccaaugucc

SEQ ID NO: 2150994 - RNA, 19 nt, Artificial Sequence
  Description of Artificial Sequence: Synthetic oligonucleotide
gacacugauccugccaccg

SEQ ID NO: 2150995 - RNA, 19 nt, Artificial Sequence
  Description of Artificial Sequence: Synthetic oligonucleotide
uccuguacauggucgacac

SEQ ID NO: 2150996 - RNA, 19 nt, Artificial Sequence
  Description of Artificial Sequence: Synthetic oligonucleotide
ugcuauagaucuugggcuc

SEQ ID NO: 2150997 - RNA, 19 nt, Artificial Sequence
  Description of Artificial Sequence: Synthetic oligonucleotide
uguacauggucgacacggc

SEQ ID NO: 2150998 - RNA, 19 nt, Artificial Sequence
  Description of Artificial Sequence: Synthetic oligonucleotide
agccguucaaucugaagcu

SEQ ID NO: 2150999 - RNA, 19 nt, Artificial Sequence
  Description of Artificial Sequence: Synthetic oligonucleotide
guacauggucgacacggcg

SEQ ID NO: 2151000 - RNA, 19 nt, Artificial Sequence
  Description of Artificial Sequence: Synthetic oligonucleotide
uuuggcgucauagccgacc

SEQ ID NO: 2151001 - RNA, 19 nt, Artificial Sequence
  Description of Artificial Sequence: Synthetic oligonucleotide
aacggaucuugaugacguc

SEQ ID NO: 2151002 - RNA, 19 nt, Artificial Sequence
  Description of Artificial Sequence: Synthetic oligonucleotide
aucugcuuuggcgucauag

SEQ ID NO: 2151003 - RNA, 19 nt, Artificial Sequence
  Description of Artificial Sequence: Synthetic oligonucleotide
augaagccgguggagaggg

SEQ ID NO: 2151004 - RNA, 19 nt, Artificial Sequence
  Description of Artificial Sequence: Synthetic oligonucleotide
cagacacugauccugccac

SEQ ID NO: 2151005 - RNA, 19 nt, Artificial Sequence
  Description of Artificial Sequence: Synthetic oligonucleotide
uacggacaggaucugggcu

SEQ ID NO: 2151006 - RNA, 19 nt, Artificial Sequence
  Description of Artificial Sequence: Synthetic oligonucleotide
agagguuacagaagagcuc

SEQ ID NO: 2151007 - RNA, 19 nt, Artificial Sequence
  Description of Artificial Sequence: Synthetic oligonucleotide
ucggagguugcuauagauc

SEQ ID NO: 2151008 - RNA, 19 nt, Artificial Sequence
  Description of Artificial Sequence: Synthetic oligonucleotide
ugucuucacuccuuaugca

SEQ ID NO: 2151009 - RNA, 19 nt, Artificial Sequence
  Description of Artificial Sequence: Synthetic oligonucleotide
ugaugacguccaaagggcu

SEQ ID NO: 2151010 - RNA, 19 nt, Artificial Sequence
  Description of Artificial Sequence: Synthetic oligonucleotide
uacgcaccucgccaaaggc

SEQ ID NO: 2151011 - RNA, 19 nt, Artificial Sequence
  Description of Artificial Sequence: Synthetic oligonucleotide
uguuugcuuuccaucugga

SEQ ID NO: 2151012 - RNA, 19 nt, Artificial Sequence
  Description of Artificial Sequence: Synthetic oligonucleotide
acggacaggaucugggcug

SEQ ID NO: 2151013 - RNA, 19 nt, Artificial Sequence
  Description of Artificial Sequence: Synthetic oligonucleotide
cucaaacccucccaccugc

SEQ ID NO: 2151014 - RNA, 19 nt, Artificial Sequence
  Description of Artificial Sequence: Synthetic oligonucleotide
ggagguaugacccagucgu

SEQ ID NO: 2151015 - RNA, 19 nt, Artificial Sequence
  Description of Artificial Sequence: Synthetic oligonucleotide
guagcuacgcaccucgcca

SEQ ID NO: 2151016 - RNA, 19 nt, Artificial Sequence
  Description of Artificial Sequence: Synthetic oligonucleotide
cuuuccaucuggagguaug

SEQ ID NO: 2151017 - RNA, 19 nt, Artificial Sequence
  Description of Artificial Sequence: Synthetic oligonucleotide
acgcucaaacccucccacc

SEQ ID NO: 2151018 - RNA, 19 nt, Artificial Sequence
  Description of Artificial Sequence: Synthetic oligonucleotide
uuggcgucauagccgacca

SEQ ID NO: 2151019 - RNA, 19 nt, Artificial Sequence
  Description of Artificial Sequence: Synthetic oligonucleotide
aaaggcggaucgggcacgc

SEQ ID NO: 2151020 - RNA, 19 nt, Artificial Sequence
  Description of Artificial Sequence: Synthetic oligonucleotide
ggggaagauggcuaucacg

SEQ ID NO: 2151021 - RNA, 19 nt, Artificial Sequence
  Description of Artificial Sequence: Synthetic oligonucleotide
acgucagaaauuggacagc

SEQ ID NO: 2151022 - RNA, 19 nt, Artificial Sequence
  Description of Artificial Sequence: Synthetic oligonucleotide
gaucgggcacgcucaaacc

SEQ ID NO: 2151023 - RNA, 19 nt, Artificial Sequence
  Description of Artificial Sequence: Synthetic oligonucleotide
gaugacguccaaagggcug

SEQ ID NO: 2151024 - RNA, 19 nt, Artificial Sequence
  Description of Artificial Sequence: Synthetic oligonucleotide
gucacuuggacacagccgu

SEQ ID NO: 2151025 - RNA, 19 nt, Artificial Sequence
  Description of Artificial Sequence: Synthetic oligonucleotide
cuacggacaggaucugggc

SEQ ID NO: 2151026 - RNA, 19 nt, Artificial Sequence
  Description of Artificial Sequence: Synthetic oligonucleotide
gacccagucguagacuugc

SEQ ID NO: 2151027 - RNA, 19 nt, Artificial Sequence
  Description of Artificial Sequence: Synthetic oligonucleotide
ucaagccuuuguagaagac

SEQ ID NO: 2151028 - RNA, 19 nt, Artificial Sequence
  Description of Artificial Sequence: Synthetic oligonucleotide
aggaggccccuguagcuac

SEQ ID NO: 2151029 - RNA, 19 nt, Artificial Sequence
  Description of Artificial Sequence: Synthetic oligonucleotide
agucaagccuuuguagaag

SEQ ID NO: 2151030 - RNA, 19 nt, Artificial Sequence
  Description of Artificial Sequence: Synthetic oligonucleotide
uggcggguuucauacaagu

SEQ ID NO: 2151031 - RNA, 19 nt, Artificial Sequence
  Description of Artificial Sequence: Synthetic oligonucleotide
ucgccaaaggcggaucggg

SEQ ID NO: 2151032 - RNA, 19 nt, Artificial Sequence
  Description of Artificial Sequence: Synthetic oligonucleotide
accgccaccuccaacuugg

SEQ ID NO: 2151033 - RNA, 19 nt, Artificial Sequence
  Description of Artificial Sequence: Synthetic oligonucleotide
acagccguucaaucugaag

SEQ ID NO: 2151034 - RNA, 19 nt, Artificial Sequence
  Description of Artificial Sequence: Synthetic oligonucleotide
cucacagcuaucugucuuc

SEQ ID NO: 2151035 - RNA, 19 nt, Artificial Sequence
  Description of Artificial Sequence: Synthetic oligonucleotide
agacgcuucuugaagaggu

SEQ ID NO: 2151036 - RNA, 19 nt, Artificial Sequence
  Description of Artificial Sequence: Synthetic oligonucleotide
aguugauucuauggagcag

SEQ ID NO: 2151037 - RNA, 19 nt, Artificial Sequence
  Description of Artificial Sequence: Synthetic oligonucleotide
uccugauaucugcuuuggc

SEQ ID NO: 2151038 - RNA, 19 nt, Artificial Sequence
  Description of Artificial Sequence: Synthetic oligonucleotide
guaugacccagucguagac

SEQ ID NO: 2151039 - RNA, 19 nt, Artificial Sequence
  Description of Artificial Sequence: Synthetic oligonucleotide
acauacgaagugugcugag

SEQ ID NO: 2151040 - RNA, 19 nt, Artificial Sequence
  Description of Artificial Sequence: Synthetic oligonucleotide
cuacgcaccucgccaaagg

SEQ ID NO: 2151041 - RNA, 19 nt, Artificial Sequence
  Description of Artificial Sequence: Synthetic oligonucleotide
uacuccugauaucugcuuu

SEQ ID NO: 2151042 - RNA, 19 nt, Artificial Sequence
  Description of Artificial Sequence: Synthetic oligonucleotide
acuugcuucaaggaccggu

SEQ ID NO: 2151043 - RNA, 19 nt, Artificial Sequence
  Description of Artificial Sequence: Synthetic oligonucleotide
acuggcggguuucauacaa

SEQ ID NO: 2151044 - RNA, 19 nt, Artificial Sequence
  Description of Artificial Sequence: Synthetic oligonucleotide
agguaugacccagucguag

SEQ ID NO: 2151045 - RNA, 19 nt, Artificial Sequence
  Description of Artificial Sequence: Synthetic oligonucleotide
uagccgaccaucccugccu

SEQ ID NO: 2151046 - RNA, 19 nt, Artificial Sequence
  Description of Artificial Sequence: Synthetic oligonucleotide
ugaucagggcacgagugac

SEQ ID NO: 2151047 - RNA, 19 nt, Artificial Sequence
  Description of Artificial Sequence: Synthetic oligonucleotide
ggauaugugagggucuugc

SEQ ID NO: 2151048 - RNA, 19 nt, Artificial Sequence
  Description of Artificial Sequence: Synthetic oligonucleotide
gggagucaagccuuuguag

SEQ ID NO: 2151049 - RNA, 19 nt, Artificial Sequence
  Description of Artificial Sequence: Synthetic oligonucleotide
acgugcccuuuccagaaag

SEQ ID NO: 2151050 - RNA, 19 nt, Artificial Sequence
  Description of Artificial Sequence: Synthetic oligonucleotide
cacugauccugccaccgcc

SEQ ID NO: 2151051 - RNA, 19 nt, Artificial Sequence
  Description of Artificial Sequence: Synthetic oligonucleotide
ucacggugggagucaagcc

SEQ ID NO: 2151052 - RNA, 19 nt, Artificial Sequence
  Description of Artificial Sequence: Synthetic oligonucleotide
agauggcuaucacgguggg

SEQ ID NO: 2151053 - RNA, 19 nt, Artificial Sequence
  Description of Artificial Sequence: Synthetic oligonucleotide
ucgggcacgcucaaacccu

SEQ ID NO: 2151054 - RNA, 19 nt, Artificial Sequence
  Description of Artificial Sequence: Synthetic oligonucleotide
cugcagacgcuucuugaag

SEQ ID NO: 2151055 - RNA, 19 nt, Artificial Sequence
  Description of Artificial Sequence: Synthetic oligonucleotide
cugauaucugcuuuggcgu

SEQ ID NO: 2151056 - RNA, 19 nt, Artificial Sequence
  Description of Artificial Sequence: Synthetic oligonucleotide
agccgcuggucccuccucc

SEQ ID NO: 2151057 - RNA, 19 nt, Artificial Sequence
  Description of Artificial Sequence: Synthetic oligonucleotide
agaaauuggacagcuccau

SEQ ID NO: 2151058 - RNA, 19 nt, Artificial Sequence
  Description of Artificial Sequence: Synthetic oligonucleotide
guagcaccugcuuggugag

SEQ ID NO: 2151059 - RNA, 19 nt, Artificial Sequence
  Description of Artificial Sequence: Synthetic oligonucleotide
gaugacuccagacccacau

SEQ ID NO: 2151060 - RNA, 19 nt, Artificial Sequence
  Description of Artificial Sequence: Synthetic oligonucleotide
cuccuuaugcaguggaaga

SEQ ID NO: 2151061 - RNA, 19 nt, Artificial Sequence
  Description of Artificial Sequence: Synthetic oligonucleotide
caugaagccgguggagagg

SEQ ID NO: 2151062 - RNA, 19 nt, Artificial Sequence
  Description of Artificial Sequence: Synthetic oligonucleotide
ccuacggacaggaucuggg

SEQ ID NO: 2151063 - RNA, 19 nt, Artificial Sequence
  Description of Artificial Sequence: Synthetic oligonucleotide
agaacuggcggguuucaua

SEQ ID NO: 2151064 - RNA, 19 nt, Artificial Sequence
  Description of Artificial Sequence: Synthetic oligonucleotide
augacccagucguagacuu

SEQ ID NO: 2151065 - RNA, 19 nt, Artificial Sequence
  Description of Artificial Sequence: Synthetic oligonucleotide
gucguagacuugcuucaag

SEQ ID NO: 2151066 - RNA, 19 nt, Artificial Sequence
  Description of Artificial Sequence: Synthetic oligonucleotide
uaugacccagucguagacu

SEQ ID NO: 2151067 - RNA, 19 nt, Artificial Sequence
  Description of Artificial Sequence: Synthetic oligonucleotide
ucgacacggcgucucggag

SEQ ID NO: 2151068 - RNA, 19 nt, Artificial Sequence
  Description of Artificial Sequence: Synthetic oligonucleotide
cugaagcuggaaacggauc

SEQ ID NO: 2151069 - RNA, 19 nt, Artificial Sequence
  Description of Artificial Sequence: Synthetic oligonucleotide
guugauucuauggagcagu

SEQ ID NO: 2151070 - RNA, 19 nt, Artificial Sequence
  Description of Artificial Sequence: Synthetic oligonucleotide
caacuuggaguuacuccug

SEQ ID NO: 2151071 - RNA, 19 nt, Artificial Sequence
  Description of Artificial Sequence: Synthetic oligonucleotide
uggucgacacggcgucucg

SEQ ID NO: 2151072 - RNA, 19 nt, Artificial Sequence
  Description of Artificial Sequence: Synthetic oligonucleotide
ugcaagaucccgugguauu

SEQ ID NO: 2151073 - RNA, 19 nt, Artificial Sequence
  Description of Artificial Sequence: Synthetic oligonucleotide
cacgcucaaacccucccac

SEQ ID NO: 2151074 - RNA, 19 nt, Artificial Sequence
  Description of Artificial Sequence: Synthetic oligonucleotide
cuccugauaucugcuuugg

SEQ ID NO: 2151075 - RNA, 19 nt, Artificial Sequence
  Description of Artificial Sequence: Synthetic oligonucleotide
caugcucacagcuaucugu

SEQ ID NO: 2151076 - RNA, 19 nt, Artificial Sequence
  Description of Artificial Sequence: Synthetic oligonucleotide
guucagucagcucuucaaa

SEQ ID NO: 2151077 - RNA, 19 nt, Artificial Sequence
  Description of Artificial Sequence: Synthetic oligonucleotide
agaucccgugguauuuggc

SEQ ID NO: 2151078 - RNA, 19 nt, Artificial Sequence
  Description of Artificial Sequence: Synthetic oligonucleotide
uccauccaauguccaugag

SEQ ID NO: 2151079 - RNA, 19 nt, Artificial Sequence
  Description of Artificial Sequence: Synthetic oligonucleotide
uuuggcuuuggggucacuu

SEQ ID NO: 2151080 - RNA, 19 nt, Artificial Sequence
  Description of Artificial Sequence: Synthetic oligonucleotide
ggaucgggcacgcucaaac

SEQ ID NO: 2151081 - RNA, 19 nt, Artificial Sequence
  Description of Artificial Sequence: Synthetic oligonucleotide
caggggauaugugaggguc

SEQ ID NO: 2151082 - RNA, 19 nt, Artificial Sequence
  Description of Artificial Sequence: Synthetic oligonucleotide
ugauugccugcaagauccc

SEQ ID NO: 2151083 - RNA, 19 nt, Artificial Sequence
  Description of Artificial Sequence: Synthetic oligonucleotide
gaucugggcuggaacgugc

SEQ ID NO: 2151084 - RNA, 19 nt, Artificial Sequence
  Description of Artificial Sequence: Synthetic oligonucleotide
cuauagaucuugggcuccc

SEQ ID NO: 2151085 - RNA, 19 nt, Artificial Sequence
  Description of Artificial Sequence: Synthetic oligonucleotide
ccagucguagacuugcuuc

SEQ ID NO: 2151086 - RNA, 19 nt, Artificial Sequence
  Description of Artificial Sequence: Synthetic oligonucleotide
gacaggccgccacauacga

SEQ ID NO: 2151087 - RNA, 19 nt, Artificial Sequence
  Description of Artificial Sequence: Synthetic oligonucleotide
auugccugcaagaucccgu

SEQ ID NO: 2151088 - RNA, 19 nt, Artificial Sequence
  Description of Artificial Sequence: Synthetic oligonucleotide
agcaaggguggcugcacca

SEQ ID NO: 2151089 - RNA, 19 nt, Artificial Sequence
  Description of Artificial Sequence: Synthetic oligonucleotide
cccucgguccuguacaugg

SEQ ID NO: 2151090 - RNA, 19 nt, Artificial Sequence
  Description of Artificial Sequence: Synthetic oligonucleotide
ucaaacccucccaccugca

SEQ ID NO: 2151091 - RNA, 19 nt, Artificial Sequence
  Description of Artificial Sequence: Synthetic oligonucleotide
augcaguggaagagguuac

SEQ ID NO: 2151092 - RNA, 19 nt, Artificial Sequence
  Description of Artificial Sequence: Synthetic oligonucleotide
uggggucacuuggacacag

SEQ ID NO: 2151093 - RNA, 19 nt, Artificial Sequence
  Description of Artificial Sequence: Synthetic oligonucleotide
ugacccagucguagacuug

SEQ ID NO: 2151094 - RNA, 19 nt, Artificial Sequence
  Description of Artificial Sequence: Synthetic oligonucleotide
ucacagcuaucugucuuca

SEQ ID NO: 2151095 - RNA, 19 nt, Artificial Sequence
  Description of Artificial Sequence: Synthetic oligonucleotide
gggcacgagugacaaaucc

SEQ ID NO: 2151096 - RNA, 19 nt, Artificial Sequence
  Description of Artificial Sequence: Synthetic oligonucleotide
ccguucaaucugaagcugg

SEQ ID NO: 2151097 - RNA, 19 nt, Artificial Sequence
  Description of Artificial Sequence: Synthetic oligonucleotide
ccuuaugcaguggaagagg

SEQ ID NO: 2151098 - RNA, 19 nt, Artificial Sequence
  Description of Artificial Sequence: Synthetic oligonucleotide
aacuggcggguuucauaca

SEQ ID NO: 2151099 - RNA, 19 nt, Artificial Sequence
  Description of Artificial Sequence: Synthetic oligonucleotide
uaucacggugggagucaag

SEQ ID NO: 2151100 - RNA, 19 nt, Artificial Sequence
  Description of Artificial Sequence: Synthetic oligonucleotide
acgcaccucgccaaaggcg

SEQ ID NO: 2151101 - RNA, 19 nt, Artificial Sequence
  Description of Artificial Sequence: Synthetic oligonucleotide
ggaguuacuccugauaucu

SEQ ID NO: 2151102 - RNA, 19 nt, Artificial Sequence
  Description of Artificial Sequence: Synthetic oligonucleotide
agcaccugcuuggugaggu

SEQ ID NO: 2151103 - RNA, 19 nt, Artificial Sequence
  Description of Artificial Sequence: Synthetic oligonucleotide
cagacgcuucuugaagagg

SEQ ID NO: 2151104 - RNA, 19 nt, Artificial Sequence
  Description of Artificial Sequence: Synthetic oligonucleotide
gguccauccaauguccaug

SEQ ID NO: 2151105 - RNA, 19 nt, Artificial Sequence
  Description of Artificial Sequence: Synthetic oligonucleotide
cuugcuucaaggaccggua

SEQ ID NO: 2151106 - RNA, 19 nt, Artificial Sequence
  Description of Artificial Sequence: Synthetic oligonucleotide
gucauagccgaccaucccu

SEQ ID NO: 2151107 - RNA, 19 nt, Artificial Sequence
  Description of Artificial Sequence: Synthetic oligonucleotide
gguccaggggauaugugag

SEQ ID NO: 2151108 - RNA, 19 nt, Artificial Sequence
  Description of Artificial Sequence: Synthetic oligonucleotide
gcagacgcuucuugaagag

SEQ ID NO: 2151109 - RNA, 19 nt, Artificial Sequence
  Description of Artificial Sequence: Synthetic oligonucleotide
gauaugugagggucuugcu

SEQ ID NO: 2151110 - RNA, 19 nt, Artificial Sequence
  Description of Artificial Sequence: Synthetic oligonucleotide
auggucgacacggcgucuc

SEQ ID NO: 2151111 - RNA, 19 nt, Artificial Sequence
  Description of Artificial Sequence: Synthetic oligonucleotide
cauagccgaccaucccugc

SEQ ID NO: 2151112 - RNA, 19 nt, Artificial Sequence
  Description of Artificial Sequence: Synthetic oligonucleotide
gagcucguaccagaagaac

SEQ ID NO: 2151113 - RNA, 19 nt, Artificial Sequence
  Description of Artificial Sequence: Synthetic oligonucleotide
caagaucccgugguauuug

SEQ ID NO: 2151114 - RNA, 19 nt, Artificial Sequence
  Description of Artificial Sequence: Synthetic oligonucleotide
gaguuacuccugauaucug

SEQ ID NO: 2151115 - RNA, 19 nt, Artificial Sequence
  Description of Artificial Sequence: Synthetic oligonucleotide
cuggcggguuucauacaag

SEQ ID NO: 2151116 - RNA, 19 nt, Artificial Sequence
  Description of Artificial Sequence: Synthetic oligonucleotide
agguucccuguuugcuuuc

SEQ ID NO: 2151117 - RNA, 19 nt, Artificial Sequence
  Description of Artificial Sequence: Synthetic oligonucleotide
aucccgugguauuuggcuu

SEQ ID NO: 2151118 - RNA, 19 nt, Artificial Sequence
  Description of Artificial Sequence: Synthetic oligonucleotide
gguaugacccagucguaga

SEQ ID NO: 2151119 - RNA, 19 nt, Artificial Sequence
  Description of Artificial Sequence: Synthetic oligonucleotide
gaagaccaaggggcccucg

SEQ ID NO: 2151120 - RNA, 19 nt, Artificial Sequence
  Description of Artificial Sequence: Synthetic oligonucleotide
ugagggucuugcugaugac

SEQ ID NO: 2151121 - RNA, 19 nt, Artificial Sequence
  Description of Artificial Sequence: Synthetic oligonucleotide
caaaggcggaucgggcacg

SEQ ID NO: 2151122 - RNA, 19 nt, Artificial Sequence
  Description of Artificial Sequence: Synthetic oligonucleotide
cacauacgaagugugcuga

SEQ ID NO: 2151123 - RNA, 19 nt, Artificial Sequence
  Description of Artificial Sequence: Synthetic oligonucleotide
uagcuacgcaccucgccaa

SEQ ID NO: 2151124 - RNA, 19 nt, Artificial Sequence
  Description of Artificial Sequence: Synthetic oligonucleotide
ggaacgugcccuuuccaga

SEQ ID NO: 2151125 - RNA, 19 nt, Artificial Sequence
  Description of Artificial Sequence: Synthetic oligonucleotide
ccacauacgaagugugcug

SEQ ID NO: 2151126 - RNA, 19 nt, Artificial Sequence
  Description of Artificial Sequence: Synthetic oligonucleotide
cucgguccuguacaugguc

SEQ ID NO: 2151127 - RNA, 19 nt, Artificial Sequence
  Description of Artificial Sequence: Synthetic oligonucleotide
gcuuuggcgucauagccga

SEQ ID NO: 2151128 - RNA, 19 nt, Artificial Sequence
  Description of Artificial Sequence: Synthetic oligonucleotide
gaaagccgcuggucccucc

SEQ ID NO: 2151129 - RNA, 19 nt, Artificial Sequence
  Description of Artificial Sequence: Synthetic oligonucleotide
gacacggcgucucggaggu

SEQ ID NO: 2151130 - RNA, 19 nt, Artificial Sequence
  Description of Artificial Sequence: Synthetic oligonucleotide
aacgugcccuuuccagaaa

SEQ ID NO: 2151131 - RNA, 19 nt, Artificial Sequence
  Description of Artificial Sequence: Synthetic oligonucleotide
gcuucaaggaccgguagca

SEQ ID NO: 2151132 - RNA, 19 nt, Artificial Sequence
  Description of Artificial Sequence: Synthetic oligonucleotide
gcuggaacgugcccuuucc

SEQ ID NO: 2151133 - RNA, 19 nt, Artificial Sequence
  Description of Artificial Sequence: Synthetic oligonucleotide
cacggcgucucggagguug

SEQ ID NO: 2151134 - RNA, 19 nt, Artificial Sequence
  Description of Artificial Sequence: Synthetic oligonucleotide
ggaaacggaucuugaugac

SEQ ID NO: 2151135 - RNA, 19 nt, Artificial Sequence
  Description of Artificial Sequence: Synthetic oligonucleotide
cugagaacuggcggguuuc

SEQ ID NO: 2151136 - RNA, 19 nt, Artificial Sequence
  Description of Artificial Sequence: Synthetic oligonucleotide
ucccgugguauuuggcuuu

SEQ ID NO: 2151137 - RNA, 19 nt, Artificial Sequence
  Description of Artificial Sequence: Synthetic oligonucleotide
aggaucugggcuggaacgu

SEQ ID NO: 2151138 - RNA, 19 nt, Artificial Sequence
  Description of Artificial Sequence: Synthetic oligonucleotide
gcugaucagggcacgagug

SEQ ID NO: 2151139 - RNA, 19 nt, Artificial Sequence
  Description of Artificial Sequence: Synthetic oligonucleotide
cucguaccagaagaacaug

SEQ ID NO: 2151140 - RNA, 19 nt, Artificial Sequence
  Description of Artificial Sequence: Synthetic oligonucleotide
cucgccaaaggcggaucgg

SEQ ID NO: 2151141 - RNA, 19 nt, Artificial Sequence
  Description of Artificial Sequence: Synthetic oligonucleotide
gccgccuucagcaggcugg

SEQ ID NO: 2151142 - RNA, 19 nt, Artificial Sequence
  Description of Artificial Sequence: Synthetic oligonucleotide
ccaacuuggaguuacuccu

SEQ ID NO: 2151143 - RNA, 19 nt, Artificial Sequence
  Description of Artificial Sequence: Synthetic oligonucleotide
cgugguauuuggcuuuggg

SEQ ID NO: 2151144 - RNA, 19 nt, Artificial Sequence
  Description of Artificial Sequence: Synthetic oligonucleotide
agagcucguaccagaagaa

SEQ ID NO: 2151145 - RNA, 19 nt, Artificial Sequence
  Description of Artificial Sequence: Synthetic oligonucleotide
cuguagcuacgcaccucgc

SEQ ID NO: 2151146 - RNA, 19 nt, Artificial Sequence
  Description of Artificial Sequence: Synthetic oligonucleotide
aucugucuucacuccuuau

SEQ ID NO: 2151147 - RNA, 19 nt, Artificial Sequence
  Description of Artificial Sequence: Synthetic oligonucleotide
guuacuccugauaucugcu

SEQ ID NO: 2151148 - RNA, 19 nt, Artificial Sequence
  Description of Artificial Sequence: Synthetic oligonucleotide
cacgagugacaaauccaga

SEQ ID NO: 2151149 - RNA, 19 nt, Artificial Sequence
  Description of Artificial Sequence: Synthetic oligonucleotide
gucgacacggcgucucgga

SEQ ID NO: 2151150 - RNA, 19 nt, Artificial Sequence
  Description of Artificial Sequence: Synthetic oligonucleotide
gcuauagaucuugggcucc

SEQ ID NO: 2151151 - RNA, 19 nt, Artificial Sequence
  Description of Artificial Sequence: Synthetic oligonucleotide
cacagcuaucugucuucac

SEQ ID NO: 2151152 - RNA, 19 nt, Artificial Sequence
  Description of Artificial Sequence: Synthetic oligonucleotide
aggaccgguagcaggagaa

SEQ ID NO: 2151153 - RNA, 19 nt, Artificial Sequence
  Description of Artificial Sequence: Synthetic oligonucleotide
uauuuggcuuuggggucac

SEQ ID NO: 2151154 - RNA, 19 nt, Artificial Sequence
  Description of Artificial Sequence: Synthetic oligonucleotide
ggcacgcucaaacccuccc

SEQ ID NO: 2151155 - RNA, 19 nt, Artificial Sequence
  Description of Artificial Sequence: Synthetic oligonucleotide
ggcgucauagccgaccauc

SEQ ID NO: 2151156 - RNA, 19 nt, Artificial Sequence
  Description of Artificial Sequence: Synthetic oligonucleotide
gacgcuucuugaagagguc

SEQ ID NO: 2151157 - RNA, 19 nt, Artificial Sequence
  Description of Artificial Sequence: Synthetic oligonucleotide
guccuguacauggucgaca

SEQ ID NO: 2151158 - RNA, 19 nt, Artificial Sequence
  Description of Artificial Sequence: Synthetic oligonucleotide
augugagggucuugcugau

SEQ ID NO: 2151159 - RNA, 19 nt, Artificial Sequence
  Description of Artificial Sequence: Synthetic oligonucleotide
aggggauaugugagggucu

SEQ ID NO: 2151160 - RNA, 19 nt, Artificial Sequence
  Description of Artificial Sequence: Synthetic oligonucleotide
ccaaaggcggaucgggcac

SEQ ID NO: 2151161 - RNA, 19 nt, Artificial Sequence
  Description of Artificial Sequence: Synthetic oligonucleotide
agggcacgagugacaaauc

SEQ ID NO: 2151162 - RNA, 19 nt, Artificial Sequence
  Description of Artificial Sequence: Synthetic oligonucleotide
gcucaaacccucccaccug

SEQ ID NO: 2151163 - RNA, 19 nt, Artificial Sequence
  Description of Artificial Sequence: Synthetic oligonucleotide
cagcucuucaaacgucaga

SEQ ID NO: 2151164 - RNA, 19 nt, Artificial Sequence
  Description of Artificial Sequence: Synthetic oligonucleotide
gccaaaggcggaucgggca

SEQ ID NO: 2151165 - RNA, 19 nt, Artificial Sequence
  Description of Artificial Sequence: Synthetic oligonucleotide
gaagagguccaggggauau

SEQ ID NO: 2151166 - RNA, 19 nt, Artificial Sequence
  Description of Artificial Sequence: Synthetic oligonucleotide
accucgccaaaggcggauc

SEQ ID NO: 2151167 - RNA, 19 nt, Artificial Sequence
  Description of Artificial Sequence: Synthetic oligonucleotide
ugggcuggaacgugcccuu

SEQ ID NO: 2151168 - RNA, 19 nt, Artificial Sequence
  Description of Artificial Sequence: Synthetic oligonucleotide
guucaaucugaagcuggaa

SEQ ID NO: 2151169 - RNA, 19 nt, Artificial Sequence
  Description of Artificial Sequence: Synthetic oligonucleotide
acacagccguucaaucuga

SEQ ID NO: 2151170 - RNA, 19 nt, Artificial Sequence
  Description of Artificial Sequence: Synthetic oligonucleotide
gauggcuaucacgguggga

SEQ ID NO: 2151171 - RNA, 19 nt, Artificial Sequence
  Description of Artificial Sequence: Synthetic oligonucleotide
acggcgucucggagguugc

SEQ ID NO: 2151172 - RNA, 19 nt, Artificial Sequence
  Description of Artificial Sequence: Synthetic oligonucleotide
auaucugcuuuggcgucau

SEQ ID NO: 2151173 - RNA, 19 nt, Artificial Sequence
  Description of Artificial Sequence: Synthetic oligonucleotide
ccucgccaaaggcggaucg

SEQ ID NO: 2151174 - RNA, 19 nt, Artificial Sequence
  Description of Artificial Sequence: Synthetic oligonucleotide
cgaagugugcugagaacug

SEQ ID NO: 2151175 - RNA, 19 nt, Artificial Sequence
  Description of Artificial Sequence: Synthetic oligonucleotide
cagggcacgagugacaaau

SEQ ID NO: 2151176 - RNA, 19 nt, Artificial Sequence
  Description of Artificial Sequence: Synthetic oligonucleotide
gaccgguagcaggagaacu

SEQ ID NO: 2151177 - RNA, 19 nt, Artificial Sequence
  Description of Artificial Sequence: Synthetic oligonucleotide
cucggagguugcuauagau

SEQ ID NO: 2151178 - RNA, 19 nt, Artificial Sequence
  Description of Artificial Sequence: Synthetic oligonucleotide
gaggccccuguagcuacgc

SEQ ID NO: 2151179 - RNA, 19 nt, Artificial Sequence
  Description of Artificial Sequence: Synthetic oligonucleotide
gccccuguagcuacgcacc

SEQ ID NO: 2151180 - RNA, 19 nt, Artificial Sequence
  Description of Artificial Sequence: Synthetic oligonucleotide
ucagggcacgagugacaaa

SEQ ID NO: 2151181 - RNA, 19 nt, Artificial Sequence
  Description of Artificial Sequence: Synthetic oligonucleotide
agcuacgcaccucgccaaa

SEQ ID NO: 2151182 - RNA, 19 nt, Artificial Sequence
  Description of Artificial Sequence: Synthetic oligonucleotide
cuuggacacagccguucaa

SEQ ID NO: 2151183 - RNA, 19 nt, Artificial Sequence
  Description of Artificial Sequence: Synthetic oligonucleotide
ucccaccugcagacgcuuc

SEQ ID NO: 2151184 - RNA, 19 nt, Artificial Sequence
  Description of Artificial Sequence: Synthetic oligonucleotide
cguagacuugcuucaagga

SEQ ID NO: 2151185 - RNA, 19 nt, Artificial Sequence
  Description of Artificial Sequence: Synthetic oligonucleotide
cuuuggcgucauagccgac

SEQ ID NO: 2151186 - RNA, 19 nt, Artificial Sequence
  Description of Artificial Sequence: Synthetic oligonucleotide
cguccaaagggcugaucag

SEQ ID NO: 2151187 - RNA, 19 nt, Artificial Sequence
  Description of Artificial Sequence: Synthetic oligonucleotide
gcgggugcgcaggacaucc

SEQ ID NO: 2151188 - RNA, 19 nt, Artificial Sequence
  Description of Artificial Sequence: Synthetic oligonucleotide
ccgguagcaggagaacugc

SEQ ID NO: 2151189 - RNA, 19 nt, Artificial Sequence
  Description of Artificial Sequence: Synthetic oligonucleotide
cgacacggcgucucggagg

SEQ ID NO: 2151190 - RNA, 19 nt, Artificial Sequence
  Description of Artificial Sequence: Synthetic oligonucleotide
ggucccuccuccugcagaa

SEQ ID NO: 2151191 - RNA, 19 nt, Artificial Sequence
  Description of Artificial Sequence: Synthetic oligonucleotide
gguucccuguuugcuuucc

SEQ ID NO: 2151192 - RNA, 19 nt, Artificial Sequence
  Description of Artificial Sequence: Synthetic oligonucleotide
gccguucaaucugaagcug

SEQ ID NO: 2151193 - RNA, 19 nt, Artificial Sequence
  Description of Artificial Sequence: Synthetic oligonucleotide
ggucgacacggcgucucgg

SEQ ID NO: 2151194 - RNA, 19 nt, Artificial Sequence
  Description of Artificial Sequence: Synthetic oligonucleotide
ccgccacauacgaagugug

SEQ ID NO: 2151195 - RNA, 19 nt, Artificial Sequence
  Description of Artificial Sequence: Synthetic oligonucleotide
gguggagagggccgccuuc

SEQ ID NO: 2151196 - RNA, 19 nt, Artificial Sequence
  Description of Artificial Sequence: Synthetic oligonucleotide
cccucccaccugcagacgc

SEQ ID NO: 2151197 - RNA, 19 nt, Artificial Sequence
  Description of Artificial Sequence: Synthetic oligonucleotide
gcuacgcaccucgccaaag

SEQ ID NO: 2151198 - RNA, 19 nt, Artificial Sequence
  Description of Artificial Sequence: Synthetic oligonucleotide
uggcgucauagccgaccau

SEQ ID NO: 2151199 - RNA, 19 nt, Artificial Sequence
  Description of Artificial Sequence: Synthetic oligonucleotide
gcuaucacggugggaguca

SEQ ID NO: 2151200 - RNA, 19 nt, Artificial Sequence
  Description of Artificial Sequence: Synthetic oligonucleotide
gccuacggacaggaucugg

SEQ ID NO: 2151201 - RNA, 19 nt, Artificial Sequence
  Description of Artificial Sequence: Synthetic oligonucleotide
gcucuucaaacgucagaaa

SEQ ID NO: 2151202 - RNA, 19 nt, Artificial Sequence
  Description of Artificial Sequence: Synthetic oligonucleotide
gccacauacgaagugugcu

SEQ ID NO: 2151203 - RNA, 19 nt, Artificial Sequence
  Description of Artificial Sequence: Synthetic oligonucleotide
gacguccaaagggcugauc

SEQ ID NO: 2151204 - RNA, 19 nt, Artificial Sequence
  Description of Artificial Sequence: Synthetic oligonucleotide
aggccccuguagcuacgca

SEQ ID NO: 2151205 - RNA, 19 nt, Artificial Sequence
  Description of Artificial Sequence: Synthetic oligonucleotide
gguuacagaagagcucgua

SEQ ID NO: 2151206 - RNA, 19 nt, Artificial Sequence
  Description of Artificial Sequence: Synthetic oligonucleotide
ggccgccacauacgaagug

SEQ ID NO: 2151207 - RNA, 19 nt, Artificial Sequence
  Description of Artificial Sequence: Synthetic oligonucleotide
agguuacagaagagcucgu

SEQ ID NO: 2151208 - RNA, 19 nt, Artificial Sequence
  Description of Artificial Sequence: Synthetic oligonucleotide
gggcugaucagggcacgag

SEQ ID NO: 2151209 - RNA, 19 nt, Artificial Sequence
  Description of Artificial Sequence: Synthetic oligonucleotide
ccauccaauguccaugagu

SEQ ID NO: 2151210 - RNA, 19 nt, Artificial Sequence
  Description of Artificial Sequence: Synthetic oligonucleotide
caucccugccuccggucca

SEQ ID NO: 2151211 - RNA, 19 nt, Artificial Sequence
  Description of Artificial Sequence: Synthetic oligonucleotide
cgugcccuuuccagaaagc

SEQ ID NO: 2151212 - RNA, 19 nt, Artificial Sequence
  Description of Artificial Sequence: Synthetic oligonucleotide
agggcugaucagggcacga

SEQ ID NO: 2151213 - RNA, 19 nt, Artificial Sequence
  Description of Artificial Sequence: Synthetic oligonucleotide
uaucugcuuuggcgucaua

SEQ ID NO: 2151214 - RNA, 19 nt, Artificial Sequence
  Description of Artificial Sequence: Synthetic oligonucleotide
cgccacauacgaagugugc

SEQ ID NO: 2151215 - RNA, 19 nt, Artificial Sequence
  Description of Artificial Sequence: Synthetic oligonucleotide
gcuggaaacggaucuugau

SEQ ID NO: 2151216 - RNA, 19 nt, Artificial Sequence
  Description of Artificial Sequence: Synthetic oligonucleotide
cagcuccauagccuacgga

SEQ ID NO: 2151217 - RNA, 19 nt, Artificial Sequence
  Description of Artificial Sequence: Synthetic oligonucleotide
cguucaaucugaagcugga

SEQ ID NO: 2151218 - RNA, 19 nt, Artificial Sequence
  Description of Artificial Sequence: Synthetic oligonucleotide
ggcugaucagggcacgagu

SEQ ID NO: 2151219 - RNA, 19 nt, Artificial Sequence
  Description of Artificial Sequence: Synthetic oligonucleotide
aaggcggaucgggcacgcu

SEQ ID NO: 2151220 - RNA, 19 nt, Artificial Sequence
  Description of Artificial Sequence: Synthetic oligonucleotide
ugggugccuucaucuugua

SEQ ID NO: 2151221 - RNA, 19 nt, Artificial Sequence
  Description of Artificial Sequence: Synthetic oligonucleotide
gccugcaagaucccguggu

SEQ ID NO: 2151222 - RNA, 19 nt, Artificial Sequence
  Description of Artificial Sequence: Synthetic oligonucleotide
acccucccaccugcagacg

SEQ ID NO: 2151223 - RNA, 19 nt, Artificial Sequence
  Description of Artificial Sequence: Synthetic oligonucleotide
ggcggaucgggcacgcuca

SEQ ID NO: 2151224 - RNA, 19 nt, Artificial Sequence
  Description of Artificial Sequence: Synthetic oligonucleotide
gagccgcgaggcgggugcg

SEQ ID NO: 2151225 - RNA, 19 nt, Artificial Sequence
  Description of Artificial Sequence: Synthetic oligonucleotide
gcucguaccagaagaacau

SEQ ID NO: 2151226 - RNA, 19 nt, Artificial Sequence
  Description of Artificial Sequence: Synthetic oligonucleotide
cugggcuggaacgugcccu

SEQ ID NO: 2151227 - RNA, 19 nt, Artificial Sequence
  Description of Artificial Sequence: Synthetic oligonucleotide
gggauaugugagggucuug

SEQ ID NO: 2151228 - RNA, 19 nt, Artificial Sequence
  Description of Artificial Sequence: Synthetic oligonucleotide
agccuacggacaggaucug

SEQ ID NO: 2151229 - RNA, 19 nt, Artificial Sequence
  Description of Artificial Sequence: Synthetic oligonucleotide
cuuguagcaccugcuuggu

SEQ ID NO: 2151230 - RNA, 19 nt, Artificial Sequence
  Description of Artificial Sequence: Synthetic oligonucleotide
cuaucacggugggagucaa

SEQ ID NO: 2151231 - RNA, 19 nt, Artificial Sequence
  Description of Artificial Sequence: Synthetic oligonucleotide
ccccugagccgcgaggcgg

SEQ ID NO: 2151232 - RNA, 19 nt, Artificial Sequence
  Description of Artificial Sequence: Synthetic oligonucleotide
ccauagccuacggacagga

SEQ ID NO: 2151233 - RNA, 19 nt, Artificial Sequence
  Description of Artificial Sequence: Synthetic oligonucleotide
ggggcccucgguccuguac

SEQ ID NO: 2151234 - RNA, 19 nt, Artificial Sequence
  Description of Artificial Sequence: Synthetic oligonucleotide
cacagccguucaaucugaa

SEQ ID NO: 2151235 - RNA, 19 nt, Artificial Sequence
  Description of Artificial Sequence: Synthetic oligonucleotide
ccgcguaggggaagauggc

SEQ ID NO: 2151236 - RNA, 19 nt, Artificial Sequence
  Description of Artificial Sequence: Synthetic oligonucleotide
ggcuuuggggucacuugga

SEQ ID NO: 2151237 - RNA, 19 nt, Artificial Sequence
  Description of Artificial Sequence: Synthetic oligonucleotide
gcuugauugccugcaagau

SEQ ID NO: 2151238 - RNA, 19 nt, Artificial Sequence
  Description of Artificial Sequence: Synthetic oligonucleotide
aggcgggugcgcaggacau

SEQ ID NO: 2151239 - RNA, 19 nt, Artificial Sequence
  Description of Artificial Sequence: Synthetic oligonucleotide
acccagucguagacuugcu

SEQ ID NO: 2151240 - RNA, 19 nt, Artificial Sequence
  Description of Artificial Sequence: Synthetic oligonucleotide
aggcccgcguaggggaaga

SEQ ID NO: 2151241 - RNA, 19 nt, Artificial Sequence
  Description of Artificial Sequence: Synthetic oligonucleotide
acaggccgccacauacgaa

SEQ ID NO: 2151242 - RNA, 19 nt, Artificial Sequence
  Description of Artificial Sequence: Synthetic oligonucleotide
cugagccgcgaggcgggug

SEQ ID NO: 2151243 - RNA, 19 nt, Artificial Sequence
  Description of Artificial Sequence: Synthetic oligonucleotide
gcguaggggaagauggcua

SEQ ID NO: 2151244 - RNA, 19 nt, Artificial Sequence
  Description of Artificial Sequence: Synthetic oligonucleotide
caggaggccccuguagcua

SEQ ID NO: 2151245 - RNA, 19 nt, Artificial Sequence
  Description of Artificial Sequence: Synthetic oligonucleotide
gccgccacauacgaagugu

SEQ ID NO: 2151246 - RNA, 19 nt, Artificial Sequence
  Description of Artificial Sequence: Synthetic oligonucleotide
cauagccuacggacaggau

SEQ ID NO: 2151247 - RNA, 19 nt, Artificial Sequence
  Description of Artificial Sequence: Synthetic oligonucleotide
gcccgcguaggggaagaug

SEQ ID NO: 2151248 - RNA, 19 nt, Artificial Sequence
  Description of Artificial Sequence: Synthetic oligonucleotide
gccgaccaucccugccucc

SEQ ID NO: 2151249 - RNA, 19 nt, Artificial Sequence
  Description of Artificial Sequence: Synthetic oligonucleotide
ccaccuccaacuuggaguu

SEQ ID NO: 2151250 - RNA, 19 nt, Artificial Sequence
  Description of Artificial Sequence: Synthetic oligonucleotide
ccgccuucagcaggcuggg

SEQ ID NO: 2151251 - RNA, 19 nt, Artificial Sequence
  Description of Artificial Sequence: Synthetic oligonucleotide
gcugagaacuggcggguuu

SEQ ID NO: 2151252 - RNA, 19 nt, Artificial Sequence
  Description of Artificial Sequence: Synthetic oligonucleotide
gggcacgcucaaacccucc

SEQ ID NO: 2151253 - RNA, 19 nt, Artificial Sequence
  Description of Artificial Sequence: Synthetic oligonucleotide
cgaccaucccugccuccgg

SEQ ID NO: 2151254 - RNA, 19 nt, Artificial Sequence
  Description of Artificial Sequence: Synthetic oligonucleotide
gcaagaucccgugguauuu

SEQ ID NO: 2151255 - RNA, 19 nt, Artificial Sequence
  Description of Artificial Sequence: Synthetic oligonucleotide
cccgugguauuuggcuuug

SEQ ID NO: 2151256 - RNA, 19 nt, Artificial Sequence
  Description of Artificial Sequence: Synthetic oligonucleotide
ccuccgguccauccaaugu

SEQ ID NO: 2151257 - RNA, 19 nt, Artificial Sequence
  Description of Artificial Sequence: Synthetic oligonucleotide
cgguccuguacauggucga

SEQ ID NO: 2151258 - RNA, 19 nt, Artificial Sequence
  Description of Artificial Sequence: Synthetic oligonucleotide
cgucagaaauuggacagcu

SEQ ID NO: 2151259 - RNA, 19 nt, Artificial Sequence
  Description of Artificial Sequence: Synthetic oligonucleotide
ccgugguauuuggcuuugg

SEQ ID NO: 2151260 - RNA, 19 nt, Artificial Sequence
  Description of Artificial Sequence: Synthetic oligonucleotide
ccgguccauccaaugucca

SEQ ID NO: 2151261 - RNA, 19 nt, Artificial Sequence
  Description of Artificial Sequence: Synthetic oligonucleotide
gcagacaggccgccacaua

SEQ ID NO: 2151262 - RNA, 19 nt, Artificial Sequence
  Description of Artificial Sequence: Synthetic oligonucleotide
ggcgucucggagguugcua

SEQ ID NO: 2151263 - RNA, 19 nt, Artificial Sequence
  Description of Artificial Sequence: Synthetic oligonucleotide
cgcucaaacccucccaccu

SEQ ID NO: 2151264 - RNA, 19 nt, Artificial Sequence
  Description of Artificial Sequence: Synthetic oligonucleotide
ggggauaugugagggucuu

SEQ ID NO: 2151265 - RNA, 19 nt, Artificial Sequence
  Description of Artificial Sequence: Synthetic oligonucleotide
ggcggguuucauacaaguu

SEQ ID NO: 2151266 - RNA, 19 nt, Artificial Sequence
  Description of Artificial Sequence: Synthetic oligonucleotide
ucccugccuccgguccauc

SEQ ID NO: 2151267 - RNA, 19 nt, Artificial Sequence
  Description of Artificial Sequence: Synthetic oligonucleotide
cgggcacgcucaaacccuc

SEQ ID NO: 2151268 - RNA, 19 nt, Artificial Sequence
  Description of Artificial Sequence: Synthetic oligonucleotide
gcccucgguccuguacaug

SEQ ID NO: 2151269 - RNA, 19 nt, Artificial Sequence
  Description of Artificial Sequence: Synthetic oligonucleotide
ggguuucauacaaguugau

SEQ ID NO: 2151270 - RNA, 19 nt, Artificial Sequence
  Description of Artificial Sequence: Synthetic oligonucleotide
ccaggggauaugugagggu

SEQ ID NO: 2151271 - RNA, 19 nt, Artificial Sequence
  Description of Artificial Sequence: Synthetic oligonucleotide
gcuuuccaucuggagguau

SEQ ID NO: 2151272 - RNA, 19 nt, Artificial Sequence
  Description of Artificial Sequence: Synthetic oligonucleotide
gccgcgaggcgggugcgca

SEQ ID NO: 2151273 - RNA, 19 nt, Artificial Sequence
  Description of Artificial Sequence: Synthetic oligonucleotide
gccgguggagagggccgcc

SEQ ID NO: 2151274 - RNA, 19 nt, Artificial Sequence
  Description of Artificial Sequence: Synthetic oligonucleotide
ccgcgaggcgggugcgcag

SEQ ID NO: 2151275 - RNA, 19 nt, Artificial Sequence
  Description of Artificial Sequence: Synthetic oligonucleotide
gcgaggcgggugcgcagga

SEQ ID NO: 2151276 - RNA, 19 nt, Artificial Sequence
  Description of Artificial Sequence: Synthetic oligonucleotide
aggggcccucgguccugua

SEQ ID NO: 2151277 - RNA, 19 nt, Artificial Sequence
  Description of Artificial Sequence: Synthetic oligonucleotide
gcaccucgccaaaggcgga

SEQ ID NO: 2151278 - RNA, 19 nt, Artificial Sequence
  Description of Artificial Sequence: Synthetic oligonucleotide
gcggaucgggcacgcucaa

SEQ ID NO: 2151279 - RNA, 19 nt, Artificial Sequence
  Description of Artificial Sequence: Synthetic oligonucleotide
caccucgccaaaggcggau

SEQ ID NO: 2151280 - RNA, 19 nt, Artificial Sequence
  Description of Artificial Sequence: Synthetic oligonucleotide
gccgcuggucccuccuccu

SEQ ID NO: 2151281 - RNA, 19 nt, Artificial Sequence
  Description of Artificial Sequence: Synthetic oligonucleotide
ggcccucgguccuguacau

SEQ ID NO: 2151282 - RNA, 19 nt, Artificial Sequence
  Description of Artificial Sequence: Synthetic oligonucleotide
caccuccaacuuggaguua

SEQ ID NO: 2151283 - RNA, 19 nt, Artificial Sequence
  Description of Artificial Sequence: Synthetic oligonucleotide
cccagucguagacuugcuu

SEQ ID NO: 2151284 - RNA, 19 nt, Artificial Sequence
  Description of Artificial Sequence: Synthetic oligonucleotide
cgcguaggggaagauggcu

SEQ ID NO: 2151285 - RNA, 19 nt, Artificial Sequence
  Description of Artificial Sequence: Synthetic oligonucleotide
ccccuguagcuacgcaccu

SEQ ID NO: 2151286 - RNA, 19 nt, Artificial Sequence
  Description of Artificial Sequence: Synthetic oligonucleotide
acacggcgucucggagguu

SEQ ID NO: 2151287 - RNA, 19 nt, Artificial Sequence
  Description of Artificial Sequence: Synthetic oligonucleotide
cgccuucagcaggcugggg

SEQ ID NO: 2151288 - RNA, 19 nt, Artificial Sequence
  Description of Artificial Sequence: Synthetic oligonucleotide
ccgguggagagggccgccu

SEQ ID NO: 2151289 - RNA, 19 nt, Artificial Sequence
  Description of Artificial Sequence: Synthetic oligonucleotide
gggcuggaacgugcccuuu

SEQ ID NO: 2151290 - RNA, 19 nt, Artificial Sequence
  Description of Artificial Sequence: Synthetic oligonucleotide
cggaucgggcacgcucaaa

SEQ ID NO: 2151291 - RNA, 19 nt, Artificial Sequence
  Description of Artificial Sequence: Synthetic oligonucleotide
ggcccgcguaggggaagau

SEQ ID NO: 2151292 - RNA, 19 nt, Artificial Sequence
  Description of Artificial Sequence: Synthetic oligonucleotide
cgguggagagggccgccuu

SEQ ID NO: 2151293 - RNA, 19 nt, Artificial Sequence
  Description of Artificial Sequence: Synthetic oligonucleotide
uuaacgaaagcccaggccg

SEQ ID NO: 2151294 - RNA, 19 nt, Artificial Sequence
  Description of Artificial Sequence: Synthetic oligonucleotide
aaugaaaagguccccacgg

SEQ ID NO: 2151295 - RNA, 19 nt, Artificial Sequence
  Description of Artificial Sequence: Synthetic oligonucleotide
aguguuuugcagcacaucc

SEQ ID NO: 2151296 - RNA, 19 nt, Artificial Sequence
  Description of Artificial Sequence: Synthetic oligonucleotide
agaaauaggaugaugaggg

SEQ ID NO: 2151297 - RNA, 19 nt, Artificial Sequence
  Description of Artificial Sequence: Synthetic oligonucleotide
gaacuuacuauguagauca

SEQ ID NO: 2151298 - RNA, 19 nt, Artificial Sequence
  Description of Artificial Sequence: Synthetic oligonucleotide
cacaauuugacacagaguc

SEQ ID NO: 2151299 - RNA, 19 nt, Artificial Sequence
  Description of Artificial Sequence: Synthetic oligonucleotide
auauuuaaacuccaccugg

SEQ ID NO: 2151300 - RNA, 19 nt, Artificial Sequence
  Description of Artificial Sequence: Synthetic oligonucleotide
aauaggaugaugagggagc

SEQ ID NO: 2151301 - RNA, 19 nt, Artificial Sequence
  Description of Artificial Sequence: Synthetic oligonucleotide
uuaaaggagaccaggcugg

SEQ ID NO: 2151302 - RNA, 19 nt, Artificial Sequence
  Description of Artificial Sequence: Synthetic oligonucleotide
uuuucuggaacuuacuaug

SEQ ID NO: 2151303 - RNA, 19 nt, Artificial Sequence
  Description of Artificial Sequence: Synthetic oligonucleotide
gacacaauuugacacagag

SEQ ID NO: 2151304 - RNA, 19 nt, Artificial Sequence
  Description of Artificial Sequence: Synthetic oligonucleotide
acauauuuaaacuccaccu

SEQ ID NO: 2151305 - RNA, 19 nt, Artificial Sequence
  Description of Artificial Sequence: Synthetic oligonucleotide
aaaccaguauuucacccgg

SEQ ID NO: 2151306 - RNA, 19 nt, Artificial Sequence
  Description of Artificial Sequence: Synthetic oligonucleotide
uucacuagucacaucaaag

SEQ ID NO: 2151307 - RNA, 19 nt, Artificial Sequence
  Description of Artificial Sequence: Synthetic oligonucleotide
auuaaaggagaccaggcug

SEQ ID NO: 2151308 - RNA, 19 nt, Artificial Sequence
  Description of Artificial Sequence: Synthetic oligonucleotide
accgaguucuccuugaacg

SEQ ID NO: 2151309 - RNA, 19 nt, Artificial Sequence
  Description of Artificial Sequence: Synthetic oligonucleotide
ugaacuuauuccaggaacc

SEQ ID NO: 2151310 - RNA, 19 nt, Artificial Sequence
  Description of Artificial Sequence: Synthetic oligonucleotide
accaguagcaaugaaaagg

SEQ ID NO: 2151311 - RNA, 19 nt, Artificial Sequence
  Description of Artificial Sequence: Synthetic oligonucleotide
gacaguacacucugaaugg

SEQ ID NO: 2151312 - RNA, 19 nt, Artificial Sequence
  Description of Artificial Sequence: Synthetic oligonucleotide
uuaagccuggcucauagug

SEQ ID NO: 2151313 - RNA, 19 nt, Artificial Sequence
  Description of Artificial Sequence: Synthetic oligonucleotide
gaaaccaguauuucacccg

SEQ ID NO: 2151314 - RNA, 19 nt, Artificial Sequence
  Description of Artificial Sequence: Synthetic oligonucleotide
aagaucuaggugcugaggu

SEQ ID NO: 2151315 - RNA, 19 nt, Artificial Sequence
  Description of Artificial Sequence: Synthetic oligonucleotide
ugaaaagguccccacggcg

SEQ ID NO: 2151316 - RNA, 19 nt, Artificial Sequence
  Description of Artificial Sequence: Synthetic oligonucleotide
aaauaggaugaugagggag

SEQ ID NO: 2151317 - RNA, 19 nt, Artificial Sequence
  Description of Artificial Sequence: Synthetic oligonucleotide
uguuucauggcaagacacg

SEQ ID NO: 2151318 - RNA, 19 nt, Artificial Sequence
  Description of Artificial Sequence: Synthetic oligonucleotide
cuagucacaucaaagggag

SEQ ID NO: 2151319 - RNA, 19 nt, Artificial Sequence
  Description of Artificial Sequence: Synthetic oligonucleotide
uuaaacuccaccugguaga

SEQ ID NO: 2151320 - RNA, 19 nt, Artificial Sequence
  Description of Artificial Sequence: Synthetic oligonucleotide
aacuccaccugguagacca

SEQ ID NO: 2151321 - RNA, 19 nt, Artificial Sequence
  Description of Artificial Sequence: Synthetic oligonucleotide
uucauggcaagacacguug

SEQ ID NO: 2151322 - RNA, 19 nt, Artificial Sequence
  Description of Artificial Sequence: Synthetic oligonucleotide
ugagaaauaggaugaugag

SEQ ID NO: 2151323 - RNA, 19 nt, Artificial Sequence
  Description of Artificial Sequence: Synthetic oligonucleotide
aaaguugcuucacuaguca

SEQ ID NO: 2151324 - RNA, 19 nt, Artificial Sequence
  Description of Artificial Sequence: Synthetic oligonucleotide
uguauuuguuccgggaugg

SEQ ID NO: 2151325 - RNA, 19 nt, Artificial Sequence
  Description of Artificial Sequence: Synthetic oligonucleotide
uguuguuuugcaccgucag

SEQ ID NO: 2151326 - RNA, 19 nt, Artificial Sequence
  Description of Artificial Sequence: Synthetic oligonucleotide
caauuugacacagaguccc

SEQ ID NO: 2151327 - RNA, 19 nt, Artificial Sequence
  Description of Artificial Sequence: Synthetic oligonucleotide
uuuguagacaguacacucu

SEQ ID NO: 2151328 - RNA, 19 nt, Artificial Sequence
  Description of Artificial Sequence: Synthetic oligonucleotide
ucuaagaugggcuggucug

SEQ ID NO: 2151329 - RNA, 19 nt, Artificial Sequence
  Description of Artificial Sequence: Synthetic oligonucleotide
ugaaaccaguauuucaccc

SEQ ID NO: 2151330 - RNA, 19 nt, Artificial Sequence
  Description of Artificial Sequence: Synthetic oligonucleotide
cuugcagccugguugaugc

SEQ ID NO: 2151331 - RNA, 19 nt, Artificial Sequence
  Description of Artificial Sequence: Synthetic oligonucleotide
caaguuacucagcacaacc

SEQ ID NO: 2151332 - RNA, 19 nt, Artificial Sequence
  Description of Artificial Sequence: Synthetic oligonucleotide
ccaacuuagaaucugcucg

SEQ ID NO: 2151333 - RNA, 19 nt, Artificial Sequence
  Description of Artificial Sequence: Synthetic oligonucleotide
agcaucguccuuuugagca

SEQ ID NO: 2151334 - RNA, 19 nt, Artificial Sequence
  Description of Artificial Sequence: Synthetic oligonucleotide
cauauuuaaacuccaccug

SEQ ID NO: 2151335 - RNA, 19 nt, Artificial Sequence
  Description of Artificial Sequence: Synthetic oligonucleotide
uucccaguaacggacacgg

SEQ ID NO: 2151336 - RNA, 19 nt, Artificial Sequence
  Description of Artificial Sequence: Synthetic oligonucleotide
uuguagacaguacacucug

SEQ ID NO: 2151337 - RNA, 19 nt, Artificial Sequence
  Description of Artificial Sequence: Synthetic oligonucleotide
aguuaagccuggcucauag

SEQ ID NO: 2151338 - RNA, 19 nt, Artificial Sequence
  Description of Artificial Sequence: Synthetic oligonucleotide
aaguuacucagcacaaccg

SEQ ID NO: 2151339 - RNA, 19 nt, Artificial Sequence
  Description of Artificial Sequence: Synthetic oligonucleotide
caagacacguugcuuaacg

SEQ ID NO: 2151340 - RNA, 19 nt, Artificial Sequence
  Description of Artificial Sequence: Synthetic oligonucleotide
cacuagucacaucaaaggg

SEQ ID NO: 2151341 - RNA, 19 nt, Artificial Sequence
  Description of Artificial Sequence: Synthetic oligonucleotide
ucgguuuguagacaguaca

SEQ ID NO: 2151342 - RNA, 19 nt, Artificial Sequence
  Description of Artificial Sequence: Synthetic oligonucleotide
aaucugcucguuauuguac

SEQ ID NO: 2151343 - RNA, 19 nt, Artificial Sequence
  Description of Artificial Sequence: Synthetic oligonucleotide
aagcaucguccuuuugagc

SEQ ID NO: 2151344 - RNA, 19 nt, Artificial Sequence
  Description of Artificial Sequence: Synthetic oligonucleotide
  modified_base (19)..(19): a, c, u, g, unknown or other
uuuugcagcacauccugcn

SEQ ID NO: 2151345 - RNA, 19 nt, Artificial Sequence
  Description of Artificial Sequence: Synthetic oligonucleotide
cugaauggcuucaaguuac

SEQ ID NO: 2151346 - RNA, 19 nt, Artificial Sequence
  Description of Artificial Sequence: Synthetic oligonucleotide
uuugguaucugaggaacag

SEQ ID NO: 2151347 - RNA, 19 nt, Artificial Sequence
  Description of Artificial Sequence: Synthetic oligonucleotide
cuuaacgaaagcccaggcc

SEQ ID NO: 2151348 - RNA, 19 nt, Artificial Sequence
  Description of Artificial Sequence: Synthetic oligonucleotide
aaccgaguucuccuugaac

SEQ ID NO: 2151349 - RNA, 19 nt, Artificial Sequence
  Description of Artificial Sequence: Synthetic oligonucleotide
uuuguuccgggaugguugg

SEQ ID NO: 2151350 - RNA, 19 nt, Artificial Sequence
  Description of Artificial Sequence: Synthetic oligonucleotide
acaguuuaccucugugaac

SEQ ID NO: 2151351 - RNA, 19 nt, Artificial Sequence
  Description of Artificial Sequence: Synthetic oligonucleotide
guagcaaugaaaagguccc

SEQ ID NO: 2151352 - RNA, 19 nt, Artificial Sequence
  Description of Artificial Sequence: Synthetic oligonucleotide
cacgguacucaaaaguugc

SEQ ID NO: 2151353 - RNA, 19 nt, Artificial Sequence
  Description of Artificial Sequence: Synthetic oligonucleotide
gugaacuuauuccaggaac

SEQ ID NO: 2151354 - RNA, 19 nt, Artificial Sequence
  Description of Artificial Sequence: Synthetic oligonucleotide
agcucacagagauccacgc

SEQ ID NO: 2151355 - RNA, 19 nt, Artificial Sequence
  Description of Artificial Sequence: Synthetic oligonucleotide
agauccacgccucugccuc

SEQ ID NO: 2151356 - RNA, 19 nt, Artificial Sequence
  Description of Artificial Sequence: Synthetic oligonucleotide
uauuguacaggugaagauc

SEQ ID NO: 2151357 - RNA, 19 nt, Artificial Sequence
  Description of Artificial Sequence: Synthetic oligonucleotide
  modified_base (4)..(4): a, c, u, g, unknown or other
ugcncuuuucuggagagga

SEQ ID NO: 2151358 - RNA, 19 nt, Artificial Sequence
  Description of Artificial Sequence: Synthetic oligonucleotide
cucguuauuguacagguga

SEQ ID NO: 2151359 - RNA, 19 nt, Artificial Sequence
  Description of Artificial Sequence: Synthetic oligonucleotide
acguugcuuaacgaaagcc

SEQ ID NO: 2151360 - RNA, 19 nt, Artificial Sequence
  Description of Artificial Sequence: Synthetic oligonucleotide
uuuaccucugugaacuuau

SEQ ID NO: 2151361 - RNA, 19 nt, Artificial Sequence
  Description of Artificial Sequence: Synthetic oligonucleotide
uguuguuucauggcaagac

SEQ ID NO: 2151362 - RNA, 19 nt, Artificial Sequence
  Description of Artificial Sequence: Synthetic oligonucleotide
ucugaauggcuucaaguua

SEQ ID NO: 2151363 - RNA, 19 nt, Artificial Sequence
  Description of Artificial Sequence: Synthetic oligonucleotide
uguacaggugaagaucuag

SEQ ID NO: 2151364 - RNA, 19 nt, Artificial Sequence
  Description of Artificial Sequence: Synthetic oligonucleotide
acaauuugacacagagucc

SEQ ID NO: 2151365 - RNA, 19 nt, Artificial Sequence
  Description of Artificial Sequence: Synthetic oligonucleotide
aguuacucagcacaaccga

SEQ ID NO: 2151366 - RNA, 19 nt, Artificial Sequence
  Description of Artificial Sequence: Synthetic oligonucleotide
uccuuuugagcaguggucc

SEQ ID NO: 2151367 - RNA, 19 nt, Artificial Sequence
  Description of Artificial Sequence: Synthetic oligonucleotide
augucuguacaguuuaccu

SEQ ID NO: 2151368 - RNA, 19 nt, Artificial Sequence
  Description of Artificial Sequence: Synthetic oligonucleotide
auaggaugaugagggagcc

SEQ ID NO: 2151369 - RNA, 19 nt, Artificial Sequence
  Description of Artificial Sequence: Synthetic oligonucleotide
ugcucguuauuguacaggu

SEQ ID NO: 2151370 - RNA, 19 nt, Artificial Sequence
  Description of Artificial Sequence: Synthetic oligonucleotide
caagcaucguccuuuugag

SEQ ID NO: 2151371 - RNA, 19 nt, Artificial Sequence
  Description of Artificial Sequence: Synthetic oligonucleotide
ucuugugucguugcugggg

SEQ ID NO: 2151372 - RNA, 19 nt, Artificial Sequence
  Description of Artificial Sequence: Synthetic oligonucleotide
uguccaaggcaucuaagau

SEQ ID NO: 2151373 - RNA, 19 nt, Artificial Sequence
  Description of Artificial Sequence: Synthetic oligonucleotide
uuacucagcacaaccgagu

SEQ ID NO: 2151374 - RNA, 19 nt, Artificial Sequence
  Description of Artificial Sequence: Synthetic oligonucleotide
acuuacuauguagaucagg

SEQ ID NO: 2151375 - RNA, 19 nt, Artificial Sequence
  Description of Artificial Sequence: Synthetic oligonucleotide
gaucuaggugcugaggugc

SEQ ID NO: 2151376 - RNA, 19 nt, Artificial Sequence
  Description of Artificial Sequence: Synthetic oligonucleotide
caguuguuguuuugcaccg

SEQ ID NO: 2151377 - RNA, 19 nt, Artificial Sequence
  Description of Artificial Sequence: Synthetic oligonucleotide
guuauuguacaggugaaga

SEQ ID NO: 2151378 - RNA, 19 nt, Artificial Sequence
  Description of Artificial Sequence: Synthetic oligonucleotide
uuuugcaccgucagcugug

SEQ ID NO: 2151379 - RNA, 19 nt, Artificial Sequence
  Description of Artificial Sequence: Synthetic oligonucleotide
uacuccuguauuuguuccg

SEQ ID NO: 2151380 - RNA, 19 nt, Artificial Sequence
  Description of Artificial Sequence: Synthetic oligonucleotide
agucacaucaaagggaggu

SEQ ID NO: 2151381 - RNA, 19 nt, Artificial Sequence
  Description of Artificial Sequence: Synthetic oligonucleotide
ugucuguacaguuuaccuc

SEQ ID NO: 2151382 - RNA, 19 nt, Artificial Sequence
  Description of Artificial Sequence: Synthetic oligonucleotide
gaucagggugacuugcagc

SEQ ID NO: 2151383 - RNA, 19 nt, Artificial Sequence
  Description of Artificial Sequence: Synthetic oligonucleotide
ugugccucgguuuguagac

SEQ ID NO: 2151384 - RNA, 19 nt, Artificial Sequence
  Description of Artificial Sequence: Synthetic oligonucleotide
aagacacguugcuuaacga

SEQ ID NO: 2151385 - RNA, 19 nt, Artificial Sequence
  Description of Artificial Sequence: Synthetic oligonucleotide
ugcuuaacgaaagcccagg

SEQ ID NO: 2151386 - RNA, 19 nt, Artificial Sequence
  Description of Artificial Sequence: Synthetic oligonucleotide
uugcuuaacgaaagcccag

SEQ ID NO: 2151387 - RNA, 19 nt, Artificial Sequence
  Description of Artificial Sequence: Synthetic oligonucleotide
ugugaacuuauuccaggaa

SEQ ID NO: 2151388 - RNA, 19 nt, Artificial Sequence
  Description of Artificial Sequence: Synthetic oligonucleotide
uggucaagcggccaccucu

SEQ ID NO: 2151389 - RNA, 19 nt, Artificial Sequence
  Description of Artificial Sequence: Synthetic oligonucleotide
  modified_base (7)..(7): a, c, u, g, unknown or other
uccugcncuuuucuggaga

SEQ ID NO: 2151390 - RNA, 19 nt, Artificial Sequence
  Description of Artificial Sequence: Synthetic oligonucleotide
uggagaggacacaauuuga

SEQ ID NO: 2151391 - RNA, 19 nt, Artificial Sequence
  Description of Artificial Sequence: Synthetic oligonucleotide
aaaggagaccaggcuggcc

SEQ ID NO: 2151392 - RNA, 19 nt, Artificial Sequence
  Description of Artificial Sequence: Synthetic oligonucleotide
uugaacgggccccucaccu

SEQ ID NO: 2151393 - RNA, 19 nt, Artificial Sequence
  Description of Artificial Sequence: Synthetic oligonucleotide
agcacaaccgaguucuccu

SEQ ID NO: 2151394 - RNA, 19 nt, Artificial Sequence
  Description of Artificial Sequence: Synthetic oligonucleotide
uguugggauuaaaggagac

SEQ ID NO: 2151395 - RNA, 19 nt, Artificial Sequence
  Description of Artificial Sequence: Synthetic oligonucleotide
acaguacacucugaauggc

SEQ ID NO: 2151396 - RNA, 19 nt, Artificial Sequence
  Description of Artificial Sequence: Synthetic oligonucleotide
caaggcaucuaagaugggc

SEQ ID NO: 2151397 - RNA, 19 nt, Artificial Sequence
  Description of Artificial Sequence: Synthetic oligonucleotide
uauuucacccggcuuuggu

SEQ ID NO: 2151398 - RNA, 19 nt, Artificial Sequence
  Description of Artificial Sequence: Synthetic oligonucleotide
gaagaagcaggccccaguc

SEQ ID NO: 2151399 - RNA, 19 nt, Artificial Sequence
  Description of Artificial Sequence: Synthetic oligonucleotide
  modified_base (18)..(18): a, c, u, g, unknown or other
uuugcagcacauccugcnc

SEQ ID NO: 2151400 - RNA, 19 nt, Artificial Sequence
  Description of Artificial Sequence: Synthetic oligonucleotide
ugacuugcagccugguuga

SEQ ID NO: 2151401 - RNA, 19 nt, Artificial Sequence
  Description of Artificial Sequence: Synthetic oligonucleotide
acuagucacaucaaaggga

SEQ ID NO: 2151402 - RNA, 19 nt, Artificial Sequence
  Description of Artificial Sequence: Synthetic oligonucleotide
guacaggugaagaucuagg

SEQ ID NO: 2151403 - RNA, 19 nt, Artificial Sequence
  Description of Artificial Sequence: Synthetic oligonucleotide
uggagcuugaaaccaguau

SEQ ID NO: 2151404 - RNA, 19 nt, Artificial Sequence
  Description of Artificial Sequence: Synthetic oligonucleotide
agggaggugagaaauagga

SEQ ID NO: 2151405 - RNA, 19 nt, Artificial Sequence
  Description of Artificial Sequence: Synthetic oligonucleotide
uggaacuuacuauguagau

SEQ ID NO: 2151406 - RNA, 19 nt, Artificial Sequence
  Description of Artificial Sequence: Synthetic oligonucleotide
gcucauaguguuuugcagc

SEQ ID NO: 2151407 - RNA, 19 nt, Artificial Sequence
  Description of Artificial Sequence: Synthetic oligonucleotide
uggcucauaguguuuugca

SEQ ID NO: 2151408 - RNA, 19 nt, Artificial Sequence
  Description of Artificial Sequence: Synthetic oligonucleotide
uaccucugugaacuuauuc

SEQ ID NO: 2151409 - RNA, 19 nt, Artificial Sequence
  Description of Artificial Sequence: Synthetic oligonucleotide
guuguuuugcaccgucagc

SEQ ID NO: 2151410 - RNA, 19 nt, Artificial Sequence
  Description of Artificial Sequence: Synthetic oligonucleotide
uaacgaaagcccaggccga

SEQ ID NO: 2151411 - RNA, 19 nt, Artificial Sequence
  Description of Artificial Sequence: Synthetic oligonucleotide
ggugaagucacacuucguc

SEQ ID NO: 2151412 - RNA, 19 nt, Artificial Sequence
  Description of Artificial Sequence: Synthetic oligonucleotide
agacacguugcuuaacgaa

SEQ ID NO: 2151413 - RNA, 19 nt, Artificial Sequence
  Description of Artificial Sequence: Synthetic oligonucleotide
augaugagggagccuuuuc

SEQ ID NO: 2151414 - RNA, 19 nt, Artificial Sequence
  Description of Artificial Sequence: Synthetic oligonucleotide
gguacucaaaaguugcuuc

SEQ ID NO: 2151415 - RNA, 19 nt, Artificial Sequence
  Description of Artificial Sequence: Synthetic oligonucleotide
ucugcucguuauuguacag

SEQ ID NO: 2151416 - RNA, 19 nt, Artificial Sequence
  Description of Artificial Sequence: Synthetic oligonucleotide
uguuuugcaccgucagcug

SEQ ID NO: 2151417 - RNA, 19 nt, Artificial Sequence
  Description of Artificial Sequence: Synthetic oligonucleotide
gggauuaaaggagaccagg

SEQ ID NO: 2151418 - RNA, 19 nt, Artificial Sequence
  Description of Artificial Sequence: Synthetic oligonucleotide
ucauggcaagacacguugc

SEQ ID NO: 2151419 - RNA, 19 nt, Artificial Sequence
  Description of Artificial Sequence: Synthetic oligonucleotide
  modified_base (17)..(17): a, c, u, g, unknown or other
uugcagcacauccugcncu

SEQ ID NO: 2151420 - RNA, 19 nt, Artificial Sequence
  Description of Artificial Sequence: Synthetic oligonucleotide
acuccuguauuuguuccgg

SEQ ID NO: 2151421 - RNA, 19 nt, Artificial Sequence
  Description of Artificial Sequence: Synthetic oligonucleotide
acggacacgguacucaaaa

SEQ ID NO: 2151422 - RNA, 19 nt, Artificial Sequence
  Description of Artificial Sequence: Synthetic oligonucleotide
guacucaaaaguugcuuca

SEQ ID NO: 2151423 - RNA, 19 nt, Artificial Sequence
  Description of Artificial Sequence: Synthetic oligonucleotide
cucccaacuuagaaucugc

SEQ ID NO: 2151424 - RNA, 19 nt, Artificial Sequence
  Description of Artificial Sequence: Synthetic oligonucleotide
uccaggaaccaucaacaua

SEQ ID NO: 2151425 - RNA, 19 nt, Artificial Sequence
  Description of Artificial Sequence: Synthetic oligonucleotide
aucugcucguuauuguaca

SEQ ID NO: 2151426 - RNA, 19 nt, Artificial Sequence
  Description of Artificial Sequence: Synthetic oligonucleotide
cucauaguguuuugcagca

SEQ ID NO: 2151427 - RNA, 19 nt, Artificial Sequence
  Description of Artificial Sequence: Synthetic oligonucleotide
aagccuggcucauaguguu

SEQ ID NO: 2151428 - RNA, 19 nt, Artificial Sequence
  Description of Artificial Sequence: Synthetic oligonucleotide
gaccacuggucuugugucg

SEQ ID NO: 2151429 - RNA, 19 nt, Artificial Sequence
  Description of Artificial Sequence: Synthetic oligonucleotide
ugccucgguuuguagacag

SEQ ID NO: 2151430 - RNA, 19 nt, Artificial Sequence
  Description of Artificial Sequence: Synthetic oligonucleotide
cauaguguuuugcagcaca

SEQ ID NO: 2151431 - RNA, 19 nt, Artificial Sequence
  Description of Artificial Sequence: Synthetic oligonucleotide
guugcuuaacgaaagccca

SEQ ID NO: 2151432 - RNA, 19 nt, Artificial Sequence
  Description of Artificial Sequence: Synthetic oligonucleotide
gugaagucacacuucguca

SEQ ID NO: 2151433 - RNA, 19 nt, Artificial Sequence
  Description of Artificial Sequence: Synthetic oligonucleotide
aacgaaagcccaggccgac

SEQ ID NO: 2151434 - RNA, 19 nt, Artificial Sequence
  Description of Artificial Sequence: Synthetic oligonucleotide
uguagacaguacacucuga

SEQ ID NO: 2151435 - RNA, 19 nt, Artificial Sequence
  Description of Artificial Sequence: Synthetic oligonucleotide
ucguuauuguacaggugaa

SEQ ID NO: 2151436 - RNA, 19 nt, Artificial Sequence
  Description of Artificial Sequence: Synthetic oligonucleotide
ugguggagcuugaaaccag

SEQ ID NO: 2151437 - RNA, 19 nt, Artificial Sequence
  Description of Artificial Sequence: Synthetic oligonucleotide
cacaucaaagggaggugag

SEQ ID NO: 2151438 - RNA, 19 nt, Artificial Sequence
  Description of Artificial Sequence: Synthetic oligonucleotide
gucuguacaguuuaccucu

SEQ ID NO: 2151439 - RNA, 19 nt, Artificial Sequence
  Description of Artificial Sequence: Synthetic oligonucleotide
aaacuccaccugguagacc

SEQ ID NO: 2151440 - RNA, 19 nt, Artificial Sequence
  Description of Artificial Sequence: Synthetic oligonucleotide
ugcaccgucagcugugccu

SEQ ID NO: 2151441 - RNA, 19 nt, Artificial Sequence
  Description of Artificial Sequence: Synthetic oligonucleotide
accaguauuucacccggcu

SEQ ID NO: 2151442 - RNA, 19 nt, Artificial Sequence
  Description of Artificial Sequence: Synthetic oligonucleotide
uuagaaucugcucguuauu

SEQ ID NO: 2151443 - RNA, 19 nt, Artificial Sequence
  Description of Artificial Sequence: Synthetic oligonucleotide
aagucacacuucgucacug

SEQ ID NO: 2151444 - RNA, 19 nt, Artificial Sequence
  Description of Artificial Sequence: Synthetic oligonucleotide
uagucacaucaaagggagg

SEQ ID NO: 2151445 - RNA, 19 nt, Artificial Sequence
  Description of Artificial Sequence: Synthetic oligonucleotide
agcuugaaaccaguauuuc

SEQ ID NO: 2151446 - RNA, 19 nt, Artificial Sequence
  Description of Artificial Sequence: Synthetic oligonucleotide
gaaauaggaugaugaggga

SEQ ID NO: 2151447 - RNA, 19 nt, Artificial Sequence
  Description of Artificial Sequence: Synthetic oligonucleotide
guagacaguacacucugaa

SEQ ID NO: 2151448 - RNA, 19 nt, Artificial Sequence
  Description of Artificial Sequence: Synthetic oligonucleotide
ucccaacuuagaaucugcu

SEQ ID NO: 2151449 - RNA, 19 nt, Artificial Sequence
  Description of Artificial Sequence: Synthetic oligonucleotide
uagacaguacacucugaau

SEQ ID NO: 2151450 - RNA, 19 nt, Artificial Sequence
  Description of Artificial Sequence: Synthetic oligonucleotide
aaccaguauuucacccggc

SEQ ID NO: 2151451 - RNA, 19 nt, Artificial Sequence
  Description of Artificial Sequence: Synthetic oligonucleotide
gaaucugcucguuauugua

SEQ ID NO: 2151452 - RNA, 19 nt, Artificial Sequence
  Description of Artificial Sequence: Synthetic oligonucleotide
gagcucacagagauccacg

SEQ ID NO: 2151453 - RNA, 19 nt, Artificial Sequence
  Description of Artificial Sequence: Synthetic oligonucleotide
guuguuguuuugcaccguc

SEQ ID NO: 2151454 - RNA, 19 nt, Artificial Sequence
  Description of Artificial Sequence: Synthetic oligonucleotide
ugguagaccacuggucuug

SEQ ID NO: 2151455 - RNA, 19 nt, Artificial Sequence
  Description of Artificial Sequence: Synthetic oligonucleotide
aacuuauuccaggaaccau

SEQ ID NO: 2151456 - RNA, 19 nt, Artificial Sequence
  Description of Artificial Sequence: Synthetic oligonucleotide
acugugaugucuguacagu

SEQ ID NO: 2151457 - RNA, 19 nt, Artificial Sequence
  Description of Artificial Sequence: Synthetic oligonucleotide
ugaugucuguacaguuuac

SEQ ID NO: 2151458 - RNA, 19 nt, Artificial Sequence
  Description of Artificial Sequence: Synthetic oligonucleotide
gaacuuauuccaggaacca

SEQ ID NO: 2151459 - RNA, 19 nt, Artificial Sequence
  Description of Artificial Sequence: Synthetic oligonucleotide
ggauuaaaggagaccaggc

SEQ ID NO: 2151460 - RNA, 19 nt, Artificial Sequence
  Description of Artificial Sequence: Synthetic oligonucleotide
uacucaaaaguugcuucac

SEQ ID NO: 2151461 - RNA, 19 nt, Artificial Sequence
  Description of Artificial Sequence: Synthetic oligonucleotide
agugccgggagcaaaggug

SEQ ID NO: 2151462 - RNA, 19 nt, Artificial Sequence
  Description of Artificial Sequence: Synthetic oligonucleotide
aguaacggacacgguacuc

SEQ ID NO: 2151463 - RNA, 19 nt, Artificial Sequence
  Description of Artificial Sequence: Synthetic oligonucleotide
cguugcuuaacgaaagccc

SEQ ID NO: 2151464 - RNA, 19 nt, Artificial Sequence
  Description of Artificial Sequence: Synthetic oligonucleotide
aguauuucacccggcuuug

SEQ ID NO: 2151465 - RNA, 19 nt, Artificial Sequence
  Description of Artificial Sequence: Synthetic oligonucleotide
ggcucauaguguuuugcag

SEQ ID NO: 2151466 - RNA, 19 nt, Artificial Sequence
  Description of Artificial Sequence: Synthetic oligonucleotide
gacacguugcuuaacgaaa

SEQ ID NO: 2151467 - RNA, 19 nt, Artificial Sequence
  Description of Artificial Sequence: Synthetic oligonucleotide
acacguugcuuaacgaaag

SEQ ID NO: 2151468 - RNA, 19 nt, Artificial Sequence
  Description of Artificial Sequence: Synthetic oligonucleotide
uuucauggcaagacacguu

SEQ ID NO: 2151469 - RNA, 19 nt, Artificial Sequence
  Description of Artificial Sequence: Synthetic oligonucleotide
cucgguuuguagacaguac

SEQ ID NO: 2151470 - RNA, 19 nt, Artificial Sequence
  Description of Artificial Sequence: Synthetic oligonucleotide
acaaccgaguucuccuuga

SEQ ID NO: 2151471 - RNA, 19 nt, Artificial Sequence
  Description of Artificial Sequence: Synthetic oligonucleotide
ggaaccaucaacauauuua

SEQ ID NO: 2151472 - RNA, 19 nt, Artificial Sequence
  Description of Artificial Sequence: Synthetic oligonucleotide
ucaagcggccaccucuggu

SEQ ID NO: 2151473 - RNA, 19 nt, Artificial Sequence
  Description of Artificial Sequence: Synthetic oligonucleotide
acuuagaaucugcucguua

SEQ ID NO: 2151474 - RNA, 19 nt, Artificial Sequence
  Description of Artificial Sequence: Synthetic oligonucleotide
cuuagaaucugcucguuau

SEQ ID NO: 2151475 - RNA, 19 nt, Artificial Sequence
  Description of Artificial Sequence: Synthetic oligonucleotide
cugcucguuauuguacagg

SEQ ID NO: 2151476 - RNA, 19 nt, Artificial Sequence
  Description of Artificial Sequence: Synthetic oligonucleotide
ccaguaacggacacgguac

SEQ ID NO: 2151477 - RNA, 19 nt, Artificial Sequence
  Description of Artificial Sequence: Synthetic oligonucleotide
cacguugcuuaacgaaagc

SEQ ID NO: 2151478 - RNA, 19 nt, Artificial Sequence
  Description of Artificial Sequence: Synthetic oligonucleotide
acuucgucacugugauguc

SEQ ID NO: 2151479 - RNA, 19 nt, Artificial Sequence
  Description of Artificial Sequence: Synthetic oligonucleotide
caccaguagcaaugaaaag

SEQ ID NO: 2151480 - RNA, 19 nt, Artificial Sequence
  Description of Artificial Sequence: Synthetic oligonucleotide
aagguccccacggcgauca

SEQ ID NO: 2151481 - RNA, 19 nt, Artificial Sequence
  Description of Artificial Sequence: Synthetic oligonucleotide
aauuugacacagaguccca

SEQ ID NO: 2151482 - RNA, 19 nt, Artificial Sequence
  Description of Artificial Sequence: Synthetic oligonucleotide
agcaccaguagcaaugaaa

SEQ ID NO: 2151483 - RNA, 19 nt, Artificial Sequence
  Description of Artificial Sequence: Synthetic oligonucleotide
guaacggacacgguacuca

SEQ ID NO: 2151484 - RNA, 19 nt, Artificial Sequence
  Description of Artificial Sequence: Synthetic oligonucleotide
agcaaaggugugcaccuaa

SEQ ID NO: 2151485 - RNA, 19 nt, Artificial Sequence
  Description of Artificial Sequence: Synthetic oligonucleotide
  modified_base (13)..(13): a, c, u, g, unknown or other
agcacauccugcncuuuuc

SEQ ID NO: 2151486 - RNA, 19 nt, Artificial Sequence
  Description of Artificial Sequence: Synthetic oligonucleotide
uaacggacacgguacucaa

SEQ ID NO: 2151487 - RNA, 19 nt, Artificial Sequence
  Description of Artificial Sequence: Synthetic oligonucleotide
acacgguacucaaaaguug

SEQ ID NO: 2151488 - RNA, 19 nt, Artificial Sequence
  Description of Artificial Sequence: Synthetic oligonucleotide
aacuuacuauguagaucag

SEQ ID NO: 2151489 - RNA, 19 nt, Artificial Sequence
  Description of Artificial Sequence: Synthetic oligonucleotide
aggaaccaucaacauauuu

SEQ ID NO: 2151490 - RNA, 19 nt, Artificial Sequence
  Description of Artificial Sequence: Synthetic oligonucleotide
cacuucgucacugugaugu

SEQ ID NO: 2151491 - RNA, 19 nt, Artificial Sequence
  Description of Artificial Sequence: Synthetic oligonucleotide
  modified_base (9)..(9): a, c, u, g, unknown or other
cauccugcncuuuucugga

SEQ ID NO: 2151492 - RNA, 19 nt, Artificial Sequence
  Description of Artificial Sequence: Synthetic oligonucleotide
uauuuguuccgggaugguu

SEQ ID NO: 2151493 - RNA, 19 nt, Artificial Sequence
  Description of Artificial Sequence: Synthetic oligonucleotide
ggagaggacacaauuugac

SEQ ID NO: 2151494 - RNA, 19 nt, Artificial Sequence
  Description of Artificial Sequence: Synthetic oligonucleotide
  modified_base (2)..(2): a, c, u, g, unknown or other
cncuuuucuggagaggaca

SEQ ID NO: 2151495 - RNA, 19 nt, Artificial Sequence
  Description of Artificial Sequence: Synthetic oligonucleotide
ucguccuuuugagcagugg

SEQ ID NO: 2151496 - RNA, 19 nt, Artificial Sequence
  Description of Artificial Sequence: Synthetic oligonucleotide
uaaaggagaccaggcuggc

SEQ ID NO: 2151497 - RNA, 19 nt, Artificial Sequence
  Description of Artificial Sequence: Synthetic oligonucleotide
ggcuucaaguuacucagca

SEQ ID NO: 2151498 - RNA, 19 nt, Artificial Sequence
  Description of Artificial Sequence: Synthetic oligonucleotide
caucaaagggaggugagaa

SEQ ID NO: 2151499 - RNA, 19 nt, Artificial Sequence
  Description of Artificial Sequence: Synthetic oligonucleotide
ggaacuuacuauguagauc

SEQ ID NO: 2151500 - RNA, 19 nt, Artificial Sequence
  Description of Artificial Sequence: Synthetic oligonucleotide
acggcgaucagggugacuu

SEQ ID NO: 2151501 - RNA, 19 nt, Artificial Sequence
  Description of Artificial Sequence: Synthetic oligonucleotide
cuugaacgggccccucacc

SEQ ID NO: 2151502 - RNA, 19 nt, Artificial Sequence
  Description of Artificial Sequence: Synthetic oligonucleotide
guacacucugaauggcuuc

SEQ ID NO: 2151503 - RNA, 19 nt, Artificial Sequence
  Description of Artificial Sequence: Synthetic oligonucleotide
ggugagaaauaggaugaug

SEQ ID NO: 2151504 - RNA, 19 nt, Artificial Sequence
  Description of Artificial Sequence: Synthetic oligonucleotide
agucacacuucgucacugu

SEQ ID NO: 2151505 - RNA, 19 nt, Artificial Sequence
  Description of Artificial Sequence: Synthetic oligonucleotide
caguuuaccucugugaacu

SEQ ID NO: 2151506 - RNA, 19 nt, Artificial Sequence
  Description of Artificial Sequence: Synthetic oligonucleotide
gcaaugaaaagguccccac

SEQ ID NO: 2151507 - RNA, 19 nt, Artificial Sequence
  Description of Artificial Sequence: Synthetic oligonucleotide
uuugcaccgucagcugugc

SEQ ID NO: 2151508 - RNA, 19 nt, Artificial Sequence
  Description of Artificial Sequence: Synthetic oligonucleotide
cagggugacuugcagccug

SEQ ID NO: 2151509 - RNA, 19 nt, Artificial Sequence
  Description of Artificial Sequence: Synthetic oligonucleotide
cacaaccgaguucuccuug

SEQ ID NO: 2151510 - RNA, 19 nt, Artificial Sequence
  Description of Artificial Sequence: Synthetic oligonucleotide
acaucaaagggaggugaga

SEQ ID NO: 2151511 - RNA, 19 nt, Artificial Sequence
  Description of Artificial Sequence: Synthetic oligonucleotide
ggcaucuaagaugggcugg

SEQ ID NO: 2151512 - RNA, 19 nt, Artificial Sequence
  Description of Artificial Sequence: Synthetic oligonucleotide
aguacacucugaauggcuu

SEQ ID NO: 2151513 - RNA, 19 nt, Artificial Sequence
  Description of Artificial Sequence: Synthetic oligonucleotide
ccggcuuugguaucugagg

SEQ ID NO: 2151514 - RNA, 19 nt, Artificial Sequence
  Description of Artificial Sequence: Synthetic oligonucleotide
caguagcaaugaaaagguc

SEQ ID NO: 2151515 - RNA, 19 nt, Artificial Sequence
  Description of Artificial Sequence: Synthetic oligonucleotide
cuucacuagucacaucaaa

SEQ ID NO: 2151516 - RNA, 19 nt, Artificial Sequence
  Description of Artificial Sequence: Synthetic oligonucleotide
ucuaggugcugaggugcag

SEQ ID NO: 2151517 - RNA, 19 nt, Artificial Sequence
  Description of Artificial Sequence: Synthetic oligonucleotide
gcuuaacgaaagcccaggc

SEQ ID NO: 2151518 - RNA, 19 nt, Artificial Sequence
  Description of Artificial Sequence: Synthetic oligonucleotide
ccgaguucuccuugaacgg

SEQ ID NO: 2151519 - RNA, 19 nt, Artificial Sequence
  Description of Artificial Sequence: Synthetic oligonucleotide
  modified_base (8)..(8): a, c, u, g, unknown or other
auccugcncuuuucuggag

SEQ ID NO: 2151520 - RNA, 19 nt, Artificial Sequence
  Description of Artificial Sequence: Synthetic oligonucleotide
uuugagcagugguccuugu

SEQ ID NO: 2151521 - RNA, 19 nt, Artificial Sequence
  Description of Artificial Sequence: Synthetic oligonucleotide
  modified_base (6)..(6): a, c, u, g, unknown or other
ccugcncuuuucuggagag

SEQ ID NO: 2151522 - RNA, 19 nt, Artificial Sequence
  Description of Artificial Sequence: Synthetic oligonucleotide
gacacgguacucaaaaguu

SEQ ID NO: 2151523 - RNA, 19 nt, Artificial Sequence
  Description of Artificial Sequence: Synthetic oligonucleotide
guuucauggcaagacacgu

SEQ ID NO: 2151524 - RNA, 19 nt, Artificial Sequence
  Description of Artificial Sequence: Synthetic oligonucleotide
auaguguuuugcagcacau

SEQ ID NO: 2151525 - RNA, 19 nt, Artificial Sequence
  Description of Artificial Sequence: Synthetic oligonucleotide
cagcacaaccgaguucucc

SEQ ID NO: 2151526 - RNA, 19 nt, Artificial Sequence
  Description of Artificial Sequence: Synthetic oligonucleotide
ccaagcaucguccuuuuga

SEQ ID NO: 2151527 - RNA, 19 nt, Artificial Sequence
  Description of Artificial Sequence: Synthetic oligonucleotide
gaagcaggccccagucagc

SEQ ID NO: 2151528 - RNA, 19 nt, Artificial Sequence
  Description of Artificial Sequence: Synthetic oligonucleotide
gcaccaguagcaaugaaaa

SEQ ID NO: 2151529 - RNA, 19 nt, Artificial Sequence
  Description of Artificial Sequence: Synthetic oligonucleotide
ggagcuugaaaccaguauu

SEQ ID NO: 2151530 - RNA, 19 nt, Artificial Sequence
  Description of Artificial Sequence: Synthetic oligonucleotide
ggugcagcaagcugggaaa

SEQ ID NO: 2151531 - RNA, 19 nt, Artificial Sequence
  Description of Artificial Sequence: Synthetic oligonucleotide
uuguacaggugaagaucua

SEQ ID NO: 2151532 - RNA, 19 nt, Artificial Sequence
  Description of Artificial Sequence: Synthetic oligonucleotide
acuugcagccugguugaug

SEQ ID NO: 2151533 - RNA, 19 nt, Artificial Sequence
  Description of Artificial Sequence: Synthetic oligonucleotide
cugugccucgguuuguaga

SEQ ID NO: 2151534 - RNA, 19 nt, Artificial Sequence
  Description of Artificial Sequence: Synthetic oligonucleotide
gaagucacacuucgucacu

SEQ ID NO: 2151535 - RNA, 19 nt, Artificial Sequence
  Description of Artificial Sequence: Synthetic oligonucleotide
ggacacgguacucaaaagu

SEQ ID NO: 2151536 - RNA, 19 nt, Artificial Sequence
  Description of Artificial Sequence: Synthetic oligonucleotide
uuccgggaugguuggugga

SEQ ID NO: 2151537 - RNA, 19 nt, Artificial Sequence
  Description of Artificial Sequence: Synthetic oligonucleotide
  modified_base (5)..(5): a, c, u, g, unknown or other
cugcncuuuucuggagagg

SEQ ID NO: 2151538 - RNA, 19 nt, Artificial Sequence
  Description of Artificial Sequence: Synthetic oligonucleotide
uuaccucugugaacuuauu

SEQ ID NO: 2151539 - RNA, 19 nt, Artificial Sequence
  Description of Artificial Sequence: Synthetic oligonucleotide
guggcggcucccaacuuag

SEQ ID NO: 2151540 - RNA, 19 nt, Artificial Sequence
  Description of Artificial Sequence: Synthetic oligonucleotide
accacuggucuugugucgu

SEQ ID NO: 2151541 - RNA, 19 nt, Artificial Sequence
  Description of Artificial Sequence: Synthetic oligonucleotide
guuuugcaccgucagcugu

SEQ ID NO: 2151542 - RNA, 19 nt, Artificial Sequence
  Description of Artificial Sequence: Synthetic oligonucleotide
gucaagcggccaccucugg

SEQ ID NO: 2151543 - RNA, 19 nt, Artificial Sequence
  Description of Artificial Sequence: Synthetic oligonucleotide
ccaguagcaaugaaaaggu

SEQ ID NO: 2151544 - RNA, 19 nt, Artificial Sequence
  Description of Artificial Sequence: Synthetic oligonucleotide
ucgucacugugaugucugu

SEQ ID NO: 2151545 - RNA, 19 nt, Artificial Sequence
  Description of Artificial Sequence: Synthetic oligonucleotide
ucacccggcuuugguaucu

SEQ ID NO: 2151546 - RNA, 19 nt, Artificial Sequence
  Description of Artificial Sequence: Synthetic oligonucleotide
caguauuucacccggcuuu

SEQ ID NO: 2151547 - RNA, 19 nt, Artificial Sequence
  Description of Artificial Sequence: Synthetic oligonucleotide
uugcaccgucagcugugcc

SEQ ID NO: 2151548 - RNA, 19 nt, Artificial Sequence
  Description of Artificial Sequence: Synthetic oligonucleotide
ccgacaguuguuguuuugc

SEQ ID NO: 2151549 - RNA, 19 nt, Artificial Sequence
  Description of Artificial Sequence: Synthetic oligonucleotide
gagcuugaaaccaguauuu

SEQ ID NO: 2151550 - RNA, 19 nt, Artificial Sequence
  Description of Artificial Sequence: Synthetic oligonucleotide
ugccgggagcaaaggugug

SEQ ID NO: 2151551 - RNA, 19 nt, Artificial Sequence
  Description of Artificial Sequence: Synthetic oligonucleotide
aguuguuguuuugcaccgu

SEQ ID NO: 2151552 - RNA, 19 nt, Artificial Sequence
  Description of Artificial Sequence: Synthetic oligonucleotide
guagaccacuggucuugug

SEQ ID NO: 2151553 - RNA, 19 nt, Artificial Sequence
  Description of Artificial Sequence: Synthetic oligonucleotide
aguuuaccucugugaacuu

SEQ ID NO: 2151554 - RNA, 19 nt, Artificial Sequence
  Description of Artificial Sequence: Synthetic oligonucleotide
uucacccggcuuugguauc

SEQ ID NO: 2151555 - RNA, 19 nt, Artificial Sequence
  Description of Artificial Sequence: Synthetic oligonucleotide
cacacuucgucacugugau

SEQ ID NO: 2151556 - RNA, 19 nt, Artificial Sequence
  Description of Artificial Sequence: Synthetic oligonucleotide
cucuggugaagucacacuu

SEQ ID NO: 2151557 - RNA, 19 nt, Artificial Sequence
  Description of Artificial Sequence: Synthetic oligonucleotide
aagcccaggccgacaguug

SEQ ID NO: 2151558 - RNA, 19 nt, Artificial Sequence
  Description of Artificial Sequence: Synthetic oligonucleotide
acacuucgucacugugaug

SEQ ID NO: 2151559 - RNA, 19 nt, Artificial Sequence
  Description of Artificial Sequence: Synthetic oligonucleotide
cgguuuguagacaguacac

SEQ ID NO: 2151560 - RNA, 19 nt, Artificial Sequence
  Description of Artificial Sequence: Synthetic oligonucleotide
gaacgggccccucaccugu

SEQ ID NO: 2151561 - RNA, 19 nt, Artificial Sequence
  Description of Artificial Sequence: Synthetic oligonucleotide
gaugguugguggagcuuga

SEQ ID NO: 2151562 - RNA, 19 nt, Artificial Sequence
  Description of Artificial Sequence: Synthetic oligonucleotide
acgguacucaaaaguugcu

SEQ ID NO: 2151563 - RNA, 19 nt, Artificial Sequence
  Description of Artificial Sequence: Synthetic oligonucleotide
guuuaccucugugaacuua

SEQ ID NO: 2151564 - RNA, 19 nt, Artificial Sequence
  Description of Artificial Sequence: Synthetic oligonucleotide
ggcgaucagggugacuugc

SEQ ID NO: 2151565 - RNA, 19 nt, Artificial Sequence
  Description of Artificial Sequence: Synthetic oligonucleotide
cccagucagcaccaguagc

SEQ ID NO: 2151566 - RNA, 19 nt, Artificial Sequence
  Description of Artificial Sequence: Synthetic oligonucleotide
cccggcuuugguaucugag

SEQ ID NO: 2151567 - RNA, 19 nt, Artificial Sequence
  Description of Artificial Sequence: Synthetic oligonucleotide
ucccaguaacggacacggu

SEQ ID NO: 2151568 - RNA, 19 nt, Artificial Sequence
  Description of Artificial Sequence: Synthetic oligonucleotide
agucccaagcaucguccuu

SEQ ID NO: 2151569 - RNA, 19 nt, Artificial Sequence
  Description of Artificial Sequence: Synthetic oligonucleotide
aggccgacaguuguuguuu

SEQ ID NO: 2151570 - RNA, 19 nt, Artificial Sequence
  Description of Artificial Sequence: Synthetic oligonucleotide
gguuuguagacaguacacu

SEQ ID NO: 2151571 - RNA, 19 nt, Artificial Sequence
  Description of Artificial Sequence: Synthetic oligonucleotide
gagauccacgccucugccu

SEQ ID NO: 2151572 - RNA, 19 nt, Artificial Sequence
  Description of Artificial Sequence: Synthetic oligonucleotide
aaguuaagccuggcucaua

SEQ ID NO: 2151573 - RNA, 19 nt, Artificial Sequence
  Description of Artificial Sequence: Synthetic oligonucleotide
gcagugguccuuguccaag

SEQ ID NO: 2151574 - RNA, 19 nt, Artificial Sequence
  Description of Artificial Sequence: Synthetic oligonucleotide
gcucccaacuuagaaucug

SEQ ID NO: 2151575 - RNA, 19 nt, Artificial Sequence
  Description of Artificial Sequence: Synthetic oligonucleotide
cggcucccaacuuagaauc

SEQ ID NO: 2151576 - RNA, 19 nt, Artificial Sequence
  Description of Artificial Sequence: Synthetic oligonucleotide
acgggccccucaccuguuc

SEQ ID NO: 2151577 - RNA, 19 nt, Artificial Sequence
  Description of Artificial Sequence: Synthetic oligonucleotide
aacggacacgguacucaaa

SEQ ID NO: 2151578 - RNA, 19 nt, Artificial Sequence
  Description of Artificial Sequence: Synthetic oligonucleotide
ccaccugguagaccacugg

SEQ ID NO: 2151579 - RNA, 19 nt, Artificial Sequence
  Description of Artificial Sequence: Synthetic oligonucleotide
aucuaggugcugaggugca

SEQ ID NO: 2151580 - RNA, 19 nt, Artificial Sequence
  Description of Artificial Sequence: Synthetic oligonucleotide
ucccaagcaucguccuuuu

SEQ ID NO: 2151581 - RNA, 19 nt, Artificial Sequence
  Description of Artificial Sequence: Synthetic oligonucleotide
cgaaagcccaggccgacag

SEQ ID NO: 2151582 - RNA, 19 nt, Artificial Sequence
  Description of Artificial Sequence: Synthetic oligonucleotide
caucuaagaugggcugguc

SEQ ID NO: 2151583 - RNA, 19 nt, Artificial Sequence
  Description of Artificial Sequence: Synthetic oligonucleotide
ggcuuugguaucugaggaa

SEQ ID NO: 2151584 - RNA, 19 nt, Artificial Sequence
  Description of Artificial Sequence: Synthetic oligonucleotide
cguuauuguacaggugaag

SEQ ID NO: 2151585 - RNA, 19 nt, Artificial Sequence
  Description of Artificial Sequence: Synthetic oligonucleotide
guuaagccuggcucauagu

SEQ ID NO: 2151586 - RNA, 19 nt, Artificial Sequence
  Description of Artificial Sequence: Synthetic oligonucleotide
ccuugaacgggccccucac

SEQ ID NO: 2151587 - RNA, 19 nt, Artificial Sequence
  Description of Artificial Sequence: Synthetic oligonucleotide
ccgagugccgggagcaaag

SEQ ID NO: 2151588 - RNA, 19 nt, Artificial Sequence
  Description of Artificial Sequence: Synthetic oligonucleotide
uguuccuguugggcuccug

SEQ ID NO: 2151589 - RNA, 19 nt, Artificial Sequence
  Description of Artificial Sequence: Synthetic oligonucleotide
ggucaagcggccaccucug

SEQ ID NO: 2151590 - RNA, 19 nt, Artificial Sequence
  Description of Artificial Sequence: Synthetic oligonucleotide
ggcggcucccaacuuagaa

SEQ ID NO: 2151591 - RNA, 19 nt, Artificial Sequence
  Description of Artificial Sequence: Synthetic oligonucleotide
caccgucagcugugccucg

SEQ ID NO: 2151592 - RNA, 19 nt, Artificial Sequence
  Description of Artificial Sequence: Synthetic oligonucleotide
uggcggcucccaacuuaga

SEQ ID NO: 2151593 - RNA, 19 nt, Artificial Sequence
  Description of Artificial Sequence: Synthetic oligonucleotide
gccgacaguuguuguuuug

SEQ ID NO: 2151594 - RNA, 19 nt, Artificial Sequence
  Description of Artificial Sequence: Synthetic oligonucleotide
acgaaagcccaggccgaca

SEQ ID NO: 2151595 - RNA, 19 nt, Artificial Sequence
  Description of Artificial Sequence: Synthetic oligonucleotide
cccaguaacggacacggua

SEQ ID NO: 2151596 - RNA, 19 nt, Artificial Sequence
  Description of Artificial Sequence: Synthetic oligonucleotide
ccugguagaccacuggucu

SEQ ID NO: 2151597 - RNA, 19 nt, Artificial Sequence
  Description of Artificial Sequence: Synthetic oligonucleotide
ggugaagaucuaggugcug

SEQ ID NO: 2151598 - RNA, 19 nt, Artificial Sequence
  Description of Artificial Sequence: Synthetic oligonucleotide
caccugguagaccacuggu

SEQ ID NO: 2151599 - RNA, 19 nt, Artificial Sequence
  Description of Artificial Sequence: Synthetic oligonucleotide
gcucguuauuguacaggug

SEQ ID NO: 2151600 - RNA, 19 nt, Artificial Sequence
  Description of Artificial Sequence: Synthetic oligonucleotide
cuggcuuuucuggaacuua

SEQ ID NO: 2151601 - RNA, 19 nt, Artificial Sequence
  Description of Artificial Sequence: Synthetic oligonucleotide
gugccgggagcaaaggugu

SEQ ID NO: 2151602 - RNA, 19 nt, Artificial Sequence
  Description of Artificial Sequence: Synthetic oligonucleotide
cucccgagugccgggagca

SEQ ID NO: 2151603 - RNA, 19 nt, Artificial Sequence
  Description of Artificial Sequence: Synthetic oligonucleotide
uccacgccucugccuccca

SEQ ID NO: 2151604 - RNA, 19 nt, Artificial Sequence
  Description of Artificial Sequence: Synthetic oligonucleotide
gguggcggcucccaacuua

SEQ ID NO: 2151605 - RNA, 19 nt, Artificial Sequence
  Description of Artificial Sequence: Synthetic oligonucleotide
  modified_base (3)..(3): a, c, u, g, unknown or other
gcncuuuucuggagaggac

SEQ ID NO: 2151606 - RNA, 19 nt, Artificial Sequence
  Description of Artificial Sequence: Synthetic oligonucleotide
cuucgucacugugaugucu

SEQ ID NO: 2151607 - RNA, 19 nt, Artificial Sequence
  Description of Artificial Sequence: Synthetic oligonucleotide
caaccgaguucuccuugaa

SEQ ID NO: 2151608 - RNA, 19 nt, Artificial Sequence
  Description of Artificial Sequence: Synthetic oligonucleotide
gccgggagcaaaggugugc

SEQ ID NO: 2151609 - RNA, 19 nt, Artificial Sequence
  Description of Artificial Sequence: Synthetic oligonucleotide
uuguuccgggaugguuggu

SEQ ID NO: 2151610 - RNA, 19 nt, Artificial Sequence
  Description of Artificial Sequence: Synthetic oligonucleotide
agcggccaccucuggugaa

SEQ ID NO: 2151611 - RNA, 19 nt, Artificial Sequence
  Description of Artificial Sequence: Synthetic oligonucleotide
caggaagaagcaggcccca

SEQ ID NO: 2151612 - RNA, 19 nt, Artificial Sequence
  Description of Artificial Sequence: Synthetic oligonucleotide
caguaacggacacgguacu

SEQ ID NO: 2151613 - RNA, 19 nt, Artificial Sequence
  Description of Artificial Sequence: Synthetic oligonucleotide
gcaagacacguugcuuaac

SEQ ID NO: 2151614 - RNA, 19 nt, Artificial Sequence
  Description of Artificial Sequence: Synthetic oligonucleotide
gugcagcaagcugggaaaa

SEQ ID NO: 2151615 - RNA, 19 nt, Artificial Sequence
  Description of Artificial Sequence: Synthetic oligonucleotide
  modified_base (14)..(14): a, c, u, g, unknown or other
cagcacauccugcncuuuu

SEQ ID NO: 2151616 - RNA, 19 nt, Artificial Sequence
  Description of Artificial Sequence: Synthetic oligonucleotide
gagcaaaggugugcaccua

SEQ ID NO: 2151617 - RNA, 19 nt, Artificial Sequence
  Description of Artificial Sequence: Synthetic oligonucleotide
ccugguugaugcugcaucu

SEQ ID NO: 2151618 - RNA, 19 nt, Artificial Sequence
  Description of Artificial Sequence: Synthetic oligonucleotide
cuggucuugugucguugcu

SEQ ID NO: 2151619 - RNA, 19 nt, Artificial Sequence
  Description of Artificial Sequence: Synthetic oligonucleotide
cccaggccgacaguuguug

SEQ ID NO: 2151620 - RNA, 19 nt, Artificial Sequence
  Description of Artificial Sequence: Synthetic oligonucleotide
guauuuguuccgggauggu

SEQ ID NO: 2151621 - RNA, 19 nt, Artificial Sequence
  Description of Artificial Sequence: Synthetic oligonucleotide
agguccccacggcgaucag

SEQ ID NO: 2151622 - RNA, 19 nt, Artificial Sequence
  Description of Artificial Sequence: Synthetic oligonucleotide
gcggcucccaacuuagaau

SEQ ID NO: 2151623 - RNA, 19 nt, Artificial Sequence
  Description of Artificial Sequence: Synthetic oligonucleotide
gcggccaccucuggugaag

SEQ ID NO: 2151624 - RNA, 19 nt, Artificial Sequence
  Description of Artificial Sequence: Synthetic oligonucleotide
gcuucacuagucacaucaa

SEQ ID NO: 2151625 - RNA, 19 nt, Artificial Sequence
  Description of Artificial Sequence: Synthetic oligonucleotide
gcaucuaagaugggcuggu

SEQ ID NO: 2151626 - RNA, 19 nt, Artificial Sequence
  Description of Artificial Sequence: Synthetic oligonucleotide
ccgggaugguugguggagc

SEQ ID NO: 2151627 - RNA, 19 nt, Artificial Sequence
  Description of Artificial Sequence: Synthetic oligonucleotide
gggguggcggcucccaacu

SEQ ID NO: 2151628 - RNA, 19 nt, Artificial Sequence
  Description of Artificial Sequence: Synthetic oligonucleotide
cugguagaccacuggucuu

SEQ ID NO: 2151629 - RNA, 19 nt, Artificial Sequence
  Description of Artificial Sequence: Synthetic oligonucleotide
ccucgguuuguagacagua

SEQ ID NO: 2151630 - RNA, 19 nt, Artificial Sequence
  Description of Artificial Sequence: Synthetic oligonucleotide
ucccgagugccgggagcaa

SEQ ID NO: 2151631 - RNA, 19 nt, Artificial Sequence
  Description of Artificial Sequence: Synthetic oligonucleotide
caggccgacaguuguuguu

SEQ ID NO: 2151632 - RNA, 19 nt, Artificial Sequence
  Description of Artificial Sequence: Synthetic oligonucleotide
cacccggcuuugguaucug

SEQ ID NO: 2151633 - RNA, 19 nt, Artificial Sequence
  Description of Artificial Sequence: Synthetic oligonucleotide
gcgaucagggugacuugca

SEQ ID NO: 2151634 - RNA, 19 nt, Artificial Sequence
  Description of Artificial Sequence: Synthetic oligonucleotide
ggugacuugcagccugguu

SEQ ID NO: 2151635 - RNA, 19 nt, Artificial Sequence
  Description of Artificial Sequence: Synthetic oligonucleotide
cccaagcaucguccuuuug

SEQ ID NO: 2151636 - RNA, 19 nt, Artificial Sequence
  Description of Artificial Sequence: Synthetic oligonucleotide
ccucuggugaagucacacu

SEQ ID NO: 2151637 - RNA, 19 nt, Artificial Sequence
  Description of Artificial Sequence: Synthetic oligonucleotide
ccaguauuucacccggcuu

SEQ ID NO: 2151638 - RNA, 19 nt, Artificial Sequence
  Description of Artificial Sequence: Synthetic oligonucleotide
ggcucccaacuuagaaucu

SEQ ID NO: 2151639 - RNA, 19 nt, Artificial Sequence
  Description of Artificial Sequence: Synthetic oligonucleotide
cggcgaucagggugacuug

SEQ ID NO: 2151640 - RNA, 19 nt, Artificial Sequence
  Description of Artificial Sequence: Synthetic oligonucleotide
gccuggcucauaguguuuu

SEQ ID NO: 2151641 - RNA, 19 nt, Artificial Sequence
  Description of Artificial Sequence: Synthetic oligonucleotide
ggccccagucagcaccagu

SEQ ID NO: 2151642 - RNA, 19 nt, Artificial Sequence
  Description of Artificial Sequence: Synthetic oligonucleotide
ggccgacaguuguuguuuu

SEQ ID NO: 2151643 - RNA, 19 nt, Artificial Sequence
  Description of Artificial Sequence: Synthetic oligonucleotide
ccaggccgacaguuguugu

SEQ ID NO: 2151644 - RNA, 19 nt, Artificial Sequence
  Description of Artificial Sequence: Synthetic oligonucleotide
cgggaugguugguggagcu

SEQ ID NO: 2151645 - RNA, 19 nt, Artificial Sequence
  Description of Artificial Sequence: Synthetic oligonucleotide
ccuggucaagcggccaccu

SEQ ID NO: 2151646 - RNA, 19 nt, Artificial Sequence
  Description of Artificial Sequence: Synthetic oligonucleotide
ccacgccucugccucccaa

SEQ ID NO: 2151647 - RNA, 19 nt, Artificial Sequence
  Description of Artificial Sequence: Synthetic oligonucleotide
cgguacucaaaaguugcuu

SEQ ID NO: 2151648 - RNA, 19 nt, Artificial Sequence
  Description of Artificial Sequence: Synthetic oligonucleotide
gggugacuugcagccuggu

SEQ ID NO: 2151649 - RNA, 19 nt, Artificial Sequence
  Description of Artificial Sequence: Synthetic oligonucleotide
gccucgguuuguagacagu

SEQ ID NO: 2151650 - RNA, 19 nt, Artificial Sequence
  Description of Artificial Sequence: Synthetic oligonucleotide
ccacggcgaucagggugac

SEQ ID NO: 2151651 - RNA, 19 nt, Artificial Sequence
  Description of Artificial Sequence: Synthetic oligonucleotide
cacggcgaucagggugacu

SEQ ID NO: 2151652 - RNA, 19 nt, Artificial Sequence
  Description of Artificial Sequence: Synthetic oligonucleotide
ccccucaccuguuccuguu

SEQ ID NO: 2151653 - RNA, 19 nt, Artificial Sequence
  Description of Artificial Sequence: Synthetic oligonucleotide
ggguggcggcucccaacuu

SEQ ID NO: 2151654 - RNA, 19 nt, Artificial Sequence
  Description of Artificial Sequence: Synthetic oligonucleotide
gcccaggccgacaguuguu

SEQ ID NO: 2151655 - RNA, 19 nt, Artificial Sequence
  Description of Artificial Sequence: Synthetic oligonucleotide
aauuucacuggucacaugc

SEQ ID NO: 2151656 - RNA, 19 nt, Artificial Sequence
  Description of Artificial Sequence: Synthetic oligonucleotide
gaagguaaacaauacaugg

SEQ ID NO: 2151657 - RNA, 19 nt, Artificial Sequence
  Description of Artificial Sequence: Synthetic oligonucleotide
uuaaacauuccauacaugu

SEQ ID NO: 2151658 - RNA, 19 nt, Artificial Sequence
  Description of Artificial Sequence: Synthetic oligonucleotide
uucaugaguucauugaugg

SEQ ID NO: 2151659 - RNA, 19 nt, Artificial Sequence
  Description of Artificial Sequence: Synthetic oligonucleotide
uuccaaauaaucauggucu

SEQ ID NO: 2151660 - RNA, 19 nt, Artificial Sequence
  Description of Artificial Sequence: Synthetic oligonucleotide
uguuccgucaucaugaacu

SEQ ID NO: 2151661 - RNA, 19 nt, Artificial Sequence
  Description of Artificial Sequence: Synthetic oligonucleotide
uuacagguccaaaaggugg

SEQ ID NO: 2151662 - RNA, 19 nt, Artificial Sequence
  Description of Artificial Sequence: Synthetic oligonucleotide
aguucagucccuucaaacc

SEQ ID NO: 2151663 - RNA, 19 nt, Artificial Sequence
  Description of Artificial Sequence: Synthetic oligonucleotide
gaaauguaagcuucgguag

SEQ ID NO: 2151664 - RNA, 19 nt, Artificial Sequence
  Description of Artificial Sequence: Synthetic oligonucleotide
gacagaaucaucuuuguca

SEQ ID NO: 2151665 - RNA, 19 nt, Artificial Sequence
  Description of Artificial Sequence: Synthetic oligonucleotide
aaauguaagcuucgguagg

SEQ ID NO: 2151666 - RNA, 19 nt, Artificial Sequence
  Description of Artificial Sequence: Synthetic oligonucleotide
acaaagaacccucuagugg

SEQ ID NO: 2151667 - RNA, 19 nt, Artificial Sequence
  Description of Artificial Sequence: Synthetic oligonucleotide
aaagcuacacgauuuauuu

SEQ ID NO: 2151668 - RNA, 19 nt, Artificial Sequence
  Description of Artificial Sequence: Synthetic oligonucleotide
aaacaauacauggaccugg

SEQ ID NO: 2151669 - RNA, 19 nt, Artificial Sequence
  Description of Artificial Sequence: Synthetic oligonucleotide
cuucacgucaauaaugacc

SEQ ID NO: 2151670 - RNA, 19 nt, Artificial Sequence
  Description of Artificial Sequence: Synthetic oligonucleotide
accaaguuaguuuauaaga

SEQ ID NO: 2151671 - RNA, 19 nt, Artificial Sequence
  Description of Artificial Sequence: Synthetic oligonucleotide
aagaaugcuagaguuacag

SEQ ID NO: 2151672 - RNA, 19 nt, Artificial Sequence
  Description of Artificial Sequence: Synthetic oligonucleotide
caauacauggaccuggacc

SEQ ID NO: 2151673 - RNA, 19 nt, Artificial Sequence
  Description of Artificial Sequence: Synthetic oligonucleotide
uuuauaagauuuuaauuua

SEQ ID NO: 2151674 - RNA, 19 nt, Artificial Sequence
  Description of Artificial Sequence: Synthetic oligonucleotide
aaugugacaaagaacccuc

SEQ ID NO: 2151675 - RNA, 19 nt, Artificial Sequence
  Description of Artificial Sequence: Synthetic oligonucleotide
augaccaacacagaguugg

SEQ ID NO: 2151676 - RNA, 19 nt, Artificial Sequence
  Description of Artificial Sequence: Synthetic oligonucleotide
agugaagccaaguacacca

SEQ ID NO: 2151677 - RNA, 19 nt, Artificial Sequence
  Description of Artificial Sequence: Synthetic oligonucleotide
agccaaguacaccacaacc

SEQ ID NO: 2151678 - RNA, 19 nt, Artificial Sequence
  Description of Artificial Sequence: Synthetic oligonucleotide
ugugguaccacccaacuau

SEQ ID NO: 2151679 - RNA, 19 nt, Artificial Sequence
  Description of Artificial Sequence: Synthetic oligonucleotide
uuucuuaaacauuccauac

SEQ ID NO: 2151680 - RNA, 19 nt, Artificial Sequence
  Description of Artificial Sequence: Synthetic oligonucleotide
uuauaagauuuuaauuuac

SEQ ID NO: 2151681 - RNA, 19 nt, Artificial Sequence
  Description of Artificial Sequence: Synthetic oligonucleotide
augcuagaguuacaggucc

SEQ ID NO: 2151682 - RNA, 19 nt, Artificial Sequence
  Description of Artificial Sequence: Synthetic oligonucleotide
acagaguugggacaguauc

SEQ ID NO: 2151683 - RNA, 19 nt, Artificial Sequence
  Description of Artificial Sequence: Synthetic oligonucleotide
uuaacaaguguuccacucc

SEQ ID NO: 2151684 - RNA, 19 nt, Artificial Sequence
  Description of Artificial Sequence: Synthetic oligonucleotide
uguugacaagcacugaaug

SEQ ID NO: 2151685 - RNA, 19 nt, Artificial Sequence
  Description of Artificial Sequence: Synthetic oligonucleotide
aaaccauggaccugguuug

SEQ ID NO: 2151686 - RNA, 19 nt, Artificial Sequence
  Description of Artificial Sequence: Synthetic oligonucleotide
uuuugaagguaaacaauac

SEQ ID NO: 2151687 - RNA, 19 nt, Artificial Sequence
  Description of Artificial Sequence: Synthetic oligonucleotide
uucuuaaacauuccauaca

SEQ ID NO: 2151688 - RNA, 19 nt, Artificial Sequence
  Description of Artificial Sequence: Synthetic oligonucleotide
aaugcuagaguuacagguc

SEQ ID NO: 2151689 - RNA, 19 nt, Artificial Sequence
  Description of Artificial Sequence: Synthetic oligonucleotide
uaaugaccaacacagaguu

SEQ ID NO: 2151690 - RNA, 19 nt, Artificial Sequence
  Description of Artificial Sequence: Synthetic oligonucleotide
agguagaaggccuugacga

SEQ ID NO: 2151691 - RNA, 19 nt, Artificial Sequence
  Description of Artificial Sequence: Synthetic oligonucleotide
uugacaagcacugaaugug

SEQ ID NO: 2151692 - RNA, 19 nt, Artificial Sequence
  Description of Artificial Sequence: Synthetic oligonucleotide
ugacaaagaacccucuagu

SEQ ID NO: 2151693 - RNA, 19 nt, Artificial Sequence
  Description of Artificial Sequence: Synthetic oligonucleotide
uucuuuacaucacucuucu

SEQ ID NO: 2151694 - RNA, 19 nt, Artificial Sequence
  Description of Artificial Sequence: Synthetic oligonucleotide
auacauguuuuccaaauaa

SEQ ID NO: 2151695 - RNA, 19 nt, Artificial Sequence
  Description of Artificial Sequence: Synthetic oligonucleotide
ucuuuucaugaguucauug

SEQ ID NO: 2151696 - RNA, 19 nt, Artificial Sequence
  Description of Artificial Sequence: Synthetic oligonucleotide
acaaguguuccacuccaac

SEQ ID NO: 2151697 - RNA, 19 nt, Artificial Sequence
  Description of Artificial Sequence: Synthetic oligonucleotide
aaaaccagacagaaucauc

SEQ ID NO: 2151698 - RNA, 19 nt, Artificial Sequence
  Description of Artificial Sequence: Synthetic oligonucleotide
uccagguaacuccugaugu

SEQ ID NO: 2151699 - RNA, 19 nt, Artificial Sequence
  Description of Artificial Sequence: Synthetic oligonucleotide
cuuaacaaguguuccacuc

SEQ ID NO: 2151700 - RNA, 19 nt, Artificial Sequence
  Description of Artificial Sequence: Synthetic oligonucleotide
ugguuugugauccgcuggg

SEQ ID NO: 2151701 - RNA, 19 nt, Artificial Sequence
  Description of Artificial Sequence: Synthetic oligonucleotide
uaacaaguguuccacucca

SEQ ID NO: 2151702 - RNA, 19 nt, Artificial Sequence
  Description of Artificial Sequence: Synthetic oligonucleotide
caaguguugacaagcacug

SEQ ID NO: 2151703 - RNA, 19 nt, Artificial Sequence
  Description of Artificial Sequence: Synthetic oligonucleotide
aaguguuccacuccaacuu

SEQ ID NO: 2151704 - RNA, 19 nt, Artificial Sequence
  Description of Artificial Sequence: Synthetic oligonucleotide
ugaaugugacaaagaaccc

SEQ ID NO: 2151705 - RNA, 19 nt, Artificial Sequence
  Description of Artificial Sequence: Synthetic oligonucleotide
cucuuugucaucuuuucuc

SEQ ID NO: 2151706 - RNA, 19 nt, Artificial Sequence
  Description of Artificial Sequence: Synthetic oligonucleotide
aagucccagguccuuuggc

SEQ ID NO: 2151707 - RNA, 19 nt, Artificial Sequence
  Description of Artificial Sequence: Synthetic oligonucleotide
uguaagcuucgguaggaag

SEQ ID NO: 2151708 - RNA, 19 nt, Artificial Sequence
  Description of Artificial Sequence: Synthetic oligonucleotide
acaaccaucuggucauugg

SEQ ID NO: 2151709 - RNA, 19 nt, Artificial Sequence
  Description of Artificial Sequence: Synthetic oligonucleotide
auuccauacauguuuucca

SEQ ID NO: 2151710 - RNA, 19 nt, Artificial Sequence
  Description of Artificial Sequence: Synthetic oligonucleotide
guaaacaauacauggaccu

SEQ ID NO: 2151711 - RNA, 19 nt, Artificial Sequence
  Description of Artificial Sequence: Synthetic oligonucleotide
uuugugauccgcugggaga

SEQ ID NO: 2151712 - RNA, 19 nt, Artificial Sequence
  Description of Artificial Sequence: Synthetic oligonucleotide
gguaggaagucccaggucc

SEQ ID NO: 2151713 - RNA, 19 nt, Artificial Sequence
  Description of Artificial Sequence: Synthetic oligonucleotide
accacaagcccuaagaaug

SEQ ID NO: 2151714 - RNA, 19 nt, Artificial Sequence
  Description of Artificial Sequence: Synthetic oligonucleotide
caagcccuaagaaugcuag

SEQ ID NO: 2151715 - RNA, 19 nt, Artificial Sequence
  Description of Artificial Sequence: Synthetic oligonucleotide
gucaauaaugaccaacaca

SEQ ID NO: 2151716 - RNA, 19 nt, Artificial Sequence
  Description of Artificial Sequence: Synthetic oligonucleotide
uugaagacgucuugcagcu

SEQ ID NO: 2151717 - RNA, 19 nt, Artificial Sequence
  Description of Artificial Sequence: Synthetic oligonucleotide
ugguagaugaucugguggu

SEQ ID NO: 2151718 - RNA, 19 nt, Artificial Sequence
  Description of Artificial Sequence: Synthetic oligonucleotide
uucgguaggaagucccagg

SEQ ID NO: 2151719 - RNA, 19 nt, Artificial Sequence
  Description of Artificial Sequence: Synthetic oligonucleotide
cuuccacugaaauguaagc

SEQ ID NO: 2151720 - RNA, 19 nt, Artificial Sequence
  Description of Artificial Sequence: Synthetic oligonucleotide
uuggcgaucuuguuguuga

SEQ ID NO: 2151721 - RNA, 19 nt, Artificial Sequence
  Description of Artificial Sequence: Synthetic oligonucleotide
ucuaguggcacaccaaguu

SEQ ID NO: 2151722 - RNA, 19 nt, Artificial Sequence
  Description of Artificial Sequence: Synthetic oligonucleotide
aaggcgaccacagagcgga

SEQ ID NO: 2151723 - RNA, 19 nt, Artificial Sequence
  Description of Artificial Sequence: Synthetic oligonucleotide
aagguaaacaauacaugga

SEQ ID NO: 2151724 - RNA, 19 nt, Artificial Sequence
  Description of Artificial Sequence: Synthetic oligonucleotide
guacaccacaaccaucugg

SEQ ID NO: 2151725 - RNA, 19 nt, Artificial Sequence
  Description of Artificial Sequence: Synthetic oligonucleotide
aaaaccuaagccauuuaau

SEQ ID NO: 2151726 - RNA, 19 nt, Artificial Sequence
  Description of Artificial Sequence: Synthetic oligonucleotide
uggcuucacgucaauaaug

SEQ ID NO: 2151727 - RNA, 19 nt, Artificial Sequence
  Description of Artificial Sequence: Synthetic oligonucleotide
caccaaguuaguuuauaag

SEQ ID NO: 2151728 - RNA, 19 nt, Artificial Sequence
  Description of Artificial Sequence: Synthetic oligonucleotide
aguguuccacuccaacuuc

SEQ ID NO: 2151729 - RNA, 19 nt, Artificial Sequence
  Description of Artificial Sequence: Synthetic oligonucleotide
gacgucuugcagcugguag

SEQ ID NO: 2151730 - RNA, 19 nt, Artificial Sequence
  Description of Artificial Sequence: Synthetic oligonucleotide
uaagccauuuaauuguauu

SEQ ID NO: 2151731 - RNA, 19 nt, Artificial Sequence
  Description of Artificial Sequence: Synthetic oligonucleotide
agagaguucccacuguagu

SEQ ID NO: 2151732 - RNA, 19 nt, Artificial Sequence
  Description of Artificial Sequence: Synthetic oligonucleotide
aauguaagcuucgguagga

SEQ ID NO: 2151733 - RNA, 19 nt, Artificial Sequence
  Description of Artificial Sequence: Synthetic oligonucleotide
ugcaaggcgaccacagagc

SEQ ID NO: 2151734 - RNA, 19 nt, Artificial Sequence
  Description of Artificial Sequence: Synthetic oligonucleotide
caacuauucuuucucuggc

SEQ ID NO: 2151735 - RNA, 19 nt, Artificial Sequence
  Description of Artificial Sequence: Synthetic oligonucleotide
aguuacagguccaaaaggu

SEQ ID NO: 2151736 - RNA, 19 nt, Artificial Sequence
  Description of Artificial Sequence: Synthetic oligonucleotide
ugacaagcacugaauguga

SEQ ID NO: 2151737 - RNA, 19 nt, Artificial Sequence
  Description of Artificial Sequence: Synthetic oligonucleotide
uaaacauuccauacauguu

SEQ ID NO: 2151738 - RNA, 19 nt, Artificial Sequence
  Description of Artificial Sequence: Synthetic oligonucleotide
auggcgauaucauucuugu

SEQ ID NO: 2151739 - RNA, 19 nt, Artificial Sequence
  Description of Artificial Sequence: Synthetic oligonucleotide
gaguucagucccuucaaac

SEQ ID NO: 2151740 - RNA, 19 nt, Artificial Sequence
  Description of Artificial Sequence: Synthetic oligonucleotide
uaaacaauacauggaccug

SEQ ID NO: 2151741 - RNA, 19 nt, Artificial Sequence
  Description of Artificial Sequence: Synthetic oligonucleotide
aguucauugauggcgauau

SEQ ID NO: 2151742 - RNA, 19 nt, Artificial Sequence
  Description of Artificial Sequence: Synthetic oligonucleotide
gauggcgauaucauucuug

SEQ ID NO: 2151743 - RNA, 19 nt, Artificial Sequence
  Description of Artificial Sequence: Synthetic oligonucleotide
ugugugguaccacccaacu

SEQ ID NO: 2151744 - RNA, 19 nt, Artificial Sequence
  Description of Artificial Sequence: Synthetic oligonucleotide
auaaugaccaacacagagu

SEQ ID NO: 2151745 - RNA, 19 nt, Artificial Sequence
  Description of Artificial Sequence: Synthetic oligonucleotide
uacagguccaaaagguggu

SEQ ID NO: 2151746 - RNA, 19 nt, Artificial Sequence
  Description of Artificial Sequence: Synthetic oligonucleotide
uggucacaugcucaaaagu

SEQ ID NO: 2151747 - RNA, 19 nt, Artificial Sequence
  Description of Artificial Sequence: Synthetic oligonucleotide
ugggagagaguucccacug

SEQ ID NO: 2151748 - RNA, 19 nt, Artificial Sequence
  Description of Artificial Sequence: Synthetic oligonucleotide
uuccacugaaauguaagcu

SEQ ID NO: 2151749 - RNA, 19 nt, Artificial Sequence
  Description of Artificial Sequence: Synthetic oligonucleotide
aaccaucuggucauugguc

SEQ ID NO: 2151750 - RNA, 19 nt, Artificial Sequence
  Description of Artificial Sequence: Synthetic oligonucleotide
agagcggaucagugaagcc

SEQ ID NO: 2151751 - RNA, 19 nt, Artificial Sequence
  Description of Artificial Sequence: Synthetic oligonucleotide
ucugcaucccgguuggcga

SEQ ID NO: 2151752 - RNA, 19 nt, Artificial Sequence
  Description of Artificial Sequence: Synthetic oligonucleotide
gaucuggugguugaugggc

SEQ ID NO: 2151753 - RNA, 19 nt, Artificial Sequence
  Description of Artificial Sequence: Synthetic oligonucleotide
cacugaaauguaagcuucg

SEQ ID NO: 2151754 - RNA, 19 nt, Artificial Sequence
  Description of Artificial Sequence: Synthetic oligonucleotide
uacaucacucuucuccuuc

SEQ ID NO: 2151755 - RNA, 19 nt, Artificial Sequence
  Description of Artificial Sequence: Synthetic oligonucleotide
uccgcugggagagaguucc

SEQ ID NO: 2151756 - RNA, 19 nt, Artificial Sequence
  Description of Artificial Sequence: Synthetic oligonucleotide
uuccauacauguuuuccaa

SEQ ID NO: 2151757 - RNA, 19 nt, Artificial Sequence
  Description of Artificial Sequence: Synthetic oligonucleotide
uagaugaucuggugguuga

SEQ ID NO: 2151758 - RNA, 19 nt, Artificial Sequence
  Description of Artificial Sequence: Synthetic oligonucleotide
uagaaggccuugacgaacu

SEQ ID NO: 2151759 - RNA, 19 nt, Artificial Sequence
  Description of Artificial Sequence: Synthetic oligonucleotide
acaauacauggaccuggac

SEQ ID NO: 2151760 - RNA, 19 nt, Artificial Sequence
  Description of Artificial Sequence: Synthetic oligonucleotide
ucgguguuccgucaucaug

SEQ ID NO: 2151761 - RNA, 19 nt, Artificial Sequence
  Description of Artificial Sequence: Synthetic oligonucleotide
agagcacaaguguugacaa

SEQ ID NO: 2151762 - RNA, 19 nt, Artificial Sequence
  Description of Artificial Sequence: Synthetic oligonucleotide
ucacaugcucaaaaguuuu

SEQ ID NO: 2151763 - RNA, 19 nt, Artificial Sequence
  Description of Artificial Sequence: Synthetic oligonucleotide
ugaccaacacagaguuggg

SEQ ID NO: 2151764 - RNA, 19 nt, Artificial Sequence
  Description of Artificial Sequence: Synthetic oligonucleotide
ucgguaggaagucccaggu

SEQ ID NO: 2151765 - RNA, 19 nt, Artificial Sequence
  Description of Artificial Sequence: Synthetic oligonucleotide
ccaacuauucuuucucugg

SEQ ID NO: 2151766 - RNA, 19 nt, Artificial Sequence
  Description of Artificial Sequence: Synthetic oligonucleotide
caaaagguggugugggcug

SEQ ID NO: 2151767 - RNA, 19 nt, Artificial Sequence
  Description of Artificial Sequence: Synthetic oligonucleotide
ggagcuuggaguucagucc

SEQ ID NO: 2151768 - RNA, 19 nt, Artificial Sequence
  Description of Artificial Sequence: Synthetic oligonucleotide
acauuccauacauguuuuc

SEQ ID NO: 2151769 - RNA, 19 nt, Artificial Sequence
  Description of Artificial Sequence: Synthetic oligonucleotide
aagaacccucuaguggcac

SEQ ID NO: 2151770 - RNA, 19 nt, Artificial Sequence
  Description of Artificial Sequence: Synthetic oligonucleotide
uuggcuucacgucaauaau

SEQ ID NO: 2151771 - RNA, 19 nt, Artificial Sequence
  Description of Artificial Sequence: Synthetic oligonucleotide
ucaugaguucauugauggc

SEQ ID NO: 2151772 - RNA, 19 nt, Artificial Sequence
  Description of Artificial Sequence: Synthetic oligonucleotide
ggcauugacuuucuuaaac

SEQ ID NO: 2151773 - RNA, 19 nt, Artificial Sequence
  Description of Artificial Sequence: Synthetic oligonucleotide
cagguaacuccugaugucc

SEQ ID NO: 2151774 - RNA, 19 nt, Artificial Sequence
  Description of Artificial Sequence: Synthetic oligonucleotide
acuggucacaugcucaaaa

SEQ ID NO: 2151775 - RNA, 19 nt, Artificial Sequence
  Description of Artificial Sequence: Synthetic oligonucleotide
auaucauucuugugcaguu

SEQ ID NO: 2151776 - RNA, 19 nt, Artificial Sequence
  Description of Artificial Sequence: Synthetic oligonucleotide
uuugacgucgguguuccgu

SEQ ID NO: 2151777 - RNA, 19 nt, Artificial Sequence
  Description of Artificial Sequence: Synthetic oligonucleotide
acaagcacugaaugugaca

SEQ ID NO: 2151778 - RNA, 19 nt, Artificial Sequence
  Description of Artificial Sequence: Synthetic oligonucleotide
agcuucgguaggaaguccc

SEQ ID NO: 2151779 - RNA, 19 nt, Artificial Sequence
  Description of Artificial Sequence: Synthetic oligonucleotide
ugugacaaagaacccucua

SEQ ID NO: 2151780 - RNA, 19 nt, Artificial Sequence
  Description of Artificial Sequence: Synthetic oligonucleotide
guuacagguccaaaaggug

SEQ ID NO: 2151781 - RNA, 19 nt, Artificial Sequence
  Description of Artificial Sequence: Synthetic oligonucleotide
acgucaauaaugaccaaca

SEQ ID NO: 2151782 - RNA, 19 nt, Artificial Sequence
  Description of Artificial Sequence: Synthetic oligonucleotide
aagcuucgguaggaagucc

SEQ ID NO: 2151783 - RNA, 19 nt, Artificial Sequence
  Description of Artificial Sequence: Synthetic oligonucleotide
gacgaacuccugcaggcug

SEQ ID NO: 2151784 - RNA, 19 nt, Artificial Sequence
  Description of Artificial Sequence: Synthetic oligonucleotide
gaagucccagguccuuugg

SEQ ID NO: 2151785 - RNA, 19 nt, Artificial Sequence
  Description of Artificial Sequence: Synthetic oligonucleotide
ugagguugugcaaggcgac

SEQ ID NO: 2151786 - RNA, 19 nt, Artificial Sequence
  Description of Artificial Sequence: Synthetic oligonucleotide
agucccuucaaaccaugga

SEQ ID NO: 2151787 - RNA, 19 nt, Artificial Sequence
  Description of Artificial Sequence: Synthetic oligonucleotide
uucuuucucuggcauugac

SEQ ID NO: 2151788 - RNA, 19 nt, Artificial Sequence
  Description of Artificial Sequence: Synthetic oligonucleotide
uccaaauaaucauggucua

SEQ ID NO: 2151789 - RNA, 19 nt, Artificial Sequence
  Description of Artificial Sequence: Synthetic oligonucleotide
cacgucaauaaugaccaac

SEQ ID NO: 2151790 - RNA, 19 nt, Artificial Sequence
  Description of Artificial Sequence: Synthetic oligonucleotide
cacugaaugugacaaagaa

SEQ ID NO: 2151791 - RNA, 19 nt, Artificial Sequence
  Description of Artificial Sequence: Synthetic oligonucleotide
aacaauacauggaccugga

SEQ ID NO: 2151792 - RNA, 19 nt, Artificial Sequence
  Description of Artificial Sequence: Synthetic oligonucleotide
guuaguuuauaagauuuua

SEQ ID NO: 2151793 - RNA, 19 nt, Artificial Sequence
  Description of Artificial Sequence: Synthetic oligonucleotide
guaacuccugauguccagg

SEQ ID NO: 2151794 - RNA, 19 nt, Artificial Sequence
  Description of Artificial Sequence: Synthetic oligonucleotide
uaagcuucgguaggaaguc

SEQ ID NO: 2151795 - RNA, 19 nt, Artificial Sequence
  Description of Artificial Sequence: Synthetic oligonucleotide
aagcuacacgauuuauuuu

SEQ ID NO: 2151796 - RNA, 19 nt, Artificial Sequence
  Description of Artificial Sequence: Synthetic oligonucleotide
gagagaguucccacuguag

SEQ ID NO: 2151797 - RNA, 19 nt, Artificial Sequence
  Description of Artificial Sequence: Synthetic oligonucleotide
uggcacaccaaguuaguuu

SEQ ID NO: 2151798 - RNA, 19 nt, Artificial Sequence
  Description of Artificial Sequence: Synthetic oligonucleotide
ucagucccuucaaaccaug

SEQ ID NO: 2151799 - RNA, 19 nt, Artificial Sequence
  Description of Artificial Sequence: Synthetic oligonucleotide
guagaugaucuggugguug

SEQ ID NO: 2151800 - RNA, 19 nt, Artificial Sequence
  Description of Artificial Sequence: Synthetic oligonucleotide
gaaugugacaaagaacccu

SEQ ID NO: 2151801 - RNA, 19 nt, Artificial Sequence
  Description of Artificial Sequence: Synthetic oligonucleotide
auggaccugguuugugauc

SEQ ID NO: 2151802 - RNA, 19 nt, Artificial Sequence
  Description of Artificial Sequence: Synthetic oligonucleotide
uucagucccuucaaaccau

SEQ ID NO: 2151803 - RNA, 19 nt, Artificial Sequence
  Description of Artificial Sequence: Synthetic oligonucleotide
cacccaacuauucuuucuc

SEQ ID NO: 2151804 - RNA, 19 nt, Artificial Sequence
  Description of Artificial Sequence: Synthetic oligonucleotide
uccauacauguuuuccaaa

SEQ ID NO: 2151805 - RNA, 19 nt, Artificial Sequence
  Description of Artificial Sequence: Synthetic oligonucleotide
gcaaggcgaccacagagcg

SEQ ID NO: 2151806 - RNA, 19 nt, Artificial Sequence
  Description of Artificial Sequence: Synthetic oligonucleotide
ugcuagaguuacaggucca

SEQ ID NO: 2151807 - RNA, 19 nt, Artificial Sequence
  Description of Artificial Sequence: Synthetic oligonucleotide
agccauuuaauuguauuuu

SEQ ID NO: 2151808 - RNA, 19 nt, Artificial Sequence
  Description of Artificial Sequence: Synthetic oligonucleotide
cagguugaagacgucuugc

SEQ ID NO: 2151809 - RNA, 19 nt, Artificial Sequence
  Description of Artificial Sequence: Synthetic oligonucleotide
guugacaagcacugaaugu

SEQ ID NO: 2151810 - RNA, 19 nt, Artificial Sequence
  Description of Artificial Sequence: Synthetic oligonucleotide
aagcccuaagaaugcuaga

SEQ ID NO: 2151811 - RNA, 19 nt, Artificial Sequence
  Description of Artificial Sequence: Synthetic oligonucleotide
uugacgucgguguuccguc

SEQ ID NO: 2151812 - RNA, 19 nt, Artificial Sequence
  Description of Artificial Sequence: Synthetic oligonucleotide
cuccagguaacuccugaug

SEQ ID NO: 2151813 - RNA, 19 nt, Artificial Sequence
  Description of Artificial Sequence: Synthetic oligonucleotide
caaguacaccacaaccauc

SEQ ID NO: 2151814 - RNA, 19 nt, Artificial Sequence
  Description of Artificial Sequence: Synthetic oligonucleotide
aaaagguggugugggcuga

SEQ ID NO: 2151815 - RNA, 19 nt, Artificial Sequence
  Description of Artificial Sequence: Synthetic oligonucleotide
cagagcggaucagugaagc

SEQ ID NO: 2151816 - RNA, 19 nt, Artificial Sequence
  Description of Artificial Sequence: Synthetic oligonucleotide
aacccucuaguggcacacc

SEQ ID NO: 2151817 - RNA, 19 nt, Artificial Sequence
  Description of Artificial Sequence: Synthetic oligonucleotide
aaugaccaacacagaguug

SEQ ID NO: 2151818 - RNA, 19 nt, Artificial Sequence
  Description of Artificial Sequence: Synthetic oligonucleotide
caaaccauggaccugguuu

SEQ ID NO: 2151819 - RNA, 19 nt, Artificial Sequence
  Description of Artificial Sequence: Synthetic oligonucleotide
aaagaacccucuaguggca

SEQ ID NO: 2151820 - RNA, 19 nt, Artificial Sequence
  Description of Artificial Sequence: Synthetic oligonucleotide
cagucccuucaaaccaugg

SEQ ID NO: 2151821 - RNA, 19 nt, Artificial Sequence
  Description of Artificial Sequence: Synthetic oligonucleotide
gaagccaaguacaccacaa

SEQ ID NO: 2151822 - RNA, 19 nt, Artificial Sequence
  Description of Artificial Sequence: Synthetic oligonucleotide
caccacaaccaucugguca

SEQ ID NO: 2151823 - RNA, 19 nt, Artificial Sequence
  Description of Artificial Sequence: Synthetic oligonucleotide
acccaacuauucuuucucu

SEQ ID NO: 2151824 - RNA, 19 nt, Artificial Sequence
  Description of Artificial Sequence: Synthetic oligonucleotide
guagaaggccuugacgaac

SEQ ID NO: 2151825 - RNA, 19 nt, Artificial Sequence
  Description of Artificial Sequence: Synthetic oligonucleotide
uaccacccaacuauucuuu

SEQ ID NO: 2151826 - RNA, 19 nt, Artificial Sequence
  Description of Artificial Sequence: Synthetic oligonucleotide
uccuuuggcuucacgucaa

SEQ ID NO: 2151827 - RNA, 19 nt, Artificial Sequence
  Description of Artificial Sequence: Synthetic oligonucleotide
gcugaagaguucagaaggg

SEQ ID NO: 2151828 - RNA, 19 nt, Artificial Sequence
  Description of Artificial Sequence: Synthetic oligonucleotide
caaggcgaccacagagcgg

SEQ ID NO: 2151829 - RNA, 19 nt, Artificial Sequence
  Description of Artificial Sequence: Synthetic oligonucleotide
gacaagcacugaaugugac

SEQ ID NO: 2151830 - RNA, 19 nt, Artificial Sequence
  Description of Artificial Sequence: Synthetic oligonucleotide
guaagcuucgguaggaagu

SEQ ID NO: 2151831 - RNA, 19 nt, Artificial Sequence
  Description of Artificial Sequence: Synthetic oligonucleotide
gaacuucuuccacugaaau

SEQ ID NO: 2151832 - RNA, 19 nt, Artificial Sequence
  Description of Artificial Sequence: Synthetic oligonucleotide
cagagcacaaguguugaca

SEQ ID NO: 2151833 - RNA, 19 nt, Artificial Sequence
  Description of Artificial Sequence: Synthetic oligonucleotide
gguaacuccugauguccag

SEQ ID NO: 2151834 - RNA, 19 nt, Artificial Sequence
  Description of Artificial Sequence: Synthetic oligonucleotide
gaacccucuaguggcacac

SEQ ID NO: 2151835 - RNA, 19 nt, Artificial Sequence
  Description of Artificial Sequence: Synthetic oligonucleotide
acgaacuccugcaggcugg

SEQ ID NO: 2151836 - RNA, 19 nt, Artificial Sequence
  Description of Artificial Sequence: Synthetic oligonucleotide
aguugggacaguaucuuuu

SEQ ID NO: 2151837 - RNA, 19 nt, Artificial Sequence
  Description of Artificial Sequence: Synthetic oligonucleotide
auacauggaccuggaccac

SEQ ID NO: 2151838 - RNA, 19 nt, Artificial Sequence
  Description of Artificial Sequence: Synthetic oligonucleotide
uacauggaccuggaccaca

SEQ ID NO: 2151839 - RNA, 19 nt, Artificial Sequence
  Description of Artificial Sequence: Synthetic oligonucleotide
agaguugggacaguaucuu

SEQ ID NO: 2151840 - RNA, 19 nt, Artificial Sequence
  Description of Artificial Sequence: Synthetic oligonucleotide
cauacauguuuuccaaaua

SEQ ID NO: 2151841 - RNA, 19 nt, Artificial Sequence
  Description of Artificial Sequence: Synthetic oligonucleotide
agaacccucuaguggcaca

SEQ ID NO: 2151842 - RNA, 19 nt, Artificial Sequence
  Description of Artificial Sequence: Synthetic oligonucleotide
ggcacaccaaguuaguuua

SEQ ID NO: 2151843 - RNA, 19 nt, Artificial Sequence
  Description of Artificial Sequence: Synthetic oligonucleotide
uuuugacgucgguguuccg

SEQ ID NO: 2151844 - RNA, 19 nt, Artificial Sequence
  Description of Artificial Sequence: Synthetic oligonucleotide
cagugaagccaaguacacc

SEQ ID NO: 2151845 - RNA, 19 nt, Artificial Sequence
  Description of Artificial Sequence: Synthetic oligonucleotide
uggcgauaucauucuugug

SEQ ID NO: 2151846 - RNA, 19 nt, Artificial Sequence
  Description of Artificial Sequence: Synthetic oligonucleotide
caaguguuccacuccaacu

SEQ ID NO: 2151847 - RNA, 19 nt, Artificial Sequence
  Description of Artificial Sequence: Synthetic oligonucleotide
gcuggcgucuggcagcagg

SEQ ID NO: 2151848 - RNA, 19 nt, Artificial Sequence
  Description of Artificial Sequence: Synthetic oligonucleotide
auuucacuggucacaugcu

SEQ ID NO: 2151849 - RNA, 19 nt, Artificial Sequence
  Description of Artificial Sequence: Synthetic oligonucleotide
ccucuaguggcacaccaag

SEQ ID NO: 2151850 - RNA, 19 nt, Artificial Sequence
  Description of Artificial Sequence: Synthetic oligonucleotide
cuucgguaggaagucccag

SEQ ID NO: 2151851 - RNA, 19 nt, Artificial Sequence
  Description of Artificial Sequence: Synthetic oligonucleotide
ucuuuacaucacucuucuc

SEQ ID NO: 2151852 - RNA, 19 nt, Artificial Sequence
  Description of Artificial Sequence: Synthetic oligonucleotide
gaguucccacuguaguguc

SEQ ID NO: 2151853 - RNA, 19 nt, Artificial Sequence
  Description of Artificial Sequence: Synthetic oligonucleotide
uggcauugacuuucuuaaa

SEQ ID NO: 2151854 - RNA, 19 nt, Artificial Sequence
  Description of Artificial Sequence: Synthetic oligonucleotide
gagguugugcaaggcgacc

SEQ ID NO: 2151855 - RNA, 19 nt, Artificial Sequence
  Description of Artificial Sequence: Synthetic oligonucleotide
ggcuucacgucaauaauga

SEQ ID NO: 2151856 - RNA, 19 nt, Artificial Sequence
  Description of Artificial Sequence: Synthetic oligonucleotide
aguuuggggccuguguggu

SEQ ID NO: 2151857 - RNA, 19 nt, Artificial Sequence
  Description of Artificial Sequence: Synthetic oligonucleotide
uuacaucacucuucuccuu

SEQ ID NO: 2151858 - RNA, 19 nt, Artificial Sequence
  Description of Artificial Sequence: Synthetic oligonucleotide
ggccuugacgaacuccugc

SEQ ID NO: 2151859 - RNA, 19 nt, Artificial Sequence
  Description of Artificial Sequence: Synthetic oligonucleotide
ggaucagugaagccaagua

SEQ ID NO: 2151860 - RNA, 19 nt, Artificial Sequence
  Description of Artificial Sequence: Synthetic oligonucleotide
gucagagcacaaguguuga

SEQ ID NO: 2151861 - RNA, 19 nt, Artificial Sequence
  Description of Artificial Sequence: Synthetic oligonucleotide
ucccagguccuuuggcuuc

SEQ ID NO: 2151862 - RNA, 19 nt, Artificial Sequence
  Description of Artificial Sequence: Synthetic oligonucleotide
acgucgguguuccgucauc

SEQ ID NO: 2151863 - RNA, 19 nt, Artificial Sequence
  Description of Artificial Sequence: Synthetic oligonucleotide
gugauccgcugggagagag

SEQ ID NO: 2151864 - RNA, 19 nt, Artificial Sequence
  Description of Artificial Sequence: Synthetic oligonucleotide
ucaaaccauggaccugguu

SEQ ID NO: 2151865 - RNA, 19 nt, Artificial Sequence
  Description of Artificial Sequence: Synthetic oligonucleotide
ugauccgcugggagagagu

SEQ ID NO: 2151866 - RNA, 19 nt, Artificial Sequence
  Description of Artificial Sequence: Synthetic oligonucleotide
cagaguugggacaguaucu

SEQ ID NO: 2151867 - RNA, 19 nt, Artificial Sequence
  Description of Artificial Sequence: Synthetic oligonucleotide
ugauggcgauaucauucuu

SEQ ID NO: 2151868 - RNA, 19 nt, Artificial Sequence
  Description of Artificial Sequence: Synthetic oligonucleotide
cacuccaacuuccucagcu

SEQ ID NO: 2151869 - RNA, 19 nt, Artificial Sequence
  Description of Artificial Sequence: Synthetic oligonucleotide
ugacgucgguguuccguca

SEQ ID NO: 2151870 - RNA, 19 nt, Artificial Sequence
  Description of Artificial Sequence: Synthetic oligonucleotide
agcugguagaugaucuggu

SEQ ID NO: 2151871 - RNA, 19 nt, Artificial Sequence
  Description of Artificial Sequence: Synthetic oligonucleotide
uugccgcuggccacuuucu

SEQ ID NO: 2151872 - RNA, 19 nt, Artificial Sequence
  Description of Artificial Sequence: Synthetic oligonucleotide
aacaaguguuccacuccaa

SEQ ID NO: 2151873 - RNA, 19 nt, Artificial Sequence
  Description of Artificial Sequence: Synthetic oligonucleotide
gguaccacccaacuauucu

SEQ ID NO: 2151874 - RNA, 19 nt, Artificial Sequence
  Description of Artificial Sequence: Synthetic oligonucleotide
cccaacuauucuuucucug

SEQ ID NO: 2151875 - RNA, 19 nt, Artificial Sequence
  Description of Artificial Sequence: Synthetic oligonucleotide
agcggaucagugaagccaa

SEQ ID NO: 2151876 - RNA, 19 nt, Artificial Sequence
  Description of Artificial Sequence: Synthetic oligonucleotide
acagagcggaucagugaag

SEQ ID NO: 2151877 - RNA, 19 nt, Artificial Sequence
  Description of Artificial Sequence: Synthetic oligonucleotide
cuggugguugaugggcagc

SEQ ID NO: 2151878 - RNA, 19 nt, Artificial Sequence
  Description of Artificial Sequence: Synthetic oligonucleotide
caucacucuucuccuucuc

SEQ ID NO: 2151879 - RNA, 19 nt, Artificial Sequence
  Description of Artificial Sequence: Synthetic oligonucleotide
ggcgucuggcagcagguug

SEQ ID NO: 2151880 - RNA, 19 nt, Artificial Sequence
  Description of Artificial Sequence: Synthetic oligonucleotide
aagacgucuugcagcuggu

SEQ ID NO: 2151881 - RNA, 19 nt, Artificial Sequence
  Description of Artificial Sequence: Synthetic oligonucleotide
gcgaccacagagcggauca

SEQ ID NO: 2151882 - RNA, 19 nt, Artificial Sequence
  Description of Artificial Sequence: Synthetic oligonucleotide
cacaaccaucuggucauug

SEQ ID NO: 2151883 - RNA, 19 nt, Artificial Sequence
  Description of Artificial Sequence: Synthetic oligonucleotide
agguaacuccugaugucca

SEQ ID NO: 2151884 - RNA, 19 nt, Artificial Sequence
  Description of Artificial Sequence: Synthetic oligonucleotide
cuguagugucuuugauguc

SEQ ID NO: 2151885 - RNA, 19 nt, Artificial Sequence
  Description of Artificial Sequence: Synthetic oligonucleotide
cagguccuuuggcuucacg

SEQ ID NO: 2151886 - RNA, 19 nt, Artificial Sequence
  Description of Artificial Sequence: Synthetic oligonucleotide
gggccugugugguaccacc

SEQ ID NO: 2151887 - RNA, 19 nt, Artificial Sequence
  Description of Artificial Sequence: Synthetic oligonucleotide
agcagguugaagacgucuu

SEQ ID NO: 2151888 - RNA, 19 nt, Artificial Sequence
  Description of Artificial Sequence: Synthetic oligonucleotide
guguuccgucaucaugaac

SEQ ID NO: 2151889 - RNA, 19 nt, Artificial Sequence
  Description of Artificial Sequence: Synthetic oligonucleotide
gguagaaggccuugacgaa

SEQ ID NO: 2151890 - RNA, 19 nt, Artificial Sequence
  Description of Artificial Sequence: Synthetic oligonucleotide
gccuugacgaacuccugca

SEQ ID NO: 2151891 - RNA, 19 nt, Artificial Sequence
  Description of Artificial Sequence: Synthetic oligonucleotide
aguggcacaccaaguuagu

SEQ ID NO: 2151892 - RNA, 19 nt, Artificial Sequence
  Description of Artificial Sequence: Synthetic oligonucleotide
ugaagacgucuugcagcug

SEQ ID NO: 2151893 - RNA, 19 nt, Artificial Sequence
  Description of Artificial Sequence: Synthetic oligonucleotide
ucacgucaauaaugaccaa

SEQ ID NO: 2151894 - RNA, 19 nt, Artificial Sequence
  Description of Artificial Sequence: Synthetic oligonucleotide
guugugcaaggcgaccaca

SEQ ID NO: 2151895 - RNA, 19 nt, Artificial Sequence
  Description of Artificial Sequence: Synthetic oligonucleotide
ccgguuggcgaucuuguug

SEQ ID NO: 2151896 - RNA, 19 nt, Artificial Sequence
  Description of Artificial Sequence: Synthetic oligonucleotide
ccagguaacuccugauguc

SEQ ID NO: 2151897 - RNA, 19 nt, Artificial Sequence
  Description of Artificial Sequence: Synthetic oligonucleotide
gucccuccuucuucucugc

SEQ ID NO: 2151898 - RNA, 19 nt, Artificial Sequence
  Description of Artificial Sequence: Synthetic oligonucleotide
gguugugcaaggcgaccac

SEQ ID NO: 2151899 - RNA, 19 nt, Artificial Sequence
  Description of Artificial Sequence: Synthetic oligonucleotide
guaccacccaacuauucuu

SEQ ID NO: 2151900 - RNA, 19 nt, Artificial Sequence
  Description of Artificial Sequence: Synthetic oligonucleotide
agaguucagaagggucaga

SEQ ID NO: 2151901 - RNA, 19 nt, Artificial Sequence
  Description of Artificial Sequence: Synthetic oligonucleotide
gaguucauugauggcgaua

SEQ ID NO: 2151902 - RNA, 19 nt, Artificial Sequence
  Description of Artificial Sequence: Synthetic oligonucleotide
gucacaugcucaaaaguuu

SEQ ID NO: 2151903 - RNA, 19 nt, Artificial Sequence
  Description of Artificial Sequence: Synthetic oligonucleotide
gcuucacgucaauaaugac

SEQ ID NO: 2151904 - RNA, 19 nt, Artificial Sequence
  Description of Artificial Sequence: Synthetic oligonucleotide
auguaagcuucgguaggaa

SEQ ID NO: 2151905 - RNA, 19 nt, Artificial Sequence
  Description of Artificial Sequence: Synthetic oligonucleotide
ggagagaguucccacugua

SEQ ID NO: 2151906 - RNA, 19 nt, Artificial Sequence
  Description of Artificial Sequence: Synthetic oligonucleotide
ccuaagaaugcuagaguua

SEQ ID NO: 2151907 - RNA, 19 nt, Artificial Sequence
  Description of Artificial Sequence: Synthetic oligonucleotide
ugccgcuggccacuuucuc

SEQ ID NO: 2151908 - RNA, 19 nt, Artificial Sequence
  Description of Artificial Sequence: Synthetic oligonucleotide
ggucacaugcucaaaaguu

SEQ ID NO: 2151909 - RNA, 19 nt, Artificial Sequence
  Description of Artificial Sequence: Synthetic oligonucleotide
cgguguuccgucaucauga

SEQ ID NO: 2151910 - RNA, 19 nt, Artificial Sequence
  Description of Artificial Sequence: Synthetic oligonucleotide
gauccgcugggagagaguu

SEQ ID NO: 2151911 - RNA, 19 nt, Artificial Sequence
  Description of Artificial Sequence: Synthetic oligonucleotide
cgucaauaaugaccaacac

SEQ ID NO: 2151912 - RNA, 19 nt, Artificial Sequence
  Description of Artificial Sequence: Synthetic oligonucleotide
aguucccacuguagugucu

SEQ ID NO: 2151913 - RNA, 19 nt, Artificial Sequence
  Description of Artificial Sequence: Synthetic oligonucleotide
gugugguaccacccaacua

SEQ ID NO: 2151914 - RNA, 19 nt, Artificial Sequence
  Description of Artificial Sequence: Synthetic oligonucleotide
cuaagccauuuaauuguau

SEQ ID NO: 2151915 - RNA, 19 nt, Artificial Sequence
  Description of Artificial Sequence: Synthetic oligonucleotide
cucuaguggcacaccaagu

SEQ ID NO: 2151916 - RNA, 19 nt, Artificial Sequence
  Description of Artificial Sequence: Synthetic oligonucleotide
uggcgaucuuguuguugau

SEQ ID NO: 2151917 - RNA, 19 nt, Artificial Sequence
  Description of Artificial Sequence: Synthetic oligonucleotide
gaccuggaccacaagcccu

SEQ ID NO: 2151918 - RNA, 19 nt, Artificial Sequence
  Description of Artificial Sequence: Synthetic oligonucleotide
uugugcaguuuggggccug

SEQ ID NO: 2151919 - RNA, 19 nt, Artificial Sequence
  Description of Artificial Sequence: Synthetic oligonucleotide
ggaguucagucccuucaaa

SEQ ID NO: 2151920 - RNA, 19 nt, Artificial Sequence
  Description of Artificial Sequence: Synthetic oligonucleotide
ccauacauguuuuccaaau

SEQ ID NO: 2151921 - RNA, 19 nt, Artificial Sequence
  Description of Artificial Sequence: Synthetic oligonucleotide
auccgcugggagagaguuc

SEQ ID NO: 2151922 - RNA, 19 nt, Artificial Sequence
  Description of Artificial Sequence: Synthetic oligonucleotide
guuccgucaucaugaacuu

SEQ ID NO: 2151923 - RNA, 19 nt, Artificial Sequence
  Description of Artificial Sequence: Synthetic oligonucleotide
gaguugggacaguaucuuu

SEQ ID NO: 2151924 - RNA, 19 nt, Artificial Sequence
  Description of Artificial Sequence: Synthetic oligonucleotide
gcacaaguguugacaagca

SEQ ID NO: 2151925 - RNA, 19 nt, Artificial Sequence
  Description of Artificial Sequence: Synthetic oligonucleotide
gaccacagagcggaucagu

SEQ ID NO: 2151926 - RNA, 19 nt, Artificial Sequence
  Description of Artificial Sequence: Synthetic oligonucleotide
cauuggucuucagguagaa

SEQ ID NO: 2151927 - RNA, 19 nt, Artificial Sequence
  Description of Artificial Sequence: Synthetic oligonucleotide
cccuaagaaugcuagaguu

SEQ ID NO: 2151928 - RNA, 19 nt, Artificial Sequence
  Description of Artificial Sequence: Synthetic oligonucleotide
uucccacuguagugucuuu

SEQ ID NO: 2151929 - RNA, 19 nt, Artificial Sequence
  Description of Artificial Sequence: Synthetic oligonucleotide
gguguuccgucaucaugaa

SEQ ID NO: 2151930 - RNA, 19 nt, Artificial Sequence
  Description of Artificial Sequence: Synthetic oligonucleotide
gcuagaguuacagguccaa

SEQ ID NO: 2151931 - RNA, 19 nt, Artificial Sequence
  Description of Artificial Sequence: Synthetic oligonucleotide
ggccugugugguaccaccc

SEQ ID NO: 2151932 - RNA, 19 nt, Artificial Sequence
  Description of Artificial Sequence: Synthetic oligonucleotide
ccuaagccauuuaauugua

SEQ ID NO: 2151933 - RNA, 19 nt, Artificial Sequence
  Description of Artificial Sequence: Synthetic oligonucleotide
gccugugugguaccaccca

SEQ ID NO: 2151934 - RNA, 19 nt, Artificial Sequence
  Description of Artificial Sequence: Synthetic oligonucleotide
ccaaguacaccacaaccau

SEQ ID NO: 2151935 - RNA, 19 nt, Artificial Sequence
  Description of Artificial Sequence: Synthetic oligonucleotide
cuggcgucuggcagcaggu

SEQ ID NO: 2151936 - RNA, 19 nt, Artificial Sequence
  Description of Artificial Sequence: Synthetic oligonucleotide
ccaaauaaucauggucuaa

SEQ ID NO: 2151937 - RNA, 19 nt, Artificial Sequence
  Description of Artificial Sequence: Synthetic oligonucleotide
agacgucuugcagcuggua

SEQ ID NO: 2151938 - RNA, 19 nt, Artificial Sequence
  Description of Artificial Sequence: Synthetic oligonucleotide
guuuggggccuguguggua

SEQ ID NO: 2151939 - RNA, 19 nt, Artificial Sequence
  Description of Artificial Sequence: Synthetic oligonucleotide
gcuucgguaggaaguccca

SEQ ID NO: 2151940 - RNA, 19 nt, Artificial Sequence
  Description of Artificial Sequence: Synthetic oligonucleotide
ggugugggcugaagaguuc

SEQ ID NO: 2151941 - RNA, 19 nt, Artificial Sequence
  Description of Artificial Sequence: Synthetic oligonucleotide
uggcgucuggcagcagguu

SEQ ID NO: 2151942 - RNA, 19 nt, Artificial Sequence
  Description of Artificial Sequence: Synthetic oligonucleotide
cacaagcccuaagaaugcu

SEQ ID NO: 2151943 - RNA, 19 nt, Artificial Sequence
  Description of Artificial Sequence: Synthetic oligonucleotide
gucgguguuccgucaucau

SEQ ID NO: 2151944 - RNA, 19 nt, Artificial Sequence
  Description of Artificial Sequence: Synthetic oligonucleotide
ggcgaccacagagcggauc

SEQ ID NO: 2151945 - RNA, 19 nt, Artificial Sequence
  Description of Artificial Sequence: Synthetic oligonucleotide
gggagagaguucccacugu

SEQ ID NO: 2151946 - RNA, 19 nt, Artificial Sequence
  Description of Artificial Sequence: Synthetic oligonucleotide
cgguuggcgaucuuguugu

SEQ ID NO: 2151947 - RNA, 19 nt, Artificial Sequence
  Description of Artificial Sequence: Synthetic oligonucleotide
gggucagagcacaaguguu

SEQ ID NO: 2151948 - RNA, 19 nt, Artificial Sequence
  Description of Artificial Sequence: Synthetic oligonucleotide
cugccccaauuucacuggu

SEQ ID NO: 2151949 - RNA, 19 nt, Artificial Sequence
  Description of Artificial Sequence: Synthetic oligonucleotide
cuugugcaguuuggggccu

SEQ ID NO: 2151950 - RNA, 19 nt, Artificial Sequence
  Description of Artificial Sequence: Synthetic oligonucleotide
cacuggucacaugcucaaa

SEQ ID NO: 2151951 - RNA, 19 nt, Artificial Sequence
  Description of Artificial Sequence: Synthetic oligonucleotide
gcggaucagugaagccaag

SEQ ID NO: 2151952 - RNA, 19 nt, Artificial Sequence
  Description of Artificial Sequence: Synthetic oligonucleotide
gugguaccacccaacuauu

SEQ ID NO: 2151953 - RNA, 19 nt, Artificial Sequence
  Description of Artificial Sequence: Synthetic oligonucleotide
cugcaucccgguuggcgau

SEQ ID NO: 2151954 - RNA, 19 nt, Artificial Sequence
  Description of Artificial Sequence: Synthetic oligonucleotide
ggggccugugugguaccac

SEQ ID NO: 2151955 - RNA, 19 nt, Artificial Sequence
  Description of Artificial Sequence: Synthetic oligonucleotide
gguagaugaucuggugguu

SEQ ID NO: 2151956 - RNA, 19 nt, Artificial Sequence
  Description of Artificial Sequence: Synthetic oligonucleotide
caggagcuuggaguucagu

SEQ ID NO: 2151957 - RNA, 19 nt, Artificial Sequence
  Description of Artificial Sequence: Synthetic oligonucleotide
cgucgguguuccgucauca

SEQ ID NO: 2151958 - RNA, 19 nt, Artificial Sequence
  Description of Artificial Sequence: Synthetic oligonucleotide
agcuugccgcuggccacuu

SEQ ID NO: 2151959 - RNA, 19 nt, Artificial Sequence
  Description of Artificial Sequence: Synthetic oligonucleotide
cagcuugccgcuggccacu

SEQ ID NO: 2151960 - RNA, 19 nt, Artificial Sequence
  Description of Artificial Sequence: Synthetic oligonucleotide
cucuggcauugacuuucuu

SEQ ID NO: 2151961 - RNA, 19 nt, Artificial Sequence
  Description of Artificial Sequence: Synthetic oligonucleotide
gguuggcgaucuuguuguu

SEQ ID NO: 2151962 - RNA, 19 nt, Artificial Sequence
  Description of Artificial Sequence: Synthetic oligonucleotide
aggcgaccacagagcggau

SEQ ID NO: 2151963 - RNA, 19 nt, Artificial Sequence
  Description of Artificial Sequence: Synthetic oligonucleotide
gcacaccaaguuaguuuau

SEQ ID NO: 2151964 - RNA, 19 nt, Artificial Sequence
  Description of Artificial Sequence: Synthetic oligonucleotide
ggugguugaugggcagcuu

SEQ ID NO: 2151965 - RNA, 19 nt, Artificial Sequence
  Description of Artificial Sequence: Synthetic oligonucleotide
cccgguuggcgaucuuguu

SEQ ID NO: 2151966 - RNA, 19 nt, Artificial Sequence
  Description of Artificial Sequence: Synthetic oligonucleotide
gcuugccgcuggccacuuu

SEQ ID NO: 2151967 - RNA, 19 nt, Artificial Sequence
  Description of Artificial Sequence: Synthetic oligonucleotide
ccacaaccaucuggucauu

SEQ ID NO: 2151968 - RNA, 19 nt, Artificial Sequence
  Description of Artificial Sequence: Synthetic oligonucleotide
uauguauuuaaacagaggc

SEQ ID NO: 2151969 - RNA, 19 nt, Artificial Sequence
  Description of Artificial Sequence: Synthetic oligonucleotide
aaauccaguguuuugauuc

SEQ ID NO: 2151970 - RNA, 19 nt, Artificial Sequence
  Description of Artificial Sequence: Synthetic oligonucleotide
uuuuguagaaauuaucuag

SEQ ID NO: 2151971 - RNA, 19 nt, Artificial Sequence
  Description of Artificial Sequence: Synthetic oligonucleotide
aaucccaaaaugcucauuc

SEQ ID NO: 2151972 - RNA, 19 nt, Artificial Sequence
  Description of Artificial Sequence: Synthetic oligonucleotide
aaagcugcauuauuaaauc

SEQ ID NO: 2151973 - RNA, 19 nt, Artificial Sequence
  Description of Artificial Sequence: Synthetic oligonucleotide
uuauuuguccuucaugagg

SEQ ID NO: 2151974 - RNA, 19 nt, Artificial Sequence
  Description of Artificial Sequence: Synthetic oligonucleotide
aaauuaucuagaauguuac

SEQ ID NO: 2151975 - RNA, 19 nt, Artificial Sequence
  Description of Artificial Sequence: Synthetic oligonucleotide
aaggacuaaguuuaaagug

SEQ ID NO: 2151976 - RNA, 19 nt, Artificial Sequence
  Description of Artificial Sequence: Synthetic oligonucleotide
cuuuucugcagauagagag

SEQ ID NO: 2151977 - RNA, 19 nt, Artificial Sequence
  Description of Artificial Sequence: Synthetic oligonucleotide
aaggcuuugaucuguaaag

SEQ ID NO: 2151978 - RNA, 19 nt, Artificial Sequence
  Description of Artificial Sequence: Synthetic oligonucleotide
aagaccauaaacaaaagca

SEQ ID NO: 2151979 - RNA, 19 nt, Artificial Sequence
  Description of Artificial Sequence: Synthetic oligonucleotide
augcauaucccauugaauc

SEQ ID NO: 2151980 - RNA, 19 nt, Artificial Sequence
  Description of Artificial Sequence: Synthetic oligonucleotide
auaaggacuaaguuuaaag

SEQ ID NO: 2151981 - RNA, 19 nt, Artificial Sequence
  Description of Artificial Sequence: Synthetic oligonucleotide
aauggaaaccagcaaaugu

SEQ ID NO: 2151982 - RNA, 19 nt, Artificial Sequence
  Description of Artificial Sequence: Synthetic oligonucleotide
aguuauuuguccuucauga

SEQ ID NO: 2151983 - RNA, 19 nt, Artificial Sequence
  Description of Artificial Sequence: Synthetic oligonucleotide
ugagcaaggauaauugugc

SEQ ID NO: 2151984 - RNA, 19 nt, Artificial Sequence
  Description of Artificial Sequence: Synthetic oligonucleotide
cauuacguaaguaacuucc

SEQ ID NO: 2151985 - RNA, 19 nt, Artificial Sequence
  Description of Artificial Sequence: Synthetic oligonucleotide
aggaaugacaaugucaagc

SEQ ID NO: 2151986 - RNA, 19 nt, Artificial Sequence
  Description of Artificial Sequence: Synthetic oligonucleotide
ugacacuucaaacuccugg

SEQ ID NO: 2151987 - RNA, 19 nt, Artificial Sequence
  Description of Artificial Sequence: Synthetic oligonucleotide
agauaguuuucucagcugg

SEQ ID NO: 2151988 - RNA, 19 nt, Artificial Sequence
  Description of Artificial Sequence: Synthetic oligonucleotide
acaauguuagugcaauggc

SEQ ID NO: 2151989 - RNA, 19 nt, Artificial Sequence
  Description of Artificial Sequence: Synthetic oligonucleotide
uaugguuucagcauagccu

SEQ ID NO: 2151990 - RNA, 19 nt, Artificial Sequence
  Description of Artificial Sequence: Synthetic oligonucleotide
ucuagaauguuacaaauuu

SEQ ID NO: 2151991 - RNA, 19 nt, Artificial Sequence
  Description of Artificial Sequence: Synthetic oligonucleotide
uuuaacaucuuagcaaagg

SEQ ID NO: 2151992 - RNA, 19 nt, Artificial Sequence
  Description of Artificial Sequence: Synthetic oligonucleotide
auagguaauucuucaauuc

SEQ ID NO: 2151993 - RNA, 19 nt, Artificial Sequence
  Description of Artificial Sequence: Synthetic oligonucleotide
aaccaacaagaccauaaac

SEQ ID NO: 2151994 - RNA, 19 nt, Artificial Sequence
  Description of Artificial Sequence: Synthetic oligonucleotide
aaguguaagggugugacuc

SEQ ID NO: 2151995 - RNA, 19 nt, Artificial Sequence
  Description of Artificial Sequence: Synthetic oligonucleotide
aaguuuaaaguguaagggu

SEQ ID NO: 2151996 - RNA, 19 nt, Artificial Sequence
  Description of Artificial Sequence: Synthetic oligonucleotide
caauuguugcuucagauag

SEQ ID NO: 2151997 - RNA, 19 nt, Artificial Sequence
  Description of Artificial Sequence: Synthetic oligonucleotide
uauuuguccuucaugagga

SEQ ID NO: 2151998 - RNA, 19 nt, Artificial Sequence
  Description of Artificial Sequence: Synthetic oligonucleotide
uggauaaacaauguuagug

SEQ ID NO: 2151999 - RNA, 19 nt, Artificial Sequence
  Description of Artificial Sequence: Synthetic oligonucleotide
uacaaauuuggcauuacgu

SEQ ID NO: 2152000 - RNA, 19 nt, Artificial Sequence
  Description of Artificial Sequence: Synthetic oligonucleotide
ucaaaugaaauguuuauuu

SEQ ID NO: 2152001 - RNA, 19 nt, Artificial Sequence
  Description of Artificial Sequence: Synthetic oligonucleotide
aagaauucaccaugacuac

SEQ ID NO: 2152002 - RNA, 19 nt, Artificial Sequence
  Description of Artificial Sequence: Synthetic oligonucleotide
auugaaucgauguaaacau

SEQ ID NO: 2152003 - RNA, 19 nt, Artificial Sequence
  Description of Artificial Sequence: Synthetic oligonucleotide
uucuuuucaggccugaacu

SEQ ID NO: 2152004 - RNA, 19 nt, Artificial Sequence
  Description of Artificial Sequence: Synthetic oligonucleotide
gaauguuacaaauuuggca

SEQ ID NO: 2152005 - RNA, 19 nt, Artificial Sequence
  Description of Artificial Sequence: Synthetic oligonucleotide
uuaguguccaagaagaauu

SEQ ID NO: 2152006 - RNA, 19 nt, Artificial Sequence
  Description of Artificial Sequence: Synthetic oligonucleotide
ugcauaucccauugaaucg

SEQ ID NO: 2152007 - RNA, 19 nt, Artificial Sequence
  Description of Artificial Sequence: Synthetic oligonucleotide
caauucaucaaaugaaaug

SEQ ID NO: 2152008 - RNA, 19 nt, Artificial Sequence
  Description of Artificial Sequence: Synthetic oligonucleotide
uagaaauuaucuagaaugu

SEQ ID NO: 2152009 - RNA, 19 nt, Artificial Sequence
  Description of Artificial Sequence: Synthetic oligonucleotide
uaaggacuaaguuuaaagu

SEQ ID NO: 2152010 - RNA, 19 nt, Artificial Sequence
  Description of Artificial Sequence: Synthetic oligonucleotide
ucucauuuaacaucuuagc

SEQ ID NO: 2152011 - RNA, 19 nt, Artificial Sequence
  Description of Artificial Sequence: Synthetic oligonucleotide
uugauucuucacuacagag

SEQ ID NO: 2152012 - RNA, 19 nt, Artificial Sequence
  Description of Artificial Sequence: Synthetic oligonucleotide
gagagaauaugguuuagug

SEQ ID NO: 2152013 - RNA, 19 nt, Artificial Sequence
  Description of Artificial Sequence: Synthetic oligonucleotide
uucaauucaucaaaugaaa

SEQ ID NO: 2152014 - RNA, 19 nt, Artificial Sequence
  Description of Artificial Sequence: Synthetic oligonucleotide
aaaccagcaaauguccugg

SEQ ID NO: 2152015 - RNA, 19 nt, Artificial Sequence
  Description of Artificial Sequence: Synthetic oligonucleotide
aauaguaauagaugagcuu

SEQ ID NO: 2152016 - RNA, 19 nt, Artificial Sequence
  Description of Artificial Sequence: Synthetic oligonucleotide
uguccaagaagaauucacc

SEQ ID NO: 2152017 - RNA, 19 nt, Artificial Sequence
  Description of Artificial Sequence: Synthetic oligonucleotide
aauguuagugcaauggcca

SEQ ID NO: 2152018 - RNA, 19 nt, Artificial Sequence
  Description of Artificial Sequence: Synthetic oligonucleotide
ugauucuucacuacagaga

SEQ ID NO: 2152019 - RNA, 19 nt, Artificial Sequence
  Description of Artificial Sequence: Synthetic oligonucleotide
aagaagaauucaccaugac

SEQ ID NO: 2152020 - RNA, 19 nt, Artificial Sequence
  Description of Artificial Sequence: Synthetic oligonucleotide
acuacaucacugcaagaac

SEQ ID NO: 2152021 - RNA, 19 nt, Artificial Sequence
  Description of Artificial Sequence: Synthetic oligonucleotide
aaauuuggcauuacguaag

SEQ ID NO: 2152022 - RNA, 19 nt, Artificial Sequence
  Description of Artificial Sequence: Synthetic oligonucleotide
ugcaagaaccaacaagacc

SEQ ID NO: 2152023 - RNA, 19 nt, Artificial Sequence
  Description of Artificial Sequence: Synthetic oligonucleotide
uuugcuuugcugagaagag

SEQ ID NO: 2152024 - RNA, 19 nt, Artificial Sequence
  Description of Artificial Sequence: Synthetic oligonucleotide
uuuucuuggacucccaaau

SEQ ID NO: 2152025 - RNA, 19 nt, Artificial Sequence
  Description of Artificial Sequence: Synthetic oligonucleotide
uugugagcaaggauaauug

SEQ ID NO: 2152026 - RNA, 19 nt, Artificial Sequence
  Description of Artificial Sequence: Synthetic oligonucleotide
aaauaguaauagaugagcu

SEQ ID NO: 2152027 - RNA, 19 nt, Artificial Sequence
  Description of Artificial Sequence: Synthetic oligonucleotide
agugcaauggccaacuuuc

SEQ ID NO: 2152028 - RNA, 19 nt, Artificial Sequence
  Description of Artificial Sequence: Synthetic oligonucleotide
uaucccauugaaucgaugu

SEQ ID NO: 2152029 - RNA, 19 nt, Artificial Sequence
  Description of Artificial Sequence: Synthetic oligonucleotide
ugguuuaguguccaagaag

SEQ ID NO: 2152030 - RNA, 19 nt, Artificial Sequence
  Description of Artificial Sequence: Synthetic oligonucleotide
ucgacacccuccaauaagg

SEQ ID NO: 2152031 - RNA, 19 nt, Artificial Sequence
  Description of Artificial Sequence: Synthetic oligonucleotide
uuaucuagaauguuacaaa

SEQ ID NO: 2152032 - RNA, 19 nt, Artificial Sequence
  Description of Artificial Sequence: Synthetic oligonucleotide
uccuucaugaggaaugaca

SEQ ID NO: 2152033 - RNA, 19 nt, Artificial Sequence
  Description of Artificial Sequence: Synthetic oligonucleotide
ucagauagguaauucuuca

SEQ ID NO: 2152034 - RNA, 19 nt, Artificial Sequence
  Description of Artificial Sequence: Synthetic oligonucleotide
uaugcagcccaauuguugc

SEQ ID NO: 2152035 - RNA, 19 nt, Artificial Sequence
  Description of Artificial Sequence: Synthetic oligonucleotide
gaucuguaaagcaugauuc

SEQ ID NO: 2152036 - RNA, 19 nt, Artificial Sequence
  Description of Artificial Sequence: Synthetic oligonucleotide
uaugguuuaguguccaaga

SEQ ID NO: 2152037 - RNA, 19 nt, Artificial Sequence
  Description of Artificial Sequence: Synthetic oligonucleotide
ggauaaacaauguuagugc

SEQ ID NO: 2152038 - RNA, 19 nt, Artificial Sequence
  Description of Artificial Sequence: Synthetic oligonucleotide
caacuuuccacagugagag

SEQ ID NO: 2152039 - RNA, 19 nt, Artificial Sequence
  Description of Artificial Sequence: Synthetic oligonucleotide
uuuguuucgacacccucca

SEQ ID NO: 2152040 - RNA, 19 nt, Artificial Sequence
  Description of Artificial Sequence: Synthetic oligonucleotide
auuaaauccaguguuuuga

SEQ ID NO: 2152041 - RNA, 19 nt, Artificial Sequence
  Description of Artificial Sequence: Synthetic oligonucleotide
aaaggcuuugaucuguaaa

SEQ ID NO: 2152042 - RNA, 19 nt, Artificial Sequence
  Description of Artificial Sequence: Synthetic oligonucleotide
uggaaaccagcaaaugucc

SEQ ID NO: 2152043 - RNA, 19 nt, Artificial Sequence
  Description of Artificial Sequence: Synthetic oligonucleotide
aauuaucuagaauguuaca

SEQ ID NO: 2152044 - RNA, 19 nt, Artificial Sequence
  Description of Artificial Sequence: Synthetic oligonucleotide
acugcaagaaccaacaaga

SEQ ID NO: 2152045 - RNA, 19 nt, Artificial Sequence
  Description of Artificial Sequence: Synthetic oligonucleotide
acguaaguaacuuccccac

SEQ ID NO: 2152046 - RNA, 19 nt, Artificial Sequence
  Description of Artificial Sequence: Synthetic oligonucleotide
cuuuguuucgacacccucc

SEQ ID NO: 2152047 - RNA, 19 nt, Artificial Sequence
  Description of Artificial Sequence: Synthetic oligonucleotide
uguuuauuuuaaauuccac

SEQ ID NO: 2152048 - RNA, 19 nt, Artificial Sequence
  Description of Artificial Sequence: Synthetic oligonucleotide
uucacuacagagagcaugu

SEQ ID NO: 2152049 - RNA, 19 nt, Artificial Sequence
  Description of Artificial Sequence: Synthetic oligonucleotide
uuaaacagaggcaguguga

SEQ ID NO: 2152050 - RNA, 19 nt, Artificial Sequence
  Description of Artificial Sequence: Synthetic oligonucleotide
ugucagugcugauaguggg

SEQ ID NO: 2152051 - RNA, 19 nt, Artificial Sequence
  Description of Artificial Sequence: Synthetic oligonucleotide
uuucugcagauagagagag

SEQ ID NO: 2152052 - RNA, 19 nt, Artificial Sequence
  Description of Artificial Sequence: Synthetic oligonucleotide
uuacguaaguaacuucccc

SEQ ID NO: 2152053 - RNA, 19 nt, Artificial Sequence
  Description of Artificial Sequence: Synthetic oligonucleotide
caaugucaagcuuugggcc

SEQ ID NO: 2152054 - RNA, 19 nt, Artificial Sequence
  Description of Artificial Sequence: Synthetic oligonucleotide
cuuugaucuguaaagcaug

SEQ ID NO: 2152055 - RNA, 19 nt, Artificial Sequence
  Description of Artificial Sequence: Synthetic oligonucleotide
uucucagauaguuuucuca

SEQ ID NO: 2152056 - RNA, 19 nt, Artificial Sequence
  Description of Artificial Sequence: Synthetic oligonucleotide
aguuuaaaguguaagggug

SEQ ID NO: 2152057 - RNA, 19 nt, Artificial Sequence
  Description of Artificial Sequence: Synthetic oligonucleotide
auuaucuagaauguuacaa

SEQ ID NO: 2152058 - RNA, 19 nt, Artificial Sequence
  Description of Artificial Sequence: Synthetic oligonucleotide
uccugaauugugagcaagg

SEQ ID NO: 2152059 - RNA, 19 nt, Artificial Sequence
  Description of Artificial Sequence: Synthetic oligonucleotide
uuugaucuguaaagcauga

SEQ ID NO: 2152060 - RNA, 19 nt, Artificial Sequence
  Description of Artificial Sequence: Synthetic oligonucleotide
ugaucuguaaagcaugauu

SEQ ID NO: 2152061 - RNA, 19 nt, Artificial Sequence
  Description of Artificial Sequence: Synthetic oligonucleotide
acaaauuuggcauuacgua

SEQ ID NO: 2152062 - RNA, 19 nt, Artificial Sequence
  Description of Artificial Sequence: Synthetic oligonucleotide
auggaaaccagcaaauguc

SEQ ID NO: 2152063 - RNA, 19 nt, Artificial Sequence
  Description of Artificial Sequence: Synthetic oligonucleotide
uucgacacccuccaauaag

SEQ ID NO: 2152064 - RNA, 19 nt, Artificial Sequence
  Description of Artificial Sequence: Synthetic oligonucleotide
gacaauuccaaucccaaaa

SEQ ID NO: 2152065 - RNA, 19 nt, Artificial Sequence
  Description of Artificial Sequence: Synthetic oligonucleotide
uacguaaguaacuucccca

SEQ ID NO: 2152066 - RNA, 19 nt, Artificial Sequence
  Description of Artificial Sequence: Synthetic oligonucleotide
uaaaguguaagggugugac

SEQ ID NO: 2152067 - RNA, 19 nt, Artificial Sequence
  Description of Artificial Sequence: Synthetic oligonucleotide
aaugacaaugucaagcuuu

SEQ ID NO: 2152068 - RNA, 19 nt, Artificial Sequence
  Description of Artificial Sequence: Synthetic oligonucleotide
ucaauucaucaaaugaaau

SEQ ID NO: 2152069 - RNA, 19 nt, Artificial Sequence
  Description of Artificial Sequence: Synthetic oligonucleotide
gaaauccaguuauuugucc

SEQ ID NO: 2152070 - RNA, 19 nt, Artificial Sequence
  Description of Artificial Sequence: Synthetic oligonucleotide
gagaauaugagcuaugguu

SEQ ID NO: 2152071 - RNA, 19 nt, Artificial Sequence
  Description of Artificial Sequence: Synthetic oligonucleotide
auaguaauagaugagcuuu

SEQ ID NO: 2152072 - RNA, 19 nt, Artificial Sequence
  Description of Artificial Sequence: Synthetic oligonucleotide
uucacucuccgccagaaau

SEQ ID NO: 2152073 - RNA, 19 nt, Artificial Sequence
  Description of Artificial Sequence: Synthetic oligonucleotide
aauucucagauaguuuucu

SEQ ID NO: 2152074 - RNA, 19 nt, Artificial Sequence
  Description of Artificial Sequence: Synthetic oligonucleotide
auuacguaaguaacuuccc

SEQ ID NO: 2152075 - RNA, 19 nt, Artificial Sequence
  Description of Artificial Sequence: Synthetic oligonucleotide
acaggaaugacacuucaaa

SEQ ID NO: 2152076 - RNA, 19 nt, Artificial Sequence
  Description of Artificial Sequence: Synthetic oligonucleotide
uucuuggacucccaaauuc

SEQ ID NO: 2152077 - RNA, 19 nt, Artificial Sequence
  Description of Artificial Sequence: Synthetic oligonucleotide
guaauucuucaauucauca

SEQ ID NO: 2152078 - RNA, 19 nt, Artificial Sequence
  Description of Artificial Sequence: Synthetic oligonucleotide
uuccacaugguaugcagcc

SEQ ID NO: 2152079 - RNA, 19 nt, Artificial Sequence
  Description of Artificial Sequence: Synthetic oligonucleotide
gaaauuaucuagaauguua

SEQ ID NO: 2152080 - RNA, 19 nt, Artificial Sequence
  Description of Artificial Sequence: Synthetic oligonucleotide
cuaugguuucagcauagcc

SEQ ID NO: 2152081 - RNA, 19 nt, Artificial Sequence
  Description of Artificial Sequence: Synthetic oligonucleotide
ucccaaaaugcucauucca

SEQ ID NO: 2152082 - RNA, 19 nt, Artificial Sequence
  Description of Artificial Sequence: Synthetic oligonucleotide
ugguaugcagcccaauugu

SEQ ID NO: 2152083 - RNA, 19 nt, Artificial Sequence
  Description of Artificial Sequence: Synthetic oligonucleotide
ugggguaguggacauagcu

SEQ ID NO: 2152084 - RNA, 19 nt, Artificial Sequence
  Description of Artificial Sequence: Synthetic oligonucleotide
aauuuggcauuacguaagu

SEQ ID NO: 2152085 - RNA, 19 nt, Artificial Sequence
  Description of Artificial Sequence: Synthetic oligonucleotide
ucuuggacucccaaauucu

SEQ ID NO: 2152086 - RNA, 19 nt, Artificial Sequence
  Description of Artificial Sequence: Synthetic oligonucleotide
ugaacuggccaauggaaac

SEQ ID NO: 2152087 - RNA, 19 nt, Artificial Sequence
  Description of Artificial Sequence: Synthetic oligonucleotide
ggauaauugugccagcugc

SEQ ID NO: 2152088 - RNA, 19 nt, Artificial Sequence
  Description of Artificial Sequence: Synthetic oligonucleotide
augguaugcagcccaauug

SEQ ID NO: 2152089 - RNA, 19 nt, Artificial Sequence
  Description of Artificial Sequence: Synthetic oligonucleotide
uuugcugagaagagcauuu

SEQ ID NO: 2152090 - RNA, 19 nt, Artificial Sequence
  Description of Artificial Sequence: Synthetic oligonucleotide
gguggauaaacaauguuag

SEQ ID NO: 2152091 - RNA, 19 nt, Artificial Sequence
  Description of Artificial Sequence: Synthetic oligonucleotide
ucugcuaaugaaagcugca

SEQ ID NO: 2152092 - RNA, 19 nt, Artificial Sequence
  Description of Artificial Sequence: Synthetic oligonucleotide
aaacaauguuagugcaaug

SEQ ID NO: 2152093 - RNA, 19 nt, Artificial Sequence
  Description of Artificial Sequence: Synthetic oligonucleotide
ucacguaaggggaugucca

SEQ ID NO: 2152094 - RNA, 19 nt, Artificial Sequence
  Description of Artificial Sequence: Synthetic oligonucleotide
cauugaaucgauguaaaca

SEQ ID NO: 2152095 - RNA, 19 nt, Artificial Sequence
  Description of Artificial Sequence: Synthetic oligonucleotide
uuuaaaguguaagggugug

SEQ ID NO: 2152096 - RNA, 19 nt, Artificial Sequence
  Description of Artificial Sequence: Synthetic oligonucleotide
ucuuuucaggccugaacug

SEQ ID NO: 2152097 - RNA, 19 nt, Artificial Sequence
  Description of Artificial Sequence: Synthetic oligonucleotide
aagagcauuucugcuaaug

SEQ ID NO: 2152098 - RNA, 19 nt, Artificial Sequence
  Description of Artificial Sequence: Synthetic oligonucleotide
uccuggucagaaaaccugc

SEQ ID NO: 2152099 - RNA, 19 nt, Artificial Sequence
  Description of Artificial Sequence: Synthetic oligonucleotide
uguuucgacacccuccaau

SEQ ID NO: 2152100 - RNA, 19 nt, Artificial Sequence
  Description of Artificial Sequence: Synthetic oligonucleotide
uuuaguguccaagaagaau

SEQ ID NO: 2152101 - RNA, 19 nt, Artificial Sequence
  Description of Artificial Sequence: Synthetic oligonucleotide
ggacauagcucccaacucg

SEQ ID NO: 2152102 - RNA, 19 nt, Artificial Sequence
  Description of Artificial Sequence: Synthetic oligonucleotide
aaaguguaagggugugacu

SEQ ID NO: 2152103 - RNA, 19 nt, Artificial Sequence
  Description of Artificial Sequence: Synthetic oligonucleotide
gaaugcauaucccauugaa

SEQ ID NO: 2152104 - RNA, 19 nt, Artificial Sequence
  Description of Artificial Sequence: Synthetic oligonucleotide
gaauaugagcuaugguuuc

SEQ ID NO: 2152105 - RNA, 19 nt, Artificial Sequence
  Description of Artificial Sequence: Synthetic oligonucleotide
uaaacagaggcagugugaa

SEQ ID NO: 2152106 - RNA, 19 nt, Artificial Sequence
  Description of Artificial Sequence: Synthetic oligonucleotide
agaagagcauuucugcuaa

SEQ ID NO: 2152107 - RNA, 19 nt, Artificial Sequence
  Description of Artificial Sequence: Synthetic oligonucleotide
aucuguaaagcaugauucu

SEQ ID NO: 2152108 - RNA, 19 nt, Artificial Sequence
  Description of Artificial Sequence: Synthetic oligonucleotide
caaauuuggcauuacguaa

SEQ ID NO: 2152109 - RNA, 19 nt, Artificial Sequence
  Description of Artificial Sequence: Synthetic oligonucleotide
auagaugagcuuugcuuug

SEQ ID NO: 2152110 - RNA, 19 nt, Artificial Sequence
  Description of Artificial Sequence: Synthetic oligonucleotide
uuacucgaagcucaucauc

SEQ ID NO: 2152111 - RNA, 19 nt, Artificial Sequence
  Description of Artificial Sequence: Synthetic oligonucleotide
uccaagaagaauucaccau

SEQ ID NO: 2152112 - RNA, 19 nt, Artificial Sequence
  Description of Artificial Sequence: Synthetic oligonucleotide
gacauagcucccaacucgg

SEQ ID NO: 2152113 - RNA, 19 nt, Artificial Sequence
  Description of Artificial Sequence: Synthetic oligonucleotide
auuguugcuucagauaggu

SEQ ID NO: 2152114 - RNA, 19 nt, Artificial Sequence
  Description of Artificial Sequence: Synthetic oligonucleotide
agugggguaguggacauag

SEQ ID NO: 2152115 - RNA, 19 nt, Artificial Sequence
  Description of Artificial Sequence: Synthetic oligonucleotide
aaggauaauugugccagcu

SEQ ID NO: 2152116 - RNA, 19 nt, Artificial Sequence
  Description of Artificial Sequence: Synthetic oligonucleotide
uuaaauccaguguuuugau

SEQ ID NO: 2152117 - RNA, 19 nt, Artificial Sequence
  Description of Artificial Sequence: Synthetic oligonucleotide
ggguaguggacauagcucc

SEQ ID NO: 2152118 - RNA, 19 nt, Artificial Sequence
  Description of Artificial Sequence: Synthetic oligonucleotide
ucuuuucugcagauagaga

SEQ ID NO: 2152119 - RNA, 19 nt, Artificial Sequence
  Description of Artificial Sequence: Synthetic oligonucleotide
ugugagcaaggauaauugu

SEQ ID NO: 2152120 - RNA, 19 nt, Artificial Sequence
  Description of Artificial Sequence: Synthetic oligonucleotide
augaaagcugcauuauuaa

SEQ ID NO: 2152121 - RNA, 19 nt, Artificial Sequence
  Description of Artificial Sequence: Synthetic oligonucleotide
agugagagaauaugguuua

SEQ ID NO: 2152122 - RNA, 19 nt, Artificial Sequence
  Description of Artificial Sequence: Synthetic oligonucleotide
aauaugagcuaugguuuca

SEQ ID NO: 2152123 - RNA, 19 nt, Artificial Sequence
  Description of Artificial Sequence: Synthetic oligonucleotide
uacagagagcaugucagug

SEQ ID NO: 2152124 - RNA, 19 nt, Artificial Sequence
  Description of Artificial Sequence: Synthetic oligonucleotide
agaauaugagcuaugguuu

SEQ ID NO: 2152125 - RNA, 19 nt, Artificial Sequence
  Description of Artificial Sequence: Synthetic oligonucleotide
ccuauguauuuaaacagag

SEQ ID NO: 2152126 - RNA, 19 nt, Artificial Sequence
  Description of Artificial Sequence: Synthetic oligonucleotide
aauaaggacuaaguuuaaa

SEQ ID NO: 2152127 - RNA, 19 nt, Artificial Sequence
  Description of Artificial Sequence: Synthetic oligonucleotide
acagugagagaauaugguu

SEQ ID NO: 2152128 - RNA, 19 nt, Artificial Sequence
  Description of Artificial Sequence: Synthetic oligonucleotide
aagcaaacaaauaguaaua

SEQ ID NO: 2152129 - RNA, 19 nt, Artificial Sequence
  Description of Artificial Sequence: Synthetic oligonucleotide
aaugcauaucccauugaau

SEQ ID NO: 2152130 - RNA, 19 nt, Artificial Sequence
  Description of Artificial Sequence: Synthetic oligonucleotide
caucacugcaagaaccaac

SEQ ID NO: 2152131 - RNA, 19 nt, Artificial Sequence
  Description of Artificial Sequence: Synthetic oligonucleotide
cucuccgccagaaauccag

SEQ ID NO: 2152132 - RNA, 19 nt, Artificial Sequence
  Description of Artificial Sequence: Synthetic oligonucleotide
caucuuuguuucgacaccc

SEQ ID NO: 2152133 - RNA, 19 nt, Artificial Sequence
  Description of Artificial Sequence: Synthetic oligonucleotide
gguuuaguguccaagaaga

SEQ ID NO: 2152134 - RNA, 19 nt, Artificial Sequence
  Description of Artificial Sequence: Synthetic oligonucleotide
auugugagcaaggauaauu

SEQ ID NO: 2152135 - RNA, 19 nt, Artificial Sequence
  Description of Artificial Sequence: Synthetic oligonucleotide
gauagugggguaguggaca

SEQ ID NO: 2152136 - RNA, 19 nt, Artificial Sequence
  Description of Artificial Sequence: Synthetic oligonucleotide
cucagauaguuuucucagc

SEQ ID NO: 2152137 - RNA, 19 nt, Artificial Sequence
  Description of Artificial Sequence: Synthetic oligonucleotide
ucuuuguuucgacacccuc

SEQ ID NO: 2152138 - RNA, 19 nt, Artificial Sequence
  Description of Artificial Sequence: Synthetic oligonucleotide
cagaaauccaguuauuugu

SEQ ID NO: 2152139 - RNA, 19 nt, Artificial Sequence
  Description of Artificial Sequence: Synthetic oligonucleotide
auuccacaugguaugcagc

SEQ ID NO: 2152140 - RNA, 19 nt, Artificial Sequence
  Description of Artificial Sequence: Synthetic oligonucleotide
gugagcaaggauaauugug

SEQ ID NO: 2152141 - RNA, 19 nt, Artificial Sequence
  Description of Artificial Sequence: Synthetic oligonucleotide
aggauaauugugccagcug

SEQ ID NO: 2152142 - RNA, 19 nt, Artificial Sequence
  Description of Artificial Sequence: Synthetic oligonucleotide
uuuucucacguaaggggau

SEQ ID NO: 2152143 - RNA, 19 nt, Artificial Sequence
  Description of Artificial Sequence: Synthetic oligonucleotide
uaugagcuaugguuucagc

SEQ ID NO: 2152144 - RNA, 19 nt, Artificial Sequence
  Description of Artificial Sequence: Synthetic oligonucleotide
caagaagaauucaccauga

SEQ ID NO: 2152145 - RNA, 19 nt, Artificial Sequence
  Description of Artificial Sequence: Synthetic oligonucleotide
agcugcauuauuaaaucca

SEQ ID NO: 2152146 - RNA, 19 nt, Artificial Sequence
  Description of Artificial Sequence: Synthetic oligonucleotide
agcaaggauaauugugcca

SEQ ID NO: 2152147 - RNA, 19 nt, Artificial Sequence
  Description of Artificial Sequence: Synthetic oligonucleotide
gacacccuccaauaaggac

SEQ ID NO: 2152148 - RNA, 19 nt, Artificial Sequence
  Description of Artificial Sequence: Synthetic oligonucleotide
ucccauugaaucgauguaa

SEQ ID NO: 2152149 - RNA, 19 nt, Artificial Sequence
  Description of Artificial Sequence: Synthetic oligonucleotide
caguuauuuguccuucaug

SEQ ID NO: 2152150 - RNA, 19 nt, Artificial Sequence
  Description of Artificial Sequence: Synthetic oligonucleotide
gaacuggccaauggaaacc

SEQ ID NO: 2152151 - RNA, 19 nt, Artificial Sequence
  Description of Artificial Sequence: Synthetic oligonucleotide
gagcauuucugcuaaugaa

SEQ ID NO: 2152152 - RNA, 19 nt, Artificial Sequence
  Description of Artificial Sequence: Synthetic oligonucleotide
uguccagaaaugucugcac

SEQ ID NO: 2152153 - RNA, 19 nt, Artificial Sequence
  Description of Artificial Sequence: Synthetic oligonucleotide
uggacauagcucccaacuc

SEQ ID NO: 2152154 - RNA, 19 nt, Artificial Sequence
  Description of Artificial Sequence: Synthetic oligonucleotide
cuccuggucagaaaaccug

SEQ ID NO: 2152155 - RNA, 19 nt, Artificial Sequence
  Description of Artificial Sequence: Synthetic oligonucleotide
gauagguaauucuucaauu

SEQ ID NO: 2152156 - RNA, 19 nt, Artificial Sequence
  Description of Artificial Sequence: Synthetic oligonucleotide
cacaucacaagguggauaa

SEQ ID NO: 2152157 - RNA, 19 nt, Artificial Sequence
  Description of Artificial Sequence: Synthetic oligonucleotide
gaagccucuuuucugcaga

SEQ ID NO: 2152158 - RNA, 19 nt, Artificial Sequence
  Description of Artificial Sequence: Synthetic oligonucleotide
ugauagugggguaguggac

SEQ ID NO: 2152159 - RNA, 19 nt, Artificial Sequence
  Description of Artificial Sequence: Synthetic oligonucleotide
uuaaaguguaaggguguga

SEQ ID NO: 2152160 - RNA, 19 nt, Artificial Sequence
  Description of Artificial Sequence: Synthetic oligonucleotide
cagugugaaugcauauccc

SEQ ID NO: 2152161 - RNA, 19 nt, Artificial Sequence
  Description of Artificial Sequence: Synthetic oligonucleotide
gaauugugagcaaggauaa

SEQ ID NO: 2152162 - RNA, 19 nt, Artificial Sequence
  Description of Artificial Sequence: Synthetic oligonucleotide
ccaauaaggacuaaguuua

SEQ ID NO: 2152163 - RNA, 19 nt, Artificial Sequence
  Description of Artificial Sequence: Synthetic oligonucleotide
uguaagggugugacucagc

SEQ ID NO: 2152164 - RNA, 19 nt, Artificial Sequence
  Description of Artificial Sequence: Synthetic oligonucleotide
ucacucuccgccagaaauc

SEQ ID NO: 2152165 - RNA, 19 nt, Artificial Sequence
  Description of Artificial Sequence: Synthetic oligonucleotide
auaugagcuaugguuucag

SEQ ID NO: 2152166 - RNA, 19 nt, Artificial Sequence
  Description of Artificial Sequence: Synthetic oligonucleotide
cucacguaaggggaugucc

SEQ ID NO: 2152167 - RNA, 19 nt, Artificial Sequence
  Description of Artificial Sequence: Synthetic oligonucleotide
auaguuuucucagcuggcu

SEQ ID NO: 2152168 - RNA, 19 nt, Artificial Sequence
  Description of Artificial Sequence: Synthetic oligonucleotide
gaggaaugacaaugucaag

SEQ ID NO: 2152169 - RNA, 19 nt, Artificial Sequence
  Description of Artificial Sequence: Synthetic oligonucleotide
augguuuaguguccaagaa

SEQ ID NO: 2152170 - RNA, 19 nt, Artificial Sequence
  Description of Artificial Sequence: Synthetic oligonucleotide
cuggcuuacucgaagcuca

SEQ ID NO: 2152171 - RNA, 19 nt, Artificial Sequence
  Description of Artificial Sequence: Synthetic oligonucleotide
ccccuauguauuuaaacag

SEQ ID NO: 2152172 - RNA, 19 nt, Artificial Sequence
  Description of Artificial Sequence: Synthetic oligonucleotide
gaaccaacaagaccauaaa

SEQ ID NO: 2152173 - RNA, 19 nt, Artificial Sequence
  Description of Artificial Sequence: Synthetic oligonucleotide
agcuuugcuuugcugagaa

SEQ ID NO: 2152174 - RNA, 19 nt, Artificial Sequence
  Description of Artificial Sequence: Synthetic oligonucleotide
uccgccagaaauccaguua

SEQ ID NO: 2152175 - RNA, 19 nt, Artificial Sequence
  Description of Artificial Sequence: Synthetic oligonucleotide
uuucgacacccuccaauaa

SEQ ID NO: 2152176 - RNA, 19 nt, Artificial Sequence
  Description of Artificial Sequence: Synthetic oligonucleotide
ucaagcuuugggccuccug

SEQ ID NO: 2152177 - RNA, 19 nt, Artificial Sequence
  Description of Artificial Sequence: Synthetic oligonucleotide
gccaacuuuccacagugag

SEQ ID NO: 2152178 - RNA, 19 nt, Artificial Sequence
  Description of Artificial Sequence: Synthetic oligonucleotide
cucacagacgcucgagcag

SEQ ID NO: 2152179 - RNA, 19 nt, Artificial Sequence
  Description of Artificial Sequence: Synthetic oligonucleotide
gcucauuccacaugguaug

SEQ ID NO: 2152180 - RNA, 19 nt, Artificial Sequence
  Description of Artificial Sequence: Synthetic oligonucleotide
agaaauuaucuagaauguu

SEQ ID NO: 2152181 - RNA, 19 nt, Artificial Sequence
  Description of Artificial Sequence: Synthetic oligonucleotide
cugcaagaaccaacaagac

SEQ ID NO: 2152182 - RNA, 19 nt, Artificial Sequence
  Description of Artificial Sequence: Synthetic oligonucleotide
agaauucaccaugacuaca

SEQ ID NO: 2152183 - RNA, 19 nt, Artificial Sequence
  Description of Artificial Sequence: Synthetic oligonucleotide
cucgacaauuccaauccca

SEQ ID NO: 2152184 - RNA, 19 nt, Artificial Sequence
  Description of Artificial Sequence: Synthetic oligonucleotide
uguccuucaugaggaauga

SEQ ID NO: 2152185 - RNA, 19 nt, Artificial Sequence
  Description of Artificial Sequence: Synthetic oligonucleotide
uugcuuugcugagaagagc

SEQ ID NO: 2152186 - RNA, 19 nt, Artificial Sequence
  Description of Artificial Sequence: Synthetic oligonucleotide
ugccauacacucgacaauu

SEQ ID NO: 2152187 - RNA, 19 nt, Artificial Sequence
  Description of Artificial Sequence: Synthetic oligonucleotide
auaaacaauguuagugcaa

SEQ ID NO: 2152188 - RNA, 19 nt, Artificial Sequence
  Description of Artificial Sequence: Synthetic oligonucleotide
gcaaacaaauaguaauaga

SEQ ID NO: 2152189 - RNA, 19 nt, Artificial Sequence
  Description of Artificial Sequence: Synthetic oligonucleotide
uuucucacguaaggggaug

SEQ ID NO: 2152190 - RNA, 19 nt, Artificial Sequence
  Description of Artificial Sequence: Synthetic oligonucleotide
cacucuccgccagaaaucc

SEQ ID NO: 2152191 - RNA, 19 nt, Artificial Sequence
  Description of Artificial Sequence: Synthetic oligonucleotide
ucccaaauucucagauagu

SEQ ID NO: 2152192 - RNA, 19 nt, Artificial Sequence
  Description of Artificial Sequence: Synthetic oligonucleotide
acuuccccacagaagacag

SEQ ID NO: 2152193 - RNA, 19 nt, Artificial Sequence
  Description of Artificial Sequence: Synthetic oligonucleotide
ggaaugacaaugucaagcu

SEQ ID NO: 2152194 - RNA, 19 nt, Artificial Sequence
  Description of Artificial Sequence: Synthetic oligonucleotide
agcugcuuucucauuuaac

SEQ ID NO: 2152195 - RNA, 19 nt, Artificial Sequence
  Description of Artificial Sequence: Synthetic oligonucleotide
guuucgacacccuccaaua

SEQ ID NO: 2152196 - RNA, 19 nt, Artificial Sequence
  Description of Artificial Sequence: Synthetic oligonucleotide
ugcuucagauagguaauuc

SEQ ID NO: 2152197 - RNA, 19 nt, Artificial Sequence
  Description of Artificial Sequence: Synthetic oligonucleotide
cccaaaaugcucauuccac

SEQ ID NO: 2152198 - RNA, 19 nt, Artificial Sequence
  Description of Artificial Sequence: Synthetic oligonucleotide
guaagggugugacucagcu

SEQ ID NO: 2152199 - RNA, 19 nt, Artificial Sequence
  Description of Artificial Sequence: Synthetic oligonucleotide
uuccacagugagagaauau

SEQ ID NO: 2152200 - RNA, 19 nt, Artificial Sequence
  Description of Artificial Sequence: Synthetic oligonucleotide
auacacucgacaauuccaa

SEQ ID NO: 2152201 - RNA, 19 nt, Artificial Sequence
  Description of Artificial Sequence: Synthetic oligonucleotide
cacguaaggggauguccag

SEQ ID NO: 2152202 - RNA, 19 nt, Artificial Sequence
  Description of Artificial Sequence: Synthetic oligonucleotide
ucauuccacaugguaugca

SEQ ID NO: 2152203 - RNA, 19 nt, Artificial Sequence
  Description of Artificial Sequence: Synthetic oligonucleotide
caauggccaacuuuccaca

SEQ ID NO: 2152204 - RNA, 19 nt, Artificial Sequence
  Description of Artificial Sequence: Synthetic oligonucleotide
cucauuccacaugguaugc

SEQ ID NO: 2152205 - RNA, 19 nt, Artificial Sequence
  Description of Artificial Sequence: Synthetic oligonucleotide
aacuuuccacagugagaga

SEQ ID NO: 2152206 - RNA, 19 nt, Artificial Sequence
  Description of Artificial Sequence: Synthetic oligonucleotide
uccuucugauuugaagccu

SEQ ID NO: 2152207 - RNA, 19 nt, Artificial Sequence
  Description of Artificial Sequence: Synthetic oligonucleotide
ucaggccugaacuggccaa

SEQ ID NO: 2152208 - RNA, 19 nt, Artificial Sequence
  Description of Artificial Sequence: Synthetic oligonucleotide
agagagaauaugagcuaug

SEQ ID NO: 2152209 - RNA, 19 nt, Artificial Sequence
  Description of Artificial Sequence: Synthetic oligonucleotide
ugacuacaucacugcaaga

SEQ ID NO: 2152210 - RNA, 19 nt, Artificial Sequence
  Description of Artificial Sequence: Synthetic oligonucleotide
cuccauuuuguagaaauua

SEQ ID NO: 2152211 - RNA, 19 nt, Artificial Sequence
  Description of Artificial Sequence: Synthetic oligonucleotide
cuccugaauugugagcaag

SEQ ID NO: 2152212 - RNA, 19 nt, Artificial Sequence
  Description of Artificial Sequence: Synthetic oligonucleotide
auagugggguaguggacau

SEQ ID NO: 2152213 - RNA, 19 nt, Artificial Sequence
  Description of Artificial Sequence: Synthetic oligonucleotide
cucccaacucggcagcccc

SEQ ID NO: 2152214 - RNA, 19 nt, Artificial Sequence
  Description of Artificial Sequence: Synthetic oligonucleotide
agcuaugguuucagcauag

SEQ ID NO: 2152215 - RNA, 19 nt, Artificial Sequence
  Description of Artificial Sequence: Synthetic oligonucleotide
cugaacuggccaauggaaa

SEQ ID NO: 2152216 - RNA, 19 nt, Artificial Sequence
  Description of Artificial Sequence: Synthetic oligonucleotide
augucaagcuuugggccuc

SEQ ID NO: 2152217 - RNA, 19 nt, Artificial Sequence
  Description of Artificial Sequence: Synthetic oligonucleotide
ucacugcaagaaccaacaa

SEQ ID NO: 2152218 - RNA, 19 nt, Artificial Sequence
  Description of Artificial Sequence: Synthetic oligonucleotide
ggcuuugaucuguaaagca

SEQ ID NO: 2152219 - RNA, 19 nt, Artificial Sequence
  Description of Artificial Sequence: Synthetic oligonucleotide
guaauagaugagcuuugcu

SEQ ID NO: 2152220 - RNA, 19 nt, Artificial Sequence
  Description of Artificial Sequence: Synthetic oligonucleotide
gagcaguccuucugauuug

SEQ ID NO: 2152221 - RNA, 19 nt, Artificial Sequence
  Description of Artificial Sequence: Synthetic oligonucleotide
aggggauguccagaaaugu

SEQ ID NO: 2152222 - RNA, 19 nt, Artificial Sequence
  Description of Artificial Sequence: Synthetic oligonucleotide
ugauucuuuucaggccuga

SEQ ID NO: 2152223 - RNA, 19 nt, Artificial Sequence
  Description of Artificial Sequence: Synthetic oligonucleotide
ucuccgccagaaauccagu

SEQ ID NO: 2152224 - RNA, 19 nt, Artificial Sequence
  Description of Artificial Sequence: Synthetic oligonucleotide
aauugugagcaaggauaau

SEQ ID NO: 2152225 - RNA, 19 nt, Artificial Sequence
  Description of Artificial Sequence: Synthetic oligonucleotide
guuuaaaguguaagggugu

SEQ ID NO: 2152226 - RNA, 19 nt, Artificial Sequence
  Description of Artificial Sequence: Synthetic oligonucleotide
cacagugagagaauauggu

SEQ ID NO: 2152227 - RNA, 19 nt, Artificial Sequence
  Description of Artificial Sequence: Synthetic oligonucleotide
auguccuggggucaccuuu

SEQ ID NO: 2152228 - RNA, 19 nt, Artificial Sequence
  Description of Artificial Sequence: Synthetic oligonucleotide
acucccaaauucucagaua

SEQ ID NO: 2152229 - RNA, 19 nt, Artificial Sequence
  Description of Artificial Sequence: Synthetic oligonucleotide
agcccaauuguugcuucag

SEQ ID NO: 2152230 - RNA, 19 nt, Artificial Sequence
  Description of Artificial Sequence: Synthetic oligonucleotide
gugagagaauaugguuuag

SEQ ID NO: 2152231 - RNA, 19 nt, Artificial Sequence
  Description of Artificial Sequence: Synthetic oligonucleotide
acuccuggucagaaaaccu

SEQ ID NO: 2152232 - RNA, 19 nt, Artificial Sequence
  Description of Artificial Sequence: Synthetic oligonucleotide
uugaucuguaaagcaugau

SEQ ID NO: 2152233 - RNA, 19 nt, Artificial Sequence
  Description of Artificial Sequence: Synthetic oligonucleotide
cagauagguaauucuucaa

SEQ ID NO: 2152234 - RNA, 19 nt, Artificial Sequence
  Description of Artificial Sequence: Synthetic oligonucleotide
gagagagaauaugagcuau

SEQ ID NO: 2152235 - RNA, 19 nt, Artificial Sequence
  Description of Artificial Sequence: Synthetic oligonucleotide
ggccugaacuggccaaugg

SEQ ID NO: 2152236 - RNA, 19 nt, Artificial Sequence
  Description of Artificial Sequence: Synthetic oligonucleotide
aggcagugugaaugcauau

SEQ ID NO: 2152237 - RNA, 19 nt, Artificial Sequence
  Description of Artificial Sequence: Synthetic oligonucleotide
aaaccugcucacagacgcu

SEQ ID NO: 2152238 - RNA, 19 nt, Artificial Sequence
  Description of Artificial Sequence: Synthetic oligonucleotide
aagaaccaacaagaccaua

SEQ ID NO: 2152239 - RNA, 19 nt, Artificial Sequence
  Description of Artificial Sequence: Synthetic oligonucleotide
ugcugauagugggguagug

SEQ ID NO: 2152240 - RNA, 19 nt, Artificial Sequence
  Description of Artificial Sequence: Synthetic oligonucleotide
augcagcccaauuguugcu

SEQ ID NO: 2152241 - RNA, 19 nt, Artificial Sequence
  Description of Artificial Sequence: Synthetic oligonucleotide
caagguggauaaacaaugu

SEQ ID NO: 2152242 - RNA, 19 nt, Artificial Sequence
  Description of Artificial Sequence: Synthetic oligonucleotide
agcaguccuucugauuuga

SEQ ID NO: 2152243 - RNA, 19 nt, Artificial Sequence
  Description of Artificial Sequence: Synthetic oligonucleotide
cugauuugaagccucuuuu

SEQ ID NO: 2152244 - RNA, 19 nt, Artificial Sequence
  Description of Artificial Sequence: Synthetic oligonucleotide
ugguuucagcauagccuuc

SEQ ID NO: 2152245 - RNA, 19 nt, Artificial Sequence
  Description of Artificial Sequence: Synthetic oligonucleotide
gcauuacguaaguaacuuc

SEQ ID NO: 2152246 - RNA, 19 nt, Artificial Sequence
  Description of Artificial Sequence: Synthetic oligonucleotide
cccuauguauuuaaacaga

SEQ ID NO: 2152247 - RNA, 19 nt, Artificial Sequence
  Description of Artificial Sequence: Synthetic oligonucleotide
gaggcagugugaaugcaua

SEQ ID NO: 2152248 - RNA, 19 nt, Artificial Sequence
  Description of Artificial Sequence: Synthetic oligonucleotide
gucagaaaaccugcucaca

SEQ ID NO: 2152249 - RNA, 19 nt, Artificial Sequence
  Description of Artificial Sequence: Synthetic oligonucleotide
guggauaaacaauguuagu

SEQ ID NO: 2152250 - RNA, 19 nt, Artificial Sequence
  Description of Artificial Sequence: Synthetic oligonucleotide
auaucccauugaaucgaug

SEQ ID NO: 2152251 - RNA, 19 nt, Artificial Sequence
  Description of Artificial Sequence: Synthetic oligonucleotide
agaggcagugugaaugcau

SEQ ID NO: 2152252 - RNA, 19 nt, Artificial Sequence
  Description of Artificial Sequence: Synthetic oligonucleotide
caauaaggacuaaguuuaa

SEQ ID NO: 2152253 - RNA, 19 nt, Artificial Sequence
  Description of Artificial Sequence: Synthetic oligonucleotide
agcuuugggccuccugaau

SEQ ID NO: 2152254 - RNA, 19 nt, Artificial Sequence
  Description of Artificial Sequence: Synthetic oligonucleotide
guuuaguguccaagaagaa

SEQ ID NO: 2152255 - RNA, 19 nt, Artificial Sequence
  Description of Artificial Sequence: Synthetic oligonucleotide
gcauaucccauugaaucga

SEQ ID NO: 2152256 - RNA, 19 nt, Artificial Sequence
  Description of Artificial Sequence: Synthetic oligonucleotide
guauuuaaacagaggcagu

SEQ ID NO: 2152257 - RNA, 19 nt, Artificial Sequence
  Description of Artificial Sequence: Synthetic oligonucleotide
ucucacguaaggggauguc

SEQ ID NO: 2152258 - RNA, 19 nt, Artificial Sequence
  Description of Artificial Sequence: Synthetic oligonucleotide
uuguuucgacacccuccaa

SEQ ID NO: 2152259 - RNA, 19 nt, Artificial Sequence
  Description of Artificial Sequence: Synthetic oligonucleotide
ugcagcccaauuguugcuu

SEQ ID NO: 2152260 - RNA, 19 nt, Artificial Sequence
  Description of Artificial Sequence: Synthetic oligonucleotide
acaucacugcaagaaccaa

SEQ ID NO: 2152261 - RNA, 19 nt, Artificial Sequence
  Description of Artificial Sequence: Synthetic oligonucleotide
uucugauuugaagccucuu

SEQ ID NO: 2152262 - RNA, 19 nt, Artificial Sequence
  Description of Artificial Sequence: Synthetic oligonucleotide
uugcuucagauagguaauu

SEQ ID NO: 2152263 - RNA, 19 nt, Artificial Sequence
  Description of Artificial Sequence: Synthetic oligonucleotide
cugaauugugagcaaggau

SEQ ID NO: 2152264 - RNA, 19 nt, Artificial Sequence
  Description of Artificial Sequence: Synthetic oligonucleotide
uggcuuacucgaagcucau

SEQ ID NO: 2152265 - RNA, 19 nt, Artificial Sequence
  Description of Artificial Sequence: Synthetic oligonucleotide
cuaaugaaagcugcauuau

SEQ ID NO: 2152266 - RNA, 19 nt, Artificial Sequence
  Description of Artificial Sequence: Synthetic oligonucleotide
gguaguggacauagcuccc

SEQ ID NO: 2152267 - RNA, 19 nt, Artificial Sequence
  Description of Artificial Sequence: Synthetic oligonucleotide
aucuuuguuucgacacccu

SEQ ID NO: 2152268 - RNA, 19 nt, Artificial Sequence
  Description of Artificial Sequence: Synthetic oligonucleotide
ggcagugugaaugcauauc

SEQ ID NO: 2152269 - RNA, 19 nt, Artificial Sequence
  Description of Artificial Sequence: Synthetic oligonucleotide
cuccaauaaggacuaaguu

SEQ ID NO: 2152270 - RNA, 19 nt, Artificial Sequence
  Description of Artificial Sequence: Synthetic oligonucleotide
gggguaguggacauagcuc

SEQ ID NO: 2152271 - RNA, 19 nt, Artificial Sequence
  Description of Artificial Sequence: Synthetic oligonucleotide
ccugaacuggccaauggaa

SEQ ID NO: 2152272 - RNA, 19 nt, Artificial Sequence
  Description of Artificial Sequence: Synthetic oligonucleotide
guaaggggauguccagaaa

SEQ ID NO: 2152273 - RNA, 19 nt, Artificial Sequence
  Description of Artificial Sequence: Synthetic oligonucleotide
cugcucacagacgcucgag

SEQ ID NO: 2152274 - RNA, 19 nt, Artificial Sequence
  Description of Artificial Sequence: Synthetic oligonucleotide
ucacuacagagagcauguc

SEQ ID NO: 2152275 - RNA, 19 nt, Artificial Sequence
  Description of Artificial Sequence: Synthetic oligonucleotide
gacgcucgagcaguccuuc

SEQ ID NO: 2152276 - RNA, 19 nt, Artificial Sequence
  Description of Artificial Sequence: Synthetic oligonucleotide
cacccuccaauaaggacua

SEQ ID NO: 2152277 - RNA, 19 nt, Artificial Sequence
  Description of Artificial Sequence: Synthetic oligonucleotide
cuuacucgaagcucaucau

SEQ ID NO: 2152278 - RNA, 19 nt, Artificial Sequence
  Description of Artificial Sequence: Synthetic oligonucleotide
ccaauuguugcuucagaua

SEQ ID NO: 2152279 - RNA, 19 nt, Artificial Sequence
  Description of Artificial Sequence: Synthetic oligonucleotide
augacacuucaaacuccug

SEQ ID NO: 2152280 - RNA, 19 nt, Artificial Sequence
  Description of Artificial Sequence: Synthetic oligonucleotide
gagcuuugcuuugcugaga

SEQ ID NO: 2152281 - RNA, 19 nt, Artificial Sequence
  Description of Artificial Sequence: Synthetic oligonucleotide
ggacuaaguuuaaagugua

SEQ ID NO: 2152282 - RNA, 19 nt, Artificial Sequence
  Description of Artificial Sequence: Synthetic oligonucleotide
gcucgagcaguccuucuga

SEQ ID NO: 2152283 - RNA, 19 nt, Artificial Sequence
  Description of Artificial Sequence: Synthetic oligonucleotide
caugguaugcagcccaauu

SEQ ID NO: 2152284 - RNA, 19 nt, Artificial Sequence
  Description of Artificial Sequence: Synthetic oligonucleotide
cacagacgcucgagcaguc

SEQ ID NO: 2152285 - RNA, 19 nt, Artificial Sequence
  Description of Artificial Sequence: Synthetic oligonucleotide
ccuccaauaaggacuaagu

SEQ ID NO: 2152286 - RNA, 19 nt, Artificial Sequence
  Description of Artificial Sequence: Synthetic oligonucleotide
cuacagagagcaugucagu

SEQ ID NO: 2152287 - RNA, 19 nt, Artificial Sequence
  Description of Artificial Sequence: Synthetic oligonucleotide
gcuuugcuuugcugagaag

SEQ ID NO: 2152288 - RNA, 19 nt, Artificial Sequence
  Description of Artificial Sequence: Synthetic oligonucleotide
cuucaugaggaaugacaau

SEQ ID NO: 2152289 - RNA, 19 nt, Artificial Sequence
  Description of Artificial Sequence: Synthetic oligonucleotide
gcuuugaucuguaaagcau

SEQ ID NO: 2152290 - RNA, 19 nt, Artificial Sequence
  Description of Artificial Sequence: Synthetic oligonucleotide
gcuggcuuacucgaagcuc

SEQ ID NO: 2152291 - RNA, 19 nt, Artificial Sequence
  Description of Artificial Sequence: Synthetic oligonucleotide
uugugccagcugccauaca

SEQ ID NO: 2152292 - RNA, 19 nt, Artificial Sequence
  Description of Artificial Sequence: Synthetic oligonucleotide
aggccugaacuggccaaug

SEQ ID NO: 2152293 - RNA, 19 nt, Artificial Sequence
  Description of Artificial Sequence: Synthetic oligonucleotide
cagcccaauuguugcuuca

SEQ ID NO: 2152294 - RNA, 19 nt, Artificial Sequence
  Description of Artificial Sequence: Synthetic oligonucleotide
ggacucccaaauucucaga

SEQ ID NO: 2152295 - RNA, 19 nt, Artificial Sequence
  Description of Artificial Sequence: Synthetic oligonucleotide
cacaugguaugcagcccaa

SEQ ID NO: 2152296 - RNA, 19 nt, Artificial Sequence
  Description of Artificial Sequence: Synthetic oligonucleotide
ggcauuacguaaguaacuu

SEQ ID NO: 2152297 - RNA, 19 nt, Artificial Sequence
  Description of Artificial Sequence: Synthetic oligonucleotide
guccuucaugaggaaugac

SEQ ID NO: 2152298 - RNA, 19 nt, Artificial Sequence
  Description of Artificial Sequence: Synthetic oligonucleotide
cucagcuggcuuacucgaa

SEQ ID NO: 2152299 - RNA, 19 nt, Artificial Sequence
  Description of Artificial Sequence: Synthetic oligonucleotide
cauaucccauugaaucgau

SEQ ID NO: 2152300 - RNA, 19 nt, Artificial Sequence
  Description of Artificial Sequence: Synthetic oligonucleotide
gcagcccaauuguugcuuc

SEQ ID NO: 2152301 - RNA, 19 nt, Artificial Sequence
  Description of Artificial Sequence: Synthetic oligonucleotide
acgcucgagcaguccuucu

SEQ ID NO: 2152302 - RNA, 19 nt, Artificial Sequence
  Description of Artificial Sequence: Synthetic oligonucleotide
acaucacaagguggauaaa

SEQ ID NO: 2152303 - RNA, 19 nt, Artificial Sequence
  Description of Artificial Sequence: Synthetic oligonucleotide
cugcuaaugaaagcugcau

SEQ ID NO: 2152304 - RNA, 19 nt, Artificial Sequence
  Description of Artificial Sequence: Synthetic oligonucleotide
cguaaggggauguccagaa

SEQ ID NO: 2152305 - RNA, 19 nt, Artificial Sequence
  Description of Artificial Sequence: Synthetic oligonucleotide
ggaaaccagcaaauguccu

SEQ ID NO: 2152306 - RNA, 19 nt, Artificial Sequence
  Description of Artificial Sequence: Synthetic oligonucleotide
cugccauacacucgacaau

SEQ ID NO: 2152307 - RNA, 19 nt, Artificial Sequence
  Description of Artificial Sequence: Synthetic oligonucleotide
acucuccgccagaaaucca

SEQ ID NO: 2152308 - RNA, 19 nt, Artificial Sequence
  Description of Artificial Sequence: Synthetic oligonucleotide
agacgcucgagcaguccuu

SEQ ID NO: 2152309 - RNA, 19 nt, Artificial Sequence
  Description of Artificial Sequence: Synthetic oligonucleotide
cgcucgagcaguccuucug

SEQ ID NO: 2152310 - RNA, 19 nt, Artificial Sequence
  Description of Artificial Sequence: Synthetic oligonucleotide
cucgagcaguccuucugau

SEQ ID NO: 2152311 - RNA, 19 nt, Artificial Sequence
  Description of Artificial Sequence: Synthetic oligonucleotide
ccgccagaaauccaguuau

SEQ ID NO: 2152312 - RNA, 19 nt, Artificial Sequence
  Description of Artificial Sequence: Synthetic oligonucleotide
ggcuuacucgaagcucauc

SEQ ID NO: 2152313 - RNA, 19 nt, Artificial Sequence
  Description of Artificial Sequence: Synthetic oligonucleotide
cuccgccagaaauccaguu

SEQ ID NO: 2152314 - RNA, 19 nt, Artificial Sequence
  Description of Artificial Sequence: Synthetic oligonucleotide
ccaguuauuuguccuucau

SEQ ID NO: 2152315 - RNA, 19 nt, Artificial Sequence
  Description of Artificial Sequence: Synthetic oligonucleotide
caggccugaacuggccaau

SEQ ID NO: 2152316 - RNA, 19 nt, Artificial Sequence
  Description of Artificial Sequence: Synthetic oligonucleotide
gucaagcuuugggccuccu

SEQ ID NO: 2152317 - RNA, 19 nt, Artificial Sequence
  Description of Artificial Sequence: Synthetic oligonucleotide
aauaccuaggaagacauag

SEQ ID NO: 2152318 - RNA, 19 nt, Artificial Sequence
  Description of Artificial Sequence: Synthetic oligonucleotide
aauagcgccuaucagagcu

SEQ ID NO: 2152319 - RNA, 19 nt, Artificial Sequence
  Description of Artificial Sequence: Synthetic oligonucleotide
uuuauguagaugaggauga

SEQ ID NO: 2152320 - RNA, 19 nt, Artificial Sequence
  Description of Artificial Sequence: Synthetic oligonucleotide
aagucuacaccucaugcag

SEQ ID NO: 2152321 - RNA, 19 nt, Artificial Sequence
  Description of Artificial Sequence: Synthetic oligonucleotide
gaaaauagcgccuaucaga

SEQ ID NO: 2152322 - RNA, 19 nt, Artificial Sequence
  Description of Artificial Sequence: Synthetic oligonucleotide
aaaauagcgccuaucagag

SEQ ID NO: 2152323 - RNA, 19 nt, Artificial Sequence
  Description of Artificial Sequence: Synthetic oligonucleotide
uucguaucuguaaugauac

SEQ ID NO: 2152324 - RNA, 19 nt, Artificial Sequence
  Description of Artificial Sequence: Synthetic oligonucleotide
auguagaugaggaugaaac

SEQ ID NO: 2152325 - RNA, 19 nt, Artificial Sequence
  Description of Artificial Sequence: Synthetic oligonucleotide
aaggaagugauugcuggcc

SEQ ID NO: 2152326 - RNA, 19 nt, Artificial Sequence
  Description of Artificial Sequence: Synthetic oligonucleotide
gaaaggaugcauaggaggg

SEQ ID NO: 2152327 - RNA, 19 nt, Artificial Sequence
  Description of Artificial Sequence: Synthetic oligonucleotide
ugccauucggccaaagugg

SEQ ID NO: 2152328 - RNA, 19 nt, Artificial Sequence
  Description of Artificial Sequence: Synthetic oligonucleotide
ugcgaaaggaugcauagga

SEQ ID NO: 2152329 - RNA, 19 nt, Artificial Sequence
  Description of Artificial Sequence: Synthetic oligonucleotide
acgguucaaauacaaaacg

SEQ ID NO: 2152330 - RNA, 19 nt, Artificial Sequence
  Description of Artificial Sequence: Synthetic oligonucleotide
ugaagucuacaccucaugc

SEQ ID NO: 2152331 - RNA, 19 nt, Artificial Sequence
  Description of Artificial Sequence: Synthetic oligonucleotide
aaugauacccuuccaugug

SEQ ID NO: 2152332 - RNA, 19 nt, Artificial Sequence
  Description of Artificial Sequence: Synthetic oligonucleotide
gugguugccacuuagguug

SEQ ID NO: 2152333 - RNA, 19 nt, Artificial Sequence
  Description of Artificial Sequence: Synthetic oligonucleotide
aaauacaaaacgaggagga

SEQ ID NO: 2152334 - RNA, 19 nt, Artificial Sequence
  Description of Artificial Sequence: Synthetic oligonucleotide
aaggauagcgucacagucc

SEQ ID NO: 2152335 - RNA, 19 nt, Artificial Sequence
  Description of Artificial Sequence: Synthetic oligonucleotide
ucagguugcgaaaggaugc

SEQ ID NO: 2152336 - RNA, 19 nt, Artificial Sequence
  Description of Artificial Sequence: Synthetic oligonucleotide
uguaaugauacccuuccau

SEQ ID NO: 2152337 - RNA, 19 nt, Artificial Sequence
  Description of Artificial Sequence: Synthetic oligonucleotide
uacgguucaaauacaaaac

SEQ ID NO: 2152338 - RNA, 19 nt, Artificial Sequence
  Description of Artificial Sequence: Synthetic oligonucleotide
uccagguacaccuugacau

SEQ ID NO: 2152339 - RNA, 19 nt, Artificial Sequence
  Description of Artificial Sequence: Synthetic oligonucleotide
uccgaguuggaacugaggu

SEQ ID NO: 2152340 - RNA, 19 nt, Artificial Sequence
  Description of Artificial Sequence: Synthetic oligonucleotide
uugccacuuagguugagcg

SEQ ID NO: 2152341 - RNA, 19 nt, Artificial Sequence
  Description of Artificial Sequence: Synthetic oligonucleotide
gauagcgucacaguccagg

SEQ ID NO: 2152342 - RNA, 19 nt, Artificial Sequence
  Description of Artificial Sequence: Synthetic oligonucleotide
uucgaggugugucagguug

SEQ ID NO: 2152343 - RNA, 19 nt, Artificial Sequence
  Description of Artificial Sequence: Synthetic oligonucleotide
guaaugauacccuuccaug

SEQ ID NO: 2152344 - RNA, 19 nt, Artificial Sequence
  Description of Artificial Sequence: Synthetic oligonucleotide
cugagguuuguuaaccugg

SEQ ID NO: 2152345 - RNA, 19 nt, Artificial Sequence
  Description of Artificial Sequence: Synthetic oligonucleotide
cauaggagggaguuguucc

SEQ ID NO: 2152346 - RNA, 19 nt, Artificial Sequence
  Description of Artificial Sequence: Synthetic oligonucleotide
uuucguaucuguaaugaua

SEQ ID NO: 2152347 - RNA, 19 nt, Artificial Sequence
  Description of Artificial Sequence: Synthetic oligonucleotide
aggaaaauagcgccuauca

SEQ ID NO: 2152348 - RNA, 19 nt, Artificial Sequence
  Description of Artificial Sequence: Synthetic oligonucleotide
agguccaggugcuugagac

SEQ ID NO: 2152349 - RNA, 19 nt, Artificial Sequence
  Description of Artificial Sequence: Synthetic oligonucleotide
uccauucugccgcugaucc

SEQ ID NO: 2152350 - RNA, 19 nt, Artificial Sequence
  Description of Artificial Sequence: Synthetic oligonucleotide
ugagguuuguuaaccuggg

SEQ ID NO: 2152351 - RNA, 19 nt, Artificial Sequence
  Description of Artificial Sequence: Synthetic oligonucleotide
gagcuaaaacaauaccuag

SEQ ID NO: 2152352 - RNA, 19 nt, Artificial Sequence
  Description of Artificial Sequence: Synthetic oligonucleotide
ucagccauguagcagucgc

SEQ ID NO: 2152353 - RNA, 19 nt, Artificial Sequence
  Description of Artificial Sequence: Synthetic oligonucleotide
gagggaguuguuccgaagg

SEQ ID NO: 2152354 - RNA, 19 nt, Artificial Sequence
  Description of Artificial Sequence: Synthetic oligonucleotide
uaccuaggaagacauagga

SEQ ID NO: 2152355 - RNA, 19 nt, Artificial Sequence
  Description of Artificial Sequence: Synthetic oligonucleotide
aaacgaggaggaaaauagc

SEQ ID NO: 2152356 - RNA, 19 nt, Artificial Sequence
  Description of Artificial Sequence: Synthetic oligonucleotide
ucucugauguuaugcaucc

SEQ ID NO: 2152357 - RNA, 19 nt, Artificial Sequence
  Description of Artificial Sequence: Synthetic oligonucleotide
ccuaggaagacauaggaag

SEQ ID NO: 2152358 - RNA, 19 nt, Artificial Sequence
  Description of Artificial Sequence: Synthetic oligonucleotide
guugcgaaaggaugcauag

SEQ ID NO: 2152359 - RNA, 19 nt, Artificial Sequence
  Description of Artificial Sequence: Synthetic oligonucleotide
aacaauaccuaggaagaca

SEQ ID NO: 2152360 - RNA, 19 nt, Artificial Sequence
  Description of Artificial Sequence: Synthetic oligonucleotide
uccaugugaucccugcagg

SEQ ID NO: 2152361 - RNA, 19 nt, Artificial Sequence
  Description of Artificial Sequence: Synthetic oligonucleotide
aaauagcgccuaucagagc

SEQ ID NO: 2152362 - RNA, 19 nt, Artificial Sequence
  Description of Artificial Sequence: Synthetic oligonucleotide
agguuuguuaaccuggggu

SEQ ID NO: 2152363 - RNA, 19 nt, Artificial Sequence
  Description of Artificial Sequence: Synthetic oligonucleotide
uuagguugagcguuuccag

SEQ ID NO: 2152364 - RNA, 19 nt, Artificial Sequence
  Description of Artificial Sequence: Synthetic oligonucleotide
uaucagagcuaaaacaaua

SEQ ID NO: 2152365 - RNA, 19 nt, Artificial Sequence
  Description of Artificial Sequence: Synthetic oligonucleotide
caccaugucagccauguag

SEQ ID NO: 2152366 - RNA, 19 nt, Artificial Sequence
  Description of Artificial Sequence: Synthetic oligonucleotide
uugauuucguaucuguaau

SEQ ID NO: 2152367 - RNA, 19 nt, Artificial Sequence
  Description of Artificial Sequence: Synthetic oligonucleotide
gaaggauagcgucacaguc

SEQ ID NO: 2152368 - RNA, 19 nt, Artificial Sequence
  Description of Artificial Sequence: Synthetic oligonucleotide
uuuuaaugccuuuacgguu

SEQ ID NO: 2152369 - RNA, 19 nt, Artificial Sequence
  Description of Artificial Sequence: Synthetic oligonucleotide
ucgaaggccaccaugcccu

SEQ ID NO: 2152370 - RNA, 19 nt, Artificial Sequence
  Description of Artificial Sequence: Synthetic oligonucleotide
ugagccuggcuuuauccgg

SEQ ID NO: 2152371 - RNA, 19 nt, Artificial Sequence
  Description of Artificial Sequence: Synthetic oligonucleotide
agcgucacaguccagguca

SEQ ID NO: 2152372 - RNA, 19 nt, Artificial Sequence
  Description of Artificial Sequence: Synthetic oligonucleotide
uuuucugggaaugcacagg

SEQ ID NO: 2152373 - RNA, 19 nt, Artificial Sequence
  Description of Artificial Sequence: Synthetic oligonucleotide
auguagcagucgcaaaccc

SEQ ID NO: 2152374 - RNA, 19 nt, Artificial Sequence
  Description of Artificial Sequence: Synthetic oligonucleotide
uagguugagcguuuccagg

SEQ ID NO: 2152375 - RNA, 19 nt, Artificial Sequence
  Description of Artificial Sequence: Synthetic oligonucleotide
ugugucagguugcgaaagg

SEQ ID NO: 2152376 - RNA, 19 nt, Artificial Sequence
  Description of Artificial Sequence: Synthetic oligonucleotide
auaggagggaguuguuccg

SEQ ID NO: 2152377 - RNA, 19 nt, Artificial Sequence
  Description of Artificial Sequence: Synthetic oligonucleotide
gauuucguaucuguaauga

SEQ ID NO: 2152378 - RNA, 19 nt, Artificial Sequence
  Description of Artificial Sequence: Synthetic oligonucleotide
aaggcacccgcacacaccu

SEQ ID NO: 2152379 - RNA, 19 nt, Artificial Sequence
  Description of Artificial Sequence: Synthetic oligonucleotide
gugauugcuggccagcucc

SEQ ID NO: 2152380 - RNA, 19 nt, Artificial Sequence
  Description of Artificial Sequence: Synthetic oligonucleotide
cacgaugugguucaggauc

SEQ ID NO: 2152381 - RNA, 19 nt, Artificial Sequence
  Description of Artificial Sequence: Synthetic oligonucleotide
ugauuucguaucuguaaug

SEQ ID NO: 2152382 - RNA, 19 nt, Artificial Sequence
  Description of Artificial Sequence: Synthetic oligonucleotide
gaagucugcagggaugggg

SEQ ID NO: 2152383 - RNA, 19 nt, Artificial Sequence
  Description of Artificial Sequence: Synthetic oligonucleotide
augucagccauguagcagu

SEQ ID NO: 2152384 - RNA, 19 nt, Artificial Sequence
  Description of Artificial Sequence: Synthetic oligonucleotide
uuuguuaaccugggguccg

SEQ ID NO: 2152385 - RNA, 19 nt, Artificial Sequence
  Description of Artificial Sequence: Synthetic oligonucleotide
uuuacgguucaaauacaaa

SEQ ID NO: 2152386 - RNA, 19 nt, Artificial Sequence
  Description of Artificial Sequence: Synthetic oligonucleotide
uccgcauugauuucguauc

SEQ ID NO: 2152387 - RNA, 19 nt, Artificial Sequence
  Description of Artificial Sequence: Synthetic oligonucleotide
gaagucuacaccucaugca

SEQ ID NO: 2152388 - RNA, 19 nt, Artificial Sequence
  Description of Artificial Sequence: Synthetic oligonucleotide
gaggaugaaacucauauuu

SEQ ID NO: 2152389 - RNA, 19 nt, Artificial Sequence
  Description of Artificial Sequence: Synthetic oligonucleotide
aaggcgcugagguugguga

SEQ ID NO: 2152390 - RNA, 19 nt, Artificial Sequence
  Description of Artificial Sequence: Synthetic oligonucleotide
uguagcagucgcaaaccca

SEQ ID NO: 2152391 - RNA, 19 nt, Artificial Sequence
  Description of Artificial Sequence: Synthetic oligonucleotide
gcuaaaacaauaccuagga

SEQ ID NO: 2152392 - RNA, 19 nt, Artificial Sequence
  Description of Artificial Sequence: Synthetic oligonucleotide
guagaugaggaugaaacuc

SEQ ID NO: 2152393 - RNA, 19 nt, Artificial Sequence
  Description of Artificial Sequence: Synthetic oligonucleotide
aacugagguuuguuaaccu

SEQ ID NO: 2152394 - RNA, 19 nt, Artificial Sequence
  Description of Artificial Sequence: Synthetic oligonucleotide
gaaugcacaggugagccug

SEQ ID NO: 2152395 - RNA, 19 nt, Artificial Sequence
  Description of Artificial Sequence: Synthetic oligonucleotide
gaagacauaggaagucugc

SEQ ID NO: 2152396 - RNA, 19 nt, Artificial Sequence
  Description of Artificial Sequence: Synthetic oligonucleotide
uaguaagucccgaggcagg

SEQ ID NO: 2152397 - RNA, 19 nt, Artificial Sequence
  Description of Artificial Sequence: Synthetic oligonucleotide
acugagguuuguuaaccug

SEQ ID NO: 2152398 - RNA, 19 nt, Artificial Sequence
  Description of Artificial Sequence: Synthetic oligonucleotide
ugucucuuuaagccaggcc

SEQ ID NO: 2152399 - RNA, 19 nt, Artificial Sequence
  Description of Artificial Sequence: Synthetic oligonucleotide
aaguggaguugugaaggac

SEQ ID NO: 2152400 - RNA, 19 nt, Artificial Sequence
  Description of Artificial Sequence: Synthetic oligonucleotide
uuaagccaggccaccaugu

SEQ ID NO: 2152401 - RNA, 19 nt, Artificial Sequence
  Description of Artificial Sequence: Synthetic oligonucleotide
ucucuuuaagccaggccac

SEQ ID NO: 2152402 - RNA, 19 nt, Artificial Sequence
  Description of Artificial Sequence: Synthetic oligonucleotide
agacauccgaguuggaacu

SEQ ID NO: 2152403 - RNA, 19 nt, Artificial Sequence
  Description of Artificial Sequence: Synthetic oligonucleotide
gaacugagguuuguuaacc

SEQ ID NO: 2152404 - RNA, 19 nt, Artificial Sequence
  Description of Artificial Sequence: Synthetic oligonucleotide
guagcagucgcaaacccag

SEQ ID NO: 2152405 - RNA, 19 nt, Artificial Sequence
  Description of Artificial Sequence: Synthetic oligonucleotide
agcagucgcaaacccaggg

SEQ ID NO: 2152406 - RNA, 19 nt, Artificial Sequence
  Description of Artificial Sequence: Synthetic oligonucleotide
gccuuuacgguucaaauac

SEQ ID NO: 2152407 - RNA, 19 nt, Artificial Sequence
  Description of Artificial Sequence: Synthetic oligonucleotide
uaagucccgaggcagguaa

SEQ ID NO: 2152408 - RNA, 19 nt, Artificial Sequence
  Description of Artificial Sequence: Synthetic oligonucleotide
uuuucgaggugugucaggu

SEQ ID NO: 2152409 - RNA, 19 nt, Artificial Sequence
  Description of Artificial Sequence: Synthetic oligonucleotide
auguuaugcauccacuuuu

SEQ ID NO: 2152410 - RNA, 19 nt, Artificial Sequence
  Description of Artificial Sequence: Synthetic oligonucleotide
gucuacaccucaugcagag

SEQ ID NO: 2152411 - RNA, 19 nt, Artificial Sequence
  Description of Artificial Sequence: Synthetic oligonucleotide
gugaaggaccuugagggcg

SEQ ID NO: 2152412 - RNA, 19 nt, Artificial Sequence
  Description of Artificial Sequence: Synthetic oligonucleotide
uccaagagggcacgauucc

SEQ ID NO: 2152413 - RNA, 19 nt, Artificial Sequence
  Description of Artificial Sequence: Synthetic oligonucleotide
gggauuguuguccagguac

SEQ ID NO: 2152414 - RNA, 19 nt, Artificial Sequence
  Description of Artificial Sequence: Synthetic oligonucleotide
aggauagcgucacagucca

SEQ ID NO: 2152415 - RNA, 19 nt, Artificial Sequence
  Description of Artificial Sequence: Synthetic oligonucleotide
ugauguuaugcauccacuu

SEQ ID NO: 2152416 - RNA, 19 nt, Artificial Sequence
  Description of Artificial Sequence: Synthetic oligonucleotide
aggaagucugcagggaugg

SEQ ID NO: 2152417 - RNA, 19 nt, Artificial Sequence
  Description of Artificial Sequence: Synthetic oligonucleotide
aaugccuuuacgguucaaa

SEQ ID NO: 2152418 - RNA, 19 nt, Artificial Sequence
  Description of Artificial Sequence: Synthetic oligonucleotide
ucugucucuuuaagccagg

SEQ ID NO: 2152419 - RNA, 19 nt, Artificial Sequence
  Description of Artificial Sequence: Synthetic oligonucleotide
ugugaaggaccuugagggc

SEQ ID NO: 2152420 - RNA, 19 nt, Artificial Sequence
  Description of Artificial Sequence: Synthetic oligonucleotide
cucgaagcuuccauucugc

SEQ ID NO: 2152421 - RNA, 19 nt, Artificial Sequence
  Description of Artificial Sequence: Synthetic oligonucleotide
gcugagguuggugagaggg

SEQ ID NO: 2152422 - RNA, 19 nt, Artificial Sequence
  Description of Artificial Sequence: Synthetic oligonucleotide
ggcguuguccuccaagugg

SEQ ID NO: 2152423 - RNA, 19 nt, Artificial Sequence
  Description of Artificial Sequence: Synthetic oligonucleotide
auacaaaacgaggaggaaa

SEQ ID NO: 2152424 - RNA, 19 nt, Artificial Sequence
  Description of Artificial Sequence: Synthetic oligonucleotide
uccggcaccaccucugucu

SEQ ID NO: 2152425 - RNA, 19 nt, Artificial Sequence
  Description of Artificial Sequence: Synthetic oligonucleotide
aggucagagcuguugaggu

SEQ ID NO: 2152426 - RNA, 19 nt, Artificial Sequence
  Description of Artificial Sequence: Synthetic oligonucleotide
guacaccuugacaugagcc

SEQ ID NO: 2152427 - RNA, 19 nt, Artificial Sequence
  Description of Artificial Sequence: Synthetic oligonucleotide
ucccgaggcagguaaagga

SEQ ID NO: 2152428 - RNA, 19 nt, Artificial Sequence
  Description of Artificial Sequence: Synthetic oligonucleotide
cauguagcagucgcaaacc

SEQ ID NO: 2152429 - RNA, 19 nt, Artificial Sequence
  Description of Artificial Sequence: Synthetic oligonucleotide
agagcuaaaacaauaccua

SEQ ID NO: 2152430 - RNA, 19 nt, Artificial Sequence
  Description of Artificial Sequence: Synthetic oligonucleotide
gagguuuguuaaccugggg

SEQ ID NO: 2152431 - RNA, 19 nt, Artificial Sequence
  Description of Artificial Sequence: Synthetic oligonucleotide
aaaggaugcauaggaggga

SEQ ID NO: 2152432 - RNA, 19 nt, Artificial Sequence
  Description of Artificial Sequence: Synthetic oligonucleotide
ucaugcagagcuguccuug

SEQ ID NO: 2152433 - RNA, 19 nt, Artificial Sequence
  Description of Artificial Sequence: Synthetic oligonucleotide
aaaggcgaaggcgcugagg

SEQ ID NO: 2152434 - RNA, 19 nt, Artificial Sequence
  Description of Artificial Sequence: Synthetic oligonucleotide
ugggcuaguaagucccgag

SEQ ID NO: 2152435 - RNA, 19 nt, Artificial Sequence
  Description of Artificial Sequence: Synthetic oligonucleotide
ugucagguugcgaaaggau

SEQ ID NO: 2152436 - RNA, 19 nt, Artificial Sequence
  Description of Artificial Sequence: Synthetic oligonucleotide
aggugugucagguugcgaa

SEQ ID NO: 2152437 - RNA, 19 nt, Artificial Sequence
  Description of Artificial Sequence: Synthetic oligonucleotide
gauggucgaaggcacccgc

SEQ ID NO: 2152438 - RNA, 19 nt, Artificial Sequence
  Description of Artificial Sequence: Synthetic oligonucleotide
guaaaggaagugauugcug

SEQ ID NO: 2152439 - RNA, 19 nt, Artificial Sequence
  Description of Artificial Sequence: Synthetic oligonucleotide
uuggaacugagguuuguua

SEQ ID NO: 2152440 - RNA, 19 nt, Artificial Sequence
  Description of Artificial Sequence: Synthetic oligonucleotide
gucgagguggcgcaggccc

SEQ ID NO: 2152441 - RNA, 19 nt, Artificial Sequence
  Description of Artificial Sequence: Synthetic oligonucleotide
agcccuugcagcgcaaggc

SEQ ID NO: 2152442 - RNA, 19 nt, Artificial Sequence
  Description of Artificial Sequence: Synthetic oligonucleotide
aggugguugccacuuaggu

SEQ ID NO: 2152443 - RNA, 19 nt, Artificial Sequence
  Description of Artificial Sequence: Synthetic oligonucleotide
ugaaggaccuugagggcgu

SEQ ID NO: 2152444 - RNA, 19 nt, Artificial Sequence
  Description of Artificial Sequence: Synthetic oligonucleotide
agugauugcuggccagcuc

SEQ ID NO: 2152445 - RNA, 19 nt, Artificial Sequence
  Description of Artificial Sequence: Synthetic oligonucleotide
accuugacaugagccaggc

SEQ ID NO: 2152446 - RNA, 19 nt, Artificial Sequence
  Description of Artificial Sequence: Synthetic oligonucleotide
augcauaggagggaguugu

SEQ ID NO: 2152447 - RNA, 19 nt, Artificial Sequence
  Description of Artificial Sequence: Synthetic oligonucleotide
auuucguaucuguaaugau

SEQ ID NO: 2152448 - RNA, 19 nt, Artificial Sequence
  Description of Artificial Sequence: Synthetic oligonucleotide
uacccuuccaugugauccc

SEQ ID NO: 2152449 - RNA, 19 nt, Artificial Sequence
  Description of Artificial Sequence: Synthetic oligonucleotide
cuuuacgguucaaauacaa

SEQ ID NO: 2152450 - RNA, 19 nt, Artificial Sequence
  Description of Artificial Sequence: Synthetic oligonucleotide
ugccuuuacgguucaaaua

SEQ ID NO: 2152451 - RNA, 19 nt, Artificial Sequence
  Description of Artificial Sequence: Synthetic oligonucleotide
ugaggaugaaacucauauu

SEQ ID NO: 2152452 - RNA, 19 nt, Artificial Sequence
  Description of Artificial Sequence: Synthetic oligonucleotide
gucacaguccaggucagag

SEQ ID NO: 2152453 - RNA, 19 nt, Artificial Sequence
  Description of Artificial Sequence: Synthetic oligonucleotide
ggaguuguuccgaaggucc

SEQ ID NO: 2152454 - RNA, 19 nt, Artificial Sequence
  Description of Artificial Sequence: Synthetic oligonucleotide
ucgaagcuuccauucugcc

SEQ ID NO: 2152455 - RNA, 19 nt, Artificial Sequence
  Description of Artificial Sequence: Synthetic oligonucleotide
uugcgaaaggaugcauagg

SEQ ID NO: 2152456 - RNA, 19 nt, Artificial Sequence
  Description of Artificial Sequence: Synthetic oligonucleotide
gaagugauugcuggccagc

SEQ ID NO: 2152457 - RNA, 19 nt, Artificial Sequence
  Description of Artificial Sequence: Synthetic oligonucleotide
gaccaguccugcuucucag

SEQ ID NO: 2152458 - RNA, 19 nt, Artificial Sequence
  Description of Artificial Sequence: Synthetic oligonucleotide
auagcgucacaguccaggu

SEQ ID NO: 2152459 - RNA, 19 nt, Artificial Sequence
  Description of Artificial Sequence: Synthetic oligonucleotide
gaugaaacucauauuuaua

SEQ ID NO: 2152460 - RNA, 19 nt, Artificial Sequence
  Description of Artificial Sequence: Synthetic oligonucleotide
ucgaggugugucagguugc

SEQ ID NO: 2152461 - RNA, 19 nt, Artificial Sequence
  Description of Artificial Sequence: Synthetic oligonucleotide
cuuagguugagcguuucca

SEQ ID NO: 2152462 - RNA, 19 nt, Artificial Sequence
  Description of Artificial Sequence: Synthetic oligonucleotide
ugagguccaagagggcacg

SEQ ID NO: 2152463 - RNA, 19 nt, Artificial Sequence
  Description of Artificial Sequence: Synthetic oligonucleotide
ucuuuaagccaggccacca

SEQ ID NO: 2152464 - RNA, 19 nt, Artificial Sequence
  Description of Artificial Sequence: Synthetic oligonucleotide
guuguuccgaagguccagg

SEQ ID NO: 2152465 - RNA, 19 nt, Artificial Sequence
  Description of Artificial Sequence: Synthetic oligonucleotide
aggaagugauugcuggcca

SEQ ID NO: 2152466 - RNA, 19 nt, Artificial Sequence
  Description of Artificial Sequence: Synthetic oligonucleotide
gagggcguuguccuccaag

SEQ ID NO: 2152467 - RNA, 19 nt, Artificial Sequence
  Description of Artificial Sequence: Synthetic oligonucleotide
gccaccaugcccucgaagc

SEQ ID NO: 2152468 - RNA, 19 nt, Artificial Sequence
  Description of Artificial Sequence: Synthetic oligonucleotide
cugagcgcagggcagcugc

SEQ ID NO: 2152469 - RNA, 19 nt, Artificial Sequence
  Description of Artificial Sequence: Synthetic oligonucleotide
uugcugcccgcaaaggcga

SEQ ID NO: 2152470 - RNA, 19 nt, Artificial Sequence
  Description of Artificial Sequence: Synthetic oligonucleotide
aggaagacauaggaagucu

SEQ ID NO: 2152471 - RNA, 19 nt, Artificial Sequence
  Description of Artificial Sequence: Synthetic oligonucleotide
ccuaucagagcuaaaacaa

SEQ ID NO: 2152472 - RNA, 19 nt, Artificial Sequence
  Description of Artificial Sequence: Synthetic oligonucleotide
ucggccaaaguggaguugu

SEQ ID NO: 2152473 - RNA, 19 nt, Artificial Sequence
  Description of Artificial Sequence: Synthetic oligonucleotide
gccuaucagagcuaaaaca

SEQ ID NO: 2152474 - RNA, 19 nt, Artificial Sequence
  Description of Artificial Sequence: Synthetic oligonucleotide
gucgcaaacccagggauug

SEQ ID NO: 2152475 - RNA, 19 nt, Artificial Sequence
  Description of Artificial Sequence: Synthetic oligonucleotide
gucgaaggcacccgcacac

SEQ ID NO: 2152476 - RNA, 19 nt, Artificial Sequence
  Description of Artificial Sequence: Synthetic oligonucleotide
ucguaucuguaaugauacc

SEQ ID NO: 2152477 - RNA, 19 nt, Artificial Sequence
  Description of Artificial Sequence: Synthetic oligonucleotide
uagcagucgcaaacccagg

SEQ ID NO: 2152478 - RNA, 19 nt, Artificial Sequence
  Description of Artificial Sequence: Synthetic oligonucleotide
ugauacccuuccaugugau

SEQ ID NO: 2152479 - RNA, 19 nt, Artificial Sequence
  Description of Artificial Sequence: Synthetic oligonucleotide
aggucgagguggcgcaggc

SEQ ID NO: 2152480 - RNA, 19 nt, Artificial Sequence
  Description of Artificial Sequence: Synthetic oligonucleotide
gaugcauaggagggaguug

SEQ ID NO: 2152481 - RNA, 19 nt, Artificial Sequence
  Description of Artificial Sequence: Synthetic oligonucleotide
aagugauugcuggccagcu

SEQ ID NO: 2152482 - RNA, 19 nt, Artificial Sequence
  Description of Artificial Sequence: Synthetic oligonucleotide
agggaguuguuccgaaggu

SEQ ID NO: 2152483 - RNA, 19 nt, Artificial Sequence
  Description of Artificial Sequence: Synthetic oligonucleotide
uccuugaccaguccugcuu

SEQ ID NO: 2152484 - RNA, 19 nt, Artificial Sequence
  Description of Artificial Sequence: Synthetic oligonucleotide
augcagagcuguccuugac

SEQ ID NO: 2152485 - RNA, 19 nt, Artificial Sequence
  Description of Artificial Sequence: Synthetic oligonucleotide
caggugguugccacuuagg

SEQ ID NO: 2152486 - RNA, 19 nt, Artificial Sequence
  Description of Artificial Sequence: Synthetic oligonucleotide
ugcagcgcaaggccugagc

SEQ ID NO: 2152487 - RNA, 19 nt, Artificial Sequence
  Description of Artificial Sequence: Synthetic oligonucleotide
gcagcgcaaggccugagcg

SEQ ID NO: 2152488 - RNA, 19 nt, Artificial Sequence
  Description of Artificial Sequence: Synthetic oligonucleotide
uggucgaaggcacccgcac

SEQ ID NO: 2152489 - RNA, 19 nt, Artificial Sequence
  Description of Artificial Sequence: Synthetic oligonucleotide
ggcuuuauccggcaccacc

SEQ ID NO: 2152490 - RNA, 19 nt, Artificial Sequence
  Description of Artificial Sequence: Synthetic oligonucleotide
ggaacugagguuuguuaac

SEQ ID NO: 2152491 - RNA, 19 nt, Artificial Sequence
  Description of Artificial Sequence: Synthetic oligonucleotide
ugauugcuggccagcucca

SEQ ID NO: 2152492 - RNA, 19 nt, Artificial Sequence
  Description of Artificial Sequence: Synthetic oligonucleotide
cauccgaguuggaacugag

SEQ ID NO: 2152493 - RNA, 19 nt, Artificial Sequence
  Description of Artificial Sequence: Synthetic oligonucleotide
gauguuaugcauccacuuu

SEQ ID NO: 2152494 - RNA, 19 nt, Artificial Sequence
  Description of Artificial Sequence: Synthetic oligonucleotide
ucgagguggcgcaggcccg

SEQ ID NO: 2152495 - RNA, 19 nt, Artificial Sequence
  Description of Artificial Sequence: Synthetic oligonucleotide
gauuguuguccagguacac

SEQ ID NO: 2152496 - RNA, 19 nt, Artificial Sequence
  Description of Artificial Sequence: Synthetic oligonucleotide
cccgcaaaggcgaaggcgc

SEQ ID NO: 2152497 - RNA, 19 nt, Artificial Sequence
  Description of Artificial Sequence: Synthetic oligonucleotide
ugccacuuagguugagcgu

SEQ ID NO: 2152498 - RNA, 19 nt, Artificial Sequence
  Description of Artificial Sequence: Synthetic oligonucleotide
uaagccaggccaccauguc

SEQ ID NO: 2152499 - RNA, 19 nt, Artificial Sequence
  Description of Artificial Sequence: Synthetic oligonucleotide
cuacaccucaugcagagcu

SEQ ID NO: 2152500 - RNA, 19 nt, Artificial Sequence
  Description of Artificial Sequence: Synthetic oligonucleotide
gaggaaaauagcgccuauc

SEQ ID NO: 2152501 - RNA, 19 nt, Artificial Sequence
  Description of Artificial Sequence: Synthetic oligonucleotide
augaagcccuugcagcgca

SEQ ID NO: 2152502 - RNA, 19 nt, Artificial Sequence
  Description of Artificial Sequence: Synthetic oligonucleotide
cuaggaagacauaggaagu

SEQ ID NO: 2152503 - RNA, 19 nt, Artificial Sequence
  Description of Artificial Sequence: Synthetic oligonucleotide
ccauguagcagucgcaaac

SEQ ID NO: 2152504 - RNA, 19 nt, Artificial Sequence
  Description of Artificial Sequence: Synthetic oligonucleotide
ugagguuggugagaggguu

SEQ ID NO: 2152505 - RNA, 19 nt, Artificial Sequence
  Description of Artificial Sequence: Synthetic oligonucleotide
gauacccuuccaugugauc

SEQ ID NO: 2152506 - RNA, 19 nt, Artificial Sequence
  Description of Artificial Sequence: Synthetic oligonucleotide
agauggucgaaggcacccg

SEQ ID NO: 2152507 - RNA, 19 nt, Artificial Sequence
  Description of Artificial Sequence: Synthetic oligonucleotide
ggaagugauugcuggccag

SEQ ID NO: 2152508 - RNA, 19 nt, Artificial Sequence
  Description of Artificial Sequence: Synthetic oligonucleotide
gguacaccuugacaugagc

SEQ ID NO: 2152509 - RNA, 19 nt, Artificial Sequence
  Description of Artificial Sequence: Synthetic oligonucleotide
agcgcaaggccugagcgca

SEQ ID NO: 2152510 - RNA, 19 nt, Artificial Sequence
  Description of Artificial Sequence: Synthetic oligonucleotide
guugccacuuagguugagc

SEQ ID NO: 2152511 - RNA, 19 nt, Artificial Sequence
  Description of Artificial Sequence: Synthetic oligonucleotide
gaaggcacccgcacacacc

SEQ ID NO: 2152512 - RNA, 19 nt, Artificial Sequence
  Description of Artificial Sequence: Synthetic oligonucleotide
gugugucagguugcgaaag

SEQ ID NO: 2152513 - RNA, 19 nt, Artificial Sequence
  Description of Artificial Sequence: Synthetic oligonucleotide
cauugauuucguaucugua

SEQ ID NO: 2152514 - RNA, 19 nt, Artificial Sequence
  Description of Artificial Sequence: Synthetic oligonucleotide
ggaagacauaggaagucug

SEQ ID NO: 2152515 - RNA, 19 nt, Artificial Sequence
  Description of Artificial Sequence: Synthetic oligonucleotide
caaaacgaggaggaaaaua

SEQ ID NO: 2152516 - RNA, 19 nt, Artificial Sequence
  Description of Artificial Sequence: Synthetic oligonucleotide
cccucgaaggccaccaugc

SEQ ID NO: 2152517 - RNA, 19 nt, Artificial Sequence
  Description of Artificial Sequence: Synthetic oligonucleotide
guccaagagggcacgauuc

SEQ ID NO: 2152518 - RNA, 19 nt, Artificial Sequence
  Description of Artificial Sequence: Synthetic oligonucleotide
cugcccgcaaaggcgaagg

SEQ ID NO: 2152519 - RNA, 19 nt, Artificial Sequence
  Description of Artificial Sequence: Synthetic oligonucleotide
ggcgaaggcgcugagguug

SEQ ID NO: 2152520 - RNA, 19 nt, Artificial Sequence
  Description of Artificial Sequence: Synthetic oligonucleotide
agucccgaggcagguaaag

SEQ ID NO: 2152521 - RNA, 19 nt, Artificial Sequence
  Description of Artificial Sequence: Synthetic oligonucleotide
ucuacaccucaugcagagc

SEQ ID NO: 2152522 - RNA, 19 nt, Artificial Sequence
  Description of Artificial Sequence: Synthetic oligonucleotide
gaagcccuugcagcgcaag

SEQ ID NO: 2152523 - RNA, 19 nt, Artificial Sequence
  Description of Artificial Sequence: Synthetic oligonucleotide
uaggagggaguuguuccga

SEQ ID NO: 2152524 - RNA, 19 nt, Artificial Sequence
  Description of Artificial Sequence: Synthetic oligonucleotide
aagcuuccauucugccgcu

SEQ ID NO: 2152525 - RNA, 19 nt, Artificial Sequence
  Description of Artificial Sequence: Synthetic oligonucleotide
accaugcccucgaagcuuc

SEQ ID NO: 2152526 - RNA, 19 nt, Artificial Sequence
  Description of Artificial Sequence: Synthetic oligonucleotide
aggaugaaacucauauuua

SEQ ID NO: 2152527 - RNA, 19 nt, Artificial Sequence
  Description of Artificial Sequence: Synthetic oligonucleotide
acaccucaugcagagcugu

SEQ ID NO: 2152528 - RNA, 19 nt, Artificial Sequence
  Description of Artificial Sequence: Synthetic oligonucleotide
gaaggcgcugagguuggug

SEQ ID NO: 2152529 - RNA, 19 nt, Artificial Sequence
  Description of Artificial Sequence: Synthetic oligonucleotide
cagcgcaaggccugagcgc

SEQ ID NO: 2152530 - RNA, 19 nt, Artificial Sequence
  Description of Artificial Sequence: Synthetic oligonucleotide
auccgaguuggaacugagg

SEQ ID NO: 2152531 - RNA, 19 nt, Artificial Sequence
  Description of Artificial Sequence: Synthetic oligonucleotide
uagcgucacaguccagguc

SEQ ID NO: 2152532 - RNA, 19 nt, Artificial Sequence
  Description of Artificial Sequence: Synthetic oligonucleotide
ugguugccacuuagguuga

SEQ ID NO: 2152533 - RNA, 19 nt, Artificial Sequence
  Description of Artificial Sequence: Synthetic oligonucleotide
ggcacccgcacacaccucc

SEQ ID NO: 2152534 - RNA, 19 nt, Artificial Sequence
  Description of Artificial Sequence: Synthetic oligonucleotide
ugacaugagccaggccuug

SEQ ID NO: 2152535 - RNA, 19 nt, Artificial Sequence
  Description of Artificial Sequence: Synthetic oligonucleotide
ggcguugcugcccgcaaag

SEQ ID NO: 2152536 - RNA, 19 nt, Artificial Sequence
  Description of Artificial Sequence: Synthetic oligonucleotide
cugucucuuuaagccaggc

SEQ ID NO: 2152537 - RNA, 19 nt, Artificial Sequence
  Description of Artificial Sequence: Synthetic oligonucleotide
caggcccggcagauggucg

SEQ ID NO: 2152538 - RNA, 19 nt, Artificial Sequence
  Description of Artificial Sequence: Synthetic oligonucleotide
aggcgcugagguuggugag

SEQ ID NO: 2152539 - RNA, 19 nt, Artificial Sequence
  Description of Artificial Sequence: Synthetic oligonucleotide
gacauccgaguuggaacug

SEQ ID NO: 2152540 - RNA, 19 nt, Artificial Sequence
  Description of Artificial Sequence: Synthetic oligonucleotide
agccauguagcagucgcaa

SEQ ID NO: 2152541 - RNA, 19 nt, Artificial Sequence
  Description of Artificial Sequence: Synthetic oligonucleotide
ugcccgcaaaggcgaaggc

SEQ ID NO: 2152542 - RNA, 19 nt, Artificial Sequence
  Description of Artificial Sequence: Synthetic oligonucleotide
uguuaaccugggguccgca

SEQ ID NO: 2152543 - RNA, 19 nt, Artificial Sequence
  Description of Artificial Sequence: Synthetic oligonucleotide
ccaugugaucccugcaggc

SEQ ID NO: 2152544 - RNA, 19 nt, Artificial Sequence
  Description of Artificial Sequence: Synthetic oligonucleotide
accuaggaagacauaggaa

SEQ ID NO: 2152545 - RNA, 19 nt, Artificial Sequence
  Description of Artificial Sequence: Synthetic oligonucleotide
augcccucgaagcuuccau

SEQ ID NO: 2152546 - RNA, 19 nt, Artificial Sequence
  Description of Artificial Sequence: Synthetic oligonucleotide
uugagggcguuguccucca

SEQ ID NO: 2152547 - RNA, 19 nt, Artificial Sequence
  Description of Artificial Sequence: Synthetic oligonucleotide
uuccauucugccgcugauc

SEQ ID NO: 2152548 - RNA, 19 nt, Artificial Sequence
  Description of Artificial Sequence: Synthetic oligonucleotide
aggaggaaaauagcgccua

SEQ ID NO: 2152549 - RNA, 19 nt, Artificial Sequence
  Description of Artificial Sequence: Synthetic oligonucleotide
uuguuaaccugggguccgc

SEQ ID NO: 2152550 - RNA, 19 nt, Artificial Sequence
  Description of Artificial Sequence: Synthetic oligonucleotide
augcacaggugagccuggc

SEQ ID NO: 2152551 - RNA, 19 nt, Artificial Sequence
  Description of Artificial Sequence: Synthetic oligonucleotide
acauccgaguuggaacuga

SEQ ID NO: 2152552 - RNA, 19 nt, Artificial Sequence
  Description of Artificial Sequence: Synthetic oligonucleotide
cuaucagagcuaaaacaau

SEQ ID NO: 2152553 - RNA, 19 nt, Artificial Sequence
  Description of Artificial Sequence: Synthetic oligonucleotide
agggcacgauuccucauuu

SEQ ID NO: 2152554 - RNA, 19 nt, Artificial Sequence
  Description of Artificial Sequence: Synthetic oligonucleotide
gaguuggaacugagguuug

SEQ ID NO: 2152555 - RNA, 19 nt, Artificial Sequence
  Description of Artificial Sequence: Synthetic oligonucleotide
uucggccaaaguggaguug

SEQ ID NO: 2152556 - RNA, 19 nt, Artificial Sequence
  Description of Artificial Sequence: Synthetic oligonucleotide
acccagggauuguugucca

SEQ ID NO: 2152557 - RNA, 19 nt, Artificial Sequence
  Description of Artificial Sequence: Synthetic oligonucleotide
agucuacaccucaugcaga

SEQ ID NO: 2152558 - RNA, 19 nt, Artificial Sequence
  Description of Artificial Sequence: Synthetic oligonucleotide
aguuggaacugagguuugu

SEQ ID NO: 2152559 - RNA, 19 nt, Artificial Sequence
  Description of Artificial Sequence: Synthetic oligonucleotide
gaguuguuccgaaggucca

SEQ ID NO: 2152560 - RNA, 19 nt, Artificial Sequence
  Description of Artificial Sequence: Synthetic oligonucleotide
guccgcauugauuucguau

SEQ ID NO: 2152561 - RNA, 19 nt, Artificial Sequence
  Description of Artificial Sequence: Synthetic oligonucleotide
cuggcuuuauccggcacca

SEQ ID NO: 2152562 - RNA, 19 nt, Artificial Sequence
  Description of Artificial Sequence: Synthetic oligonucleotide
acaaaacgaggaggaaaau

SEQ ID NO: 2152563 - RNA, 19 nt, Artificial Sequence
  Description of Artificial Sequence: Synthetic oligonucleotide
cauucggccaaaguggagu

SEQ ID NO: 2152564 - RNA, 19 nt, Artificial Sequence
  Description of Artificial Sequence: Synthetic oligonucleotide
cagguacaccuugacauga

SEQ ID NO: 2152565 - RNA, 19 nt, Artificial Sequence
  Description of Artificial Sequence: Synthetic oligonucleotide
agguacaccuugacaugag

SEQ ID NO: 2152566 - RNA, 19 nt, Artificial Sequence
  Description of Artificial Sequence: Synthetic oligonucleotide
gcgaaaggaugcauaggag

SEQ ID NO: 2152567 - RNA, 19 nt, Artificial Sequence
  Description of Artificial Sequence: Synthetic oligonucleotide
auccggcaccaccucuguc

SEQ ID NO: 2152568 - RNA, 19 nt, Artificial Sequence
  Description of Artificial Sequence: Synthetic oligonucleotide
cuguaaugauacccuucca

SEQ ID NO: 2152569 - RNA, 19 nt, Artificial Sequence
  Description of Artificial Sequence: Synthetic oligonucleotide
gucagccauguagcagucg

SEQ ID NO: 2152570 - RNA, 19 nt, Artificial Sequence
  Description of Artificial Sequence: Synthetic oligonucleotide
gcauugauuucguaucugu

SEQ ID NO: 2152571 - RNA, 19 nt, Artificial Sequence
  Description of Artificial Sequence: Synthetic oligonucleotide
ugcauaggagggaguuguu

SEQ ID NO: 2152572 - RNA, 19 nt, Artificial Sequence
  Description of Artificial Sequence: Synthetic oligonucleotide
gaugaggaugaaacucaua

SEQ ID NO: 2152573 - RNA, 19 nt, Artificial Sequence
  Description of Artificial Sequence: Synthetic oligonucleotide
caggugcuugagacugggc

SEQ ID NO: 2152574 - RNA, 19 nt, Artificial Sequence
  Description of Artificial Sequence: Synthetic oligonucleotide
gcccuugcagcgcaaggcc

SEQ ID NO: 2152575 - RNA, 19 nt, Artificial Sequence
  Description of Artificial Sequence: Synthetic oligonucleotide
cuugaagucuacaccucau

SEQ ID NO: 2152576 - RNA, 19 nt, Artificial Sequence
  Description of Artificial Sequence: Synthetic oligonucleotide
caaaggcgaaggcgcugag

SEQ ID NO: 2152577 - RNA, 19 nt, Artificial Sequence
  Description of Artificial Sequence: Synthetic oligonucleotide
agggauuguuguccaggua

SEQ ID NO: 2152578 - RNA, 19 nt, Artificial Sequence
  Description of Artificial Sequence: Synthetic oligonucleotide
cgguucaaauacaaaacga

SEQ ID NO: 2152579 - RNA, 19 nt, Artificial Sequence
  Description of Artificial Sequence: Synthetic oligonucleotide
uagcgccuaucagagcuaa

SEQ ID NO: 2152580 - RNA, 19 nt, Artificial Sequence
  Description of Artificial Sequence: Synthetic oligonucleotide
ucgaaggcacccgcacaca

SEQ ID NO: 2152581 - RNA, 19 nt, Artificial Sequence
  Description of Artificial Sequence: Synthetic oligonucleotide
ccaguccugcuucucagac

SEQ ID NO: 2152582 - RNA, 19 nt, Artificial Sequence
  Description of Artificial Sequence: Synthetic oligonucleotide
ggauuguuguccagguaca

SEQ ID NO: 2152583 - RNA, 19 nt, Artificial Sequence
  Description of Artificial Sequence: Synthetic oligonucleotide
aggcccggcagauggucga

SEQ ID NO: 2152584 - RNA, 19 nt, Artificial Sequence
  Description of Artificial Sequence: Synthetic oligonucleotide
gcccgcaaaggcgaaggcg

SEQ ID NO: 2152585 - RNA, 19 nt, Artificial Sequence
  Description of Artificial Sequence: Synthetic oligonucleotide
ugaagcccuugcagcgcaa

SEQ ID NO: 2152586 - RNA, 19 nt, Artificial Sequence
  Description of Artificial Sequence: Synthetic oligonucleotide
ggaaggauagcgucacagu

SEQ ID NO: 2152587 - RNA, 19 nt, Artificial Sequence
  Description of Artificial Sequence: Synthetic oligonucleotide
gcagucgcaaacccaggga

SEQ ID NO: 2152588 - RNA, 19 nt, Artificial Sequence
  Description of Artificial Sequence: Synthetic oligonucleotide
caucucugauguuaugcau

SEQ ID NO: 2152589 - RNA, 19 nt, Artificial Sequence
  Description of Artificial Sequence: Synthetic oligonucleotide
gcuccaggugaugaagccc

SEQ ID NO: 2152590 - RNA, 19 nt, Artificial Sequence
  Description of Artificial Sequence: Synthetic oligonucleotide
ggugugucagguugcgaaa

SEQ ID NO: 2152591 - RNA, 19 nt, Artificial Sequence
  Description of Artificial Sequence: Synthetic oligonucleotide
ccuugaccaguccugcuuc

SEQ ID NO: 2152592 - RNA, 19 nt, Artificial Sequence
  Description of Artificial Sequence: Synthetic oligonucleotide
ccuugcagcgcaaggccug

SEQ ID NO: 2152593 - RNA, 19 nt, Artificial Sequence
  Description of Artificial Sequence: Synthetic oligonucleotide
ggucagagcuguugagguc

SEQ ID NO: 2152594 - RNA, 19 nt, Artificial Sequence
  Description of Artificial Sequence: Synthetic oligonucleotide
aaccugggguccgcauuga

SEQ ID NO: 2152595 - RNA, 19 nt, Artificial Sequence
  Description of Artificial Sequence: Synthetic oligonucleotide
cagggauuguuguccaggu

SEQ ID NO: 2152596 - RNA, 19 nt, Artificial Sequence
  Description of Artificial Sequence: Synthetic oligonucleotide
gagggcacgauuccucauu

SEQ ID NO: 2152597 - RNA, 19 nt, Artificial Sequence
  Description of Artificial Sequence: Synthetic oligonucleotide
gcauaggagggaguuguuc

SEQ ID NO: 2152598 - RNA, 19 nt, Artificial Sequence
  Description of Artificial Sequence: Synthetic oligonucleotide
ucgcaaacccagggauugu

SEQ ID NO: 2152599 - RNA, 19 nt, Artificial Sequence
  Description of Artificial Sequence: Synthetic oligonucleotide
cagucgcaaacccagggau

SEQ ID NO: 2152600 - RNA, 19 nt, Artificial Sequence
  Description of Artificial Sequence: Synthetic oligonucleotide
gggaguuguuccgaagguc

SEQ ID NO: 2152601 - RNA, 19 nt, Artificial Sequence
  Description of Artificial Sequence: Synthetic oligonucleotide
cagguugcgaaaggaugca

SEQ ID NO: 2152602 - RNA, 19 nt, Artificial Sequence
  Description of Artificial Sequence: Synthetic oligonucleotide
auggucgaaggcacccgca

SEQ ID NO: 2152603 - RNA, 19 nt, Artificial Sequence
  Description of Artificial Sequence: Synthetic oligonucleotide
gcugccaccaugcccucga

SEQ ID NO: 2152604 - RNA, 19 nt, Artificial Sequence
  Description of Artificial Sequence: Synthetic oligonucleotide
gguugcgaaaggaugcaua

SEQ ID NO: 2152605 - RNA, 19 nt, Artificial Sequence
  Description of Artificial Sequence: Synthetic oligonucleotide
caauaccuaggaagacaua

SEQ ID NO: 2152606 - RNA, 19 nt, Artificial Sequence
  Description of Artificial Sequence: Synthetic oligonucleotide
gcgccuaucagagcuaaaa

SEQ ID NO: 2152607 - RNA, 19 nt, Artificial Sequence
  Description of Artificial Sequence: Synthetic oligonucleotide
gcguuguccuccaagugga

SEQ ID NO: 2152608 - RNA, 19 nt, Artificial Sequence
  Description of Artificial Sequence: Synthetic oligonucleotide
cgccuaucagagcuaaaac

SEQ ID NO: 2152609 - RNA, 19 nt, Artificial Sequence
  Description of Artificial Sequence: Synthetic oligonucleotide
agguugcgaaaggaugcau

SEQ ID NO: 2152610 - RNA, 19 nt, Artificial Sequence
  Description of Artificial Sequence: Synthetic oligonucleotide
cacuuagguugagcguuuc

SEQ ID NO: 2152611 - RNA, 19 nt, Artificial Sequence
  Description of Artificial Sequence: Synthetic oligonucleotide
aggaugcauaggagggagu

SEQ ID NO: 2152612 - RNA, 19 nt, Artificial Sequence
  Description of Artificial Sequence: Synthetic oligonucleotide
gcgcugagguuggugagag

SEQ ID NO: 2152613 - RNA, 19 nt, Artificial Sequence
  Description of Artificial Sequence: Synthetic oligonucleotide
agguccaagagggcacgau

SEQ ID NO: 2152614 - RNA, 19 nt, Artificial Sequence
  Description of Artificial Sequence: Synthetic oligonucleotide
uugcagcgcaaggccugag

SEQ ID NO: 2152615 - RNA, 19 nt, Artificial Sequence
  Description of Artificial Sequence: Synthetic oligonucleotide
gcuucucagacauccgagu

SEQ ID NO: 2152616 - RNA, 19 nt, Artificial Sequence
  Description of Artificial Sequence: Synthetic oligonucleotide
ggaagucugcagggauggg

SEQ ID NO: 2152617 - RNA, 19 nt, Artificial Sequence
  Description of Artificial Sequence: Synthetic oligonucleotide
ccuuuacgguucaaauaca

SEQ ID NO: 2152618 - RNA, 19 nt, Artificial Sequence
  Description of Artificial Sequence: Synthetic oligonucleotide
acccuuccaugugaucccu

SEQ ID NO: 2152619 - RNA, 19 nt, Artificial Sequence
  Description of Artificial Sequence: Synthetic oligonucleotide
guuaaccugggguccgcau

SEQ ID NO: 2152620 - RNA, 19 nt, Artificial Sequence
  Description of Artificial Sequence: Synthetic oligonucleotide
gccaggccuugccauucgg

SEQ ID NO: 2152621 - RNA, 19 nt, Artificial Sequence
  Description of Artificial Sequence: Synthetic oligonucleotide
ugcugcccgcaaaggcgaa

SEQ ID NO: 2152622 - RNA, 19 nt, Artificial Sequence
  Description of Artificial Sequence: Synthetic oligonucleotide
cacaccuccuucagguggu

SEQ ID NO: 2152623 - RNA, 19 nt, Artificial Sequence
  Description of Artificial Sequence: Synthetic oligonucleotide
uggaguugugaaggaccuu

SEQ ID NO: 2152624 - RNA, 19 nt, Artificial Sequence
  Description of Artificial Sequence: Synthetic oligonucleotide
ccauucggccaaaguggag

SEQ ID NO: 2152625 - RNA, 19 nt, Artificial Sequence
  Description of Artificial Sequence: Synthetic oligonucleotide
aagucccgaggcagguaaa

SEQ ID NO: 2152626 - RNA, 19 nt, Artificial Sequence
  Description of Artificial Sequence: Synthetic oligonucleotide
ggugguugccacuuagguu

SEQ ID NO: 2152627 - RNA, 19 nt, Artificial Sequence
  Description of Artificial Sequence: Synthetic oligonucleotide
gcagauggucgaaggcacc

SEQ ID NO: 2152628 - RNA, 19 nt, Artificial Sequence
  Description of Artificial Sequence: Synthetic oligonucleotide
ugagggcguuguccuccaa

SEQ ID NO: 2152629 - RNA, 19 nt, Artificial Sequence
  Description of Artificial Sequence: Synthetic oligonucleotide
cuugcagcgcaaggccuga

SEQ ID NO: 2152630 - RNA, 19 nt, Artificial Sequence
  Description of Artificial Sequence: Synthetic oligonucleotide
ugcccucgaaggccaccau

SEQ ID NO: 2152631 - RNA, 19 nt, Artificial Sequence
  Description of Artificial Sequence: Synthetic oligonucleotide
uggcuuuauccggcaccac

SEQ ID NO: 2152632 - RNA, 19 nt, Artificial Sequence
  Description of Artificial Sequence: Synthetic oligonucleotide
aggcgaaggcgcugagguu

SEQ ID NO: 2152633 - RNA, 19 nt, Artificial Sequence
  Description of Artificial Sequence: Synthetic oligonucleotide
guuggaacugagguuuguu

SEQ ID NO: 2152634 - RNA, 19 nt, Artificial Sequence
  Description of Artificial Sequence: Synthetic oligonucleotide
auagcgccuaucagagcua

SEQ ID NO: 2152635 - RNA, 19 nt, Artificial Sequence
  Description of Artificial Sequence: Synthetic oligonucleotide
gccauucggccaaagugga

SEQ ID NO: 2152636 - RNA, 19 nt, Artificial Sequence
  Description of Artificial Sequence: Synthetic oligonucleotide
cugggcuaguaagucccga

SEQ ID NO: 2152637 - RNA, 19 nt, Artificial Sequence
  Description of Artificial Sequence: Synthetic oligonucleotide
caugcccucgaagcuucca

SEQ ID NO: 2152638 - RNA, 19 nt, Artificial Sequence
  Description of Artificial Sequence: Synthetic oligonucleotide
cccgaggcagguaaaggaa

SEQ ID NO: 2152639 - RNA, 19 nt, Artificial Sequence
  Description of Artificial Sequence: Synthetic oligonucleotide
gggcacgaugugguucagg

SEQ ID NO: 2152640 - RNA, 19 nt, Artificial Sequence
  Description of Artificial Sequence: Synthetic oligonucleotide
gcguugcugcccgcaaagg

SEQ ID NO: 2152641 - RNA, 19 nt, Artificial Sequence
  Description of Artificial Sequence: Synthetic oligonucleotide
ggaugcauaggagggaguu

SEQ ID NO: 2152642 - RNA, 19 nt, Artificial Sequence
  Description of Artificial Sequence: Synthetic oligonucleotide
ggggccgagacgcuggcgu

SEQ ID NO: 2152643 - RNA, 19 nt, Artificial Sequence
  Description of Artificial Sequence: Synthetic oligonucleotide
gguccaagagggcacgauu

SEQ ID NO: 2152644 - RNA, 19 nt, Artificial Sequence
  Description of Artificial Sequence: Synthetic oligonucleotide
guaagucccgaggcaggua

SEQ ID NO: 2152645 - RNA, 19 nt, Artificial Sequence
  Description of Artificial Sequence: Synthetic oligonucleotide
uggcgcaggcccggcagau

SEQ ID NO: 2152646 - RNA, 19 nt, Artificial Sequence
  Description of Artificial Sequence: Synthetic oligonucleotide
guccuugaccaguccugcu

SEQ ID NO: 2152647 - RNA, 19 nt, Artificial Sequence
  Description of Artificial Sequence: Synthetic oligonucleotide
cccgcacacaccuccuuca

SEQ ID NO: 2152648 - RNA, 19 nt, Artificial Sequence
  Description of Artificial Sequence: Synthetic oligonucleotide
gccgagacgcuggcguugc

SEQ ID NO: 2152649 - RNA, 19 nt, Artificial Sequence
  Description of Artificial Sequence: Synthetic oligonucleotide
uccgaagguccaggugcuu

SEQ ID NO: 2152650 - RNA, 19 nt, Artificial Sequence
  Description of Artificial Sequence: Synthetic oligonucleotide
ggcgcugagguuggugaga

SEQ ID NO: 2152651 - RNA, 19 nt, Artificial Sequence
  Description of Artificial Sequence: Synthetic oligonucleotide
ggccugagcgcagggcagc

SEQ ID NO: 2152652 - RNA, 19 nt, Artificial Sequence
  Description of Artificial Sequence: Synthetic oligonucleotide
cuggcguugcugcccgcaa

SEQ ID NO: 2152653 - RNA, 19 nt, Artificial Sequence
  Description of Artificial Sequence: Synthetic oligonucleotide
ggucgagguggcgcaggcc

SEQ ID NO: 2152654 - RNA, 19 nt, Artificial Sequence
  Description of Artificial Sequence: Synthetic oligonucleotide
gcugcccgcaaaggcgaag

SEQ ID NO: 2152655 - RNA, 19 nt, Artificial Sequence
  Description of Artificial Sequence: Synthetic oligonucleotide
ggaggaaaauagcgccuau

SEQ ID NO: 2152656 - RNA, 19 nt, Artificial Sequence
  Description of Artificial Sequence: Synthetic oligonucleotide
ggccgagacgcuggcguug

SEQ ID NO: 2152657 - RNA, 19 nt, Artificial Sequence
  Description of Artificial Sequence: Synthetic oligonucleotide
cguuguccuccaaguggag

SEQ ID NO: 2152658 - RNA, 19 nt, Artificial Sequence
  Description of Artificial Sequence: Synthetic oligonucleotide
gccuggcuuuauccggcac

SEQ ID NO: 2152659 - RNA, 19 nt, Artificial Sequence
  Description of Artificial Sequence: Synthetic oligonucleotide
gcgucacaguccaggucag

SEQ ID NO: 2152660 - RNA, 19 nt, Artificial Sequence
  Description of Artificial Sequence: Synthetic oligonucleotide
aggccaccaugcccucgaa

SEQ ID NO: 2152661 - RNA, 19 nt, Artificial Sequence
  Description of Artificial Sequence: Synthetic oligonucleotide
aggcacccgcacacaccuc

SEQ ID NO: 2152662 - RNA, 19 nt, Artificial Sequence
  Description of Artificial Sequence: Synthetic oligonucleotide
ggauagcgucacaguccag

SEQ ID NO: 2152663 - RNA, 19 nt, Artificial Sequence
  Description of Artificial Sequence: Synthetic oligonucleotide
ggggaaggauagcgucaca

SEQ ID NO: 2152664 - RNA, 19 nt, Artificial Sequence
  Description of Artificial Sequence: Synthetic oligonucleotide
cucaugcagagcuguccuu

SEQ ID NO: 2152665 - RNA, 19 nt, Artificial Sequence
  Description of Artificial Sequence: Synthetic oligonucleotide
ccaugcccucgaagcuucc

SEQ ID NO: 2152666 - RNA, 19 nt, Artificial Sequence
  Description of Artificial Sequence: Synthetic oligonucleotide
gcuggcguugcugcccgca

SEQ ID NO: 2152667 - RNA, 19 nt, Artificial Sequence
  Description of Artificial Sequence: Synthetic oligonucleotide
agcgccuaucagagcuaaa

SEQ ID NO: 2152668 - RNA, 19 nt, Artificial Sequence
  Description of Artificial Sequence: Synthetic oligonucleotide
gguccgcauugauuucgua

SEQ ID NO: 2152669 - RNA, 19 nt, Artificial Sequence
  Description of Artificial Sequence: Synthetic oligonucleotide
cgcaaggccugagcgcagg

SEQ ID NO: 2152670 - RNA, 19 nt, Artificial Sequence
  Description of Artificial Sequence: Synthetic oligonucleotide
ccgcauugauuucguaucu

SEQ ID NO: 2152671 - RNA, 19 nt, Artificial Sequence
  Description of Artificial Sequence: Synthetic oligonucleotide
gcccggcagauggucgaag

SEQ ID NO: 2152672 - RNA, 19 nt, Artificial Sequence
  Description of Artificial Sequence: Synthetic oligonucleotide
caccaugcccucgaagcuu

SEQ ID NO: 2152673 - RNA, 19 nt, Artificial Sequence
  Description of Artificial Sequence: Synthetic oligonucleotide
ccuugccauucggccaaag

SEQ ID NO: 2152674 - RNA, 19 nt, Artificial Sequence
  Description of Artificial Sequence: Synthetic oligonucleotide
ggcaccaccucugucucuu

SEQ ID NO: 2152675 - RNA, 19 nt, Artificial Sequence
  Description of Artificial Sequence: Synthetic oligonucleotide
ccgaguuggaacugagguu

SEQ ID NO: 2152676 - RNA, 19 nt, Artificial Sequence
  Description of Artificial Sequence: Synthetic oligonucleotide
ccaccaugcccucgaagcu

SEQ ID NO: 2152677 - RNA, 19 nt, Artificial Sequence
  Description of Artificial Sequence: Synthetic oligonucleotide
ggggcacgaugugguucag

SEQ ID NO: 2152678 - RNA, 19 nt, Artificial Sequence
  Description of Artificial Sequence: Synthetic oligonucleotide
ggguuguggcugaggucga

SEQ ID NO: 2152679 - RNA, 19 nt, Artificial Sequence
  Description of Artificial Sequence: Synthetic oligonucleotide
ccugagcgcagggcagcug

SEQ ID NO: 2152680 - RNA, 19 nt, Artificial Sequence
  Description of Artificial Sequence: Synthetic oligonucleotide
cccucgaagcuuccauucu

SEQ ID NO: 2152681 - RNA, 19 nt, Artificial Sequence
  Description of Artificial Sequence: Synthetic oligonucleotide
cccuugcagcgcaaggccu

SEQ ID NO: 2152682 - RNA, 19 nt, Artificial Sequence
  Description of Artificial Sequence: Synthetic oligonucleotide
gaaggaccuugagggcguu

SEQ ID NO: 2152683 - RNA, 19 nt, Artificial Sequence
  Description of Artificial Sequence: Synthetic oligonucleotide
gcgcaaggccugagcgcag

SEQ ID NO: 2152684 - RNA, 19 nt, Artificial Sequence
  Description of Artificial Sequence: Synthetic oligonucleotide
cagagcuguugagguccaa

SEQ ID NO: 2152685 - RNA, 19 nt, Artificial Sequence
  Description of Artificial Sequence: Synthetic oligonucleotide
ggguccgcauugauuucgu

SEQ ID NO: 2152686 - RNA, 19 nt, Artificial Sequence
  Description of Artificial Sequence: Synthetic oligonucleotide
gggcacgauuccucauuuu

SEQ ID NO: 2152687 - RNA, 19 nt, Artificial Sequence
  Description of Artificial Sequence: Synthetic oligonucleotide
caggugagccuggcuuuau

SEQ ID NO: 2152688 - RNA, 19 nt, Artificial Sequence
  Description of Artificial Sequence: Synthetic oligonucleotide
ccgcaaaggcgaaggcgcu

SEQ ID NO: 2152689 - RNA, 19 nt, Artificial Sequence
  Description of Artificial Sequence: Synthetic oligonucleotide
cacccgcacacaccuccuu

SEQ ID NO: 2152690 - RNA, 19 nt, Artificial Sequence
  Description of Artificial Sequence: Synthetic oligonucleotide
cccugcaggcaucucugau

SEQ ID NO: 2152691 - RNA, 19 nt, Artificial Sequence
  Description of Artificial Sequence: Synthetic oligonucleotide
ggcccggcagauggucgaa

SEQ ID NO: 2152692 - RNA, 19 nt, Artificial Sequence
  Description of Artificial Sequence: Synthetic oligonucleotide
gggccgagacgcuggcguu

SEQ ID NO: 2152693 - RNA, 19 nt, Artificial Sequence
  Description of Artificial Sequence: Synthetic oligonucleotide
cgucacaguccaggucaga

SEQ ID NO: 2152694 - RNA, 19 nt, Artificial Sequence
  Description of Artificial Sequence: Synthetic oligonucleotide
agaaauauccuguaauucc

SEQ ID NO: 2152695 - RNA, 19 nt, Artificial Sequence
  Description of Artificial Sequence: Synthetic oligonucleotide
aagucuuaaagauguagcc

SEQ ID NO: 2152696 - RNA, 19 nt, Artificial Sequence
  Description of Artificial Sequence: Synthetic oligonucleotide
aguacuuuguaauaguaac

SEQ ID NO: 2152697 - RNA, 19 nt, Artificial Sequence
  Description of Artificial Sequence: Synthetic oligonucleotide
aaauguucauaauacgggg

SEQ ID NO: 2152698 - RNA, 19 nt, Artificial Sequence
  Description of Artificial Sequence: Synthetic oligonucleotide
aauaguaacagaaaagucu

SEQ ID NO: 2152699 - RNA, 19 nt, Artificial Sequence
  Description of Artificial Sequence: Synthetic oligonucleotide
aacagaaaagucugggugg

SEQ ID NO: 2152700 - RNA, 19 nt, Artificial Sequence
  Description of Artificial Sequence: Synthetic oligonucleotide
aauauccuguaauuccugc

SEQ ID NO: 2152701 - RNA, 19 nt, Artificial Sequence
  Description of Artificial Sequence: Synthetic oligonucleotide
aucaaagaaacccaucaac

SEQ ID NO: 2152702 - RNA, 19 nt, Artificial Sequence
  Description of Artificial Sequence: Synthetic oligonucleotide
ugagguuucuuuuaauggg

SEQ ID NO: 2152703 - RNA, 19 nt, Artificial Sequence
  Description of Artificial Sequence: Synthetic oligonucleotide
ucuuuuaaugggaacguag

SEQ ID NO: 2152704 - RNA, 19 nt, Artificial Sequence
  Description of Artificial Sequence: Synthetic oligonucleotide
auacaaaggagugugaaac

SEQ ID NO: 2152705 - RNA, 19 nt, Artificial Sequence
  Description of Artificial Sequence: Synthetic oligonucleotide
aacguagugcuuccaaggc

SEQ ID NO: 2152706 - RNA, 19 nt, Artificial Sequence
  Description of Artificial Sequence: Synthetic oligonucleotide
ucuagaagaucacugaggu

SEQ ID NO: 2152707 - RNA, 19 nt, Artificial Sequence
  Description of Artificial Sequence: Synthetic oligonucleotide
ucacaagucuuaaagaugu

SEQ ID NO: 2152708 - RNA, 19 nt, Artificial Sequence
  Description of Artificial Sequence: Synthetic oligonucleotide
uugauaagguccaacuggg

SEQ ID NO: 2152709 - RNA, 19 nt, Artificial Sequence
  Description of Artificial Sequence: Synthetic oligonucleotide
aagaaauccucuugcuucg

SEQ ID NO: 2152710 - RNA, 19 nt, Artificial Sequence
  Description of Artificial Sequence: Synthetic oligonucleotide
aaacccaucaacuuggcuu

SEQ ID NO: 2152711 - RNA, 19 nt, Artificial Sequence
  Description of Artificial Sequence: Synthetic oligonucleotide
uacuuaaagaaaucaaaga

SEQ ID NO: 2152712 - RNA, 19 nt, Artificial Sequence
  Description of Artificial Sequence: Synthetic oligonucleotide
uuuaaugggaacguagugc

SEQ ID NO: 2152713 - RNA, 19 nt, Artificial Sequence
  Description of Artificial Sequence: Synthetic oligonucleotide
gaaaucaccauguaucuca

SEQ ID NO: 2152714 - RNA, 19 nt, Artificial Sequence
  Description of Artificial Sequence: Synthetic oligonucleotide
uuguaauaguaacagaaaa

SEQ ID NO: 2152715 - RNA, 19 nt, Artificial Sequence
  Description of Artificial Sequence: Synthetic oligonucleotide
ucaucauuuuccuuggccc

SEQ ID NO: 2152716 - RNA, 19 nt, Artificial Sequence
  Description of Artificial Sequence: Synthetic oligonucleotide
uguaauuccugcaucuagc

SEQ ID NO: 2152717 - RNA, 19 nt, Artificial Sequence
  Description of Artificial Sequence: Synthetic oligonucleotide
uacuaagaaauccucuugc

SEQ ID NO: 2152718 - RNA, 19 nt, Artificial Sequence
  Description of Artificial Sequence: Synthetic oligonucleotide
auaagguccaacuggguag

SEQ ID NO: 2152719 - RNA, 19 nt, Artificial Sequence
  Description of Artificial Sequence: Synthetic oligonucleotide
aaugggaacguagugcuuc

SEQ ID NO: 2152720 - RNA, 19 nt, Artificial Sequence
  Description of Artificial Sequence: Synthetic oligonucleotide
aagaaacccaucaacuugg

SEQ ID NO: 2152721 - RNA, 19 nt, Artificial Sequence
  Description of Artificial Sequence: Synthetic oligonucleotide
uuaaugggaacguagugcu

SEQ ID NO: 2152722 - RNA, 19 nt, Artificial Sequence
  Description of Artificial Sequence: Synthetic oligonucleotide
cuuuguaauaguaacagaa

SEQ ID NO: 2152723 - RNA, 19 nt, Artificial Sequence
  Description of Artificial Sequence: Synthetic oligonucleotide
aaacggaugugccaucauc

SEQ ID NO: 2152724 - RNA, 19 nt, Artificial Sequence
  Description of Artificial Sequence: Synthetic oligonucleotide
uuuuaaugggaacguagug

SEQ ID NO: 2152725 - RNA, 19 nt, Artificial Sequence
  Description of Artificial Sequence: Synthetic oligonucleotide
gaacguagugcuuccaagg

SEQ ID NO: 2152726 - RNA, 19 nt, Artificial Sequence
  Description of Artificial Sequence: Synthetic oligonucleotide
auuuaccugguacuuguac

SEQ ID NO: 2152727 - RNA, 19 nt, Artificial Sequence
  Description of Artificial Sequence: Synthetic oligonucleotide
uagaagaucacugagguuu

SEQ ID NO: 2152728 - RNA, 19 nt, Artificial Sequence
  Description of Artificial Sequence: Synthetic oligonucleotide
ucucuagaagaucacugag

SEQ ID NO: 2152729 - RNA, 19 nt, Artificial Sequence
  Description of Artificial Sequence: Synthetic oligonucleotide
gauagggauaccuguacgc

SEQ ID NO: 2152730 - RNA, 19 nt, Artificial Sequence
  Description of Artificial Sequence: Synthetic oligonucleotide
uaaaggucuuccuucuccg

SEQ ID NO: 2152731 - RNA, 19 nt, Artificial Sequence
  Description of Artificial Sequence: Synthetic oligonucleotide
cauaauacggggaauccug

SEQ ID NO: 2152732 - RNA, 19 nt, Artificial Sequence
  Description of Artificial Sequence: Synthetic oligonucleotide
ugccacauagaaauguuca

SEQ ID NO: 2152733 - RNA, 19 nt, Artificial Sequence
  Description of Artificial Sequence: Synthetic oligonucleotide
ucaacuuggcuuuuccaag

SEQ ID NO: 2152734 - RNA, 19 nt, Artificial Sequence
  Description of Artificial Sequence: Synthetic oligonucleotide
ucuuuggcgaucuucuuug

SEQ ID NO: 2152735 - RNA, 19 nt, Artificial Sequence
  Description of Artificial Sequence: Synthetic oligonucleotide
aaaggagugugaaacuggg

SEQ ID NO: 2152736 - RNA, 19 nt, Artificial Sequence
  Description of Artificial Sequence: Synthetic oligonucleotide
uccaucacguaucaugggc

SEQ ID NO: 2152737 - RNA, 19 nt, Artificial Sequence
  Description of Artificial Sequence: Synthetic oligonucleotide
uaacuguccuucuuuggcg

SEQ ID NO: 2152738 - RNA, 19 nt, Artificial Sequence
  Description of Artificial Sequence: Synthetic oligonucleotide
cuugacuuucucuagaaga

SEQ ID NO: 2152739 - RNA, 19 nt, Artificial Sequence
  Description of Artificial Sequence: Synthetic oligonucleotide
aagaaaucaaagaaaccca

SEQ ID NO: 2152740 - RNA, 19 nt, Artificial Sequence
  Description of Artificial Sequence: Synthetic oligonucleotide
auaguaacagaaaagucug

SEQ ID NO: 2152741 - RNA, 19 nt, Artificial Sequence
  Description of Artificial Sequence: Synthetic oligonucleotide
gugagcuugacccaccagg

SEQ ID NO: 2152742 - RNA, 19 nt, Artificial Sequence
  Description of Artificial Sequence: Synthetic oligonucleotide
uucuguaguacuuuguaau

SEQ ID NO: 2152743 - RNA, 19 nt, Artificial Sequence
  Description of Artificial Sequence: Synthetic oligonucleotide
uuuaccugguacuuguacu

SEQ ID NO: 2152744 - RNA, 19 nt, Artificial Sequence
  Description of Artificial Sequence: Synthetic oligonucleotide
acaagcuccauuccaucac

SEQ ID NO: 2152745 - RNA, 19 nt, Artificial Sequence
  Description of Artificial Sequence: Synthetic oligonucleotide
aacaagcuccauuccauca

SEQ ID NO: 2152746 - RNA, 19 nt, Artificial Sequence
  Description of Artificial Sequence: Synthetic oligonucleotide
gauaccuguacgcagccac

SEQ ID NO: 2152747 - RNA, 19 nt, Artificial Sequence
  Description of Artificial Sequence: Synthetic oligonucleotide
caaaggagugugaaacugg

SEQ ID NO: 2152748 - RNA, 19 nt, Artificial Sequence
  Description of Artificial Sequence: Synthetic oligonucleotide
gguacuuguacuuaaagaa

SEQ ID NO: 2152749 - RNA, 19 nt, Artificial Sequence
  Description of Artificial Sequence: Synthetic oligonucleotide
cuuagugccacauagaaau

SEQ ID NO: 2152750 - RNA, 19 nt, Artificial Sequence
  Description of Artificial Sequence: Synthetic oligonucleotide
uguacuaagaaauccucuu

SEQ ID NO: 2152751 - RNA, 19 nt, Artificial Sequence
  Description of Artificial Sequence: Synthetic oligonucleotide
agauagggauaccuguacg

SEQ ID NO: 2152752 - RNA, 19 nt, Artificial Sequence
  Description of Artificial Sequence: Synthetic oligonucleotide
uccacauuuaccugguacu

SEQ ID NO: 2152753 - RNA, 19 nt, Artificial Sequence
  Description of Artificial Sequence: Synthetic oligonucleotide
auuccaucacguaucaugg

SEQ ID NO: 2152754 - RNA, 19 nt, Artificial Sequence
  Description of Artificial Sequence: Synthetic oligonucleotide
uuguacuaagaaauccucu

SEQ ID NO: 2152755 - RNA, 19 nt, Artificial Sequence
  Description of Artificial Sequence: Synthetic oligonucleotide
uucucuagaagaucacuga

SEQ ID NO: 2152756 - RNA, 19 nt, Artificial Sequence
  Description of Artificial Sequence: Synthetic oligonucleotide
acguagugcuuccaaggcc

SEQ ID NO: 2152757 - RNA, 19 nt, Artificial Sequence
  Description of Artificial Sequence: Synthetic oligonucleotide
uaguaacagaaaagucugg

SEQ ID NO: 2152758 - RNA, 19 nt, Artificial Sequence
  Description of Artificial Sequence: Synthetic oligonucleotide
ugagcuugacccaccaggc

SEQ ID NO: 2152759 - RNA, 19 nt, Artificial Sequence
  Description of Artificial Sequence: Synthetic oligonucleotide
acauuuaccugguacuugu

SEQ ID NO: 2152760 - RNA, 19 nt, Artificial Sequence
  Description of Artificial Sequence: Synthetic oligonucleotide
uaguacuuuguaauaguaa

SEQ ID NO: 2152761 - RNA, 19 nt, Artificial Sequence
  Description of Artificial Sequence: Synthetic oligonucleotide
auacggggaauccugcuuc

SEQ ID NO: 2152762 - RNA, 19 nt, Artificial Sequence
  Description of Artificial Sequence: Synthetic oligonucleotide
augagauagggauaccugu

SEQ ID NO: 2152763 - RNA, 19 nt, Artificial Sequence
  Description of Artificial Sequence: Synthetic oligonucleotide
gauuagaggugugagcuug

SEQ ID NO: 2152764 - RNA, 19 nt, Artificial Sequence
  Description of Artificial Sequence: Synthetic oligonucleotide
uguggauuuucuugggaca

SEQ ID NO: 2152765 - RNA, 19 nt, Artificial Sequence
  Description of Artificial Sequence: Synthetic oligonucleotide
uaauuccugcaucuagcag

SEQ ID NO: 2152766 - RNA, 19 nt, Artificial Sequence
  Description of Artificial Sequence: Synthetic oligonucleotide
aggccuuagugccacauag

SEQ ID NO: 2152767 - RNA, 19 nt, Artificial Sequence
  Description of Artificial Sequence: Synthetic oligonucleotide
acuaagaaauccucuugcu

SEQ ID NO: 2152768 - RNA, 19 nt, Artificial Sequence
  Description of Artificial Sequence: Synthetic oligonucleotide
uccuuaaaggucuuccuuc

SEQ ID NO: 2152769 - RNA, 19 nt, Artificial Sequence
  Description of Artificial Sequence: Synthetic oligonucleotide
uauccuguaauuccugcau

SEQ ID NO: 2152770 - RNA, 19 nt, Artificial Sequence
  Description of Artificial Sequence: Synthetic oligonucleotide
aauguucauaauacgggga

SEQ ID NO: 2152771 - RNA, 19 nt, Artificial Sequence
  Description of Artificial Sequence: Synthetic oligonucleotide
aucaacuuggcuuuuccaa

SEQ ID NO: 2152772 - RNA, 19 nt, Artificial Sequence
  Description of Artificial Sequence: Synthetic oligonucleotide
uggggaacaagcuccauuc

SEQ ID NO: 2152773 - RNA, 19 nt, Artificial Sequence
  Description of Artificial Sequence: Synthetic oligonucleotide
uucauaauacggggaaucc

SEQ ID NO: 2152774 - RNA, 19 nt, Artificial Sequence
  Description of Artificial Sequence: Synthetic oligonucleotide
caugagauagggauaccug

SEQ ID NO: 2152775 - RNA, 19 nt, Artificial Sequence
  Description of Artificial Sequence: Synthetic oligonucleotide
uucgccucuagagugcugg

SEQ ID NO: 2152776 - RNA, 19 nt, Artificial Sequence
  Description of Artificial Sequence: Synthetic oligonucleotide
guacuaagaaauccucuug

SEQ ID NO: 2152777 - RNA, 19 nt, Artificial Sequence
  Description of Artificial Sequence: Synthetic oligonucleotide
aacggaugugccaucaucu

SEQ ID NO: 2152778 - RNA, 19 nt, Artificial Sequence
  Description of Artificial Sequence: Synthetic oligonucleotide
ggaauccugcuucagaacc

SEQ ID NO: 2152779 - RNA, 19 nt, Artificial Sequence
  Description of Artificial Sequence: Synthetic oligonucleotide
auaauacggggaauccugc

SEQ ID NO: 2152780 - RNA, 19 nt, Artificial Sequence
  Description of Artificial Sequence: Synthetic oligonucleotide
aauacggggaauccugcuu

SEQ ID NO: 2152781 - RNA, 19 nt, Artificial Sequence
  Description of Artificial Sequence: Synthetic oligonucleotide
uccuguaauuccugcaucu

SEQ ID NO: 2152782 - RNA, 19 nt, Artificial Sequence
  Description of Artificial Sequence: Synthetic oligonucleotide
cuguaauuccugcaucuag

SEQ ID NO: 2152783 - RNA, 19 nt, Artificial Sequence
  Description of Artificial Sequence: Synthetic oligonucleotide
aacuguccuucuuuggcga

SEQ ID NO: 2152784 - RNA, 19 nt, Artificial Sequence
  Description of Artificial Sequence: Synthetic oligonucleotide
cuuguacuuaaagaaauca

SEQ ID NO: 2152785 - RNA, 19 nt, Artificial Sequence
  Description of Artificial Sequence: Synthetic oligonucleotide
auguucauaauacggggaa

SEQ ID NO: 2152786 - RNA, 19 nt, Artificial Sequence
  Description of Artificial Sequence: Synthetic oligonucleotide
agauguagccagcauacaa

SEQ ID NO: 2152787 - RNA, 19 nt, Artificial Sequence
  Description of Artificial Sequence: Synthetic oligonucleotide
acaaaggagugugaaacug

SEQ ID NO: 2152788 - RNA, 19 nt, Artificial Sequence
  Description of Artificial Sequence: Synthetic oligonucleotide
cguaucaugggcuugcugg

SEQ ID NO: 2152789 - RNA, 19 nt, Artificial Sequence
  Description of Artificial Sequence: Synthetic oligonucleotide
uugcuucgccucuagagug

SEQ ID NO: 2152790 - RNA, 19 nt, Artificial Sequence
  Description of Artificial Sequence: Synthetic oligonucleotide
ucuguaguacuuuguaaua

SEQ ID NO: 2152791 - RNA, 19 nt, Artificial Sequence
  Description of Artificial Sequence: Synthetic oligonucleotide
augggaacguagugcuucc

SEQ ID NO: 2152792 - RNA, 19 nt, Artificial Sequence
  Description of Artificial Sequence: Synthetic oligonucleotide
gagauagggauaccuguac

SEQ ID NO: 2152793 - RNA, 19 nt, Artificial Sequence
  Description of Artificial Sequence: Synthetic oligonucleotide
agucuuaaagauguagcca

SEQ ID NO: 2152794 - RNA, 19 nt, Artificial Sequence
  Description of Artificial Sequence: Synthetic oligonucleotide
uguaccaacugcagccucu

SEQ ID NO: 2152795 - RNA, 19 nt, Artificial Sequence
  Description of Artificial Sequence: Synthetic oligonucleotide
uacaaaggagugugaaacu

SEQ ID NO: 2152796 - RNA, 19 nt, Artificial Sequence
  Description of Artificial Sequence: Synthetic oligonucleotide
agcguauuucuguaguacu

SEQ ID NO: 2152797 - RNA, 19 nt, Artificial Sequence
  Description of Artificial Sequence: Synthetic oligonucleotide
aaggagugugaaacugggc

SEQ ID NO: 2152798 - RNA, 19 nt, Artificial Sequence
  Description of Artificial Sequence: Synthetic oligonucleotide
ugagauagggauaccugua

SEQ ID NO: 2152799 - RNA, 19 nt, Artificial Sequence
  Description of Artificial Sequence: Synthetic oligonucleotide
acuugacuuucucuagaag

SEQ ID NO: 2152800 - RNA, 19 nt, Artificial Sequence
  Description of Artificial Sequence: Synthetic oligonucleotide
acuggcaaacggaugugcc

SEQ ID NO: 2152801 - RNA, 19 nt, Artificial Sequence
  Description of Artificial Sequence: Synthetic oligonucleotide
auauccuguaauuccugca

SEQ ID NO: 2152802 - RNA, 19 nt, Artificial Sequence
  Description of Artificial Sequence: Synthetic oligonucleotide
agggauaccuguacgcagc

SEQ ID NO: 2152803 - RNA, 19 nt, Artificial Sequence
  Description of Artificial Sequence: Synthetic oligonucleotide
agcuugacccaccaggccu

SEQ ID NO: 2152804 - RNA, 19 nt, Artificial Sequence
  Description of Artificial Sequence: Synthetic oligonucleotide
ucaccauguaucucaggca

SEQ ID NO: 2152805 - RNA, 19 nt, Artificial Sequence
  Description of Artificial Sequence: Synthetic oligonucleotide
uuggcuucuugauaagguc

SEQ ID NO: 2152806 - RNA, 19 nt, Artificial Sequence
  Description of Artificial Sequence: Synthetic oligonucleotide
ugaaacugggccuccuuaa

SEQ ID NO: 2152807 - RNA, 19 nt, Artificial Sequence
  Description of Artificial Sequence: Synthetic oligonucleotide
ugcaucuagcagcugugga

SEQ ID NO: 2152808 - RNA, 19 nt, Artificial Sequence
  Description of Artificial Sequence: Synthetic oligonucleotide
ucauaauacggggaauccu

SEQ ID NO: 2152809 - RNA, 19 nt, Artificial Sequence
  Description of Artificial Sequence: Synthetic oligonucleotide
uuuggcgaucuucuuugcu

SEQ ID NO: 2152810 - RNA, 19 nt, Artificial Sequence
  Description of Artificial Sequence: Synthetic oligonucleotide
uguaucucaggcaggcuuu

SEQ ID NO: 2152811 - RNA, 19 nt, Artificial Sequence
  Description of Artificial Sequence: Synthetic oligonucleotide
uagaggugugagcuugacc

SEQ ID NO: 2152812 - RNA, 19 nt, Artificial Sequence
  Description of Artificial Sequence: Synthetic oligonucleotide
uuccaucacguaucauggg

SEQ ID NO: 2152813 - RNA, 19 nt, Artificial Sequence
  Description of Artificial Sequence: Synthetic oligonucleotide
cagcauacaaaggagugug

SEQ ID NO: 2152814 - RNA, 19 nt, Artificial Sequence
  Description of Artificial Sequence: Synthetic oligonucleotide
ucacugagguuucuuuuaa

SEQ ID NO: 2152815 - RNA, 19 nt, Artificial Sequence
  Description of Artificial Sequence: Synthetic oligonucleotide
guaucaugggcuugcuggc

SEQ ID NO: 2152816 - RNA, 19 nt, Artificial Sequence
  Description of Artificial Sequence: Synthetic oligonucleotide
gauguagccagcauacaaa

SEQ ID NO: 2152817 - RNA, 19 nt, Artificial Sequence
  Description of Artificial Sequence: Synthetic oligonucleotide
acagcuuggcaucuucaca

SEQ ID NO: 2152818 - RNA, 19 nt, Artificial Sequence
  Description of Artificial Sequence: Synthetic oligonucleotide
ucacguaucaugggcuugc

SEQ ID NO: 2152819 - RNA, 19 nt, Artificial Sequence
  Description of Artificial Sequence: Synthetic oligonucleotide
uuggcgaucuucuuugcuu

SEQ ID NO: 2152820 - RNA, 19 nt, Artificial Sequence
  Description of Artificial Sequence: Synthetic oligonucleotide
uucuugggacagcuguacc

SEQ ID NO: 2152821 - RNA, 19 nt, Artificial Sequence
  Description of Artificial Sequence: Synthetic oligonucleotide
guggauuuucuugggacag

SEQ ID NO: 2152822 - RNA, 19 nt, Artificial Sequence
  Description of Artificial Sequence: Synthetic oligonucleotide
ucccuagcaguuaacuguc

SEQ ID NO: 2152823 - RNA, 19 nt, Artificial Sequence
  Description of Artificial Sequence: Synthetic oligonucleotide
agcuguggauuuucuuggg

SEQ ID NO: 2152824 - RNA, 19 nt, Artificial Sequence
  Description of Artificial Sequence: Synthetic oligonucleotide
gcuuuguacuaagaaaucc

SEQ ID NO: 2152825 - RNA, 19 nt, Artificial Sequence
  Description of Artificial Sequence: Synthetic oligonucleotide
agugcuuccaaggccuuag

SEQ ID NO: 2152826 - RNA, 19 nt, Artificial Sequence
  Description of Artificial Sequence: Synthetic oligonucleotide
uaauacggggaauccugcu

SEQ ID NO: 2152827 - RNA, 19 nt, Artificial Sequence
  Description of Artificial Sequence: Synthetic oligonucleotide
uccaagcucucuuucuuuc

SEQ ID NO: 2152828 - RNA, 19 nt, Artificial Sequence
  Description of Artificial Sequence: Synthetic oligonucleotide
ugggcugaccaggaaauca

SEQ ID NO: 2152829 - RNA, 19 nt, Artificial Sequence
  Description of Artificial Sequence: Synthetic oligonucleotide
uguacgcagccacgguucc

SEQ ID NO: 2152830 - RNA, 19 nt, Artificial Sequence
  Description of Artificial Sequence: Synthetic oligonucleotide
auagggauaccuguacgca

SEQ ID NO: 2152831 - RNA, 19 nt, Artificial Sequence
  Description of Artificial Sequence: Synthetic oligonucleotide
uucacagcuuggcaucuuc

SEQ ID NO: 2152832 - RNA, 19 nt, Artificial Sequence
  Description of Artificial Sequence: Synthetic oligonucleotide
ugugagcuugacccaccag

SEQ ID NO: 2152833 - RNA, 19 nt, Artificial Sequence
  Description of Artificial Sequence: Synthetic oligonucleotide
ugauaagguccaacugggu

SEQ ID NO: 2152834 - RNA, 19 nt, Artificial Sequence
  Description of Artificial Sequence: Synthetic oligonucleotide
uaccuguacgcagccacgg

SEQ ID NO: 2152835 - RNA, 19 nt, Artificial Sequence
  Description of Artificial Sequence: Synthetic oligonucleotide
guacuuuguaauaguaaca

SEQ ID NO: 2152836 - RNA, 19 nt, Artificial Sequence
  Description of Artificial Sequence: Synthetic oligonucleotide
agaucacugagguuucuuu

SEQ ID NO: 2152837 - RNA, 19 nt, Artificial Sequence
  Description of Artificial Sequence: Synthetic oligonucleotide
cagcaugagauagggauac

SEQ ID NO: 2152838 - RNA, 19 nt, Artificial Sequence
  Description of Artificial Sequence: Synthetic oligonucleotide
agugugaaacugggccucc

SEQ ID NO: 2152839 - RNA, 19 nt, Artificial Sequence
  Description of Artificial Sequence: Synthetic oligonucleotide
agaagaucacugagguuuc

SEQ ID NO: 2152840 - RNA, 19 nt, Artificial Sequence
  Description of Artificial Sequence: Synthetic oligonucleotide
agaaauccucuugcuucgc

SEQ ID NO: 2152841 - RNA, 19 nt, Artificial Sequence
  Description of Artificial Sequence: Synthetic oligonucleotide
ugcuucgccucuagagugc

SEQ ID NO: 2152842 - RNA, 19 nt, Artificial Sequence
  Description of Artificial Sequence: Synthetic oligonucleotide
ugacccaccaggccuggcu

SEQ ID NO: 2152843 - RNA, 19 nt, Artificial Sequence
  Description of Artificial Sequence: Synthetic oligonucleotide
agaaacccaucaacuuggc

SEQ ID NO: 2152844 - RNA, 19 nt, Artificial Sequence
  Description of Artificial Sequence: Synthetic oligonucleotide
gucccuagcaguuaacugu

SEQ ID NO: 2152845 - RNA, 19 nt, Artificial Sequence
  Description of Artificial Sequence: Synthetic oligonucleotide
uggcgaucuucuuugcuuc

SEQ ID NO: 2152846 - RNA, 19 nt, Artificial Sequence
  Description of Artificial Sequence: Synthetic oligonucleotide
agcaguuaacuguccuucu

SEQ ID NO: 2152847 - RNA, 19 nt, Artificial Sequence
  Description of Artificial Sequence: Synthetic oligonucleotide
cuguacgcagccacgguuc

SEQ ID NO: 2152848 - RNA, 19 nt, Artificial Sequence
  Description of Artificial Sequence: Synthetic oligonucleotide
acggaugugccaucaucug

SEQ ID NO: 2152849 - RNA, 19 nt, Artificial Sequence
  Description of Artificial Sequence: Synthetic oligonucleotide
aggugugagcuugacccac

SEQ ID NO: 2152850 - RNA, 19 nt, Artificial Sequence
  Description of Artificial Sequence: Synthetic oligonucleotide
guacuuguacuuaaagaaa

SEQ ID NO: 2152851 - RNA, 19 nt, Artificial Sequence
  Description of Artificial Sequence: Synthetic oligonucleotide
auguuuuggcuucuugaua

SEQ ID NO: 2152852 - RNA, 19 nt, Artificial Sequence
  Description of Artificial Sequence: Synthetic oligonucleotide
uguucauaauacggggaau

SEQ ID NO: 2152853 - RNA, 19 nt, Artificial Sequence
  Description of Artificial Sequence: Synthetic oligonucleotide
ucaggcaggcuuuguacua

SEQ ID NO: 2152854 - RNA, 19 nt, Artificial Sequence
  Description of Artificial Sequence: Synthetic oligonucleotide
cagcguauuucuguaguac

SEQ ID NO: 2152855 - RNA, 19 nt, Artificial Sequence
  Description of Artificial Sequence: Synthetic oligonucleotide
uaucaugggcuugcuggcc

SEQ ID NO: 2152856 - RNA, 19 nt, Artificial Sequence
  Description of Artificial Sequence: Synthetic oligonucleotide
aagauguagccagcauaca

SEQ ID NO: 2152857 - RNA, 19 nt, Artificial Sequence
  Description of Artificial Sequence: Synthetic oligonucleotide
cacauuuaccugguacuug

SEQ ID NO: 2152858 - RNA, 19 nt, Artificial Sequence
  Description of Artificial Sequence: Synthetic oligonucleotide
gagcuugacccaccaggcc

SEQ ID NO: 2152859 - RNA, 19 nt, Artificial Sequence
  Description of Artificial Sequence: Synthetic oligonucleotide
uggcaaacggaugugccau

SEQ ID NO: 2152860 - RNA, 19 nt, Artificial Sequence
  Description of Artificial Sequence: Synthetic oligonucleotide
cuuuggcgaucuucuuugc

SEQ ID NO: 2152861 - RNA, 19 nt, Artificial Sequence
  Description of Artificial Sequence: Synthetic oligonucleotide
gaauccugcuucagaacca

SEQ ID NO: 2152862 - RNA, 19 nt, Artificial Sequence
  Description of Artificial Sequence: Synthetic oligonucleotide
uggauuuucuugggacagc

SEQ ID NO: 2152863 - RNA, 19 nt, Artificial Sequence
  Description of Artificial Sequence: Synthetic oligonucleotide
cuguggcacuggcaaacgg

SEQ ID NO: 2152864 - RNA, 19 nt, Artificial Sequence
  Description of Artificial Sequence: Synthetic oligonucleotide
ggucccuagcaguuaacug

SEQ ID NO: 2152865 - RNA, 19 nt, Artificial Sequence
  Description of Artificial Sequence: Synthetic oligonucleotide
uucuuuuaaugggaacgua

SEQ ID NO: 2152866 - RNA, 19 nt, Artificial Sequence
  Description of Artificial Sequence: Synthetic oligonucleotide
cacgguuccauccacauuu

SEQ ID NO: 2152867 - RNA, 19 nt, Artificial Sequence
  Description of Artificial Sequence: Synthetic oligonucleotide
accugguacuuguacuuaa

SEQ ID NO: 2152868 - RNA, 19 nt, Artificial Sequence
  Description of Artificial Sequence: Synthetic oligonucleotide
uuagaggugugagcuugac

SEQ ID NO: 2152869 - RNA, 19 nt, Artificial Sequence
  Description of Artificial Sequence: Synthetic oligonucleotide
uacggggaauccugcuuca

SEQ ID NO: 2152870 - RNA, 19 nt, Artificial Sequence
  Description of Artificial Sequence: Synthetic oligonucleotide
cuagcagcuguggauuuuc

SEQ ID NO: 2152871 - RNA, 19 nt, Artificial Sequence
  Description of Artificial Sequence: Synthetic oligonucleotide
uggcgcgcagcguauuucu

SEQ ID NO: 2152872 - RNA, 19 nt, Artificial Sequence
  Description of Artificial Sequence: Synthetic oligonucleotide
gggaacaagcuccauucca

SEQ ID NO: 2152873 - RNA, 19 nt, Artificial Sequence
  Description of Artificial Sequence: Synthetic oligonucleotide
aucucaggcaggcuuugua

SEQ ID NO: 2152874 - RNA, 19 nt, Artificial Sequence
  Description of Artificial Sequence: Synthetic oligonucleotide
acguaucaugggcuugcug

SEQ ID NO: 2152875 - RNA, 19 nt, Artificial Sequence
  Description of Artificial Sequence: Synthetic oligonucleotide
cugcaucuagcagcugugg

SEQ ID NO: 2152876 - RNA, 19 nt, Artificial Sequence
  Description of Artificial Sequence: Synthetic oligonucleotide
aggucccuagcaguuaacu

SEQ ID NO: 2152877 - RNA, 19 nt, Artificial Sequence
  Description of Artificial Sequence: Synthetic oligonucleotide
ggcugaagcaggucccuag

SEQ ID NO: 2152878 - RNA, 19 nt, Artificial Sequence
  Description of Artificial Sequence: Synthetic oligonucleotide
gguagucugggcugaccag

SEQ ID NO: 2152879 - RNA, 19 nt, Artificial Sequence
  Description of Artificial Sequence: Synthetic oligonucleotide
ucgccucuagagugcuggg

SEQ ID NO: 2152880 - RNA, 19 nt, Artificial Sequence
  Description of Artificial Sequence: Synthetic oligonucleotide
ccggcuaucucuaccucgg

SEQ ID NO: 2152881 - RNA, 19 nt, Artificial Sequence
  Description of Artificial Sequence: Synthetic oligonucleotide
gaggugugagcuugaccca

SEQ ID NO: 2152882 - RNA, 19 nt, Artificial Sequence
  Description of Artificial Sequence: Synthetic oligonucleotide
gggauuagaggugugagcu

SEQ ID NO: 2152883 - RNA, 19 nt, Artificial Sequence
  Description of Artificial Sequence: Synthetic oligonucleotide
ccauguaucucaggcaggc

SEQ ID NO: 2152884 - RNA, 19 nt, Artificial Sequence
  Description of Artificial Sequence: Synthetic oligonucleotide
aucacguaucaugggcuug

SEQ ID NO: 2152885 - RNA, 19 nt, Artificial Sequence
  Description of Artificial Sequence: Synthetic oligonucleotide
gcaggcuuuguacuaagaa

SEQ ID NO: 2152886 - RNA, 19 nt, Artificial Sequence
  Description of Artificial Sequence: Synthetic oligonucleotide
aagguccaacuggguaguc

SEQ ID NO: 2152887 - RNA, 19 nt, Artificial Sequence
  Description of Artificial Sequence: Synthetic oligonucleotide
gccuuagugccacauagaa

SEQ ID NO: 2152888 - RNA, 19 nt, Artificial Sequence
  Description of Artificial Sequence: Synthetic oligonucleotide
gugaaacugggccuccuua

SEQ ID NO: 2152889 - RNA, 19 nt, Artificial Sequence
  Description of Artificial Sequence: Synthetic oligonucleotide
gacccaccaggccuggcuc

SEQ ID NO: 2152890 - RNA, 19 nt, Artificial Sequence
  Description of Artificial Sequence: Synthetic oligonucleotide
agcuccauuccaucacgua

SEQ ID NO: 2152891 - RNA, 19 nt, Artificial Sequence
  Description of Artificial Sequence: Synthetic oligonucleotide
ggguagucugggcugacca

SEQ ID NO: 2152892 - RNA, 19 nt, Artificial Sequence
  Description of Artificial Sequence: Synthetic oligonucleotide
agguccaacuggguagucu

SEQ ID NO: 2152893 - RNA, 19 nt, Artificial Sequence
  Description of Artificial Sequence: Synthetic oligonucleotide
gccaucaucuggcugggga

SEQ ID NO: 2152894 - RNA, 19 nt, Artificial Sequence
  Description of Artificial Sequence: Synthetic oligonucleotide
gugccacauagaaauguuc

SEQ ID NO: 2152895 - RNA, 19 nt, Artificial Sequence
  Description of Artificial Sequence: Synthetic oligonucleotide
aagcaggucccuagcaguu

SEQ ID NO: 2152896 - RNA, 19 nt, Artificial Sequence
  Description of Artificial Sequence: Synthetic oligonucleotide
cccacuugacuuucucuag

SEQ ID NO: 2152897 - RNA, 19 nt, Artificial Sequence
  Description of Artificial Sequence: Synthetic oligonucleotide
uggguagucugggcugacc

SEQ ID NO: 2152898 - RNA, 19 nt, Artificial Sequence
  Description of Artificial Sequence: Synthetic oligonucleotide
cccggcuaucucuaccucg

SEQ ID NO: 2152899 - RNA, 19 nt, Artificial Sequence
  Description of Artificial Sequence: Synthetic oligonucleotide
aucuagcagcuguggauuu

SEQ ID NO: 2152900 - RNA, 19 nt, Artificial Sequence
  Description of Artificial Sequence: Synthetic oligonucleotide
auuagaggugugagcuuga

SEQ ID NO: 2152901 - RNA, 19 nt, Artificial Sequence
  Description of Artificial Sequence: Synthetic oligonucleotide
ggcuugcuggccuggcgcg

SEQ ID NO: 2152902 - RNA, 19 nt, Artificial Sequence
  Description of Artificial Sequence: Synthetic oligonucleotide
guaucucaggcaggcuuug

SEQ ID NO: 2152903 - RNA, 19 nt, Artificial Sequence
  Description of Artificial Sequence: Synthetic oligonucleotide
agcauacaaaggaguguga

SEQ ID NO: 2152904 - RNA, 19 nt, Artificial Sequence
  Description of Artificial Sequence: Synthetic oligonucleotide
accuguacgcagccacggu

SEQ ID NO: 2152905 - RNA, 19 nt, Artificial Sequence
  Description of Artificial Sequence: Synthetic oligonucleotide
cuuucucuagaagaucacu

SEQ ID NO: 2152906 - RNA, 19 nt, Artificial Sequence
  Description of Artificial Sequence: Synthetic oligonucleotide
ggggaacaagcuccauucc

SEQ ID NO: 2152907 - RNA, 19 nt, Artificial Sequence
  Description of Artificial Sequence: Synthetic oligonucleotide
uaccugguacuuguacuua

SEQ ID NO: 2152908 - RNA, 19 nt, Artificial Sequence
  Description of Artificial Sequence: Synthetic oligonucleotide
ucuagcagcuguggauuuu

SEQ ID NO: 2152909 - RNA, 19 nt, Artificial Sequence
  Description of Artificial Sequence: Synthetic oligonucleotide
cuguaccaacugcagccuc

SEQ ID NO: 2152910 - RNA, 19 nt, Artificial Sequence
  Description of Artificial Sequence: Synthetic oligonucleotide
uaucucaggcaggcuuugu

SEQ ID NO: 2152911 - RNA, 19 nt, Artificial Sequence
  Description of Artificial Sequence: Synthetic oligonucleotide
uuggcccacuugacuuucu

SEQ ID NO: 2152912 - RNA, 19 nt, Artificial Sequence
  Description of Artificial Sequence: Synthetic oligonucleotide
gcauacaaaggagugugaa

SEQ ID NO: 2152913 - RNA, 19 nt, Artificial Sequence
  Description of Artificial Sequence: Synthetic oligonucleotide
gaugugccaucaucuggcu

SEQ ID NO: 2152914 - RNA, 19 nt, Artificial Sequence
  Description of Artificial Sequence: Synthetic oligonucleotide
cuuggcccacuugacuuuc

SEQ ID NO: 2152915 - RNA, 19 nt, Artificial Sequence
  Description of Artificial Sequence: Synthetic oligonucleotide
ggcuuuguacuaagaaauc

SEQ ID NO: 2152916 - RNA, 19 nt, Artificial Sequence
  Description of Artificial Sequence: Synthetic oligonucleotide
gugugagcuugacccacca

SEQ ID NO: 2152917 - RNA, 19 nt, Artificial Sequence
  Description of Artificial Sequence: Synthetic oligonucleotide
cccagcaugagauagggau

SEQ ID NO: 2152918 - RNA, 19 nt, Artificial Sequence
  Description of Artificial Sequence: Synthetic oligonucleotide
ggaaaucaccauguaucuc

SEQ ID NO: 2152919 - RNA, 19 nt, Artificial Sequence
  Description of Artificial Sequence: Synthetic oligonucleotide
gcuguggauuuucuuggga

SEQ ID NO: 2152920 - RNA, 19 nt, Artificial Sequence
  Description of Artificial Sequence: Synthetic oligonucleotide
ucccggcuaucucuaccuc

SEQ ID NO: 2152921 - RNA, 19 nt, Artificial Sequence
  Description of Artificial Sequence: Synthetic oligonucleotide
ugggaacguagugcuucca

SEQ ID NO: 2152922 - RNA, 19 nt, Artificial Sequence
  Description of Artificial Sequence: Synthetic oligonucleotide
cuagcaguuaacuguccuu

SEQ ID NO: 2152923 - RNA, 19 nt, Artificial Sequence
  Description of Artificial Sequence: Synthetic oligonucleotide
gcccacuugacuuucucua

SEQ ID NO: 2152924 - RNA, 19 nt, Artificial Sequence
  Description of Artificial Sequence: Synthetic oligonucleotide
guaccaacugcagccucuc

SEQ ID NO: 2152925 - RNA, 19 nt, Artificial Sequence
  Description of Artificial Sequence: Synthetic oligonucleotide
caggucccuagcaguuaac

SEQ ID NO: 2152926 - RNA, 19 nt, Artificial Sequence
  Description of Artificial Sequence: Synthetic oligonucleotide
cugaccaggaaaucaccau

SEQ ID NO: 2152927 - RNA, 19 nt, Artificial Sequence
  Description of Artificial Sequence: Synthetic oligonucleotide
gggaacguagugcuuccaa

SEQ ID NO: 2152928 - RNA, 19 nt, Artificial Sequence
  Description of Artificial Sequence: Synthetic oligonucleotide
ggauuuucuugggacagcu

SEQ ID NO: 2152929 - RNA, 19 nt, Artificial Sequence
  Description of Artificial Sequence: Synthetic oligonucleotide
acggggaauccugcuucag

SEQ ID NO: 2152930 - RNA, 19 nt, Artificial Sequence
  Description of Artificial Sequence: Synthetic oligonucleotide
acgcagccacgguuccauc

SEQ ID NO: 2152931 - RNA, 19 nt, Artificial Sequence
  Description of Artificial Sequence: Synthetic oligonucleotide
caguuaacuguccuucuuu

SEQ ID NO: 2152932 - RNA, 19 nt, Artificial Sequence
  Description of Artificial Sequence: Synthetic oligonucleotide
agucugggcugaccaggaa

SEQ ID NO: 2152933 - RNA, 19 nt, Artificial Sequence
  Description of Artificial Sequence: Synthetic oligonucleotide
cuucgccucuagagugcug

SEQ ID NO: 2152934 - RNA, 19 nt, Artificial Sequence
  Description of Artificial Sequence: Synthetic oligonucleotide
cauuuaccugguacuugua

SEQ ID NO: 2152935 - RNA, 19 nt, Artificial Sequence
  Description of Artificial Sequence: Synthetic oligonucleotide
gcaaacggaugugccauca

SEQ ID NO: 2152936 - RNA, 19 nt, Artificial Sequence
  Description of Artificial Sequence: Synthetic oligonucleotide
ggugugagcuugacccacc

SEQ ID NO: 2152937 - RNA, 19 nt, Artificial Sequence
  Description of Artificial Sequence: Synthetic oligonucleotide
uccucccggcuaucucuac

SEQ ID NO: 2152938 - RNA, 19 nt, Artificial Sequence
  Description of Artificial Sequence: Synthetic oligonucleotide
gcaugagauagggauaccu

SEQ ID NO: 2152939 - RNA, 19 nt, Artificial Sequence
  Description of Artificial Sequence: Synthetic oligonucleotide
uagugcuuccaaggccuua

SEQ ID NO: 2152940 - RNA, 19 nt, Artificial Sequence
  Description of Artificial Sequence: Synthetic oligonucleotide
cacaagucuuaaagaugua

SEQ ID NO: 2152941 - RNA, 19 nt, Artificial Sequence
  Description of Artificial Sequence: Synthetic oligonucleotide
ggaacaagcuccauuccau

SEQ ID NO: 2152942 - RNA, 19 nt, Artificial Sequence
  Description of Artificial Sequence: Synthetic oligonucleotide
ccuuagugccacauagaaa

SEQ ID NO: 2152943 - RNA, 19 nt, Artificial Sequence
  Description of Artificial Sequence: Synthetic oligonucleotide
cuggcgcgcagcguauuuc

SEQ ID NO: 2152944 - RNA, 19 nt, Artificial Sequence
  Description of Artificial Sequence: Synthetic oligonucleotide
ccucccggcuaucucuacc

SEQ ID NO: 2152945 - RNA, 19 nt, Artificial Sequence
  Description of Artificial Sequence: Synthetic oligonucleotide
cgcagccacgguuccaucc

SEQ ID NO: 2152946 - RNA, 19 nt, Artificial Sequence
  Description of Artificial Sequence: Synthetic oligonucleotide
gcgcagcguauuucuguag

SEQ ID NO: 2152947 - RNA, 19 nt, Artificial Sequence
  Description of Artificial Sequence: Synthetic oligonucleotide
uggguggcugaagcagguc

SEQ ID NO: 2152948 - RNA, 19 nt, Artificial Sequence
  Description of Artificial Sequence: Synthetic oligonucleotide
cugggcugaccaggaaauc

SEQ ID NO: 2152949 - RNA, 19 nt, Artificial Sequence
  Description of Artificial Sequence: Synthetic oligonucleotide
gcagcguauuucuguagua

SEQ ID NO: 2152950 - RNA, 19 nt, Artificial Sequence
  Description of Artificial Sequence: Synthetic oligonucleotide
cuagaagaucacugagguu

SEQ ID NO: 2152951 - RNA, 19 nt, Artificial Sequence
  Description of Artificial Sequence: Synthetic oligonucleotide
gcaggucccuagcaguuaa

SEQ ID NO: 2152952 - RNA, 19 nt, Artificial Sequence
  Description of Artificial Sequence: Synthetic oligonucleotide
ccacauagaaauguucaua

SEQ ID NO: 2152953 - RNA, 19 nt, Artificial Sequence
  Description of Artificial Sequence: Synthetic oligonucleotide
uugacccaccaggccuggc

SEQ ID NO: 2152954 - RNA, 19 nt, Artificial Sequence
  Description of Artificial Sequence: Synthetic oligonucleotide
caucacguaucaugggcuu

SEQ ID NO: 2152955 - RNA, 19 nt, Artificial Sequence
  Description of Artificial Sequence: Synthetic oligonucleotide
cccuagcaguuaacugucc

SEQ ID NO: 2152956 - RNA, 19 nt, Artificial Sequence
  Description of Artificial Sequence: Synthetic oligonucleotide
ggcaaacggaugugccauc

SEQ ID NO: 2152957 - RNA, 19 nt, Artificial Sequence
  Description of Artificial Sequence: Synthetic oligonucleotide
guggcacuggcaaacggau

SEQ ID NO: 2152958 - RNA, 19 nt, Artificial Sequence
  Description of Artificial Sequence: Synthetic oligonucleotide
agcaggucccuagcaguua

SEQ ID NO: 2152959 - RNA, 19 nt, Artificial Sequence
  Description of Artificial Sequence: Synthetic oligonucleotide
ccagcaugagauagggaua

SEQ ID NO: 2152960 - RNA, 19 nt, Artificial Sequence
  Description of Artificial Sequence: Synthetic oligonucleotide
cuggggaacaagcuccauu

SEQ ID NO: 2152961 - RNA, 19 nt, Artificial Sequence
  Description of Artificial Sequence: Synthetic oligonucleotide
ccugguacuuguacuuaaa

SEQ ID NO: 2152962 - RNA, 19 nt, Artificial Sequence
  Description of Artificial Sequence: Synthetic oligonucleotide
gcacuggcaaacggaugug

SEQ ID NO: 2152963 - RNA, 19 nt, Artificial Sequence
  Description of Artificial Sequence: Synthetic oligonucleotide
ggccuuagugccacauaga

SEQ ID NO: 2152964 - RNA, 19 nt, Artificial Sequence
  Description of Artificial Sequence: Synthetic oligonucleotide
ccuagcaguuaacuguccu

SEQ ID NO: 2152965 - RNA, 19 nt, Artificial Sequence
  Description of Artificial Sequence: Synthetic oligonucleotide
cuccucccggcuaucucua

SEQ ID NO: 2152966 - RNA, 19 nt, Artificial Sequence
  Description of Artificial Sequence: Synthetic oligonucleotide
guacgcagccacgguucca

SEQ ID NO: 2152967 - RNA, 19 nt, Artificial Sequence
  Description of Artificial Sequence: Synthetic oligonucleotide
ggauaccuguacgcagcca

SEQ ID NO: 2152968 - RNA, 19 nt, Artificial Sequence
  Description of Artificial Sequence: Synthetic oligonucleotide
acgguuccauccacauuua

SEQ ID NO: 2152969 - RNA, 19 nt, Artificial Sequence
  Description of Artificial Sequence: Synthetic oligonucleotide
cauccacauuuaccuggua

SEQ ID NO: 2152970 - RNA, 19 nt, Artificial Sequence
  Description of Artificial Sequence: Synthetic oligonucleotide
caaacggaugugccaucau

SEQ ID NO: 2152971 - RNA, 19 nt, Artificial Sequence
  Description of Artificial Sequence: Synthetic oligonucleotide
ggcgaucuucuuugcuucu

SEQ ID NO: 2152972 - RNA, 19 nt, Artificial Sequence
  Description of Artificial Sequence: Synthetic oligonucleotide
caaggccuuagugccacau

SEQ ID NO: 2152973 - RNA, 19 nt, Artificial Sequence
  Description of Artificial Sequence: Synthetic oligonucleotide
ggcgcgcagcguauuucug

SEQ ID NO: 2152974 - RNA, 19 nt, Artificial Sequence
  Description of Artificial Sequence: Synthetic oligonucleotide
cccaucaacuuggcuuuuc

SEQ ID NO: 2152975 - RNA, 19 nt, Artificial Sequence
  Description of Artificial Sequence: Synthetic oligonucleotide
gccacgguuccauccacau

SEQ ID NO: 2152976 - RNA, 19 nt, Artificial Sequence
  Description of Artificial Sequence: Synthetic oligonucleotide
gcgcgcagcguauuucugu

SEQ ID NO: 2152977 - RNA, 19 nt, Artificial Sequence
  Description of Artificial Sequence: Synthetic oligonucleotide
acccaucaacuuggcuuuu

SEQ ID NO: 2152978 - RNA, 19 nt, Artificial Sequence
  Description of Artificial Sequence: Synthetic oligonucleotide
ggccucuuccuguggcacu

SEQ ID NO: 2152979 - RNA, 19 nt, Artificial Sequence
  Description of Artificial Sequence: Synthetic oligonucleotide
cgcagcguauuucuguagu

SEQ ID NO: 2152980 - RNA, 19 nt, Artificial Sequence
  Description of Artificial Sequence: Synthetic oligonucleotide
ccuguacgcagccacgguu

SEQ ID NO: 2152981 - RNA, 19 nt, Artificial Sequence
  Description of Artificial Sequence: Synthetic oligonucleotide
cacguaucaugggcuugcu

SEQ ID NO: 2152982 - RNA, 19 nt, Artificial Sequence
  Description of Artificial Sequence: Synthetic oligonucleotide
ccggccucuuccuguggca

SEQ ID NO: 2152983 - RNA, 19 nt, Artificial Sequence
  Description of Artificial Sequence: Synthetic oligonucleotide
gcuucgccucuagagugcu

SEQ ID NO: 2152984 - RNA, 19 nt, Artificial Sequence
  Description of Artificial Sequence: Synthetic oligonucleotide
cgcgcagcguauuucugua

SEQ ID NO: 2152985 - RNA, 19 nt, Artificial Sequence
  Description of Artificial Sequence: Synthetic oligonucleotide
ccacauuuaccugguacuu

SEQ ID NO: 2152986 - RNA, 19 nt, Artificial Sequence
  Description of Artificial Sequence: Synthetic oligonucleotide
ccaaggccuuagugccaca

SEQ ID NO: 2152987 - RNA, 19 nt, Artificial Sequence
  Description of Artificial Sequence: Synthetic oligonucleotide
ccuuggcccacuugacuuu

SEQ ID NO: 2152988 - RNA, 19 nt, Artificial Sequence
  Description of Artificial Sequence: Synthetic oligonucleotide
cuggccuggcgcgcagcgu

SEQ ID NO: 2152989 - RNA, 19 nt, Artificial Sequence
  Description of Artificial Sequence: Synthetic oligonucleotide
ccacgguuccauccacauu

SEQ ID NO: 2152990 - RNA, 19 nt, Artificial Sequence
  Description of Artificial Sequence: Synthetic oligonucleotide
ccuggcgcgcagcguauuu

SEQ ID NO: 2152991 - RNA, 19 nt, Artificial Sequence
  Description of Artificial Sequence: Synthetic oligonucleotide
ccauuccaucacguaucau

SEQ ID NO: 2152992 - RNA, 19 nt, Artificial Sequence
  Description of Artificial Sequence: Synthetic oligonucleotide
gccuggcgcgcagcguauu

SEQ ID NO: 2152993 - RNA, 19 nt, Artificial Sequence
  Description of Artificial Sequence: Synthetic oligonucleotide
aaauuuauccuucaguugg

SEQ ID NO: 2152994 - RNA, 19 nt, Artificial Sequence
  Description of Artificial Sequence: Synthetic oligonucleotide
gaauaguagcuauugaugg

SEQ ID NO: 2152995 - RNA, 19 nt, Artificial Sequence
  Description of Artificial Sequence: Synthetic oligonucleotide
ucuucuauguucuugacug

SEQ ID NO: 2152996 - RNA, 19 nt, Artificial Sequence
  Description of Artificial Sequence: Synthetic oligonucleotide
aagagauucaaaguggugg

SEQ ID NO: 2152997 - RNA, 19 nt, Artificial Sequence
  Description of Artificial Sequence: Synthetic oligonucleotide
auagaaaggaacucugacc

SEQ ID NO: 2152998 - RNA, 19 nt, Artificial Sequence
  Description of Artificial Sequence: Synthetic oligonucleotide
aaagugguggacuacagca

SEQ ID NO: 2152999 - RNA, 19 nt, Artificial Sequence
  Description of Artificial Sequence: Synthetic oligonucleotide
agaguuggugaauuuagcc

SEQ ID NO: 2153000 - RNA, 19 nt, Artificial Sequence
  Description of Artificial Sequence: Synthetic oligonucleotide
aaacuuucguccucgcugc

SEQ ID NO: 2153001 - RNA, 19 nt, Artificial Sequence
  Description of Artificial Sequence: Synthetic oligonucleotide
auugauggaacuuagcaca

SEQ ID NO: 2153002 - RNA, 19 nt, Artificial Sequence
  Description of Artificial Sequence: Synthetic oligonucleotide
uacuuguagaagaucaggg

SEQ ID NO: 2153003 - RNA, 19 nt, Artificial Sequence
  Description of Artificial Sequence: Synthetic oligonucleotide
uaggcgauuggccacaugg

SEQ ID NO: 2153004 - RNA, 19 nt, Artificial Sequence
  Description of Artificial Sequence: Synthetic oligonucleotide
aaucaggcagcagagaaac

SEQ ID NO: 2153005 - RNA, 19 nt, Artificial Sequence
  Description of Artificial Sequence: Synthetic oligonucleotide
ucuggagaaacuuucgucc

SEQ ID NO: 2153006 - RNA, 19 nt, Artificial Sequence
  Description of Artificial Sequence: Synthetic oligonucleotide
gaaacuuucguccucgcug

SEQ ID NO: 2153007 - RNA, 19 nt, Artificial Sequence
  Description of Artificial Sequence: Synthetic oligonucleotide
agaaacagaagaccauagc

SEQ ID NO: 2153008 - RNA, 19 nt, Artificial Sequence
  Description of Artificial Sequence: Synthetic oligonucleotide
cugaccuggaaauuuaucc

SEQ ID NO: 2153009 - RNA, 19 nt, Artificial Sequence
  Description of Artificial Sequence: Synthetic oligonucleotide
cuaacuaacuaccuccucc

SEQ ID NO: 2153010 - RNA, 19 nt, Artificial Sequence
  Description of Artificial Sequence: Synthetic oligonucleotide
agaccauagcuccaaagac

SEQ ID NO: 2153011 - RNA, 19 nt, Artificial Sequence
  Description of Artificial Sequence: Synthetic oligonucleotide
uucacaaaaggcagccucg

SEQ ID NO: 2153012 - RNA, 19 nt, Artificial Sequence
  Description of Artificial Sequence: Synthetic oligonucleotide
ucacaauacuuguagaaga

SEQ ID NO: 2153013 - RNA, 19 nt, Artificial Sequence
  Description of Artificial Sequence: Synthetic oligonucleotide
ugggguuugagacauugag

SEQ ID NO: 2153014 - RNA, 19 nt, Artificial Sequence
  Description of Artificial Sequence: Synthetic oligonucleotide
uuuagcccagaguaaaucc

SEQ ID NO: 2153015 - RNA, 19 nt, Artificial Sequence
  Description of Artificial Sequence: Synthetic oligonucleotide
ucaacccacagcuugacca

SEQ ID NO: 2153016 - RNA, 19 nt, Artificial Sequence
  Description of Artificial Sequence: Synthetic oligonucleotide
uauugauggaacuuagcac

SEQ ID NO: 2153017 - RNA, 19 nt, Artificial Sequence
  Description of Artificial Sequence: Synthetic oligonucleotide
agcagagaaacagaagacc

SEQ ID NO: 2153018 - RNA, 19 nt, Artificial Sequence
  Description of Artificial Sequence: Synthetic oligonucleotide
gaguuggugaauuuagccc

SEQ ID NO: 2153019 - RNA, 19 nt, Artificial Sequence
  Description of Artificial Sequence: Synthetic oligonucleotide
cuaaacugagccaggaaag

SEQ ID NO: 2153020 - RNA, 19 nt, Artificial Sequence
  Description of Artificial Sequence: Synthetic oligonucleotide
gaaaggaacucugaccugg

SEQ ID NO: 2153021 - RNA, 19 nt, Artificial Sequence
  Description of Artificial Sequence: Synthetic oligonucleotide
uauugccauucuuaaaucc

SEQ ID NO: 2153022 - RNA, 19 nt, Artificial Sequence
  Description of Artificial Sequence: Synthetic oligonucleotide
aguuggugaauuuagccca

SEQ ID NO: 2153023 - RNA, 19 nt, Artificial Sequence
  Description of Artificial Sequence: Synthetic oligonucleotide
aauuuauccuucaguuggc

SEQ ID NO: 2153024 - RNA, 19 nt, Artificial Sequence
  Description of Artificial Sequence: Synthetic oligonucleotide
gugaauuuagcccagagua

SEQ ID NO: 2153025 - RNA, 19 nt, Artificial Sequence
  Description of Artificial Sequence: Synthetic oligonucleotide
uuuuaucagucuuucucag

SEQ ID NO: 2153026 - RNA, 19 nt, Artificial Sequence
  Description of Artificial Sequence: Synthetic oligonucleotide
cugcuaacuaacuaccucc

SEQ ID NO: 2153027 - RNA, 19 nt, Artificial Sequence
  Description of Artificial Sequence: Synthetic oligonucleotide
cucgugaucacaauacuug

SEQ ID NO: 2153028 - RNA, 19 nt, Artificial Sequence
  Description of Artificial Sequence: Synthetic oligonucleotide
caauacuuguagaagauca

SEQ ID NO: 2153029 - RNA, 19 nt, Artificial Sequence
  Description of Artificial Sequence: Synthetic oligonucleotide
cuaacuaccuccucccagg

SEQ ID NO: 2153030 - RNA, 19 nt, Artificial Sequence
  Description of Artificial Sequence: Synthetic oligonucleotide
aacuucgucucuuucuuca

SEQ ID NO: 2153031 - RNA, 19 nt, Artificial Sequence
  Description of Artificial Sequence: Synthetic oligonucleotide
acucaguuugucugagucc

SEQ ID NO: 2153032 - RNA, 19 nt, Artificial Sequence
  Description of Artificial Sequence: Synthetic oligonucleotide
cauucuuaaauccagagcu

SEQ ID NO: 2153033 - RNA, 19 nt, Artificial Sequence
  Description of Artificial Sequence: Synthetic oligonucleotide
uuauccuucaguuggcuaa

SEQ ID NO: 2153034 - RNA, 19 nt, Artificial Sequence
  Description of Artificial Sequence: Synthetic oligonucleotide
uuagcccagaguaaauccc

SEQ ID NO: 2153035 - RNA, 19 nt, Artificial Sequence
  Description of Artificial Sequence: Synthetic oligonucleotide
uaacuaacuaccuccuccc

SEQ ID NO: 2153036 - RNA, 19 nt, Artificial Sequence
  Description of Artificial Sequence: Synthetic oligonucleotide
auucucgugaucacaauac

SEQ ID NO: 2153037 - RNA, 19 nt, Artificial Sequence
  Description of Artificial Sequence: Synthetic oligonucleotide
uucaacgccaccucugugc

SEQ ID NO: 2153038 - RNA, 19 nt, Artificial Sequence
  Description of Artificial Sequence: Synthetic oligonucleotide
ggaacuuagcacaagagcc

SEQ ID NO: 2153039 - RNA, 19 nt, Artificial Sequence
  Description of Artificial Sequence: Synthetic oligonucleotide
uuaaaggcagcauucucgu

SEQ ID NO: 2153040 - RNA, 19 nt, Artificial Sequence
  Description of Artificial Sequence: Synthetic oligonucleotide
uccuucacuaacuucgucu

SEQ ID NO: 2153041 - RNA, 19 nt, Artificial Sequence
  Description of Artificial Sequence: Synthetic oligonucleotide
cuauugauggaacuuagca

SEQ ID NO: 2153042 - RNA, 19 nt, Artificial Sequence
  Description of Artificial Sequence: Synthetic oligonucleotide
aggaauaguagcuauugau

SEQ ID NO: 2153043 - RNA, 19 nt, Artificial Sequence
  Description of Artificial Sequence: Synthetic oligonucleotide
ugugcauggcuucacaaaa

SEQ ID NO: 2153044 - RNA, 19 nt, Artificial Sequence
  Description of Artificial Sequence: Synthetic oligonucleotide
cauagaaaggaacucugac

SEQ ID NO: 2153045 - RNA, 19 nt, Artificial Sequence
  Description of Artificial Sequence: Synthetic oligonucleotide
ucuuaaauccagagcugag

SEQ ID NO: 2153046 - RNA, 19 nt, Artificial Sequence
  Description of Artificial Sequence: Synthetic oligonucleotide
cucaguaaauccuggcucc

SEQ ID NO: 2153047 - RNA, 19 nt, Artificial Sequence
  Description of Artificial Sequence: Synthetic oligonucleotide
aauacuuguagaagaucag

SEQ ID NO: 2153048 - RNA, 19 nt, Artificial Sequence
  Description of Artificial Sequence: Synthetic oligonucleotide
uucuugacuggcuggacag

SEQ ID NO: 2153049 - RNA, 19 nt, Artificial Sequence
  Description of Artificial Sequence: Synthetic oligonucleotide
acgccugcuaacuaacuac

SEQ ID NO: 2153050 - RNA, 19 nt, Artificial Sequence
  Description of Artificial Sequence: Synthetic oligonucleotide
caguuggcuaaacugagcc

SEQ ID NO: 2153051 - RNA, 19 nt, Artificial Sequence
  Description of Artificial Sequence: Synthetic oligonucleotide
auacuuguagaagaucagg

SEQ ID NO: 2153052 - RNA, 19 nt, Artificial Sequence
  Description of Artificial Sequence: Synthetic oligonucleotide
uaaauccuggcucccuggg

SEQ ID NO: 2153053 - RNA, 19 nt, Artificial Sequence
  Description of Artificial Sequence: Synthetic oligonucleotide
acuuucugggaagaggugg

SEQ ID NO: 2153054 - RNA, 19 nt, Artificial Sequence
  Description of Artificial Sequence: Synthetic oligonucleotide
aggacggucaggaugaggg

SEQ ID NO: 2153055 - RNA, 19 nt, Artificial Sequence
  Description of Artificial Sequence: Synthetic oligonucleotide
gaagaccauagcuccaaag

SEQ ID NO: 2153056 - RNA, 19 nt, Artificial Sequence
  Description of Artificial Sequence: Synthetic oligonucleotide
auugaggugcuucuggaga

SEQ ID NO: 2153057 - RNA, 19 nt, Artificial Sequence
  Description of Artificial Sequence: Synthetic oligonucleotide
ugagcuccaagucaaccca

SEQ ID NO: 2153058 - RNA, 19 nt, Artificial Sequence
  Description of Artificial Sequence: Synthetic oligonucleotide
gacacuuucugggaagagg

SEQ ID NO: 2153059 - RNA, 19 nt, Artificial Sequence
  Description of Artificial Sequence: Synthetic oligonucleotide
aggugugaaaugcggcucc

SEQ ID NO: 2153060 - RNA, 19 nt, Artificial Sequence
  Description of Artificial Sequence: Synthetic oligonucleotide
caagucaacccacagcuug

SEQ ID NO: 2153061 - RNA, 19 nt, Artificial Sequence
  Description of Artificial Sequence: Synthetic oligonucleotide
cuuaaauccagagcugagc

SEQ ID NO: 2153062 - RNA, 19 nt, Artificial Sequence
  Description of Artificial Sequence: Synthetic oligonucleotide
agagauucaaaguggugga

SEQ ID NO: 2153063 - RNA, 19 nt, Artificial Sequence
  Description of Artificial Sequence: Synthetic oligonucleotide
ugaauuuagcccagaguaa

SEQ ID NO: 2153064 - RNA, 19 nt, Artificial Sequence
  Description of Artificial Sequence: Synthetic oligonucleotide
acaaucaggcagcagagaa

SEQ ID NO: 2153065 - RNA, 19 nt, Artificial Sequence
  Description of Artificial Sequence: Synthetic oligonucleotide
aggaagagauucaaagugg

SEQ ID NO: 2153066 - RNA, 19 nt, Artificial Sequence
  Description of Artificial Sequence: Synthetic oligonucleotide
auuuagcccagaguaaauc

SEQ ID NO: 2153067 - RNA, 19 nt, Artificial Sequence
  Description of Artificial Sequence: Synthetic oligonucleotide
uaguguuuccuccuccagc

SEQ ID NO: 2153068 - RNA, 19 nt, Artificial Sequence
  Description of Artificial Sequence: Synthetic oligonucleotide
uccucaguaaauccuggcu

SEQ ID NO: 2153069 - RNA, 19 nt, Artificial Sequence
  Description of Artificial Sequence: Synthetic oligonucleotide
uucuuaaauccagagcuga

SEQ ID NO: 2153070 - RNA, 19 nt, Artificial Sequence
  Description of Artificial Sequence: Synthetic oligonucleotide
cuuucagcuccgucuaugg

SEQ ID NO: 2153071 - RNA, 19 nt, Artificial Sequence
  Description of Artificial Sequence: Synthetic oligonucleotide
gugaaaugcggcuccacag

SEQ ID NO: 2153072 - RNA, 19 nt, Artificial Sequence
  Description of Artificial Sequence: Synthetic oligonucleotide
uucgucucuuucuucagga

SEQ ID NO: 2153073 - RNA, 19 nt, Artificial Sequence
  Description of Artificial Sequence: Synthetic oligonucleotide
cugagcuccaagucaaccc

SEQ ID NO: 2153074 - RNA, 19 nt, Artificial Sequence
  Description of Artificial Sequence: Synthetic oligonucleotide
cucagaccuggcuucaacg

SEQ ID NO: 2153075 - RNA, 19 nt, Artificial Sequence
  Description of Artificial Sequence: Synthetic oligonucleotide
uggugaauuuagcccagag

SEQ ID NO: 2153076 - RNA, 19 nt, Artificial Sequence
  Description of Artificial Sequence: Synthetic oligonucleotide
ugaucacaauacuuguaga

SEQ ID NO: 2153077 - RNA, 19 nt, Artificial Sequence
  Description of Artificial Sequence: Synthetic oligonucleotide
ucagcuccgucuauggaga

SEQ ID NO: 2153078 - RNA, 19 nt, Artificial Sequence
  Description of Artificial Sequence: Synthetic oligonucleotide
uuugagacauugaggugcu

SEQ ID NO: 2153079 - RNA, 19 nt, Artificial Sequence
  Description of Artificial Sequence: Synthetic oligonucleotide
acaauacuuguagaagauc

SEQ ID NO: 2153080 - RNA, 19 nt, Artificial Sequence
  Description of Artificial Sequence: Synthetic oligonucleotide
ucuaguguuuccuccucca

SEQ ID NO: 2153081 - RNA, 19 nt, Artificial Sequence
  Description of Artificial Sequence: Synthetic oligonucleotide
cuuauugccauucuuaaau

SEQ ID NO: 2153082 - RNA, 19 nt, Artificial Sequence
  Description of Artificial Sequence: Synthetic oligonucleotide
uucaaagugguggacuaca

SEQ ID NO: 2153083 - RNA, 19 nt, Artificial Sequence
  Description of Artificial Sequence: Synthetic oligonucleotide
uucuaguguuuccuccucc

SEQ ID NO: 2153084 - RNA, 19 nt, Artificial Sequence
  Description of Artificial Sequence: Synthetic oligonucleotide
guaaauccuggcucccugg

SEQ ID NO: 2153085 - RNA, 19 nt, Artificial Sequence
  Description of Artificial Sequence: Synthetic oligonucleotide
ggaauaguagcuauugaug

SEQ ID NO: 2153086 - RNA, 19 nt, Artificial Sequence
  Description of Artificial Sequence: Synthetic oligonucleotide
ucagcuguuuccucacgcc

SEQ ID NO: 2153087 - RNA, 19 nt, Artificial Sequence
  Description of Artificial Sequence: Synthetic oligonucleotide
uaacuaccuccucccaggg

SEQ ID NO: 2153088 - RNA, 19 nt, Artificial Sequence
  Description of Artificial Sequence: Synthetic oligonucleotide
ucugaguccaugugacuga

SEQ ID NO: 2153089 - RNA, 19 nt, Artificial Sequence
  Description of Artificial Sequence: Synthetic oligonucleotide
ugcuaacuaacuaccuccu

SEQ ID NO: 2153090 - RNA, 19 nt, Artificial Sequence
  Description of Artificial Sequence: Synthetic oligonucleotide
ucagugaauccugugcagc

SEQ ID NO: 2153091 - RNA, 19 nt, Artificial Sequence
  Description of Artificial Sequence: Synthetic oligonucleotide
aguuugucugaguccaugu

SEQ ID NO: 2153092 - RNA, 19 nt, Artificial Sequence
  Description of Artificial Sequence: Synthetic oligonucleotide
ugggaguucagaguuggug

SEQ ID NO: 2153093 - RNA, 19 nt, Artificial Sequence
  Description of Artificial Sequence: Synthetic oligonucleotide
aacgccaccucugugcaug

SEQ ID NO: 2153094 - RNA, 19 nt, Artificial Sequence
  Description of Artificial Sequence: Synthetic oligonucleotide
ucgugaucacaauacuugu

SEQ ID NO: 2153095 - RNA, 19 nt, Artificial Sequence
  Description of Artificial Sequence: Synthetic oligonucleotide
aacuuucguccucgcugcc

SEQ ID NO: 2153096 - RNA, 19 nt, Artificial Sequence
  Description of Artificial Sequence: Synthetic oligonucleotide
gaagaugaugguggcaggc

SEQ ID NO: 2153097 - RNA, 19 nt, Artificial Sequence
  Description of Artificial Sequence: Synthetic oligonucleotide
cacucaguuugucugaguc

SEQ ID NO: 2153098 - RNA, 19 nt, Artificial Sequence
  Description of Artificial Sequence: Synthetic oligonucleotide
ucaacgccaccucugugca

SEQ ID NO: 2153099 - RNA, 19 nt, Artificial Sequence
  Description of Artificial Sequence: Synthetic oligonucleotide
ucucgugaucacaauacuu

SEQ ID NO: 2153100 - RNA, 19 nt, Artificial Sequence
  Description of Artificial Sequence: Synthetic oligonucleotide
uucucgugaucacaauacu

SEQ ID NO: 2153101 - RNA, 19 nt, Artificial Sequence
  Description of Artificial Sequence: Synthetic oligonucleotide
cagugaauccugugcagcc

SEQ ID NO: 2153102 - RNA, 19 nt, Artificial Sequence
  Description of Artificial Sequence: Synthetic oligonucleotide
cuauggagacggcugacac

SEQ ID NO: 2153103 - RNA, 19 nt, Artificial Sequence
  Description of Artificial Sequence: Synthetic oligonucleotide
ucugaccuggaaauuuauc

SEQ ID NO: 2153104 - RNA, 19 nt, Artificial Sequence
  Description of Artificial Sequence: Synthetic oligonucleotide
gauucaaagugguggacua

SEQ ID NO: 2153105 - RNA, 19 nt, Artificial Sequence
  Description of Artificial Sequence: Synthetic oligonucleotide
ugccauagaaaggaacucu

SEQ ID NO: 2153106 - RNA, 19 nt, Artificial Sequence
  Description of Artificial Sequence: Synthetic oligonucleotide
agauucaaagugguggacu

SEQ ID NO: 2153107 - RNA, 19 nt, Artificial Sequence
  Description of Artificial Sequence: Synthetic oligonucleotide
uacgcuugcuucuaguguu

SEQ ID NO: 2153108 - RNA, 19 nt, Artificial Sequence
  Description of Artificial Sequence: Synthetic oligonucleotide
cuugaccacgucacugucc

SEQ ID NO: 2153109 - RNA, 19 nt, Artificial Sequence
  Description of Artificial Sequence: Synthetic oligonucleotide
gcuagggaggaauaguagc

SEQ ID NO: 2153110 - RNA, 19 nt, Artificial Sequence
  Description of Artificial Sequence: Synthetic oligonucleotide
agcacaagagccacaauca

SEQ ID NO: 2153111 - RNA, 19 nt, Artificial Sequence
  Description of Artificial Sequence: Synthetic oligonucleotide
cagcagagaaacagaagac

SEQ ID NO: 2153112 - RNA, 19 nt, Artificial Sequence
  Description of Artificial Sequence: Synthetic oligonucleotide
caccaggugugaaaugcgg

SEQ ID NO: 2153113 - RNA, 19 nt, Artificial Sequence
  Description of Artificial Sequence: Synthetic oligonucleotide
gaagagauucaaaguggug

SEQ ID NO: 2153114 - RNA, 19 nt, Artificial Sequence
  Description of Artificial Sequence: Synthetic oligonucleotide
aucagucuuucucagugaa

SEQ ID NO: 2153115 - RNA, 19 nt, Artificial Sequence
  Description of Artificial Sequence: Synthetic oligonucleotide
uugauggaacuuagcacaa

SEQ ID NO: 2153116 - RNA, 19 nt, Artificial Sequence
  Description of Artificial Sequence: Synthetic oligonucleotide
cauugaggugcuucuggag

SEQ ID NO: 2153117 - RNA, 19 nt, Artificial Sequence
  Description of Artificial Sequence: Synthetic oligonucleotide
gucugaguccaugugacug

SEQ ID NO: 2153118 - RNA, 19 nt, Artificial Sequence
  Description of Artificial Sequence: Synthetic oligonucleotide
aacuaacuaccuccuccca

SEQ ID NO: 2153119 - RNA, 19 nt, Artificial Sequence
  Description of Artificial Sequence: Synthetic oligonucleotide
cuacagcagccuuauugcc

SEQ ID NO: 2153120 - RNA, 19 nt, Artificial Sequence
  Description of Artificial Sequence: Synthetic oligonucleotide
acauugaggugcuucugga

SEQ ID NO: 2153121 - RNA, 19 nt, Artificial Sequence
  Description of Artificial Sequence: Synthetic oligonucleotide
cucagcuguuuccucacgc

SEQ ID NO: 2153122 - RNA, 19 nt, Artificial Sequence
  Description of Artificial Sequence: Synthetic oligonucleotide
uuuauccuucaguuggcua

SEQ ID NO: 2153123 - RNA, 19 nt, Artificial Sequence
  Description of Artificial Sequence: Synthetic oligonucleotide
agaaacuuucguccucgcu

SEQ ID NO: 2153124 - RNA, 19 nt, Artificial Sequence
  Description of Artificial Sequence: Synthetic oligonucleotide
uugaggugcuucuggagaa

SEQ ID NO: 2153125 - RNA, 19 nt, Artificial Sequence
  Description of Artificial Sequence: Synthetic oligonucleotide
uccuuucccuccuugcgca

SEQ ID NO: 2153126 - RNA, 19 nt, Artificial Sequence
  Description of Artificial Sequence: Synthetic oligonucleotide
aaggcagcauucucgugau

SEQ ID NO: 2153127 - RNA, 19 nt, Artificial Sequence
  Description of Artificial Sequence: Synthetic oligonucleotide
uguagaagaucagggugga

SEQ ID NO: 2153128 - RNA, 19 nt, Artificial Sequence
  Description of Artificial Sequence: Synthetic oligonucleotide
ucugugcauggcuucacaa

SEQ ID NO: 2153129 - RNA, 19 nt, Artificial Sequence
  Description of Artificial Sequence: Synthetic oligonucleotide
uauggagacggcugacacu

SEQ ID NO: 2153130 - RNA, 19 nt, Artificial Sequence
  Description of Artificial Sequence: Synthetic oligonucleotide
auggaacuuagcacaagag

SEQ ID NO: 2153131 - RNA, 19 nt, Artificial Sequence
  Description of Artificial Sequence: Synthetic oligonucleotide
gacggucaggaugagggcc

SEQ ID NO: 2153132 - RNA, 19 nt, Artificial Sequence
  Description of Artificial Sequence: Synthetic oligonucleotide
aguuggcuaaacugagcca

SEQ ID NO: 2153133 - RNA, 19 nt, Artificial Sequence
  Description of Artificial Sequence: Synthetic oligonucleotide
ucuauggagacggcugaca

SEQ ID NO: 2153134 - RNA, 19 nt, Artificial Sequence
  Description of Artificial Sequence: Synthetic oligonucleotide
aagaggugguaggcgauug

SEQ ID NO: 2153135 - RNA, 19 nt, Artificial Sequence
  Description of Artificial Sequence: Synthetic oligonucleotide
gcuaaacugagccaggaaa

SEQ ID NO: 2153136 - RNA, 19 nt, Artificial Sequence
  Description of Artificial Sequence: Synthetic oligonucleotide
acuucgucucuuucuucag

SEQ ID NO: 2153137 - RNA, 19 nt, Artificial Sequence
  Description of Artificial Sequence: Synthetic oligonucleotide
cucgcugccauagaaagga

SEQ ID NO: 2153138 - RNA, 19 nt, Artificial Sequence
  Description of Artificial Sequence: Synthetic oligonucleotide
gaguaaaucccucacuuuu

SEQ ID NO: 2153139 - RNA, 19 nt, Artificial Sequence
  Description of Artificial Sequence: Synthetic oligonucleotide
agagaaacagaagaccaua

SEQ ID NO: 2153140 - RNA, 19 nt, Artificial Sequence
  Description of Artificial Sequence: Synthetic oligonucleotide
ucucagaccuggcuucaac

SEQ ID NO: 2153141 - RNA, 19 nt, Artificial Sequence
  Description of Artificial Sequence: Synthetic oligonucleotide
gccacaaucaggcagcaga

SEQ ID NO: 2153142 - RNA, 19 nt, Artificial Sequence
  Description of Artificial Sequence: Synthetic oligonucleotide
ccauucuuaaauccagagc

SEQ ID NO: 2153143 - RNA, 19 nt, Artificial Sequence
  Description of Artificial Sequence: Synthetic oligonucleotide
cuucaggacuuccagccuc

SEQ ID NO: 2153144 - RNA, 19 nt, Artificial Sequence
  Description of Artificial Sequence: Synthetic oligonucleotide
ucgccuccucaguaaaucc

SEQ ID NO: 2153145 - RNA, 19 nt, Artificial Sequence
  Description of Artificial Sequence: Synthetic oligonucleotide
aauuuagcccagaguaaau

SEQ ID NO: 2153146 - RNA, 19 nt, Artificial Sequence
  Description of Artificial Sequence: Synthetic oligonucleotide
agaguaaaucccucacuuu

SEQ ID NO: 2153147 - RNA, 19 nt, Artificial Sequence
  Description of Artificial Sequence: Synthetic oligonucleotide
aagccuccaaagcuggguu

SEQ ID NO: 2153148 - RNA, 19 nt, Artificial Sequence
  Description of Artificial Sequence: Synthetic oligonucleotide
agcuauugauggaacuuag

SEQ ID NO: 2153149 - RNA, 19 nt, Artificial Sequence
  Description of Artificial Sequence: Synthetic oligonucleotide
cuugagggucuccuuuccc

SEQ ID NO: 2153150 - RNA, 19 nt, Artificial Sequence
  Description of Artificial Sequence: Synthetic oligonucleotide
augagggccacaucuuuaa

SEQ ID NO: 2153151 - RNA, 19 nt, Artificial Sequence
  Description of Artificial Sequence: Synthetic oligonucleotide
uggagaaacuuucguccuc

SEQ ID NO: 2153152 - RNA, 19 nt, Artificial Sequence
  Description of Artificial Sequence: Synthetic oligonucleotide
ucaguaaauccuggcuccc

SEQ ID NO: 2153153 - RNA, 19 nt, Artificial Sequence
  Description of Artificial Sequence: Synthetic oligonucleotide
agacggcugacacuuucug

SEQ ID NO: 2153154 - RNA, 19 nt, Artificial Sequence
  Description of Artificial Sequence: Synthetic oligonucleotide
auggagacggcugacacuu

SEQ ID NO: 2153155 - RNA, 19 nt, Artificial Sequence
  Description of Artificial Sequence: Synthetic oligonucleotide
ucuugacuggcuggacagg

SEQ ID NO: 2153156 - RNA, 19 nt, Artificial Sequence
  Description of Artificial Sequence: Synthetic oligonucleotide
cuggacaggcagcaccagg

SEQ ID NO: 2153157 - RNA, 19 nt, Artificial Sequence
  Description of Artificial Sequence: Synthetic oligonucleotide
cagcaggacggucaggaug

SEQ ID NO: 2153158 - RNA, 19 nt, Artificial Sequence
  Description of Artificial Sequence: Synthetic oligonucleotide
aucaggguggagccugcag

SEQ ID NO: 2153159 - RNA, 19 nt, Artificial Sequence
  Description of Artificial Sequence: Synthetic oligonucleotide
guucuugacuggcuggaca

SEQ ID NO: 2153160 - RNA, 19 nt, Artificial Sequence
  Description of Artificial Sequence: Synthetic oligonucleotide
cucacgccugcuaacuaac

SEQ ID NO: 2153161 - RNA, 19 nt, Artificial Sequence
  Description of Artificial Sequence: Synthetic oligonucleotide
aagucaacccacagcuuga

SEQ ID NO: 2153162 - RNA, 19 nt, Artificial Sequence
  Description of Artificial Sequence: Synthetic oligonucleotide
agucaacccacagcuugac

SEQ ID NO: 2153163 - RNA, 19 nt, Artificial Sequence
  Description of Artificial Sequence: Synthetic oligonucleotide
ugaguccaugugacugaag

SEQ ID NO: 2153164 - RNA, 19 nt, Artificial Sequence
  Description of Artificial Sequence: Synthetic oligonucleotide
ucucccuggggccuacgcu

SEQ ID NO: 2153165 - RNA, 19 nt, Artificial Sequence
  Description of Artificial Sequence: Synthetic oligonucleotide
caacccacagcuugaccac

SEQ ID NO: 2153166 - RNA, 19 nt, Artificial Sequence
  Description of Artificial Sequence: Synthetic oligonucleotide
cuagggaggaauaguagcu

SEQ ID NO: 2153167 - RNA, 19 nt, Artificial Sequence
  Description of Artificial Sequence: Synthetic oligonucleotide
uuuccucacgccugcuaac

SEQ ID NO: 2153168 - RNA, 19 nt, Artificial Sequence
  Description of Artificial Sequence: Synthetic oligonucleotide
cuuagcacaagagccacaa

SEQ ID NO: 2153169 - RNA, 19 nt, Artificial Sequence
  Description of Artificial Sequence: Synthetic oligonucleotide
guuuccucacgccugcuaa

SEQ ID NO: 2153170 - RNA, 19 nt, Artificial Sequence
  Description of Artificial Sequence: Synthetic oligonucleotide
gaaagccuccaaagcuggg

SEQ ID NO: 2153171 - RNA, 19 nt, Artificial Sequence
  Description of Artificial Sequence: Synthetic oligonucleotide
aguucagaguuggugaauu

SEQ ID NO: 2153172 - RNA, 19 nt, Artificial Sequence
  Description of Artificial Sequence: Synthetic oligonucleotide
uggacuacagcagccuuau

SEQ ID NO: 2153173 - RNA, 19 nt, Artificial Sequence
  Description of Artificial Sequence: Synthetic oligonucleotide
gcgauuggccacauggugg

SEQ ID NO: 2153174 - RNA, 19 nt, Artificial Sequence
  Description of Artificial Sequence: Synthetic oligonucleotide
gagauucaaagugguggac

SEQ ID NO: 2153175 - RNA, 19 nt, Artificial Sequence
  Description of Artificial Sequence: Synthetic oligonucleotide
caggaugagggccacaucu

SEQ ID NO: 2153176 - RNA, 19 nt, Artificial Sequence
  Description of Artificial Sequence: Synthetic oligonucleotide
aaaggaacucugaccugga

SEQ ID NO: 2153177 - RNA, 19 nt, Artificial Sequence
  Description of Artificial Sequence: Synthetic oligonucleotide
ugucugaguccaugugacu

SEQ ID NO: 2153178 - RNA, 19 nt, Artificial Sequence
  Description of Artificial Sequence: Synthetic oligonucleotide
uaacuucgucucuuucuuc

SEQ ID NO: 2153179 - RNA, 19 nt, Artificial Sequence
  Description of Artificial Sequence: Synthetic oligonucleotide
ucgucucuuucuucaggac

SEQ ID NO: 2153180 - RNA, 19 nt, Artificial Sequence
  Description of Artificial Sequence: Synthetic oligonucleotide
cacaugguggacucaggca

SEQ ID NO: 2153181 - RNA, 19 nt, Artificial Sequence
  Description of Artificial Sequence: Synthetic oligonucleotide
ggcgauuggccacauggug

SEQ ID NO: 2153182 - RNA, 19 nt, Artificial Sequence
  Description of Artificial Sequence: Synthetic oligonucleotide
agcauucucgugaucacaa

SEQ ID NO: 2153183 - RNA, 19 nt, Artificial Sequence
  Description of Artificial Sequence: Synthetic oligonucleotide
uccgucuauggagacggcu

SEQ ID NO: 2153184 - RNA, 19 nt, Artificial Sequence
  Description of Artificial Sequence: Synthetic oligonucleotide
ucacgccugcuaacuaacu

SEQ ID NO: 2153185 - RNA, 19 nt, Artificial Sequence
  Description of Artificial Sequence: Synthetic oligonucleotide
ccucaguaaauccuggcuc

SEQ ID NO: 2153186 - RNA, 19 nt, Artificial Sequence
  Description of Artificial Sequence: Synthetic oligonucleotide
uccuugcgcagcugugaag

SEQ ID NO: 2153187 - RNA, 19 nt, Artificial Sequence
  Description of Artificial Sequence: Synthetic oligonucleotide
ggcagcauucucgugauca

SEQ ID NO: 2153188 - RNA, 19 nt, Artificial Sequence
  Description of Artificial Sequence: Synthetic oligonucleotide
uggcuaaacugagccagga

SEQ ID NO: 2153189 - RNA, 19 nt, Artificial Sequence
  Description of Artificial Sequence: Synthetic oligonucleotide
gaccauagcuccaaagacu

SEQ ID NO: 2153190 - RNA, 19 nt, Artificial Sequence
  Description of Artificial Sequence: Synthetic oligonucleotide
cauucucgugaucacaaua

SEQ ID NO: 2153191 - RNA, 19 nt, Artificial Sequence
  Description of Artificial Sequence: Synthetic oligonucleotide
uuccucacgccugcuaacu

SEQ ID NO: 2153192 - RNA, 19 nt, Artificial Sequence
  Description of Artificial Sequence: Synthetic oligonucleotide
uugcgcagcugugaagaug

SEQ ID NO: 2153193 - RNA, 19 nt, Artificial Sequence
  Description of Artificial Sequence: Synthetic oligonucleotide
gcacaagagccacaaucag

SEQ ID NO: 2153194 - RNA, 19 nt, Artificial Sequence
  Description of Artificial Sequence: Synthetic oligonucleotide
uauccuucaguuggcuaaa

SEQ ID NO: 2153195 - RNA, 19 nt, Artificial Sequence
  Description of Artificial Sequence: Synthetic oligonucleotide
gugcauggcuucacaaaag

SEQ ID NO: 2153196 - RNA, 19 nt, Artificial Sequence
  Description of Artificial Sequence: Synthetic oligonucleotide
ggugggguuugagacauug

SEQ ID NO: 2153197 - RNA, 19 nt, Artificial Sequence
  Description of Artificial Sequence: Synthetic oligonucleotide
gugguaggcgauuggccac

SEQ ID NO: 2153198 - RNA, 19 nt, Artificial Sequence
  Description of Artificial Sequence: Synthetic oligonucleotide
gacucaggcacuugagggu

SEQ ID NO: 2153199 - RNA, 19 nt, Artificial Sequence
  Description of Artificial Sequence: Synthetic oligonucleotide
ugagggccacaucuuuaaa

SEQ ID NO: 2153200 - RNA, 19 nt, Artificial Sequence
  Description of Artificial Sequence: Synthetic oligonucleotide
gucaacccacagcuugacc

SEQ ID NO: 2153201 - RNA, 19 nt, Artificial Sequence
  Description of Artificial Sequence: Synthetic oligonucleotide
ccaaagcuggguucugggg

SEQ ID NO: 2153202 - RNA, 19 nt, Artificial Sequence
  Description of Artificial Sequence: Synthetic oligonucleotide
caguuugucugaguccaug

SEQ ID NO: 2153203 - RNA, 19 nt, Artificial Sequence
  Description of Artificial Sequence: Synthetic oligonucleotide
agcuccgucuauggagacg

SEQ ID NO: 2153204 - RNA, 19 nt, Artificial Sequence
  Description of Artificial Sequence: Synthetic oligonucleotide
cugccauagaaaggaacuc

SEQ ID NO: 2153205 - RNA, 19 nt, Artificial Sequence
  Description of Artificial Sequence: Synthetic oligonucleotide
ugguggacuacagcagccu

SEQ ID NO: 2153206 - RNA, 19 nt, Artificial Sequence
  Description of Artificial Sequence: Synthetic oligonucleotide
uguucuugacuggcuggac

SEQ ID NO: 2153207 - RNA, 19 nt, Artificial Sequence
  Description of Artificial Sequence: Synthetic oligonucleotide
cagcuugaccacgucacug

SEQ ID NO: 2153208 - RNA, 19 nt, Artificial Sequence
  Description of Artificial Sequence: Synthetic oligonucleotide
ccuacgcuugcuucuagug

SEQ ID NO: 2153209 - RNA, 19 nt, Artificial Sequence
  Description of Artificial Sequence: Synthetic oligonucleotide
ccugcuaacuaacuaccuc

SEQ ID NO: 2153210 - RNA, 19 nt, Artificial Sequence
  Description of Artificial Sequence: Synthetic oligonucleotide
ccacaugguggacucaggc

SEQ ID NO: 2153211 - RNA, 19 nt, Artificial Sequence
  Description of Artificial Sequence: Synthetic oligonucleotide
caugugacugaaggagcug

SEQ ID NO: 2153212 - RNA, 19 nt, Artificial Sequence
  Description of Artificial Sequence: Synthetic oligonucleotide
cacaauacuuguagaagau

SEQ ID NO: 2153213 - RNA, 19 nt, Artificial Sequence
  Description of Artificial Sequence: Synthetic oligonucleotide
caucuuuaaaggcagcauu

SEQ ID NO: 2153214 - RNA, 19 nt, Artificial Sequence
  Description of Artificial Sequence: Synthetic oligonucleotide
cagaguaaaucccucacuu

SEQ ID NO: 2153215 - RNA, 19 nt, Artificial Sequence
  Description of Artificial Sequence: Synthetic oligonucleotide
cuucaacgccaccucugug

SEQ ID NO: 2153216 - RNA, 19 nt, Artificial Sequence
  Description of Artificial Sequence: Synthetic oligonucleotide
ggugaauuuagcccagagu

SEQ ID NO: 2153217 - RNA, 19 nt, Artificial Sequence
  Description of Artificial Sequence: Synthetic oligonucleotide
cugggcuagggaggaauag

SEQ ID NO: 2153218 - RNA, 19 nt, Artificial Sequence
  Description of Artificial Sequence: Synthetic oligonucleotide
uggggccuacgcuugcuuc

SEQ ID NO: 2153219 - RNA, 19 nt, Artificial Sequence
  Description of Artificial Sequence: Synthetic oligonucleotide
gcuauugauggaacuuagc

SEQ ID NO: 2153220 - RNA, 19 nt, Artificial Sequence
  Description of Artificial Sequence: Synthetic oligonucleotide
ggguggagccugcaggaag

SEQ ID NO: 2153221 - RNA, 19 nt, Artificial Sequence
  Description of Artificial Sequence: Synthetic oligonucleotide
gucgccuccucaguaaauc

SEQ ID NO: 2153222 - RNA, 19 nt, Artificial Sequence
  Description of Artificial Sequence: Synthetic oligonucleotide
acagcccacucaguuuguc

SEQ ID NO: 2153223 - RNA, 19 nt, Artificial Sequence
  Description of Artificial Sequence: Synthetic oligonucleotide
ugguaggcgauuggccaca

SEQ ID NO: 2153224 - RNA, 19 nt, Artificial Sequence
  Description of Artificial Sequence: Synthetic oligonucleotide
gaugagggccacaucuuua

SEQ ID NO: 2153225 - RNA, 19 nt, Artificial Sequence
  Description of Artificial Sequence: Synthetic oligonucleotide
ucuggggcacuugcugggc

SEQ ID NO: 2153226 - RNA, 19 nt, Artificial Sequence
  Description of Artificial Sequence: Synthetic oligonucleotide
caggugugaaaugcggcuc

SEQ ID NO: 2153227 - RNA, 19 nt, Artificial Sequence
  Description of Artificial Sequence: Synthetic oligonucleotide
uuggugaauuuagcccaga

SEQ ID NO: 2153228 - RNA, 19 nt, Artificial Sequence
  Description of Artificial Sequence: Synthetic oligonucleotide
aggggcacgggcucucaga

SEQ ID NO: 2153229 - RNA, 19 nt, Artificial Sequence
  Description of Artificial Sequence: Synthetic oligonucleotide
ggcuagggaggaauaguag

SEQ ID NO: 2153230 - RNA, 19 nt, Artificial Sequence
  Description of Artificial Sequence: Synthetic oligonucleotide
cuaacuucgucucuuucuu

SEQ ID NO: 2153231 - RNA, 19 nt, Artificial Sequence
  Description of Artificial Sequence: Synthetic oligonucleotide
ccgucuauggagacggcug

SEQ ID NO: 2153232 - RNA, 19 nt, Artificial Sequence
  Description of Artificial Sequence: Synthetic oligonucleotide
cagggcucuuucagcuccg

SEQ ID NO: 2153233 - RNA, 19 nt, Artificial Sequence
  Description of Artificial Sequence: Synthetic oligonucleotide
gcagccucgcucuucuaug

SEQ ID NO: 2153234 - RNA, 19 nt, Artificial Sequence
  Description of Artificial Sequence: Synthetic oligonucleotide
acuuucguccucgcugcca

SEQ ID NO: 2153235 - RNA, 19 nt, Artificial Sequence
  Description of Artificial Sequence: Synthetic oligonucleotide
gccuuauugccauucuuaa

SEQ ID NO: 2153236 - RNA, 19 nt, Artificial Sequence
  Description of Artificial Sequence: Synthetic oligonucleotide
cacgggcucucagaccugg

SEQ ID NO: 2153237 - RNA, 19 nt, Artificial Sequence
  Description of Artificial Sequence: Synthetic oligonucleotide
uccucacgccugcuaacua

SEQ ID NO: 2153238 - RNA, 19 nt, Artificial Sequence
  Description of Artificial Sequence: Synthetic oligonucleotide
cucuucuauguucuugacu

SEQ ID NO: 2153239 - RNA, 19 nt, Artificial Sequence
  Description of Artificial Sequence: Synthetic oligonucleotide
guagcuauugauggaacuu

SEQ ID NO: 2153240 - RNA, 19 nt, Artificial Sequence
  Description of Artificial Sequence: Synthetic oligonucleotide
cucccugggucugcgcugg

SEQ ID NO: 2153241 - RNA, 19 nt, Artificial Sequence
  Description of Artificial Sequence: Synthetic oligonucleotide
cucggugggguuugagaca

SEQ ID NO: 2153242 - RNA, 19 nt, Artificial Sequence
  Description of Artificial Sequence: Synthetic oligonucleotide
ggagacggcugacacuuuc

SEQ ID NO: 2153243 - RNA, 19 nt, Artificial Sequence
  Description of Artificial Sequence: Synthetic oligonucleotide
gagcuccaagucaacccac

SEQ ID NO: 2153244 - RNA, 19 nt, Artificial Sequence
  Description of Artificial Sequence: Synthetic oligonucleotide
gcugccauagaaaggaacu

SEQ ID NO: 2153245 - RNA, 19 nt, Artificial Sequence
  Description of Artificial Sequence: Synthetic oligonucleotide
cuacgcuugcuucuagugu

SEQ ID NO: 2153246 - RNA, 19 nt, Artificial Sequence
  Description of Artificial Sequence: Synthetic oligonucleotide
uuucugggaagagguggua

SEQ ID NO: 2153247 - RNA, 19 nt, Artificial Sequence
  Description of Artificial Sequence: Synthetic oligonucleotide
caggacggucaggaugagg

SEQ ID NO: 2153248 - RNA, 19 nt, Artificial Sequence
  Description of Artificial Sequence: Synthetic oligonucleotide
acggucaggaugagggcca

SEQ ID NO: 2153249 - RNA, 19 nt, Artificial Sequence
  Description of Artificial Sequence: Synthetic oligonucleotide
acucugaccuggaaauuua

SEQ ID NO: 2153250 - RNA, 19 nt, Artificial Sequence
  Description of Artificial Sequence: Synthetic oligonucleotide
ccucgcugccauagaaagg

SEQ ID NO: 2153251 - RNA, 19 nt, Artificial Sequence
  Description of Artificial Sequence: Synthetic oligonucleotide
ucgcugccauagaaaggaa

SEQ ID NO: 2153252 - RNA, 19 nt, Artificial Sequence
  Description of Artificial Sequence: Synthetic oligonucleotide
gcaccaggugugaaaugcg

SEQ ID NO: 2153253 - RNA, 19 nt, Artificial Sequence
  Description of Artificial Sequence: Synthetic oligonucleotide
gcuaacuaacuaccuccuc

SEQ ID NO: 2153254 - RNA, 19 nt, Artificial Sequence
  Description of Artificial Sequence: Synthetic oligonucleotide
agcugagcuccaagucaac

SEQ ID NO: 2153255 - RNA, 19 nt, Artificial Sequence
  Description of Artificial Sequence: Synthetic oligonucleotide
cagaagaccauagcuccaa

SEQ ID NO: 2153256 - RNA, 19 nt, Artificial Sequence
  Description of Artificial Sequence: Synthetic oligonucleotide
caagagccacaaucaggca

SEQ ID NO: 2153257 - RNA, 19 nt, Artificial Sequence
  Description of Artificial Sequence: Synthetic oligonucleotide
agcuccaagucaacccaca

SEQ ID NO: 2153258 - RNA, 19 nt, Artificial Sequence
  Description of Artificial Sequence: Synthetic oligonucleotide
cgccugcuaacuaacuacc

SEQ ID NO: 2153259 - RNA, 19 nt, Artificial Sequence
  Description of Artificial Sequence: Synthetic oligonucleotide
cucugugcauggcuucaca

SEQ ID NO: 2153260 - RNA, 19 nt, Artificial Sequence
  Description of Artificial Sequence: Synthetic oligonucleotide
aggcagcauucucgugauc

SEQ ID NO: 2153261 - RNA, 19 nt, Artificial Sequence
  Description of Artificial Sequence: Synthetic oligonucleotide
cagcaccaggugugaaaug

SEQ ID NO: 2153262 - RNA, 19 nt, Artificial Sequence
  Description of Artificial Sequence: Synthetic oligonucleotide
cacgccugcuaacuaacua

SEQ ID NO: 2153263 - RNA, 19 nt, Artificial Sequence
  Description of Artificial Sequence: Synthetic oligonucleotide
gucuauggagacggcugac

SEQ ID NO: 2153264 - RNA, 19 nt, Artificial Sequence
  Description of Artificial Sequence: Synthetic oligonucleotide
aggcgauuggccacauggu

SEQ ID NO: 2153265 - RNA, 19 nt, Artificial Sequence
  Description of Artificial Sequence: Synthetic oligonucleotide
ugaccacgucacuguccug

SEQ ID NO: 2153266 - RNA, 19 nt, Artificial Sequence
  Description of Artificial Sequence: Synthetic oligonucleotide
gccucgcucuucuauguuc

SEQ ID NO: 2153267 - RNA, 19 nt, Artificial Sequence
  Description of Artificial Sequence: Synthetic oligonucleotide
ggcucggugggguuugaga

SEQ ID NO: 2153268 - RNA, 19 nt, Artificial Sequence
  Description of Artificial Sequence: Synthetic oligonucleotide
guaggcgauuggccacaug

SEQ ID NO: 2153269 - RNA, 19 nt, Artificial Sequence
  Description of Artificial Sequence: Synthetic oligonucleotide
ccuugcgcagcugugaaga

SEQ ID NO: 2153270 - RNA, 19 nt, Artificial Sequence
  Description of Artificial Sequence: Synthetic oligonucleotide
gcuucuaguguuuccuccu

SEQ ID NO: 2153271 - RNA, 19 nt, Artificial Sequence
  Description of Artificial Sequence: Synthetic oligonucleotide
gauuggccacaugguggac

SEQ ID NO: 2153272 - RNA, 19 nt, Artificial Sequence
  Description of Artificial Sequence: Synthetic oligonucleotide
cacaaucaggcagcagaga

SEQ ID NO: 2153273 - RNA, 19 nt, Artificial Sequence
  Description of Artificial Sequence: Synthetic oligonucleotide
cuccgucuauggagacggc

SEQ ID NO: 2153274 - RNA, 19 nt, Artificial Sequence
  Description of Artificial Sequence: Synthetic oligonucleotide
cagcuccgucuauggagac

SEQ ID NO: 2153275 - RNA, 19 nt, Artificial Sequence
  Description of Artificial Sequence: Synthetic oligonucleotide
caggacuuccagccucuga

SEQ ID NO: 2153276 - RNA, 19 nt, Artificial Sequence
  Description of Artificial Sequence: Synthetic oligonucleotide
guggacuacagcagccuua

SEQ ID NO: 2153277 - RNA, 19 nt, Artificial Sequence
  Description of Artificial Sequence: Synthetic oligonucleotide
gcccagaguaaaucccuca

SEQ ID NO: 2153278 - RNA, 19 nt, Artificial Sequence
  Description of Artificial Sequence: Synthetic oligonucleotide
cuucacuaacuucgucucu

SEQ ID NO: 2153279 - RNA, 19 nt, Artificial Sequence
  Description of Artificial Sequence: Synthetic oligonucleotide
acgggcucucagaccuggc

SEQ ID NO: 2153280 - RNA, 19 nt, Artificial Sequence
  Description of Artificial Sequence: Synthetic oligonucleotide
gagacggcugacacuuucu

SEQ ID NO: 2153281 - RNA, 19 nt, Artificial Sequence
  Description of Artificial Sequence: Synthetic oligonucleotide
ggcuaaacugagccaggaa

SEQ ID NO: 2153282 - RNA, 19 nt, Artificial Sequence
  Description of Artificial Sequence: Synthetic oligonucleotide
cugugcagccucuuguuuu

SEQ ID NO: 2153283 - RNA, 19 nt, Artificial Sequence
  Description of Artificial Sequence: Synthetic oligonucleotide
ugucucccuggggccuacg

SEQ ID NO: 2153284 - RNA, 19 nt, Artificial Sequence
  Description of Artificial Sequence: Synthetic oligonucleotide
agccucgcucuucuauguu

SEQ ID NO: 2153285 - RNA, 19 nt, Artificial Sequence
  Description of Artificial Sequence: Synthetic oligonucleotide
ggcugacacuuucugggaa

SEQ ID NO: 2153286 - RNA, 19 nt, Artificial Sequence
  Description of Artificial Sequence: Synthetic oligonucleotide
gugggguuugagacauuga

SEQ ID NO: 2153287 - RNA, 19 nt, Artificial Sequence
  Description of Artificial Sequence: Synthetic oligonucleotide
cuggguucuggggcacuug

SEQ ID NO: 2153288 - RNA, 19 nt, Artificial Sequence
  Description of Artificial Sequence: Synthetic oligonucleotide
gaucaggguggagccugca

SEQ ID NO: 2153289 - RNA, 19 nt, Artificial Sequence
  Description of Artificial Sequence: Synthetic oligonucleotide
ggcuggacaggcagcacca

SEQ ID NO: 2153290 - RNA, 19 nt, Artificial Sequence
  Description of Artificial Sequence: Synthetic oligonucleotide
augguggacucaggcacuu

SEQ ID NO: 2153291 - RNA, 19 nt, Artificial Sequence
  Description of Artificial Sequence: Synthetic oligonucleotide
cugaguccaugugacugaa

SEQ ID NO: 2153292 - RNA, 19 nt, Artificial Sequence
  Description of Artificial Sequence: Synthetic oligonucleotide
gcagucgccuccucaguaa

SEQ ID NO: 2153293 - RNA, 19 nt, Artificial Sequence
  Description of Artificial Sequence: Synthetic oligonucleotide
gcuucaacgccaccucugu

SEQ ID NO: 2153294 - RNA, 19 nt, Artificial Sequence
  Description of Artificial Sequence: Synthetic oligonucleotide
gggcuagggaggaauagua

SEQ ID NO: 2153295 - RNA, 19 nt, Artificial Sequence
  Description of Artificial Sequence: Synthetic oligonucleotide
cucugaccuggaaauuuau

SEQ ID NO: 2153296 - RNA, 19 nt, Artificial Sequence
  Description of Artificial Sequence: Synthetic oligonucleotide
cagucgccuccucaguaaa

SEQ ID NO: 2153297 - RNA, 19 nt, Artificial Sequence
  Description of Artificial Sequence: Synthetic oligonucleotide
cgauuggccacauggugga

SEQ ID NO: 2153298 - RNA, 19 nt, Artificial Sequence
  Description of Artificial Sequence: Synthetic oligonucleotide
ccucugacacaggcagucg

SEQ ID NO: 2153299 - RNA, 19 nt, Artificial Sequence
  Description of Artificial Sequence: Synthetic oligonucleotide
gaagaggugguaggcgauu

SEQ ID NO: 2153300 - RNA, 19 nt, Artificial Sequence
  Description of Artificial Sequence: Synthetic oligonucleotide
ggggcacuugcugggcuag

SEQ ID NO: 2153301 - RNA, 19 nt, Artificial Sequence
  Description of Artificial Sequence: Synthetic oligonucleotide
uggagacggcugacacuuu

SEQ ID NO: 2153302 - RNA, 19 nt, Artificial Sequence
  Description of Artificial Sequence: Synthetic oligonucleotide
cuccacagcccacucaguu

SEQ ID NO: 2153303 - RNA, 19 nt, Artificial Sequence
  Description of Artificial Sequence: Synthetic oligonucleotide
uggcucccugggucugcgc

SEQ ID NO: 2153304 - RNA, 19 nt, Artificial Sequence
  Description of Artificial Sequence: Synthetic oligonucleotide
ccaugugacugaaggagcu

SEQ ID NO: 2153305 - RNA, 19 nt, Artificial Sequence
  Description of Artificial Sequence: Synthetic oligonucleotide
ggccuacgcuugcuucuag

SEQ ID NO: 2153306 - RNA, 19 nt, Artificial Sequence
  Description of Artificial Sequence: Synthetic oligonucleotide
cccacucaguuugucugag

SEQ ID NO: 2153307 - RNA, 19 nt, Artificial Sequence
  Description of Artificial Sequence: Synthetic oligonucleotide
cucccuggggccuacgcuu

SEQ ID NO: 2153308 - RNA, 19 nt, Artificial Sequence
  Description of Artificial Sequence: Synthetic oligonucleotide
ccucacgccugcuaacuaa

SEQ ID NO: 2153309 - RNA, 19 nt, Artificial Sequence
  Description of Artificial Sequence: Synthetic oligonucleotide
uggccacaugguggacuca

SEQ ID NO: 2153310 - RNA, 19 nt, Artificial Sequence
  Description of Artificial Sequence: Synthetic oligonucleotide
cagccucgcucuucuaugu

SEQ ID NO: 2153311 - RNA, 19 nt, Artificial Sequence
  Description of Artificial Sequence: Synthetic oligonucleotide
agggcucuuucagcuccgu

SEQ ID NO: 2153312 - RNA, 19 nt, Artificial Sequence
  Description of Artificial Sequence: Synthetic oligonucleotide
aggguggagccugcaggaa

SEQ ID NO: 2153313 - RNA, 19 nt, Artificial Sequence
  Description of Artificial Sequence: Synthetic oligonucleotide
ggggccuacgcuugcuucu

SEQ ID NO: 2153314 - RNA, 19 nt, Artificial Sequence
  Description of Artificial Sequence: Synthetic oligonucleotide
uugagacauugaggugcuu

SEQ ID NO: 2153315 - RNA, 19 nt, Artificial Sequence
  Description of Artificial Sequence: Synthetic oligonucleotide
acgcuugcuucuaguguuu

SEQ ID NO: 2153316 - RNA, 19 nt, Artificial Sequence
  Description of Artificial Sequence: Synthetic oligonucleotide
gcaggcucggugggguuug

SEQ ID NO: 2153317 - RNA, 19 nt, Artificial Sequence
  Description of Artificial Sequence: Synthetic oligonucleotide
ccacgucacuguccugcag

SEQ ID NO: 2153318 - RNA, 19 nt, Artificial Sequence
  Description of Artificial Sequence: Synthetic oligonucleotide
cuugcgcagcugugaagau

SEQ ID NO: 2153319 - RNA, 19 nt, Artificial Sequence
  Description of Artificial Sequence: Synthetic oligonucleotide
gguggacuacagcagccuu

SEQ ID NO: 2153320 - RNA, 19 nt, Artificial Sequence
  Description of Artificial Sequence: Synthetic oligonucleotide
cugggaguucagaguuggu

SEQ ID NO: 2153321 - RNA, 19 nt, Artificial Sequence
  Description of Artificial Sequence: Synthetic oligonucleotide
gccuacgcuugcuucuagu

SEQ ID NO: 2153322 - RNA, 19 nt, Artificial Sequence
  Description of Artificial Sequence: Synthetic oligonucleotide
gccugcuaacuaacuaccu

SEQ ID NO: 2153323 - RNA, 19 nt, Artificial Sequence
  Description of Artificial Sequence: Synthetic oligonucleotide
gcuucacaaaaggcagccu

SEQ ID NO: 2153324 - RNA, 19 nt, Artificial Sequence
  Description of Artificial Sequence: Synthetic oligonucleotide
cggcugacacuuucuggga

SEQ ID NO: 2153325 - RNA, 19 nt, Artificial Sequence
  Description of Artificial Sequence: Synthetic oligonucleotide
gcacgggcucucagaccug

SEQ ID NO: 2153326 - RNA, 19 nt, Artificial Sequence
  Description of Artificial Sequence: Synthetic oligonucleotide
caacgccaccucugugcau

SEQ ID NO: 2153327 - RNA, 19 nt, Artificial Sequence
  Description of Artificial Sequence: Synthetic oligonucleotide
cuguccugcagggcucuuu

SEQ ID NO: 2153328 - RNA, 19 nt, Artificial Sequence
  Description of Artificial Sequence: Synthetic oligonucleotide
gguaggcgauuggccacau

SEQ ID NO: 2153329 - RNA, 19 nt, Artificial Sequence
  Description of Artificial Sequence: Synthetic oligonucleotide
cggucaggaugagggccac

SEQ ID NO: 2153330 - RNA, 19 nt, Artificial Sequence
  Description of Artificial Sequence: Synthetic oligonucleotide
aaugacuugacucuguggg

SEQ ID NO: 2153331 - RNA, 19 nt, Artificial Sequence
  Description of Artificial Sequence: Synthetic oligonucleotide
uguuuuagcuccaagaaca

SEQ ID NO: 2153332 - RNA, 19 nt, Artificial Sequence
  Description of Artificial Sequence: Synthetic oligonucleotide
aaggauauacugcacgggc

SEQ ID NO: 2153333 - RNA, 19 nt, Artificial Sequence
  Description of Artificial Sequence: Synthetic oligonucleotide
aacugcaaaucucuggggc

SEQ ID NO: 2153334 - RNA, 19 nt, Artificial Sequence
  Description of Artificial Sequence: Synthetic oligonucleotide
uuuagcuccaagaacauga

SEQ ID NO: 2153335 - RNA, 19 nt, Artificial Sequence
  Description of Artificial Sequence: Synthetic oligonucleotide
auaacugcaaaucucuggg

SEQ ID NO: 2153336 - RNA, 19 nt, Artificial Sequence
  Description of Artificial Sequence: Synthetic oligonucleotide
ugagguuacaucaaggcga

SEQ ID NO: 2153337 - RNA, 19 nt, Artificial Sequence
  Description of Artificial Sequence: Synthetic oligonucleotide
uaaggugcaagucaggcug

SEQ ID NO: 2153338 - RNA, 19 nt, Artificial Sequence
  Description of Artificial Sequence: Synthetic oligonucleotide
agcuccaagaacaugagcc

SEQ ID NO: 2153339 - RNA, 19 nt, Artificial Sequence
  Description of Artificial Sequence: Synthetic oligonucleotide
ugacucagaaggcugaggg

SEQ ID NO: 2153340 - RNA, 19 nt, Artificial Sequence
  Description of Artificial Sequence: Synthetic oligonucleotide
aagacuaaggugcaaguca

SEQ ID NO: 2153341 - RNA, 19 nt, Artificial Sequence
  Description of Artificial Sequence: Synthetic oligonucleotide
ucuaaaacccauucaacca

SEQ ID NO: 2153342 - RNA, 19 nt, Artificial Sequence
  Description of Artificial Sequence: Synthetic oligonucleotide
aaguccuguguccaguggc

SEQ ID NO: 2153343 - RNA, 19 nt, Artificial Sequence
  Description of Artificial Sequence: Synthetic oligonucleotide
aaaaggcguguccagcacc

SEQ ID NO: 2153344 - RNA, 19 nt, Artificial Sequence
  Description of Artificial Sequence: Synthetic oligonucleotide
cucuaaaacccauucaacc

SEQ ID NO: 2153345 - RNA, 19 nt, Artificial Sequence
  Description of Artificial Sequence: Synthetic oligonucleotide
aaugauguccaugccuucc

SEQ ID NO: 2153346 - RNA, 19 nt, Artificial Sequence
  Description of Artificial Sequence: Synthetic oligonucleotide
agucuuuccggacagccgc

SEQ ID NO: 2153347 - RNA, 19 nt, Artificial Sequence
  Description of Artificial Sequence: Synthetic oligonucleotide
aaugagacuuccaugagcu

SEQ ID NO: 2153348 - RNA, 19 nt, Artificial Sequence
  Description of Artificial Sequence: Synthetic oligonucleotide
agugauccgaauccugucc

SEQ ID NO: 2153349 - RNA, 19 nt, Artificial Sequence
  Description of Artificial Sequence: Synthetic oligonucleotide
ucugagguuacaucaaggc

SEQ ID NO: 2153350 - RNA, 19 nt, Artificial Sequence
  Description of Artificial Sequence: Synthetic oligonucleotide
acuucuaagaagaugcuuc

SEQ ID NO: 2153351 - RNA, 19 nt, Artificial Sequence
  Description of Artificial Sequence: Synthetic oligonucleotide
caaagugcugguuucaggc

SEQ ID NO: 2153352 - RNA, 19 nt, Artificial Sequence
  Description of Artificial Sequence: Synthetic oligonucleotide
uuugguucccacugcaggg

SEQ ID NO: 2153353 - RNA, 19 nt, Artificial Sequence
  Description of Artificial Sequence: Synthetic oligonucleotide
acugcaaaucucuggggcc

SEQ ID NO: 2153354 - RNA, 19 nt, Artificial Sequence
  Description of Artificial Sequence: Synthetic oligonucleotide
aacaugagccacgauguac

SEQ ID NO: 2153355 - RNA, 19 nt, Artificial Sequence
  Description of Artificial Sequence: Synthetic oligonucleotide
auguuuuagcuccaagaac

SEQ ID NO: 2153356 - RNA, 19 nt, Artificial Sequence
  Description of Artificial Sequence: Synthetic oligonucleotide
aguagccacacuauggugc

SEQ ID NO: 2153357 - RNA, 19 nt, Artificial Sequence
  Description of Artificial Sequence: Synthetic oligonucleotide
aaggcgagugauccgaauc

SEQ ID NO: 2153358 - RNA, 19 nt, Artificial Sequence
  Description of Artificial Sequence: Synthetic oligonucleotide
acuaaggugcaagucaggc

SEQ ID NO: 2153359 - RNA, 19 nt, Artificial Sequence
  Description of Artificial Sequence: Synthetic oligonucleotide
gaugaaugagacuuccaug

SEQ ID NO: 2153360 - RNA, 19 nt, Artificial Sequence
  Description of Artificial Sequence: Synthetic oligonucleotide
guaaccgauggcuacacag

SEQ ID NO: 2153361 - RNA, 19 nt, Artificial Sequence
  Description of Artificial Sequence: Synthetic oligonucleotide
agccgcaagacuaaggugc

SEQ ID NO: 2153362 - RNA, 19 nt, Artificial Sequence
  Description of Artificial Sequence: Synthetic oligonucleotide
cuaaaacccauucaaccag

SEQ ID NO: 2153363 - RNA, 19 nt, Artificial Sequence
  Description of Artificial Sequence: Synthetic oligonucleotide
aauggcuccugauccacag

SEQ ID NO: 2153364 - RNA, 19 nt, Artificial Sequence
  Description of Artificial Sequence: Synthetic oligonucleotide
uccaagaacaugagccacg

SEQ ID NO: 2153365 - RNA, 19 nt, Artificial Sequence
  Description of Artificial Sequence: Synthetic oligonucleotide
ugcaacugaagccucugag

SEQ ID NO: 2153366 - RNA, 19 nt, Artificial Sequence
  Description of Artificial Sequence: Synthetic oligonucleotide
aggcgagugauccgaaucc

SEQ ID NO: 2153367 - RNA, 19 nt, Artificial Sequence
  Description of Artificial Sequence: Synthetic oligonucleotide
ucccacagaagucuuuccg

SEQ ID NO: 2153368 - RNA, 19 nt, Artificial Sequence
  Description of Artificial Sequence: Synthetic oligonucleotide
auauacugcacgggcaucc

SEQ ID NO: 2153369 - RNA, 19 nt, Artificial Sequence
  Description of Artificial Sequence: Synthetic oligonucleotide
cagaguagccacacuaugg

SEQ ID NO: 2153370 - RNA, 19 nt, Artificial Sequence
  Description of Artificial Sequence: Synthetic oligonucleotide
gucaggcugacucugaagc

SEQ ID NO: 2153371 - RNA, 19 nt, Artificial Sequence
  Description of Artificial Sequence: Synthetic oligonucleotide
cugagguuacaucaaggcg

SEQ ID NO: 2153372 - RNA, 19 nt, Artificial Sequence
  Description of Artificial Sequence: Synthetic oligonucleotide
ucacgggucaggcuaacag

SEQ ID NO: 2153373 - RNA, 19 nt, Artificial Sequence
  Description of Artificial Sequence: Synthetic oligonucleotide
ugagccacgauguacucac

SEQ ID NO: 2153374 - RNA, 19 nt, Artificial Sequence
  Description of Artificial Sequence: Synthetic oligonucleotide
acgggcauccucuguaacc

SEQ ID NO: 2153375 - RNA, 19 nt, Artificial Sequence
  Description of Artificial Sequence: Synthetic oligonucleotide
uguacucacuggauucccg

SEQ ID NO: 2153376 - RNA, 19 nt, Artificial Sequence
  Description of Artificial Sequence: Synthetic oligonucleotide
cuucauaacugcaaaucuc

SEQ ID NO: 2153377 - RNA, 19 nt, Artificial Sequence
  Description of Artificial Sequence: Synthetic oligonucleotide
aaggucaagauguggguaa

SEQ ID NO: 2153378 - RNA, 19 nt, Artificial Sequence
  Description of Artificial Sequence: Synthetic oligonucleotide
ucagaguagccacacuaug

SEQ ID NO: 2153379 - RNA, 19 nt, Artificial Sequence
  Description of Artificial Sequence: Synthetic oligonucleotide
cugucuaggggucaguggc

SEQ ID NO: 2153380 - RNA, 19 nt, Artificial Sequence
  Description of Artificial Sequence: Synthetic oligonucleotide
cuacacaguuccuggaucc

SEQ ID NO: 2153381 - RNA, 19 nt, Artificial Sequence
  Description of Artificial Sequence: Synthetic oligonucleotide
uguagggaggguuacugac

SEQ ID NO: 2153382 - RNA, 19 nt, Artificial Sequence
  Description of Artificial Sequence: Synthetic oligonucleotide
agaguagccacacuauggu

SEQ ID NO: 2153383 - RNA, 19 nt, Artificial Sequence
  Description of Artificial Sequence: Synthetic oligonucleotide
cuuguguccacuucuaaga

SEQ ID NO: 2153384 - RNA, 19 nt, Artificial Sequence
  Description of Artificial Sequence: Synthetic oligonucleotide
aagauguagggaggguuac

SEQ ID NO: 2153385 - RNA, 19 nt, Artificial Sequence
  Description of Artificial Sequence: Synthetic oligonucleotide
cacucaacaccccaggcag

SEQ ID NO: 2153386 - RNA, 19 nt, Artificial Sequence
  Description of Artificial Sequence: Synthetic oligonucleotide
acagccgcaagacuaaggu

SEQ ID NO: 2153387 - RNA, 19 nt, Artificial Sequence
  Description of Artificial Sequence: Synthetic oligonucleotide
uaacugcaaaucucugggg

SEQ ID NO: 2153388 - RNA, 19 nt, Artificial Sequence
  Description of Artificial Sequence: Synthetic oligonucleotide
aaagugcugguuucaggcu

SEQ ID NO: 2153389 - RNA, 19 nt, Artificial Sequence
  Description of Artificial Sequence: Synthetic oligonucleotide
agaacaugagccacgaugu

SEQ ID NO: 2153390 - RNA, 19 nt, Artificial Sequence
  Description of Artificial Sequence: Synthetic oligonucleotide
ucauaacugcaaaucucug

SEQ ID NO: 2153391 - RNA, 19 nt, Artificial Sequence
  Description of Artificial Sequence: Synthetic oligonucleotide
gaagucuuuccggacagcc

SEQ ID NO: 2153392 - RNA, 19 nt, Artificial Sequence
  Description of Artificial Sequence: Synthetic oligonucleotide
ugacuugacucugugggag

SEQ ID NO: 2153393 - RNA, 19 nt, Artificial Sequence
  Description of Artificial Sequence: Synthetic oligonucleotide
gauguagggaggguuacug

SEQ ID NO: 2153394 - RNA, 19 nt, Artificial Sequence
  Description of Artificial Sequence: Synthetic oligonucleotide
cauccucuguaaccgaugg

SEQ ID NO: 2153395 - RNA, 19 nt, Artificial Sequence
  Description of Artificial Sequence: Synthetic oligonucleotide
cuguccugcaacugaagcc

SEQ ID NO: 2153396 - RNA, 19 nt, Artificial Sequence
  Description of Artificial Sequence: Synthetic oligonucleotide
cucugaaauguuuuagcuc

SEQ ID NO: 2153397 - RNA, 19 nt, Artificial Sequence
  Description of Artificial Sequence: Synthetic oligonucleotide
acagaagucuuuccggaca

SEQ ID NO: 2153398 - RNA, 19 nt, Artificial Sequence
  Description of Artificial Sequence: Synthetic oligonucleotide
ucuggccgaggaaugaaca

SEQ ID NO: 2153399 - RNA, 19 nt, Artificial Sequence
  Description of Artificial Sequence: Synthetic oligonucleotide
uuuccggacagccgcaaga

SEQ ID NO: 2153400 - RNA, 19 nt, Artificial Sequence
  Description of Artificial Sequence: Synthetic oligonucleotide
guucuuccgucucuggccg

SEQ ID NO: 2153401 - RNA, 19 nt, Artificial Sequence
  Description of Artificial Sequence: Synthetic oligonucleotide
uuuccucaaaguccugugu

SEQ ID NO: 2153402 - RNA, 19 nt, Artificial Sequence
  Description of Artificial Sequence: Synthetic oligonucleotide
uaaccgauggcuacacagu

SEQ ID NO: 2153403 - RNA, 19 nt, Artificial Sequence
  Description of Artificial Sequence: Synthetic oligonucleotide
cuccccaaggauauacugc

SEQ ID NO: 2153404 - RNA, 19 nt, Artificial Sequence
  Description of Artificial Sequence: Synthetic oligonucleotide
aaugaggggaccaccuuug

SEQ ID NO: 2153405 - RNA, 19 nt, Artificial Sequence
  Description of Artificial Sequence: Synthetic oligonucleotide
caaugacuugacucugugg

SEQ ID NO: 2153406 - RNA, 19 nt, Artificial Sequence
  Description of Artificial Sequence: Synthetic oligonucleotide
gaugcuuccagaggcauuc

SEQ ID NO: 2153407 - RNA, 19 nt, Artificial Sequence
  Description of Artificial Sequence: Synthetic oligonucleotide
agagugagccccuggaagu

SEQ ID NO: 2153408 - RNA, 19 nt, Artificial Sequence
  Description of Artificial Sequence: Synthetic oligonucleotide
cuuccucuaaaacccauuc

SEQ ID NO: 2153409 - RNA, 19 nt, Artificial Sequence
  Description of Artificial Sequence: Synthetic oligonucleotide
uguccaguggcugaccacc

SEQ ID NO: 2153410 - RNA, 19 nt, Artificial Sequence
  Description of Artificial Sequence: Synthetic oligonucleotide
acucagaaggcugagggca

SEQ ID NO: 2153411 - RNA, 19 nt, Artificial Sequence
  Description of Artificial Sequence: Synthetic oligonucleotide
auucucacgggucaggcua

SEQ ID NO: 2153412 - RNA, 19 nt, Artificial Sequence
  Description of Artificial Sequence: Synthetic oligonucleotide
gcuaacagcggcuucuucc

SEQ ID NO: 2153413 - RNA, 19 nt, Artificial Sequence
  Description of Artificial Sequence: Synthetic oligonucleotide
caacugaagccucugagca

SEQ ID NO: 2153414 - RNA, 19 nt, Artificial Sequence
  Description of Artificial Sequence: Synthetic oligonucleotide
gugcaagucaggcugacuc

SEQ ID NO: 2153415 - RNA, 19 nt, Artificial Sequence
  Description of Artificial Sequence: Synthetic oligonucleotide
agaggcauucagaagccgg

SEQ ID NO: 2153416 - RNA, 19 nt, Artificial Sequence
  Description of Artificial Sequence: Synthetic oligonucleotide
acuccccaaggauauacug

SEQ ID NO: 2153417 - RNA, 19 nt, Artificial Sequence
  Description of Artificial Sequence: Synthetic oligonucleotide
cagagugagccccuggaag

SEQ ID NO: 2153418 - RNA, 19 nt, Artificial Sequence
  Description of Artificial Sequence: Synthetic oligonucleotide
aagucuuuccggacagccg

SEQ ID NO: 2153419 - RNA, 19 nt, Artificial Sequence
  Description of Artificial Sequence: Synthetic oligonucleotide
caggcuagaauccuggcca

SEQ ID NO: 2153420 - RNA, 19 nt, Artificial Sequence
  Description of Artificial Sequence: Synthetic oligonucleotide
uguguccaguggcugacca

SEQ ID NO: 2153421 - RNA, 19 nt, Artificial Sequence
  Description of Artificial Sequence: Synthetic oligonucleotide
cuucugagguuacaucaag

SEQ ID NO: 2153422 - RNA, 19 nt, Artificial Sequence
  Description of Artificial Sequence: Synthetic oligonucleotide
aggggaccaccuuugguuc

SEQ ID NO: 2153423 - RNA, 19 nt, Artificial Sequence
  Description of Artificial Sequence: Synthetic oligonucleotide
agcaggcuagaauccuggc

SEQ ID NO: 2153424 - RNA, 19 nt, Artificial Sequence
  Description of Artificial Sequence: Synthetic oligonucleotide
ucaagauguggguaaugau

SEQ ID NO: 2153425 - RNA, 19 nt, Artificial Sequence
  Description of Artificial Sequence: Synthetic oligonucleotide
agacuaaggugcaagucag

SEQ ID NO: 2153426 - RNA, 19 nt, Artificial Sequence
  Description of Artificial Sequence: Synthetic oligonucleotide
cuaagaagaugcuuccaga

SEQ ID NO: 2153427 - RNA, 19 nt, Artificial Sequence
  Description of Artificial Sequence: Synthetic oligonucleotide
ccucugagcauucucacgg

SEQ ID NO: 2153428 - RNA, 19 nt, Artificial Sequence
  Description of Artificial Sequence: Synthetic oligonucleotide
guuacaucaaggcgaguga

SEQ ID NO: 2153429 - RNA, 19 nt, Artificial Sequence
  Description of Artificial Sequence: Synthetic oligonucleotide
ggccacuuccucuaaaacc

SEQ ID NO: 2153430 - RNA, 19 nt, Artificial Sequence
  Description of Artificial Sequence: Synthetic oligonucleotide
caaggauauacugcacggg

SEQ ID NO: 2153431 - RNA, 19 nt, Artificial Sequence
  Description of Artificial Sequence: Synthetic oligonucleotide
acgggucaggcuaacagcg

SEQ ID NO: 2153432 - RNA, 19 nt, Artificial Sequence
  Description of Artificial Sequence: Synthetic oligonucleotide
auccucuguaaccgauggc

SEQ ID NO: 2153433 - RNA, 19 nt, Artificial Sequence
  Description of Artificial Sequence: Synthetic oligonucleotide
aaccgauggcuacacaguu

SEQ ID NO: 2153434 - RNA, 19 nt, Artificial Sequence
  Description of Artificial Sequence: Synthetic oligonucleotide
ugguccaaagugcugguuu

SEQ ID NO: 2153435 - RNA, 19 nt, Artificial Sequence
  Description of Artificial Sequence: Synthetic oligonucleotide
uuuuagcuccaagaacaug

SEQ ID NO: 2153436 - RNA, 19 nt, Artificial Sequence
  Description of Artificial Sequence: Synthetic oligonucleotide
gacucagaaggcugagggc

SEQ ID NO: 2153437 - RNA, 19 nt, Artificial Sequence
  Description of Artificial Sequence: Synthetic oligonucleotide
ucuguaaccgauggcuaca

SEQ ID NO: 2153438 - RNA, 19 nt, Artificial Sequence
  Description of Artificial Sequence: Synthetic oligonucleotide
uacaucaaggcgagugauc

SEQ ID NO: 2153439 - RNA, 19 nt, Artificial Sequence
  Description of Artificial Sequence: Synthetic oligonucleotide
cagaagucuuuccggacag

SEQ ID NO: 2153440 - RNA, 19 nt, Artificial Sequence
  Description of Artificial Sequence: Synthetic oligonucleotide
cagcaggcuagaauccugg

SEQ ID NO: 2153441 - RNA, 19 nt, Artificial Sequence
  Description of Artificial Sequence: Synthetic oligonucleotide
acccuucugagguuacauc

SEQ ID NO: 2153442 - RNA, 19 nt, Artificial Sequence
  Description of Artificial Sequence: Synthetic oligonucleotide
auccacagcaaugacuuga

SEQ ID NO: 2153443 - RNA, 19 nt, Artificial Sequence
  Description of Artificial Sequence: Synthetic oligonucleotide
guggaagauguagggaggg

SEQ ID NO: 2153444 - RNA, 19 nt, Artificial Sequence
  Description of Artificial Sequence: Synthetic oligonucleotide
ggcucugaaauguuuuagc

SEQ ID NO: 2153445 - RNA, 19 nt, Artificial Sequence
  Description of Artificial Sequence: Synthetic oligonucleotide
aacugaagccucugagcau

SEQ ID NO: 2153446 - RNA, 19 nt, Artificial Sequence
  Description of Artificial Sequence: Synthetic oligonucleotide
aagccggggcgccaagguc

SEQ ID NO: 2153447 - RNA, 19 nt, Artificial Sequence
  Description of Artificial Sequence: Synthetic oligonucleotide
agccacgauguacucacug

SEQ ID NO: 2153448 - RNA, 19 nt, Artificial Sequence
  Description of Artificial Sequence: Synthetic oligonucleotide
gauccgaauccuguccugc

SEQ ID NO: 2153449 - RNA, 19 nt, Artificial Sequence
  Description of Artificial Sequence: Synthetic oligonucleotide
gucaagauguggguaauga

SEQ ID NO: 2153450 - RNA, 19 nt, Artificial Sequence
  Description of Artificial Sequence: Synthetic oligonucleotide
agugagccccuggaagucc

SEQ ID NO: 2153451 - RNA, 19 nt, Artificial Sequence
  Description of Artificial Sequence: Synthetic oligonucleotide
aacagcggcuucuuccuua

SEQ ID NO: 2153452 - RNA, 19 nt, Artificial Sequence
  Description of Artificial Sequence: Synthetic oligonucleotide
aucaaggcgagugauccga

SEQ ID NO: 2153453 - RNA, 19 nt, Artificial Sequence
  Description of Artificial Sequence: Synthetic oligonucleotide
guguccagcacccuucuga

SEQ ID NO: 2153454 - RNA, 19 nt, Artificial Sequence
  Description of Artificial Sequence: Synthetic oligonucleotide
augacuugacucuguggga

SEQ ID NO: 2153455 - RNA, 19 nt, Artificial Sequence
  Description of Artificial Sequence: Synthetic oligonucleotide
gacuugacucugugggagc

SEQ ID NO: 2153456 - RNA, 19 nt, Artificial Sequence
  Description of Artificial Sequence: Synthetic oligonucleotide
ugaggggaccaccuuuggu

SEQ ID NO: 2153457 - RNA, 19 nt, Artificial Sequence
  Description of Artificial Sequence: Synthetic oligonucleotide
uuccaugagcugagggccc

SEQ ID NO: 2153458 - RNA, 19 nt, Artificial Sequence
  Description of Artificial Sequence: Synthetic oligonucleotide
uggauucccgggccucugg

SEQ ID NO: 2153459 - RNA, 19 nt, Artificial Sequence
  Description of Artificial Sequence: Synthetic oligonucleotide
cucaaaguccuguguccag

SEQ ID NO: 2153460 - RNA, 19 nt, Artificial Sequence
  Description of Artificial Sequence: Synthetic oligonucleotide
gacagccgcaagacuaagg

SEQ ID NO: 2153461 - RNA, 19 nt, Artificial Sequence
  Description of Artificial Sequence: Synthetic oligonucleotide
cccaaggauauacugcacg

SEQ ID NO: 2153462 - RNA, 19 nt, Artificial Sequence
  Description of Artificial Sequence: Synthetic oligonucleotide
cuaggggucaguggcuugg

SEQ ID NO: 2153463 - RNA, 19 nt, Artificial Sequence
  Description of Artificial Sequence: Synthetic oligonucleotide
acgauguacucacuggauu

SEQ ID NO: 2153464 - RNA, 19 nt, Artificial Sequence
  Description of Artificial Sequence: Synthetic oligonucleotide
cucugagcauucucacggg

SEQ ID NO: 2153465 - RNA, 19 nt, Artificial Sequence
  Description of Artificial Sequence: Synthetic oligonucleotide
cauucagaagccggggcgc

SEQ ID NO: 2153466 - RNA, 19 nt, Artificial Sequence
  Description of Artificial Sequence: Synthetic oligonucleotide
cacacuauggugcagacuu

SEQ ID NO: 2153467 - RNA, 19 nt, Artificial Sequence
  Description of Artificial Sequence: Synthetic oligonucleotide
uugacucugugggagcuga

SEQ ID NO: 2153468 - RNA, 19 nt, Artificial Sequence
  Description of Artificial Sequence: Synthetic oligonucleotide
ugauccgaauccuguccug

SEQ ID NO: 2153469 - RNA, 19 nt, Artificial Sequence
  Description of Artificial Sequence: Synthetic oligonucleotide
caucaaggcgagugauccg

SEQ ID NO: 2153470 - RNA, 19 nt, Artificial Sequence
  Description of Artificial Sequence: Synthetic oligonucleotide
uguaaccgauggcuacaca

SEQ ID NO: 2153471 - RNA, 19 nt, Artificial Sequence
  Description of Artificial Sequence: Synthetic oligonucleotide
ugggccacuuccucuaaaa

SEQ ID NO: 2153472 - RNA, 19 nt, Artificial Sequence
  Description of Artificial Sequence: Synthetic oligonucleotide
aggcucugaaauguuuuag

SEQ ID NO: 2153473 - RNA, 19 nt, Artificial Sequence
  Description of Artificial Sequence: Synthetic oligonucleotide
ccgauggcuacacaguucc

SEQ ID NO: 2153474 - RNA, 19 nt, Artificial Sequence
  Description of Artificial Sequence: Synthetic oligonucleotide
ggggucaguggcuuggucc

SEQ ID NO: 2153475 - RNA, 19 nt, Artificial Sequence
  Description of Artificial Sequence: Synthetic oligonucleotide
cugaccaccccuguggcac

SEQ ID NO: 2153476 - RNA, 19 nt, Artificial Sequence
  Description of Artificial Sequence: Synthetic oligonucleotide
gacuaaggugcaagucagg

SEQ ID NO: 2153477 - RNA, 19 nt, Artificial Sequence
  Description of Artificial Sequence: Synthetic oligonucleotide
agaagucuuuccggacagc

SEQ ID NO: 2153478 - RNA, 19 nt, Artificial Sequence
  Description of Artificial Sequence: Synthetic oligonucleotide
cucaacaccccaggcagag

SEQ ID NO: 2153479 - RNA, 19 nt, Artificial Sequence
  Description of Artificial Sequence: Synthetic oligonucleotide
uucaaccaguucuuccguc

SEQ ID NO: 2153480 - RNA, 19 nt, Artificial Sequence
  Description of Artificial Sequence: Synthetic oligonucleotide
auguggguaaugaugucca

SEQ ID NO: 2153481 - RNA, 19 nt, Artificial Sequence
  Description of Artificial Sequence: Synthetic oligonucleotide
gagugauccgaauccuguc

SEQ ID NO: 2153482 - RNA, 19 nt, Artificial Sequence
  Description of Artificial Sequence: Synthetic oligonucleotide
guagccacacuauggugca

SEQ ID NO: 2153483 - RNA, 19 nt, Artificial Sequence
  Description of Artificial Sequence: Synthetic oligonucleotide
gaaccggggccucccacag

SEQ ID NO: 2153484 - RNA, 19 nt, Artificial Sequence
  Description of Artificial Sequence: Synthetic oligonucleotide
uccuguguccaguggcuga

SEQ ID NO: 2153485 - RNA, 19 nt, Artificial Sequence
  Description of Artificial Sequence: Synthetic oligonucleotide
guagggaggguuacugacc

SEQ ID NO: 2153486 - RNA, 19 nt, Artificial Sequence
  Description of Artificial Sequence: Synthetic oligonucleotide
auguagggaggguuacuga

SEQ ID NO: 2153487 - RNA, 19 nt, Artificial Sequence
  Description of Artificial Sequence: Synthetic oligonucleotide
ccuuguguccacuucuaag

SEQ ID NO: 2153488 - RNA, 19 nt, Artificial Sequence
  Description of Artificial Sequence: Synthetic oligonucleotide
uaaugauguccaugccuuc

SEQ ID NO: 2153489 - RNA, 19 nt, Artificial Sequence
  Description of Artificial Sequence: Synthetic oligonucleotide
uccgaauccuguccugcaa

SEQ ID NO: 2153490 - RNA, 19 nt, Artificial Sequence
  Description of Artificial Sequence: Synthetic oligonucleotide
caaaaggcguguccagcac

SEQ ID NO: 2153491 - RNA, 19 nt, Artificial Sequence
  Description of Artificial Sequence: Synthetic oligonucleotide
gaagauguagggaggguua

SEQ ID NO: 2153492 - RNA, 19 nt, Artificial Sequence
  Description of Artificial Sequence: Synthetic oligonucleotide
aggaaccggggccucccac

SEQ ID NO: 2153493 - RNA, 19 nt, Artificial Sequence
  Description of Artificial Sequence: Synthetic oligonucleotide
ggaagucccacuccccaag

SEQ ID NO: 2153494 - RNA, 19 nt, Artificial Sequence
  Description of Artificial Sequence: Synthetic oligonucleotide
cuagaauccuggccagcug

SEQ ID NO: 2153495 - RNA, 19 nt, Artificial Sequence
  Description of Artificial Sequence: Synthetic oligonucleotide
aggauauacugcacgggca

SEQ ID NO: 2153496 - RNA, 19 nt, Artificial Sequence
  Description of Artificial Sequence: Synthetic oligonucleotide
uccagaaugaggggaccac

SEQ ID NO: 2153497 - RNA, 19 nt, Artificial Sequence
  Description of Artificial Sequence: Synthetic oligonucleotide
ucuaggggucaguggcuug

SEQ ID NO: 2153498 - RNA, 19 nt, Artificial Sequence
  Description of Artificial Sequence: Synthetic oligonucleotide
ucuuccgucucuggccgag

SEQ ID NO: 2153499 - RNA, 19 nt, Artificial Sequence
  Description of Artificial Sequence: Synthetic oligonucleotide
uuccgucucuggccgagga

SEQ ID NO: 2153500 - RNA, 19 nt, Artificial Sequence
  Description of Artificial Sequence: Synthetic oligonucleotide
gcugucuaggggucagugg

SEQ ID NO: 2153501 - RNA, 19 nt, Artificial Sequence
  Description of Artificial Sequence: Synthetic oligonucleotide
auucccgggccucugggau

SEQ ID NO: 2153502 - RNA, 19 nt, Artificial Sequence
  Description of Artificial Sequence: Synthetic oligonucleotide
cucccacagaagucuuucc

SEQ ID NO: 2153503 - RNA, 19 nt, Artificial Sequence
  Description of Artificial Sequence: Synthetic oligonucleotide
cucuggccgaggaaugaac

SEQ ID NO: 2153504 - RNA, 19 nt, Artificial Sequence
  Description of Artificial Sequence: Synthetic oligonucleotide
cugacucagaaggcugagg

SEQ ID NO: 2153505 - RNA, 19 nt, Artificial Sequence
  Description of Artificial Sequence: Synthetic oligonucleotide
gcaaugacuugacucugug

SEQ ID NO: 2153506 - RNA, 19 nt, Artificial Sequence
  Description of Artificial Sequence: Synthetic oligonucleotide
ggguaccaucuucagagug

SEQ ID NO: 2153507 - RNA, 19 nt, Artificial Sequence
  Description of Artificial Sequence: Synthetic oligonucleotide
gaggggaccaccuuugguu

SEQ ID NO: 2153508 - RNA, 19 nt, Artificial Sequence
  Description of Artificial Sequence: Synthetic oligonucleotide
gcagagaugaaugagacuu

SEQ ID NO: 2153509 - RNA, 19 nt, Artificial Sequence
  Description of Artificial Sequence: Synthetic oligonucleotide
uuccggacagccgcaagac

SEQ ID NO: 2153510 - RNA, 19 nt, Artificial Sequence
  Description of Artificial Sequence: Synthetic oligonucleotide
auccgaauccuguccugca

SEQ ID NO: 2153511 - RNA, 19 nt, Artificial Sequence
  Description of Artificial Sequence: Synthetic oligonucleotide
ucacuggauucccgggccu

SEQ ID NO: 2153512 - RNA, 19 nt, Artificial Sequence
  Description of Artificial Sequence: Synthetic oligonucleotide
ccgaggaaugaacacuggg

SEQ ID NO: 2153513 - RNA, 19 nt, Artificial Sequence
  Description of Artificial Sequence: Synthetic oligonucleotide
aaaacccauucaaccaguu

SEQ ID NO: 2153514 - RNA, 19 nt, Artificial Sequence
  Description of Artificial Sequence: Synthetic oligonucleotide
ucaggcuaacagcggcuuc

SEQ ID NO: 2153515 - RNA, 19 nt, Artificial Sequence
  Description of Artificial Sequence: Synthetic oligonucleotide
uacacaguuccuggaucca

SEQ ID NO: 2153516 - RNA, 19 nt, Artificial Sequence
  Description of Artificial Sequence: Synthetic oligonucleotide
accggggccucccacagaa

SEQ ID NO: 2153517 - RNA, 19 nt, Artificial Sequence
  Description of Artificial Sequence: Synthetic oligonucleotide
acuugacucugugggagcu

SEQ ID NO: 2153518 - RNA, 19 nt, Artificial Sequence
  Description of Artificial Sequence: Synthetic oligonucleotide
gauauacugcacgggcauc

SEQ ID NO: 2153519 - RNA, 19 nt, Artificial Sequence
  Description of Artificial Sequence: Synthetic oligonucleotide
accgauggcuacacaguuc

SEQ ID NO: 2153520 - RNA, 19 nt, Artificial Sequence
  Description of Artificial Sequence: Synthetic oligonucleotide
ucaaggcgagugauccgaa

SEQ ID NO: 2153521 - RNA, 19 nt, Artificial Sequence
  Description of Artificial Sequence: Synthetic oligonucleotide
ugcaaaucucuggggccag

SEQ ID NO: 2153522 - RNA, 19 nt, Artificial Sequence
  Description of Artificial Sequence: Synthetic oligonucleotide
uauacugcacgggcauccu

SEQ ID NO: 2153523 - RNA, 19 nt, Artificial Sequence
  Description of Artificial Sequence: Synthetic oligonucleotide
agcugucuaggggucagug

SEQ ID NO: 2153524 - RNA, 19 nt, Artificial Sequence
  Description of Artificial Sequence: Synthetic oligonucleotide
cagccgcaagacuaaggug

SEQ ID NO: 2153525 - RNA, 19 nt, Artificial Sequence
  Description of Artificial Sequence: Synthetic oligonucleotide
cuaacagcggcuucuuccu

SEQ ID NO: 2153526 - RNA, 19 nt, Artificial Sequence
  Description of Artificial Sequence: Synthetic oligonucleotide
gggucaggcuaacagcggc

SEQ ID NO: 2153527 - RNA, 19 nt, Artificial Sequence
  Description of Artificial Sequence: Synthetic oligonucleotide
uguggguaaugauguccau

SEQ ID NO: 2153528 - RNA, 19 nt, Artificial Sequence
  Description of Artificial Sequence: Synthetic oligonucleotide
ggaugugcaggaaccgggg

SEQ ID NO: 2153529 - RNA, 19 nt, Artificial Sequence
  Description of Artificial Sequence: Synthetic oligonucleotide
uccggacagccgcaagacu

SEQ ID NO: 2153530 - RNA, 19 nt, Artificial Sequence
  Description of Artificial Sequence: Synthetic oligonucleotide
agccacacuauggugcaga

SEQ ID NO: 2153531 - RNA, 19 nt, Artificial Sequence
  Description of Artificial Sequence: Synthetic oligonucleotide
gguaccaucuucagaguga

SEQ ID NO: 2153532 - RNA, 19 nt, Artificial Sequence
  Description of Artificial Sequence: Synthetic oligonucleotide
gguuacugaccaccaaguc

SEQ ID NO: 2153533 - RNA, 19 nt, Artificial Sequence
  Description of Artificial Sequence: Synthetic oligonucleotide
gaaugaggggaccaccuuu

SEQ ID NO: 2153534 - RNA, 19 nt, Artificial Sequence
  Description of Artificial Sequence: Synthetic oligonucleotide
ugccuuguguccacuucua

SEQ ID NO: 2153535 - RNA, 19 nt, Artificial Sequence
  Description of Artificial Sequence: Synthetic oligonucleotide
cuuuccggacagccgcaag

SEQ ID NO: 2153536 - RNA, 19 nt, Artificial Sequence
  Description of Artificial Sequence: Synthetic oligonucleotide
gguccaaagugcugguuuc

SEQ ID NO: 2153537 - RNA, 19 nt, Artificial Sequence
  Description of Artificial Sequence: Synthetic oligonucleotide
gcucugaaauguuuuagcu

SEQ ID NO: 2153538 - RNA, 19 nt, Artificial Sequence
  Description of Artificial Sequence: Synthetic oligonucleotide
gauucccgggccucuggga

SEQ ID NO: 2153539 - RNA, 19 nt, Artificial Sequence
  Description of Artificial Sequence: Synthetic oligonucleotide
cugaaauguuuuagcucca

SEQ ID NO: 2153540 - RNA, 19 nt, Artificial Sequence
  Description of Artificial Sequence: Synthetic oligonucleotide
agaagccggggcgccaagg

SEQ ID NO: 2153541 - RNA, 19 nt, Artificial Sequence
  Description of Artificial Sequence: Synthetic oligonucleotide
gccucugagcauucucacg

SEQ ID NO: 2153542 - RNA, 19 nt, Artificial Sequence
  Description of Artificial Sequence: Synthetic oligonucleotide
aguggcugaccaccccugu

SEQ ID NO: 2153543 - RNA, 19 nt, Artificial Sequence
  Description of Artificial Sequence: Synthetic oligonucleotide
gcugguuucaggcucugaa

SEQ ID NO: 2153544 - RNA, 19 nt, Artificial Sequence
  Description of Artificial Sequence: Synthetic oligonucleotide
gcuacacaguuccuggauc

SEQ ID NO: 2153545 - RNA, 19 nt, Artificial Sequence
  Description of Artificial Sequence: Synthetic oligonucleotide
aaggugcaagucaggcuga

SEQ ID NO: 2153546 - RNA, 19 nt, Artificial Sequence
  Description of Artificial Sequence: Synthetic oligonucleotide
ggauucccgggccucuggg

SEQ ID NO: 2153547 - RNA, 19 nt, Artificial Sequence
  Description of Artificial Sequence: Synthetic oligonucleotide
cagaggcauucagaagccg

SEQ ID NO: 2153548 - RNA, 19 nt, Artificial Sequence
  Description of Artificial Sequence: Synthetic oligonucleotide
cuaaggugcaagucaggcu

SEQ ID NO: 2153549 - RNA, 19 nt, Artificial Sequence
  Description of Artificial Sequence: Synthetic oligonucleotide
acagcggcuucuuccuuau

SEQ ID NO: 2153550 - RNA, 19 nt, Artificial Sequence
  Description of Artificial Sequence: Synthetic oligonucleotide
cuguaaccgauggcuacac

SEQ ID NO: 2153551 - RNA, 19 nt, Artificial Sequence
  Description of Artificial Sequence: Synthetic oligonucleotide
augagccacgauguacuca

SEQ ID NO: 2153552 - RNA, 19 nt, Artificial Sequence
  Description of Artificial Sequence: Synthetic oligonucleotide
aggugcaagucaggcugac

SEQ ID NO: 2153553 - RNA, 19 nt, Artificial Sequence
  Description of Artificial Sequence: Synthetic oligonucleotide
uccaugagcugagggccca

SEQ ID NO: 2153554 - RNA, 19 nt, Artificial Sequence
  Description of Artificial Sequence: Synthetic oligonucleotide
ggcaaaaggcguguccagc

SEQ ID NO: 2153555 - RNA, 19 nt, Artificial Sequence
  Description of Artificial Sequence: Synthetic oligonucleotide
agauguagggaggguuacu

SEQ ID NO: 2153556 - RNA, 19 nt, Artificial Sequence
  Description of Artificial Sequence: Synthetic oligonucleotide
ggccgaggaaugaacacug

SEQ ID NO: 2153557 - RNA, 19 nt, Artificial Sequence
  Description of Artificial Sequence: Synthetic oligonucleotide
uccgucucuggccgaggaa

SEQ ID NO: 2153558 - RNA, 19 nt, Artificial Sequence
  Description of Artificial Sequence: Synthetic oligonucleotide
cugcaaaucucuggggcca

SEQ ID NO: 2153559 - RNA, 19 nt, Artificial Sequence
  Description of Artificial Sequence: Synthetic oligonucleotide
caguggcugaccaccccug

SEQ ID NO: 2153560 - RNA, 19 nt, Artificial Sequence
  Description of Artificial Sequence: Synthetic oligonucleotide
gugauccgaauccuguccu

SEQ ID NO: 2153561 - RNA, 19 nt, Artificial Sequence
  Description of Artificial Sequence: Synthetic oligonucleotide
gaacaugagccacgaugua

SEQ ID NO: 2153562 - RNA, 19 nt, Artificial Sequence
  Description of Artificial Sequence: Synthetic oligonucleotide
cagaaugaggggaccaccu

SEQ ID NO: 2153563 - RNA, 19 nt, Artificial Sequence
  Description of Artificial Sequence: Synthetic oligonucleotide
uacugaccaccaaguccac

SEQ ID NO: 2153564 - RNA, 19 nt, Artificial Sequence
  Description of Artificial Sequence: Synthetic oligonucleotide
ccaggcagagaugaaugag

SEQ ID NO: 2153565 - RNA, 19 nt, Artificial Sequence
  Description of Artificial Sequence: Synthetic oligonucleotide
agccggggcgccaagguca

SEQ ID NO: 2153566 - RNA, 19 nt, Artificial Sequence
  Description of Artificial Sequence: Synthetic oligonucleotide
caagucaggcugacucuga

SEQ ID NO: 2153567 - RNA, 19 nt, Artificial Sequence
  Description of Artificial Sequence: Synthetic oligonucleotide
ugacucugugggagcugac

SEQ ID NO: 2153568 - RNA, 19 nt, Artificial Sequence
  Description of Artificial Sequence: Synthetic oligonucleotide
gagugagccccuggaaguc

SEQ ID NO: 2153569 - RNA, 19 nt, Artificial Sequence
  Description of Artificial Sequence: Synthetic oligonucleotide
cuugacucugugggagcug

SEQ ID NO: 2153570 - RNA, 19 nt, Artificial Sequence
  Description of Artificial Sequence: Synthetic oligonucleotide
guguccaguggcugaccac

SEQ ID NO: 2153571 - RNA, 19 nt, Artificial Sequence
  Description of Artificial Sequence: Synthetic oligonucleotide
gugccuuguguccacuucu

SEQ ID NO: 2153572 - RNA, 19 nt, Artificial Sequence
  Description of Artificial Sequence: Synthetic oligonucleotide
agcacccuucugagguuac

SEQ ID NO: 2153573 - RNA, 19 nt, Artificial Sequence
  Description of Artificial Sequence: Synthetic oligonucleotide
uaacagcggcuucuuccuu

SEQ ID NO: 2153574 - RNA, 19 nt, Artificial Sequence
  Description of Artificial Sequence: Synthetic oligonucleotide
ucagaaggcugagggcaau

SEQ ID NO: 2153575 - RNA, 19 nt, Artificial Sequence
  Description of Artificial Sequence: Synthetic oligonucleotide
acuggauucccgggccucu

SEQ ID NO: 2153576 - RNA, 19 nt, Artificial Sequence
  Description of Artificial Sequence: Synthetic oligonucleotide
ucaacaccccaggcagaga

SEQ ID NO: 2153577 - RNA, 19 nt, Artificial Sequence
  Description of Artificial Sequence: Synthetic oligonucleotide
cacgggcauccucuguaac

SEQ ID NO: 2153578 - RNA, 19 nt, Artificial Sequence
  Description of Artificial Sequence: Synthetic oligonucleotide
ggauauacugcacgggcau

SEQ ID NO: 2153579 - RNA, 19 nt, Artificial Sequence
  Description of Artificial Sequence: Synthetic oligonucleotide
gaauccuggccagcugcuc

SEQ ID NO: 2153580 - RNA, 19 nt, Artificial Sequence
  Description of Artificial Sequence: Synthetic oligonucleotide
caggcucugaaauguuuua

SEQ ID NO: 2153581 - RNA, 19 nt, Artificial Sequence
  Description of Artificial Sequence: Synthetic oligonucleotide
gaagccggggcgccaaggu

SEQ ID NO: 2153582 - RNA, 19 nt, Artificial Sequence
  Description of Artificial Sequence: Synthetic oligonucleotide
gaccaccuuugguucccac

SEQ ID NO: 2153583 - RNA, 19 nt, Artificial Sequence
  Description of Artificial Sequence: Synthetic oligonucleotide
gugagccccuggaaguccc

SEQ ID NO: 2153584 - RNA, 19 nt, Artificial Sequence
  Description of Artificial Sequence: Synthetic oligonucleotide
ccagaaugaggggaccacc

SEQ ID NO: 2153585 - RNA, 19 nt, Artificial Sequence
  Description of Artificial Sequence: Synthetic oligonucleotide
uucuuccgucucuggccga

SEQ ID NO: 2153586 - RNA, 19 nt, Artificial Sequence
  Description of Artificial Sequence: Synthetic oligonucleotide
gggccacuuccucuaaaac

SEQ ID NO: 2153587 - RNA, 19 nt, Artificial Sequence
  Description of Artificial Sequence: Synthetic oligonucleotide
aaccggggccucccacaga

SEQ ID NO: 2153588 - RNA, 19 nt, Artificial Sequence
  Description of Artificial Sequence: Synthetic oligonucleotide
caauggcuccugauccaca

SEQ ID NO: 2153589 - RNA, 19 nt, Artificial Sequence
  Description of Artificial Sequence: Synthetic oligonucleotide
ugaccaccccuguggcacu

SEQ ID NO: 2153590 - RNA, 19 nt, Artificial Sequence
  Description of Artificial Sequence: Synthetic oligonucleotide
ggcaauggcuccugaucca

SEQ ID NO: 2153591 - RNA, 19 nt, Artificial Sequence
  Description of Artificial Sequence: Synthetic oligonucleotide
cgggcauccucuguaaccg

SEQ ID NO: 2153592 - RNA, 19 nt, Artificial Sequence
  Description of Artificial Sequence: Synthetic oligonucleotide
ccgaauccuguccugcaac

SEQ ID NO: 2153593 - RNA, 19 nt, Artificial Sequence
  Description of Artificial Sequence: Synthetic oligonucleotide
ggucaagauguggguaaug

SEQ ID NO: 2153594 - RNA, 19 nt, Artificial Sequence
  Description of Artificial Sequence: Synthetic oligonucleotide
aggucaagauguggguaau

SEQ ID NO: 2153595 - RNA, 19 nt, Artificial Sequence
  Description of Artificial Sequence: Synthetic oligonucleotide
gacucugugggagcugacu

SEQ ID NO: 2153596 - RNA, 19 nt, Artificial Sequence
  Description of Artificial Sequence: Synthetic oligonucleotide
guccuguguccaguggcug

SEQ ID NO: 2153597 - RNA, 19 nt, Artificial Sequence
  Description of Artificial Sequence: Synthetic oligonucleotide
ggaaccggggccucccaca

SEQ ID NO: 2153598 - RNA, 19 nt, Artificial Sequence
  Description of Artificial Sequence: Synthetic oligonucleotide
ggggaccaccuuugguucc

SEQ ID NO: 2153599 - RNA, 19 nt, Artificial Sequence
  Description of Artificial Sequence: Synthetic oligonucleotide
aaggcguguccagcacccu

SEQ ID NO: 2153600 - RNA, 19 nt, Artificial Sequence
  Description of Artificial Sequence: Synthetic oligonucleotide
cuuccgucucuggccgagg

SEQ ID NO: 2153601 - RNA, 19 nt, Artificial Sequence
  Description of Artificial Sequence: Synthetic oligonucleotide
gcaagacuaaggugcaagu

SEQ ID NO: 2153602 - RNA, 19 nt, Artificial Sequence
  Description of Artificial Sequence: Synthetic oligonucleotide
uugguccaaagugcugguu

SEQ ID NO: 2153603 - RNA, 19 nt, Artificial Sequence
  Description of Artificial Sequence: Synthetic oligonucleotide
gcaauggcuccugauccac

SEQ ID NO: 2153604 - RNA, 19 nt, Artificial Sequence
  Description of Artificial Sequence: Synthetic oligonucleotide
cacgauguacucacuggau

SEQ ID NO: 2153605 - RNA, 19 nt, Artificial Sequence
  Description of Artificial Sequence: Synthetic oligonucleotide
ccacuccccaaggauauac

SEQ ID NO: 2153606 - RNA, 19 nt, Artificial Sequence
  Description of Artificial Sequence: Synthetic oligonucleotide
uucccgggccucugggaua

SEQ ID NO: 2153607 - RNA, 19 nt, Artificial Sequence
  Description of Artificial Sequence: Synthetic oligonucleotide
guuuuagcuccaagaacau

SEQ ID NO: 2153608 - RNA, 19 nt, Artificial Sequence
  Description of Artificial Sequence: Synthetic oligonucleotide
cacuauggugcagacuucu

SEQ ID NO: 2153609 - RNA, 19 nt, Artificial Sequence
  Description of Artificial Sequence: Synthetic oligonucleotide
caccccuguggcacucaac

SEQ ID NO: 2153610 - RNA, 19 nt, Artificial Sequence
  Description of Artificial Sequence: Synthetic oligonucleotide
cuguguccaguggcugacc

SEQ ID NO: 2153611 - RNA, 19 nt, Artificial Sequence
  Description of Artificial Sequence: Synthetic oligonucleotide
acucaacaccccaggcaga

SEQ ID NO: 2153612 - RNA, 19 nt, Artificial Sequence
  Description of Artificial Sequence: Synthetic oligonucleotide
gccacacuauggugcagac

SEQ ID NO: 2153613 - RNA, 19 nt, Artificial Sequence
  Description of Artificial Sequence: Synthetic oligonucleotide
ucucacgggucaggcuaac

SEQ ID NO: 2153614 - RNA, 19 nt, Artificial Sequence
  Description of Artificial Sequence: Synthetic oligonucleotide
cauucucacgggucaggcu

SEQ ID NO: 2153615 - RNA, 19 nt, Artificial Sequence
  Description of Artificial Sequence: Synthetic oligonucleotide
cacuggauucccgggccuc

SEQ ID NO: 2153616 - RNA, 19 nt, Artificial Sequence
  Description of Artificial Sequence: Synthetic oligonucleotide
ccggacagccgcaagacua

SEQ ID NO: 2153617 - RNA, 19 nt, Artificial Sequence
  Description of Artificial Sequence: Synthetic oligonucleotide
caggcuaacagcggcuucu

SEQ ID NO: 2153618 - RNA, 19 nt, Artificial Sequence
  Description of Artificial Sequence: Synthetic oligonucleotide
gagccccuggaagucccac

SEQ ID NO: 2153619 - RNA, 19 nt, Artificial Sequence
  Description of Artificial Sequence: Synthetic oligonucleotide
gcgagugauccgaauccug

SEQ ID NO: 2153620 - RNA, 19 nt, Artificial Sequence
  Description of Artificial Sequence: Synthetic oligonucleotide
gcuagaauccuggccagcu

SEQ ID NO: 2153621 - RNA, 19 nt, Artificial Sequence
  Description of Artificial Sequence: Synthetic oligonucleotide
gggcgccaaggucaagaug

SEQ ID NO: 2153622 - RNA, 19 nt, Artificial Sequence
  Description of Artificial Sequence: Synthetic oligonucleotide
ccaagaacaugagccacga

SEQ ID NO: 2153623 - RNA, 19 nt, Artificial Sequence
  Description of Artificial Sequence: Synthetic oligonucleotide
ggguuacugaccaccaagu

SEQ ID NO: 2153624 - RNA, 19 nt, Artificial Sequence
  Description of Artificial Sequence: Synthetic oligonucleotide
cagaagccggggcgccaag

SEQ ID NO: 2153625 - RNA, 19 nt, Artificial Sequence
  Description of Artificial Sequence: Synthetic oligonucleotide
ggcuugguccaaagugcug

SEQ ID NO: 2153626 - RNA, 19 nt, Artificial Sequence
  Description of Artificial Sequence: Synthetic oligonucleotide
ggacagccgcaagacuaag

SEQ ID NO: 2153627 - RNA, 19 nt, Artificial Sequence
  Description of Artificial Sequence: Synthetic oligonucleotide
ggcuagaauccuggccagc

SEQ ID NO: 2153628 - RNA, 19 nt, Artificial Sequence
  Description of Artificial Sequence: Synthetic oligonucleotide
gggccaguuguuccauguc

SEQ ID NO: 2153629 - RNA, 19 nt, Artificial Sequence
  Description of Artificial Sequence: Synthetic oligonucleotide
ggcuacacaguuccuggau

SEQ ID NO: 2153630 - RNA, 19 nt, Artificial Sequence
  Description of Artificial Sequence: Synthetic oligonucleotide
cacuuccucuaaaacccau

SEQ ID NO: 2153631 - RNA, 19 nt, Artificial Sequence
  Description of Artificial Sequence: Synthetic oligonucleotide
ggggccaguuguuccaugu

SEQ ID NO: 2153632 - RNA, 19 nt, Artificial Sequence
  Description of Artificial Sequence: Synthetic oligonucleotide
ccuccagaaugaggggacc

SEQ ID NO: 2153633 - RNA, 19 nt, Artificial Sequence
  Description of Artificial Sequence: Synthetic oligonucleotide
gcaggaaccggggccuccc

SEQ ID NO: 2153634 - RNA, 19 nt, Artificial Sequence
  Description of Artificial Sequence: Synthetic oligonucleotide
cgggucaggcuaacagcgg

SEQ ID NO: 2153635 - RNA, 19 nt, Artificial Sequence
  Description of Artificial Sequence: Synthetic oligonucleotide
aggcuaacagcggcuucuu

SEQ ID NO: 2153636 - RNA, 19 nt, Artificial Sequence
  Description of Artificial Sequence: Synthetic oligonucleotide
cugugggagcugacucaga

SEQ ID NO: 2153637 - RNA, 19 nt, Artificial Sequence
  Description of Artificial Sequence: Synthetic oligonucleotide
gcugaccaccccuguggca

SEQ ID NO: 2153638 - RNA, 19 nt, Artificial Sequence
  Description of Artificial Sequence: Synthetic oligonucleotide
cucacgggucaggcuaaca

SEQ ID NO: 2153639 - RNA, 19 nt, Artificial Sequence
  Description of Artificial Sequence: Synthetic oligonucleotide
agguuacaucaaggcgagu

SEQ ID NO: 2153640 - RNA, 19 nt, Artificial Sequence
  Description of Artificial Sequence: Synthetic oligonucleotide
gccgcaagacuaaggugca

SEQ ID NO: 2153641 - RNA, 19 nt, Artificial Sequence
  Description of Artificial Sequence: Synthetic oligonucleotide
gaccaccccuguggcacuc

SEQ ID NO: 2153642 - RNA, 19 nt, Artificial Sequence
  Description of Artificial Sequence: Synthetic oligonucleotide
ccacuuccucuaaaaccca

SEQ ID NO: 2153643 - RNA, 19 nt, Artificial Sequence
  Description of Artificial Sequence: Synthetic oligonucleotide
caaggcgagugauccgaau

SEQ ID NO: 2153644 - RNA, 19 nt, Artificial Sequence
  Description of Artificial Sequence: Synthetic oligonucleotide
cgagugauccgaauccugu

SEQ ID NO: 2153645 - RNA, 19 nt, Artificial Sequence
  Description of Artificial Sequence: Synthetic oligonucleotide
caguggcuugguccaaagu

SEQ ID NO: 2153646 - RNA, 19 nt, Artificial Sequence
  Description of Artificial Sequence: Synthetic oligonucleotide
gggcauccucuguaaccga

SEQ ID NO: 2153647 - RNA, 19 nt, Artificial Sequence
  Description of Artificial Sequence: Synthetic oligonucleotide
cacccuucugagguuacau

SEQ ID NO: 2153648 - RNA, 19 nt, Artificial Sequence
  Description of Artificial Sequence: Synthetic oligonucleotide
gggccucccacagaagucu

SEQ ID NO: 2153649 - RNA, 19 nt, Artificial Sequence
  Description of Artificial Sequence: Synthetic oligonucleotide
cagcacccuucugagguua

SEQ ID NO: 2153650 - RNA, 19 nt, Artificial Sequence
  Description of Artificial Sequence: Synthetic oligonucleotide
ccaccauccagggccacca

SEQ ID NO: 2153651 - RNA, 19 nt, Artificial Sequence
  Description of Artificial Sequence: Synthetic oligonucleotide
ggucaggcuaacagcggcu

SEQ ID NO: 2153652 - RNA, 19 nt, Artificial Sequence
  Description of Artificial Sequence: Synthetic oligonucleotide
gcgccaaggucaagaugug

SEQ ID NO: 2153653 - RNA, 19 nt, Artificial Sequence
  Description of Artificial Sequence: Synthetic oligonucleotide
caggaaccggggccuccca

SEQ ID NO: 2153654 - RNA, 19 nt, Artificial Sequence
  Description of Artificial Sequence: Synthetic oligonucleotide
ggcgagugauccgaauccu

SEQ ID NO: 2153655 - RNA, 19 nt, Artificial Sequence
  Description of Artificial Sequence: Synthetic oligonucleotide
caagaacaugagccacgau

SEQ ID NO: 2153656 - RNA, 19 nt, Artificial Sequence
  Description of Artificial Sequence: Synthetic oligonucleotide
acagggccccagggcaaaa

SEQ ID NO: 2153657 - RNA, 19 nt, Artificial Sequence
  Description of Artificial Sequence: Synthetic oligonucleotide
cacagggccccagggcaaa

SEQ ID NO: 2153658 - RNA, 19 nt, Artificial Sequence
  Description of Artificial Sequence: Synthetic oligonucleotide
cgaauccuguccugcaacu

SEQ ID NO: 2153659 - RNA, 19 nt, Artificial Sequence
  Description of Artificial Sequence: Synthetic oligonucleotide
gcacccuucugagguuaca

SEQ ID NO: 2153660 - RNA, 19 nt, Artificial Sequence
  Description of Artificial Sequence: Synthetic oligonucleotide
ccagggcaaaaggcguguc

SEQ ID NO: 2153661 - RNA, 19 nt, Artificial Sequence
  Description of Artificial Sequence: Synthetic oligonucleotide
cggacagccgcaagacuaa

SEQ ID NO: 2153662 - RNA, 19 nt, Artificial Sequence
  Description of Artificial Sequence: Synthetic oligonucleotide
ggggcgccaaggucaagau

SEQ ID NO: 2153663 - RNA, 19 nt, Artificial Sequence
  Description of Artificial Sequence: Synthetic oligonucleotide
gagccacgauguacucacu

SEQ ID NO: 2153664 - RNA, 19 nt, Artificial Sequence
  Description of Artificial Sequence: Synthetic oligonucleotide
ggucaguggcuugguccaa

SEQ ID NO: 2153665 - RNA, 19 nt, Artificial Sequence
  Description of Artificial Sequence: Synthetic oligonucleotide
ccggggccucccacagaag

SEQ ID NO: 2153666 - RNA, 19 nt, Artificial Sequence
  Description of Artificial Sequence: Synthetic oligonucleotide
cggggcgccaaggucaaga

SEQ ID NO: 2153667 - RNA, 19 nt, Artificial Sequence
  Description of Artificial Sequence: Synthetic oligonucleotide
ccgucucuggccgaggaau

SEQ ID NO: 2153668 - RNA, 19 nt, Artificial Sequence
  Description of Artificial Sequence: Synthetic oligonucleotide
ccacagcaaugacuugacu

SEQ ID NO: 2153669 - RNA, 19 nt, Artificial Sequence
  Description of Artificial Sequence: Synthetic oligonucleotide
gcaaaucucuggggccagu

SEQ ID NO: 2153670 - RNA, 19 nt, Artificial Sequence
  Description of Artificial Sequence: Synthetic oligonucleotide
cggggccucccacagaagu

SEQ ID NO: 2153671 - RNA, 19 nt, Artificial Sequence
  Description of Artificial Sequence: Synthetic oligonucleotide
ccacacuauggugcagacu

SEQ ID NO: 2153672 - RNA, 19 nt, Artificial Sequence
  Description of Artificial Sequence: Synthetic oligonucleotide
ccaccccuguggcacucaa

SEQ ID NO: 2153673 - RNA, 19 nt, Artificial Sequence
  Description of Artificial Sequence: Synthetic oligonucleotide
cccagggcaaaaggcgugu

SEQ ID NO: 2153674 - RNA, 19 nt, Artificial Sequence
  Description of Artificial Sequence: Synthetic oligonucleotide
gccggggcgccaaggucaa

SEQ ID NO: 2153675 - RNA, 19 nt, Artificial Sequence
  Description of Artificial Sequence: Synthetic oligonucleotide
ccggggcgccaaggucaag

SEQ ID NO: 2153676 - RNA, 19 nt, Artificial Sequence
  Description of Artificial Sequence: Synthetic oligonucleotide
cgggccucugggauaccuu

SEQ ID NO: 2153677 - RNA, 19 nt, Artificial Sequence
  Description of Artificial Sequence: Synthetic oligonucleotide
ucaauuaaaacccugaagg

SEQ ID NO: 2153678 - RNA, 19 nt, Artificial Sequence
  Description of Artificial Sequence: Synthetic oligonucleotide
aagagugauaucuaaaugc

SEQ ID NO: 2153679 - RNA, 19 nt, Artificial Sequence
  Description of Artificial Sequence: Synthetic oligonucleotide
uuaaguuucaauuaaaacc

SEQ ID NO: 2153680 - RNA, 19 nt, Artificial Sequence
  Description of Artificial Sequence: Synthetic oligonucleotide
uuauuuaugucuaugauag

SEQ ID NO: 2153681 - RNA, 19 nt, Artificial Sequence
  Description of Artificial Sequence: Synthetic oligonucleotide
auuguugacauuuauaggg

SEQ ID NO: 2153682 - RNA, 19 nt, Artificial Sequence
  Description of Artificial Sequence: Synthetic oligonucleotide
uaaguuucaauuaaaaccc

SEQ ID NO: 2153683 - RNA, 19 nt, Artificial Sequence
  Description of Artificial Sequence: Synthetic oligonucleotide
aagagugaugccuaaaagc

SEQ ID NO: 2153684 - RNA, 19 nt, Artificial Sequence
  Description of Artificial Sequence: Synthetic oligonucleotide
agaguuuacauucauaggg

SEQ ID NO: 2153685 - RNA, 19 nt, Artificial Sequence
  Description of Artificial Sequence: Synthetic oligonucleotide
aaggcuauacuacaaaagg

SEQ ID NO: 2153686 - RNA, 19 nt, Artificial Sequence
  Description of Artificial Sequence: Synthetic oligonucleotide
aguuauagaauguuucucc

SEQ ID NO: 2153687 - RNA, 19 nt, Artificial Sequence
  Description of Artificial Sequence: Synthetic oligonucleotide
auauuguugacauuuauag

SEQ ID NO: 2153688 - RNA, 19 nt, Artificial Sequence
  Description of Artificial Sequence: Synthetic oligonucleotide
aacucugacguguaaaggc

SEQ ID NO: 2153689 - RNA, 19 nt, Artificial Sequence
  Description of Artificial Sequence: Synthetic oligonucleotide
auuaaguuucaauuaaaac

SEQ ID NO: 2153690 - RNA, 19 nt, Artificial Sequence
  Description of Artificial Sequence: Synthetic oligonucleotide
agauuugaaaacuauauca

SEQ ID NO: 2153691 - RNA, 19 nt, Artificial Sequence
  Description of Artificial Sequence: Synthetic oligonucleotide
uguauauaguauuuuauug

SEQ ID NO: 2153692 - RNA, 19 nt, Artificial Sequence
  Description of Artificial Sequence: Synthetic oligonucleotide
aacucugagauuugaaaac

SEQ ID NO: 2153693 - RNA, 19 nt, Artificial Sequence
  Description of Artificial Sequence: Synthetic oligonucleotide
uuaugaauuaggauaagca

SEQ ID NO: 2153694 - RNA, 19 nt, Artificial Sequence
  Description of Artificial Sequence: Synthetic oligonucleotide
aauuagauauuguugacau

SEQ ID NO: 2153695 - RNA, 19 nt, Artificial Sequence
  Description of Artificial Sequence: Synthetic oligonucleotide
aacuauaucacacuguuua

SEQ ID NO: 2153696 - RNA, 19 nt, Artificial Sequence
  Description of Artificial Sequence: Synthetic oligonucleotide
uaagcauuuucucacacag

SEQ ID NO: 2153697 - RNA, 19 nt, Artificial Sequence
  Description of Artificial Sequence: Synthetic oligonucleotide
aauuaggauaagcauuuuc

SEQ ID NO: 2153698 - RNA, 19 nt, Artificial Sequence
  Description of Artificial Sequence: Synthetic oligonucleotide
cauugagacaucuaaaggc

SEQ ID NO: 2153699 - RNA, 19 nt, Artificial Sequence
  Description of Artificial Sequence: Synthetic oligonucleotide
aauccauuaaguuucaauu

SEQ ID NO: 2153700 - RNA, 19 nt, Artificial Sequence
  Description of Artificial Sequence: Synthetic oligonucleotide
uguauucuuaugaauuagg

SEQ ID NO: 2153701 - RNA, 19 nt, Artificial Sequence
  Description of Artificial Sequence: Synthetic oligonucleotide
agaauaacagcauagaaua

SEQ ID NO: 2153702 - RNA, 19 nt, Artificial Sequence
  Description of Artificial Sequence: Synthetic oligonucleotide
ucuguuugaauccauuaag

SEQ ID NO: 2153703 - RNA, 19 nt, Artificial Sequence
  Description of Artificial Sequence: Synthetic oligonucleotide
auucuuaugaauuaggaua

SEQ ID NO: 2153704 - RNA, 19 nt, Artificial Sequence
  Description of Artificial Sequence: Synthetic oligonucleotide
uucaauuaaaacccugaag

SEQ ID NO: 2153705 - RNA, 19 nt, Artificial Sequence
  Description of Artificial Sequence: Synthetic oligonucleotide
auuuugaguucuuagaugu

SEQ ID NO: 2153706 - RNA, 19 nt, Artificial Sequence
  Description of Artificial Sequence: Synthetic oligonucleotide
aaaacuauaucacacuguu

SEQ ID NO: 2153707 - RNA, 19 nt, Artificial Sequence
  Description of Artificial Sequence: Synthetic oligonucleotide
ugaaaacuauaucacacug

SEQ ID NO: 2153708 - RNA, 19 nt, Artificial Sequence
  Description of Artificial Sequence: Synthetic oligonucleotide
acugcuuacaguuauagaa

SEQ ID NO: 2153709 - RNA, 19 nt, Artificial Sequence
  Description of Artificial Sequence: Synthetic oligonucleotide
uagaauacauuccacagaa

SEQ ID NO: 2153710 - RNA, 19 nt, Artificial Sequence
  Description of Artificial Sequence: Synthetic oligonucleotide
auuugaaggaaauagggau

SEQ ID NO: 2153711 - RNA, 19 nt, Artificial Sequence
  Description of Artificial Sequence: Synthetic oligonucleotide
uacuacaaaaggcucauca

SEQ ID NO: 2153712 - RNA, 19 nt, Artificial Sequence
  Description of Artificial Sequence: Synthetic oligonucleotide
auugagacaucuaaaggcc

SEQ ID NO: 2153713 - RNA, 19 nt, Artificial Sequence
  Description of Artificial Sequence: Synthetic oligonucleotide
cauagaauacauuccacag

SEQ ID NO: 2153714 - RNA, 19 nt, Artificial Sequence
  Description of Artificial Sequence: Synthetic oligonucleotide
uucauuaagguuuucucca

SEQ ID NO: 2153715 - RNA, 19 nt, Artificial Sequence
  Description of Artificial Sequence: Synthetic oligonucleotide
aauuaaaacccugaaggcu

SEQ ID NO: 2153716 - RNA, 19 nt, Artificial Sequence
  Description of Artificial Sequence: Synthetic oligonucleotide
gaguaagucugcuaaaagc

SEQ ID NO: 2153717 - RNA, 19 nt, Artificial Sequence
  Description of Artificial Sequence: Synthetic oligonucleotide
uauuguugacauuuauagg

SEQ ID NO: 2153718 - RNA, 19 nt, Artificial Sequence
  Description of Artificial Sequence: Synthetic oligonucleotide
uuucaugugacugaagggc

SEQ ID NO: 2153719 - RNA, 19 nt, Artificial Sequence
  Description of Artificial Sequence: Synthetic oligonucleotide
gauaucuaaaugcuuuccc

SEQ ID NO: 2153720 - RNA, 19 nt, Artificial Sequence
  Description of Artificial Sequence: Synthetic oligonucleotide
uaugauaggaacucugaga

SEQ ID NO: 2153721 - RNA, 19 nt, Artificial Sequence
  Description of Artificial Sequence: Synthetic oligonucleotide
ucuaaaugcuuucccacag

SEQ ID NO: 2153722 - RNA, 19 nt, Artificial Sequence
  Description of Artificial Sequence: Synthetic oligonucleotide
ucucaggugaguaagucug

SEQ ID NO: 2153723 - RNA, 19 nt, Artificial Sequence
  Description of Artificial Sequence: Synthetic oligonucleotide
uaugaauuaggauaagcau

SEQ ID NO: 2153724 - RNA, 19 nt, Artificial Sequence
  Description of Artificial Sequence: Synthetic oligonucleotide
uuucauguaaucucaggug

SEQ ID NO: 2153725 - RNA, 19 nt, Artificial Sequence
  Description of Artificial Sequence: Synthetic oligonucleotide
acuacaaaaggcucaucac

SEQ ID NO: 2153726 - RNA, 19 nt, Artificial Sequence
  Description of Artificial Sequence: Synthetic oligonucleotide
aagcgugugucucaagaac

SEQ ID NO: 2153727 - RNA, 19 nt, Artificial Sequence
  Description of Artificial Sequence: Synthetic oligonucleotide
cuuucaugcaaccguaugg

SEQ ID NO: 2153728 - RNA, 19 nt, Artificial Sequence
  Description of Artificial Sequence: Synthetic oligonucleotide
uucuuaugaauuaggauaa

SEQ ID NO: 2153729 - RNA, 19 nt, Artificial Sequence
  Description of Artificial Sequence: Synthetic oligonucleotide
gaaggaaauagggauaaag

SEQ ID NO: 2153730 - RNA, 19 nt, Artificial Sequence
  Description of Artificial Sequence: Synthetic oligonucleotide
acugaagauaacucugacg

SEQ ID NO: 2153731 - RNA, 19 nt, Artificial Sequence
  Description of Artificial Sequence: Synthetic oligonucleotide
ugaauuaggauaagcauuu

SEQ ID NO: 2153732 - RNA, 19 nt, Artificial Sequence
  Description of Artificial Sequence: Synthetic oligonucleotide
uaagagugaugccuaaaag

SEQ ID NO: 2153733 - RNA, 19 nt, Artificial Sequence
  Description of Artificial Sequence: Synthetic oligonucleotide
uacaguuauagaauguuuc

SEQ ID NO: 2153734 - RNA, 19 nt, Artificial Sequence
  Description of Artificial Sequence: Synthetic oligonucleotide
agaaguuuagugcuggugu

SEQ ID NO: 2153735 - RNA, 19 nt, Artificial Sequence
  Description of Artificial Sequence: Synthetic oligonucleotide
acuauuuugaguucuuaga

SEQ ID NO: 2153736 - RNA, 19 nt, Artificial Sequence
  Description of Artificial Sequence: Synthetic oligonucleotide
uauuuugaguucuuagaug

SEQ ID NO: 2153737 - RNA, 19 nt, Artificial Sequence
  Description of Artificial Sequence: Synthetic oligonucleotide
uaguauuuuauugaacuug

SEQ ID NO: 2153738 - RNA, 19 nt, Artificial Sequence
  Description of Artificial Sequence: Synthetic oligonucleotide
guauauaguauuuuauuga

SEQ ID NO: 2153739 - RNA, 19 nt, Artificial Sequence
  Description of Artificial Sequence: Synthetic oligonucleotide
ucaugcaaccguauggaag

SEQ ID NO: 2153740 - RNA, 19 nt, Artificial Sequence
  Description of Artificial Sequence: Synthetic oligonucleotide
uuuauugaacuugagaaua

SEQ ID NO: 2153741 - RNA, 19 nt, Artificial Sequence
  Description of Artificial Sequence: Synthetic oligonucleotide
augauaggaacucugagau

SEQ ID NO: 2153742 - RNA, 19 nt, Artificial Sequence
  Description of Artificial Sequence: Synthetic oligonucleotide
gauuugaaaacuauaucac

SEQ ID NO: 2153743 - RNA, 19 nt, Artificial Sequence
  Description of Artificial Sequence: Synthetic oligonucleotide
auuauuuaugucuaugaua

SEQ ID NO: 2153744 - RNA, 19 nt, Artificial Sequence
  Description of Artificial Sequence: Synthetic oligonucleotide
agcaugaacggacugaugu

SEQ ID NO: 2153745 - RNA, 19 nt, Artificial Sequence
  Description of Artificial Sequence: Synthetic oligonucleotide
guaaucgaagguaagagug

SEQ ID NO: 2153746 - RNA, 19 nt, Artificial Sequence
  Description of Artificial Sequence: Synthetic oligonucleotide
aaaacccugaaggcuauac

SEQ ID NO: 2153747 - RNA, 19 nt, Artificial Sequence
  Description of Artificial Sequence: Synthetic oligonucleotide
uguaaguucuuucaugcau

SEQ ID NO: 2153748 - RNA, 19 nt, Artificial Sequence
  Description of Artificial Sequence: Synthetic oligonucleotide
auuugaaaacuauaucaca

SEQ ID NO: 2153749 - RNA, 19 nt, Artificial Sequence
  Description of Artificial Sequence: Synthetic oligonucleotide
caauuaaaacccugaaggc

SEQ ID NO: 2153750 - RNA, 19 nt, Artificial Sequence
  Description of Artificial Sequence: Synthetic oligonucleotide
uauauggucuuucucaaua

SEQ ID NO: 2153751 - RNA, 19 nt, Artificial Sequence
  Description of Artificial Sequence: Synthetic oligonucleotide
uccauuaaguuucaauuaa

SEQ ID NO: 2153752 - RNA, 19 nt, Artificial Sequence
  Description of Artificial Sequence: Synthetic oligonucleotide
ucuaugauaggaacucuga

SEQ ID NO: 2153753 - RNA, 19 nt, Artificial Sequence
  Description of Artificial Sequence: Synthetic oligonucleotide
auacauuccacagaacagg

SEQ ID NO: 2153754 - RNA, 19 nt, Artificial Sequence
  Description of Artificial Sequence: Synthetic oligonucleotide
ugaguaagucugcuaaaag

SEQ ID NO: 2153755 - RNA, 19 nt, Artificial Sequence
  Description of Artificial Sequence: Synthetic oligonucleotide
gaacucugccuacugaagg

SEQ ID NO: 2153756 - RNA, 19 nt, Artificial Sequence
  Description of Artificial Sequence: Synthetic oligonucleotide
gucucaagaacucuguuug

SEQ ID NO: 2153757 - RNA, 19 nt, Artificial Sequence
  Description of Artificial Sequence: Synthetic oligonucleotide
uaggauaagcauuuucuca

SEQ ID NO: 2153758 - RNA, 19 nt, Artificial Sequence
  Description of Artificial Sequence: Synthetic oligonucleotide
augcauuugaaggaaauag

SEQ ID NO: 2153759 - RNA, 19 nt, Artificial Sequence
  Description of Artificial Sequence: Synthetic oligonucleotide
acuauaucacacuguuuac

SEQ ID NO: 2153760 - RNA, 19 nt, Artificial Sequence
  Description of Artificial Sequence: Synthetic oligonucleotide
guguuuacauucauuaagg

SEQ ID NO: 2153761 - RNA, 19 nt, Artificial Sequence
  Description of Artificial Sequence: Synthetic oligonucleotide
ucuccaugcauuauuuaug

SEQ ID NO: 2153762 - RNA, 19 nt, Artificial Sequence
  Description of Artificial Sequence: Synthetic oligonucleotide
auuaggauaagcauuuucu

SEQ ID NO: 2153763 - RNA, 19 nt, Artificial Sequence
  Description of Artificial Sequence: Synthetic oligonucleotide
cuuagauguauucuuauga

SEQ ID NO: 2153764 - RNA, 19 nt, Artificial Sequence
  Description of Artificial Sequence: Synthetic oligonucleotide
uuuuauugaacuugagaau

SEQ ID NO: 2153765 - RNA, 19 nt, Artificial Sequence
  Description of Artificial Sequence: Synthetic oligonucleotide
acuguacgcacugauaugg

SEQ ID NO: 2153766 - RNA, 19 nt, Artificial Sequence
  Description of Artificial Sequence: Synthetic oligonucleotide
acaguguuuacauucauua

SEQ ID NO: 2153767 - RNA, 19 nt, Artificial Sequence
  Description of Artificial Sequence: Synthetic oligonucleotide
uuagauguauucuuaugaa

SEQ ID NO: 2153768 - RNA, 19 nt, Artificial Sequence
  Description of Artificial Sequence: Synthetic oligonucleotide
auaucuaaaugcuuuccca

SEQ ID NO: 2153769 - RNA, 19 nt, Artificial Sequence
  Description of Artificial Sequence: Synthetic oligonucleotide
uauaucacacuguuuacau

SEQ ID NO: 2153770 - RNA, 19 nt, Artificial Sequence
  Description of Artificial Sequence: Synthetic oligonucleotide
acaguucacaugcagaagu

SEQ ID NO: 2153771 - RNA, 19 nt, Artificial Sequence
  Description of Artificial Sequence: Synthetic oligonucleotide
auaaaggaauuagauauug

SEQ ID NO: 2153772 - RNA, 19 nt, Artificial Sequence
  Description of Artificial Sequence: Synthetic oligonucleotide
uugaaaacuauaucacacu

SEQ ID NO: 2153773 - RNA, 19 nt, Artificial Sequence
  Description of Artificial Sequence: Synthetic oligonucleotide
uauucuuaugaauuaggau

SEQ ID NO: 2153774 - RNA, 19 nt, Artificial Sequence
  Description of Artificial Sequence: Synthetic oligonucleotide
uucacaugcagaaguuuag

SEQ ID NO: 2153775 - RNA, 19 nt, Artificial Sequence
  Description of Artificial Sequence: Synthetic oligonucleotide
ucugauugucuuugaagag

SEQ ID NO: 2153776 - RNA, 19 nt, Artificial Sequence
  Description of Artificial Sequence: Synthetic oligonucleotide
uaagucugcuaaaagcugu

SEQ ID NO: 2153777 - RNA, 19 nt, Artificial Sequence
  Description of Artificial Sequence: Synthetic oligonucleotide
uuucaauuaaaacccugaa

SEQ ID NO: 2153778 - RNA, 19 nt, Artificial Sequence
  Description of Artificial Sequence: Synthetic oligonucleotide
uguaaucgaagguaagagu

SEQ ID NO: 2153779 - RNA, 19 nt, Artificial Sequence
  Description of Artificial Sequence: Synthetic oligonucleotide
ucuuagauguauucuuaug

SEQ ID NO: 2153780 - RNA, 19 nt, Artificial Sequence
  Description of Artificial Sequence: Synthetic oligonucleotide
caucuaaaggccuuacuac

SEQ ID NO: 2153781 - RNA, 19 nt, Artificial Sequence
  Description of Artificial Sequence: Synthetic oligonucleotide
ugcuuacaguuauagaaug

SEQ ID NO: 2153782 - RNA, 19 nt, Artificial Sequence
  Description of Artificial Sequence: Synthetic oligonucleotide
cuuaugaauuaggauaagc

SEQ ID NO: 2153783 - RNA, 19 nt, Artificial Sequence
  Description of Artificial Sequence: Synthetic oligonucleotide
aaggacuuaccacacugcu

SEQ ID NO: 2153784 - RNA, 19 nt, Artificial Sequence
  Description of Artificial Sequence: Synthetic oligonucleotide
aaucucaggugaguaaguc

SEQ ID NO: 2153785 - RNA, 19 nt, Artificial Sequence
  Description of Artificial Sequence: Synthetic oligonucleotide
auagaauacauuccacaga

SEQ ID NO: 2153786 - RNA, 19 nt, Artificial Sequence
  Description of Artificial Sequence: Synthetic oligonucleotide
agcauuuucucacacaguu

SEQ ID NO: 2153787 - RNA, 19 nt, Artificial Sequence
  Description of Artificial Sequence: Synthetic oligonucleotide
cauucauuaagguuuucuc

SEQ ID NO: 2153788 - RNA, 19 nt, Artificial Sequence
  Description of Artificial Sequence: Synthetic oligonucleotide
aauguuucuccaugcauua

SEQ ID NO: 2153789 - RNA, 19 nt, Artificial Sequence
  Description of Artificial Sequence: Synthetic oligonucleotide
ucauguaaucucaggugag

SEQ ID NO: 2153790 - RNA, 19 nt, Artificial Sequence
  Description of Artificial Sequence: Synthetic oligonucleotide
ucuuucaugcaaccguaug

SEQ ID NO: 2153791 - RNA, 19 nt, Artificial Sequence
  Description of Artificial Sequence: Synthetic oligonucleotide
aggcuauacuacaaaaggc

SEQ ID NO: 2153792 - RNA, 19 nt, Artificial Sequence
  Description of Artificial Sequence: Synthetic oligonucleotide
uuaggauaagcauuuucuc

SEQ ID NO: 2153793 - RNA, 19 nt, Artificial Sequence
  Description of Artificial Sequence: Synthetic oligonucleotide
augaaacugaagauaacuc

SEQ ID NO: 2153794 - RNA, 19 nt, Artificial Sequence
  Description of Artificial Sequence: Synthetic oligonucleotide
uaaucgaagguaagaguga

SEQ ID NO: 2153795 - RNA, 19 nt, Artificial Sequence
  Description of Artificial Sequence: Synthetic oligonucleotide
cacuauuuugaguucuuag

SEQ ID NO: 2153796 - RNA, 19 nt, Artificial Sequence
  Description of Artificial Sequence: Synthetic oligonucleotide
agagugaugccuaaaagcu

SEQ ID NO: 2153797 - RNA, 19 nt, Artificial Sequence
  Description of Artificial Sequence: Synthetic oligonucleotide
uaaaggaauuagauauugu

SEQ ID NO: 2153798 - RNA, 19 nt, Artificial Sequence
  Description of Artificial Sequence: Synthetic oligonucleotide
uggucuuucucaauauugu

SEQ ID NO: 2153799 - RNA, 19 nt, Artificial Sequence
  Description of Artificial Sequence: Synthetic oligonucleotide
auauaguauuuuauugaac

SEQ ID NO: 2153800 - RNA, 19 nt, Artificial Sequence
  Description of Artificial Sequence: Synthetic oligonucleotide
aucuaaaggccuuacuaca

SEQ ID NO: 2153801 - RNA, 19 nt, Artificial Sequence
  Description of Artificial Sequence: Synthetic oligonucleotide
gaacucugagauuugaaaa

SEQ ID NO: 2153802 - RNA, 19 nt, Artificial Sequence
  Description of Artificial Sequence: Synthetic oligonucleotide
guaaucucaggugaguaag

SEQ ID NO: 2153803 - RNA, 19 nt, Artificial Sequence
  Description of Artificial Sequence: Synthetic oligonucleotide
ucauuaagguuuucuccag

SEQ ID NO: 2153804 - RNA, 19 nt, Artificial Sequence
  Description of Artificial Sequence: Synthetic oligonucleotide
uguuugaauccauuaaguu

SEQ ID NO: 2153805 - RNA, 19 nt, Artificial Sequence
  Description of Artificial Sequence: Synthetic oligonucleotide
uucuccaugcauuauuuau

SEQ ID NO: 2153806 - RNA, 19 nt, Artificial Sequence
  Description of Artificial Sequence: Synthetic oligonucleotide
uuauugaacuugagaauaa

SEQ ID NO: 2153807 - RNA, 19 nt, Artificial Sequence
  Description of Artificial Sequence: Synthetic oligonucleotide
ugaaggcuauacuacaaaa

SEQ ID NO: 2153808 - RNA, 19 nt, Artificial Sequence
  Description of Artificial Sequence: Synthetic oligonucleotide
aguucuuagauguauucuu

SEQ ID NO: 2153809 - RNA, 19 nt, Artificial Sequence
  Description of Artificial Sequence: Synthetic oligonucleotide
ggcauugagacaucuaaag

SEQ ID NO: 2153810 - RNA, 19 nt, Artificial Sequence
  Description of Artificial Sequence: Synthetic oligonucleotide
uguuuacauucauuaaggu

SEQ ID NO: 2153811 - RNA, 19 nt, Artificial Sequence
  Description of Artificial Sequence: Synthetic oligonucleotide
ucugccuacugaaggaucu

SEQ ID NO: 2153812 - RNA, 19 nt, Artificial Sequence
  Description of Artificial Sequence: Synthetic oligonucleotide
gauaagcauuuucucacac

SEQ ID NO: 2153813 - RNA, 19 nt, Artificial Sequence
  Description of Artificial Sequence: Synthetic oligonucleotide
ugugccacaguguuuacau

SEQ ID NO: 2153814 - RNA, 19 nt, Artificial Sequence
  Description of Artificial Sequence: Synthetic oligonucleotide
ugauaucuaaaugcuuucc

SEQ ID NO: 2153815 - RNA, 19 nt, Artificial Sequence
  Description of Artificial Sequence: Synthetic oligonucleotide
aacucugccuacugaagga

SEQ ID NO: 2153816 - RNA, 19 nt, Artificial Sequence
  Description of Artificial Sequence: Synthetic oligonucleotide
ugacugaagggcauugaga

SEQ ID NO: 2153817 - RNA, 19 nt, Artificial Sequence
  Description of Artificial Sequence: Synthetic oligonucleotide
cuaugauaggaacucugag

SEQ ID NO: 2153818 - RNA, 19 nt, Artificial Sequence
  Description of Artificial Sequence: Synthetic oligonucleotide
uuucaugcaaccguaugga

SEQ ID NO: 2153819 - RNA, 19 nt, Artificial Sequence
  Description of Artificial Sequence: Synthetic oligonucleotide
ugcauuauuuaugucuaug

SEQ ID NO: 2153820 - RNA, 19 nt, Artificial Sequence
  Description of Artificial Sequence: Synthetic oligonucleotide
acacuguacgcacugauau

SEQ ID NO: 2153821 - RNA, 19 nt, Artificial Sequence
  Description of Artificial Sequence: Synthetic oligonucleotide
ugguguaaguucuuucaug

SEQ ID NO: 2153822 - RNA, 19 nt, Artificial Sequence
  Description of Artificial Sequence: Synthetic oligonucleotide
gauguauucuuaugaauua

SEQ ID NO: 2153823 - RNA, 19 nt, Artificial Sequence
  Description of Artificial Sequence: Synthetic oligonucleotide
aaggcucaucacuauuuug

SEQ ID NO: 2153824 - RNA, 19 nt, Artificial Sequence
  Description of Artificial Sequence: Synthetic oligonucleotide
ugcagaaguuuagugcugg

SEQ ID NO: 2153825 - RNA, 19 nt, Artificial Sequence
  Description of Artificial Sequence: Synthetic oligonucleotide
uagaauguuucuccaugca

SEQ ID NO: 2153826 - RNA, 19 nt, Artificial Sequence
  Description of Artificial Sequence: Synthetic oligonucleotide
gaauuagauauuguugaca

SEQ ID NO: 2153827 - RNA, 19 nt, Artificial Sequence
  Description of Artificial Sequence: Synthetic oligonucleotide
uguaaucucaggugaguaa

SEQ ID NO: 2153828 - RNA, 19 nt, Artificial Sequence
  Description of Artificial Sequence: Synthetic oligonucleotide
uuugaguucuuagauguau

SEQ ID NO: 2153829 - RNA, 19 nt, Artificial Sequence
  Description of Artificial Sequence: Synthetic oligonucleotide
caugcaaccguauggaaga

SEQ ID NO: 2153830 - RNA, 19 nt, Artificial Sequence
  Description of Artificial Sequence: Synthetic oligonucleotide
guuauagaauguuucucca

SEQ ID NO: 2153831 - RNA, 19 nt, Artificial Sequence
  Description of Artificial Sequence: Synthetic oligonucleotide
uaacucugacguguaaagg

SEQ ID NO: 2153832 - RNA, 19 nt, Artificial Sequence
  Description of Artificial Sequence: Synthetic oligonucleotide
aaacccugaaggcuauacu

SEQ ID NO: 2153833 - RNA, 19 nt, Artificial Sequence
  Description of Artificial Sequence: Synthetic oligonucleotide
uagauguauucuuaugaau

SEQ ID NO: 2153834 - RNA, 19 nt, Artificial Sequence
  Description of Artificial Sequence: Synthetic oligonucleotide
uuacaguuauagaauguuu

SEQ ID NO: 2153835 - RNA, 19 nt, Artificial Sequence
  Description of Artificial Sequence: Synthetic oligonucleotide
uugaaggaaauagggauaa

SEQ ID NO: 2153836 - RNA, 19 nt, Artificial Sequence
  Description of Artificial Sequence: Synthetic oligonucleotide
aaccguauggaagagugau

SEQ ID NO: 2153837 - RNA, 19 nt, Artificial Sequence
  Description of Artificial Sequence: Synthetic oligonucleotide
auaagcauuuucucacaca

SEQ ID NO: 2153838 - RNA, 19 nt, Artificial Sequence
  Description of Artificial Sequence: Synthetic oligonucleotide
cuauacuacaaaaggcuca

SEQ ID NO: 2153839 - RNA, 19 nt, Artificial Sequence
  Description of Artificial Sequence: Synthetic oligonucleotide
agugauaucuaaaugcuuu

SEQ ID NO: 2153840 - RNA, 19 nt, Artificial Sequence
  Description of Artificial Sequence: Synthetic oligonucleotide
uguuucuccaugcauuauu

SEQ ID NO: 2153841 - RNA, 19 nt, Artificial Sequence
  Description of Artificial Sequence: Synthetic oligonucleotide
aggugaguaagucugcuaa

SEQ ID NO: 2153842 - RNA, 19 nt, Artificial Sequence
  Description of Artificial Sequence: Synthetic oligonucleotide
uuaagguuuucuccaguau

SEQ ID NO: 2153843 - RNA, 19 nt, Artificial Sequence
  Description of Artificial Sequence: Synthetic oligonucleotide
aaacugaagauaacucuga

SEQ ID NO: 2153844 - RNA, 19 nt, Artificial Sequence
  Description of Artificial Sequence: Synthetic oligonucleotide
uaccacacugcuuacaguu

SEQ ID NO: 2153845 - RNA, 19 nt, Artificial Sequence
  Description of Artificial Sequence: Synthetic oligonucleotide
agggcauugagacaucuaa

SEQ ID NO: 2153846 - RNA, 19 nt, Artificial Sequence
  Description of Artificial Sequence: Synthetic oligonucleotide
cauuugaaggaaauaggga

SEQ ID NO: 2153847 - RNA, 19 nt, Artificial Sequence
  Description of Artificial Sequence: Synthetic oligonucleotide
uguugacauuuauaggggu

SEQ ID NO: 2153848 - RNA, 19 nt, Artificial Sequence
  Description of Artificial Sequence: Synthetic oligonucleotide
agagugauaucuaaaugcu

SEQ ID NO: 2153849 - RNA, 19 nt, Artificial Sequence
  Description of Artificial Sequence: Synthetic oligonucleotide
gcauugagacaucuaaagg

SEQ ID NO: 2153850 - RNA, 19 nt, Artificial Sequence
  Description of Artificial Sequence: Synthetic oligonucleotide
uugacauuuauauggucuu

SEQ ID NO: 2153851 - RNA, 19 nt, Artificial Sequence
  Description of Artificial Sequence: Synthetic oligonucleotide
acacaguucacaugcagaa

SEQ ID NO: 2153852 - RNA, 19 nt, Artificial Sequence
  Description of Artificial Sequence: Synthetic oligonucleotide
uuucucacacaguucacau

SEQ ID NO: 2153853 - RNA, 19 nt, Artificial Sequence
  Description of Artificial Sequence: Synthetic oligonucleotide
auaguauuuuauugaacuu

SEQ ID NO: 2153854 - RNA, 19 nt, Artificial Sequence
  Description of Artificial Sequence: Synthetic oligonucleotide
auuaagguuuucuccagua

SEQ ID NO: 2153855 - RNA, 19 nt, Artificial Sequence
  Description of Artificial Sequence: Synthetic oligonucleotide
uggaagagugauaucuaaa

SEQ ID NO: 2153856 - RNA, 19 nt, Artificial Sequence
  Description of Artificial Sequence: Synthetic oligonucleotide
uagugcugguguaaguucu

SEQ ID NO: 2153857 - RNA, 19 nt, Artificial Sequence
  Description of Artificial Sequence: Synthetic oligonucleotide
cacaugcagaaguuuagug

SEQ ID NO: 2153858 - RNA, 19 nt, Artificial Sequence
  Description of Artificial Sequence: Synthetic oligonucleotide
aaaggcucaucacuauuuu

SEQ ID NO: 2153859 - RNA, 19 nt, Artificial Sequence
  Description of Artificial Sequence: Synthetic oligonucleotide
gucugcuaaaagcugugcc

SEQ ID NO: 2153860 - RNA, 19 nt, Artificial Sequence
  Description of Artificial Sequence: Synthetic oligonucleotide
gaagauaacucugacgugu

SEQ ID NO: 2153861 - RNA, 19 nt, Artificial Sequence
  Description of Artificial Sequence: Synthetic oligonucleotide
uuuagugcugguguaaguu

SEQ ID NO: 2153862 - RNA, 19 nt, Artificial Sequence
  Description of Artificial Sequence: Synthetic oligonucleotide
aauagggauaaaggaauua

SEQ ID NO: 2153863 - RNA, 19 nt, Artificial Sequence
  Description of Artificial Sequence: Synthetic oligonucleotide
gaaauagggauaaaggaau

SEQ ID NO: 2153864 - RNA, 19 nt, Artificial Sequence
  Description of Artificial Sequence: Synthetic oligonucleotide
guuucaauuaaaacccuga

SEQ ID NO: 2153865 - RNA, 19 nt, Artificial Sequence
  Description of Artificial Sequence: Synthetic oligonucleotide
ucaagaacucuguuugaau

SEQ ID NO: 2153866 - RNA, 19 nt, Artificial Sequence
  Description of Artificial Sequence: Synthetic oligonucleotide
ugucucaagaacucuguuu

SEQ ID NO: 2153867 - RNA, 19 nt, Artificial Sequence
  Description of Artificial Sequence: Synthetic oligonucleotide
augaauuaggauaagcauu

SEQ ID NO: 2153868 - RNA, 19 nt, Artificial Sequence
  Description of Artificial Sequence: Synthetic oligonucleotide
uguacgcacugauauggcu

SEQ ID NO: 2153869 - RNA, 19 nt, Artificial Sequence
  Description of Artificial Sequence: Synthetic oligonucleotide
gaagguaagagugaugccu

SEQ ID NO: 2153870 - RNA, 19 nt, Artificial Sequence
  Description of Artificial Sequence: Synthetic oligonucleotide
gugacugaagggcauugag

SEQ ID NO: 2153871 - RNA, 19 nt, Artificial Sequence
  Description of Artificial Sequence: Synthetic oligonucleotide
uucuuagauguauucuuau

SEQ ID NO: 2153872 - RNA, 19 nt, Artificial Sequence
  Description of Artificial Sequence: Synthetic oligonucleotide
guauucuuaugaauuagga

SEQ ID NO: 2153873 - RNA, 19 nt, Artificial Sequence
  Description of Artificial Sequence: Synthetic oligonucleotide
gauauuguugacauuuaua

SEQ ID NO: 2153874 - RNA, 19 nt, Artificial Sequence
  Description of Artificial Sequence: Synthetic oligonucleotide
gaguguauauaguauuuua

SEQ ID NO: 2153875 - RNA, 19 nt, Artificial Sequence
  Description of Artificial Sequence: Synthetic oligonucleotide
gauaggaacucugagauuu

SEQ ID NO: 2153876 - RNA, 19 nt, Artificial Sequence
  Description of Artificial Sequence: Synthetic oligonucleotide
agcauagaauacauuccac

SEQ ID NO: 2153877 - RNA, 19 nt, Artificial Sequence
  Description of Artificial Sequence: Synthetic oligonucleotide
cuuacuacacuguugacau

SEQ ID NO: 2153878 - RNA, 19 nt, Artificial Sequence
  Description of Artificial Sequence: Synthetic oligonucleotide
agggauaaaggaauuagau

SEQ ID NO: 2153879 - RNA, 19 nt, Artificial Sequence
  Description of Artificial Sequence: Synthetic oligonucleotide
uaaucucaggugaguaagu

SEQ ID NO: 2153880 - RNA, 19 nt, Artificial Sequence
  Description of Artificial Sequence: Synthetic oligonucleotide
auaacagcauagaauacau

SEQ ID NO: 2153881 - RNA, 19 nt, Artificial Sequence
  Description of Artificial Sequence: Synthetic oligonucleotide
aucucaggugaguaagucu

SEQ ID NO: 2153882 - RNA, 19 nt, Artificial Sequence
  Description of Artificial Sequence: Synthetic oligonucleotide
guuugaauccauuaaguuu

SEQ ID NO: 2153883 - RNA, 19 nt, Artificial Sequence
  Description of Artificial Sequence: Synthetic oligonucleotide
agucugcuaaaagcugugc

SEQ ID NO: 2153884 - RNA, 19 nt, Artificial Sequence
  Description of Artificial Sequence: Synthetic oligonucleotide
uacugagaguguauauagu

SEQ ID NO: 2153885 - RNA, 19 nt, Artificial Sequence
  Description of Artificial Sequence: Synthetic oligonucleotide
aaggccuuacuacacuguu

SEQ ID NO: 2153886 - RNA, 19 nt, Artificial Sequence
  Description of Artificial Sequence: Synthetic oligonucleotide
aguuuagugcugguguaag

SEQ ID NO: 2153887 - RNA, 19 nt, Artificial Sequence
  Description of Artificial Sequence: Synthetic oligonucleotide
aguuucaauuaaaacccug

SEQ ID NO: 2153888 - RNA, 19 nt, Artificial Sequence
  Description of Artificial Sequence: Synthetic oligonucleotide
caugcauuauuuaugucua

SEQ ID NO: 2153889 - RNA, 19 nt, Artificial Sequence
  Description of Artificial Sequence: Synthetic oligonucleotide
ugagacaucuaaaggccuu

SEQ ID NO: 2153890 - RNA, 19 nt, Artificial Sequence
  Description of Artificial Sequence: Synthetic oligonucleotide
auauggucuuucucaauau

SEQ ID NO: 2153891 - RNA, 19 nt, Artificial Sequence
  Description of Artificial Sequence: Synthetic oligonucleotide
acucugagauuugaaaacu

SEQ ID NO: 2153892 - RNA, 19 nt, Artificial Sequence
  Description of Artificial Sequence: Synthetic oligonucleotide
guugacauuuauauggucu

SEQ ID NO: 2153893 - RNA, 19 nt, Artificial Sequence
  Description of Artificial Sequence: Synthetic oligonucleotide
gauaacucugacguguaaa

SEQ ID NO: 2153894 - RNA, 19 nt, Artificial Sequence
  Description of Artificial Sequence: Synthetic oligonucleotide
gcauuauuuaugucuauga

SEQ ID NO: 2153895 - RNA, 19 nt, Artificial Sequence
  Description of Artificial Sequence: Synthetic oligonucleotide
uugaauccauuaaguuuca

SEQ ID NO: 2153896 - RNA, 19 nt, Artificial Sequence
  Description of Artificial Sequence: Synthetic oligonucleotide
aaaagcugugccacagugu

SEQ ID NO: 2153897 - RNA, 19 nt, Artificial Sequence
  Description of Artificial Sequence: Synthetic oligonucleotide
gaauaacagcauagaauac

SEQ ID NO: 2153898 - RNA, 19 nt, Artificial Sequence
  Description of Artificial Sequence: Synthetic oligonucleotide
ucuuaugaauuaggauaag

SEQ ID NO: 2153899 - RNA, 19 nt, Artificial Sequence
  Description of Artificial Sequence: Synthetic oligonucleotide
uugacauuuauagggguuu

SEQ ID NO: 2153900 - RNA, 19 nt, Artificial Sequence
  Description of Artificial Sequence: Synthetic oligonucleotide
uuaaaacccugaaggcuau

SEQ ID NO: 2153901 - RNA, 19 nt, Artificial Sequence
  Description of Artificial Sequence: Synthetic oligonucleotide
gugauaucuaaaugcuuuc

SEQ ID NO: 2153902 - RNA, 19 nt, Artificial Sequence
  Description of Artificial Sequence: Synthetic oligonucleotide
acccugaaggcuauacuac

SEQ ID NO: 2153903 - RNA, 19 nt, Artificial Sequence
  Description of Artificial Sequence: Synthetic oligonucleotide
aggcucaucacuauuuuga

SEQ ID NO: 2153904 - RNA, 19 nt, Artificial Sequence
  Description of Artificial Sequence: Synthetic oligonucleotide
cagcauagaauacauucca

SEQ ID NO: 2153905 - RNA, 19 nt, Artificial Sequence
  Description of Artificial Sequence: Synthetic oligonucleotide
uagauauuguugacauuua

SEQ ID NO: 2153906 - RNA, 19 nt, Artificial Sequence
  Description of Artificial Sequence: Synthetic oligonucleotide
uauagggguuuuccacagc

SEQ ID NO: 2153907 - RNA, 19 nt, Artificial Sequence
  Description of Artificial Sequence: Synthetic oligonucleotide
gcauagaauacauuccaca

SEQ ID NO: 2153908 - RNA, 19 nt, Artificial Sequence
  Description of Artificial Sequence: Synthetic oligonucleotide
gucuaugauaggaacucug

SEQ ID NO: 2153909 - RNA, 19 nt, Artificial Sequence
  Description of Artificial Sequence: Synthetic oligonucleotide
ggaauuagauauuguugac

SEQ ID NO: 2153910 - RNA, 19 nt, Artificial Sequence
  Description of Artificial Sequence: Synthetic oligonucleotide
agugaugccuaaaagcuuu

SEQ ID NO: 2153911 - RNA, 19 nt, Artificial Sequence
  Description of Artificial Sequence: Synthetic oligonucleotide
aagucugcuaaaagcugug

SEQ ID NO: 2153912 - RNA, 19 nt, Artificial Sequence
  Description of Artificial Sequence: Synthetic oligonucleotide
ucaucacuauuuugaguuc

SEQ ID NO: 2153913 - RNA, 19 nt, Artificial Sequence
  Description of Artificial Sequence: Synthetic oligonucleotide
agacaucuaaaggccuuac

SEQ ID NO: 2153914 - RNA, 19 nt, Artificial Sequence
  Description of Artificial Sequence: Synthetic oligonucleotide
guuuacauucauuaagguu

SEQ ID NO: 2153915 - RNA, 19 nt, Artificial Sequence
  Description of Artificial Sequence: Synthetic oligonucleotide
caugaaacugaagauaacu

SEQ ID NO: 2153916 - RNA, 19 nt, Artificial Sequence
  Description of Artificial Sequence: Synthetic oligonucleotide
uuuugaguucuuagaugua

SEQ ID NO: 2153917 - RNA, 19 nt, Artificial Sequence
  Description of Artificial Sequence: Synthetic oligonucleotide
cugcuaaaagcugugccac

SEQ ID NO: 2153918 - RNA, 19 nt, Artificial Sequence
  Description of Artificial Sequence: Synthetic oligonucleotide
cuauuuugaguucuuagau

SEQ ID NO: 2153919 - RNA, 19 nt, Artificial Sequence
  Description of Artificial Sequence: Synthetic oligonucleotide
aaauagggauaaaggaauu

SEQ ID NO: 2153920 - RNA, 19 nt, Artificial Sequence
  Description of Artificial Sequence: Synthetic oligonucleotide
ucugacguguaaaggcuuu

SEQ ID NO: 2153921 - RNA, 19 nt, Artificial Sequence
  Description of Artificial Sequence: Synthetic oligonucleotide
ucacaugcagaaguuuagu

SEQ ID NO: 2153922 - RNA, 19 nt, Artificial Sequence
  Description of Artificial Sequence: Synthetic oligonucleotide
ucaugugacugaagggcau

SEQ ID NO: 2153923 - RNA, 19 nt, Artificial Sequence
  Description of Artificial Sequence: Synthetic oligonucleotide
gaaaacuauaucacacugu

SEQ ID NO: 2153924 - RNA, 19 nt, Artificial Sequence
  Description of Artificial Sequence: Synthetic oligonucleotide
ugaugccuaaaagcuuucc

SEQ ID NO: 2153925 - RNA, 19 nt, Artificial Sequence
  Description of Artificial Sequence: Synthetic oligonucleotide
aaguuuagugcugguguaa

SEQ ID NO: 2153926 - RNA, 19 nt, Artificial Sequence
  Description of Artificial Sequence: Synthetic oligonucleotide
agaauacauuccacagaac

SEQ ID NO: 2153927 - RNA, 19 nt, Artificial Sequence
  Description of Artificial Sequence: Synthetic oligonucleotide
gaaguuuagugcuggugua

SEQ ID NO: 2153928 - RNA, 19 nt, Artificial Sequence
  Description of Artificial Sequence: Synthetic oligonucleotide
ggaacucugagauuugaaa

SEQ ID NO: 2153929 - RNA, 19 nt, Artificial Sequence
  Description of Artificial Sequence: Synthetic oligonucleotide
cuacaaaaggcucaucacu

SEQ ID NO: 2153930 - RNA, 19 nt, Artificial Sequence
  Description of Artificial Sequence: Synthetic oligonucleotide
cucaggugaguaagucugc

SEQ ID NO: 2153931 - RNA, 19 nt, Artificial Sequence
  Description of Artificial Sequence: Synthetic oligonucleotide
gcaaccguauggaagagug

SEQ ID NO: 2153932 - RNA, 19 nt, Artificial Sequence
  Description of Artificial Sequence: Synthetic oligonucleotide
aagguaagagugaugccua

SEQ ID NO: 2153933 - RNA, 19 nt, Artificial Sequence
  Description of Artificial Sequence: Synthetic oligonucleotide
ggccuuacuacacuguuga

SEQ ID NO: 2153934 - RNA, 19 nt, Artificial Sequence
  Description of Artificial Sequence: Synthetic oligonucleotide
ugcuaaaagcugugccaca

SEQ ID NO: 2153935 - RNA, 19 nt, Artificial Sequence
  Description of Artificial Sequence: Synthetic oligonucleotide
uucaugcaaccguauggaa

SEQ ID NO: 2153936 - RNA, 19 nt, Artificial Sequence
  Description of Artificial Sequence: Synthetic oligonucleotide
auuagauauuguugacauu

SEQ ID NO: 2153937 - RNA, 19 nt, Artificial Sequence
  Description of Artificial Sequence: Synthetic oligonucleotide
guguauauaguauuuuauu

SEQ ID NO: 2153938 - RNA, 19 nt, Artificial Sequence
  Description of Artificial Sequence: Synthetic oligonucleotide
aguggacucaagcgugugu

SEQ ID NO: 2153939 - RNA, 19 nt, Artificial Sequence
  Description of Artificial Sequence: Synthetic oligonucleotide
cagaaguuuagugcuggug

SEQ ID NO: 2153940 - RNA, 19 nt, Artificial Sequence
  Description of Artificial Sequence: Synthetic oligonucleotide
ggcucaucacuauuuugag

SEQ ID NO: 2153941 - RNA, 19 nt, Artificial Sequence
  Description of Artificial Sequence: Synthetic oligonucleotide
cuguuugaauccauuaagu

SEQ ID NO: 2153942 - RNA, 19 nt, Artificial Sequence
  Description of Artificial Sequence: Synthetic oligonucleotide
cuguacgcacugauauggc

SEQ ID NO: 2153943 - RNA, 19 nt, Artificial Sequence
  Description of Artificial Sequence: Synthetic oligonucleotide
ucaggugaguaagucugcu

SEQ ID NO: 2153944 - RNA, 19 nt, Artificial Sequence
  Description of Artificial Sequence: Synthetic oligonucleotide
agcgugugucucaagaacu

SEQ ID NO: 2153945 - RNA, 19 nt, Artificial Sequence
  Description of Artificial Sequence: Synthetic oligonucleotide
acucugacguguaaaggcu

SEQ ID NO: 2153946 - RNA, 19 nt, Artificial Sequence
  Description of Artificial Sequence: Synthetic oligonucleotide
gcuaaaagcugugccacag

SEQ ID NO: 2153947 - RNA, 19 nt, Artificial Sequence
  Description of Artificial Sequence: Synthetic oligonucleotide
uuucuccaugcauuauuua

SEQ ID NO: 2153948 - RNA, 19 nt, Artificial Sequence
  Description of Artificial Sequence: Synthetic oligonucleotide
gacucaagcgugugucuca

SEQ ID NO: 2153949 - RNA, 19 nt, Artificial Sequence
  Description of Artificial Sequence: Synthetic oligonucleotide
ugugacugaagggcauuga

SEQ ID NO: 2153950 - RNA, 19 nt, Artificial Sequence
  Description of Artificial Sequence: Synthetic oligonucleotide
gggauaaaggaauuagaua

SEQ ID NO: 2153951 - RNA, 19 nt, Artificial Sequence
  Description of Artificial Sequence: Synthetic oligonucleotide
agaguguauauaguauuuu

SEQ ID NO: 2153952 - RNA, 19 nt, Artificial Sequence
  Description of Artificial Sequence: Synthetic oligonucleotide
gugugucucaagaacucug

SEQ ID NO: 2153953 - RNA, 19 nt, Artificial Sequence
  Description of Artificial Sequence: Synthetic oligonucleotide
ggaagagugauaucuaaau

SEQ ID NO: 2153954 - RNA, 19 nt, Artificial Sequence
  Description of Artificial Sequence: Synthetic oligonucleotide
cacuguacgcacugauaug

SEQ ID NO: 2153955 - RNA, 19 nt, Artificial Sequence
  Description of Artificial Sequence: Synthetic oligonucleotide
gaauguuucuccaugcauu

SEQ ID NO: 2153956 - RNA, 19 nt, Artificial Sequence
  Description of Artificial Sequence: Synthetic oligonucleotide
acagcaugaacggacugau

SEQ ID NO: 2153957 - RNA, 19 nt, Artificial Sequence
  Description of Artificial Sequence: Synthetic oligonucleotide
cauuauuuaugucuaugau

SEQ ID NO: 2153958 - RNA, 19 nt, Artificial Sequence
  Description of Artificial Sequence: Synthetic oligonucleotide
aagcauuuucucacacagu

SEQ ID NO: 2153959 - RNA, 19 nt, Artificial Sequence
  Description of Artificial Sequence: Synthetic oligonucleotide
aaacuauaucacacuguuu

SEQ ID NO: 2153960 - RNA, 19 nt, Artificial Sequence
  Description of Artificial Sequence: Synthetic oligonucleotide
uccaugcauuauuuauguc

SEQ ID NO: 2153961 - RNA, 19 nt, Artificial Sequence
  Description of Artificial Sequence: Synthetic oligonucleotide
cuccaugcauuauuuaugu

SEQ ID NO: 2153962 - RNA, 19 nt, Artificial Sequence
  Description of Artificial Sequence: Synthetic oligonucleotide
guggacucaagcguguguc

SEQ ID NO: 2153963 - RNA, 19 nt, Artificial Sequence
  Description of Artificial Sequence: Synthetic oligonucleotide
ccaugcauuauuuaugucu

SEQ ID NO: 2153964 - RNA, 19 nt, Artificial Sequence
  Description of Artificial Sequence: Synthetic oligonucleotide
agauaacucugacguguaa

SEQ ID NO: 2153965 - RNA, 19 nt, Artificial Sequence
  Description of Artificial Sequence: Synthetic oligonucleotide
cacaguucacaugcagaag

SEQ ID NO: 2153966 - RNA, 19 nt, Artificial Sequence
  Description of Artificial Sequence: Synthetic oligonucleotide
aagauaacucugacgugua

SEQ ID NO: 2153967 - RNA, 19 nt, Artificial Sequence
  Description of Artificial Sequence: Synthetic oligonucleotide
ugauaggaacucugagauu

SEQ ID NO: 2153968 - RNA, 19 nt, Artificial Sequence
  Description of Artificial Sequence: Synthetic oligonucleotide
ucacuauuuugaguucuua

SEQ ID NO: 2153969 - RNA, 19 nt, Artificial Sequence
  Description of Artificial Sequence: Synthetic oligonucleotide
gugaguaagucugcuaaaa

SEQ ID NO: 2153970 - RNA, 19 nt, Artificial Sequence
  Description of Artificial Sequence: Synthetic oligonucleotide
ggcuauacuacaaaaggcu

SEQ ID NO: 2153971 - RNA, 19 nt, Artificial Sequence
  Description of Artificial Sequence: Synthetic oligonucleotide
auguaaucucaggugagua

SEQ ID NO: 2153972 - RNA, 19 nt, Artificial Sequence
  Description of Artificial Sequence: Synthetic oligonucleotide
gcuauacuacaaaaggcuc

SEQ ID NO: 2153973 - RNA, 19 nt, Artificial Sequence
  Description of Artificial Sequence: Synthetic oligonucleotide
auacuacaaaaggcucauc

SEQ ID NO: 2153974 - RNA, 19 nt, Artificial Sequence
  Description of Artificial Sequence: Synthetic oligonucleotide
ugacauuuauauggucuuu

SEQ ID NO: 2153975 - RNA, 19 nt, Artificial Sequence
  Description of Artificial Sequence: Synthetic oligonucleotide
cucugccuacugaaggauc

SEQ ID NO: 2153976 - RNA, 19 nt, Artificial Sequence
  Description of Artificial Sequence: Synthetic oligonucleotide
cugaaggcuauacuacaaa

SEQ ID NO: 2153977 - RNA, 19 nt, Artificial Sequence
  Description of Artificial Sequence: Synthetic oligonucleotide
augugacugaagggcauug

SEQ ID NO: 2153978 - RNA, 19 nt, Artificial Sequence
  Description of Artificial Sequence: Synthetic oligonucleotide
guucuuagauguauucuua

SEQ ID NO: 2153979 - RNA, 19 nt, Artificial Sequence
  Description of Artificial Sequence: Synthetic oligonucleotide
gacaucuaaaggccuuacu

SEQ ID NO: 2153980 - RNA, 19 nt, Artificial Sequence
  Description of Artificial Sequence: Synthetic oligonucleotide
gauaaaggaauuagauauu

SEQ ID NO: 2153981 - RNA, 19 nt, Artificial Sequence
  Description of Artificial Sequence: Synthetic oligonucleotide
caagcgugugucucaagaa

SEQ ID NO: 2153982 - RNA, 19 nt, Artificial Sequence
  Description of Artificial Sequence: Synthetic oligonucleotide
cugaagggcauugagacau

SEQ ID NO: 2153983 - RNA, 19 nt, Artificial Sequence
  Description of Artificial Sequence: Synthetic oligonucleotide
cugagaguguauauaguau

SEQ ID NO: 2153984 - RNA, 19 nt, Artificial Sequence
  Description of Artificial Sequence: Synthetic oligonucleotide
cuuacaguuauagaauguu

SEQ ID NO: 2153985 - RNA, 19 nt, Artificial Sequence
  Description of Artificial Sequence: Synthetic oligonucleotide
ugacauuuauagggguuuu

SEQ ID NO: 2153986 - RNA, 19 nt, Artificial Sequence
  Description of Artificial Sequence: Synthetic oligonucleotide
ugcaaccguauggaagagu

SEQ ID NO: 2153987 - RNA, 19 nt, Artificial Sequence
  Description of Artificial Sequence: Synthetic oligonucleotide
ggaacucugccuacugaag

SEQ ID NO: 2153988 - RNA, 19 nt, Artificial Sequence
  Description of Artificial Sequence: Synthetic oligonucleotide
ugaagggcauugagacauc

SEQ ID NO: 2153989 - RNA, 19 nt, Artificial Sequence
  Description of Artificial Sequence: Synthetic oligonucleotide
cugcuuacaguuauagaau

SEQ ID NO: 2153990 - RNA, 19 nt, Artificial Sequence
  Description of Artificial Sequence: Synthetic oligonucleotide
ugaaggaaauagggauaaa

SEQ ID NO: 2153991 - RNA, 19 nt, Artificial Sequence
  Description of Artificial Sequence: Synthetic oligonucleotide
agguaagagugaugccuaa

SEQ ID NO: 2153992 - RNA, 19 nt, Artificial Sequence
  Description of Artificial Sequence: Synthetic oligonucleotide
cacagcaugaacggacuga

SEQ ID NO: 2153993 - RNA, 19 nt, Artificial Sequence
  Description of Artificial Sequence: Synthetic oligonucleotide
gagaguguauauaguauuu

SEQ ID NO: 2153994 - RNA, 19 nt, Artificial Sequence
  Description of Artificial Sequence: Synthetic oligonucleotide
cacagaguuuacauucaua

SEQ ID NO: 2153995 - RNA, 19 nt, Artificial Sequence
  Description of Artificial Sequence: Synthetic oligonucleotide
caggaguggacucaagcgu

SEQ ID NO: 2153996 - RNA, 19 nt, Artificial Sequence
  Description of Artificial Sequence: Synthetic oligonucleotide
aggccuuacuacacuguug

SEQ ID NO: 2153997 - RNA, 19 nt, Artificial Sequence
  Description of Artificial Sequence: Synthetic oligonucleotide
ccuuacuacacuguugaca

SEQ ID NO: 2153998 - RNA, 19 nt, Artificial Sequence
  Description of Artificial Sequence: Synthetic oligonucleotide
gaacaggaguggacucaag

SEQ ID NO: 2153999 - RNA, 19 nt, Artificial Sequence
  Description of Artificial Sequence: Synthetic oligonucleotide
cugacguguaaaggcuuug

SEQ ID NO: 2154000 - RNA, 19 nt, Artificial Sequence
  Description of Artificial Sequence: Synthetic oligonucleotide
caugcauuugaaggaaaua

SEQ ID NO: 2154001 - RNA, 19 nt, Artificial Sequence
  Description of Artificial Sequence: Synthetic oligonucleotide
gaguggacucaagcgugug

SEQ ID NO: 2154002 - RNA, 19 nt, Artificial Sequence
  Description of Artificial Sequence: Synthetic oligonucleotide
augcagaaguuuagugcug

SEQ ID NO: 2154003 - RNA, 19 nt, Artificial Sequence
  Description of Artificial Sequence: Synthetic oligonucleotide
ggucuuucucaauauugua

SEQ ID NO: 2154004 - RNA, 19 nt, Artificial Sequence
  Description of Artificial Sequence: Synthetic oligonucleotide
gagacaucuaaaggccuua

SEQ ID NO: 2154005 - RNA, 19 nt, Artificial Sequence
  Description of Artificial Sequence: Synthetic oligonucleotide
acucugccuacugaaggau

SEQ ID NO: 2154006 - RNA, 19 nt, Artificial Sequence
  Description of Artificial Sequence: Synthetic oligonucleotide
cagcaugaacggacugaug

SEQ ID NO: 2154007 - RNA, 19 nt, Artificial Sequence
  Description of Artificial Sequence: Synthetic oligonucleotide
cacacuguacgcacugaua

SEQ ID NO: 2154008 - RNA, 19 nt, Artificial Sequence
  Description of Artificial Sequence: Synthetic oligonucleotide
agguuuucuccaguaugaa

SEQ ID NO: 2154009 - RNA, 19 nt, Artificial Sequence
  Description of Artificial Sequence: Synthetic oligonucleotide
caaccguauggaagaguga

SEQ ID NO: 2154010 - RNA, 19 nt, Artificial Sequence
  Description of Artificial Sequence: Synthetic oligonucleotide
cucaagcgugugucucaag

SEQ ID NO: 2154011 - RNA, 19 nt, Artificial Sequence
  Description of Artificial Sequence: Synthetic oligonucleotide
caucacuauuuugaguucu

SEQ ID NO: 2154012 - RNA, 19 nt, Artificial Sequence
  Description of Artificial Sequence: Synthetic oligonucleotide
augcaaccguauggaagag

SEQ ID NO: 2154013 - RNA, 19 nt, Artificial Sequence
  Description of Artificial Sequence: Synthetic oligonucleotide
uuacuacacuguugacauu

SEQ ID NO: 2154014 - RNA, 19 nt, Artificial Sequence
  Description of Artificial Sequence: Synthetic oligonucleotide
ggugaguaagucugcuaaa

SEQ ID NO: 2154015 - RNA, 19 nt, Artificial Sequence
  Description of Artificial Sequence: Synthetic oligonucleotide
aagggcauugagacaucua

SEQ ID NO: 2154016 - RNA, 19 nt, Artificial Sequence
  Description of Artificial Sequence: Synthetic oligonucleotide
cauuaagguuuucuccagu

SEQ ID NO: 2154017 - RNA, 19 nt, Artificial Sequence
  Description of Artificial Sequence: Synthetic oligonucleotide
aucacuauuuugaguucuu

SEQ ID NO: 2154018 - RNA, 19 nt, Artificial Sequence
  Description of Artificial Sequence: Synthetic oligonucleotide
gaagggcauugagacaucu

SEQ ID NO: 2154019 - RNA, 19 nt, Artificial Sequence
  Description of Artificial Sequence: Synthetic oligonucleotide
guugacauuuauagggguu

SEQ ID NO: 2154020 - RNA, 19 nt, Artificial Sequence
  Description of Artificial Sequence: Synthetic oligonucleotide
acucaagcgugugucucaa

SEQ ID NO: 2154021 - RNA, 19 nt, Artificial Sequence
  Description of Artificial Sequence: Synthetic oligonucleotide
aggacuuaccacacugcuu

SEQ ID NO: 2154022 - RNA, 19 nt, Artificial Sequence
  Description of Artificial Sequence: Synthetic oligonucleotide
cauguaaucucaggugagu

SEQ ID NO: 2154023 - RNA, 19 nt, Artificial Sequence
  Description of Artificial Sequence: Synthetic oligonucleotide
auguuucuccaugcauuau

SEQ ID NO: 2154024 - RNA, 19 nt, Artificial Sequence
  Description of Artificial Sequence: Synthetic oligonucleotide
uaaaacccugaaggcuaua

SEQ ID NO: 2154025 - RNA, 19 nt, Artificial Sequence
  Description of Artificial Sequence: Synthetic oligonucleotide
gagugauaucuaaaugcuu

SEQ ID NO: 2154026 - RNA, 19 nt, Artificial Sequence
  Description of Artificial Sequence: Synthetic oligonucleotide
cacaguguuuacauucauu

SEQ ID NO: 2154027 - RNA, 19 nt, Artificial Sequence
  Description of Artificial Sequence: Synthetic oligonucleotide
ggacucaagcgugugucuc

SEQ ID NO: 2154028 - RNA, 19 nt, Artificial Sequence
  Description of Artificial Sequence: Synthetic oligonucleotide
caggugaguaagucugcua

SEQ ID NO: 2154029 - RNA, 19 nt, Artificial Sequence
  Description of Artificial Sequence: Synthetic oligonucleotide
gugaugccuaaaagcuuuc

SEQ ID NO: 2154030 - RNA, 19 nt, Artificial Sequence
  Description of Artificial Sequence: Synthetic oligonucleotide
cugguguaaguucuuucau

SEQ ID NO: 2154031 - RNA, 19 nt, Artificial Sequence
  Description of Artificial Sequence: Synthetic oligonucleotide
ccugaaggcuauacuacaa

SEQ ID NO: 2154032 - RNA, 19 nt, Artificial Sequence
  Description of Artificial Sequence: Synthetic oligonucleotide
acuacacuguugacauuua

SEQ ID NO: 2154033 - RNA, 19 nt, Artificial Sequence
  Description of Artificial Sequence: Synthetic oligonucleotide
gagugaugccuaaaagcuu

SEQ ID NO: 2154034 - RNA, 19 nt, Artificial Sequence
  Description of Artificial Sequence: Synthetic oligonucleotide
gcucaucacuauuuugagu

SEQ ID NO: 2154035 - RNA, 19 nt, Artificial Sequence
  Description of Artificial Sequence: Synthetic oligonucleotide
accguauggaagagugaua

SEQ ID NO: 2154036 - RNA, 19 nt, Artificial Sequence
  Description of Artificial Sequence: Synthetic oligonucleotide
cuacacuguugacauuuau

SEQ ID NO: 2154037 - RNA, 19 nt, Artificial Sequence
  Description of Artificial Sequence: Synthetic oligonucleotide
agugcugguguaaguucuu

SEQ ID NO: 2154038 - RNA, 19 nt, Artificial Sequence
  Description of Artificial Sequence: Synthetic oligonucleotide
gcgugugucucaagaacuc

SEQ ID NO: 2154039 - RNA, 19 nt, Artificial Sequence
  Description of Artificial Sequence: Synthetic oligonucleotide
caguucacaugcagaaguu

SEQ ID NO: 2154040 - RNA, 19 nt, Artificial Sequence
  Description of Artificial Sequence: Synthetic oligonucleotide
gccuuacuacacuguugac

SEQ ID NO: 2154041 - RNA, 19 nt, Artificial Sequence
  Description of Artificial Sequence: Synthetic oligonucleotide
gugucucaagaacucuguu

SEQ ID NO: 2154042 - RNA, 19 nt, Artificial Sequence
  Description of Artificial Sequence: Synthetic oligonucleotide
gaacucuguuugaauccau

SEQ ID NO: 2154043 - RNA, 19 nt, Artificial Sequence
  Description of Artificial Sequence: Synthetic oligonucleotide
ccacagcaugaacggacug

SEQ ID NO: 2154044 - RNA, 19 nt, Artificial Sequence
  Description of Artificial Sequence: Synthetic oligonucleotide
cucugacguguaaaggcuu

SEQ ID NO: 2154045 - RNA, 19 nt, Artificial Sequence
  Description of Artificial Sequence: Synthetic oligonucleotide
ccguauggaagagugauau

SEQ ID NO: 2154046 - RNA, 19 nt, Artificial Sequence
  Description of Artificial Sequence: Synthetic oligonucleotide
caugugacugaagggcauu

SEQ ID NO: 2154047 - RNA, 19 nt, Artificial Sequence
  Description of Artificial Sequence: Synthetic oligonucleotide
ccacacuguacgcacugau

SEQ ID NO: 2154048 - RNA, 19 nt, Artificial Sequence
  Description of Artificial Sequence: Synthetic oligonucleotide
cgugugucucaagaacucu

SEQ ID NO: 2154049 - RNA, 19 nt, Artificial Sequence
  Description of Artificial Sequence: Synthetic oligonucleotide
aaaguuaacgcuugcauuc

SEQ ID NO: 2154050 - RNA, 19 nt, Artificial Sequence
  Description of Artificial Sequence: Synthetic oligonucleotide
uuuauuagagaucuaacgc

SEQ ID NO: 2154051 - RNA, 19 nt, Artificial Sequence
  Description of Artificial Sequence: Synthetic oligonucleotide
gaugcuaccauucugaaug

SEQ ID NO: 2154052 - RNA, 19 nt, Artificial Sequence
  Description of Artificial Sequence: Synthetic oligonucleotide
uuuauuuaguccaaaauac

SEQ ID NO: 2154053 - RNA, 19 nt, Artificial Sequence
  Description of Artificial Sequence: Synthetic oligonucleotide
aaguuuauagcauucuauc

SEQ ID NO: 2154054 - RNA, 19 nt, Artificial Sequence
  Description of Artificial Sequence: Synthetic oligonucleotide
uucuuuagaacucuagagg

SEQ ID NO: 2154055 - RNA, 19 nt, Artificial Sequence
  Description of Artificial Sequence: Synthetic oligonucleotide
uauacagacuuuauuagag

SEQ ID NO: 2154056 - RNA, 19 nt, Artificial Sequence
  Description of Artificial Sequence: Synthetic oligonucleotide
aguuuauagcauucuaucc

SEQ ID NO: 2154057 - RNA, 19 nt, Artificial Sequence
  Description of Artificial Sequence: Synthetic oligonucleotide
ucuuuagaacucuagaggc

SEQ ID NO: 2154058 - RNA, 19 nt, Artificial Sequence
  Description of Artificial Sequence: Synthetic oligonucleotide
uugaacuggauauagaaac

SEQ ID NO: 2154059 - RNA, 19 nt, Artificial Sequence
  Description of Artificial Sequence: Synthetic oligonucleotide
uucagauugccuuuugucg

SEQ ID NO: 2154060 - RNA, 19 nt, Artificial Sequence
  Description of Artificial Sequence: Synthetic oligonucleotide
aacgcuugcauucuguuug

SEQ ID NO: 2154061 - RNA, 19 nt, Artificial Sequence
  Description of Artificial Sequence: Synthetic oligonucleotide
cauaauggaauucauaguc

SEQ ID NO: 2154062 - RNA, 19 nt, Artificial Sequence
  Description of Artificial Sequence: Synthetic oligonucleotide
uuauuagagaucuaacgca

SEQ ID NO: 2154063 - RNA, 19 nt, Artificial Sequence
  Description of Artificial Sequence: Synthetic oligonucleotide
uucauauugaacuggauau

SEQ ID NO: 2154064 - RNA, 19 nt, Artificial Sequence
  Description of Artificial Sequence: Synthetic oligonucleotide
uacagcacuaauaaauaag

SEQ ID NO: 2154065 - RNA, 19 nt, Artificial Sequence
  Description of Artificial Sequence: Synthetic oligonucleotide
auagccaacccguuggacc

SEQ ID NO: 2154066 - RNA, 19 nt, Artificial Sequence
  Description of Artificial Sequence: Synthetic oligonucleotide
aacuaaguuaaugccagac

SEQ ID NO: 2154067 - RNA, 19 nt, Artificial Sequence
  Description of Artificial Sequence: Synthetic oligonucleotide
uauugaacuggauauagaa

SEQ ID NO: 2154068 - RNA, 19 nt, Artificial Sequence
  Description of Artificial Sequence: Synthetic oligonucleotide
gauauagaaacuaaguuaa

SEQ ID NO: 2154069 - RNA, 19 nt, Artificial Sequence
  Description of Artificial Sequence: Synthetic oligonucleotide
aucaacaccagauucauau

SEQ ID NO: 2154070 - RNA, 19 nt, Artificial Sequence
  Description of Artificial Sequence: Synthetic oligonucleotide
acauguguuacaauagugc

SEQ ID NO: 2154071 - RNA, 19 nt, Artificial Sequence
  Description of Artificial Sequence: Synthetic oligonucleotide
aguacaaaagaaugucuuc

SEQ ID NO: 2154072 - RNA, 19 nt, Artificial Sequence
  Description of Artificial Sequence: Synthetic oligonucleotide
agagaucuaacgcaucacg

SEQ ID NO: 2154073 - RNA, 19 nt, Artificial Sequence
  Description of Artificial Sequence: Synthetic oligonucleotide
uaauggaauucauaguccc

SEQ ID NO: 2154074 - RNA, 19 nt, Artificial Sequence
  Description of Artificial Sequence: Synthetic oligonucleotide
aagguagguaagaaggggc

SEQ ID NO: 2154075 - RNA, 19 nt, Artificial Sequence
  Description of Artificial Sequence: Synthetic oligonucleotide
uaaguuaaugccagacuag

SEQ ID NO: 2154076 - RNA, 19 nt, Artificial Sequence
  Description of Artificial Sequence: Synthetic oligonucleotide
aaguuaaugccagacuagg

SEQ ID NO: 2154077 - RNA, 19 nt, Artificial Sequence
  Description of Artificial Sequence: Synthetic oligonucleotide
uguguuacaauagugcugu

SEQ ID NO: 2154078 - RNA, 19 nt, Artificial Sequence
  Description of Artificial Sequence: Synthetic oligonucleotide
uuuauagcauucuauccac

SEQ ID NO: 2154079 - RNA, 19 nt, Artificial Sequence
  Description of Artificial Sequence: Synthetic oligonucleotide
cagaagaccaaaguuaacg

SEQ ID NO: 2154080 - RNA, 19 nt, Artificial Sequence
  Description of Artificial Sequence: Synthetic oligonucleotide
auaauggaauucauagucc

SEQ ID NO: 2154081 - RNA, 19 nt, Artificial Sequence
  Description of Artificial Sequence: Synthetic oligonucleotide
auugccgugaauauuacag

SEQ ID NO: 2154082 - RNA, 19 nt, Artificial Sequence
  Description of Artificial Sequence: Synthetic oligonucleotide
cuugucagcccacugacgg

SEQ ID NO: 2154083 - RNA, 19 nt, Artificial Sequence
  Description of Artificial Sequence: Synthetic oligonucleotide
agcacuaauaaauaaguuu

SEQ ID NO: 2154084 - RNA, 19 nt, Artificial Sequence
  Description of Artificial Sequence: Synthetic oligonucleotide
gaucuaacgcaucacggag

SEQ ID NO: 2154085 - RNA, 19 nt, Artificial Sequence
  Description of Artificial Sequence: Synthetic oligonucleotide
aagcgggugaagcggaagc

SEQ ID NO: 2154086 - RNA, 19 nt, Artificial Sequence
  Description of Artificial Sequence: Synthetic oligonucleotide
guuaaugccagacuaggac

SEQ ID NO: 2154087 - RNA, 19 nt, Artificial Sequence
  Description of Artificial Sequence: Synthetic oligonucleotide
cuugugacuaucuucuuug

SEQ ID NO: 2154088 - RNA, 19 nt, Artificial Sequence
  Description of Artificial Sequence: Synthetic oligonucleotide
uacaauagugcuguuuggg

SEQ ID NO: 2154089 - RNA, 19 nt, Artificial Sequence
  Description of Artificial Sequence: Synthetic oligonucleotide
ugaaugcucuuccacauac

SEQ ID NO: 2154090 - RNA, 19 nt, Artificial Sequence
  Description of Artificial Sequence: Synthetic oligonucleotide
aggaggagaagguuuuacc

SEQ ID NO: 2154091 - RNA, 19 nt, Artificial Sequence
  Description of Artificial Sequence: Synthetic oligonucleotide
guuuauagcauucuaucca

SEQ ID NO: 2154092 - RNA, 19 nt, Artificial Sequence
  Description of Artificial Sequence: Synthetic oligonucleotide
uuaaugccagacuaggacu

SEQ ID NO: 2154093 - RNA, 19 nt, Artificial Sequence
  Description of Artificial Sequence: Synthetic oligonucleotide
uuuagaacucuagaggcug

SEQ ID NO: 2154094 - RNA, 19 nt, Artificial Sequence
  Description of Artificial Sequence: Synthetic oligonucleotide
uuacagcaaguuuauagca

SEQ ID NO: 2154095 - RNA, 19 nt, Artificial Sequence
  Description of Artificial Sequence: Synthetic oligonucleotide
cugaaugacagagaucucg

SEQ ID NO: 2154096 - RNA, 19 nt, Artificial Sequence
  Description of Artificial Sequence: Synthetic oligonucleotide
ucuaacgcaucacggaggc

SEQ ID NO: 2154097 - RNA, 19 nt, Artificial Sequence
  Description of Artificial Sequence: Synthetic oligonucleotide
uccacgaagccgaagcggg

SEQ ID NO: 2154098 - RNA, 19 nt, Artificial Sequence
  Description of Artificial Sequence: Synthetic oligonucleotide
cuagaauugccauggggcc

SEQ ID NO: 2154099 - RNA, 19 nt, Artificial Sequence
  Description of Artificial Sequence: Synthetic oligonucleotide
auauacagacuuuauuaga

SEQ ID NO: 2154100 - RNA, 19 nt, Artificial Sequence
  Description of Artificial Sequence: Synthetic oligonucleotide
cauauugaacuggauauag

SEQ ID NO: 2154101 - RNA, 19 nt, Artificial Sequence
  Description of Artificial Sequence: Synthetic oligonucleotide
uuagcuugugacuaucuuc

SEQ ID NO: 2154102 - RNA, 19 nt, Artificial Sequence
  Description of Artificial Sequence: Synthetic oligonucleotide
aaacuggacggauccccgc

SEQ ID NO: 2154103 - RNA, 19 nt, Artificial Sequence
  Description of Artificial Sequence: Synthetic oligonucleotide
uaaugccagacuaggacug

SEQ ID NO: 2154104 - RNA, 19 nt, Artificial Sequence
  Description of Artificial Sequence: Synthetic oligonucleotide
ugcaaagcaagguuacagc

SEQ ID NO: 2154105 - RNA, 19 nt, Artificial Sequence
  Description of Artificial Sequence: Synthetic oligonucleotide
uuacaauagugcuguuugg

SEQ ID NO: 2154106 - RNA, 19 nt, Artificial Sequence
  Description of Artificial Sequence: Synthetic oligonucleotide
ucagauugccuuuugucgu

SEQ ID NO: 2154107 - RNA, 19 nt, Artificial Sequence
  Description of Artificial Sequence: Synthetic oligonucleotide
gagaucuaacgcaucacgg

SEQ ID NO: 2154108 - RNA, 19 nt, Artificial Sequence
  Description of Artificial Sequence: Synthetic oligonucleotide
ucauaauggaauucauagu

SEQ ID NO: 2154109 - RNA, 19 nt, Artificial Sequence
  Description of Artificial Sequence: Synthetic oligonucleotide
ugaacuggauauagaaacu

SEQ ID NO: 2154110 - RNA, 19 nt, Artificial Sequence
  Description of Artificial Sequence: Synthetic oligonucleotide
acuaggacugccuggcacg

SEQ ID NO: 2154111 - RNA, 19 nt, Artificial Sequence
  Description of Artificial Sequence: Synthetic oligonucleotide
gaacucuagaggcugaaca

SEQ ID NO: 2154112 - RNA, 19 nt, Artificial Sequence
  Description of Artificial Sequence: Synthetic oligonucleotide
acagagaucucguuggccu

SEQ ID NO: 2154113 - RNA, 19 nt, Artificial Sequence
  Description of Artificial Sequence: Synthetic oligonucleotide
ugaaugacagagaucucgu

SEQ ID NO: 2154114 - RNA, 19 nt, Artificial Sequence
  Description of Artificial Sequence: Synthetic oligonucleotide
acuuuauuagagaucuaac

SEQ ID NO: 2154115 - RNA, 19 nt, Artificial Sequence
  Description of Artificial Sequence: Synthetic oligonucleotide
caauagugcuguuugggag

SEQ ID NO: 2154116 - RNA, 19 nt, Artificial Sequence
  Description of Artificial Sequence: Synthetic oligonucleotide
uagccaacccguuggaccg

SEQ ID NO: 2154117 - RNA, 19 nt, Artificial Sequence
  Description of Artificial Sequence: Synthetic oligonucleotide
acggcaacuugccauugcc

SEQ ID NO: 2154118 - RNA, 19 nt, Artificial Sequence
  Description of Artificial Sequence: Synthetic oligonucleotide
acuaaguuaaugccagacu

SEQ ID NO: 2154119 - RNA, 19 nt, Artificial Sequence
  Description of Artificial Sequence: Synthetic oligonucleotide
aacucuagaggcugaacaa

SEQ ID NO: 2154120 - RNA, 19 nt, Artificial Sequence
  Description of Artificial Sequence: Synthetic oligonucleotide
ugggacauuucuaggaacu

SEQ ID NO: 2154121 - RNA, 19 nt, Artificial Sequence
  Description of Artificial Sequence: Synthetic oligonucleotide
uuuaccaguucuacaugug

SEQ ID NO: 2154122 - RNA, 19 nt, Artificial Sequence
  Description of Artificial Sequence: Synthetic oligonucleotide
ccuagaauugccauggggc

SEQ ID NO: 2154123 - RNA, 19 nt, Artificial Sequence
  Description of Artificial Sequence: Synthetic oligonucleotide
uuaccaguucuacaugugu

SEQ ID NO: 2154124 - RNA, 19 nt, Artificial Sequence
  Description of Artificial Sequence: Synthetic oligonucleotide
uaccaguucuacaugugug

SEQ ID NO: 2154125 - RNA, 19 nt, Artificial Sequence
  Description of Artificial Sequence: Synthetic oligonucleotide
agaaacuaaguuaaugcca

SEQ ID NO: 2154126 - RNA, 19 nt, Artificial Sequence
  Description of Artificial Sequence: Synthetic oligonucleotide
agaauuggagggaugcuac

SEQ ID NO: 2154127 - RNA, 19 nt, Artificial Sequence
  Description of Artificial Sequence: Synthetic oligonucleotide
ugccgugaauauuacagca

SEQ ID NO: 2154128 - RNA, 19 nt, Artificial Sequence
  Description of Artificial Sequence: Synthetic oligonucleotide
aagccgaagcgggugaagc

SEQ ID NO: 2154129 - RNA, 19 nt, Artificial Sequence
  Description of Artificial Sequence: Synthetic oligonucleotide
aacuugacaggauugccua

SEQ ID NO: 2154130 - RNA, 19 nt, Artificial Sequence
  Description of Artificial Sequence: Synthetic oligonucleotide
uaccacauguguuacaaua

SEQ ID NO: 2154131 - RNA, 19 nt, Artificial Sequence
  Description of Artificial Sequence: Synthetic oligonucleotide
cucguuggccuucauagcc

SEQ ID NO: 2154132 - RNA, 19 nt, Artificial Sequence
  Description of Artificial Sequence: Synthetic oligonucleotide
agaucuaacgcaucacgga

SEQ ID NO: 2154133 - RNA, 19 nt, Artificial Sequence
  Description of Artificial Sequence: Synthetic oligonucleotide
uugucgugaaugcucuucc

SEQ ID NO: 2154134 - RNA, 19 nt, Artificial Sequence
  Description of Artificial Sequence: Synthetic oligonucleotide
cuucagauugccuuuuguc

SEQ ID NO: 2154135 - RNA, 19 nt, Artificial Sequence
  Description of Artificial Sequence: Synthetic oligonucleotide
auugccuagaauugccaug

SEQ ID NO: 2154136 - RNA, 19 nt, Artificial Sequence
  Description of Artificial Sequence: Synthetic oligonucleotide
uauagcauucuauccacua

SEQ ID NO: 2154137 - RNA, 19 nt, Artificial Sequence
  Description of Artificial Sequence: Synthetic oligonucleotide
aagcugguucuguucucgc

SEQ ID NO: 2154138 - RNA, 19 nt, Artificial Sequence
  Description of Artificial Sequence: Synthetic oligonucleotide
aaugccagacuaggacugc

SEQ ID NO: 2154139 - RNA, 19 nt, Artificial Sequence
  Description of Artificial Sequence: Synthetic oligonucleotide
uuugggaguucuucggggc

SEQ ID NO: 2154140 - RNA, 19 nt, Artificial Sequence
  Description of Artificial Sequence: Synthetic oligonucleotide
ucuguuugcaaagcaaggu

SEQ ID NO: 2154141 - RNA, 19 nt, Artificial Sequence
  Description of Artificial Sequence: Synthetic oligonucleotide
auucuguuugcaaagcaag

SEQ ID NO: 2154142 - RNA, 19 nt, Artificial Sequence
  Description of Artificial Sequence: Synthetic oligonucleotide
acagcacuaauaaauaagu

SEQ ID NO: 2154143 - RNA, 19 nt, Artificial Sequence
  Description of Artificial Sequence: Synthetic oligonucleotide
aaaacuggacggauccccg

SEQ ID NO: 2154144 - RNA, 19 nt, Artificial Sequence
  Description of Artificial Sequence: Synthetic oligonucleotide
agugcaagcaaaggguuuc

SEQ ID NO: 2154145 - RNA, 19 nt, Artificial Sequence
  Description of Artificial Sequence: Synthetic oligonucleotide
cucuagaggcugaacaaag

SEQ ID NO: 2154146 - RNA, 19 nt, Artificial Sequence
  Description of Artificial Sequence: Synthetic oligonucleotide
uauccacuaguauuuauuu

SEQ ID NO: 2154147 - RNA, 19 nt, Artificial Sequence
  Description of Artificial Sequence: Synthetic oligonucleotide
aggcauuacaucaacacca

SEQ ID NO: 2154148 - RNA, 19 nt, Artificial Sequence
  Description of Artificial Sequence: Synthetic oligonucleotide
cuaaguuaaugccagacua

SEQ ID NO: 2154149 - RNA, 19 nt, Artificial Sequence
  Description of Artificial Sequence: Synthetic oligonucleotide
acuggauauagaaacuaag

SEQ ID NO: 2154150 - RNA, 19 nt, Artificial Sequence
  Description of Artificial Sequence: Synthetic oligonucleotide
cauacagugcaagcaaagg

SEQ ID NO: 2154151 - RNA, 19 nt, Artificial Sequence
  Description of Artificial Sequence: Synthetic oligonucleotide
aauuggagggaugcuacca

SEQ ID NO: 2154152 - RNA, 19 nt, Artificial Sequence
  Description of Artificial Sequence: Synthetic oligonucleotide
guccaaaauacagaagacc

SEQ ID NO: 2154153 - RNA, 19 nt, Artificial Sequence
  Description of Artificial Sequence: Synthetic oligonucleotide
guucuguucucgcuucucg

SEQ ID NO: 2154154 - RNA, 19 nt, Artificial Sequence
  Description of Artificial Sequence: Synthetic oligonucleotide
ucgugaaugcucuuccaca

SEQ ID NO: 2154155 - RNA, 19 nt, Artificial Sequence
  Description of Artificial Sequence: Synthetic oligonucleotide
aggauugccuagaauugcc

SEQ ID NO: 2154156 - RNA, 19 nt, Artificial Sequence
  Description of Artificial Sequence: Synthetic oligonucleotide
ucuagaggcugaacaaagu

SEQ ID NO: 2154157 - RNA, 19 nt, Artificial Sequence
  Description of Artificial Sequence: Synthetic oligonucleotide
guacaaaagaaugucuuca

SEQ ID NO: 2154158 - RNA, 19 nt, Artificial Sequence
  Description of Artificial Sequence: Synthetic oligonucleotide
aaguuuucuuuagaacucu

SEQ ID NO: 2154159 - RNA, 19 nt, Artificial Sequence
  Description of Artificial Sequence: Synthetic oligonucleotide
cucgccauuuucuccaggc

SEQ ID NO: 2154160 - RNA, 19 nt, Artificial Sequence
  Description of Artificial Sequence: Synthetic oligonucleotide
ucuucauaauggaauucau

SEQ ID NO: 2154161 - RNA, 19 nt, Artificial Sequence
  Description of Artificial Sequence: Synthetic oligonucleotide
ugaagcggaagcugguucu

SEQ ID NO: 2154162 - RNA, 19 nt, Artificial Sequence
  Description of Artificial Sequence: Synthetic oligonucleotide
cuguuugggaguucuucgg

SEQ ID NO: 2154163 - RNA, 19 nt, Artificial Sequence
  Description of Artificial Sequence: Synthetic oligonucleotide
uugccgugaauauuacagc

SEQ ID NO: 2154164 - RNA, 19 nt, Artificial Sequence
  Description of Artificial Sequence: Synthetic oligonucleotide
uucuaggaacuugacagga

SEQ ID NO: 2154165 - RNA, 19 nt, Artificial Sequence
  Description of Artificial Sequence: Synthetic oligonucleotide
uuuagcuugugacuaucuu

SEQ ID NO: 2154166 - RNA, 19 nt, Artificial Sequence
  Description of Artificial Sequence: Synthetic oligonucleotide
aauugccauggggccaucc

SEQ ID NO: 2154167 - RNA, 19 nt, Artificial Sequence
  Description of Artificial Sequence: Synthetic oligonucleotide
cacuaguauuuauuuaguc

SEQ ID NO: 2154168 - RNA, 19 nt, Artificial Sequence
  Description of Artificial Sequence: Synthetic oligonucleotide
uaagaaggggcagaggcaa

SEQ ID NO: 2154169 - RNA, 19 nt, Artificial Sequence
  Description of Artificial Sequence: Synthetic oligonucleotide
uaacgcaucacggaggcau

SEQ ID NO: 2154170 - RNA, 19 nt, Artificial Sequence
  Description of Artificial Sequence: Synthetic oligonucleotide
acccguuggaccgugcugc

SEQ ID NO: 2154171 - RNA, 19 nt, Artificial Sequence
  Description of Artificial Sequence: Synthetic oligonucleotide
uuccacauacagugcaagc

SEQ ID NO: 2154172 - RNA, 19 nt, Artificial Sequence
  Description of Artificial Sequence: Synthetic oligonucleotide
aaacuaaguuaaugccaga

SEQ ID NO: 2154173 - RNA, 19 nt, Artificial Sequence
  Description of Artificial Sequence: Synthetic oligonucleotide
auccacagggagccgacgg

SEQ ID NO: 2154174 - RNA, 19 nt, Artificial Sequence
  Description of Artificial Sequence: Synthetic oligonucleotide
uuuccacauucccuuguca

SEQ ID NO: 2154175 - RNA, 19 nt, Artificial Sequence
  Description of Artificial Sequence: Synthetic oligonucleotide
acggaggcauuacaucaac

SEQ ID NO: 2154176 - RNA, 19 nt, Artificial Sequence
  Description of Artificial Sequence: Synthetic oligonucleotide
agaggcaaccgucgggcgg

SEQ ID NO: 2154177 - RNA, 19 nt, Artificial Sequence
  Description of Artificial Sequence: Synthetic oligonucleotide
uuccugaccuugcugccag

SEQ ID NO: 2154178 - RNA, 19 nt, Artificial Sequence
  Description of Artificial Sequence: Synthetic oligonucleotide
caguucuacaugugugucc

SEQ ID NO: 2154179 - RNA, 19 nt, Artificial Sequence
  Description of Artificial Sequence: Synthetic oligonucleotide
acagcaaguuuauagcauu

SEQ ID NO: 2154180 - RNA, 19 nt, Artificial Sequence
  Description of Artificial Sequence: Synthetic oligonucleotide
gcuguuugggaguucuucg

SEQ ID NO: 2154181 - RNA, 19 nt, Artificial Sequence
  Description of Artificial Sequence: Synthetic oligonucleotide
gaauuggagggaugcuacc

SEQ ID NO: 2154182 - RNA, 19 nt, Artificial Sequence
  Description of Artificial Sequence: Synthetic oligonucleotide
aacuggacggauccccgcu

SEQ ID NO: 2154183 - RNA, 19 nt, Artificial Sequence
  Description of Artificial Sequence: Synthetic oligonucleotide
uuugucgugaaugcucuuc

SEQ ID NO: 2154184 - RNA, 19 nt, Artificial Sequence
  Description of Artificial Sequence: Synthetic oligonucleotide
uccaagaauuggagggaug

SEQ ID NO: 2154185 - RNA, 19 nt, Artificial Sequence
  Description of Artificial Sequence: Synthetic oligonucleotide
caccagauucauauugaac

SEQ ID NO: 2154186 - RNA, 19 nt, Artificial Sequence
  Description of Artificial Sequence: Synthetic oligonucleotide
acgcuugcauucuguuugc

SEQ ID NO: 2154187 - RNA, 19 nt, Artificial Sequence
  Description of Artificial Sequence: Synthetic oligonucleotide
gagggaugcuaccauucug

SEQ ID NO: 2154188 - RNA, 19 nt, Artificial Sequence
  Description of Artificial Sequence: Synthetic oligonucleotide
acaggauugccuagaauug

SEQ ID NO: 2154189 - RNA, 19 nt, Artificial Sequence
  Description of Artificial Sequence: Synthetic oligonucleotide
gacuaggacugccuggcac

SEQ ID NO: 2154190 - RNA, 19 nt, Artificial Sequence
  Description of Artificial Sequence: Synthetic oligonucleotide
caagguuacagcacuaaua

SEQ ID NO: 2154191 - RNA, 19 nt, Artificial Sequence
  Description of Artificial Sequence: Synthetic oligonucleotide
agauucauauugaacugga

SEQ ID NO: 2154192 - RNA, 19 nt, Artificial Sequence
  Description of Artificial Sequence: Synthetic oligonucleotide
aaguuaacgcuugcauucu

SEQ ID NO: 2154193 - RNA, 19 nt, Artificial Sequence
  Description of Artificial Sequence: Synthetic oligonucleotide
acauacagugcaagcaaag

SEQ ID NO: 2154194 - RNA, 19 nt, Artificial Sequence
  Description of Artificial Sequence: Synthetic oligonucleotide
ugcauucuguuugcaaagc

SEQ ID NO: 2154195 - RNA, 19 nt, Artificial Sequence
  Description of Artificial Sequence: Synthetic oligonucleotide
ugacagagaucucguuggc

SEQ ID NO: 2154196 - RNA, 19 nt, Artificial Sequence
  Description of Artificial Sequence: Synthetic oligonucleotide
uugucagcccacugacggg

SEQ ID NO: 2154197 - RNA, 19 nt, Artificial Sequence
  Description of Artificial Sequence: Synthetic oligonucleotide
aacccguuggaccgugcug

SEQ ID NO: 2154198 - RNA, 19 nt, Artificial Sequence
  Description of Artificial Sequence: Synthetic oligonucleotide
aucuaacgcaucacggagg

SEQ ID NO: 2154199 - RNA, 19 nt, Artificial Sequence
  Description of Artificial Sequence: Synthetic oligonucleotide
cagacuaggacugccuggc

SEQ ID NO: 2154200 - RNA, 19 nt, Artificial Sequence
  Description of Artificial Sequence: Synthetic oligonucleotide
cauucuguuugcaaagcaa

SEQ ID NO: 2154201 - RNA, 19 nt, Artificial Sequence
  Description of Artificial Sequence: Synthetic oligonucleotide
uuugcaaagcaagguuaca

SEQ ID NO: 2154202 - RNA, 19 nt, Artificial Sequence
  Description of Artificial Sequence: Synthetic oligonucleotide
ugccauggggccauccaca

SEQ ID NO: 2154203 - RNA, 19 nt, Artificial Sequence
  Description of Artificial Sequence: Synthetic oligonucleotide
ggagccgacggccaaggcg

SEQ ID NO: 2154204 - RNA, 19 nt, Artificial Sequence
  Description of Artificial Sequence: Synthetic oligonucleotide
agugcuguuugggaguucu

SEQ ID NO: 2154205 - RNA, 19 nt, Artificial Sequence
  Description of Artificial Sequence: Synthetic oligonucleotide
gucgugaaugcucuuccac

SEQ ID NO: 2154206 - RNA, 19 nt, Artificial Sequence
  Description of Artificial Sequence: Synthetic oligonucleotide
ucauauugaacuggauaua

SEQ ID NO: 2154207 - RNA, 19 nt, Artificial Sequence
  Description of Artificial Sequence: Synthetic oligonucleotide
uugacaggauugccuagaa

SEQ ID NO: 2154208 - RNA, 19 nt, Artificial Sequence
  Description of Artificial Sequence: Synthetic oligonucleotide
auuggagggaugcuaccau

SEQ ID NO: 2154209 - RNA, 19 nt, Artificial Sequence
  Description of Artificial Sequence: Synthetic oligonucleotide
aguuaacgcuugcauucug

SEQ ID NO: 2154210 - RNA, 19 nt, Artificial Sequence
  Description of Artificial Sequence: Synthetic oligonucleotide
ggcuuccaagaauuggagg

SEQ ID NO: 2154211 - RNA, 19 nt, Artificial Sequence
  Description of Artificial Sequence: Synthetic oligonucleotide
caggauugccuagaauugc

SEQ ID NO: 2154212 - RNA, 19 nt, Artificial Sequence
  Description of Artificial Sequence: Synthetic oligonucleotide
cuucauaauggaauucaua

SEQ ID NO: 2154213 - RNA, 19 nt, Artificial Sequence
  Description of Artificial Sequence: Synthetic oligonucleotide
ugacgggugagcugcuccc

SEQ ID NO: 2154214 - RNA, 19 nt, Artificial Sequence
  Description of Artificial Sequence: Synthetic oligonucleotide
cugggacauuucuaggaac

SEQ ID NO: 2154215 - RNA, 19 nt, Artificial Sequence
  Description of Artificial Sequence: Synthetic oligonucleotide
agggaugcuaccauucuga

SEQ ID NO: 2154216 - RNA, 19 nt, Artificial Sequence
  Description of Artificial Sequence: Synthetic oligonucleotide
ucucgccauuuucuccagg

SEQ ID NO: 2154217 - RNA, 19 nt, Artificial Sequence
  Description of Artificial Sequence: Synthetic oligonucleotide
gaacuggauauagaaacua

SEQ ID NO: 2154218 - RNA, 19 nt, Artificial Sequence
  Description of Artificial Sequence: Synthetic oligonucleotide
ccaagaauuggagggaugc

SEQ ID NO: 2154219 - RNA, 19 nt, Artificial Sequence
  Description of Artificial Sequence: Synthetic oligonucleotide
uggaucugcagggcacucg

SEQ ID NO: 2154220 - RNA, 19 nt, Artificial Sequence
  Description of Artificial Sequence: Synthetic oligonucleotide
auguggaccuucagauugc

SEQ ID NO: 2154221 - RNA, 19 nt, Artificial Sequence
  Description of Artificial Sequence: Synthetic oligonucleotide
acagaagaccaaaguuaac

SEQ ID NO: 2154222 - RNA, 19 nt, Artificial Sequence
  Description of Artificial Sequence: Synthetic oligonucleotide
gccuagaauugccaugggg

SEQ ID NO: 2154223 - RNA, 19 nt, Artificial Sequence
  Description of Artificial Sequence: Synthetic oligonucleotide
ugucgugaaugcucuucca

SEQ ID NO: 2154224 - RNA, 19 nt, Artificial Sequence
  Description of Artificial Sequence: Synthetic oligonucleotide
ugcuguuugggaguucuuc

SEQ ID NO: 2154225 - RNA, 19 nt, Artificial Sequence
  Description of Artificial Sequence: Synthetic oligonucleotide
agaccaaaguuaacgcuug

SEQ ID NO: 2154226 - RNA, 19 nt, Artificial Sequence
  Description of Artificial Sequence: Synthetic oligonucleotide
accaaaguuaacgcuugca

SEQ ID NO: 2154227 - RNA, 19 nt, Artificial Sequence
  Description of Artificial Sequence: Synthetic oligonucleotide
agagaucucguuggccuuc

SEQ ID NO: 2154228 - RNA, 19 nt, Artificial Sequence
  Description of Artificial Sequence: Synthetic oligonucleotide
uagagaucuaacgcaucac

SEQ ID NO: 2154229 - RNA, 19 nt, Artificial Sequence
  Description of Artificial Sequence: Synthetic oligonucleotide
cagcaaguuuauagcauuc

SEQ ID NO: 2154230 - RNA, 19 nt, Artificial Sequence
  Description of Artificial Sequence: Synthetic oligonucleotide
aggacugccuggcacggca

SEQ ID NO: 2154231 - RNA, 19 nt, Artificial Sequence
  Description of Artificial Sequence: Synthetic oligonucleotide
cagauugccuuuugucgug

SEQ ID NO: 2154232 - RNA, 19 nt, Artificial Sequence
  Description of Artificial Sequence: Synthetic oligonucleotide
ugccuagaauugccauggg

SEQ ID NO: 2154233 - RNA, 19 nt, Artificial Sequence
  Description of Artificial Sequence: Synthetic oligonucleotide
ccgugaauauuacagcaag

SEQ ID NO: 2154234 - RNA, 19 nt, Artificial Sequence
  Description of Artificial Sequence: Synthetic oligonucleotide
ugucagcccacugacgggu

SEQ ID NO: 2154235 - RNA, 19 nt, Artificial Sequence
  Description of Artificial Sequence: Synthetic oligonucleotide
gaccaaaguuaacgcuugc

SEQ ID NO: 2154236 - RNA, 19 nt, Artificial Sequence
  Description of Artificial Sequence: Synthetic oligonucleotide
uugccauugccgugaauau

SEQ ID NO: 2154237 - RNA, 19 nt, Artificial Sequence
  Description of Artificial Sequence: Synthetic oligonucleotide
ggaauucauagucccagga

SEQ ID NO: 2154238 - RNA, 19 nt, Artificial Sequence
  Description of Artificial Sequence: Synthetic oligonucleotide
auccacuaguauuuauuua

SEQ ID NO: 2154239 - RNA, 19 nt, Artificial Sequence
  Description of Artificial Sequence: Synthetic oligonucleotide
uaacgcuugcauucuguuu

SEQ ID NO: 2154240 - RNA, 19 nt, Artificial Sequence
  Description of Artificial Sequence: Synthetic oligonucleotide
aguuaaugccagacuagga

SEQ ID NO: 2154241 - RNA, 19 nt, Artificial Sequence
  Description of Artificial Sequence: Synthetic oligonucleotide
ucugaaugacagagaucuc

SEQ ID NO: 2154242 - RNA, 19 nt, Artificial Sequence
  Description of Artificial Sequence: Synthetic oligonucleotide
acauucccuugucagccca

SEQ ID NO: 2154243 - RNA, 19 nt, Artificial Sequence
  Description of Artificial Sequence: Synthetic oligonucleotide
ugggaguucuucggggcag

SEQ ID NO: 2154244 - RNA, 19 nt, Artificial Sequence
  Description of Artificial Sequence: Synthetic oligonucleotide
ugacaggauugccuagaau

SEQ ID NO: 2154245 - RNA, 19 nt, Artificial Sequence
  Description of Artificial Sequence: Synthetic oligonucleotide
gagccgacggccaaggcga

SEQ ID NO: 2154246 - RNA, 19 nt, Artificial Sequence
  Description of Artificial Sequence: Synthetic oligonucleotide
gguuuaccaguucuacaug

SEQ ID NO: 2154247 - RNA, 19 nt, Artificial Sequence
  Description of Artificial Sequence: Synthetic oligonucleotide
ucuucggggcagagcuggg

SEQ ID NO: 2154248 - RNA, 19 nt, Artificial Sequence
  Description of Artificial Sequence: Synthetic oligonucleotide
gugaagcggaagcugguuc

SEQ ID NO: 2154249 - RNA, 19 nt, Artificial Sequence
  Description of Artificial Sequence: Synthetic oligonucleotide
agguagguaagaaggggca

SEQ ID NO: 2154250 - RNA, 19 nt, Artificial Sequence
  Description of Artificial Sequence: Synthetic oligonucleotide
gacggccaaggcgagcagg

SEQ ID NO: 2154251 - RNA, 19 nt, Artificial Sequence
  Description of Artificial Sequence: Synthetic oligonucleotide
gaggcaaccgucgggcggc

SEQ ID NO: 2154252 - RNA, 19 nt, Artificial Sequence
  Description of Artificial Sequence: Synthetic oligonucleotide
guagguaagaaggggcaga

SEQ ID NO: 2154253 - RNA, 19 nt, Artificial Sequence
  Description of Artificial Sequence: Synthetic oligonucleotide
cuuuagaacucuagaggcu

SEQ ID NO: 2154254 - RNA, 19 nt, Artificial Sequence
  Description of Artificial Sequence: Synthetic oligonucleotide
gcacucgaggaggagaagg

SEQ ID NO: 2154255 - RNA, 19 nt, Artificial Sequence
  Description of Artificial Sequence: Synthetic oligonucleotide
ggacauuucuaggaacuug

SEQ ID NO: 2154256 - RNA, 19 nt, Artificial Sequence
  Description of Artificial Sequence: Synthetic oligonucleotide
cacauucccuugucagccc

SEQ ID NO: 2154257 - RNA, 19 nt, Artificial Sequence
  Description of Artificial Sequence: Synthetic oligonucleotide
agcugguucuguucucgcu

SEQ ID NO: 2154258 - RNA, 19 nt, Artificial Sequence
  Description of Artificial Sequence: Synthetic oligonucleotide
uggacggauccccgcuucc

SEQ ID NO: 2154259 - RNA, 19 nt, Artificial Sequence
  Description of Artificial Sequence: Synthetic oligonucleotide
acucuagaggcugaacaaa

SEQ ID NO: 2154260 - RNA, 19 nt, Artificial Sequence
  Description of Artificial Sequence: Synthetic oligonucleotide
ggccuucauagccaacccg

SEQ ID NO: 2154261 - RNA, 19 nt, Artificial Sequence
  Description of Artificial Sequence: Synthetic oligonucleotide
agaauugccauggggccau

SEQ ID NO: 2154262 - RNA, 19 nt, Artificial Sequence
  Description of Artificial Sequence: Synthetic oligonucleotide
ggcauuacaucaacaccag

SEQ ID NO: 2154263 - RNA, 19 nt, Artificial Sequence
  Description of Artificial Sequence: Synthetic oligonucleotide
uuggguggggcagcuuuag

SEQ ID NO: 2154264 - RNA, 19 nt, Artificial Sequence
  Description of Artificial Sequence: Synthetic oligonucleotide
ggagccggaagguagguaa

SEQ ID NO: 2154265 - RNA, 19 nt, Artificial Sequence
  Description of Artificial Sequence: Synthetic oligonucleotide
acggccaaggcgagcaggg

SEQ ID NO: 2154266 - RNA, 19 nt, Artificial Sequence
  Description of Artificial Sequence: Synthetic oligonucleotide
gcacuaauaaauaaguuuu

SEQ ID NO: 2154267 - RNA, 19 nt, Artificial Sequence
  Description of Artificial Sequence: Synthetic oligonucleotide
uguucucgcuucucgccau

SEQ ID NO: 2154268 - RNA, 19 nt, Artificial Sequence
  Description of Artificial Sequence: Synthetic oligonucleotide
gaagcggaagcugguucug

SEQ ID NO: 2154269 - RNA, 19 nt, Artificial Sequence
  Description of Artificial Sequence: Synthetic oligonucleotide
gguggaauuggguggggca

SEQ ID NO: 2154270 - RNA, 19 nt, Artificial Sequence
  Description of Artificial Sequence: Synthetic oligonucleotide
ccagacuaggacugccugg

SEQ ID NO: 2154271 - RNA, 19 nt, Artificial Sequence
  Description of Artificial Sequence: Synthetic oligonucleotide
cuauccacuaguauuuauu

SEQ ID NO: 2154272 - RNA, 19 nt, Artificial Sequence
  Description of Artificial Sequence: Synthetic oligonucleotide
auauagaaacuaaguuaau

SEQ ID NO: 2154273 - RNA, 19 nt, Artificial Sequence
  Description of Artificial Sequence: Synthetic oligonucleotide
gacgggugagcugcucccg

SEQ ID NO: 2154274 - RNA, 19 nt, Artificial Sequence
  Description of Artificial Sequence: Synthetic oligonucleotide
ggguuuaccaguucuacau

SEQ ID NO: 2154275 - RNA, 19 nt, Artificial Sequence
  Description of Artificial Sequence: Synthetic oligonucleotide
cagaggcaaccgucgggcg

SEQ ID NO: 2154276 - RNA, 19 nt, Artificial Sequence
  Description of Artificial Sequence: Synthetic oligonucleotide
acggauccccgcuuccuga

SEQ ID NO: 2154277 - RNA, 19 nt, Artificial Sequence
  Description of Artificial Sequence: Synthetic oligonucleotide
cacggcaacuugccauugc

SEQ ID NO: 2154278 - RNA, 19 nt, Artificial Sequence
  Description of Artificial Sequence: Synthetic oligonucleotide
caacuugccauugccguga

SEQ ID NO: 2154279 - RNA, 19 nt, Artificial Sequence
  Description of Artificial Sequence: Synthetic oligonucleotide
ccggaagguagguaagaag

SEQ ID NO: 2154280 - RNA, 19 nt, Artificial Sequence
  Description of Artificial Sequence: Synthetic oligonucleotide
cauagccaacccguuggac

SEQ ID NO: 2154281 - RNA, 19 nt, Artificial Sequence
  Description of Artificial Sequence: Synthetic oligonucleotide
gagccggaagguagguaag

SEQ ID NO: 2154282 - RNA, 19 nt, Artificial Sequence
  Description of Artificial Sequence: Synthetic oligonucleotide
aaccgucgggcggcguucg

SEQ ID NO: 2154283 - RNA, 19 nt, Artificial Sequence
  Description of Artificial Sequence: Synthetic oligonucleotide
uucuauccacuaguauuua

SEQ ID NO: 2154284 - RNA, 19 nt, Artificial Sequence
  Description of Artificial Sequence: Synthetic oligonucleotide
agcauucuauccacuagua

SEQ ID NO: 2154285 - RNA, 19 nt, Artificial Sequence
  Description of Artificial Sequence: Synthetic oligonucleotide
cuuuagcuugugacuaucu

SEQ ID NO: 2154286 - RNA, 19 nt, Artificial Sequence
  Description of Artificial Sequence: Synthetic oligonucleotide
cuguucucgcuucucgcca

SEQ ID NO: 2154287 - RNA, 19 nt, Artificial Sequence
  Description of Artificial Sequence: Synthetic oligonucleotide
ugcuaccauucugaaugac

SEQ ID NO: 2154288 - RNA, 19 nt, Artificial Sequence
  Description of Artificial Sequence: Synthetic oligonucleotide
aacuugccauugccgugaa

SEQ ID NO: 2154289 - RNA, 19 nt, Artificial Sequence
  Description of Artificial Sequence: Synthetic oligonucleotide
gccgaagcgggugaagcgg

SEQ ID NO: 2154290 - RNA, 19 nt, Artificial Sequence
  Description of Artificial Sequence: Synthetic oligonucleotide
ccuggcacggcaacuugcc

SEQ ID NO: 2154291 - RNA, 19 nt, Artificial Sequence
  Description of Artificial Sequence: Synthetic oligonucleotide
ucucgcuucucgccauuuu

SEQ ID NO: 2154292 - RNA, 19 nt, Artificial Sequence
  Description of Artificial Sequence: Synthetic oligonucleotide
ccacugacgggugagcugc

SEQ ID NO: 2154293 - RNA, 19 nt, Artificial Sequence
  Description of Artificial Sequence: Synthetic oligonucleotide
cuaggaacuugacaggauu

SEQ ID NO: 2154294 - RNA, 19 nt, Artificial Sequence
  Description of Artificial Sequence: Synthetic oligonucleotide
guucuacaugugugucccc

SEQ ID NO: 2154295 - RNA, 19 nt, Artificial Sequence
  Description of Artificial Sequence: Synthetic oligonucleotide
gacugccuggcacggcaac

SEQ ID NO: 2154296 - RNA, 19 nt, Artificial Sequence
  Description of Artificial Sequence: Synthetic oligonucleotide
ggggcagaggcaaccgucg

SEQ ID NO: 2154297 - RNA, 19 nt, Artificial Sequence
  Description of Artificial Sequence: Synthetic oligonucleotide
ggcaacuugccauugccgu

SEQ ID NO: 2154298 - RNA, 19 nt, Artificial Sequence
  Description of Artificial Sequence: Synthetic oligonucleotide
agacuaggacugccuggca

SEQ ID NO: 2154299 - RNA, 19 nt, Artificial Sequence
  Description of Artificial Sequence: Synthetic oligonucleotide
ugcuguguacugguuccaa

SEQ ID NO: 2154300 - RNA, 19 nt, Artificial Sequence
  Description of Artificial Sequence: Synthetic oligonucleotide
gcagcuuuagcuugugacu

SEQ ID NO: 2154301 - RNA, 19 nt, Artificial Sequence
  Description of Artificial Sequence: Synthetic oligonucleotide
gauugccuuuugucgugaa

SEQ ID NO: 2154302 - RNA, 19 nt, Artificial Sequence
  Description of Artificial Sequence: Synthetic oligonucleotide
guuaacgcuugcauucugu

SEQ ID NO: 2154303 - RNA, 19 nt, Artificial Sequence
  Description of Artificial Sequence: Synthetic oligonucleotide
cucguggaucugcagggca

SEQ ID NO: 2154304 - RNA, 19 nt, Artificial Sequence
  Description of Artificial Sequence: Synthetic oligonucleotide
auagugcuguuugggaguu

SEQ ID NO: 2154305 - RNA, 19 nt, Artificial Sequence
  Description of Artificial Sequence: Synthetic oligonucleotide
gggguuuaccaguucuaca

SEQ ID NO: 2154306 - RNA, 19 nt, Artificial Sequence
  Description of Artificial Sequence: Synthetic oligonucleotide
cauagucccaggagccgga

SEQ ID NO: 2154307 - RNA, 19 nt, Artificial Sequence
  Description of Artificial Sequence: Synthetic oligonucleotide
acugacgggugagcugcuc

SEQ ID NO: 2154308 - RNA, 19 nt, Artificial Sequence
  Description of Artificial Sequence: Synthetic oligonucleotide
gccauugccgugaauauua

SEQ ID NO: 2154309 - RNA, 19 nt, Artificial Sequence
  Description of Artificial Sequence: Synthetic oligonucleotide
cagcuuuagcuugugacua

SEQ ID NO: 2154310 - RNA, 19 nt, Artificial Sequence
  Description of Artificial Sequence: Synthetic oligonucleotide
cuggacggauccccgcuuc

SEQ ID NO: 2154311 - RNA, 19 nt, Artificial Sequence
  Description of Artificial Sequence: Synthetic oligonucleotide
caucacggaggcauuacau

SEQ ID NO: 2154312 - RNA, 19 nt, Artificial Sequence
  Description of Artificial Sequence: Synthetic oligonucleotide
ugccauugccgugaauauu

SEQ ID NO: 2154313 - RNA, 19 nt, Artificial Sequence
  Description of Artificial Sequence: Synthetic oligonucleotide
cuguuugcaaagcaagguu

SEQ ID NO: 2154314 - RNA, 19 nt, Artificial Sequence
  Description of Artificial Sequence: Synthetic oligonucleotide
cauccacagggagccgacg

SEQ ID NO: 2154315 - RNA, 19 nt, Artificial Sequence
  Description of Artificial Sequence: Synthetic oligonucleotide
gccauggggccauccacag

SEQ ID NO: 2154316 - RNA, 19 nt, Artificial Sequence
  Description of Artificial Sequence: Synthetic oligonucleotide
ccuugucagcccacugacg

SEQ ID NO: 2154317 - RNA, 19 nt, Artificial Sequence
  Description of Artificial Sequence: Synthetic oligonucleotide
gauucauauugaacuggau

SEQ ID NO: 2154318 - RNA, 19 nt, Artificial Sequence
  Description of Artificial Sequence: Synthetic oligonucleotide
cacggaggcauuacaucaa

SEQ ID NO: 2154319 - RNA, 19 nt, Artificial Sequence
  Description of Artificial Sequence: Synthetic oligonucleotide
agccggaagguagguaaga

SEQ ID NO: 2154320 - RNA, 19 nt, Artificial Sequence
  Description of Artificial Sequence: Synthetic oligonucleotide
cccuugucagcccacugac

SEQ ID NO: 2154321 - RNA, 19 nt, Artificial Sequence
  Description of Artificial Sequence: Synthetic oligonucleotide
acuggacggauccccgcuu

SEQ ID NO: 2154322 - RNA, 19 nt, Artificial Sequence
  Description of Artificial Sequence: Synthetic oligonucleotide
cucgaggaggagaagguuu

SEQ ID NO: 2154323 - RNA, 19 nt, Artificial Sequence
  Description of Artificial Sequence: Synthetic oligonucleotide
aagcaagguuacagcacua

SEQ ID NO: 2154324 - RNA, 19 nt, Artificial Sequence
  Description of Artificial Sequence: Synthetic oligonucleotide
acagggagccgacggccaa

SEQ ID NO: 2154325 - RNA, 19 nt, Artificial Sequence
  Description of Artificial Sequence: Synthetic oligonucleotide
acucgaggaggagaagguu

SEQ ID NO: 2154326 - RNA, 19 nt, Artificial Sequence
  Description of Artificial Sequence: Synthetic oligonucleotide
ggguggggcagcuuuagcu

SEQ ID NO: 2154327 - RNA, 19 nt, Artificial Sequence
  Description of Artificial Sequence: Synthetic oligonucleotide
gucgggcggcguucguggg

SEQ ID NO: 2154328 - RNA, 19 nt, Artificial Sequence
  Description of Artificial Sequence: Synthetic oligonucleotide
aacgcaucacggaggcauu

SEQ ID NO: 2154329 - RNA, 19 nt, Artificial Sequence
  Description of Artificial Sequence: Synthetic oligonucleotide
gcaucacggaggcauuaca

SEQ ID NO: 2154330 - RNA, 19 nt, Artificial Sequence
  Description of Artificial Sequence: Synthetic oligonucleotide
ccagaggagcacuggguuc

SEQ ID NO: 2154331 - RNA, 19 nt, Artificial Sequence
  Description of Artificial Sequence: Synthetic oligonucleotide
gaccgugcugcuguguacu

SEQ ID NO: 2154332 - RNA, 19 nt, Artificial Sequence
  Description of Artificial Sequence: Synthetic oligonucleotide
uaggacugccuggcacggc

SEQ ID NO: 2154333 - RNA, 19 nt, Artificial Sequence
  Description of Artificial Sequence: Synthetic oligonucleotide
cagcccacugacgggugag

SEQ ID NO: 2154334 - RNA, 19 nt, Artificial Sequence
  Description of Artificial Sequence: Synthetic oligonucleotide
gcuuuagcuugugacuauc

SEQ ID NO: 2154335 - RNA, 19 nt, Artificial Sequence
  Description of Artificial Sequence: Synthetic oligonucleotide
cggcaacuugccauugccg

SEQ ID NO: 2154336 - RNA, 19 nt, Artificial Sequence
  Description of Artificial Sequence: Synthetic oligonucleotide
ccauugccgugaauauuac

SEQ ID NO: 2154337 - RNA, 19 nt, Artificial Sequence
  Description of Artificial Sequence: Synthetic oligonucleotide
gcguucguggguggaauug

SEQ ID NO: 2154338 - RNA, 19 nt, Artificial Sequence
  Description of Artificial Sequence: Synthetic oligonucleotide
gggaugcuaccauucugaa

SEQ ID NO: 2154339 - RNA, 19 nt, Artificial Sequence
  Description of Artificial Sequence: Synthetic oligonucleotide
ggauccccgcuuccugacc

SEQ ID NO: 2154340 - RNA, 19 nt, Artificial Sequence
  Description of Artificial Sequence: Synthetic oligonucleotide
ggguggaauuggguggggc

SEQ ID NO: 2154341 - RNA, 19 nt, Artificial Sequence
  Description of Artificial Sequence: Synthetic oligonucleotide
ggaccgugcugcuguguac

SEQ ID NO: 2154342 - RNA, 19 nt, Artificial Sequence
  Description of Artificial Sequence: Synthetic oligonucleotide
ggagggaugcuaccauucu

SEQ ID NO: 2154343 - RNA, 19 nt, Artificial Sequence
  Description of Artificial Sequence: Synthetic oligonucleotide
cgucgggcggcguucgugg

SEQ ID NO: 2154344 - RNA, 19 nt, Artificial Sequence
  Description of Artificial Sequence: Synthetic oligonucleotide
caagaauuggagggaugcu

SEQ ID NO: 2154345 - RNA, 19 nt, Artificial Sequence
  Description of Artificial Sequence: Synthetic oligonucleotide
cuggcacggcaacuugcca

SEQ ID NO: 2154346 - RNA, 19 nt, Artificial Sequence
  Description of Artificial Sequence: Synthetic oligonucleotide
cccacugacgggugagcug

SEQ ID NO: 2154347 - RNA, 19 nt, Artificial Sequence
  Description of Artificial Sequence: Synthetic oligonucleotide
auagucccaggagccggaa

SEQ ID NO: 2154348 - RNA, 19 nt, Artificial Sequence
  Description of Artificial Sequence: Synthetic oligonucleotide
caaccgucgggcggcguuc

SEQ ID NO: 2154349 - RNA, 19 nt, Artificial Sequence
  Description of Artificial Sequence: Synthetic oligonucleotide
gccgugaauauuacagcaa

SEQ ID NO: 2154350 - RNA, 19 nt, Artificial Sequence
  Description of Artificial Sequence: Synthetic oligonucleotide
gcauucuauccacuaguau

SEQ ID NO: 2154351 - RNA, 19 nt, Artificial Sequence
  Description of Artificial Sequence: Synthetic oligonucleotide
gcuugugacuaucuucuuu

SEQ ID NO: 2154352 - RNA, 19 nt, Artificial Sequence
  Description of Artificial Sequence: Synthetic oligonucleotide
agaucucguuggccuucau

SEQ ID NO: 2154353 - RNA, 19 nt, Artificial Sequence
  Description of Artificial Sequence: Synthetic oligonucleotide
gguggggcagcuuuagcuu

SEQ ID NO: 2154354 - RNA, 19 nt, Artificial Sequence
  Description of Artificial Sequence: Synthetic oligonucleotide
gcaagguuacagcacuaau

SEQ ID NO: 2154355 - RNA, 19 nt, Artificial Sequence
  Description of Artificial Sequence: Synthetic oligonucleotide
gucagcccacugacgggug

SEQ ID NO: 2154356 - RNA, 19 nt, Artificial Sequence
  Description of Artificial Sequence: Synthetic oligonucleotide
ccacuaguauuuauuuagu

SEQ ID NO: 2154357 - RNA, 19 nt, Artificial Sequence
  Description of Artificial Sequence: Synthetic oligonucleotide
agacuuuauuagagaucua

SEQ ID NO: 2154358 - RNA, 19 nt, Artificial Sequence
  Description of Artificial Sequence: Synthetic oligonucleotide
cuucggggcagagcuggga

SEQ ID NO: 2154359 - RNA, 19 nt, Artificial Sequence
  Description of Artificial Sequence: Synthetic oligonucleotide
ggaugcuaccauucugaau

SEQ ID NO: 2154360 - RNA, 19 nt, Artificial Sequence
  Description of Artificial Sequence: Synthetic oligonucleotide
ccacauguguuacaauagu

SEQ ID NO: 2154361 - RNA, 19 nt, Artificial Sequence
  Description of Artificial Sequence: Synthetic oligonucleotide
gccuggcacggcaacuugc

SEQ ID NO: 2154362 - RNA, 19 nt, Artificial Sequence
  Description of Artificial Sequence: Synthetic oligonucleotide
caacccguuggaccgugcu

SEQ ID NO: 2154363 - RNA, 19 nt, Artificial Sequence
  Description of Artificial Sequence: Synthetic oligonucleotide
cagugcaagcaaaggguuu

SEQ ID NO: 2154364 - RNA, 19 nt, Artificial Sequence
  Description of Artificial Sequence: Synthetic oligonucleotide
acgcaucacggaggcauua

SEQ ID NO: 2154365 - RNA, 19 nt, Artificial Sequence
  Description of Artificial Sequence: Synthetic oligonucleotide
aggagccggaagguaggua

SEQ ID NO: 2154366 - RNA, 19 nt, Artificial Sequence
  Description of Artificial Sequence: Synthetic oligonucleotide
ggaccuucagauugccuuu

SEQ ID NO: 2154367 - RNA, 19 nt, Artificial Sequence
  Description of Artificial Sequence: Synthetic oligonucleotide
ggcacucgaggaggagaag

SEQ ID NO: 2154368 - RNA, 19 nt, Artificial Sequence
  Description of Artificial Sequence: Synthetic oligonucleotide
ccgugcugcuguguacugg

SEQ ID NO: 2154369 - RNA, 19 nt, Artificial Sequence
  Description of Artificial Sequence: Synthetic oligonucleotide
cuaacgcaucacggaggca

SEQ ID NO: 2154370 - RNA, 19 nt, Artificial Sequence
  Description of Artificial Sequence: Synthetic oligonucleotide
auccccgcuuccugaccuu

SEQ ID NO: 2154371 - RNA, 19 nt, Artificial Sequence
  Description of Artificial Sequence: Synthetic oligonucleotide
aggcaaccgucgggcggcg

SEQ ID NO: 2154372 - RNA, 19 nt, Artificial Sequence
  Description of Artificial Sequence: Synthetic oligonucleotide
gccggaagguagguaagaa

SEQ ID NO: 2154373 - RNA, 19 nt, Artificial Sequence
  Description of Artificial Sequence: Synthetic oligonucleotide
cgugaauauuacagcaagu

SEQ ID NO: 2154374 - RNA, 19 nt, Artificial Sequence
  Description of Artificial Sequence: Synthetic oligonucleotide
auggggccauccacaggga

SEQ ID NO: 2154375 - RNA, 19 nt, Artificial Sequence
  Description of Artificial Sequence: Synthetic oligonucleotide
gaauugccauggggccauc

SEQ ID NO: 2154376 - RNA, 19 nt, Artificial Sequence
  Description of Artificial Sequence: Synthetic oligonucleotide
agccaacccguuggaccgu

SEQ ID NO: 2154377 - RNA, 19 nt, Artificial Sequence
  Description of Artificial Sequence: Synthetic oligonucleotide
gaccuucagauugccuuuu

SEQ ID NO: 2154378 - RNA, 19 nt, Artificial Sequence
  Description of Artificial Sequence: Synthetic oligonucleotide
cagagaucucguuggccuu

SEQ ID NO: 2154379 - RNA, 19 nt, Artificial Sequence
  Description of Artificial Sequence: Synthetic oligonucleotide
ccaacccguuggaccgugc

SEQ ID NO: 2154380 - RNA, 19 nt, Artificial Sequence
  Description of Artificial Sequence: Synthetic oligonucleotide
ccccgcuuccugaccuugc

SEQ ID NO: 2154381 - RNA, 19 nt, Artificial Sequence
  Description of Artificial Sequence: Synthetic oligonucleotide
ccgacggccaaggcgagca

SEQ ID NO: 2154382 - RNA, 19 nt, Artificial Sequence
  Description of Artificial Sequence: Synthetic oligonucleotide
ccgaagcgggugaagcgga

SEQ ID NO: 2154383 - RNA, 19 nt, Artificial Sequence
  Description of Artificial Sequence: Synthetic oligonucleotide
ggcacggcaacuugccauu

SEQ ID NO: 2154384 - RNA, 19 nt, Artificial Sequence
  Description of Artificial Sequence: Synthetic oligonucleotide
accgucgggcggcguucgu

SEQ ID NO: 2154385 - RNA, 19 nt, Artificial Sequence
  Description of Artificial Sequence: Synthetic oligonucleotide
gcacggcaacuugccauug

SEQ ID NO: 2154386 - RNA, 19 nt, Artificial Sequence
  Description of Artificial Sequence: Synthetic oligonucleotide
agccgacggccaaggcgag

SEQ ID NO: 2154387 - RNA, 19 nt, Artificial Sequence
  Description of Artificial Sequence: Synthetic oligonucleotide
guggaccuucagauugccu

SEQ ID NO: 2154388 - RNA, 19 nt, Artificial Sequence
  Description of Artificial Sequence: Synthetic oligonucleotide
cggaggcauuacaucaaca

SEQ ID NO: 2154389 - RNA, 19 nt, Artificial Sequence
  Description of Artificial Sequence: Synthetic oligonucleotide
gccaacccguuggaccgug

SEQ ID NO: 2154390 - RNA, 19 nt, Artificial Sequence
  Description of Artificial Sequence: Synthetic oligonucleotide
gggcggcguucgugggugg

SEQ ID NO: 2154391 - RNA, 19 nt, Artificial Sequence
  Description of Artificial Sequence: Synthetic oligonucleotide
cgcaucacggaggcauuac

SEQ ID NO: 2154392 - RNA, 19 nt, Artificial Sequence
  Description of Artificial Sequence: Synthetic oligonucleotide
ggugaagcggaagcugguu

SEQ ID NO: 2154393 - RNA, 19 nt, Artificial Sequence
  Description of Artificial Sequence: Synthetic oligonucleotide
guucucgcuucucgccauu

SEQ ID NO: 2154394 - RNA, 19 nt, Artificial Sequence
  Description of Artificial Sequence: Synthetic oligonucleotide
caggagccggaagguaggu

SEQ ID NO: 2154395 - RNA, 19 nt, Artificial Sequence
  Description of Artificial Sequence: Synthetic oligonucleotide
gcaaccgucgggcggcguu

SEQ ID NO: 2154396 - RNA, 19 nt, Artificial Sequence
  Description of Artificial Sequence: Synthetic oligonucleotide
ccgucgggcggcguucgug

SEQ ID NO: 2154397 - RNA, 19 nt, Artificial Sequence
  Description of Artificial Sequence: Synthetic oligonucleotide
gccgacggccaaggcgagc

SEQ ID NO: 2154398 - RNA, 19 nt, Artificial Sequence
  Description of Artificial Sequence: Synthetic oligonucleotide
cacugacgggugagcugcu

SEQ ID NO: 2154399 - RNA, 19 nt, Artificial Sequence
  Description of Artificial Sequence: Synthetic oligonucleotide
ggcguucguggguggaauu

SEQ ID NO: 2154400 - RNA, 19 nt, Artificial Sequence
  Description of Artificial Sequence: Synthetic oligonucleotide
gcggcguucguggguggaa

SEQ ID NO: 2154401 - RNA, 19 nt, Artificial Sequence
  Description of Artificial Sequence: Synthetic oligonucleotide
ccacgaagccgaagcgggu

SEQ ID NO: 2154402 - RNA, 19 nt, Artificial Sequence
  Description of Artificial Sequence: Synthetic oligonucleotide
ccugaccuugcugccagau

SEQ ID NO: 2154403 - RNA, 19 nt, Artificial Sequence
  Description of Artificial Sequence: Synthetic oligonucleotide
cccguuggaccgugcugcu

SEQ ID NO: 2154404 - RNA, 19 nt, Artificial Sequence
  Description of Artificial Sequence: Synthetic oligonucleotide
cagauccuucugggacauu

SEQ ID NO: 2154405 - RNA, 19 nt, Artificial Sequence
  Description of Artificial Sequence: Synthetic oligonucleotide
ggcaaccgucgggcggcgu

SEQ ID NO: 2154406 - RNA, 19 nt, Artificial Sequence
  Description of Artificial Sequence: Synthetic oligonucleotide
auucgugaguuucaaaggc

SEQ ID NO: 2154407 - RNA, 19 nt, Artificial Sequence
  Description of Artificial Sequence: Synthetic oligonucleotide
aguuucaaaggcuugcacg

SEQ ID NO: 2154408 - RNA, 19 nt, Artificial Sequence
  Description of Artificial Sequence: Synthetic oligonucleotide
ucauguccaaacaggaugg

SEQ ID NO: 2154409 - RNA, 19 nt, Artificial Sequence
  Description of Artificial Sequence: Synthetic oligonucleotide
augguauagucauuguacc

SEQ ID NO: 2154410 - RNA, 19 nt, Artificial Sequence
  Description of Artificial Sequence: Synthetic oligonucleotide
uaugauacucuccuuggag

SEQ ID NO: 2154411 - RNA, 19 nt, Artificial Sequence
  Description of Artificial Sequence: Synthetic oligonucleotide
gaucccaugauccugagca

SEQ ID NO: 2154412 - RNA, 19 nt, Artificial Sequence
  Description of Artificial Sequence: Synthetic oligonucleotide
uaugcccaaacucuuagag

SEQ ID NO: 2154413 - RNA, 19 nt, Artificial Sequence
  Description of Artificial Sequence: Synthetic oligonucleotide
agaaguccacgcuugacgc

SEQ ID NO: 2154414 - RNA, 19 nt, Artificial Sequence
  Description of Artificial Sequence: Synthetic oligonucleotide
auaagcacacgccaucacc

SEQ ID NO: 2154415 - RNA, 19 nt, Artificial Sequence
  Description of Artificial Sequence: Synthetic oligonucleotide
ucuaucugcccgcaggucg

SEQ ID NO: 2154416 - RNA, 19 nt, Artificial Sequence
  Description of Artificial Sequence: Synthetic oligonucleotide
uuugucaaaugucagugga

SEQ ID NO: 2154417 - RNA, 19 nt, Artificial Sequence
  Description of Artificial Sequence: Synthetic oligonucleotide
auagucauuguacccagcg

SEQ ID NO: 2154418 - RNA, 19 nt, Artificial Sequence
  Description of Artificial Sequence: Synthetic oligonucleotide
aagcagaggacaucagccc

SEQ ID NO: 2154419 - RNA, 19 nt, Artificial Sequence
  Description of Artificial Sequence: Synthetic oligonucleotide
gauucgugaguuucaaagg

SEQ ID NO: 2154420 - RNA, 19 nt, Artificial Sequence
  Description of Artificial Sequence: Synthetic oligonucleotide
ugcccaaacucuuagagug

SEQ ID NO: 2154421 - RNA, 19 nt, Artificial Sequence
  Description of Artificial Sequence: Synthetic oligonucleotide
aucccgauggagcauaagc

SEQ ID NO: 2154422 - RNA, 19 nt, Artificial Sequence
  Description of Artificial Sequence: Synthetic oligonucleotide
cucucuacaucccacaggg

SEQ ID NO: 2154423 - RNA, 19 nt, Artificial Sequence
  Description of Artificial Sequence: Synthetic oligonucleotide
acgguuuucauguccaaac

SEQ ID NO: 2154424 - RNA, 19 nt, Artificial Sequence
  Description of Artificial Sequence: Synthetic oligonucleotide
gaugguauagucauuguac

SEQ ID NO: 2154425 - RNA, 19 nt, Artificial Sequence
  Description of Artificial Sequence: Synthetic oligonucleotide
augcacaggacuuuguuuc

SEQ ID NO: 2154426 - RNA, 19 nt, Artificial Sequence
  Description of Artificial Sequence: Synthetic oligonucleotide
uugagaacgucccagacau

SEQ ID NO: 2154427 - RNA, 19 nt, Artificial Sequence
  Description of Artificial Sequence: Synthetic oligonucleotide
gagaaguccacgcuugacg

SEQ ID NO: 2154428 - RNA, 19 nt, Artificial Sequence
  Description of Artificial Sequence: Synthetic oligonucleotide
uccuuguuagucgugaagg

SEQ ID NO: 2154429 - RNA, 19 nt, Artificial Sequence
  Description of Artificial Sequence: Synthetic oligonucleotide
auagcaacagacuucuucu

SEQ ID NO: 2154430 - RNA, 19 nt, Artificial Sequence
  Description of Artificial Sequence: Synthetic oligonucleotide
cucuacaucccacagggcg

SEQ ID NO: 2154431 - RNA, 19 nt, Artificial Sequence
  Description of Artificial Sequence: Synthetic oligonucleotide
acucgaagagugcugacac

SEQ ID NO: 2154432 - RNA, 19 nt, Artificial Sequence
  Description of Artificial Sequence: Synthetic oligonucleotide
caagcagaggacaucagcc

SEQ ID NO: 2154433 - RNA, 19 nt, Artificial Sequence
  Description of Artificial Sequence: Synthetic oligonucleotide
guuucaaaggcuugcacgc

SEQ ID NO: 2154434 - RNA, 19 nt, Artificial Sequence
  Description of Artificial Sequence: Synthetic oligonucleotide
agacauugaugguauaguc

SEQ ID NO: 2154435 - RNA, 19 nt, Artificial Sequence
  Description of Artificial Sequence: Synthetic oligonucleotide
uaagcacacgccaucaccc

SEQ ID NO: 2154436 - RNA, 19 nt, Artificial Sequence
  Description of Artificial Sequence: Synthetic oligonucleotide
cacgccaucacccaugugc

SEQ ID NO: 2154437 - RNA, 19 nt, Artificial Sequence
  Description of Artificial Sequence: Synthetic oligonucleotide
guuuccguggccuuugagg

SEQ ID NO: 2154438 - RNA, 19 nt, Artificial Sequence
  Description of Artificial Sequence: Synthetic oligonucleotide
uucuuagcagccauguucu

SEQ ID NO: 2154439 - RNA, 19 nt, Artificial Sequence
  Description of Artificial Sequence: Synthetic oligonucleotide
ucgaagagugcugacacgg

SEQ ID NO: 2154440 - RNA, 19 nt, Artificial Sequence
  Description of Artificial Sequence: Synthetic oligonucleotide
ggauucgugaguuucaaag

SEQ ID NO: 2154441 - RNA, 19 nt, Artificial Sequence
  Description of Artificial Sequence: Synthetic oligonucleotide
ugugcauagcaacagacuu

SEQ ID NO: 2154442 - RNA, 19 nt, Artificial Sequence
  Description of Artificial Sequence: Synthetic oligonucleotide
uucaugacaaacuggccca

SEQ ID NO: 2154443 - RNA, 19 nt, Artificial Sequence
  Description of Artificial Sequence: Synthetic oligonucleotide
uccaaauaugauacucucc

SEQ ID NO: 2154444 - RNA, 19 nt, Artificial Sequence
  Description of Artificial Sequence: Synthetic oligonucleotide
uccgaguuggugaagcugc

SEQ ID NO: 2154445 - RNA, 19 nt, Artificial Sequence
  Description of Artificial Sequence: Synthetic oligonucleotide
ucaguggauacacggagca

SEQ ID NO: 2154446 - RNA, 19 nt, Artificial Sequence
  Description of Artificial Sequence: Synthetic oligonucleotide
gacgcuccaaauaugauac

SEQ ID NO: 2154447 - RNA, 19 nt, Artificial Sequence
  Description of Artificial Sequence: Synthetic oligonucleotide
gcacuuguuauccagaccc

SEQ ID NO: 2154448 - RNA, 19 nt, Artificial Sequence
  Description of Artificial Sequence: Synthetic oligonucleotide
ucgggagaaacucgaagag

SEQ ID NO: 2154449 - RNA, 19 nt, Artificial Sequence
  Description of Artificial Sequence: Synthetic oligonucleotide
agaggcgacacguugcauc

SEQ ID NO: 2154450 - RNA, 19 nt, Artificial Sequence
  Description of Artificial Sequence: Synthetic oligonucleotide
ucuacaucccacagggcgc

SEQ ID NO: 2154451 - RNA, 19 nt, Artificial Sequence
  Description of Artificial Sequence: Synthetic oligonucleotide
uaguaucggacacuguuga

SEQ ID NO: 2154452 - RNA, 19 nt, Artificial Sequence
  Description of Artificial Sequence: Synthetic oligonucleotide
aucgggagaaacucgaaga

SEQ ID NO: 2154453 - RNA, 19 nt, Artificial Sequence
  Description of Artificial Sequence: Synthetic oligonucleotide
uuguacccagcgaagagca

SEQ ID NO: 2154454 - RNA, 19 nt, Artificial Sequence
  Description of Artificial Sequence: Synthetic oligonucleotide
ugugaucccaugauccuga

SEQ ID NO: 2154455 - RNA, 19 nt, Artificial Sequence
  Description of Artificial Sequence: Synthetic oligonucleotide
guaucggacacuguugacg

SEQ ID NO: 2154456 - RNA, 19 nt, Artificial Sequence
  Description of Artificial Sequence: Synthetic oligonucleotide
uugacgucggauucgugag

SEQ ID NO: 2154457 - RNA, 19 nt, Artificial Sequence
  Description of Artificial Sequence: Synthetic oligonucleotide
caagcgauggcgcaucccg

SEQ ID NO: 2154458 - RNA, 19 nt, Artificial Sequence
  Description of Artificial Sequence: Synthetic oligonucleotide
uuagucgugaaggaauccc

SEQ ID NO: 2154459 - RNA, 19 nt, Artificial Sequence
  Description of Artificial Sequence: Synthetic oligonucleotide
acucuuagagugugauccc

SEQ ID NO: 2154460 - RNA, 19 nt, Artificial Sequence
  Description of Artificial Sequence: Synthetic oligonucleotide
gagaacgucccagacauug

SEQ ID NO: 2154461 - RNA, 19 nt, Artificial Sequence
  Description of Artificial Sequence: Synthetic oligonucleotide
ugguauagucauuguaccc

SEQ ID NO: 2154462 - RNA, 19 nt, Artificial Sequence
  Description of Artificial Sequence: Synthetic oligonucleotide
agcauaagcacacgccauc

SEQ ID NO: 2154463 - RNA, 19 nt, Artificial Sequence
  Description of Artificial Sequence: Synthetic oligonucleotide
ucccgauggagcauaagca

SEQ ID NO: 2154464 - RNA, 19 nt, Artificial Sequence
  Description of Artificial Sequence: Synthetic oligonucleotide
acgucaugcagcuuugcag

SEQ ID NO: 2154465 - RNA, 19 nt, Artificial Sequence
  Description of Artificial Sequence: Synthetic oligonucleotide
uaucggacacuguugacgu

SEQ ID NO: 2154466 - RNA, 19 nt, Artificial Sequence
  Description of Artificial Sequence: Synthetic oligonucleotide
aaacucgaagagugcugac

SEQ ID NO: 2154467 - RNA, 19 nt, Artificial Sequence
  Description of Artificial Sequence: Synthetic oligonucleotide
acguugcaucaucugaccc

SEQ ID NO: 2154468 - RNA, 19 nt, Artificial Sequence
  Description of Artificial Sequence: Synthetic oligonucleotide
aaggcaucuccacuggggu

SEQ ID NO: 2154469 - RNA, 19 nt, Artificial Sequence
  Description of Artificial Sequence: Synthetic oligonucleotide
ucuucaugacaaacuggcc

SEQ ID NO: 2154470 - RNA, 19 nt, Artificial Sequence
  Description of Artificial Sequence: Synthetic oligonucleotide
augauacucuccuuggagu

SEQ ID NO: 2154471 - RNA, 19 nt, Artificial Sequence
  Description of Artificial Sequence: Synthetic oligonucleotide
caugauccugagcagaaug

SEQ ID NO: 2154472 - RNA, 19 nt, Artificial Sequence
  Description of Artificial Sequence: Synthetic oligonucleotide
caccuuuccauccugugag

SEQ ID NO: 2154473 - RNA, 19 nt, Artificial Sequence
  Description of Artificial Sequence: Synthetic oligonucleotide
ugaugguauagucauugua

SEQ ID NO: 2154474 - RNA, 19 nt, Artificial Sequence
  Description of Artificial Sequence: Synthetic oligonucleotide
ugacccggaagcaaaggca

SEQ ID NO: 2154475 - RNA, 19 nt, Artificial Sequence
  Description of Artificial Sequence: Synthetic oligonucleotide
accgcaugcuccuuguuag

SEQ ID NO: 2154476 - RNA, 19 nt, Artificial Sequence
  Description of Artificial Sequence: Synthetic oligonucleotide
guauagucauuguacccag

SEQ ID NO: 2154477 - RNA, 19 nt, Artificial Sequence
  Description of Artificial Sequence: Synthetic oligonucleotide
aaguccacgcuugacgcuc

SEQ ID NO: 2154478 - RNA, 19 nt, Artificial Sequence
  Description of Artificial Sequence: Synthetic oligonucleotide
uucgugaguuucaaaggcu

SEQ ID NO: 2154479 - RNA, 19 nt, Artificial Sequence
  Description of Artificial Sequence: Synthetic oligonucleotide
acucucuacaucccacagg

SEQ ID NO: 2154480 - RNA, 19 nt, Artificial Sequence
  Description of Artificial Sequence: Synthetic oligonucleotide
uguagcuccacgucaugca

SEQ ID NO: 2154481 - RNA, 19 nt, Artificial Sequence
  Description of Artificial Sequence: Synthetic oligonucleotide
cucucuaucugcccgcagg

SEQ ID NO: 2154482 - RNA, 19 nt, Artificial Sequence
  Description of Artificial Sequence: Synthetic oligonucleotide
uuagcagccauguucucau

SEQ ID NO: 2154483 - RNA, 19 nt, Artificial Sequence
  Description of Artificial Sequence: Synthetic oligonucleotide
gacacguugcaucaucuga

SEQ ID NO: 2154484 - RNA, 19 nt, Artificial Sequence
  Description of Artificial Sequence: Synthetic oligonucleotide
uuuccacccgcucagccac

SEQ ID NO: 2154485 - RNA, 19 nt, Artificial Sequence
  Description of Artificial Sequence: Synthetic oligonucleotide
cuugacgcuccaaauauga

SEQ ID NO: 2154486 - RNA, 19 nt, Artificial Sequence
  Description of Artificial Sequence: Synthetic oligonucleotide
guugacgucggauucguga

SEQ ID NO: 2154487 - RNA, 19 nt, Artificial Sequence
  Description of Artificial Sequence: Synthetic oligonucleotide
aaggaaucccacacaauca

SEQ ID NO: 2154488 - RNA, 19 nt, Artificial Sequence
  Description of Artificial Sequence: Synthetic oligonucleotide
cuccaaauaugauacucuc

SEQ ID NO: 2154489 - RNA, 19 nt, Artificial Sequence
  Description of Artificial Sequence: Synthetic oligonucleotide
aguggauacacggagcacu

SEQ ID NO: 2154490 - RNA, 19 nt, Artificial Sequence
  Description of Artificial Sequence: Synthetic oligonucleotide
uagagugugaucccaugau

SEQ ID NO: 2154491 - RNA, 19 nt, Artificial Sequence
  Description of Artificial Sequence: Synthetic oligonucleotide
ucguagaggcgacacguug

SEQ ID NO: 2154492 - RNA, 19 nt, Artificial Sequence
  Description of Artificial Sequence: Synthetic oligonucleotide
uccugugaggagcucacga

SEQ ID NO: 2154493 - RNA, 19 nt, Artificial Sequence
  Description of Artificial Sequence: Synthetic oligonucleotide
aguaucggacacuguugac

SEQ ID NO: 2154494 - RNA, 19 nt, Artificial Sequence
  Description of Artificial Sequence: Synthetic oligonucleotide
acacguugcaucaucugac

SEQ ID NO: 2154495 - RNA, 19 nt, Artificial Sequence
  Description of Artificial Sequence: Synthetic oligonucleotide
ugucaaaugucaguggaua

SEQ ID NO: 2154496 - RNA, 19 nt, Artificial Sequence
  Description of Artificial Sequence: Synthetic oligonucleotide
ucucgugcagcccaucggu

SEQ ID NO: 2154497 - RNA, 19 nt, Artificial Sequence
  Description of Artificial Sequence: Synthetic oligonucleotide
ugucccaucgggagaaacu

SEQ ID NO: 2154498 - RNA, 19 nt, Artificial Sequence
  Description of Artificial Sequence: Synthetic oligonucleotide
uuugcagcgacgccagcgu

SEQ ID NO: 2154499 - RNA, 19 nt, Artificial Sequence
  Description of Artificial Sequence: Synthetic oligonucleotide
acacggagcacuuguuauc

SEQ ID NO: 2154500 - RNA, 19 nt, Artificial Sequence
  Description of Artificial Sequence: Synthetic oligonucleotide
cauuguacccagcgaagag

SEQ ID NO: 2154501 - RNA, 19 nt, Artificial Sequence
  Description of Artificial Sequence: Synthetic oligonucleotide
ugauacucuccuuggagua

SEQ ID NO: 2154502 - RNA, 19 nt, Artificial Sequence
  Description of Artificial Sequence: Synthetic oligonucleotide
aacucgaagagugcugaca

SEQ ID NO: 2154503 - RNA, 19 nt, Artificial Sequence
  Description of Artificial Sequence: Synthetic oligonucleotide
aaaugucaguggauacacg

SEQ ID NO: 2154504 - RNA, 19 nt, Artificial Sequence
  Description of Artificial Sequence: Synthetic oligonucleotide
uagucauuguacccagcga

SEQ ID NO: 2154505 - RNA, 19 nt, Artificial Sequence
  Description of Artificial Sequence: Synthetic oligonucleotide
uuggugugcauagcaacag

SEQ ID NO: 2154506 - RNA, 19 nt, Artificial Sequence
  Description of Artificial Sequence: Synthetic oligonucleotide
gcacgcacuggccagaacg

SEQ ID NO: 2154507 - RNA, 19 nt, Artificial Sequence
  Description of Artificial Sequence: Synthetic oligonucleotide
ucccaucgggagaaacucg

SEQ ID NO: 2154508 - RNA, 19 nt, Artificial Sequence
  Description of Artificial Sequence: Synthetic oligonucleotide
uacacggagcacuuguuau

SEQ ID NO: 2154509 - RNA, 19 nt, Artificial Sequence
  Description of Artificial Sequence: Synthetic oligonucleotide
agacagguaguuggugugc

SEQ ID NO: 2154510 - RNA, 19 nt, Artificial Sequence
  Description of Artificial Sequence: Synthetic oligonucleotide
auaugauacucuccuugga

SEQ ID NO: 2154511 - RNA, 19 nt, Artificial Sequence
  Description of Artificial Sequence: Synthetic oligonucleotide
ccuggaacccuugagaacg

SEQ ID NO: 2154512 - RNA, 19 nt, Artificial Sequence
  Description of Artificial Sequence: Synthetic oligonucleotide
cuuagagugugaucccaug

SEQ ID NO: 2154513 - RNA, 19 nt, Artificial Sequence
  Description of Artificial Sequence: Synthetic oligonucleotide
ugcagcuuugcagcgacgc

SEQ ID NO: 2154514 - RNA, 19 nt, Artificial Sequence
  Description of Artificial Sequence: Synthetic oligonucleotide
caucgggagaaacucgaag

SEQ ID NO: 2154515 - RNA, 19 nt, Artificial Sequence
  Description of Artificial Sequence: Synthetic oligonucleotide
agugcugacacgguuuuca

SEQ ID NO: 2154516 - RNA, 19 nt, Artificial Sequence
  Description of Artificial Sequence: Synthetic oligonucleotide
guucucgugcagcccaucg

SEQ ID NO: 2154517 - RNA, 19 nt, Artificial Sequence
  Description of Artificial Sequence: Synthetic oligonucleotide
gauacucuccuuggaguag

SEQ ID NO: 2154518 - RNA, 19 nt, Artificial Sequence
  Description of Artificial Sequence: Synthetic oligonucleotide
cugacccggaagcaaaggc

SEQ ID NO: 2154519 - RNA, 19 nt, Artificial Sequence
  Description of Artificial Sequence: Synthetic oligonucleotide
ugaguuucaaaggcuugca

SEQ ID NO: 2154520 - RNA, 19 nt, Artificial Sequence
  Description of Artificial Sequence: Synthetic oligonucleotide
uggcgcaucccgauggagc

SEQ ID NO: 2154521 - RNA, 19 nt, Artificial Sequence
  Description of Artificial Sequence: Synthetic oligonucleotide
ucuuagagugugaucccau

SEQ ID NO: 2154522 - RNA, 19 nt, Artificial Sequence
  Description of Artificial Sequence: Synthetic oligonucleotide
gugaguuucaaaggcuugc

SEQ ID NO: 2154523 - RNA, 19 nt, Artificial Sequence
  Description of Artificial Sequence: Synthetic oligonucleotide
auggcgaccucucuaucug

SEQ ID NO: 2154524 - RNA, 19 nt, Artificial Sequence
  Description of Artificial Sequence: Synthetic oligonucleotide
guaguaucggacacuguug

SEQ ID NO: 2154525 - RNA, 19 nt, Artificial Sequence
  Description of Artificial Sequence: Synthetic oligonucleotide
gaagguguuuccaguuucc

SEQ ID NO: 2154526 - RNA, 19 nt, Artificial Sequence
  Description of Artificial Sequence: Synthetic oligonucleotide
ugucccacaccauagccuu

SEQ ID NO: 2154527 - RNA, 19 nt, Artificial Sequence
  Description of Artificial Sequence: Synthetic oligonucleotide
ugcacaggacuuuguuucc

SEQ ID NO: 2154528 - RNA, 19 nt, Artificial Sequence
  Description of Artificial Sequence: Synthetic oligonucleotide
uagauggcgaccucucuau

SEQ ID NO: 2154529 - RNA, 19 nt, Artificial Sequence
  Description of Artificial Sequence: Synthetic oligonucleotide
ugcaucaucugacccggaa

SEQ ID NO: 2154530 - RNA, 19 nt, Artificial Sequence
  Description of Artificial Sequence: Synthetic oligonucleotide
cacguugcaucaucugacc

SEQ ID NO: 2154531 - RNA, 19 nt, Artificial Sequence
  Description of Artificial Sequence: Synthetic oligonucleotide
ucuuugcaccaguccaugc

SEQ ID NO: 2154532 - RNA, 19 nt, Artificial Sequence
  Description of Artificial Sequence: Synthetic oligonucleotide
ugauccugagcagaaugcu

SEQ ID NO: 2154533 - RNA, 19 nt, Artificial Sequence
  Description of Artificial Sequence: Synthetic oligonucleotide
ucugacccggaagcaaagg

SEQ ID NO: 2154534 - RNA, 19 nt, Artificial Sequence
  Description of Artificial Sequence: Synthetic oligonucleotide
cagaaugcugucccaucgg

SEQ ID NO: 2154535 - RNA, 19 nt, Artificial Sequence
  Description of Artificial Sequence: Synthetic oligonucleotide
uguuuccguggccuuugag

SEQ ID NO: 2154536 - RNA, 19 nt, Artificial Sequence
  Description of Artificial Sequence: Synthetic oligonucleotide
gguauagucauuguaccca

SEQ ID NO: 2154537 - RNA, 19 nt, Artificial Sequence
  Description of Artificial Sequence: Synthetic oligonucleotide
uugaugguauagucauugu

SEQ ID NO: 2154538 - RNA, 19 nt, Artificial Sequence
  Description of Artificial Sequence: Synthetic oligonucleotide
cacggagcacuuguuaucc

SEQ ID NO: 2154539 - RNA, 19 nt, Artificial Sequence
  Description of Artificial Sequence: Synthetic oligonucleotide
augcccaaacucuuagagu

SEQ ID NO: 2154540 - RNA, 19 nt, Artificial Sequence
  Description of Artificial Sequence: Synthetic oligonucleotide
gauggagcauaagcacacg

SEQ ID NO: 2154541 - RNA, 19 nt, Artificial Sequence
  Description of Artificial Sequence: Synthetic oligonucleotide
agggcuuuccacccgcuca

SEQ ID NO: 2154542 - RNA, 19 nt, Artificial Sequence
  Description of Artificial Sequence: Synthetic oligonucleotide
ugaaggaaucccacacaau

SEQ ID NO: 2154543 - RNA, 19 nt, Artificial Sequence
  Description of Artificial Sequence: Synthetic oligonucleotide
uggugugcauagcaacaga

SEQ ID NO: 2154544 - RNA, 19 nt, Artificial Sequence
  Description of Artificial Sequence: Synthetic oligonucleotide
cuugagaacgucccagaca

SEQ ID NO: 2154545 - RNA, 19 nt, Artificial Sequence
  Description of Artificial Sequence: Synthetic oligonucleotide
agacccuggaacccuugag

SEQ ID NO: 2154546 - RNA, 19 nt, Artificial Sequence
  Description of Artificial Sequence: Synthetic oligonucleotide
cucgaagagugcugacacg

SEQ ID NO: 2154547 - RNA, 19 nt, Artificial Sequence
  Description of Artificial Sequence: Synthetic oligonucleotide
uccgcuugucuuugcacca

SEQ ID NO: 2154548 - RNA, 19 nt, Artificial Sequence
  Description of Artificial Sequence: Synthetic oligonucleotide
agccuucuugucacaaccc

SEQ ID NO: 2154549 - RNA, 19 nt, Artificial Sequence
  Description of Artificial Sequence: Synthetic oligonucleotide
cacuuguuauccagacccc

SEQ ID NO: 2154550 - RNA, 19 nt, Artificial Sequence
  Description of Artificial Sequence: Synthetic oligonucleotide
agcaacagacuucuucuua

SEQ ID NO: 2154551 - RNA, 19 nt, Artificial Sequence
  Description of Artificial Sequence: Synthetic oligonucleotide
ugaucccaugauccugagc

SEQ ID NO: 2154552 - RNA, 19 nt, Artificial Sequence
  Description of Artificial Sequence: Synthetic oligonucleotide
uccaagcagaggacaucag

SEQ ID NO: 2154553 - RNA, 19 nt, Artificial Sequence
  Description of Artificial Sequence: Synthetic oligonucleotide
agaaacucgaagagugcug

SEQ ID NO: 2154554 - RNA, 19 nt, Artificial Sequence
  Description of Artificial Sequence: Synthetic oligonucleotide
aacccuugagaacguccca

SEQ ID NO: 2154555 - RNA, 19 nt, Artificial Sequence
  Description of Artificial Sequence: Synthetic oligonucleotide
acaggacuuuguuuccgug

SEQ ID NO: 2154556 - RNA, 19 nt, Artificial Sequence
  Description of Artificial Sequence: Synthetic oligonucleotide
gaacgcacugucccacacc

SEQ ID NO: 2154557 - RNA, 19 nt, Artificial Sequence
  Description of Artificial Sequence: Synthetic oligonucleotide
cacgcacuggccagaacgc

SEQ ID NO: 2154558 - RNA, 19 nt, Artificial Sequence
  Description of Artificial Sequence: Synthetic oligonucleotide
ucugcaguagcugcccacu

SEQ ID NO: 2154559 - RNA, 19 nt, Artificial Sequence
  Description of Artificial Sequence: Synthetic oligonucleotide
aggagcucacgauccuccg

SEQ ID NO: 2154560 - RNA, 19 nt, Artificial Sequence
  Description of Artificial Sequence: Synthetic oligonucleotide
guagcugcccacucucuac

SEQ ID NO: 2154561 - RNA, 19 nt, Artificial Sequence
  Description of Artificial Sequence: Synthetic oligonucleotide
cacucucuacaucccacag

SEQ ID NO: 2154562 - RNA, 19 nt, Artificial Sequence
  Description of Artificial Sequence: Synthetic oligonucleotide
ugcagcgacgccagcgucu

SEQ ID NO: 2154563 - RNA, 19 nt, Artificial Sequence
  Description of Artificial Sequence: Synthetic oligonucleotide
aacgucccagacauugaug

SEQ ID NO: 2154564 - RNA, 19 nt, Artificial Sequence
  Description of Artificial Sequence: Synthetic oligonucleotide
cugugaggagcucacgauc

SEQ ID NO: 2154565 - RNA, 19 nt, Artificial Sequence
  Description of Artificial Sequence: Synthetic oligonucleotide
aggucguagaggcgacacg

SEQ ID NO: 2154566 - RNA, 19 nt, Artificial Sequence
  Description of Artificial Sequence: Synthetic oligonucleotide
aaucaccuuuccauccugu

SEQ ID NO: 2154567 - RNA, 19 nt, Artificial Sequence
  Description of Artificial Sequence: Synthetic oligonucleotide
ucacccaugugcagggcau

SEQ ID NO: 2154568 - RNA, 19 nt, Artificial Sequence
  Description of Artificial Sequence: Synthetic oligonucleotide
auacacggagcacuuguua

SEQ ID NO: 2154569 - RNA, 19 nt, Artificial Sequence
  Description of Artificial Sequence: Synthetic oligonucleotide
uugcaccaguccaugcaca

SEQ ID NO: 2154570 - RNA, 19 nt, Artificial Sequence
  Description of Artificial Sequence: Synthetic oligonucleotide
aagagugcugacacgguuu

SEQ ID NO: 2154571 - RNA, 19 nt, Artificial Sequence
  Description of Artificial Sequence: Synthetic oligonucleotide
uugacgcuccaaauaugau

SEQ ID NO: 2154572 - RNA, 19 nt, Artificial Sequence
  Description of Artificial Sequence: Synthetic oligonucleotide
cacccgcucagccaccugg

SEQ ID NO: 2154573 - RNA, 19 nt, Artificial Sequence
  Description of Artificial Sequence: Synthetic oligonucleotide
acaagcgauggcgcauccc

SEQ ID NO: 2154574 - RNA, 19 nt, Artificial Sequence
  Description of Artificial Sequence: Synthetic oligonucleotide
gaccucucuaucugcccgc

SEQ ID NO: 2154575 - RNA, 19 nt, Artificial Sequence
  Description of Artificial Sequence: Synthetic oligonucleotide
gauggcgaccucucuaucu

SEQ ID NO: 2154576 - RNA, 19 nt, Artificial Sequence
  Description of Artificial Sequence: Synthetic oligonucleotide
cauaagcacacgccaucac

SEQ ID NO: 2154577 - RNA, 19 nt, Artificial Sequence
  Description of Artificial Sequence: Synthetic oligonucleotide
cagcgucucguucucgugc

SEQ ID NO: 2154578 - RNA, 19 nt, Artificial Sequence
  Description of Artificial Sequence: Synthetic oligonucleotide
ucaucugacccggaagcaa

SEQ ID NO: 2154579 - RNA, 19 nt, Artificial Sequence
  Description of Artificial Sequence: Synthetic oligonucleotide
aucccaugauccugagcag

SEQ ID NO: 2154580 - RNA, 19 nt, Artificial Sequence
  Description of Artificial Sequence: Synthetic oligonucleotide
ucucuacaucccacagggc

SEQ ID NO: 2154581 - RNA, 19 nt, Artificial Sequence
  Description of Artificial Sequence: Synthetic oligonucleotide
agauggcgaccucucuauc

SEQ ID NO: 2154582 - RNA, 19 nt, Artificial Sequence
  Description of Artificial Sequence: Synthetic oligonucleotide
uccuccgcuugucuuugca

SEQ ID NO: 2154583 - RNA, 19 nt, Artificial Sequence
  Description of Artificial Sequence: Synthetic oligonucleotide
gagaaacucgaagagugcu

SEQ ID NO: 2154584 - RNA, 19 nt, Artificial Sequence
  Description of Artificial Sequence: Synthetic oligonucleotide
guagaggcgacacguugca

SEQ ID NO: 2154585 - RNA, 19 nt, Artificial Sequence
  Description of Artificial Sequence: Synthetic oligonucleotide
cagacacgaagguguuucc

SEQ ID NO: 2154586 - RNA, 19 nt, Artificial Sequence
  Description of Artificial Sequence: Synthetic oligonucleotide
agcgucucguucucgugca

SEQ ID NO: 2154587 - RNA, 19 nt, Artificial Sequence
  Description of Artificial Sequence: Synthetic oligonucleotide
agagugcugacacgguuuu

SEQ ID NO: 2154588 - RNA, 19 nt, Artificial Sequence
  Description of Artificial Sequence: Synthetic oligonucleotide
ccaagcagaggacaucagc

SEQ ID NO: 2154589 - RNA, 19 nt, Artificial Sequence
  Description of Artificial Sequence: Synthetic oligonucleotide
uguccgaguuggugaagcu

SEQ ID NO: 2154590 - RNA, 19 nt, Artificial Sequence
  Description of Artificial Sequence: Synthetic oligonucleotide
ugacgucggauucgugagu

SEQ ID NO: 2154591 - RNA, 19 nt, Artificial Sequence
  Description of Artificial Sequence: Synthetic oligonucleotide
cacugucccacaccauagc

SEQ ID NO: 2154592 - RNA, 19 nt, Artificial Sequence
  Description of Artificial Sequence: Synthetic oligonucleotide
guagauggcgaccucucua

SEQ ID NO: 2154593 - RNA, 19 nt, Artificial Sequence
  Description of Artificial Sequence: Synthetic oligonucleotide
ccagacauugaugguauag

SEQ ID NO: 2154594 - RNA, 19 nt, Artificial Sequence
  Description of Artificial Sequence: Synthetic oligonucleotide
auacucuccuuggaguaga

SEQ ID NO: 2154595 - RNA, 19 nt, Artificial Sequence
  Description of Artificial Sequence: Synthetic oligonucleotide
ggcgcaugucccaucaccg

SEQ ID NO: 2154596 - RNA, 19 nt, Artificial Sequence
  Description of Artificial Sequence: Synthetic oligonucleotide
agggagaaguccacgcuug

SEQ ID NO: 2154597 - RNA, 19 nt, Artificial Sequence
  Description of Artificial Sequence: Synthetic oligonucleotide
ucugcccgcaggucguaga

SEQ ID NO: 2154598 - RNA, 19 nt, Artificial Sequence
  Description of Artificial Sequence: Synthetic oligonucleotide
ucugcauguccgaguuggu

SEQ ID NO: 2154599 - RNA, 19 nt, Artificial Sequence
  Description of Artificial Sequence: Synthetic oligonucleotide
uguugacgucggauucgug

SEQ ID NO: 2154600 - RNA, 19 nt, Artificial Sequence
  Description of Artificial Sequence: Synthetic oligonucleotide
uccguggccuuugaggguc

SEQ ID NO: 2154601 - RNA, 19 nt, Artificial Sequence
  Description of Artificial Sequence: Synthetic oligonucleotide
gauccuccgcuugucuuug

SEQ ID NO: 2154602 - RNA, 19 nt, Artificial Sequence
  Description of Artificial Sequence: Synthetic oligonucleotide
acgaagguguuuccaguuu

SEQ ID NO: 2154603 - RNA, 19 nt, Artificial Sequence
  Description of Artificial Sequence: Synthetic oligonucleotide
acgcuugacgcuccaaaua

SEQ ID NO: 2154604 - RNA, 19 nt, Artificial Sequence
  Description of Artificial Sequence: Synthetic oligonucleotide
cucugcaguagcugcccac

SEQ ID NO: 2154605 - RNA, 19 nt, Artificial Sequence
  Description of Artificial Sequence: Synthetic oligonucleotide
gacuuuguuuccguggccu

SEQ ID NO: 2154606 - RNA, 19 nt, Artificial Sequence
  Description of Artificial Sequence: Synthetic oligonucleotide
gacgccagcgucucguucu

SEQ ID NO: 2154607 - RNA, 19 nt, Artificial Sequence
  Description of Artificial Sequence: Synthetic oligonucleotide
cucguucucgugcagccca

SEQ ID NO: 2154608 - RNA, 19 nt, Artificial Sequence
  Description of Artificial Sequence: Synthetic oligonucleotide
cuggcggucaggaucugca

SEQ ID NO: 2154609 - RNA, 19 nt, Artificial Sequence
  Description of Artificial Sequence: Synthetic oligonucleotide
gugcauagcaacagacuuc

SEQ ID NO: 2154610 - RNA, 19 nt, Artificial Sequence
  Description of Artificial Sequence: Synthetic oligonucleotide
cccgauggagcauaagcac

SEQ ID NO: 2154611 - RNA, 19 nt, Artificial Sequence
  Description of Artificial Sequence: Synthetic oligonucleotide
agacacgaagguguuucca

SEQ ID NO: 2154612 - RNA, 19 nt, Artificial Sequence
  Description of Artificial Sequence: Synthetic oligonucleotide
uggcgaccucucuaucugc

SEQ ID NO: 2154613 - RNA, 19 nt, Artificial Sequence
  Description of Artificial Sequence: Synthetic oligonucleotide
caccugguguagcuccacg

SEQ ID NO: 2154614 - RNA, 19 nt, Artificial Sequence
  Description of Artificial Sequence: Synthetic oligonucleotide
gaguagauggcgaccucuc

SEQ ID NO: 2154615 - RNA, 19 nt, Artificial Sequence
  Description of Artificial Sequence: Synthetic oligonucleotide
gucccaucgggagaaacuc

SEQ ID NO: 2154616 - RNA, 19 nt, Artificial Sequence
  Description of Artificial Sequence: Synthetic oligonucleotide
gacagguaguuggugugca

SEQ ID NO: 2154617 - RNA, 19 nt, Artificial Sequence
  Description of Artificial Sequence: Synthetic oligonucleotide
ucggauucgugaguuucaa

SEQ ID NO: 2154618 - RNA, 19 nt, Artificial Sequence
  Description of Artificial Sequence: Synthetic oligonucleotide
caucugacccggaagcaaa

SEQ ID NO: 2154619 - RNA, 19 nt, Artificial Sequence
  Description of Artificial Sequence: Synthetic oligonucleotide
uccugagcagaaugcuguc

SEQ ID NO: 2154620 - RNA, 19 nt, Artificial Sequence
  Description of Artificial Sequence: Synthetic oligonucleotide
uagcaacagacuucuucuu

SEQ ID NO: 2154621 - RNA, 19 nt, Artificial Sequence
  Description of Artificial Sequence: Synthetic oligonucleotide
agggcauggugaccgcaug

SEQ ID NO: 2154622 - RNA, 19 nt, Artificial Sequence
  Description of Artificial Sequence: Synthetic oligonucleotide
ugggguaguaucggacacu

SEQ ID NO: 2154623 - RNA, 19 nt, Artificial Sequence
  Description of Artificial Sequence: Synthetic oligonucleotide
acagggcgcaugucccauc

SEQ ID NO: 2154624 - RNA, 19 nt, Artificial Sequence
  Description of Artificial Sequence: Synthetic oligonucleotide
ggagaaacucgaagagugc

SEQ ID NO: 2154625 - RNA, 19 nt, Artificial Sequence
  Description of Artificial Sequence: Synthetic oligonucleotide
caggucguagaggcgacac

SEQ ID NO: 2154626 - RNA, 19 nt, Artificial Sequence
  Description of Artificial Sequence: Synthetic oligonucleotide
uuguuuccguggccuuuga

SEQ ID NO: 2154627 - RNA, 19 nt, Artificial Sequence
  Description of Artificial Sequence: Synthetic oligonucleotide
gggguaguaucggacacug

SEQ ID NO: 2154628 - RNA, 19 nt, Artificial Sequence
  Description of Artificial Sequence: Synthetic oligonucleotide
caggaucugcauguccgag

SEQ ID NO: 2154629 - RNA, 19 nt, Artificial Sequence
  Description of Artificial Sequence: Synthetic oligonucleotide
aguccacgcuugacgcucc

SEQ ID NO: 2154630 - RNA, 19 nt, Artificial Sequence
  Description of Artificial Sequence: Synthetic oligonucleotide
cacgucaugcagcuuugca

SEQ ID NO: 2154631 - RNA, 19 nt, Artificial Sequence
  Description of Artificial Sequence: Synthetic oligonucleotide
gcccgcaggucguagaggc

SEQ ID NO: 2154632 - RNA, 19 nt, Artificial Sequence
  Description of Artificial Sequence: Synthetic oligonucleotide
uggauacacggagcacuug

SEQ ID NO: 2154633 - RNA, 19 nt, Artificial Sequence
  Description of Artificial Sequence: Synthetic oligonucleotide
uggaguagauggcgaccuc

SEQ ID NO: 2154634 - RNA, 19 nt, Artificial Sequence
  Description of Artificial Sequence: Synthetic oligonucleotide
cugcccgcaggucguagag

SEQ ID NO: 2154635 - RNA, 19 nt, Artificial Sequence
  Description of Artificial Sequence: Synthetic oligonucleotide
gaacgucccagacauugau

SEQ ID NO: 2154636 - RNA, 19 nt, Artificial Sequence
  Description of Artificial Sequence: Synthetic oligonucleotide
gaagagugcugacacgguu

SEQ ID NO: 2154637 - RNA, 19 nt, Artificial Sequence
  Description of Artificial Sequence: Synthetic oligonucleotide
acgauccuccgcuugucuu

SEQ ID NO: 2154638 - RNA, 19 nt, Artificial Sequence
  Description of Artificial Sequence: Synthetic oligonucleotide
uuccguggccuuugagggu

SEQ ID NO: 2154639 - RNA, 19 nt, Artificial Sequence
  Description of Artificial Sequence: Synthetic oligonucleotide
gcuugcacgcacuggccag

SEQ ID NO: 2154640 - RNA, 19 nt, Artificial Sequence
  Description of Artificial Sequence: Synthetic oligonucleotide
gauggcgcaucccgaugga

SEQ ID NO: 2154641 - RNA, 19 nt, Artificial Sequence
  Description of Artificial Sequence: Synthetic oligonucleotide
ccagacacgaagguguuuc

SEQ ID NO: 2154642 - RNA, 19 nt, Artificial Sequence
  Description of Artificial Sequence: Synthetic oligonucleotide
agcacacgccaucacccau

SEQ ID NO: 2154643 - RNA, 19 nt, Artificial Sequence
  Description of Artificial Sequence: Synthetic oligonucleotide
agcgaagagcaggcgacca

SEQ ID NO: 2154644 - RNA, 19 nt, Artificial Sequence
  Description of Artificial Sequence: Synthetic oligonucleotide
ggauacacggagcacuugu

SEQ ID NO: 2154645 - RNA, 19 nt, Artificial Sequence
  Description of Artificial Sequence: Synthetic oligonucleotide
aucugacccggaagcaaag

SEQ ID NO: 2154646 - RNA, 19 nt, Artificial Sequence
  Description of Artificial Sequence: Synthetic oligonucleotide
ggugaccgcaugcuccuug

SEQ ID NO: 2154647 - RNA, 19 nt, Artificial Sequence
  Description of Artificial Sequence: Synthetic oligonucleotide
gggcuuuccacccgcucag

SEQ ID NO: 2154648 - RNA, 19 nt, Artificial Sequence
  Description of Artificial Sequence: Synthetic oligonucleotide
cacaagcgauggcgcaucc

SEQ ID NO: 2154649 - RNA, 19 nt, Artificial Sequence
  Description of Artificial Sequence: Synthetic oligonucleotide
acgccaucacccaugugca

SEQ ID NO: 2154650 - RNA, 19 nt, Artificial Sequence
  Description of Artificial Sequence: Synthetic oligonucleotide
agcgacgccagcgucucgu

SEQ ID NO: 2154651 - RNA, 19 nt, Artificial Sequence
  Description of Artificial Sequence: Synthetic oligonucleotide
agggcgcaugucccaucac

SEQ ID NO: 2154652 - RNA, 19 nt, Artificial Sequence
  Description of Artificial Sequence: Synthetic oligonucleotide
agaacgucccagacauuga

SEQ ID NO: 2154653 - RNA, 19 nt, Artificial Sequence
  Description of Artificial Sequence: Synthetic oligonucleotide
gcuuuccacccgcucagcc

SEQ ID NO: 2154654 - RNA, 19 nt, Artificial Sequence
  Description of Artificial Sequence: Synthetic oligonucleotide
cucuuagagugugauccca

SEQ ID NO: 2154655 - RNA, 19 nt, Artificial Sequence
  Description of Artificial Sequence: Synthetic oligonucleotide
acgccagcgucucguucuc

SEQ ID NO: 2154656 - RNA, 19 nt, Artificial Sequence
  Description of Artificial Sequence: Synthetic oligonucleotide
ggcgcaucccgauggagca

SEQ ID NO: 2154657 - RNA, 19 nt, Artificial Sequence
  Description of Artificial Sequence: Synthetic oligonucleotide
auccugugaggagcucacg

SEQ ID NO: 2154658 - RNA, 19 nt, Artificial Sequence
  Description of Artificial Sequence: Synthetic oligonucleotide
aucaccgcuggcggucagg

SEQ ID NO: 2154659 - RNA, 19 nt, Artificial Sequence
  Description of Artificial Sequence: Synthetic oligonucleotide
aagcgauggcgcaucccga

SEQ ID NO: 2154660 - RNA, 19 nt, Artificial Sequence
  Description of Artificial Sequence: Synthetic oligonucleotide
ggacuuuguuuccguggcc

SEQ ID NO: 2154661 - RNA, 19 nt, Artificial Sequence
  Description of Artificial Sequence: Synthetic oligonucleotide
acggagcacuuguuaucca

SEQ ID NO: 2154662 - RNA, 19 nt, Artificial Sequence
  Description of Artificial Sequence: Synthetic oligonucleotide
ugcagggcauggugaccgc

SEQ ID NO: 2154663 - RNA, 19 nt, Artificial Sequence
  Description of Artificial Sequence: Synthetic oligonucleotide
cccacagggcgcauguccc

SEQ ID NO: 2154664 - RNA, 19 nt, Artificial Sequence
  Description of Artificial Sequence: Synthetic oligonucleotide
ccuugagaacgucccagac

SEQ ID NO: 2154665 - RNA, 19 nt, Artificial Sequence
  Description of Artificial Sequence: Synthetic oligonucleotide
gaaguccacgcuugacgcu

SEQ ID NO: 2154666 - RNA, 19 nt, Artificial Sequence
  Description of Artificial Sequence: Synthetic oligonucleotide
gucggauucgugaguuuca

SEQ ID NO: 2154667 - RNA, 19 nt, Artificial Sequence
  Description of Artificial Sequence: Synthetic oligonucleotide
auggcgcaucccgauggag

SEQ ID NO: 2154668 - RNA, 19 nt, Artificial Sequence
  Description of Artificial Sequence: Synthetic oligonucleotide
aguccaugcacaggacuuu

SEQ ID NO: 2154669 - RNA, 19 nt, Artificial Sequence
  Description of Artificial Sequence: Synthetic oligonucleotide
ggcgacacguugcaucauc

SEQ ID NO: 2154670 - RNA, 19 nt, Artificial Sequence
  Description of Artificial Sequence: Synthetic oligonucleotide
cagcgaagagcaggcgacc

SEQ ID NO: 2154671 - RNA, 19 nt, Artificial Sequence
  Description of Artificial Sequence: Synthetic oligonucleotide
cgaccucucuaucugcccg

SEQ ID NO: 2154672 - RNA, 19 nt, Artificial Sequence
  Description of Artificial Sequence: Synthetic oligonucleotide
ucguucucgugcagcccau

SEQ ID NO: 2154673 - RNA, 19 nt, Artificial Sequence
  Description of Artificial Sequence: Synthetic oligonucleotide
agguccaagcagaggacau

SEQ ID NO: 2154674 - RNA, 19 nt, Artificial Sequence
  Description of Artificial Sequence: Synthetic oligonucleotide
cuacaucccacagggcgca

SEQ ID NO: 2154675 - RNA, 19 nt, Artificial Sequence
  Description of Artificial Sequence: Synthetic oligonucleotide
gcauaagcacacgccauca

SEQ ID NO: 2154676 - RNA, 19 nt, Artificial Sequence
  Description of Artificial Sequence: Synthetic oligonucleotide
ugcacgcacuggccagaac

SEQ ID NO: 2154677 - RNA, 19 nt, Artificial Sequence
  Description of Artificial Sequence: Synthetic oligonucleotide
cccaaacucuuagagugug

SEQ ID NO: 2154678 - RNA, 19 nt, Artificial Sequence
  Description of Artificial Sequence: Synthetic oligonucleotide
ccgauggagcauaagcaca

SEQ ID NO: 2154679 - RNA, 19 nt, Artificial Sequence
  Description of Artificial Sequence: Synthetic oligonucleotide
cugcaguagcugcccacuc

SEQ ID NO: 2154680 - RNA, 19 nt, Artificial Sequence
  Description of Artificial Sequence: Synthetic oligonucleotide
ccuuguuagucgugaagga

SEQ ID NO: 2154681 - RNA, 19 nt, Artificial Sequence
  Description of Artificial Sequence: Synthetic oligonucleotide
cacuggccagaacgcacug

SEQ ID NO: 2154682 - RNA, 19 nt, Artificial Sequence
  Description of Artificial Sequence: Synthetic oligonucleotide
gacccggaagcaaaggcau

SEQ ID NO: 2154683 - RNA, 19 nt, Artificial Sequence
  Description of Artificial Sequence: Synthetic oligonucleotide
gccuuugaggguccuucug

SEQ ID NO: 2154684 - RNA, 19 nt, Artificial Sequence
  Description of Artificial Sequence: Synthetic oligonucleotide
ucagccccauggccaugga

SEQ ID NO: 2154685 - RNA, 19 nt, Artificial Sequence
  Description of Artificial Sequence: Synthetic oligonucleotide
cgugaguuucaaaggcuug

SEQ ID NO: 2154686 - RNA, 19 nt, Artificial Sequence
  Description of Artificial Sequence: Synthetic oligonucleotide
ccugagcagaaugcugucc

SEQ ID NO: 2154687 - RNA, 19 nt, Artificial Sequence
  Description of Artificial Sequence: Synthetic oligonucleotide
ggucguagaggcgacacgu

SEQ ID NO: 2154688 - RNA, 19 nt, Artificial Sequence
  Description of Artificial Sequence: Synthetic oligonucleotide
cgaagguguuuccaguuuc

SEQ ID NO: 2154689 - RNA, 19 nt, Artificial Sequence
  Description of Artificial Sequence: Synthetic oligonucleotide
cuccacgucaugcagcuuu

SEQ ID NO: 2154690 - RNA, 19 nt, Artificial Sequence
  Description of Artificial Sequence: Synthetic oligonucleotide
cagggcgcaugucccauca

SEQ ID NO: 2154691 - RNA, 19 nt, Artificial Sequence
  Description of Artificial Sequence: Synthetic oligonucleotide
ggcgaccucucuaucugcc

SEQ ID NO: 2154692 - RNA, 19 nt, Artificial Sequence
  Description of Artificial Sequence: Synthetic oligonucleotide
caucccgauggagcauaag

SEQ ID NO: 2154693 - RNA, 19 nt, Artificial Sequence
  Description of Artificial Sequence: Synthetic oligonucleotide
cuaucugcccgcaggucgu

SEQ ID NO: 2154694 - RNA, 19 nt, Artificial Sequence
  Description of Artificial Sequence: Synthetic oligonucleotide
gcgaccucucuaucugccc

SEQ ID NO: 2154695 - RNA, 19 nt, Artificial Sequence
  Description of Artificial Sequence: Synthetic oligonucleotide
ugcagcccaucgguugcca

SEQ ID NO: 2154696 - RNA, 19 nt, Artificial Sequence
  Description of Artificial Sequence: Synthetic oligonucleotide
aggcagacagguaguuggu

SEQ ID NO: 2154697 - RNA, 19 nt, Artificial Sequence
  Description of Artificial Sequence: Synthetic oligonucleotide
cagguaguuggugugcaua

SEQ ID NO: 2154698 - RNA, 19 nt, Artificial Sequence
  Description of Artificial Sequence: Synthetic oligonucleotide
acccagcgaagagcaggcg

SEQ ID NO: 2154699 - RNA, 19 nt, Artificial Sequence
  Description of Artificial Sequence: Synthetic oligonucleotide
gcuccaaauaugauacucu

SEQ ID NO: 2154700 - RNA, 19 nt, Artificial Sequence
  Description of Artificial Sequence: Synthetic oligonucleotide
gcuugacgcuccaaauaug

SEQ ID NO: 2154701 - RNA, 19 nt, Artificial Sequence
  Description of Artificial Sequence: Synthetic oligonucleotide
gcgcaugucccaucaccgc

SEQ ID NO: 2154702 - RNA, 19 nt, Artificial Sequence
  Description of Artificial Sequence: Synthetic oligonucleotide
cucacgauccuccgcuugu

SEQ ID NO: 2154703 - RNA, 19 nt, Artificial Sequence
  Description of Artificial Sequence: Synthetic oligonucleotide
gagcauaagcacacgccau

SEQ ID NO: 2154704 - RNA, 19 nt, Artificial Sequence
  Description of Artificial Sequence: Synthetic oligonucleotide
cacgguuuucauguccaaa

SEQ ID NO: 2154705 - RNA, 19 nt, Artificial Sequence
  Description of Artificial Sequence: Synthetic oligonucleotide
ugaccgcaugcuccuuguu

SEQ ID NO: 2154706 - RNA, 19 nt, Artificial Sequence
  Description of Artificial Sequence: Synthetic oligonucleotide
cccaucgggagaaacucga

SEQ ID NO: 2154707 - RNA, 19 nt, Artificial Sequence
  Description of Artificial Sequence: Synthetic oligonucleotide
gccauggaagcucugcagu

SEQ ID NO: 2154708 - RNA, 19 nt, Artificial Sequence
  Description of Artificial Sequence: Synthetic oligonucleotide
cgcuccaaauaugauacuc

SEQ ID NO: 2154709 - RNA, 19 nt, Artificial Sequence
  Description of Artificial Sequence: Synthetic oligonucleotide
gacgucggauucgugaguu

SEQ ID NO: 2154710 - RNA, 19 nt, Artificial Sequence
  Description of Artificial Sequence: Synthetic oligonucleotide
gcauguccgaguuggugaa

SEQ ID NO: 2154711 - RNA, 19 nt, Artificial Sequence
  Description of Artificial Sequence: Synthetic oligonucleotide
cauguccaaacaggaugga

SEQ ID NO: 2154712 - RNA, 19 nt, Artificial Sequence
  Description of Artificial Sequence: Synthetic oligonucleotide
ccuccgcuugucuuugcac

SEQ ID NO: 2154713 - RNA, 19 nt, Artificial Sequence
  Description of Artificial Sequence: Synthetic oligonucleotide
acgcacuggccagaacgca

SEQ ID NO: 2154714 - RNA, 19 nt, Artificial Sequence
  Description of Artificial Sequence: Synthetic oligonucleotide
cacaggacuuuguuuccgu

SEQ ID NO: 2154715 - RNA, 19 nt, Artificial Sequence
  Description of Artificial Sequence: Synthetic oligonucleotide
gauacacggagcacuuguu

SEQ ID NO: 2154716 - RNA, 19 nt, Artificial Sequence
  Description of Artificial Sequence: Synthetic oligonucleotide
aucugcccgcaggucguag

SEQ ID NO: 2154717 - RNA, 19 nt, Artificial Sequence
  Description of Artificial Sequence: Synthetic oligonucleotide
uugcacgcacuggccagaa

SEQ ID NO: 2154718 - RNA, 19 nt, Artificial Sequence
  Description of Artificial Sequence: Synthetic oligonucleotide
cgugcagcccaucgguugc

SEQ ID NO: 2154719 - RNA, 19 nt, Artificial Sequence
  Description of Artificial Sequence: Synthetic oligonucleotide
cacgaagguguuuccaguu

SEQ ID NO: 2154720 - RNA, 19 nt, Artificial Sequence
  Description of Artificial Sequence: Synthetic oligonucleotide
gcgaagagcaggcgaccac

SEQ ID NO: 2154721 - RNA, 19 nt, Artificial Sequence
  Description of Artificial Sequence: Synthetic oligonucleotide
uagaggcgacacguugcau

SEQ ID NO: 2154722 - RNA, 19 nt, Artificial Sequence
  Description of Artificial Sequence: Synthetic oligonucleotide
cuugcacgcacuggccaga

SEQ ID NO: 2154723 - RNA, 19 nt, Artificial Sequence
  Description of Artificial Sequence: Synthetic oligonucleotide
cacgcuugacgcuccaaau

SEQ ID NO: 2154724 - RNA, 19 nt, Artificial Sequence
  Description of Artificial Sequence: Synthetic oligonucleotide
acacgccaucacccaugug

SEQ ID NO: 2154725 - RNA, 19 nt, Artificial Sequence
  Description of Artificial Sequence: Synthetic oligonucleotide
gagcagaaugcugucccau

SEQ ID NO: 2154726 - RNA, 19 nt, Artificial Sequence
  Description of Artificial Sequence: Synthetic oligonucleotide
gguccaagcagaggacauc

SEQ ID NO: 2154727 - RNA, 19 nt, Artificial Sequence
  Description of Artificial Sequence: Synthetic oligonucleotide
cacccaugugcagggcaug

SEQ ID NO: 2154728 - RNA, 19 nt, Artificial Sequence
  Description of Artificial Sequence: Synthetic oligonucleotide
gagugcugacacgguuuuc

SEQ ID NO: 2154729 - RNA, 19 nt, Artificial Sequence
  Description of Artificial Sequence: Synthetic oligonucleotide
acgucggauucgugaguuu

SEQ ID NO: 2154730 - RNA, 19 nt, Artificial Sequence
  Description of Artificial Sequence: Synthetic oligonucleotide
ccaaacucuuagaguguga

SEQ ID NO: 2154731 - RNA, 19 nt, Artificial Sequence
  Description of Artificial Sequence: Synthetic oligonucleotide
caucaccgcuggcggucag

SEQ ID NO: 2154732 - RNA, 19 nt, Artificial Sequence
  Description of Artificial Sequence: Synthetic oligonucleotide
cccagcgaagagcaggcga

SEQ ID NO: 2154733 - RNA, 19 nt, Artificial Sequence
  Description of Artificial Sequence: Synthetic oligonucleotide
cccaugauccugagcagaa

SEQ ID NO: 2154734 - RNA, 19 nt, Artificial Sequence
  Description of Artificial Sequence: Synthetic oligonucleotide
caaacaggauggagacccu

SEQ ID NO: 2154735 - RNA, 19 nt, Artificial Sequence
  Description of Artificial Sequence: Synthetic oligonucleotide
gugcagcccaucgguugcc

SEQ ID NO: 2154736 - RNA, 19 nt, Artificial Sequence
  Description of Artificial Sequence: Synthetic oligonucleotide
cauugaugguauagucauu

SEQ ID NO: 2154737 - RNA, 19 nt, Artificial Sequence
  Description of Artificial Sequence: Synthetic oligonucleotide
cgacacguugcaucaucug

SEQ ID NO: 2154738 - RNA, 19 nt, Artificial Sequence
  Description of Artificial Sequence: Synthetic oligonucleotide
ccauggaagcucugcagua

SEQ ID NO: 2154739 - RNA, 19 nt, Artificial Sequence
  Description of Artificial Sequence: Synthetic oligonucleotide
cacacgccaucacccaugu

SEQ ID NO: 2154740 - RNA, 19 nt, Artificial Sequence
  Description of Artificial Sequence: Synthetic oligonucleotide
cgguuuucauguccaaaca

SEQ ID NO: 2154741 - RNA, 19 nt, Artificial Sequence
  Description of Artificial Sequence: Synthetic oligonucleotide
cccuugagaacgucccaga

SEQ ID NO: 2154742 - RNA, 19 nt, Artificial Sequence
  Description of Artificial Sequence: Synthetic oligonucleotide
gcuccuuguuagucgugaa

SEQ ID NO: 2154743 - RNA, 19 nt, Artificial Sequence
  Description of Artificial Sequence: Synthetic oligonucleotide
gcgaccacugagggagaag

SEQ ID NO: 2154744 - RNA, 19 nt, Artificial Sequence
  Description of Artificial Sequence: Synthetic oligonucleotide
cacgauccuccgcuugucu

SEQ ID NO: 2154745 - RNA, 19 nt, Artificial Sequence
  Description of Artificial Sequence: Synthetic oligonucleotide
guggauacacggagcacuu

SEQ ID NO: 2154746 - RNA, 19 nt, Artificial Sequence
  Description of Artificial Sequence: Synthetic oligonucleotide
cgucucguucucgugcagc

SEQ ID NO: 2154747 - RNA, 19 nt, Artificial Sequence
  Description of Artificial Sequence: Synthetic oligonucleotide
ccacgcuugacgcuccaaa

SEQ ID NO: 2154748 - RNA, 19 nt, Artificial Sequence
  Description of Artificial Sequence: Synthetic oligonucleotide
gcuggcggucaggaucugc

SEQ ID NO: 2154749 - RNA, 19 nt, Artificial Sequence
  Description of Artificial Sequence: Synthetic oligonucleotide
cagcgacgccagcgucucg

SEQ ID NO: 2154750 - RNA, 19 nt, Artificial Sequence
  Description of Artificial Sequence: Synthetic oligonucleotide
ccacaagcgauggcgcauc

SEQ ID NO: 2154751 - RNA, 19 nt, Artificial Sequence
  Description of Artificial Sequence: Synthetic oligonucleotide
cagccccauggccauggaa

SEQ ID NO: 2154752 - RNA, 19 nt, Artificial Sequence
  Description of Artificial Sequence: Synthetic oligonucleotide
gcgucucguucucgugcag

SEQ ID NO: 2154753 - RNA, 19 nt, Artificial Sequence
  Description of Artificial Sequence: Synthetic oligonucleotide
guccacgcuugacgcucca

SEQ ID NO: 2154754 - RNA, 19 nt, Artificial Sequence
  Description of Artificial Sequence: Synthetic oligonucleotide
gcagcgacgccagcgucuc

SEQ ID NO: 2154755 - RNA, 19 nt, Artificial Sequence
  Description of Artificial Sequence: Synthetic oligonucleotide
ggcuuuccacccgcucagc

SEQ ID NO: 2154756 - RNA, 19 nt, Artificial Sequence
  Description of Artificial Sequence: Synthetic oligonucleotide
caaacuggcccagggcuuu

SEQ ID NO: 2154757 - RNA, 19 nt, Artificial Sequence
  Description of Artificial Sequence: Synthetic oligonucleotide
cgcacugucccacaccaua

SEQ ID NO: 2154758 - RNA, 19 nt, Artificial Sequence
  Description of Artificial Sequence: Synthetic oligonucleotide
cgcuugacgcuccaaauau

SEQ ID NO: 2154759 - RNA, 19 nt, Artificial Sequence
  Description of Artificial Sequence: Synthetic oligonucleotide
ccgaguuggugaagcugca

SEQ ID NO: 2154760 - RNA, 19 nt, Artificial Sequence
  Description of Artificial Sequence: Synthetic oligonucleotide
ccaucgggagaaacucgaa

SEQ ID NO: 2154761 - RNA, 19 nt, Artificial Sequence
  Description of Artificial Sequence: Synthetic oligonucleotide
aggcgacacguugcaucau

SEQ ID NO: 2154762 - RNA, 19 nt, Artificial Sequence
  Description of Artificial Sequence: Synthetic oligonucleotide
gcgacacguugcaucaucu

SEQ ID NO: 2154763 - RNA, 19 nt, Artificial Sequence
  Description of Artificial Sequence: Synthetic oligonucleotide
ccccacaagcgauggcgca

SEQ ID NO: 2154764 - RNA, 19 nt, Artificial Sequence
  Description of Artificial Sequence: Synthetic oligonucleotide
cucgugcagcccaucgguu

SEQ ID NO: 2154765 - RNA, 19 nt, Artificial Sequence
  Description of Artificial Sequence: Synthetic oligonucleotide
uggugaccgcaugcuccuu

SEQ ID NO: 2154766 - RNA, 19 nt, Artificial Sequence
  Description of Artificial Sequence: Synthetic oligonucleotide
cgcaggucguagaggcgac

SEQ ID NO: 2154767 - RNA, 19 nt, Artificial Sequence
  Description of Artificial Sequence: Synthetic oligonucleotide
cccgcucagccaccuggug

SEQ ID NO: 2154768 - RNA, 19 nt, Artificial Sequence
  Description of Artificial Sequence: Synthetic oligonucleotide
ccguggccuuugagggucc

SEQ ID NO: 2154769 - RNA, 19 nt, Artificial Sequence
  Description of Artificial Sequence: Synthetic oligonucleotide
ccacagggcgcauguccca

SEQ ID NO: 2154770 - RNA, 19 nt, Artificial Sequence
  Description of Artificial Sequence: Synthetic oligonucleotide
gucguagaggcgacacguu

SEQ ID NO: 2154771 - RNA, 19 nt, Artificial Sequence
  Description of Artificial Sequence: Synthetic oligonucleotide
aggcgaccacugagggaga

SEQ ID NO: 2154772 - RNA, 19 nt, Artificial Sequence
  Description of Artificial Sequence: Synthetic oligonucleotide
gcaggucguagaggcgaca

SEQ ID NO: 2154773 - RNA, 19 nt, Artificial Sequence
  Description of Artificial Sequence: Synthetic oligonucleotide
cgaccacugagggagaagu

SEQ ID NO: 2154774 - RNA, 19 nt, Artificial Sequence
  Description of Artificial Sequence: Synthetic oligonucleotide
ggcgaccacugagggagaa

SEQ ID NO: 2154775 - RNA, 19 nt, Artificial Sequence
  Description of Artificial Sequence: Synthetic oligonucleotide
cgcaugucccaucaccgcu

SEQ ID NO: 2154776 - RNA, 19 nt, Artificial Sequence
  Description of Artificial Sequence: Synthetic oligonucleotide
ccgcucagccaccuggugu

SEQ ID NO: 2154777 - RNA, 19 nt, Artificial Sequence
  Description of Artificial Sequence: Synthetic oligonucleotide
cacagggcgcaugucccau

SEQ ID NO: 2154778 - RNA, 19 nt, Artificial Sequence
  Description of Artificial Sequence: Synthetic oligonucleotide
cggauucgugaguuucaaa

SEQ ID NO: 2154779 - RNA, 19 nt, Artificial Sequence
  Description of Artificial Sequence: Synthetic oligonucleotide
gcaucccgauggagcauaa

SEQ ID NO: 2154780 - RNA, 19 nt, Artificial Sequence
  Description of Artificial Sequence: Synthetic oligonucleotide
ggguaguaucggacacugu

SEQ ID NO: 2154781 - RNA, 19 nt, Artificial Sequence
  Description of Artificial Sequence: Synthetic oligonucleotide
gcagcccaucgguugccau

SEQ ID NO: 2154782 - RNA, 19 nt, Artificial Sequence
  Description of Artificial Sequence: Synthetic oligonucleotide
cgauccuccgcuugucuuu

SEQ ID NO: 2154783 - RNA, 19 nt, Artificial Sequence
  Description of Artificial Sequence: Synthetic oligonucleotide
cguucucgugcagcccauc

SEQ ID NO: 2154784 - RNA, 19 nt, Artificial Sequence
  Description of Artificial Sequence: Synthetic oligonucleotide
cccacaagcgauggcgcau

SEQ ID NO: 2154785 - RNA, 19 nt, Artificial Sequence
  Description of Artificial Sequence: Synthetic oligonucleotide
caccgcuggcggucaggau

SEQ ID NO: 2154786 - RNA, 19 nt, Artificial Sequence
  Description of Artificial Sequence: Synthetic oligonucleotide
cccaugugcagggcauggu

SEQ ID NO: 2154787 - RNA, 19 nt, Artificial Sequence
  Description of Artificial Sequence: Synthetic oligonucleotide
ccccagacacgaagguguu

SEQ ID NO: 2154788 - RNA, 19 nt, Artificial Sequence
  Description of Artificial Sequence: Synthetic oligonucleotide
gcgacgccagcgucucguu

SEQ ID NO: 2154789 - RNA, 19 nt, Artificial Sequence
  Description of Artificial Sequence: Synthetic oligonucleotide
gcgcaucccgauggagcau

SEQ ID NO: 2154790 - RNA, 19 nt, Artificial Sequence
  Description of Artificial Sequence: Synthetic oligonucleotide
cccagacacgaagguguuu

SEQ ID NO: 2154791 - RNA, 19 nt, Artificial Sequence
  Description of Artificial Sequence: Synthetic oligonucleotide
aaauucguaauccagacgg

SEQ ID NO: 2154792 - RNA, 19 nt, Artificial Sequence
  Description of Artificial Sequence: Synthetic oligonucleotide
auaucuaguacacugaugg

SEQ ID NO: 2154793 - RNA, 19 nt, Artificial Sequence
  Description of Artificial Sequence: Synthetic oligonucleotide
aaauauugccgcaagaugc

SEQ ID NO: 2154794 - RNA, 19 nt, Artificial Sequence
  Description of Artificial Sequence: Synthetic oligonucleotide
aaguccaggauuuugauug

SEQ ID NO: 2154795 - RNA, 19 nt, Artificial Sequence
  Description of Artificial Sequence: Synthetic oligonucleotide
aagcgugacccuuaaaucc

SEQ ID NO: 2154796 - RNA, 19 nt, Artificial Sequence
  Description of Artificial Sequence: Synthetic oligonucleotide
aauguuagaaugucucuuc

SEQ ID NO: 2154797 - RNA, 19 nt, Artificial Sequence
  Description of Artificial Sequence: Synthetic oligonucleotide
uuuagugaaagacaauuga

SEQ ID NO: 2154798 - RNA, 19 nt, Artificial Sequence
  Description of Artificial Sequence: Synthetic oligonucleotide
aagacaauugauuucuuca

SEQ ID NO: 2154799 - RNA, 19 nt, Artificial Sequence
  Description of Artificial Sequence: Synthetic oligonucleotide
aaaacaagaugcugguaac

SEQ ID NO: 2154800 - RNA, 19 nt, Artificial Sequence
  Description of Artificial Sequence: Synthetic oligonucleotide
aaaauauugccgcaagaug

SEQ ID NO: 2154801 - RNA, 19 nt, Artificial Sequence
  Description of Artificial Sequence: Synthetic oligonucleotide
aaagacaauugauuucuuc

SEQ ID NO: 2154802 - RNA, 19 nt, Artificial Sequence
  Description of Artificial Sequence: Synthetic oligonucleotide
aaagcgugacccuuaaauc

SEQ ID NO: 2154803 - RNA, 19 nt, Artificial Sequence
  Description of Artificial Sequence: Synthetic oligonucleotide
uuagaaugucucuucaggg

SEQ ID NO: 2154804 - RNA, 19 nt, Artificial Sequence
  Description of Artificial Sequence: Synthetic oligonucleotide
augaaaacgguccacggac

SEQ ID NO: 2154805 - RNA, 19 nt, Artificial Sequence
  Description of Artificial Sequence: Synthetic oligonucleotide
gaggcauauagcuuggugg

SEQ ID NO: 2154806 - RNA, 19 nt, Artificial Sequence
  Description of Artificial Sequence: Synthetic oligonucleotide
aauagagucccaucuucac

SEQ ID NO: 2154807 - RNA, 19 nt, Artificial Sequence
  Description of Artificial Sequence: Synthetic oligonucleotide
uucaauaucgagcuuuggc

SEQ ID NO: 2154808 - RNA, 19 nt, Artificial Sequence
  Description of Artificial Sequence: Synthetic oligonucleotide
gacagagugggcuagugcg

SEQ ID NO: 2154809 - RNA, 19 nt, Artificial Sequence
  Description of Artificial Sequence: Synthetic oligonucleotide
ucaauaucgagcuuuggca

SEQ ID NO: 2154810 - RNA, 19 nt, Artificial Sequence
  Description of Artificial Sequence: Synthetic oligonucleotide
guuagaaugucucuucagg

SEQ ID NO: 2154811 - RNA, 19 nt, Artificial Sequence
  Description of Artificial Sequence: Synthetic oligonucleotide
acauuugacucccaucacc

SEQ ID NO: 2154812 - RNA, 19 nt, Artificial Sequence
  Description of Artificial Sequence: Synthetic oligonucleotide
uuuaagagaccugauaucu

SEQ ID NO: 2154813 - RNA, 19 nt, Artificial Sequence
  Description of Artificial Sequence: Synthetic oligonucleotide
aauauugccgcaagaugcc

SEQ ID NO: 2154814 - RNA, 19 nt, Artificial Sequence
  Description of Artificial Sequence: Synthetic oligonucleotide
uaagagaccugauaucuag

SEQ ID NO: 2154815 - RNA, 19 nt, Artificial Sequence
  Description of Artificial Sequence: Synthetic oligonucleotide
ucauccuccuguaaauucg

SEQ ID NO: 2154816 - RNA, 19 nt, Artificial Sequence
  Description of Artificial Sequence: Synthetic oligonucleotide
aggagcaaauguuagaaug

SEQ ID NO: 2154817 - RNA, 19 nt, Artificial Sequence
  Description of Artificial Sequence: Synthetic oligonucleotide
ucugaggucgaaaagcuac

SEQ ID NO: 2154818 - RNA, 19 nt, Artificial Sequence
  Description of Artificial Sequence: Synthetic oligonucleotide
acaauugauuucuucauca

SEQ ID NO: 2154819 - RNA, 19 nt, Artificial Sequence
  Description of Artificial Sequence: Synthetic oligonucleotide
uaaauucguaauccagacg

SEQ ID NO: 2154820 - RNA, 19 nt, Artificial Sequence
  Description of Artificial Sequence: Synthetic oligonucleotide
acugcaugcguccuaauag

SEQ ID NO: 2154821 - RNA, 19 nt, Artificial Sequence
  Description of Artificial Sequence: Synthetic oligonucleotide
ucguaauccagacgggucg

SEQ ID NO: 2154822 - RNA, 19 nt, Artificial Sequence
  Description of Artificial Sequence: Synthetic oligonucleotide
cuuaaaucccaauucucgc

SEQ ID NO: 2154823 - RNA, 19 nt, Artificial Sequence
  Description of Artificial Sequence: Synthetic oligonucleotide
uccgucagaaagcagaccu

SEQ ID NO: 2154824 - RNA, 19 nt, Artificial Sequence
  Description of Artificial Sequence: Synthetic oligonucleotide
uuagugaaagacaauugau

SEQ ID NO: 2154825 - RNA, 19 nt, Artificial Sequence
  Description of Artificial Sequence: Synthetic oligonucleotide
uccuaauagagucccaucu

SEQ ID NO: 2154826 - RNA, 19 nt, Artificial Sequence
  Description of Artificial Sequence: Synthetic oligonucleotide
aggucgaaaagcuacggag

SEQ ID NO: 2154827 - RNA, 19 nt, Artificial Sequence
  Description of Artificial Sequence: Synthetic oligonucleotide
caccuuaccaucuucugcg

SEQ ID NO: 2154828 - RNA, 19 nt, Artificial Sequence
  Description of Artificial Sequence: Synthetic oligonucleotide
gauagaagaagaaugucca

SEQ ID NO: 2154829 - RNA, 19 nt, Artificial Sequence
  Description of Artificial Sequence: Synthetic oligonucleotide
agaggauagaagaagaaug

SEQ ID NO: 2154830 - RNA, 19 nt, Artificial Sequence
  Description of Artificial Sequence: Synthetic oligonucleotide
cauuugacucccaucaccc

SEQ ID NO: 2154831 - RNA, 19 nt, Artificial Sequence
  Description of Artificial Sequence: Synthetic oligonucleotide
ugcuccugaagccacaagc

SEQ ID NO: 2154832 - RNA, 19 nt, Artificial Sequence
  Description of Artificial Sequence: Synthetic oligonucleotide
uuggcaaaaccuuugcaug

SEQ ID NO: 2154833 - RNA, 19 nt, Artificial Sequence
  Description of Artificial Sequence: Synthetic oligonucleotide
caucauucacaugaaaacg

SEQ ID NO: 2154834 - RNA, 19 nt, Artificial Sequence
  Description of Artificial Sequence: Synthetic oligonucleotide
uuaggagcugaccagggga

SEQ ID NO: 2154835 - RNA, 19 nt, Artificial Sequence
  Description of Artificial Sequence: Synthetic oligonucleotide
aucauucacaugaaaacgg

SEQ ID NO: 2154836 - RNA, 19 nt, Artificial Sequence
  Description of Artificial Sequence: Synthetic oligonucleotide
agaccugauaucuaguaca

SEQ ID NO: 2154837 - RNA, 19 nt, Artificial Sequence
  Description of Artificial Sequence: Synthetic oligonucleotide
uguggguguguuuugcagg

SEQ ID NO: 2154838 - RNA, 19 nt, Artificial Sequence
  Description of Artificial Sequence: Synthetic oligonucleotide
guaaauucguaauccagac

SEQ ID NO: 2154839 - RNA, 19 nt, Artificial Sequence
  Description of Artificial Sequence: Synthetic oligonucleotide
ggagaaaacaagaugcugg

SEQ ID NO: 2154840 - RNA, 19 nt, Artificial Sequence
  Description of Artificial Sequence: Synthetic oligonucleotide
uuuuguaacucaagagcca

SEQ ID NO: 2154841 - RNA, 19 nt, Artificial Sequence
  Description of Artificial Sequence: Synthetic oligonucleotide
uuaaaucccaauucucgcu

SEQ ID NO: 2154842 - RNA, 19 nt, Artificial Sequence
  Description of Artificial Sequence: Synthetic oligonucleotide
caugcguccuaauagaguc

SEQ ID NO: 2154843 - RNA, 19 nt, Artificial Sequence
  Description of Artificial Sequence: Synthetic oligonucleotide
ucuucugcgccacagcuga

SEQ ID NO: 2154844 - RNA, 19 nt, Artificial Sequence
  Description of Artificial Sequence: Synthetic oligonucleotide
ucgagcuuuggcaaaaccu

SEQ ID NO: 2154845 - RNA, 19 nt, Artificial Sequence
  Description of Artificial Sequence: Synthetic oligonucleotide
uccuguaaauucguaaucc

SEQ ID NO: 2154846 - RNA, 19 nt, Artificial Sequence
  Description of Artificial Sequence: Synthetic oligonucleotide
uuuaggagcugaccagggg

SEQ ID NO: 2154847 - RNA, 19 nt, Artificial Sequence
  Description of Artificial Sequence: Synthetic oligonucleotide
ucuaguacacugaugguuu

SEQ ID NO: 2154848 - RNA, 19 nt, Artificial Sequence
  Description of Artificial Sequence: Synthetic oligonucleotide
uaauagagucccaucuuca

SEQ ID NO: 2154849 - RNA, 19 nt, Artificial Sequence
  Description of Artificial Sequence: Synthetic oligonucleotide
uguuuugcaggacucuucu

SEQ ID NO: 2154850 - RNA, 19 nt, Artificial Sequence
  Description of Artificial Sequence: Synthetic oligonucleotide
cuguaaauucguaauccag

SEQ ID NO: 2154851 - RNA, 19 nt, Artificial Sequence
  Description of Artificial Sequence: Synthetic oligonucleotide
uguuagaaugucucuucag

SEQ ID NO: 2154852 - RNA, 19 nt, Artificial Sequence
  Description of Artificial Sequence: Synthetic oligonucleotide
cuuugcaugcuccuccucg

SEQ ID NO: 2154853 - RNA, 19 nt, Artificial Sequence
  Description of Artificial Sequence: Synthetic oligonucleotide
uucaccccaagccacaaga

SEQ ID NO: 2154854 - RNA, 19 nt, Artificial Sequence
  Description of Artificial Sequence: Synthetic oligonucleotide
aauucucgcucacauuuga

SEQ ID NO: 2154855 - RNA, 19 nt, Artificial Sequence
  Description of Artificial Sequence: Synthetic oligonucleotide
uauccaggccacaugacac

SEQ ID NO: 2154856 - RNA, 19 nt, Artificial Sequence
  Description of Artificial Sequence: Synthetic oligonucleotide
uuccacaaccuuaucuucc

SEQ ID NO: 2154857 - RNA, 19 nt, Artificial Sequence
  Description of Artificial Sequence: Synthetic oligonucleotide
acaugaaaacgguccacgg

SEQ ID NO: 2154858 - RNA, 19 nt, Artificial Sequence
  Description of Artificial Sequence: Synthetic oligonucleotide
uagaaugucucuucaggga

SEQ ID NO: 2154859 - RNA, 19 nt, Artificial Sequence
  Description of Artificial Sequence: Synthetic oligonucleotide
uguucaauaucgagcuuug

SEQ ID NO: 2154860 - RNA, 19 nt, Artificial Sequence
  Description of Artificial Sequence: Synthetic oligonucleotide
ugacaccaggcucugaggc

SEQ ID NO: 2154861 - RNA, 19 nt, Artificial Sequence
  Description of Artificial Sequence: Synthetic oligonucleotide
ucauucacaugaaaacggu

SEQ ID NO: 2154862 - RNA, 19 nt, Artificial Sequence
  Description of Artificial Sequence: Synthetic oligonucleotide
aaucccaauucucgcucac

SEQ ID NO: 2154863 - RNA, 19 nt, Artificial Sequence
  Description of Artificial Sequence: Synthetic oligonucleotide
augccacugagacagagug

SEQ ID NO: 2154864 - RNA, 19 nt, Artificial Sequence
  Description of Artificial Sequence: Synthetic oligonucleotide
gaagaugcgcaccuuacca

SEQ ID NO: 2154865 - RNA, 19 nt, Artificial Sequence
  Description of Artificial Sequence: Synthetic oligonucleotide
ccuuaaaucccaauucucg

SEQ ID NO: 2154866 - RNA, 19 nt, Artificial Sequence
  Description of Artificial Sequence: Synthetic oligonucleotide
caucauucccuccaguaag

SEQ ID NO: 2154867 - RNA, 19 nt, Artificial Sequence
  Description of Artificial Sequence: Synthetic oligonucleotide
aucgagcuuuggcaaaacc

SEQ ID NO: 2154868 - RNA, 19 nt, Artificial Sequence
  Description of Artificial Sequence: Synthetic oligonucleotide
uaaaucccaauucucgcuc

SEQ ID NO: 2154869 - RNA, 19 nt, Artificial Sequence
  Description of Artificial Sequence: Synthetic oligonucleotide
uugaagacuccacagcauc

SEQ ID NO: 2154870 - RNA, 19 nt, Artificial Sequence
  Description of Artificial Sequence: Synthetic oligonucleotide
cauuucacugcucacguuc

SEQ ID NO: 2154871 - RNA, 19 nt, Artificial Sequence
  Description of Artificial Sequence: Synthetic oligonucleotide
aaagcuacggaggagcaaa

SEQ ID NO: 2154872 - RNA, 19 nt, Artificial Sequence
  Description of Artificial Sequence: Synthetic oligonucleotide
ugauaucuaguacacugau

SEQ ID NO: 2154873 - RNA, 19 nt, Artificial Sequence
  Description of Artificial Sequence: Synthetic oligonucleotide
aaauguuagaaugucucuu

SEQ ID NO: 2154874 - RNA, 19 nt, Artificial Sequence
  Description of Artificial Sequence: Synthetic oligonucleotide
uccauuucacugcucacgu

SEQ ID NO: 2154875 - RNA, 19 nt, Artificial Sequence
  Description of Artificial Sequence: Synthetic oligonucleotide
ugaugguuucuccauggga

SEQ ID NO: 2154876 - RNA, 19 nt, Artificial Sequence
  Description of Artificial Sequence: Synthetic oligonucleotide
aauaucgagcuuuggcaaa

SEQ ID NO: 2154877 - RNA, 19 nt, Artificial Sequence
  Description of Artificial Sequence: Synthetic oligonucleotide
gacccuuaaaucccaauuc

SEQ ID NO: 2154878 - RNA, 19 nt, Artificial Sequence
  Description of Artificial Sequence: Synthetic oligonucleotide
gguacuagagucccuaccc

SEQ ID NO: 2154879 - RNA, 19 nt, Artificial Sequence
  Description of Artificial Sequence: Synthetic oligonucleotide
ggauagaagaagaaugucc

SEQ ID NO: 2154880 - RNA, 19 nt, Artificial Sequence
  Description of Artificial Sequence: Synthetic oligonucleotide
uccaggauuuugauugccc

SEQ ID NO: 2154881 - RNA, 19 nt, Artificial Sequence
  Description of Artificial Sequence: Synthetic oligonucleotide
cuuuaagagaccugauauc

SEQ ID NO: 2154882 - RNA, 19 nt, Artificial Sequence
  Description of Artificial Sequence: Synthetic oligonucleotide
cacggacucuuuaagagac

SEQ ID NO: 2154883 - RNA, 19 nt, Artificial Sequence
  Description of Artificial Sequence: Synthetic oligonucleotide
uagugcgggguuuaggagc

SEQ ID NO: 2154884 - RNA, 19 nt, Artificial Sequence
  Description of Artificial Sequence: Synthetic oligonucleotide
ugguaacaucaucagcucc

SEQ ID NO: 2154885 - RNA, 19 nt, Artificial Sequence
  Description of Artificial Sequence: Synthetic oligonucleotide
auuuagugaaagacaauug

SEQ ID NO: 2154886 - RNA, 19 nt, Artificial Sequence
  Description of Artificial Sequence: Synthetic oligonucleotide
agaaugucucuucagggau

SEQ ID NO: 2154887 - RNA, 19 nt, Artificial Sequence
  Description of Artificial Sequence: Synthetic oligonucleotide
auauccaggccacaugaca

SEQ ID NO: 2154888 - RNA, 19 nt, Artificial Sequence
  Description of Artificial Sequence: Synthetic oligonucleotide
aauucguaauccagacggg

SEQ ID NO: 2154889 - RNA, 19 nt, Artificial Sequence
  Description of Artificial Sequence: Synthetic oligonucleotide
gacaauugauuucuucauc

SEQ ID NO: 2154890 - RNA, 19 nt, Artificial Sequence
  Description of Artificial Sequence: Synthetic oligonucleotide
acuagagucccuacccugc

SEQ ID NO: 2154891 - RNA, 19 nt, Artificial Sequence
  Description of Artificial Sequence: Synthetic oligonucleotide
ucuucagggaucugguaac

SEQ ID NO: 2154892 - RNA, 19 nt, Artificial Sequence
  Description of Artificial Sequence: Synthetic oligonucleotide
aauccagacgggucgggcu

SEQ ID NO: 2154893 - RNA, 19 nt, Artificial Sequence
  Description of Artificial Sequence: Synthetic oligonucleotide
agacaauugauuucuucau

SEQ ID NO: 2154894 - RNA, 19 nt, Artificial Sequence
  Description of Artificial Sequence: Synthetic oligonucleotide
aguccaggauuuugauugc

SEQ ID NO: 2154895 - RNA, 19 nt, Artificial Sequence
  Description of Artificial Sequence: Synthetic oligonucleotide
cuuccaacugcaugcgucc

SEQ ID NO: 2154896 - RNA, 19 nt, Artificial Sequence
  Description of Artificial Sequence: Synthetic oligonucleotide
ugacccuuaaaucccaauu

SEQ ID NO: 2154897 - RNA, 19 nt, Artificial Sequence
  Description of Artificial Sequence: Synthetic oligonucleotide
uccacaaccuuaucuuccc

SEQ ID NO: 2154898 - RNA, 19 nt, Artificial Sequence
  Description of Artificial Sequence: Synthetic oligonucleotide
aguuucauuuagugaaaga

SEQ ID NO: 2154899 - RNA, 19 nt, Artificial Sequence
  Description of Artificial Sequence: Synthetic oligonucleotide
gaagaauguccaccagucc

SEQ ID NO: 2154900 - RNA, 19 nt, Artificial Sequence
  Description of Artificial Sequence: Synthetic oligonucleotide
auuucacugcucacguucc

SEQ ID NO: 2154901 - RNA, 19 nt, Artificial Sequence
  Description of Artificial Sequence: Synthetic oligonucleotide
acccuuaaaucccaauucu

SEQ ID NO: 2154902 - RNA, 19 nt, Artificial Sequence
  Description of Artificial Sequence: Synthetic oligonucleotide
aaaucccaauucucgcuca

SEQ ID NO: 2154903 - RNA, 19 nt, Artificial Sequence
  Description of Artificial Sequence: Synthetic oligonucleotide
cacaugaaaacgguccacg

SEQ ID NO: 2154904 - RNA, 19 nt, Artificial Sequence
  Description of Artificial Sequence: Synthetic oligonucleotide
ugguacuagagucccuacc

SEQ ID NO: 2154905 - RNA, 19 nt, Artificial Sequence
  Description of Artificial Sequence: Synthetic oligonucleotide
agcgugacccuuaaauccc

SEQ ID NO: 2154906 - RNA, 19 nt, Artificial Sequence
  Description of Artificial Sequence: Synthetic oligonucleotide
aggauagaagaagaauguc

SEQ ID NO: 2154907 - RNA, 19 nt, Artificial Sequence
  Description of Artificial Sequence: Synthetic oligonucleotide
cugcucacguuccacaacc

SEQ ID NO: 2154908 - RNA, 19 nt, Artificial Sequence
  Description of Artificial Sequence: Synthetic oligonucleotide
ugcugguaacaucaucagc

SEQ ID NO: 2154909 - RNA, 19 nt, Artificial Sequence
  Description of Artificial Sequence: Synthetic oligonucleotide
ugggacuccgucagaaagc

SEQ ID NO: 2154910 - RNA, 19 nt, Artificial Sequence
  Description of Artificial Sequence: Synthetic oligonucleotide
uacuagagucccuacccug

SEQ ID NO: 2154911 - RNA, 19 nt, Artificial Sequence
  Description of Artificial Sequence: Synthetic oligonucleotide
aaacaagaugcugguaaca

SEQ ID NO: 2154912 - RNA, 19 nt, Artificial Sequence
  Description of Artificial Sequence: Synthetic oligonucleotide
uucguaauccagacggguc

SEQ ID NO: 2154913 - RNA, 19 nt, Artificial Sequence
  Description of Artificial Sequence: Synthetic oligonucleotide
uuugaagacuccacagcau

SEQ ID NO: 2154914 - RNA, 19 nt, Artificial Sequence
  Description of Artificial Sequence: Synthetic oligonucleotide
gagaccugauaucuaguac

SEQ ID NO: 2154915 - RNA, 19 nt, Artificial Sequence
  Description of Artificial Sequence: Synthetic oligonucleotide
acguuccacaaccuuaucu

SEQ ID NO: 2154916 - RNA, 19 nt, Artificial Sequence
  Description of Artificial Sequence: Synthetic oligonucleotide
ugaggucgaaaagcuacgg

SEQ ID NO: 2154917 - RNA, 19 nt, Artificial Sequence
  Description of Artificial Sequence: Synthetic oligonucleotide
ugcauauccaggccacaug

SEQ ID NO: 2154918 - RNA, 19 nt, Artificial Sequence
  Description of Artificial Sequence: Synthetic oligonucleotide
ucaguuucauuuagugaaa

SEQ ID NO: 2154919 - RNA, 19 nt, Artificial Sequence
  Description of Artificial Sequence: Synthetic oligonucleotide
aggauuuugauugccccag

SEQ ID NO: 2154920 - RNA, 19 nt, Artificial Sequence
  Description of Artificial Sequence: Synthetic oligonucleotide
cuucuuuuccaaguccagg

SEQ ID NO: 2154921 - RNA, 19 nt, Artificial Sequence
  Description of Artificial Sequence: Synthetic oligonucleotide
aguacacugaugguuucuc

SEQ ID NO: 2154922 - RNA, 19 nt, Artificial Sequence
  Description of Artificial Sequence: Synthetic oligonucleotide
uugacucccaucacccuga

SEQ ID NO: 2154923 - RNA, 19 nt, Artificial Sequence
  Description of Artificial Sequence: Synthetic oligonucleotide
cugaggucgaaaagcuacg

SEQ ID NO: 2154924 - RNA, 19 nt, Artificial Sequence
  Description of Artificial Sequence: Synthetic oligonucleotide
ugcuccugugguacuagag

SEQ ID NO: 2154925 - RNA, 19 nt, Artificial Sequence
  Description of Artificial Sequence: Synthetic oligonucleotide
agagucccuacccugcuug

SEQ ID NO: 2154926 - RNA, 19 nt, Artificial Sequence
  Description of Artificial Sequence: Synthetic oligonucleotide
ugcaggacucuucuguuuc

SEQ ID NO: 2154927 - RNA, 19 nt, Artificial Sequence
  Description of Artificial Sequence: Synthetic oligonucleotide
cuccauuucacugcucacg

SEQ ID NO: 2154928 - RNA, 19 nt, Artificial Sequence
  Description of Artificial Sequence: Synthetic oligonucleotide
aagaugcgcaccuuaccau

SEQ ID NO: 2154929 - RNA, 19 nt, Artificial Sequence
  Description of Artificial Sequence: Synthetic oligonucleotide
gucuuuacuugcauucagg

SEQ ID NO: 2154930 - RNA, 19 nt, Artificial Sequence
  Description of Artificial Sequence: Synthetic oligonucleotide
aaccuuaucuucccaucau

SEQ ID NO: 2154931 - RNA, 19 nt, Artificial Sequence
  Description of Artificial Sequence: Synthetic oligonucleotide
ugaaaacgguccacggacu

SEQ ID NO: 2154932 - RNA, 19 nt, Artificial Sequence
  Description of Artificial Sequence: Synthetic oligonucleotide
uccuccuguaaauucguaa

SEQ ID NO: 2154933 - RNA, 19 nt, Artificial Sequence
  Description of Artificial Sequence: Synthetic oligonucleotide
auguuagaaugucucuuca

SEQ ID NO: 2154934 - RNA, 19 nt, Artificial Sequence
  Description of Artificial Sequence: Synthetic oligonucleotide
aucauucccuccaguaagc

SEQ ID NO: 2154935 - RNA, 19 nt, Artificial Sequence
  Description of Artificial Sequence: Synthetic oligonucleotide
ucacguuccacaaccuuau

SEQ ID NO: 2154936 - RNA, 19 nt, Artificial Sequence
  Description of Artificial Sequence: Synthetic oligonucleotide
uguaacucaagagccaguu

SEQ ID NO: 2154937 - RNA, 19 nt, Artificial Sequence
  Description of Artificial Sequence: Synthetic oligonucleotide
uuaagagaccugauaucua

SEQ ID NO: 2154938 - RNA, 19 nt, Artificial Sequence
  Description of Artificial Sequence: Synthetic oligonucleotide
ugcguccuaauagaguccc

SEQ ID NO: 2154939 - RNA, 19 nt, Artificial Sequence
  Description of Artificial Sequence: Synthetic oligonucleotide
cuccugugguacuagaguc

SEQ ID NO: 2154940 - RNA, 19 nt, Artificial Sequence
  Description of Artificial Sequence: Synthetic oligonucleotide
ucaccugcauauccaggcc

SEQ ID NO: 2154941 - RNA, 19 nt, Artificial Sequence
  Description of Artificial Sequence: Synthetic oligonucleotide
uauugccgcaagaugccac

SEQ ID NO: 2154942 - RNA, 19 nt, Artificial Sequence
  Description of Artificial Sequence: Synthetic oligonucleotide
cauucacaugaaaacgguc

SEQ ID NO: 2154943 - RNA, 19 nt, Artificial Sequence
  Description of Artificial Sequence: Synthetic oligonucleotide
ucauuuagugaaagacaau

SEQ ID NO: 2154944 - RNA, 19 nt, Artificial Sequence
  Description of Artificial Sequence: Synthetic oligonucleotide
cugaagaugcgcaccuuac

SEQ ID NO: 2154945 - RNA, 19 nt, Artificial Sequence
  Description of Artificial Sequence: Synthetic oligonucleotide
cucgcucacauuugacucc

SEQ ID NO: 2154946 - RNA, 19 nt, Artificial Sequence
  Description of Artificial Sequence: Synthetic oligonucleotide
agagaccugauaucuagua

SEQ ID NO: 2154947 - RNA, 19 nt, Artificial Sequence
  Description of Artificial Sequence: Synthetic oligonucleotide
cuuaccaucuucugcgcca

SEQ ID NO: 2154948 - RNA, 19 nt, Artificial Sequence
  Description of Artificial Sequence: Synthetic oligonucleotide
uccaccaguccacuugacu

SEQ ID NO: 2154949 - RNA, 19 nt, Artificial Sequence
  Description of Artificial Sequence: Synthetic oligonucleotide
aguaagcagcagaugggac

SEQ ID NO: 2154950 - RNA, 19 nt, Artificial Sequence
  Description of Artificial Sequence: Synthetic oligonucleotide
uaucuaguacacugauggu

SEQ ID NO: 2154951 - RNA, 19 nt, Artificial Sequence
  Description of Artificial Sequence: Synthetic oligonucleotide
gaaaacgguccacggacuc

SEQ ID NO: 2154952 - RNA, 19 nt, Artificial Sequence
  Description of Artificial Sequence: Synthetic oligonucleotide
ugcgccacagcugaaaaua

SEQ ID NO: 2154953 - RNA, 19 nt, Artificial Sequence
  Description of Artificial Sequence: Synthetic oligonucleotide
gucgaaaagcuacggagga

SEQ ID NO: 2154954 - RNA, 19 nt, Artificial Sequence
  Description of Artificial Sequence: Synthetic oligonucleotide
cuccguguucaauaucgag

SEQ ID NO: 2154955 - RNA, 19 nt, Artificial Sequence
  Description of Artificial Sequence: Synthetic oligonucleotide
aucuaguacacugaugguu

SEQ ID NO: 2154956 - RNA, 19 nt, Artificial Sequence
  Description of Artificial Sequence: Synthetic oligonucleotide
acaagcccgucuuuacuug

SEQ ID NO: 2154957 - RNA, 19 nt, Artificial Sequence
  Description of Artificial Sequence: Synthetic oligonucleotide
auugccgcaagaugccacu

SEQ ID NO: 2154958 - RNA, 19 nt, Artificial Sequence
  Description of Artificial Sequence: Synthetic oligonucleotide
guuuaggagcugaccaggg

SEQ ID NO: 2154959 - RNA, 19 nt, Artificial Sequence
  Description of Artificial Sequence: Synthetic oligonucleotide
cacccucugcuccugaagc

SEQ ID NO: 2154960 - RNA, 19 nt, Artificial Sequence
  Description of Artificial Sequence: Synthetic oligonucleotide
gucccuacccugcuugggg

SEQ ID NO: 2154961 - RNA, 19 nt, Artificial Sequence
  Description of Artificial Sequence: Synthetic oligonucleotide
aaaacgguccacggacucu

SEQ ID NO: 2154962 - RNA, 19 nt, Artificial Sequence
  Description of Artificial Sequence: Synthetic oligonucleotide
gauugccccagagucauca

SEQ ID NO: 2154963 - RNA, 19 nt, Artificial Sequence
  Description of Artificial Sequence: Synthetic oligonucleotide
caauaucgagcuuuggcaa

SEQ ID NO: 2154964 - RNA, 19 nt, Artificial Sequence
  Description of Artificial Sequence: Synthetic oligonucleotide
cuagugcgggguuuaggag

SEQ ID NO: 2154965 - RNA, 19 nt, Artificial Sequence
  Description of Artificial Sequence: Synthetic oligonucleotide
ugugguacuagagucccua

SEQ ID NO: 2154966 - RNA, 19 nt, Artificial Sequence
  Description of Artificial Sequence: Synthetic oligonucleotide
auucguaauccagacgggu

SEQ ID NO: 2154967 - RNA, 19 nt, Artificial Sequence
  Description of Artificial Sequence: Synthetic oligonucleotide
cagggaucugguaacuuuc

SEQ ID NO: 2154968 - RNA, 19 nt, Artificial Sequence
  Description of Artificial Sequence: Synthetic oligonucleotide
cugaugguuucuccauggg

SEQ ID NO: 2154969 - RNA, 19 nt, Artificial Sequence
  Description of Artificial Sequence: Synthetic oligonucleotide
gaggauagaagaagaaugu

SEQ ID NO: 2154970 - RNA, 19 nt, Artificial Sequence
  Description of Artificial Sequence: Synthetic oligonucleotide
ucgaaaagcuacggaggag

SEQ ID NO: 2154971 - RNA, 19 nt, Artificial Sequence
  Description of Artificial Sequence: Synthetic oligonucleotide
gagcaaauguuagaauguc

SEQ ID NO: 2154972 - RNA, 19 nt, Artificial Sequence
  Description of Artificial Sequence: Synthetic oligonucleotide
gguuuaggagcugaccagg

SEQ ID NO: 2154973 - RNA, 19 nt, Artificial Sequence
  Description of Artificial Sequence: Synthetic oligonucleotide
gaccugauaucuaguacac

SEQ ID NO: 2154974 - RNA, 19 nt, Artificial Sequence
  Description of Artificial Sequence: Synthetic oligonucleotide
cuccuguaaauucguaauc

SEQ ID NO: 2154975 - RNA, 19 nt, Artificial Sequence
  Description of Artificial Sequence: Synthetic oligonucleotide
guacacugaugguuucucc

SEQ ID NO: 2154976 - RNA, 19 nt, Artificial Sequence
  Description of Artificial Sequence: Synthetic oligonucleotide
acuccgucagaaagcagac

SEQ ID NO: 2154977 - RNA, 19 nt, Artificial Sequence
  Description of Artificial Sequence: Synthetic oligonucleotide
caagaucuccacccucugc

SEQ ID NO: 2154978 - RNA, 19 nt, Artificial Sequence
  Description of Artificial Sequence: Synthetic oligonucleotide
caugaaaacgguccacgga

SEQ ID NO: 2154979 - RNA, 19 nt, Artificial Sequence
  Description of Artificial Sequence: Synthetic oligonucleotide
caauucucgcucacauuug

SEQ ID NO: 2154980 - RNA, 19 nt, Artificial Sequence
  Description of Artificial Sequence: Synthetic oligonucleotide
caaagcgugacccuuaaau

SEQ ID NO: 2154981 - RNA, 19 nt, Artificial Sequence
  Description of Artificial Sequence: Synthetic oligonucleotide
ucuccguguucaauaucga

SEQ ID NO: 2154982 - RNA, 19 nt, Artificial Sequence
  Description of Artificial Sequence: Synthetic oligonucleotide
caguuucauuuagugaaag

SEQ ID NO: 2154983 - RNA, 19 nt, Artificial Sequence
  Description of Artificial Sequence: Synthetic oligonucleotide
acacugaugguuucuccau

SEQ ID NO: 2154984 - RNA, 19 nt, Artificial Sequence
  Description of Artificial Sequence: Synthetic oligonucleotide
guaagcagcagaugggacu

SEQ ID NO: 2154985 - RNA, 19 nt, Artificial Sequence
  Description of Artificial Sequence: Synthetic oligonucleotide
acaagaucuccacccucug

SEQ ID NO: 2154986 - RNA, 19 nt, Artificial Sequence
  Description of Artificial Sequence: Synthetic oligonucleotide
gaggucgaaaagcuacgga

SEQ ID NO: 2154987 - RNA, 19 nt, Artificial Sequence
  Description of Artificial Sequence: Synthetic oligonucleotide
cauauccaggccacaugac

SEQ ID NO: 2154988 - RNA, 19 nt, Artificial Sequence
  Description of Artificial Sequence: Synthetic oligonucleotide
auucucgcucacauuugac

SEQ ID NO: 2154989 - RNA, 19 nt, Artificial Sequence
  Description of Artificial Sequence: Synthetic oligonucleotide
caagcccgucuuuacuugc

SEQ ID NO: 2154990 - RNA, 19 nt, Artificial Sequence
  Description of Artificial Sequence: Synthetic oligonucleotide
auuugacucccaucacccu

SEQ ID NO: 2154991 - RNA, 19 nt, Artificial Sequence
  Description of Artificial Sequence: Synthetic oligonucleotide
uucuccaugggaggcauau

SEQ ID NO: 2154992 - RNA, 19 nt, Artificial Sequence
  Description of Artificial Sequence: Synthetic oligonucleotide
ucuccauuucacugcucac

SEQ ID NO: 2154993 - RNA, 19 nt, Artificial Sequence
  Description of Artificial Sequence: Synthetic oligonucleotide
uuucuccguguucaauauc

SEQ ID NO: 2154994 - RNA, 19 nt, Artificial Sequence
  Description of Artificial Sequence: Synthetic oligonucleotide
ucgucugcuccugugguac

SEQ ID NO: 2154995 - RNA, 19 nt, Artificial Sequence
  Description of Artificial Sequence: Synthetic oligonucleotide
gagucccuacccugcuugg

SEQ ID NO: 2154996 - RNA, 19 nt, Artificial Sequence
  Description of Artificial Sequence: Synthetic oligonucleotide
aagagaccugauaucuagu

SEQ ID NO: 2154997 - RNA, 19 nt, Artificial Sequence
  Description of Artificial Sequence: Synthetic oligonucleotide
aauguccaccaguccacuu

SEQ ID NO: 2154998 - RNA, 19 nt, Artificial Sequence
  Description of Artificial Sequence: Synthetic oligonucleotide
agaugccacugagacagag

SEQ ID NO: 2154999 - RNA, 19 nt, Artificial Sequence
  Description of Artificial Sequence: Synthetic oligonucleotide
ucacccugaagaugcgcac

SEQ ID NO: 2155000 - RNA, 19 nt, Artificial Sequence
  Description of Artificial Sequence: Synthetic oligonucleotide
ucgcucacauuugacuccc

SEQ ID NO: 2155001 - RNA, 19 nt, Artificial Sequence
  Description of Artificial Sequence: Synthetic oligonucleotide
guucaauaucgagcuuugg

SEQ ID NO: 2155002 - RNA, 19 nt, Artificial Sequence
  Description of Artificial Sequence: Synthetic oligonucleotide
ccuuaucuucccaucauuc

SEQ ID NO: 2155003 - RNA, 19 nt, Artificial Sequence
  Description of Artificial Sequence: Synthetic oligonucleotide
accugcauauccaggccac

SEQ ID NO: 2155004 - RNA, 19 nt, Artificial Sequence
  Description of Artificial Sequence: Synthetic oligonucleotide
acagagugggcuagugcgg

SEQ ID NO: 2155005 - RNA, 19 nt, Artificial Sequence
  Description of Artificial Sequence: Synthetic oligonucleotide
ucccuacccugcuuggggc

SEQ ID NO: 2155006 - RNA, 19 nt, Artificial Sequence
  Description of Artificial Sequence: Synthetic oligonucleotide
augcguccuaauagagucc

SEQ ID NO: 2155007 - RNA, 19 nt, Artificial Sequence
  Description of Artificial Sequence: Synthetic oligonucleotide
caaccuuaucuucccauca

SEQ ID NO: 2155008 - RNA, 19 nt, Artificial Sequence
  Description of Artificial Sequence: Synthetic oligonucleotide
ggguuuaggagcugaccag

SEQ ID NO: 2155009 - RNA, 19 nt, Artificial Sequence
  Description of Artificial Sequence: Synthetic oligonucleotide
gcuagugcgggguuuagga

SEQ ID NO: 2155010 - RNA, 19 nt, Artificial Sequence
  Description of Artificial Sequence: Synthetic oligonucleotide
guggguguguuuugcagga

SEQ ID NO: 2155011 - RNA, 19 nt, Artificial Sequence
  Description of Artificial Sequence: Synthetic oligonucleotide
ugccgcaagaugccacuga

SEQ ID NO: 2155012 - RNA, 19 nt, Artificial Sequence
  Description of Artificial Sequence: Synthetic oligonucleotide
caaauguuagaaugucucu

SEQ ID NO: 2155013 - RNA, 19 nt, Artificial Sequence
  Description of Artificial Sequence: Synthetic oligonucleotide
cuaguacacugaugguuuc

SEQ ID NO: 2155014 - RNA, 19 nt, Artificial Sequence
  Description of Artificial Sequence: Synthetic oligonucleotide
ucugcuccugugguacuag

SEQ ID NO: 2155015 - RNA, 19 nt, Artificial Sequence
  Description of Artificial Sequence: Synthetic oligonucleotide
cucacguuccacaaccuua

SEQ ID NO: 2155016 - RNA, 19 nt, Artificial Sequence
  Description of Artificial Sequence: Synthetic oligonucleotide
uugcuuucuuccugugggu

SEQ ID NO: 2155017 - RNA, 19 nt, Artificial Sequence
  Description of Artificial Sequence: Synthetic oligonucleotide
acggaggagcaaauguuag

SEQ ID NO: 2155018 - RNA, 19 nt, Artificial Sequence
  Description of Artificial Sequence: Synthetic oligonucleotide
aaacgguccacggacucuu

SEQ ID NO: 2155019 - RNA, 19 nt, Artificial Sequence
  Description of Artificial Sequence: Synthetic oligonucleotide
uaguacacugaugguuucu

SEQ ID NO: 2155020 - RNA, 19 nt, Artificial Sequence
  Description of Artificial Sequence: Synthetic oligonucleotide
cagagugggcuagugcggg

SEQ ID NO: 2155021 - RNA, 19 nt, Artificial Sequence
  Description of Artificial Sequence: Synthetic oligonucleotide
ugguaacuuucuucuuuuc

SEQ ID NO: 2155022 - RNA, 19 nt, Artificial Sequence
  Description of Artificial Sequence: Synthetic oligonucleotide
cucuuuaagagaccugaua

SEQ ID NO: 2155023 - RNA, 19 nt, Artificial Sequence
  Description of Artificial Sequence: Synthetic oligonucleotide
agcagcagaugggacuccg

SEQ ID NO: 2155024 - RNA, 19 nt, Artificial Sequence
  Description of Artificial Sequence: Synthetic oligonucleotide
auugccccagagucaucag

SEQ ID NO: 2155025 - RNA, 19 nt, Artificial Sequence
  Description of Artificial Sequence: Synthetic oligonucleotide
caggauuuugauugcccca

SEQ ID NO: 2155026 - RNA, 19 nt, Artificial Sequence
  Description of Artificial Sequence: Synthetic oligonucleotide
accuuaucuucccaucauu

SEQ ID NO: 2155027 - RNA, 19 nt, Artificial Sequence
  Description of Artificial Sequence: Synthetic oligonucleotide
cugcaugcguccuaauaga

SEQ ID NO: 2155028 - RNA, 19 nt, Artificial Sequence
  Description of Artificial Sequence: Synthetic oligonucleotide
uuucauccuccuguaaauu

SEQ ID NO: 2155029 - RNA, 19 nt, Artificial Sequence
  Description of Artificial Sequence: Synthetic oligonucleotide
cauauagcuugguggggca

SEQ ID NO: 2155030 - RNA, 19 nt, Artificial Sequence
  Description of Artificial Sequence: Synthetic oligonucleotide
guccuaauagagucccauc

SEQ ID NO: 2155031 - RNA, 19 nt, Artificial Sequence
  Description of Artificial Sequence: Synthetic oligonucleotide
gguccacggacucuuuaag

SEQ ID NO: 2155032 - RNA, 19 nt, Artificial Sequence
  Description of Artificial Sequence: Synthetic oligonucleotide
guuucauccuccuguaaau

SEQ ID NO: 2155033 - RNA, 19 nt, Artificial Sequence
  Description of Artificial Sequence: Synthetic oligonucleotide
gccucugaggucgaaaagc

SEQ ID NO: 2155034 - RNA, 19 nt, Artificial Sequence
  Description of Artificial Sequence: Synthetic oligonucleotide
gagacagagugggcuagug

SEQ ID NO: 2155035 - RNA, 19 nt, Artificial Sequence
  Description of Artificial Sequence: Synthetic oligonucleotide
acaccaggcucugaggccu

SEQ ID NO: 2155036 - RNA, 19 nt, Artificial Sequence
  Description of Artificial Sequence: Synthetic oligonucleotide
acggacucuuuaagagacc

SEQ ID NO: 2155037 - RNA, 19 nt, Artificial Sequence
  Description of Artificial Sequence: Synthetic oligonucleotide
ugcgcaccuuaccaucuuc

SEQ ID NO: 2155038 - RNA, 19 nt, Artificial Sequence
  Description of Artificial Sequence: Synthetic oligonucleotide
ugcucacguuccacaaccu

SEQ ID NO: 2155039 - RNA, 19 nt, Artificial Sequence
  Description of Artificial Sequence: Synthetic oligonucleotide
cccgucuuuacuugcauuc

SEQ ID NO: 2155040 - RNA, 19 nt, Artificial Sequence
  Description of Artificial Sequence: Synthetic oligonucleotide
auaucgagcuuuggcaaaa

SEQ ID NO: 2155041 - RNA, 19 nt, Artificial Sequence
  Description of Artificial Sequence: Synthetic oligonucleotide
guaauccagacgggucggg

SEQ ID NO: 2155042 - RNA, 19 nt, Artificial Sequence
  Description of Artificial Sequence: Synthetic oligonucleotide
gaagccacaagcccgucuu

SEQ ID NO: 2155043 - RNA, 19 nt, Artificial Sequence
  Description of Artificial Sequence: Synthetic oligonucleotide
ccuuccaacugcaugcguc

SEQ ID NO: 2155044 - RNA, 19 nt, Artificial Sequence
  Description of Artificial Sequence: Synthetic oligonucleotide
cuccuuccaacugcaugcg

SEQ ID NO: 2155045 - RNA, 19 nt, Artificial Sequence
  Description of Artificial Sequence: Synthetic oligonucleotide
aggccacaugacaccaggc

SEQ ID NO: 2155046 - RNA, 19 nt, Artificial Sequence
  Description of Artificial Sequence: Synthetic oligonucleotide
agugcgggguuuaggagcu

SEQ ID NO: 2155047 - RNA, 19 nt, Artificial Sequence
  Description of Artificial Sequence: Synthetic oligonucleotide
agcagaccugggauacccc

SEQ ID NO: 2155048 - RNA, 19 nt, Artificial Sequence
  Description of Artificial Sequence: Synthetic oligonucleotide
uccuuccaacugcaugcgu

SEQ ID NO: 2155049 - RNA, 19 nt, Artificial Sequence
  Description of Artificial Sequence: Synthetic oligonucleotide
agucccuacccugcuuggg

SEQ ID NO: 2155050 - RNA, 19 nt, Artificial Sequence
  Description of Artificial Sequence: Synthetic oligonucleotide
gcuccugaagccacaagcc

SEQ ID NO: 2155051 - RNA, 19 nt, Artificial Sequence
  Description of Artificial Sequence: Synthetic oligonucleotide
acucaagagccaguucacu

SEQ ID NO: 2155052 - RNA, 19 nt, Artificial Sequence
  Description of Artificial Sequence: Synthetic oligonucleotide
caguaagcagcagauggga

SEQ ID NO: 2155053 - RNA, 19 nt, Artificial Sequence
  Description of Artificial Sequence: Synthetic oligonucleotide
uccacuugacugccaugau

SEQ ID NO: 2155054 - RNA, 19 nt, Artificial Sequence
  Description of Artificial Sequence: Synthetic oligonucleotide
ugcgggguuuaggagcuga

SEQ ID NO: 2155055 - RNA, 19 nt, Artificial Sequence
  Description of Artificial Sequence: Synthetic oligonucleotide
caucagcagaagccagcag

SEQ ID NO: 2155056 - RNA, 19 nt, Artificial Sequence
  Description of Artificial Sequence: Synthetic oligonucleotide
gccgcaagaugccacugag

SEQ ID NO: 2155057 - RNA, 19 nt, Artificial Sequence
  Description of Artificial Sequence: Synthetic oligonucleotide
cacaagaucuccacccucu

SEQ ID NO: 2155058 - RNA, 19 nt, Artificial Sequence
  Description of Artificial Sequence: Synthetic oligonucleotide
auauugccgcaagaugcca

SEQ ID NO: 2155059 - RNA, 19 nt, Artificial Sequence
  Description of Artificial Sequence: Synthetic oligonucleotide
caucacccugaagaugcgc

SEQ ID NO: 2155060 - RNA, 19 nt, Artificial Sequence
  Description of Artificial Sequence: Synthetic oligonucleotide
cuucaccccaagccacaag

SEQ ID NO: 2155061 - RNA, 19 nt, Artificial Sequence
  Description of Artificial Sequence: Synthetic oligonucleotide
cccuuaaaucccaauucuc

SEQ ID NO: 2155062 - RNA, 19 nt, Artificial Sequence
  Description of Artificial Sequence: Synthetic oligonucleotide
cagaaagcagaccugggau

SEQ ID NO: 2155063 - RNA, 19 nt, Artificial Sequence
  Description of Artificial Sequence: Synthetic oligonucleotide
uaucgagcuuuggcaaaac

SEQ ID NO: 2155064 - RNA, 19 nt, Artificial Sequence
  Description of Artificial Sequence: Synthetic oligonucleotide
gcuacggaggagcaaaugu

SEQ ID NO: 2155065 - RNA, 19 nt, Artificial Sequence
  Description of Artificial Sequence: Synthetic oligonucleotide
guccaggauuuugauugcc

SEQ ID NO: 2155066 - RNA, 19 nt, Artificial Sequence
  Description of Artificial Sequence: Synthetic oligonucleotide
aagcccgucuuuacuugca

SEQ ID NO: 2155067 - RNA, 19 nt, Artificial Sequence
  Description of Artificial Sequence: Synthetic oligonucleotide
uacuugcauucaggcagag

SEQ ID NO: 2155068 - RNA, 19 nt, Artificial Sequence
  Description of Artificial Sequence: Synthetic oligonucleotide
agcuacggaggagcaaaug

SEQ ID NO: 2155069 - RNA, 19 nt, Artificial Sequence
  Description of Artificial Sequence: Synthetic oligonucleotide
uggggcaagcugcucuuuu

SEQ ID NO: 2155070 - RNA, 19 nt, Artificial Sequence
  Description of Artificial Sequence: Synthetic oligonucleotide
ugagacagagugggcuagu

SEQ ID NO: 2155071 - RNA, 19 nt, Artificial Sequence
  Description of Artificial Sequence: Synthetic oligonucleotide
cgucagaaagcagaccugg

SEQ ID NO: 2155072 - RNA, 19 nt, Artificial Sequence
  Description of Artificial Sequence: Synthetic oligonucleotide
gacucccaucacccugaag

SEQ ID NO: 2155073 - RNA, 19 nt, Artificial Sequence
  Description of Artificial Sequence: Synthetic oligonucleotide
guguucaauaucgagcuuu

SEQ ID NO: 2155074 - RNA, 19 nt, Artificial Sequence
  Description of Artificial Sequence: Synthetic oligonucleotide
auccagacgggucgggcuu

SEQ ID NO: 2155075 - RNA, 19 nt, Artificial Sequence
  Description of Artificial Sequence: Synthetic oligonucleotide
gucccaucuucaccccaag

SEQ ID NO: 2155076 - RNA, 19 nt, Artificial Sequence
  Description of Artificial Sequence: Synthetic oligonucleotide
ggagcaaauguuagaaugu

SEQ ID NO: 2155077 - RNA, 19 nt, Artificial Sequence
  Description of Artificial Sequence: Synthetic oligonucleotide
gaggagcaaauguuagaau

SEQ ID NO: 2155078 - RNA, 19 nt, Artificial Sequence
  Description of Artificial Sequence: Synthetic oligonucleotide
ccacuugacugccaugaug

SEQ ID NO: 2155079 - RNA, 19 nt, Artificial Sequence
  Description of Artificial Sequence: Synthetic oligonucleotide
guacuagagucccuacccu

SEQ ID NO: 2155080 - RNA, 19 nt, Artificial Sequence
  Description of Artificial Sequence: Synthetic oligonucleotide
gcaugcuccuccucgucug

SEQ ID NO: 2155081 - RNA, 19 nt, Artificial Sequence
  Description of Artificial Sequence: Synthetic oligonucleotide
aagccacaagcccgucuuu

SEQ ID NO: 2155082 - RNA, 19 nt, Artificial Sequence
  Description of Artificial Sequence: Synthetic oligonucleotide
cuccgucagaaagcagacc

SEQ ID NO: 2155083 - RNA, 19 nt, Artificial Sequence
  Description of Artificial Sequence: Synthetic oligonucleotide
gcugaaaauauugccgcaa

SEQ ID NO: 2155084 - RNA, 19 nt, Artificial Sequence
  Description of Artificial Sequence: Synthetic oligonucleotide
uugccgcaagaugccacug

SEQ ID NO: 2155085 - RNA, 19 nt, Artificial Sequence
  Description of Artificial Sequence: Synthetic oligonucleotide
ccuuaccaucuucugcgcc

SEQ ID NO: 2155086 - RNA, 19 nt, Artificial Sequence
  Description of Artificial Sequence: Synthetic oligonucleotide
uccacccucugcuccugaa

SEQ ID NO: 2155087 - RNA, 19 nt, Artificial Sequence
  Description of Artificial Sequence: Synthetic oligonucleotide
acucuuuaagagaccugau

SEQ ID NO: 2155088 - RNA, 19 nt, Artificial Sequence
  Description of Artificial Sequence: Synthetic oligonucleotide
ggccucugaggucgaaaag

SEQ ID NO: 2155089 - RNA, 19 nt, Artificial Sequence
  Description of Artificial Sequence: Synthetic oligonucleotide
cucaagagccaguucacuu

SEQ ID NO: 2155090 - RNA, 19 nt, Artificial Sequence
  Description of Artificial Sequence: Synthetic oligonucleotide
aucccaauucucgcucaca

SEQ ID NO: 2155091 - RNA, 19 nt, Artificial Sequence
  Description of Artificial Sequence: Synthetic oligonucleotide
cuacggaggagcaaauguu

SEQ ID NO: 2155092 - RNA, 19 nt, Artificial Sequence
  Description of Artificial Sequence: Synthetic oligonucleotide
agcccgucuuuacuugcau

SEQ ID NO: 2155093 - RNA, 19 nt, Artificial Sequence
  Description of Artificial Sequence: Synthetic oligonucleotide
cagaggauagaagaagaau

SEQ ID NO: 2155094 - RNA, 19 nt, Artificial Sequence
  Description of Artificial Sequence: Synthetic oligonucleotide
cacaugacaccaggcucug

SEQ ID NO: 2155095 - RNA, 19 nt, Artificial Sequence
  Description of Artificial Sequence: Synthetic oligonucleotide
uuucuuccugugggugugu

SEQ ID NO: 2155096 - RNA, 19 nt, Artificial Sequence
  Description of Artificial Sequence: Synthetic oligonucleotide
cacaaccuuaucuucccau

SEQ ID NO: 2155097 - RNA, 19 nt, Artificial Sequence
  Description of Artificial Sequence: Synthetic oligonucleotide
ccaauucucgcucacauuu

SEQ ID NO: 2155098 - RNA, 19 nt, Artificial Sequence
  Description of Artificial Sequence: Synthetic oligonucleotide
ggagcugaccaggggacug

SEQ ID NO: 2155099 - RNA, 19 nt, Artificial Sequence
  Description of Artificial Sequence: Synthetic oligonucleotide
ugacucccaucacccugaa

SEQ ID NO: 2155100 - RNA, 19 nt, Artificial Sequence
  Description of Artificial Sequence: Synthetic oligonucleotide
aagcuacggaggagcaaau

SEQ ID NO: 2155101 - RNA, 19 nt, Artificial Sequence
  Description of Artificial Sequence: Synthetic oligonucleotide
uacccugcuuggggcaagc

SEQ ID NO: 2155102 - RNA, 19 nt, Artificial Sequence
  Description of Artificial Sequence: Synthetic oligonucleotide
ugggcuagugcgggguuua

SEQ ID NO: 2155103 - RNA, 19 nt, Artificial Sequence
  Description of Artificial Sequence: Synthetic oligonucleotide
ugauugccccagagucauc

SEQ ID NO: 2155104 - RNA, 19 nt, Artificial Sequence
  Description of Artificial Sequence: Synthetic oligonucleotide
uggguguguuuugcaggac

SEQ ID NO: 2155105 - RNA, 19 nt, Artificial Sequence
  Description of Artificial Sequence: Synthetic oligonucleotide
cacaagcccgucuuuacuu

SEQ ID NO: 2155106 - RNA, 19 nt, Artificial Sequence
  Description of Artificial Sequence: Synthetic oligonucleotide
ggauuuugauugccccaga

SEQ ID NO: 2155107 - RNA, 19 nt, Artificial Sequence
  Description of Artificial Sequence: Synthetic oligonucleotide
gcuccugugguacuagagu

SEQ ID NO: 2155108 - RNA, 19 nt, Artificial Sequence
  Description of Artificial Sequence: Synthetic oligonucleotide
cucugaggucgaaaagcua

SEQ ID NO: 2155109 - RNA, 19 nt, Artificial Sequence
  Description of Artificial Sequence: Synthetic oligonucleotide
aggagcugaccaggggacu

SEQ ID NO: 2155110 - RNA, 19 nt, Artificial Sequence
  Description of Artificial Sequence: Synthetic oligonucleotide
acgguccacggacucuuua

SEQ ID NO: 2155111 - RNA, 19 nt, Artificial Sequence
  Description of Artificial Sequence: Synthetic oligonucleotide
ggccacaugacaccaggcu

SEQ ID NO: 2155112 - RNA, 19 nt, Artificial Sequence
  Description of Artificial Sequence: Synthetic oligonucleotide
cacguuccacaaccuuauc

SEQ ID NO: 2155113 - RNA, 19 nt, Artificial Sequence
  Description of Artificial Sequence: Synthetic oligonucleotide
ggguguguuuugcaggacu

SEQ ID NO: 2155114 - RNA, 19 nt, Artificial Sequence
  Description of Artificial Sequence: Synthetic oligonucleotide
ccgucagaaagcagaccug

SEQ ID NO: 2155115 - RNA, 19 nt, Artificial Sequence
  Description of Artificial Sequence: Synthetic oligonucleotide
caaguccaggauuuugauu

SEQ ID NO: 2155116 - RNA, 19 nt, Artificial Sequence
  Description of Artificial Sequence: Synthetic oligonucleotide
ccacggacucuuuaagaga

SEQ ID NO: 2155117 - RNA, 19 nt, Artificial Sequence
  Description of Artificial Sequence: Synthetic oligonucleotide
ucuccaugggaggcauaua

SEQ ID NO: 2155118 - RNA, 19 nt, Artificial Sequence
  Description of Artificial Sequence: Synthetic oligonucleotide
ccaucacccugaagaugcg

SEQ ID NO: 2155119 - RNA, 19 nt, Artificial Sequence
  Description of Artificial Sequence: Synthetic oligonucleotide
ccaucauucccuccaguaa

SEQ ID NO: 2155120 - RNA, 19 nt, Artificial Sequence
  Description of Artificial Sequence: Synthetic oligonucleotide
augcgcaccuuaccaucuu

SEQ ID NO: 2155121 - RNA, 19 nt, Artificial Sequence
  Description of Artificial Sequence: Synthetic oligonucleotide
cguaauccagacgggucgg

SEQ ID NO: 2155122 - RNA, 19 nt, Artificial Sequence
  Description of Artificial Sequence: Synthetic oligonucleotide
cuacccugcuuggggcaag

SEQ ID NO: 2155123 - RNA, 19 nt, Artificial Sequence
  Description of Artificial Sequence: Synthetic oligonucleotide
cuagagucccuacccugcu

SEQ ID NO: 2155124 - RNA, 19 nt, Artificial Sequence
  Description of Artificial Sequence: Synthetic oligonucleotide
ccuccuguaaauucguaau

SEQ ID NO: 2155125 - RNA, 19 nt, Artificial Sequence
  Description of Artificial Sequence: Synthetic oligonucleotide
ccaagccacaagaucucca

SEQ ID NO: 2155126 - RNA, 19 nt, Artificial Sequence
  Description of Artificial Sequence: Synthetic oligonucleotide
ccacccucugcuccugaag

SEQ ID NO: 2155127 - RNA, 19 nt, Artificial Sequence
  Description of Artificial Sequence: Synthetic oligonucleotide
cugcuccugugguacuaga

SEQ ID NO: 2155128 - RNA, 19 nt, Artificial Sequence
  Description of Artificial Sequence: Synthetic oligonucleotide
cucccaucacccugaagau

SEQ ID NO: 2155129 - RNA, 19 nt, Artificial Sequence
  Description of Artificial Sequence: Synthetic oligonucleotide
cucgucugcuccuguggua

SEQ ID NO: 2155130 - RNA, 19 nt, Artificial Sequence
  Description of Artificial Sequence: Synthetic oligonucleotide
cgcaccuuaccaucuucug

SEQ ID NO: 2155131 - RNA, 19 nt, Artificial Sequence
  Description of Artificial Sequence: Synthetic oligonucleotide
ccacugagacagagugggc

SEQ ID NO: 2155132 - RNA, 19 nt, Artificial Sequence
  Description of Artificial Sequence: Synthetic oligonucleotide
ccugaagaugcgcaccuua

SEQ ID NO: 2155133 - RNA, 19 nt, Artificial Sequence
  Description of Artificial Sequence: Synthetic oligonucleotide
acaugacaccaggcucuga

SEQ ID NO: 2155134 - RNA, 19 nt, Artificial Sequence
  Description of Artificial Sequence: Synthetic oligonucleotide
uccagacgggucgggcuuu

SEQ ID NO: 2155135 - RNA, 19 nt, Artificial Sequence
  Description of Artificial Sequence: Synthetic oligonucleotide
ccuguggguguguuuugca

SEQ ID NO: 2155136 - RNA, 19 nt, Artificial Sequence
  Description of Artificial Sequence: Synthetic oligonucleotide
cuuggggcaagcugcucuu

SEQ ID NO: 2155137 - RNA, 19 nt, Artificial Sequence
  Description of Artificial Sequence: Synthetic oligonucleotide
cuucagggaucugguaacu

SEQ ID NO: 2155138 - RNA, 19 nt, Artificial Sequence
  Description of Artificial Sequence: Synthetic oligonucleotide
auccuccuguaaauucgua

SEQ ID NO: 2155139 - RNA, 19 nt, Artificial Sequence
  Description of Artificial Sequence: Synthetic oligonucleotide
aacgguccacggacucuuu

SEQ ID NO: 2155140 - RNA, 19 nt, Artificial Sequence
  Description of Artificial Sequence: Synthetic oligonucleotide
gccacaagaucuccacccu

SEQ ID NO: 2155141 - RNA, 19 nt, Artificial Sequence
  Description of Artificial Sequence: Synthetic oligonucleotide
ggacuccgucagaaagcag

SEQ ID NO: 2155142 - RNA, 19 nt, Artificial Sequence
  Description of Artificial Sequence: Synthetic oligonucleotide
cgggguuuaggagcugacc

SEQ ID NO: 2155143 - RNA, 19 nt, Artificial Sequence
  Description of Artificial Sequence: Synthetic oligonucleotide
cgagcuuuggcaaaaccuu

SEQ ID NO: 2155144 - RNA, 19 nt, Artificial Sequence
  Description of Artificial Sequence: Synthetic oligonucleotide
gcaugcguccuaauagagu

SEQ ID NO: 2155145 - RNA, 19 nt, Artificial Sequence
  Description of Artificial Sequence: Synthetic oligonucleotide
ccgucuuuacuugcauuca

SEQ ID NO: 2155146 - RNA, 19 nt, Artificial Sequence
  Description of Artificial Sequence: Synthetic oligonucleotide
ccgcaagaugccacugaga

SEQ ID NO: 2155147 - RNA, 19 nt, Artificial Sequence
  Description of Artificial Sequence: Synthetic oligonucleotide
ccaaguccaggauuuugau

SEQ ID NO: 2155148 - RNA, 19 nt, Artificial Sequence
  Description of Artificial Sequence: Synthetic oligonucleotide
cugaggccucugaggucga

SEQ ID NO: 2155149 - RNA, 19 nt, Artificial Sequence
  Description of Artificial Sequence: Synthetic oligonucleotide
ccacaaccuuaucuuccca

SEQ ID NO: 2155150 - RNA, 19 nt, Artificial Sequence
  Description of Artificial Sequence: Synthetic oligonucleotide
gcgugacccuuaaauccca

SEQ ID NO: 2155151 - RNA, 19 nt, Artificial Sequence
  Description of Artificial Sequence: Synthetic oligonucleotide
gggcuagugcgggguuuag

SEQ ID NO: 2155152 - RNA, 19 nt, Artificial Sequence
  Description of Artificial Sequence: Synthetic oligonucleotide
gcgggguuuaggagcugac

SEQ ID NO: 2155153 - RNA, 19 nt, Artificial Sequence
  Description of Artificial Sequence: Synthetic oligonucleotide
gccagcagacuuucaguuu

SEQ ID NO: 2155154 - RNA, 19 nt, Artificial Sequence
  Description of Artificial Sequence: Synthetic oligonucleotide
gcucacguuccacaaccuu

SEQ ID NO: 2155155 - RNA, 19 nt, Artificial Sequence
  Description of Artificial Sequence: Synthetic oligonucleotide
cccuacccugcuuggggca

SEQ ID NO: 2155156 - RNA, 19 nt, Artificial Sequence
  Description of Artificial Sequence: Synthetic oligonucleotide
cccaaagcgugacccuuaa

SEQ ID NO: 2155157 - RNA, 19 nt, Artificial Sequence
  Description of Artificial Sequence: Synthetic oligonucleotide
cgguccacggacucuuuaa

SEQ ID NO: 2155158 - RNA, 19 nt, Artificial Sequence
  Description of Artificial Sequence: Synthetic oligonucleotide
gcgcaccuuaccaucuucu

SEQ ID NO: 2155159 - RNA, 19 nt, Artificial Sequence
  Description of Artificial Sequence: Synthetic oligonucleotide
cggacucuuuaagagaccu

SEQ ID NO: 2155160 - RNA, 19 nt, Artificial Sequence
  Description of Artificial Sequence: Synthetic oligonucleotide
caggacucuucuguuucuu

SEQ ID NO: 2155161 - RNA, 19 nt, Artificial Sequence
  Description of Artificial Sequence: Synthetic oligonucleotide
gugcgggguuuaggagcug

SEQ ID NO: 2155162 - RNA, 19 nt, Artificial Sequence
  Description of Artificial Sequence: Synthetic oligonucleotide
ccucgucugcuccuguggu

SEQ ID NO: 2155163 - RNA, 19 nt, Artificial Sequence
  Description of Artificial Sequence: Synthetic oligonucleotide
ccccaaagcgugacccuua

SEQ ID NO: 2155164 - RNA, 19 nt, Artificial Sequence
  Description of Artificial Sequence: Synthetic oligonucleotide
ccaaagcgugacccuuaaa

SEQ ID NO: 2155165 - RNA, 19 nt, Artificial Sequence
  Description of Artificial Sequence: Synthetic oligonucleotide
gcguccuaauagaguccca

SEQ ID NO: 2155166 - RNA, 19 nt, Artificial Sequence
  Description of Artificial Sequence: Synthetic oligonucleotide
gugggcuagugcgggguuu

SEQ ID NO: 2155167 - RNA, 19 nt, Artificial Sequence
  Description of Artificial Sequence: Synthetic oligonucleotide
gcccgucuuuacuugcauu

SEQ ID NO: 2155168 - RNA, 19 nt, Artificial Sequence
  Description of Artificial Sequence: Synthetic oligonucleotide
cgugacccuuaaaucccaa

SEQ ID NO: 2155169 - RNA, 19 nt, Artificial Sequence
  Description of Artificial Sequence: Synthetic oligonucleotide
cguccuaauagagucccau

SEQ ID NO: 2155170 - RNA, 19 nt, Artificial Sequence
  Description of Artificial Sequence: Synthetic oligonucleotide
ccuacccugcuuggggcaa

SEQ ID NO: 2155171 - RNA, 19 nt, Artificial Sequence
  Description of Artificial Sequence: Synthetic oligonucleotide
cagcuccuuccaacugcau

SEQ ID NO: 2155172 - RNA, 19 nt, Artificial Sequence
  Description of Artificial Sequence: Synthetic oligonucleotide
gcgccacagcugaaaauau

SEQ ID NO: 2155173 - RNA, 19 nt, Artificial Sequence
  Description of Artificial Sequence: Synthetic oligonucleotide
ccauuucacugcucacguu

SEQ ID NO: 2155174 - RNA, 19 nt, Artificial Sequence
  Description of Artificial Sequence: Synthetic oligonucleotide
cgccacagcugaaaauauu

SEQ ID NO: 2155175 - RNA, 19 nt, Artificial Sequence
  Description of Artificial Sequence: Synthetic oligonucleotide
cguguucaauaucgagcuu

SEQ ID NO: 2155176 - RNA, 19 nt, Artificial Sequence
  Description of Artificial Sequence: Synthetic oligonucleotide
ccagacgggucgggcuuuu

SEQ ID NO: 2155177 - RNA, 19 nt, Artificial Sequence
  Description of Artificial Sequence: Synthetic oligonucleotide
aaaucagauaguucugacc

SEQ ID NO: 2155178 - RNA, 19 nt, Artificial Sequence
  Description of Artificial Sequence: Synthetic oligonucleotide
uguaggauaaagcggaagg

SEQ ID NO: 2155179 - RNA, 19 nt, Artificial Sequence
  Description of Artificial Sequence: Synthetic oligonucleotide
uuuauggcaucaaagauga

SEQ ID NO: 2155180 - RNA, 19 nt, Artificial Sequence
  Description of Artificial Sequence: Synthetic oligonucleotide
cugaaauccaucaugauac

SEQ ID NO: 2155181 - RNA, 19 nt, Artificial Sequence
  Description of Artificial Sequence: Synthetic oligonucleotide
uuuuguuagagucaaacaa

SEQ ID NO: 2155182 - RNA, 19 nt, Artificial Sequence
  Description of Artificial Sequence: Synthetic oligonucleotide
agagcgacuucuuagcacc

SEQ ID NO: 2155183 - RNA, 19 nt, Artificial Sequence
  Description of Artificial Sequence: Synthetic oligonucleotide
aaagcggaaggauuucugg

SEQ ID NO: 2155184 - RNA, 19 nt, Artificial Sequence
  Description of Artificial Sequence: Synthetic oligonucleotide
ucauuaggcacaaaguugu

SEQ ID NO: 2155185 - RNA, 19 nt, Artificial Sequence
  Description of Artificial Sequence: Synthetic oligonucleotide
uuagagucaaacaacacuu

SEQ ID NO: 2155186 - RNA, 19 nt, Artificial Sequence
  Description of Artificial Sequence: Synthetic oligonucleotide
gaugccaugguagaaagag

SEQ ID NO: 2155187 - RNA, 19 nt, Artificial Sequence
  Description of Artificial Sequence: Synthetic oligonucleotide
aaggugaaugaaugcacac

SEQ ID NO: 2155188 - RNA, 19 nt, Artificial Sequence
  Description of Artificial Sequence: Synthetic oligonucleotide
gacgacauuuuccaagugg

SEQ ID NO: 2155189 - RNA, 19 nt, Artificial Sequence
  Description of Artificial Sequence: Synthetic oligonucleotide
auuaggaccccagagacgg

SEQ ID NO: 2155190 - RNA, 19 nt, Artificial Sequence
  Description of Artificial Sequence: Synthetic oligonucleotide
auaguucugacccuccaac

SEQ ID NO: 2155191 - RNA, 19 nt, Artificial Sequence
  Description of Artificial Sequence: Synthetic oligonucleotide
ggauauaccagguagggag

SEQ ID NO: 2155192 - RNA, 19 nt, Artificial Sequence
  Description of Artificial Sequence: Synthetic oligonucleotide
agaaaggcaaucacuaccc

SEQ ID NO: 2155193 - RNA, 19 nt, Artificial Sequence
  Description of Artificial Sequence: Synthetic oligonucleotide
uagaaagagaaccaacccu

SEQ ID NO: 2155194 - RNA, 19 nt, Artificial Sequence
  Description of Artificial Sequence: Synthetic oligonucleotide
uuguuagagucaaacaaca

SEQ ID NO: 2155195 - RNA, 19 nt, Artificial Sequence
  Description of Artificial Sequence: Synthetic oligonucleotide
agugagaugcuuuauggca

SEQ ID NO: 2155196 - RNA, 19 nt, Artificial Sequence
  Description of Artificial Sequence: Synthetic oligonucleotide
ugcuuggagauaaacagga

SEQ ID NO: 2155197 - RNA, 19 nt, Artificial Sequence
  Description of Artificial Sequence: Synthetic oligonucleotide
caucauucaggauguaucg

SEQ ID NO: 2155198 - RNA, 19 nt, Artificial Sequence
  Description of Artificial Sequence: Synthetic oligonucleotide
uggaauacucuuuccagag

SEQ ID NO: 2155199 - RNA, 19 nt, Artificial Sequence
  Description of Artificial Sequence: Synthetic oligonucleotide
aaauccaucaugauacucu

SEQ ID NO: 2155200 - RNA, 19 nt, Artificial Sequence
  Description of Artificial Sequence: Synthetic oligonucleotide
uguaaggggcccauauugg

SEQ ID NO: 2155201 - RNA, 19 nt, Artificial Sequence
  Description of Artificial Sequence: Synthetic oligonucleotide
ugaaucuucugggaggugg

SEQ ID NO: 2155202 - RNA, 19 nt, Artificial Sequence
  Description of Artificial Sequence: Synthetic oligonucleotide
guacaucuggcccagagag

SEQ ID NO: 2155203 - RNA, 19 nt, Artificial Sequence
  Description of Artificial Sequence: Synthetic oligonucleotide
gagauaaacaggaagaaaa

SEQ ID NO: 2155204 - RNA, 19 nt, Artificial Sequence
  Description of Artificial Sequence: Synthetic oligonucleotide
uugcucuuaguuuucauga

SEQ ID NO: 2155205 - RNA, 19 nt, Artificial Sequence
  Description of Artificial Sequence: Synthetic oligonucleotide
agggcuugaaucuucuggg

SEQ ID NO: 2155206 - RNA, 19 nt, Artificial Sequence
  Description of Artificial Sequence: Synthetic oligonucleotide
aagaaggaugccaugguag

SEQ ID NO: 2155207 - RNA, 19 nt, Artificial Sequence
  Description of Artificial Sequence: Synthetic oligonucleotide
caucaugauacucugucag

SEQ ID NO: 2155208 - RNA, 19 nt, Artificial Sequence
  Description of Artificial Sequence: Synthetic oligonucleotide
uccaucaugauacucuguc

SEQ ID NO: 2155209 - RNA, 19 nt, Artificial Sequence
  Description of Artificial Sequence: Synthetic oligonucleotide
guagaaagagaaccaaccc

SEQ ID NO: 2155210 - RNA, 19 nt, Artificial Sequence
  Description of Artificial Sequence: Synthetic oligonucleotide
agaugaggauugcagguac

SEQ ID NO: 2155211 - RNA, 19 nt, Artificial Sequence
  Description of Artificial Sequence: Synthetic oligonucleotide
auugcagguaccaccagcc

SEQ ID NO: 2155212 - RNA, 19 nt, Artificial Sequence
  Description of Artificial Sequence: Synthetic oligonucleotide
ugccauuuaagaaaacaaa

SEQ ID NO: 2155213 - RNA, 19 nt, Artificial Sequence
  Description of Artificial Sequence: Synthetic oligonucleotide
agcucgacuggacagcagc

SEQ ID NO: 2155214 - RNA, 19 nt, Artificial Sequence
  Description of Artificial Sequence: Synthetic oligonucleotide
agccauaugccauuuaaga

SEQ ID NO: 2155215 - RNA, 19 nt, Artificial Sequence
  Description of Artificial Sequence: Synthetic oligonucleotide
agagaaccaacccucgauc

SEQ ID NO: 2155216 - RNA, 19 nt, Artificial Sequence
  Description of Artificial Sequence: Synthetic oligonucleotide
gcaaucacuacccacaggc

SEQ ID NO: 2155217 - RNA, 19 nt, Artificial Sequence
  Description of Artificial Sequence: Synthetic oligonucleotide
acaauuaggaccccagaga

SEQ ID NO: 2155218 - RNA, 19 nt, Artificial Sequence
  Description of Artificial Sequence: Synthetic oligonucleotide
guuuucaugaccuugcugu

SEQ ID NO: 2155219 - RNA, 19 nt, Artificial Sequence
  Description of Artificial Sequence: Synthetic oligonucleotide
ugaaugcacacacagcaaa

SEQ ID NO: 2155220 - RNA, 19 nt, Artificial Sequence
  Description of Artificial Sequence: Synthetic oligonucleotide
caauuaggaccccagagac

SEQ ID NO: 2155221 - RNA, 19 nt, Artificial Sequence
  Description of Artificial Sequence: Synthetic oligonucleotide
caaguggucacaauuagga

SEQ ID NO: 2155222 - RNA, 19 nt, Artificial Sequence
  Description of Artificial Sequence: Synthetic oligonucleotide
ucuuuaguuaugcuugcuc

SEQ ID NO: 2155223 - RNA, 19 nt, Artificial Sequence
  Description of Artificial Sequence: Synthetic oligonucleotide
auauugguggucauguuuc

SEQ ID NO: 2155224 - RNA, 19 nt, Artificial Sequence
  Description of Artificial Sequence: Synthetic oligonucleotide
aaggauuucugguggagaa

SEQ ID NO: 2155225 - RNA, 19 nt, Artificial Sequence
  Description of Artificial Sequence: Synthetic oligonucleotide
cuuagcaccggcuucggac

SEQ ID NO: 2155226 - RNA, 19 nt, Artificial Sequence
  Description of Artificial Sequence: Synthetic oligonucleotide
cacaauuaggaccccagag

SEQ ID NO: 2155227 - RNA, 19 nt, Artificial Sequence
  Description of Artificial Sequence: Synthetic oligonucleotide
ucgaucacaaggugaauga

SEQ ID NO: 2155228 - RNA, 19 nt, Artificial Sequence
  Description of Artificial Sequence: Synthetic oligonucleotide
uugggauaagacagcuugg

SEQ ID NO: 2155229 - RNA, 19 nt, Artificial Sequence
  Description of Artificial Sequence: Synthetic oligonucleotide
caguauggauguaaggggc

SEQ ID NO: 2155230 - RNA, 19 nt, Artificial Sequence
  Description of Artificial Sequence: Synthetic oligonucleotide
uuggaauacucuuuccaga

SEQ ID NO: 2155231 - RNA, 19 nt, Artificial Sequence
  Description of Artificial Sequence: Synthetic oligonucleotide
agccucaagugccugggcc

SEQ ID NO: 2155232 - RNA, 19 nt, Artificial Sequence
  Description of Artificial Sequence: Synthetic oligonucleotide
cuauggcucccaaacagcc

SEQ ID NO: 2155233 - RNA, 19 nt, Artificial Sequence
  Description of Artificial Sequence: Synthetic oligonucleotide
uguuucuaugggccgcugg

SEQ ID NO: 2155234 - RNA, 19 nt, Artificial Sequence
  Description of Artificial Sequence: Synthetic oligonucleotide
acgacauuuuccaaguggg

SEQ ID NO: 2155235 - RNA, 19 nt, Artificial Sequence
  Description of Artificial Sequence: Synthetic oligonucleotide
ucaucagugguguuccggc

SEQ ID NO: 2155236 - RNA, 19 nt, Artificial Sequence
  Description of Artificial Sequence: Synthetic oligonucleotide
acaaggugaaugaaugcac

SEQ ID NO: 2155237 - RNA, 19 nt, Artificial Sequence
  Description of Artificial Sequence: Synthetic oligonucleotide
agaaccaacccucgaucac

SEQ ID NO: 2155238 - RNA, 19 nt, Artificial Sequence
  Description of Artificial Sequence: Synthetic oligonucleotide
guggucauguuucuauggg

SEQ ID NO: 2155239 - RNA, 19 nt, Artificial Sequence
  Description of Artificial Sequence: Synthetic oligonucleotide
gucgacgacauuuuccaag

SEQ ID NO: 2155240 - RNA, 19 nt, Artificial Sequence
  Description of Artificial Sequence: Synthetic oligonucleotide
gauugcagguaccaccagc

SEQ ID NO: 2155241 - RNA, 19 nt, Artificial Sequence
  Description of Artificial Sequence: Synthetic oligonucleotide
agucaaacaacacuuuauu

SEQ ID NO: 2155242 - RNA, 19 nt, Artificial Sequence
  Description of Artificial Sequence: Synthetic oligonucleotide
uguuagagucaaacaacac

SEQ ID NO: 2155243 - RNA, 19 nt, Artificial Sequence
  Description of Artificial Sequence: Synthetic oligonucleotide
gguagaaagagaaccaacc

SEQ ID NO: 2155244 - RNA, 19 nt, Artificial Sequence
  Description of Artificial Sequence: Synthetic oligonucleotide
ggugaaugaaugcacacac

SEQ ID NO: 2155245 - RNA, 19 nt, Artificial Sequence
  Description of Artificial Sequence: Synthetic oligonucleotide
cugagugugacaaaucaga

SEQ ID NO: 2155246 - RNA, 19 nt, Artificial Sequence
  Description of Artificial Sequence: Synthetic oligonucleotide
gauguaucggcugucuccc

SEQ ID NO: 2155247 - RNA, 19 nt, Artificial Sequence
  Description of Artificial Sequence: Synthetic oligonucleotide
ucggacuugccagucagcg

SEQ ID NO: 2155248 - RNA, 19 nt, Artificial Sequence
  Description of Artificial Sequence: Synthetic oligonucleotide
aguauggauguaaggggcc

SEQ ID NO: 2155249 - RNA, 19 nt, Artificial Sequence
  Description of Artificial Sequence: Synthetic oligonucleotide
ugguagaaagagaaccaac

SEQ ID NO: 2155250 - RNA, 19 nt, Artificial Sequence
  Description of Artificial Sequence: Synthetic oligonucleotide
aauuaggaccccagagacg

SEQ ID NO: 2155251 - RNA, 19 nt, Artificial Sequence
  Description of Artificial Sequence: Synthetic oligonucleotide
gucauuaggcacaaaguug

SEQ ID NO: 2155252 - RNA, 19 nt, Artificial Sequence
  Description of Artificial Sequence: Synthetic oligonucleotide
uacucuuuccagaguuggg

SEQ ID NO: 2155253 - RNA, 19 nt, Artificial Sequence
  Description of Artificial Sequence: Synthetic oligonucleotide
gagaccacgagcuguagga

SEQ ID NO: 2155254 - RNA, 19 nt, Artificial Sequence
  Description of Artificial Sequence: Synthetic oligonucleotide
ucaagaaggaugccauggu

SEQ ID NO: 2155255 - RNA, 19 nt, Artificial Sequence
  Description of Artificial Sequence: Synthetic oligonucleotide
ugugacaaaucagauaguu

SEQ ID NO: 2155256 - RNA, 19 nt, Artificial Sequence
  Description of Artificial Sequence: Synthetic oligonucleotide
uucaggauguaucggcugu

SEQ ID NO: 2155257 - RNA, 19 nt, Artificial Sequence
  Description of Artificial Sequence: Synthetic oligonucleotide
cucagagcgacuucuuagc

SEQ ID NO: 2155258 - RNA, 19 nt, Artificial Sequence
  Description of Artificial Sequence: Synthetic oligonucleotide
agagacggagaacaggcca

SEQ ID NO: 2155259 - RNA, 19 nt, Artificial Sequence
  Description of Artificial Sequence: Synthetic oligonucleotide
aaaccuaagcggcgcgauc

SEQ ID NO: 2155260 - RNA, 19 nt, Artificial Sequence
  Description of Artificial Sequence: Synthetic oligonucleotide
gccaguauggauguaaggg

SEQ ID NO: 2155261 - RNA, 19 nt, Artificial Sequence
  Description of Artificial Sequence: Synthetic oligonucleotide
ugagugugacaaaucagau

SEQ ID NO: 2155262 - RNA, 19 nt, Artificial Sequence
  Description of Artificial Sequence: Synthetic oligonucleotide
ccaaccaggauauaccagg

SEQ ID NO: 2155263 - RNA, 19 nt, Artificial Sequence
  Description of Artificial Sequence: Synthetic oligonucleotide
uaguuaugcuugcucuuag

SEQ ID NO: 2155264 - RNA, 19 nt, Artificial Sequence
  Description of Artificial Sequence: Synthetic oligonucleotide
gucauguuucuaugggccg

SEQ ID NO: 2155265 - RNA, 19 nt, Artificial Sequence
  Description of Artificial Sequence: Synthetic oligonucleotide
uguacccaucaucagccug

SEQ ID NO: 2155266 - RNA, 19 nt, Artificial Sequence
  Description of Artificial Sequence: Synthetic oligonucleotide
uggucauguuucuaugggc

SEQ ID NO: 2155267 - RNA, 19 nt, Artificial Sequence
  Description of Artificial Sequence: Synthetic oligonucleotide
acuauacugcucuuuaguu

SEQ ID NO: 2155268 - RNA, 19 nt, Artificial Sequence
  Description of Artificial Sequence: Synthetic oligonucleotide
cgagcuguaggauaaagcg

SEQ ID NO: 2155269 - RNA, 19 nt, Artificial Sequence
  Description of Artificial Sequence: Synthetic oligonucleotide
gagcuguaggauaaagcgg

SEQ ID NO: 2155270 - RNA, 19 nt, Artificial Sequence
  Description of Artificial Sequence: Synthetic oligonucleotide
guuucuaugggccgcuggc

SEQ ID NO: 2155271 - RNA, 19 nt, Artificial Sequence
  Description of Artificial Sequence: Synthetic oligonucleotide
uuaugcuugcucuuaguuu

SEQ ID NO: 2155272 - RNA, 19 nt, Artificial Sequence
  Description of Artificial Sequence: Synthetic oligonucleotide
caaaucagauaguucugac

SEQ ID NO: 2155273 - RNA, 19 nt, Artificial Sequence
  Description of Artificial Sequence: Synthetic oligonucleotide
ucgacgacauuuuccaagu

SEQ ID NO: 2155274 - RNA, 19 nt, Artificial Sequence
  Description of Artificial Sequence: Synthetic oligonucleotide
gcuugaaucuucugggagg

SEQ ID NO: 2155275 - RNA, 19 nt, Artificial Sequence
  Description of Artificial Sequence: Synthetic oligonucleotide
agguagggaggucauuagg

SEQ ID NO: 2155276 - RNA, 19 nt, Artificial Sequence
  Description of Artificial Sequence: Synthetic oligonucleotide
agaaggaugccaugguaga

SEQ ID NO: 2155277 - RNA, 19 nt, Artificial Sequence
  Description of Artificial Sequence: Synthetic oligonucleotide
acgagcuguaggauaaagc

SEQ ID NO: 2155278 - RNA, 19 nt, Artificial Sequence
  Description of Artificial Sequence: Synthetic oligonucleotide
agcggaaggauuucuggug

SEQ ID NO: 2155279 - RNA, 19 nt, Artificial Sequence
  Description of Artificial Sequence: Synthetic oligonucleotide
caggauauaccagguaggg

SEQ ID NO: 2155280 - RNA, 19 nt, Artificial Sequence
  Description of Artificial Sequence: Synthetic oligonucleotide
gucuccauagugaugauga

SEQ ID NO: 2155281 - RNA, 19 nt, Artificial Sequence
  Description of Artificial Sequence: Synthetic oligonucleotide
uucuaugggccgcuggcug

SEQ ID NO: 2155282 - RNA, 19 nt, Artificial Sequence
  Description of Artificial Sequence: Synthetic oligonucleotide
aaccuaagcggcgcgaucu

SEQ ID NO: 2155283 - RNA, 19 nt, Artificial Sequence
  Description of Artificial Sequence: Synthetic oligonucleotide
agagaccacgagcuguagg

SEQ ID NO: 2155284 - RNA, 19 nt, Artificial Sequence
  Description of Artificial Sequence: Synthetic oligonucleotide
ucagagcgacuucuuagca

SEQ ID NO: 2155285 - RNA, 19 nt, Artificial Sequence
  Description of Artificial Sequence: Synthetic oligonucleotide
ggacuugccagucagcgcc

SEQ ID NO: 2155286 - RNA, 19 nt, Artificial Sequence
  Description of Artificial Sequence: Synthetic oligonucleotide
ucacaauuaggaccccaga

SEQ ID NO: 2155287 - RNA, 19 nt, Artificial Sequence
  Description of Artificial Sequence: Synthetic oligonucleotide
cagcaaaccagcacagggc

SEQ ID NO: 2155288 - RNA, 19 nt, Artificial Sequence
  Description of Artificial Sequence: Synthetic oligonucleotide
guuccggcccacuauacug

SEQ ID NO: 2155289 - RNA, 19 nt, Artificial Sequence
  Description of Artificial Sequence: Synthetic oligonucleotide
gaugcuuuauggcaucaaa

SEQ ID NO: 2155290 - RNA, 19 nt, Artificial Sequence
  Description of Artificial Sequence: Synthetic oligonucleotide
uuuaguuaugcuugcucuu

SEQ ID NO: 2155291 - RNA, 19 nt, Artificial Sequence
  Description of Artificial Sequence: Synthetic oligonucleotide
ccaguauggauguaagggg

SEQ ID NO: 2155292 - RNA, 19 nt, Artificial Sequence
  Description of Artificial Sequence: Synthetic oligonucleotide
gaaucuucugggagguggg

SEQ ID NO: 2155293 - RNA, 19 nt, Artificial Sequence
  Description of Artificial Sequence: Synthetic oligonucleotide
acaaaucagauaguucuga

SEQ ID NO: 2155294 - RNA, 19 nt, Artificial Sequence
  Description of Artificial Sequence: Synthetic oligonucleotide
uuagcaccggcuucggacu

SEQ ID NO: 2155295 - RNA, 19 nt, Artificial Sequence
  Description of Artificial Sequence: Synthetic oligonucleotide
gguggucauguuucuaugg

SEQ ID NO: 2155296 - RNA, 19 nt, Artificial Sequence
  Description of Artificial Sequence: Synthetic oligonucleotide
agagucaaacaacacuuua

SEQ ID NO: 2155297 - RNA, 19 nt, Artificial Sequence
  Description of Artificial Sequence: Synthetic oligonucleotide
aucauucaggauguaucgg

SEQ ID NO: 2155298 - RNA, 19 nt, Artificial Sequence
  Description of Artificial Sequence: Synthetic oligonucleotide
uaggauaaagcggaaggau

SEQ ID NO: 2155299 - RNA, 19 nt, Artificial Sequence
  Description of Artificial Sequence: Synthetic oligonucleotide
uuuccaaguggggcaacgg

SEQ ID NO: 2155300 - RNA, 19 nt, Artificial Sequence
  Description of Artificial Sequence: Synthetic oligonucleotide
ccaugguagaaagagaacc

SEQ ID NO: 2155301 - RNA, 19 nt, Artificial Sequence
  Description of Artificial Sequence: Synthetic oligonucleotide
gagaaccaacccucgauca

SEQ ID NO: 2155302 - RNA, 19 nt, Artificial Sequence
  Description of Artificial Sequence: Synthetic oligonucleotide
ugggcagggugccucauca

SEQ ID NO: 2155303 - RNA, 19 nt, Artificial Sequence
  Description of Artificial Sequence: Synthetic oligonucleotide
gaaguacagcacauccccg

SEQ ID NO: 2155304 - RNA, 19 nt, Artificial Sequence
  Description of Artificial Sequence: Synthetic oligonucleotide
uccagauuggucugggcau

SEQ ID NO: 2155305 - RNA, 19 nt, Artificial Sequence
  Description of Artificial Sequence: Synthetic oligonucleotide
ucauguuucuaugggccgc

SEQ ID NO: 2155306 - RNA, 19 nt, Artificial Sequence
  Description of Artificial Sequence: Synthetic oligonucleotide
ggauaagacagcuuggucu

SEQ ID NO: 2155307 - RNA, 19 nt, Artificial Sequence
  Description of Artificial Sequence: Synthetic oligonucleotide
cuuuaguuaugcuugcucu

SEQ ID NO: 2155308 - RNA, 19 nt, Artificial Sequence
  Description of Artificial Sequence: Synthetic oligonucleotide
ugacagucuccauagugau

SEQ ID NO: 2155309 - RNA, 19 nt, Artificial Sequence
  Description of Artificial Sequence: Synthetic oligonucleotide
aaggaugccaugguagaaa

SEQ ID NO: 2155310 - RNA, 19 nt, Artificial Sequence
  Description of Artificial Sequence: Synthetic oligonucleotide
aagcggcgcgaucucagag

SEQ ID NO: 2155311 - RNA, 19 nt, Artificial Sequence
  Description of Artificial Sequence: Synthetic oligonucleotide
ggauuucugguggagaaag

SEQ ID NO: 2155312 - RNA, 19 nt, Artificial Sequence
  Description of Artificial Sequence: Synthetic oligonucleotide
cuucggacuugccagucag

SEQ ID NO: 2155313 - RNA, 19 nt, Artificial Sequence
  Description of Artificial Sequence: Synthetic oligonucleotide
ccaacccucgaucacaagg

SEQ ID NO: 2155314 - RNA, 19 nt, Artificial Sequence
  Description of Artificial Sequence: Synthetic oligonucleotide
ugaaauccaucaugauacu

SEQ ID NO: 2155315 - RNA, 19 nt, Artificial Sequence
  Description of Artificial Sequence: Synthetic oligonucleotide
uuaguuaugcuugcucuua

SEQ ID NO: 2155316 - RNA, 19 nt, Artificial Sequence
  Description of Artificial Sequence: Synthetic oligonucleotide
ugggauaagacagcuuggu

SEQ ID NO: 2155317 - RNA, 19 nt, Artificial Sequence
  Description of Artificial Sequence: Synthetic oligonucleotide
cuacccacaggcugagcgg

SEQ ID NO: 2155318 - RNA, 19 nt, Artificial Sequence
  Description of Artificial Sequence: Synthetic oligonucleotide
acggagaacaggccaacca

SEQ ID NO: 2155319 - RNA, 19 nt, Artificial Sequence
  Description of Artificial Sequence: Synthetic oligonucleotide
ugcucuuaguuuucaugac

SEQ ID NO: 2155320 - RNA, 19 nt, Artificial Sequence
  Description of Artificial Sequence: Synthetic oligonucleotide
uuuucaugaccuugcuguc

SEQ ID NO: 2155321 - RNA, 19 nt, Artificial Sequence
  Description of Artificial Sequence: Synthetic oligonucleotide
ugcagguaccaccagccau

SEQ ID NO: 2155322 - RNA, 19 nt, Artificial Sequence
  Description of Artificial Sequence: Synthetic oligonucleotide
uuccggcccacuauacugc

SEQ ID NO: 2155323 - RNA, 19 nt, Artificial Sequence
  Description of Artificial Sequence: Synthetic oligonucleotide
aacggaagcucgacuggac

SEQ ID NO: 2155324 - RNA, 19 nt, Artificial Sequence
  Description of Artificial Sequence: Synthetic oligonucleotide
ggucauguuucuaugggcc

SEQ ID NO: 2155325 - RNA, 19 nt, Artificial Sequence
  Description of Artificial Sequence: Synthetic oligonucleotide
cagccauaugccauuuaag

SEQ ID NO: 2155326 - RNA, 19 nt, Artificial Sequence
  Description of Artificial Sequence: Synthetic oligonucleotide
gguagggaggucauuaggc

SEQ ID NO: 2155327 - RNA, 19 nt, Artificial Sequence
  Description of Artificial Sequence: Synthetic oligonucleotide
gucacaauuaggaccccag

SEQ ID NO: 2155328 - RNA, 19 nt, Artificial Sequence
  Description of Artificial Sequence: Synthetic oligonucleotide
uaucggcugucucccuugg

SEQ ID NO: 2155329 - RNA, 19 nt, Artificial Sequence
  Description of Artificial Sequence: Synthetic oligonucleotide
cuaagcggcgcgaucucag

SEQ ID NO: 2155330 - RNA, 19 nt, Artificial Sequence
  Description of Artificial Sequence: Synthetic oligonucleotide
uaggcacaaaguuguccag

SEQ ID NO: 2155331 - RNA, 19 nt, Artificial Sequence
  Description of Artificial Sequence: Synthetic oligonucleotide
ggcaacggaagcucgacug

SEQ ID NO: 2155332 - RNA, 19 nt, Artificial Sequence
  Description of Artificial Sequence: Synthetic oligonucleotide
aaacaacacuuuauuuccu

SEQ ID NO: 2155333 - RNA, 19 nt, Artificial Sequence
  Description of Artificial Sequence: Synthetic oligonucleotide
aggcaaucacuacccacag

SEQ ID NO: 2155334 - RNA, 19 nt, Artificial Sequence
  Description of Artificial Sequence: Synthetic oligonucleotide
ugguggucauguuucuaug

SEQ ID NO: 2155335 - RNA, 19 nt, Artificial Sequence
  Description of Artificial Sequence: Synthetic oligonucleotide
ucagugguguuccggccca

SEQ ID NO: 2155336 - RNA, 19 nt, Artificial Sequence
  Description of Artificial Sequence: Synthetic oligonucleotide
cacaaggugaaugaaugca

SEQ ID NO: 2155337 - RNA, 19 nt, Artificial Sequence
  Description of Artificial Sequence: Synthetic oligonucleotide
aaaaccuaagcggcgcgau

SEQ ID NO: 2155338 - RNA, 19 nt, Artificial Sequence
  Description of Artificial Sequence: Synthetic oligonucleotide
gauaguucugacccuccaa

SEQ ID NO: 2155339 - RNA, 19 nt, Artificial Sequence
  Description of Artificial Sequence: Synthetic oligonucleotide
gcucuuaguuuucaugacc

SEQ ID NO: 2155340 - RNA, 19 nt, Artificial Sequence
  Description of Artificial Sequence: Synthetic oligonucleotide
uauugguggucauguuucu

SEQ ID NO: 2155341 - RNA, 19 nt, Artificial Sequence
  Description of Artificial Sequence: Synthetic oligonucleotide
aagaugaggauugcaggua

SEQ ID NO: 2155342 - RNA, 19 nt, Artificial Sequence
  Description of Artificial Sequence: Synthetic oligonucleotide
cagggugccucaucagugg

SEQ ID NO: 2155343 - RNA, 19 nt, Artificial Sequence
  Description of Artificial Sequence: Synthetic oligonucleotide
cugucaggaaguacagcac

SEQ ID NO: 2155344 - RNA, 19 nt, Artificial Sequence
  Description of Artificial Sequence: Synthetic oligonucleotide
uagagucaaacaacacuuu

SEQ ID NO: 2155345 - RNA, 19 nt, Artificial Sequence
  Description of Artificial Sequence: Synthetic oligonucleotide
agauaguucugacccucca

SEQ ID NO: 2155346 - RNA, 19 nt, Artificial Sequence
  Description of Artificial Sequence: Synthetic oligonucleotide
accccagagacggagaaca

SEQ ID NO: 2155347 - RNA, 19 nt, Artificial Sequence
  Description of Artificial Sequence: Synthetic oligonucleotide
cucuuaguuuucaugaccu

SEQ ID NO: 2155348 - RNA, 19 nt, Artificial Sequence
  Description of Artificial Sequence: Synthetic oligonucleotide
agucagcgccuauggcucc

SEQ ID NO: 2155349 - RNA, 19 nt, Artificial Sequence
  Description of Artificial Sequence: Synthetic oligonucleotide
ucgacuggacagcagccaa

SEQ ID NO: 2155350 - RNA, 19 nt, Artificial Sequence
  Description of Artificial Sequence: Synthetic oligonucleotide
gccuauggcucccaaacag

SEQ ID NO: 2155351 - RNA, 19 nt, Artificial Sequence
  Description of Artificial Sequence: Synthetic oligonucleotide
aucagauaguucugacccu

SEQ ID NO: 2155352 - RNA, 19 nt, Artificial Sequence
  Description of Artificial Sequence: Synthetic oligonucleotide
aucagccugagugugacaa

SEQ ID NO: 2155353 - RNA, 19 nt, Artificial Sequence
  Description of Artificial Sequence: Synthetic oligonucleotide
auaccagguagggagguca

SEQ ID NO: 2155354 - RNA, 19 nt, Artificial Sequence
  Description of Artificial Sequence: Synthetic oligonucleotide
cuauacugcucuuuaguua

SEQ ID NO: 2155355 - RNA, 19 nt, Artificial Sequence
  Description of Artificial Sequence: Synthetic oligonucleotide
cagagcgacuucuuagcac

SEQ ID NO: 2155356 - RNA, 19 nt, Artificial Sequence
  Description of Artificial Sequence: Synthetic oligonucleotide
ccaggauauaccagguagg

SEQ ID NO: 2155357 - RNA, 19 nt, Artificial Sequence
  Description of Artificial Sequence: Synthetic oligonucleotide
uccccagagaaaagcugug

SEQ ID NO: 2155358 - RNA, 19 nt, Artificial Sequence
  Description of Artificial Sequence: Synthetic oligonucleotide
aggugaaugaaugcacaca

SEQ ID NO: 2155359 - RNA, 19 nt, Artificial Sequence
  Description of Artificial Sequence: Synthetic oligonucleotide
gcggaaggauuucuggugg

SEQ ID NO: 2155360 - RNA, 19 nt, Artificial Sequence
  Description of Artificial Sequence: Synthetic oligonucleotide
guaggauaaagcggaagga

SEQ ID NO: 2155361 - RNA, 19 nt, Artificial Sequence
  Description of Artificial Sequence: Synthetic oligonucleotide
gagugugacaaaucagaua

SEQ ID NO: 2155362 - RNA, 19 nt, Artificial Sequence
  Description of Artificial Sequence: Synthetic oligonucleotide
gaaggauuucugguggaga

SEQ ID NO: 2155363 - RNA, 19 nt, Artificial Sequence
  Description of Artificial Sequence: Synthetic oligonucleotide
aggucauuaggcacaaagu

SEQ ID NO: 2155364 - RNA, 19 nt, Artificial Sequence
  Description of Artificial Sequence: Synthetic oligonucleotide
uccccguacaucuggccca

SEQ ID NO: 2155365 - RNA, 19 nt, Artificial Sequence
  Description of Artificial Sequence: Synthetic oligonucleotide
guauggauguaaggggccc

SEQ ID NO: 2155366 - RNA, 19 nt, Artificial Sequence
  Description of Artificial Sequence: Synthetic oligonucleotide
ccaacuugugggaggaggg

SEQ ID NO: 2155367 - RNA, 19 nt, Artificial Sequence
  Description of Artificial Sequence: Synthetic oligonucleotide
caucagugguguuccggcc

SEQ ID NO: 2155368 - RNA, 19 nt, Artificial Sequence
  Description of Artificial Sequence: Synthetic oligonucleotide
aaguggggcaacggaagcu

SEQ ID NO: 2155369 - RNA, 19 nt, Artificial Sequence
  Description of Artificial Sequence: Synthetic oligonucleotide
aucacuacccacaggcuga

SEQ ID NO: 2155370 - RNA, 19 nt, Artificial Sequence
  Description of Artificial Sequence: Synthetic oligonucleotide
accggcuucggacuugcca

SEQ ID NO: 2155371 - RNA, 19 nt, Artificial Sequence
  Description of Artificial Sequence: Synthetic oligonucleotide
gaaaggcaaucacuaccca

SEQ ID NO: 2155372 - RNA, 19 nt, Artificial Sequence
  Description of Artificial Sequence: Synthetic oligonucleotide
cuguaggauaaagcggaag

SEQ ID NO: 2155373 - RNA, 19 nt, Artificial Sequence
  Description of Artificial Sequence: Synthetic oligonucleotide
uguaucggcugucucccuu

SEQ ID NO: 2155374 - RNA, 19 nt, Artificial Sequence
  Description of Artificial Sequence: Synthetic oligonucleotide
uauggauguaaggggccca

SEQ ID NO: 2155375 - RNA, 19 nt, Artificial Sequence
  Description of Artificial Sequence: Synthetic oligonucleotide
agcacagggccagucgacg

SEQ ID NO: 2155376 - RNA, 19 nt, Artificial Sequence
  Description of Artificial Sequence: Synthetic oligonucleotide
ccagucgacgacauuuucc

SEQ ID NO: 2155377 - RNA, 19 nt, Artificial Sequence
  Description of Artificial Sequence: Synthetic oligonucleotide
guaucggcugucucccuug

SEQ ID NO: 2155378 - RNA, 19 nt, Artificial Sequence
  Description of Artificial Sequence: Synthetic oligonucleotide
ucuuaguuuucaugaccuu

SEQ ID NO: 2155379 - RNA, 19 nt, Artificial Sequence
  Description of Artificial Sequence: Synthetic oligonucleotide
cagagacggagaacaggcc

SEQ ID NO: 2155380 - RNA, 19 nt, Artificial Sequence
  Description of Artificial Sequence: Synthetic oligonucleotide
uaccaccagccauaugcca

SEQ ID NO: 2155381 - RNA, 19 nt, Artificial Sequence
  Description of Artificial Sequence: Synthetic oligonucleotide
uuauggcaucaaagaugag

SEQ ID NO: 2155382 - RNA, 19 nt, Artificial Sequence
  Description of Artificial Sequence: Synthetic oligonucleotide
uucggacuugccagucagc

SEQ ID NO: 2155383 - RNA, 19 nt, Artificial Sequence
  Description of Artificial Sequence: Synthetic oligonucleotide
uugcagguaccaccagcca

SEQ ID NO: 2155384 - RNA, 19 nt, Artificial Sequence
  Description of Artificial Sequence: Synthetic oligonucleotide
caucaucagccugagugug

SEQ ID NO: 2155385 - RNA, 19 nt, Artificial Sequence
  Description of Artificial Sequence: Synthetic oligonucleotide
ugggccaguauggauguaa

SEQ ID NO: 2155386 - RNA, 19 nt, Artificial Sequence
  Description of Artificial Sequence: Synthetic oligonucleotide
gcaacggaagcucgacugg

SEQ ID NO: 2155387 - RNA, 19 nt, Artificial Sequence
  Description of Artificial Sequence: Synthetic oligonucleotide
uguccagauuggucugggc

SEQ ID NO: 2155388 - RNA, 19 nt, Artificial Sequence
  Description of Artificial Sequence: Synthetic oligonucleotide
auauaccagguagggaggu

SEQ ID NO: 2155389 - RNA, 19 nt, Artificial Sequence
  Description of Artificial Sequence: Synthetic oligonucleotide
aggauaaagcggaaggauu

SEQ ID NO: 2155390 - RNA, 19 nt, Artificial Sequence
  Description of Artificial Sequence: Synthetic oligonucleotide
uggcccagagagaccacga

SEQ ID NO: 2155391 - RNA, 19 nt, Artificial Sequence
  Description of Artificial Sequence: Synthetic oligonucleotide
ccugagugugacaaaucag

SEQ ID NO: 2155392 - RNA, 19 nt, Artificial Sequence
  Description of Artificial Sequence: Synthetic oligonucleotide
guacccaucaucagccuga

SEQ ID NO: 2155393 - RNA, 19 nt, Artificial Sequence
  Description of Artificial Sequence: Synthetic oligonucleotide
ucuuagcaccggcuucgga

SEQ ID NO: 2155394 - RNA, 19 nt, Artificial Sequence
  Description of Artificial Sequence: Synthetic oligonucleotide
ugguguuccggcccacuau

SEQ ID NO: 2155395 - RNA, 19 nt, Artificial Sequence
  Description of Artificial Sequence: Synthetic oligonucleotide
ggccaguauggauguaagg

SEQ ID NO: 2155396 - RNA, 19 nt, Artificial Sequence
  Description of Artificial Sequence: Synthetic oligonucleotide
guacagcacauccccguac

SEQ ID NO: 2155397 - RNA, 19 nt, Artificial Sequence
  Description of Artificial Sequence: Synthetic oligonucleotide
uaagcggcgcgaucucaga

SEQ ID NO: 2155398 - RNA, 19 nt, Artificial Sequence
  Description of Artificial Sequence: Synthetic oligonucleotide
uugccagucagcgccuaug

SEQ ID NO: 2155399 - RNA, 19 nt, Artificial Sequence
  Description of Artificial Sequence: Synthetic oligonucleotide
ccuauggcucccaaacagc

SEQ ID NO: 2155400 - RNA, 19 nt, Artificial Sequence
  Description of Artificial Sequence: Synthetic oligonucleotide
aguacagcacauccccgua

SEQ ID NO: 2155401 - RNA, 19 nt, Artificial Sequence
  Description of Artificial Sequence: Synthetic oligonucleotide
accuaagcggcgcgaucuc

SEQ ID NO: 2155402 - RNA, 19 nt, Artificial Sequence
  Description of Artificial Sequence: Synthetic oligonucleotide
uucuuagcaccggcuucgg

SEQ ID NO: 2155403 - RNA, 19 nt, Artificial Sequence
  Description of Artificial Sequence: Synthetic oligonucleotide
guaccaccagccauaugcc

SEQ ID NO: 2155404 - RNA, 19 nt, Artificial Sequence
  Description of Artificial Sequence: Synthetic oligonucleotide
gccugagugugacaaauca

SEQ ID NO: 2155405 - RNA, 19 nt, Artificial Sequence
  Description of Artificial Sequence: Synthetic oligonucleotide
aggauauaccagguaggga

SEQ ID NO: 2155406 - RNA, 19 nt, Artificial Sequence
  Description of Artificial Sequence: Synthetic oligonucleotide
ccaaguggggcaacggaag

SEQ ID NO: 2155407 - RNA, 19 nt, Artificial Sequence
  Description of Artificial Sequence: Synthetic oligonucleotide
uccccaugcugaaauccau

SEQ ID NO: 2155408 - RNA, 19 nt, Artificial Sequence
  Description of Artificial Sequence: Synthetic oligonucleotide
gagucaaacaacacuuuau

SEQ ID NO: 2155409 - RNA, 19 nt, Artificial Sequence
  Description of Artificial Sequence: Synthetic oligonucleotide
gacccuccaacuuguggga

SEQ ID NO: 2155410 - RNA, 19 nt, Artificial Sequence
  Description of Artificial Sequence: Synthetic oligonucleotide
gaagcucgacuggacagca

SEQ ID NO: 2155411 - RNA, 19 nt, Artificial Sequence
  Description of Artificial Sequence: Synthetic oligonucleotide
agcgacuucuuagcaccgg

SEQ ID NO: 2155412 - RNA, 19 nt, Artificial Sequence
  Description of Artificial Sequence: Synthetic oligonucleotide
cacgagcuguaggauaaag

SEQ ID NO: 2155413 - RNA, 19 nt, Artificial Sequence
  Description of Artificial Sequence: Synthetic oligonucleotide
ccauagugaugaugaagcc

SEQ ID NO: 2155414 - RNA, 19 nt, Artificial Sequence
  Description of Artificial Sequence: Synthetic oligonucleotide
cacuauacugcucuuuagu

SEQ ID NO: 2155415 - RNA, 19 nt, Artificial Sequence
  Description of Artificial Sequence: Synthetic oligonucleotide
acuggacagcagccaagug

SEQ ID NO: 2155416 - RNA, 19 nt, Artificial Sequence
  Description of Artificial Sequence: Synthetic oligonucleotide
caacuugugggaggagggc

SEQ ID NO: 2155417 - RNA, 19 nt, Artificial Sequence
  Description of Artificial Sequence: Synthetic oligonucleotide
ugggcaugagugagaugcu

SEQ ID NO: 2155418 - RNA, 19 nt, Artificial Sequence
  Description of Artificial Sequence: Synthetic oligonucleotide
ccggcuucggacuugccag

SEQ ID NO: 2155419 - RNA, 19 nt, Artificial Sequence
  Description of Artificial Sequence: Synthetic oligonucleotide
gagcgacuucuuagcaccg

SEQ ID NO: 2155420 - RNA, 19 nt, Artificial Sequence
  Description of Artificial Sequence: Synthetic oligonucleotide
accacgagcuguaggauaa

SEQ ID NO: 2155421 - RNA, 19 nt, Artificial Sequence
  Description of Artificial Sequence: Synthetic oligonucleotide
ucacuacccacaggcugag

SEQ ID NO: 2155422 - RNA, 19 nt, Artificial Sequence
  Description of Artificial Sequence: Synthetic oligonucleotide
gcggcgcgaucucagagcg

SEQ ID NO: 2155423 - RNA, 19 nt, Artificial Sequence
  Description of Artificial Sequence: Synthetic oligonucleotide
cauauugguggucauguuu

SEQ ID NO: 2155424 - RNA, 19 nt, Artificial Sequence
  Description of Artificial Sequence: Synthetic oligonucleotide
gacggagaacaggccaacc

SEQ ID NO: 2155425 - RNA, 19 nt, Artificial Sequence
  Description of Artificial Sequence: Synthetic oligonucleotide
uggcaucaaagaugaggau

SEQ ID NO: 2155426 - RNA, 19 nt, Artificial Sequence
  Description of Artificial Sequence: Synthetic oligonucleotide
ggaaggauuucugguggag

SEQ ID NO: 2155427 - RNA, 19 nt, Artificial Sequence
  Description of Artificial Sequence: Synthetic oligonucleotide
ggcaaucacuacccacagg

SEQ ID NO: 2155428 - RNA, 19 nt, Artificial Sequence
  Description of Artificial Sequence: Synthetic oligonucleotide
caagaaggaugccauggua

SEQ ID NO: 2155429 - RNA, 19 nt, Artificial Sequence
  Description of Artificial Sequence: Synthetic oligonucleotide
cucugucaggaaguacagc

SEQ ID NO: 2155430 - RNA, 19 nt, Artificial Sequence
  Description of Artificial Sequence: Synthetic oligonucleotide
guaaggggcccauauuggu

SEQ ID NO: 2155431 - RNA, 19 nt, Artificial Sequence
  Description of Artificial Sequence: Synthetic oligonucleotide
uauaccagguagggagguc

SEQ ID NO: 2155432 - RNA, 19 nt, Artificial Sequence
  Description of Artificial Sequence: Synthetic oligonucleotide
cugagcgguccccagagaa

SEQ ID NO: 2155433 - RNA, 19 nt, Artificial Sequence
  Description of Artificial Sequence: Synthetic oligonucleotide
caacccucgaucacaaggu

SEQ ID NO: 2155434 - RNA, 19 nt, Artificial Sequence
  Description of Artificial Sequence: Synthetic oligonucleotide
cauucaggauguaucggcu

SEQ ID NO: 2155435 - RNA, 19 nt, Artificial Sequence
  Description of Artificial Sequence: Synthetic oligonucleotide
ggcugagcgguccccagag

SEQ ID NO: 2155436 - RNA, 19 nt, Artificial Sequence
  Description of Artificial Sequence: Synthetic oligonucleotide
aaccaacccucgaucacaa

SEQ ID NO: 2155437 - RNA, 19 nt, Artificial Sequence
  Description of Artificial Sequence: Synthetic oligonucleotide
gagacggagaacaggccaa

SEQ ID NO: 2155438 - RNA, 19 nt, Artificial Sequence
  Description of Artificial Sequence: Synthetic oligonucleotide
ggagauaaacaggaagaaa

SEQ ID NO: 2155439 - RNA, 19 nt, Artificial Sequence
  Description of Artificial Sequence: Synthetic oligonucleotide
agggugccucaucaguggu

SEQ ID NO: 2155440 - RNA, 19 nt, Artificial Sequence
  Description of Artificial Sequence: Synthetic oligonucleotide
ggccaaccaggauauacca

SEQ ID NO: 2155441 - RNA, 19 nt, Artificial Sequence
  Description of Artificial Sequence: Synthetic oligonucleotide
gggauaagacagcuugguc

SEQ ID NO: 2155442 - RNA, 19 nt, Artificial Sequence
  Description of Artificial Sequence: Synthetic oligonucleotide
agccugagugugacaaauc

SEQ ID NO: 2155443 - RNA, 19 nt, Artificial Sequence
  Description of Artificial Sequence: Synthetic oligonucleotide
agccaaguggucacaauua

SEQ ID NO: 2155444 - RNA, 19 nt, Artificial Sequence
  Description of Artificial Sequence: Synthetic oligonucleotide
ucaagugccugggccagua

SEQ ID NO: 2155445 - RNA, 19 nt, Artificial Sequence
  Description of Artificial Sequence: Synthetic oligonucleotide
gagcgguccccagagaaaa

SEQ ID NO: 2155446 - RNA, 19 nt, Artificial Sequence
  Description of Artificial Sequence: Synthetic oligonucleotide
uccggcccacuauacugcu

SEQ ID NO: 2155447 - RNA, 19 nt, Artificial Sequence
  Description of Artificial Sequence: Synthetic oligonucleotide
uuaggaccccagagacgga

SEQ ID NO: 2155448 - RNA, 19 nt, Artificial Sequence
  Description of Artificial Sequence: Synthetic oligonucleotide
uugaaucuucugggaggug

SEQ ID NO: 2155449 - RNA, 19 nt, Artificial Sequence
  Description of Artificial Sequence: Synthetic oligonucleotide
ggaagcucgacuggacagc

SEQ ID NO: 2155450 - RNA, 19 nt, Artificial Sequence
  Description of Artificial Sequence: Synthetic oligonucleotide
cuugaaucuucugggaggu

SEQ ID NO: 2155451 - RNA, 19 nt, Artificial Sequence
  Description of Artificial Sequence: Synthetic oligonucleotide
agauuggucugggcaugag

SEQ ID NO: 2155452 - RNA, 19 nt, Artificial Sequence
  Description of Artificial Sequence: Synthetic oligonucleotide
ggcgcgaucucagagcgac

SEQ ID NO: 2155453 - RNA, 19 nt, Artificial Sequence
  Description of Artificial Sequence: Synthetic oligonucleotide
ccacuauacugcucuuuag

SEQ ID NO: 2155454 - RNA, 19 nt, Artificial Sequence
  Description of Artificial Sequence: Synthetic oligonucleotide
agucgacgacauuuuccaa

SEQ ID NO: 2155455 - RNA, 19 nt, Artificial Sequence
  Description of Artificial Sequence: Synthetic oligonucleotide
gagagaccacgagcuguag

SEQ ID NO: 2155456 - RNA, 19 nt, Artificial Sequence
  Description of Artificial Sequence: Synthetic oligonucleotide
acagcacauccccguacau

SEQ ID NO: 2155457 - RNA, 19 nt, Artificial Sequence
  Description of Artificial Sequence: Synthetic oligonucleotide
cagcacagggccagucgac

SEQ ID NO: 2155458 - RNA, 19 nt, Artificial Sequence
  Description of Artificial Sequence: Synthetic oligonucleotide
accaacccucgaucacaag

SEQ ID NO: 2155459 - RNA, 19 nt, Artificial Sequence
  Description of Artificial Sequence: Synthetic oligonucleotide
agagagaccacgagcugua

SEQ ID NO: 2155460 - RNA, 19 nt, Artificial Sequence
  Description of Artificial Sequence: Synthetic oligonucleotide
agaugcuuuauggcaucaa

SEQ ID NO: 2155461 - RNA, 19 nt, Artificial Sequence
  Description of Artificial Sequence: Synthetic oligonucleotide
cagcacauccccguacauc

SEQ ID NO: 2155462 - RNA, 19 nt, Artificial Sequence
  Description of Artificial Sequence: Synthetic oligonucleotide
gcuccccaugcugaaaucc

SEQ ID NO: 2155463 - RNA, 19 nt, Artificial Sequence
  Description of Artificial Sequence: Synthetic oligonucleotide
cugcucuuuaguuaugcuu

SEQ ID NO: 2155464 - RNA, 19 nt, Artificial Sequence
  Description of Artificial Sequence: Synthetic oligonucleotide
uggcucccaaacagcccca

SEQ ID NO: 2155465 - RNA, 19 nt, Artificial Sequence
  Description of Artificial Sequence: Synthetic oligonucleotide
aagcucgacuggacagcag

SEQ ID NO: 2155466 - RNA, 19 nt, Artificial Sequence
  Description of Artificial Sequence: Synthetic oligonucleotide
auugguggucauguuucua

SEQ ID NO: 2155467 - RNA, 19 nt, Artificial Sequence
  Description of Artificial Sequence: Synthetic oligonucleotide
cccuccaacuugugggagg

SEQ ID NO: 2155468 - RNA, 19 nt, Artificial Sequence
  Description of Artificial Sequence: Synthetic oligonucleotide
gacuggacagcagccaagu

SEQ ID NO: 2155469 - RNA, 19 nt, Artificial Sequence
  Description of Artificial Sequence: Synthetic oligonucleotide
auggauguaaggggcccau

SEQ ID NO: 2155470 - RNA, 19 nt, Artificial Sequence
  Description of Artificial Sequence: Synthetic oligonucleotide
ccguacaucuggcccagag

SEQ ID NO: 2155471 - RNA, 19 nt, Artificial Sequence
  Description of Artificial Sequence: Synthetic oligonucleotide
caaccaggauauaccaggu

SEQ ID NO: 2155472 - RNA, 19 nt, Artificial Sequence
  Description of Artificial Sequence: Synthetic oligonucleotide
ccagccauaugccauuuaa

SEQ ID NO: 2155473 - RNA, 19 nt, Artificial Sequence
  Description of Artificial Sequence: Synthetic oligonucleotide
auguaucggcugucucccu

SEQ ID NO: 2155474 - RNA, 19 nt, Artificial Sequence
  Description of Artificial Sequence: Synthetic oligonucleotide
ggauguaaggggcccauau

SEQ ID NO: 2155475 - RNA, 19 nt, Artificial Sequence
  Description of Artificial Sequence: Synthetic oligonucleotide
ggauugcagguaccaccag

SEQ ID NO: 2155476 - RNA, 19 nt, Artificial Sequence
  Description of Artificial Sequence: Synthetic oligonucleotide
ggauaaagcggaaggauuu

SEQ ID NO: 2155477 - RNA, 19 nt, Artificial Sequence
  Description of Artificial Sequence: Synthetic oligonucleotide
caacggaagcucgacugga

SEQ ID NO: 2155478 - RNA, 19 nt, Artificial Sequence
  Description of Artificial Sequence: Synthetic oligonucleotide
gccaaccaggauauaccag

SEQ ID NO: 2155479 - RNA, 19 nt, Artificial Sequence
  Description of Artificial Sequence: Synthetic oligonucleotide
ccaucaugauacucuguca

SEQ ID NO: 2155480 - RNA, 19 nt, Artificial Sequence
  Description of Artificial Sequence: Synthetic oligonucleotide
gaccccagagacggagaac

SEQ ID NO: 2155481 - RNA, 19 nt, Artificial Sequence
  Description of Artificial Sequence: Synthetic oligonucleotide
augggccgcuggcugcuug

SEQ ID NO: 2155482 - RNA, 19 nt, Artificial Sequence
  Description of Artificial Sequence: Synthetic oligonucleotide
gguguuccggcccacuaua

SEQ ID NO: 2155483 - RNA, 19 nt, Artificial Sequence
  Description of Artificial Sequence: Synthetic oligonucleotide
cucgacuggacagcagcca

SEQ ID NO: 2155484 - RNA, 19 nt, Artificial Sequence
  Description of Artificial Sequence: Synthetic oligonucleotide
caaucacuacccacaggcu

SEQ ID NO: 2155485 - RNA, 19 nt, Artificial Sequence
  Description of Artificial Sequence: Synthetic oligonucleotide
agaccacgagcuguaggau

SEQ ID NO: 2155486 - RNA, 19 nt, Artificial Sequence
  Description of Artificial Sequence: Synthetic oligonucleotide
acuugugggaggagggcuu

SEQ ID NO: 2155487 - RNA, 19 nt, Artificial Sequence
  Description of Artificial Sequence: Synthetic oligonucleotide
gcugucucccuuggaauac

SEQ ID NO: 2155488 - RNA, 19 nt, Artificial Sequence
  Description of Artificial Sequence: Synthetic oligonucleotide
gguggccuagcuccccaug

SEQ ID NO: 2155489 - RNA, 19 nt, Artificial Sequence
  Description of Artificial Sequence: Synthetic oligonucleotide
cagccucaagugccugggc

SEQ ID NO: 2155490 - RNA, 19 nt, Artificial Sequence
  Description of Artificial Sequence: Synthetic oligonucleotide
aggggcccauauugguggu

SEQ ID NO: 2155491 - RNA, 19 nt, Artificial Sequence
  Description of Artificial Sequence: Synthetic oligonucleotide
uggucacaauuaggacccc

SEQ ID NO: 2155492 - RNA, 19 nt, Artificial Sequence
  Description of Artificial Sequence: Synthetic oligonucleotide
auguuucuaugggccgcug

SEQ ID NO: 2155493 - RNA, 19 nt, Artificial Sequence
  Description of Artificial Sequence: Synthetic oligonucleotide
ggaauacucuuuccagagu

SEQ ID NO: 2155494 - RNA, 19 nt, Artificial Sequence
  Description of Artificial Sequence: Synthetic oligonucleotide
gcucgacuggacagcagcc

SEQ ID NO: 2155495 - RNA, 19 nt, Artificial Sequence
  Description of Artificial Sequence: Synthetic oligonucleotide
ggcugucucccuuggaaua

SEQ ID NO: 2155496 - RNA, 19 nt, Artificial Sequence
  Description of Artificial Sequence: Synthetic oligonucleotide
agcgguccccagagaaaag

SEQ ID NO: 2155497 - RNA, 19 nt, Artificial Sequence
  Description of Artificial Sequence: Synthetic oligonucleotide
uggauguaaggggcccaua

SEQ ID NO: 2155498 - RNA, 19 nt, Artificial Sequence
  Description of Artificial Sequence: Synthetic oligonucleotide
accagccauaugccauuua

SEQ ID NO: 2155499 - RNA, 19 nt, Artificial Sequence
  Description of Artificial Sequence: Synthetic oligonucleotide
gggcccauauuggugguca

SEQ ID NO: 2155500 - RNA, 19 nt, Artificial Sequence
  Description of Artificial Sequence: Synthetic oligonucleotide
ggucacaauuaggacccca

SEQ ID NO: 2155501 - RNA, 19 nt, Artificial Sequence
  Description of Artificial Sequence: Synthetic oligonucleotide
ggaccccagagacggagaa

SEQ ID NO: 2155502 - RNA, 19 nt, Artificial Sequence
  Description of Artificial Sequence: Synthetic oligonucleotide
ccagauuggucugggcaug

SEQ ID NO: 2155503 - RNA, 19 nt, Artificial Sequence
  Description of Artificial Sequence: Synthetic oligonucleotide
gcagguaccaccagccaua

SEQ ID NO: 2155504 - RNA, 19 nt, Artificial Sequence
  Description of Artificial Sequence: Synthetic oligonucleotide
cagauuggucugggcauga

SEQ ID NO: 2155505 - RNA, 19 nt, Artificial Sequence
  Description of Artificial Sequence: Synthetic oligonucleotide
aggaccccagagacggaga

SEQ ID NO: 2155506 - RNA, 19 nt, Artificial Sequence
  Description of Artificial Sequence: Synthetic oligonucleotide
gcccauauugguggucaug

SEQ ID NO: 2155507 - RNA, 19 nt, Artificial Sequence
  Description of Artificial Sequence: Synthetic oligonucleotide
caaaguuguccagccucaa

SEQ ID NO: 2155508 - RNA, 19 nt, Artificial Sequence
  Description of Artificial Sequence: Synthetic oligonucleotide
acccacaggcugagcgguc

SEQ ID NO: 2155509 - RNA, 19 nt, Artificial Sequence
  Description of Artificial Sequence: Synthetic oligonucleotide
gucugggcaugagugagau

SEQ ID NO: 2155510 - RNA, 19 nt, Artificial Sequence
  Description of Artificial Sequence: Synthetic oligonucleotide
ccagcacagggccagucga

SEQ ID NO: 2155511 - RNA, 19 nt, Artificial Sequence
  Description of Artificial Sequence: Synthetic oligonucleotide
ggggcaacggaagcucgac

SEQ ID NO: 2155512 - RNA, 19 nt, Artificial Sequence
  Description of Artificial Sequence: Synthetic oligonucleotide
gggugccucaucaguggug

SEQ ID NO: 2155513 - RNA, 19 nt, Artificial Sequence
  Description of Artificial Sequence: Synthetic oligonucleotide
cccauauugguggucaugu

SEQ ID NO: 2155514 - RNA, 19 nt, Artificial Sequence
  Description of Artificial Sequence: Synthetic oligonucleotide
caugagugagaugcuuuau

SEQ ID NO: 2155515 - RNA, 19 nt, Artificial Sequence
  Description of Artificial Sequence: Synthetic oligonucleotide
gucucccuuggaauacucu

SEQ ID NO: 2155516 - RNA, 19 nt, Artificial Sequence
  Description of Artificial Sequence: Synthetic oligonucleotide
ccagguagggaggucauua

SEQ ID NO: 2155517 - RNA, 19 nt, Artificial Sequence
  Description of Artificial Sequence: Synthetic oligonucleotide
cggacuugccagucagcgc

SEQ ID NO: 2155518 - RNA, 19 nt, Artificial Sequence
  Description of Artificial Sequence: Synthetic oligonucleotide
gcgaucucagagcgacuuc

SEQ ID NO: 2155519 - RNA, 19 nt, Artificial Sequence
  Description of Artificial Sequence: Synthetic oligonucleotide
ccccagagacggagaacag

SEQ ID NO: 2155520 - RNA, 19 nt, Artificial Sequence
  Description of Artificial Sequence: Synthetic oligonucleotide
cuagcuccccaugcugaaa

SEQ ID NO: 2155521 - RNA, 19 nt, Artificial Sequence
  Description of Artificial Sequence: Synthetic oligonucleotide
gugugacaaaucagauagu

SEQ ID NO: 2155522 - RNA, 19 nt, Artificial Sequence
  Description of Artificial Sequence: Synthetic oligonucleotide
cguacaucuggcccagaga

SEQ ID NO: 2155523 - RNA, 19 nt, Artificial Sequence
  Description of Artificial Sequence: Synthetic oligonucleotide
agggccagucgacgacauu

SEQ ID NO: 2155524 - RNA, 19 nt, Artificial Sequence
  Description of Artificial Sequence: Synthetic oligonucleotide
caccggcuucggacuugcc

SEQ ID NO: 2155525 - RNA, 19 nt, Artificial Sequence
  Description of Artificial Sequence: Synthetic oligonucleotide
gggccagucgacgacauuu

SEQ ID NO: 2155526 - RNA, 19 nt, Artificial Sequence
  Description of Artificial Sequence: Synthetic oligonucleotide
gcaccggcuucggacuugc

SEQ ID NO: 2155527 - RNA, 19 nt, Artificial Sequence
  Description of Artificial Sequence: Synthetic oligonucleotide
ggcuucggacuugccaguc

SEQ ID NO: 2155528 - RNA, 19 nt, Artificial Sequence
  Description of Artificial Sequence: Synthetic oligonucleotide
gacuugccagucagcgccu

SEQ ID NO: 2155529 - RNA, 19 nt, Artificial Sequence
  Description of Artificial Sequence: Synthetic oligonucleotide
gcuguaggauaaagcggaa

SEQ ID NO: 2155530 - RNA, 19 nt, Artificial Sequence
  Description of Artificial Sequence: Synthetic oligonucleotide
ccuagcuccccaugcugaa

SEQ ID NO: 2155531 - RNA, 19 nt, Artificial Sequence
  Description of Artificial Sequence: Synthetic oligonucleotide
cagugguguuccggcccac

SEQ ID NO: 2155532 - RNA, 19 nt, Artificial Sequence
  Description of Artificial Sequence: Synthetic oligonucleotide
cgacgacauuuuccaagug

SEQ ID NO: 2155533 - RNA, 19 nt, Artificial Sequence
  Description of Artificial Sequence: Synthetic oligonucleotide
cuaugggccgcuggcugcu

SEQ ID NO: 2155534 - RNA, 19 nt, Artificial Sequence
  Description of Artificial Sequence: Synthetic oligonucleotide
ccccagagaaaagcuguga

SEQ ID NO: 2155535 - RNA, 19 nt, Artificial Sequence
  Description of Artificial Sequence: Synthetic oligonucleotide
cugucucccuuggaauacu

SEQ ID NO: 2155536 - RNA, 19 nt, Artificial Sequence
  Description of Artificial Sequence: Synthetic oligonucleotide
uaugggccgcuggcugcuu

SEQ ID NO: 2155537 - RNA, 19 nt, Artificial Sequence
  Description of Artificial Sequence: Synthetic oligonucleotide
gggcaacggaagcucgacu

SEQ ID NO: 2155538 - RNA, 19 nt, Artificial Sequence
  Description of Artificial Sequence: Synthetic oligonucleotide
cuugccagucagcgccuau

SEQ ID NO: 2155539 - RNA, 19 nt, Artificial Sequence
  Description of Artificial Sequence: Synthetic oligonucleotide
cggaaggauuucuggugga

SEQ ID NO: 2155540 - RNA, 19 nt, Artificial Sequence
  Description of Artificial Sequence: Synthetic oligonucleotide
cagcagccaaguggucaca

SEQ ID NO: 2155541 - RNA, 19 nt, Artificial Sequence
  Description of Artificial Sequence: Synthetic oligonucleotide
ccccguacaucuggcccag

SEQ ID NO: 2155542 - RNA, 19 nt, Artificial Sequence
  Description of Artificial Sequence: Synthetic oligonucleotide
acaggccaaccaggauaua

SEQ ID NO: 2155543 - RNA, 19 nt, Artificial Sequence
  Description of Artificial Sequence: Synthetic oligonucleotide
gcagccaaguggucacaau

SEQ ID NO: 2155544 - RNA, 19 nt, Artificial Sequence
  Description of Artificial Sequence: Synthetic oligonucleotide
agccaucauucaggaugua

SEQ ID NO: 2155545 - RNA, 19 nt, Artificial Sequence
  Description of Artificial Sequence: Synthetic oligonucleotide
cggcccacuauacugcucu

SEQ ID NO: 2155546 - RNA, 19 nt, Artificial Sequence
  Description of Artificial Sequence: Synthetic oligonucleotide
ggggcccauauuggugguc

SEQ ID NO: 2155547 - RNA, 19 nt, Artificial Sequence
  Description of Artificial Sequence: Synthetic oligonucleotide
ccggcccacuauacugcuc

SEQ ID NO: 2155548 - RNA, 19 nt, Artificial Sequence
  Description of Artificial Sequence: Synthetic oligonucleotide
cagucuccauagugaugau

SEQ ID NO: 2155549 - RNA, 19 nt, Artificial Sequence
  Description of Artificial Sequence: Synthetic oligonucleotide
caagugccugggccaguau

SEQ ID NO: 2155550 - RNA, 19 nt, Artificial Sequence
  Description of Artificial Sequence: Synthetic oligonucleotide
cgacuucuuagcaccggcu

SEQ ID NO: 2155551 - RNA, 19 nt, Artificial Sequence
  Description of Artificial Sequence: Synthetic oligonucleotide
gggcaugagugagaugcuu

SEQ ID NO: 2155552 - RNA, 19 nt, Artificial Sequence
  Description of Artificial Sequence: Synthetic oligonucleotide
ccauauugguggucauguu

SEQ ID NO: 2155553 - RNA, 19 nt, Artificial Sequence
  Description of Artificial Sequence: Synthetic oligonucleotide
ggcccauauugguggucau

SEQ ID NO: 2155554 - RNA, 19 nt, Artificial Sequence
  Description of Artificial Sequence: Synthetic oligonucleotide
ggccagucgacgacauuuu

SEQ ID NO: 2155555 - RNA, 19 nt, Artificial Sequence
  Description of Artificial Sequence: Synthetic oligonucleotide
ccgcuggcugcuuggagau

SEQ ID NO: 2155556 - RNA, 19 nt, Artificial Sequence
  Description of Artificial Sequence: Synthetic oligonucleotide
gcccacuauacugcucuuu

SEQ ID NO: 2155557 - RNA, 19 nt, Artificial Sequence
  Description of Artificial Sequence: Synthetic oligonucleotide
gggccgcuggcugcuugga

SEQ ID NO: 2155558 - RNA, 19 nt, Artificial Sequence
  Description of Artificial Sequence: Synthetic oligonucleotide
caccagccauaugccauuu

SEQ ID NO: 2155559 - RNA, 19 nt, Artificial Sequence
  Description of Artificial Sequence: Synthetic oligonucleotide
ggcccacuauacugcucuu

SEQ ID NO: 2155560 - RNA, 19 nt, Artificial Sequence
  Description of Artificial Sequence: Synthetic oligonucleotide
cgcgaucucagagcgacuu

SEQ ID NO: 2155561 - RNA, 19 nt, Artificial Sequence
  Description of Artificial Sequence: Synthetic oligonucleotide
ccacgagcuguaggauaaa

SEQ ID NO: 2155562 - RNA, 19 nt, Artificial Sequence
  Description of Artificial Sequence: Synthetic oligonucleotide
ccucgaucacaaggugaau

SEQ ID NO: 2155563 - RNA, 19 nt, Artificial Sequence
  Description of Artificial Sequence: Synthetic oligonucleotide
cggcuucggacuugccagu

SEQ ID NO: 2155564 - RNA, 19 nt, Artificial Sequence
  Description of Artificial Sequence: Synthetic oligonucleotide
gcgcgaucucagagcgacu

SEQ ID NO: 2155565 - RNA, 19 nt, Artificial Sequence
  Description of Artificial Sequence: Synthetic oligonucleotide
cggcgcgaucucagagcga

SEQ ID NO: 2155566 - RNA, 19 nt, Artificial Sequence
  Description of Artificial Sequence: Synthetic oligonucleotide
cccguacaucuggcccaga

SEQ ID NO: 2155567 - RNA, 19 nt, Artificial Sequence
  Description of Artificial Sequence: Synthetic oligonucleotide
uuuaauauuggguaaaugg

SEQ ID NO: 2155568 - RNA, 19 nt, Artificial Sequence
  Description of Artificial Sequence: Synthetic oligonucleotide
auagguaugauacagcacc

SEQ ID NO: 2155569 - RNA, 19 nt, Artificial Sequence
  Description of Artificial Sequence: Synthetic oligonucleotide
uauauaauaaaacauuucu

SEQ ID NO: 2155570 - RNA, 19 nt, Artificial Sequence
  Description of Artificial Sequence: Synthetic oligonucleotide
agauaaauaaaucugguag

SEQ ID NO: 2155571 - RNA, 19 nt, Artificial Sequence
  Description of Artificial Sequence: Synthetic oligonucleotide
aaaacaauucuccccaccc

SEQ ID NO: 2155572 - RNA, 19 nt, Artificial Sequence
  Description of Artificial Sequence: Synthetic oligonucleotide
aaguauuguauauacaguc

SEQ ID NO: 2155573 - RNA, 19 nt, Artificial Sequence
  Description of Artificial Sequence: Synthetic oligonucleotide
aauaaguuuaauaagauaa

SEQ ID NO: 2155574 - RNA, 19 nt, Artificial Sequence
  Description of Artificial Sequence: Synthetic oligonucleotide
uuauauauauauauaauaa

SEQ ID NO: 2155575 - RNA, 19 nt, Artificial Sequence
  Description of Artificial Sequence: Synthetic oligonucleotide
uguauauacagucacuuag

SEQ ID NO: 2155576 - RNA, 19 nt, Artificial Sequence
  Description of Artificial Sequence: Synthetic oligonucleotide
uauauauauauaauaaaac

SEQ ID NO: 2155577 - RNA, 19 nt, Artificial Sequence
  Description of Artificial Sequence: Synthetic oligonucleotide
aaaacaacaaguaauuuag

SEQ ID NO: 2155578 - RNA, 19 nt, Artificial Sequence
  Description of Artificial Sequence: Synthetic oligonucleotide
aauaagauaaauaaaucug

SEQ ID NO: 2155579 - RNA, 19 nt, Artificial Sequence
  Description of Artificial Sequence: Synthetic oligonucleotide
guaaucugaacauaaaggg

SEQ ID NO: 2155580 - RNA, 19 nt, Artificial Sequence
  Description of Artificial Sequence: Synthetic oligonucleotide
aguuuaauaagauaaauaa

SEQ ID NO: 2155581 - RNA, 19 nt, Artificial Sequence
  Description of Artificial Sequence: Synthetic oligonucleotide
ugagaaacaagcaagcagc

SEQ ID NO: 2155582 - RNA, 19 nt, Artificial Sequence
  Description of Artificial Sequence: Synthetic oligonucleotide
guaauuuagcuuuugaaag

SEQ ID NO: 2155583 - RNA, 19 nt, Artificial Sequence
  Description of Artificial Sequence: Synthetic oligonucleotide
aauaaguacuacugccucc

SEQ ID NO: 2155584 - RNA, 19 nt, Artificial Sequence
  Description of Artificial Sequence: Synthetic oligonucleotide
auugucauagguaugauac

SEQ ID NO: 2155585 - RNA, 19 nt, Artificial Sequence
  Description of Artificial Sequence: Synthetic oligonucleotide
aauucugggaccuuucauc

SEQ ID NO: 2155586 - RNA, 19 nt, Artificial Sequence
  Description of Artificial Sequence: Synthetic oligonucleotide
aaauaaguacuacugccuc

SEQ ID NO: 2155587 - RNA, 19 nt, Artificial Sequence
  Description of Artificial Sequence: Synthetic oligonucleotide
aguucuauccgcucaaggc

SEQ ID NO: 2155588 - RNA, 19 nt, Artificial Sequence
  Description of Artificial Sequence: Synthetic oligonucleotide
aauacucagucaccaaggc

SEQ ID NO: 2155589 - RNA, 19 nt, Artificial Sequence
  Description of Artificial Sequence: Synthetic oligonucleotide
aauaagauuuuaaauaagu

SEQ ID NO: 2155590 - RNA, 19 nt, Artificial Sequence
  Description of Artificial Sequence: Synthetic oligonucleotide
aauggaaccugguaagguc

SEQ ID NO: 2155591 - RNA, 19 nt, Artificial Sequence
  Description of Artificial Sequence: Synthetic oligonucleotide
uuaauaagauaaauaaauc

SEQ ID NO: 2155592 - RNA, 19 nt, Artificial Sequence
  Description of Artificial Sequence: Synthetic oligonucleotide
agugucauuaaauacucag

SEQ ID NO: 2155593 - RNA, 19 nt, Artificial Sequence
  Description of Artificial Sequence: Synthetic oligonucleotide
auggaaguauuguauauac

SEQ ID NO: 2155594 - RNA, 19 nt, Artificial Sequence
  Description of Artificial Sequence: Synthetic oligonucleotide
uacucagucaccaaggcug

SEQ ID NO: 2155595 - RNA, 19 nt, Artificial Sequence
  Description of Artificial Sequence: Synthetic oligonucleotide
ugaaagagcauaauaaaau

SEQ ID NO: 2155596 - RNA, 19 nt, Artificial Sequence
  Description of Artificial Sequence: Synthetic oligonucleotide
uauauauauauauaauaaa

SEQ ID NO: 2155597 - RNA, 19 nt, Artificial Sequence
  Description of Artificial Sequence: Synthetic oligonucleotide
aaacaauucuccccacccc

SEQ ID NO: 2155598 - RNA, 19 nt, Artificial Sequence
  Description of Artificial Sequence: Synthetic oligonucleotide
aguauagaauucugggacc

SEQ ID NO: 2155599 - RNA, 19 nt, Artificial Sequence
  Description of Artificial Sequence: Synthetic oligonucleotide
aguaauuuagcuuuugaaa

SEQ ID NO: 2155600 - RNA, 19 nt, Artificial Sequence
  Description of Artificial Sequence: Synthetic oligonucleotide
aagagcauaauaaaauaag

SEQ ID NO: 2155601 - RNA, 19 nt, Artificial Sequence
  Description of Artificial Sequence: Synthetic oligonucleotide
auugugacugcccugcuac

SEQ ID NO: 2155602 - RNA, 19 nt, Artificial Sequence
  Description of Artificial Sequence: Synthetic oligonucleotide
aauauuggguaaauggguc

SEQ ID NO: 2155603 - RNA, 19 nt, Artificial Sequence
  Description of Artificial Sequence: Synthetic oligonucleotide
auauuggguaaaugggucc

SEQ ID NO: 2155604 - RNA, 19 nt, Artificial Sequence
  Description of Artificial Sequence: Synthetic oligonucleotide
gguaguauagaauucuggg

SEQ ID NO: 2155605 - RNA, 19 nt, Artificial Sequence
  Description of Artificial Sequence: Synthetic oligonucleotide
aguacuacugccuccuugg

SEQ ID NO: 2155606 - RNA, 19 nt, Artificial Sequence
  Description of Artificial Sequence: Synthetic oligonucleotide
uucucuugauuccagcccg

SEQ ID NO: 2155607 - RNA, 19 nt, Artificial Sequence
  Description of Artificial Sequence: Synthetic oligonucleotide
uggacuuuaauauugggua

SEQ ID NO: 2155608 - RNA, 19 nt, Artificial Sequence
  Description of Artificial Sequence: Synthetic oligonucleotide
aaguaauuuagcuuuugaa

SEQ ID NO: 2155609 - RNA, 19 nt, Artificial Sequence
  Description of Artificial Sequence: Synthetic oligonucleotide
auauauauauauaauaaaa

SEQ ID NO: 2155610 - RNA, 19 nt, Artificial Sequence
  Description of Artificial Sequence: Synthetic oligonucleotide
aaauacucagucaccaagg

SEQ ID NO: 2155611 - RNA, 19 nt, Artificial Sequence
  Description of Artificial Sequence: Synthetic oligonucleotide
aacaaauggucucaggaaa

SEQ ID NO: 2155612 - RNA, 19 nt, Artificial Sequence
  Description of Artificial Sequence: Synthetic oligonucleotide
cauacaaaaguccagguca

SEQ ID NO: 2155613 - RNA, 19 nt, Artificial Sequence
  Description of Artificial Sequence: Synthetic oligonucleotide
gguaaucugaacauaaagg

SEQ ID NO: 2155614 - RNA, 19 nt, Artificial Sequence
  Description of Artificial Sequence: Synthetic oligonucleotide
cuggcaacguaacaaaugg

SEQ ID NO: 2155615 - RNA, 19 nt, Artificial Sequence
  Description of Artificial Sequence: Synthetic oligonucleotide
agaugagaguuccucagac

SEQ ID NO: 2155616 - RNA, 19 nt, Artificial Sequence
  Description of Artificial Sequence: Synthetic oligonucleotide
uuggcaaagacuaggggug

SEQ ID NO: 2155617 - RNA, 19 nt, Artificial Sequence
  Description of Artificial Sequence: Synthetic oligonucleotide
uaauuuagcuuuugaaaga

SEQ ID NO: 2155618 - RNA, 19 nt, Artificial Sequence
  Description of Artificial Sequence: Synthetic oligonucleotide
uucuuuaguccaaagauuu

SEQ ID NO: 2155619 - RNA, 19 nt, Artificial Sequence
  Description of Artificial Sequence: Synthetic oligonucleotide
auauauaauaaaacauuuc

SEQ ID NO: 2155620 - RNA, 19 nt, Artificial Sequence
  Description of Artificial Sequence: Synthetic oligonucleotide
aaaauaaguacuacugccu

SEQ ID NO: 2155621 - RNA, 19 nt, Artificial Sequence
  Description of Artificial Sequence: Synthetic oligonucleotide
gaagaugagaguuccucag

SEQ ID NO: 2155622 - RNA, 19 nt, Artificial Sequence
  Description of Artificial Sequence: Synthetic oligonucleotide
acaaaaguccaggucaggc

SEQ ID NO: 2155623 - RNA, 19 nt, Artificial Sequence
  Description of Artificial Sequence: Synthetic oligonucleotide
gauauugugacugcccugc

SEQ ID NO: 2155624 - RNA, 19 nt, Artificial Sequence
  Description of Artificial Sequence: Synthetic oligonucleotide
acagucacuuagcuaaugg

SEQ ID NO: 2155625 - RNA, 19 nt, Artificial Sequence
  Description of Artificial Sequence: Synthetic oligonucleotide
cuggugagaaacaagcaag

SEQ ID NO: 2155626 - RNA, 19 nt, Artificial Sequence
  Description of Artificial Sequence: Synthetic oligonucleotide
guaacaaauggucucagga

SEQ ID NO: 2155627 - RNA, 19 nt, Artificial Sequence
  Description of Artificial Sequence: Synthetic oligonucleotide
ugagcggucugacaggaag

SEQ ID NO: 2155628 - RNA, 19 nt, Artificial Sequence
  Description of Artificial Sequence: Synthetic oligonucleotide
ucugaagugucauuaaaua

SEQ ID NO: 2155629 - RNA, 19 nt, Artificial Sequence
  Description of Artificial Sequence: Synthetic oligonucleotide
ucaaguguuccagggaugg

SEQ ID NO: 2155630 - RNA, 19 nt, Artificial Sequence
  Description of Artificial Sequence: Synthetic oligonucleotide
guucaugauauugugacug

SEQ ID NO: 2155631 - RNA, 19 nt, Artificial Sequence
  Description of Artificial Sequence: Synthetic oligonucleotide
caugauauugugacugccc

SEQ ID NO: 2155632 - RNA, 19 nt, Artificial Sequence
  Description of Artificial Sequence: Synthetic oligonucleotide
cauuaaauacucagucacc

SEQ ID NO: 2155633 - RNA, 19 nt, Artificial Sequence
  Description of Artificial Sequence: Synthetic oligonucleotide
cugaagugucauuaaauac

SEQ ID NO: 2155634 - RNA, 19 nt, Artificial Sequence
  Description of Artificial Sequence: Synthetic oligonucleotide
ugauacagcaccugcagaa

SEQ ID NO: 2155635 - RNA, 19 nt, Artificial Sequence
  Description of Artificial Sequence: Synthetic oligonucleotide
acaacaaguaauuuagcuu

SEQ ID NO: 2155636 - RNA, 19 nt, Artificial Sequence
  Description of Artificial Sequence: Synthetic oligonucleotide
aagaaauucuguacaaggu

SEQ ID NO: 2155637 - RNA, 19 nt, Artificial Sequence
  Description of Artificial Sequence: Synthetic oligonucleotide
ucccauacaaaaguccagg

SEQ ID NO: 2155638 - RNA, 19 nt, Artificial Sequence
  Description of Artificial Sequence: Synthetic oligonucleotide
gucaccuccauugucauag

SEQ ID NO: 2155639 - RNA, 19 nt, Artificial Sequence
  Description of Artificial Sequence: Synthetic oligonucleotide
guccaaagauuuuaaagac

SEQ ID NO: 2155640 - RNA, 19 nt, Artificial Sequence
  Description of Artificial Sequence: Synthetic oligonucleotide
aaagacuaggggugcagga

SEQ ID NO: 2155641 - RNA, 19 nt, Artificial Sequence
  Description of Artificial Sequence: Synthetic oligonucleotide
ugaagaugagaguuccuca

SEQ ID NO: 2155642 - RNA, 19 nt, Artificial Sequence
  Description of Artificial Sequence: Synthetic oligonucleotide
uggugagaaacaagcaagc

SEQ ID NO: 2155643 - RNA, 19 nt, Artificial Sequence
  Description of Artificial Sequence: Synthetic oligonucleotide
ucugguaguauagaauucu

SEQ ID NO: 2155644 - RNA, 19 nt, Artificial Sequence
  Description of Artificial Sequence: Synthetic oligonucleotide
acaggugcgaaguaggcgu

SEQ ID NO: 2155645 - RNA, 19 nt, Artificial Sequence
  Description of Artificial Sequence: Synthetic oligonucleotide
agaaauucuguacaaggua

SEQ ID NO: 2155646 - RNA, 19 nt, Artificial Sequence
  Description of Artificial Sequence: Synthetic oligonucleotide
aaguacuacugccuccuug

SEQ ID NO: 2155647 - RNA, 19 nt, Artificial Sequence
  Description of Artificial Sequence: Synthetic oligonucleotide
caaaaguccaggucaggcc

SEQ ID NO: 2155648 - RNA, 19 nt, Artificial Sequence
  Description of Artificial Sequence: Synthetic oligonucleotide
agcuaauggaaccugguaa

SEQ ID NO: 2155649 - RNA, 19 nt, Artificial Sequence
  Description of Artificial Sequence: Synthetic oligonucleotide
uguacaagguaaucugaac

SEQ ID NO: 2155650 - RNA, 19 nt, Artificial Sequence
  Description of Artificial Sequence: Synthetic oligonucleotide
uucuauccgcucaaggcug

SEQ ID NO: 2155651 - RNA, 19 nt, Artificial Sequence
  Description of Artificial Sequence: Synthetic oligonucleotide
cuugauuccagcccgcgug

SEQ ID NO: 2155652 - RNA, 19 nt, Artificial Sequence
  Description of Artificial Sequence: Synthetic oligonucleotide
auagaguucuauccgcuca

SEQ ID NO: 2155653 - RNA, 19 nt, Artificial Sequence
  Description of Artificial Sequence: Synthetic oligonucleotide
uuagcuaauggaaccuggu

SEQ ID NO: 2155654 - RNA, 19 nt, Artificial Sequence
  Description of Artificial Sequence: Synthetic oligonucleotide
acuacugccuccuugguuu

SEQ ID NO: 2155655 - RNA, 19 nt, Artificial Sequence
  Description of Artificial Sequence: Synthetic oligonucleotide
guaguauagaauucuggga

SEQ ID NO: 2155656 - RNA, 19 nt, Artificial Sequence
  Description of Artificial Sequence: Synthetic oligonucleotide
gaguucuauccgcucaagg

SEQ ID NO: 2155657 - RNA, 19 nt, Artificial Sequence
  Description of Artificial Sequence: Synthetic oligonucleotide
gaaauucuguacaagguaa

SEQ ID NO: 2155658 - RNA, 19 nt, Artificial Sequence
  Description of Artificial Sequence: Synthetic oligonucleotide
auccaccugucccugagcg

SEQ ID NO: 2155659 - RNA, 19 nt, Artificial Sequence
  Description of Artificial Sequence: Synthetic oligonucleotide
aacguaacaaauggucuca

SEQ ID NO: 2155660 - RNA, 19 nt, Artificial Sequence
  Description of Artificial Sequence: Synthetic oligonucleotide
aaccugguaagguccccac

SEQ ID NO: 2155661 - RNA, 19 nt, Artificial Sequence
  Description of Artificial Sequence: Synthetic oligonucleotide
uucaugauauugugacugc

SEQ ID NO: 2155662 - RNA, 19 nt, Artificial Sequence
  Description of Artificial Sequence: Synthetic oligonucleotide
aaaucugguaguauagaau

SEQ ID NO: 2155663 - RNA, 19 nt, Artificial Sequence
  Description of Artificial Sequence: Synthetic oligonucleotide
aagaugagaguuccucaga

SEQ ID NO: 2155664 - RNA, 19 nt, Artificial Sequence
  Description of Artificial Sequence: Synthetic oligonucleotide
agguuguccagcucaauca

SEQ ID NO: 2155665 - RNA, 19 nt, Artificial Sequence
  Description of Artificial Sequence: Synthetic oligonucleotide
gucauuaaauacucaguca

SEQ ID NO: 2155666 - RNA, 19 nt, Artificial Sequence
  Description of Artificial Sequence: Synthetic oligonucleotide
guauauacagucacuuagc

SEQ ID NO: 2155667 - RNA, 19 nt, Artificial Sequence
  Description of Artificial Sequence: Synthetic oligonucleotide
uuagcuuuugaaagagcau

SEQ ID NO: 2155668 - RNA, 19 nt, Artificial Sequence
  Description of Artificial Sequence: Synthetic oligonucleotide
uggucaugggcgcaggccc

SEQ ID NO: 2155669 - RNA, 19 nt, Artificial Sequence
  Description of Artificial Sequence: Synthetic oligonucleotide
auucuguacaagguaaucu

SEQ ID NO: 2155670 - RNA, 19 nt, Artificial Sequence
  Description of Artificial Sequence: Synthetic oligonucleotide
uggaaguauuguauauaca

SEQ ID NO: 2155671 - RNA, 19 nt, Artificial Sequence
  Description of Artificial Sequence: Synthetic oligonucleotide
aagacuaggggugcaggag

SEQ ID NO: 2155672 - RNA, 19 nt, Artificial Sequence
  Description of Artificial Sequence: Synthetic oligonucleotide
aacauaaaggggagaagga

SEQ ID NO: 2155673 - RNA, 19 nt, Artificial Sequence
  Description of Artificial Sequence: Synthetic oligonucleotide
cauccuugggugauggaag

SEQ ID NO: 2155674 - RNA, 19 nt, Artificial Sequence
  Description of Artificial Sequence: Synthetic oligonucleotide
ugauggaaguauuguauau

SEQ ID NO: 2155675 - RNA, 19 nt, Artificial Sequence
  Description of Artificial Sequence: Synthetic oligonucleotide
ggaccuuucaucugaagug

SEQ ID NO: 2155676 - RNA, 19 nt, Artificial Sequence
  Description of Artificial Sequence: Synthetic oligonucleotide
caacguaacaaauggucuc

SEQ ID NO: 2155677 - RNA, 19 nt, Artificial Sequence
  Description of Artificial Sequence: Synthetic oligonucleotide
caagcaagcagcagcuccc

SEQ ID NO: 2155678 - RNA, 19 nt, Artificial Sequence
  Description of Artificial Sequence: Synthetic oligonucleotide
ggguucaugauauugugac

SEQ ID NO: 2155679 - RNA, 19 nt, Artificial Sequence
  Description of Artificial Sequence: Synthetic oligonucleotide
gcuaauggaaccugguaag

SEQ ID NO: 2155680 - RNA, 19 nt, Artificial Sequence
  Description of Artificial Sequence: Synthetic oligonucleotide
ugccccuuacugauggcgg

SEQ ID NO: 2155681 - RNA, 19 nt, Artificial Sequence
  Description of Artificial Sequence: Synthetic oligonucleotide
aguauuguauauacaguca

SEQ ID NO: 2155682 - RNA, 19 nt, Artificial Sequence
  Description of Artificial Sequence: Synthetic oligonucleotide
agcucccauacaaaagucc

SEQ ID NO: 2155683 - RNA, 19 nt, Artificial Sequence
  Description of Artificial Sequence: Synthetic oligonucleotide
guacccauccaccuguccc

SEQ ID NO: 2155684 - RNA, 19 nt, Artificial Sequence
  Description of Artificial Sequence: Synthetic oligonucleotide
ugguaagguccccaccggg

SEQ ID NO: 2155685 - RNA, 19 nt, Artificial Sequence
  Description of Artificial Sequence: Synthetic oligonucleotide
uuaguccaaagauuuuaaa

SEQ ID NO: 2155686 - RNA, 19 nt, Artificial Sequence
  Description of Artificial Sequence: Synthetic oligonucleotide
auaaguacuacugccuccu

SEQ ID NO: 2155687 - RNA, 19 nt, Artificial Sequence
  Description of Artificial Sequence: Synthetic oligonucleotide
auccgcucaaggcugugac

SEQ ID NO: 2155688 - RNA, 19 nt, Artificial Sequence
  Description of Artificial Sequence: Synthetic oligonucleotide
ugagaguuccucagacagc

SEQ ID NO: 2155689 - RNA, 19 nt, Artificial Sequence
  Description of Artificial Sequence: Synthetic oligonucleotide
uucaaguguuccagggaug

SEQ ID NO: 2155690 - RNA, 19 nt, Artificial Sequence
  Description of Artificial Sequence: Synthetic oligonucleotide
uaaauggguccugaguucu

SEQ ID NO: 2155691 - RNA, 19 nt, Artificial Sequence
  Description of Artificial Sequence: Synthetic oligonucleotide
ugauauugugacugcccug

SEQ ID NO: 2155692 - RNA, 19 nt, Artificial Sequence
  Description of Artificial Sequence: Synthetic oligonucleotide
aggugccaagaccaguugg

SEQ ID NO: 2155693 - RNA, 19 nt, Artificial Sequence
  Description of Artificial Sequence: Synthetic oligonucleotide
uguuccagggauggcgucg

SEQ ID NO: 2155694 - RNA, 19 nt, Artificial Sequence
  Description of Artificial Sequence: Synthetic oligonucleotide
ucaugauauugugacugcc

SEQ ID NO: 2155695 - RNA, 19 nt, Artificial Sequence
  Description of Artificial Sequence: Synthetic oligonucleotide
cauagguaugauacagcac

SEQ ID NO: 2155696 - RNA, 19 nt, Artificial Sequence
  Description of Artificial Sequence: Synthetic oligonucleotide
cuaauggaaccugguaagg

SEQ ID NO: 2155697 - RNA, 19 nt, Artificial Sequence
  Description of Artificial Sequence: Synthetic oligonucleotide
uggagugacaggugcgaag

SEQ ID NO: 2155698 - RNA, 19 nt, Artificial Sequence
  Description of Artificial Sequence: Synthetic oligonucleotide
gacaggugcgaaguaggcg

SEQ ID NO: 2155699 - RNA, 19 nt, Artificial Sequence
  Description of Artificial Sequence: Synthetic oligonucleotide
uauuggguaaauggguccu

SEQ ID NO: 2155700 - RNA, 19 nt, Artificial Sequence
  Description of Artificial Sequence: Synthetic oligonucleotide
uagguaugauacagcaccu

SEQ ID NO: 2155701 - RNA, 19 nt, Artificial Sequence
  Description of Artificial Sequence: Synthetic oligonucleotide
auaaaucugguaguauaga

SEQ ID NO: 2155702 - RNA, 19 nt, Artificial Sequence
  Description of Artificial Sequence: Synthetic oligonucleotide
ugaucagcgggcagguugu

SEQ ID NO: 2155703 - RNA, 19 nt, Artificial Sequence
  Description of Artificial Sequence: Synthetic oligonucleotide
uugucauagguaugauaca

SEQ ID NO: 2155704 - RNA, 19 nt, Artificial Sequence
  Description of Artificial Sequence: Synthetic oligonucleotide
gauggcgucggugaucagc

SEQ ID NO: 2155705 - RNA, 19 nt, Artificial Sequence
  Description of Artificial Sequence: Synthetic oligonucleotide
aagcgcugucugcugcccc

SEQ ID NO: 2155706 - RNA, 19 nt, Artificial Sequence
  Description of Artificial Sequence: Synthetic oligonucleotide
gucacuuagcuaauggaac

SEQ ID NO: 2155707 - RNA, 19 nt, Artificial Sequence
  Description of Artificial Sequence: Synthetic oligonucleotide
aggagugaagaugagaguu

SEQ ID NO: 2155708 - RNA, 19 nt, Artificial Sequence
  Description of Artificial Sequence: Synthetic oligonucleotide
gauggcgguggagugacag

SEQ ID NO: 2155709 - RNA, 19 nt, Artificial Sequence
  Description of Artificial Sequence: Synthetic oligonucleotide
auacucagucaccaaggcu

SEQ ID NO: 2155710 - RNA, 19 nt, Artificial Sequence
  Description of Artificial Sequence: Synthetic oligonucleotide
cugguaguauagaauucug

SEQ ID NO: 2155711 - RNA, 19 nt, Artificial Sequence
  Description of Artificial Sequence: Synthetic oligonucleotide
ugcacagugcucugcugag

SEQ ID NO: 2155712 - RNA, 19 nt, Artificial Sequence
  Description of Artificial Sequence: Synthetic oligonucleotide
accugguaagguccccacc

SEQ ID NO: 2155713 - RNA, 19 nt, Artificial Sequence
  Description of Artificial Sequence: Synthetic oligonucleotide
caggguucaugauauugug

SEQ ID NO: 2155714 - RNA, 19 nt, Artificial Sequence
  Description of Artificial Sequence: Synthetic oligonucleotide
uagaguucuauccgcucaa

SEQ ID NO: 2155715 - RNA, 19 nt, Artificial Sequence
  Description of Artificial Sequence: Synthetic oligonucleotide
aauggguccugaguucucu

SEQ ID NO: 2155716 - RNA, 19 nt, Artificial Sequence
  Description of Artificial Sequence: Synthetic oligonucleotide
gaguucucuugauuccagc

SEQ ID NO: 2155717 - RNA, 19 nt, Artificial Sequence
  Description of Artificial Sequence: Synthetic oligonucleotide
agaaacaagcaagcagcag

SEQ ID NO: 2155718 - RNA, 19 nt, Artificial Sequence
  Description of Artificial Sequence: Synthetic oligonucleotide
guaggcguggacuuuaaua

SEQ ID NO: 2155719 - RNA, 19 nt, Artificial Sequence
  Description of Artificial Sequence: Synthetic oligonucleotide
uggaaccugguaagguccc

SEQ ID NO: 2155720 - RNA, 19 nt, Artificial Sequence
  Description of Artificial Sequence: Synthetic oligonucleotide
caaguaauuuagcuuuuga

SEQ ID NO: 2155721 - RNA, 19 nt, Artificial Sequence
  Description of Artificial Sequence: Synthetic oligonucleotide
auuccagcccgcgugaucu

SEQ ID NO: 2155722 - RNA, 19 nt, Artificial Sequence
  Description of Artificial Sequence: Synthetic oligonucleotide
auggcgucggugaucagcg

SEQ ID NO: 2155723 - RNA, 19 nt, Artificial Sequence
  Description of Artificial Sequence: Synthetic oligonucleotide
aacauuucuuuaguccaaa

SEQ ID NO: 2155724 - RNA, 19 nt, Artificial Sequence
  Description of Artificial Sequence: Synthetic oligonucleotide
uggguaaauggguccugag

SEQ ID NO: 2155725 - RNA, 19 nt, Artificial Sequence
  Description of Artificial Sequence: Synthetic oligonucleotide
agacuaggggugcaggagu

SEQ ID NO: 2155726 - RNA, 19 nt, Artificial Sequence
  Description of Artificial Sequence: Synthetic oligonucleotide
cacaggguucaugauauug

SEQ ID NO: 2155727 - RNA, 19 nt, Artificial Sequence
  Description of Artificial Sequence: Synthetic oligonucleotide
ugggugauggaaguauugu

SEQ ID NO: 2155728 - RNA, 19 nt, Artificial Sequence
  Description of Artificial Sequence: Synthetic oligonucleotide
acauaaaggggagaaggaa

SEQ ID NO: 2155729 - RNA, 19 nt, Artificial Sequence
  Description of Artificial Sequence: Synthetic oligonucleotide
gugaagaugagaguuccuc

SEQ ID NO: 2155730 - RNA, 19 nt, Artificial Sequence
  Description of Artificial Sequence: Synthetic oligonucleotide
ucuugauuccagcccgcgu

SEQ ID NO: 2155731 - RNA, 19 nt, Artificial Sequence
  Description of Artificial Sequence: Synthetic oligonucleotide
caaagacuaggggugcagg

SEQ ID NO: 2155732 - RNA, 19 nt, Artificial Sequence
  Description of Artificial Sequence: Synthetic oligonucleotide
cauagaguucuauccgcuc

SEQ ID NO: 2155733 - RNA, 19 nt, Artificial Sequence
  Description of Artificial Sequence: Synthetic oligonucleotide
augggcgcaggccccauuc

SEQ ID NO: 2155734 - RNA, 19 nt, Artificial Sequence
  Description of Artificial Sequence: Synthetic oligonucleotide
ccugguaagguccccaccg

SEQ ID NO: 2155735 - RNA, 19 nt, Artificial Sequence
  Description of Artificial Sequence: Synthetic oligonucleotide
agaccaguuggccuggcaa

SEQ ID NO: 2155736 - RNA, 19 nt, Artificial Sequence
  Description of Artificial Sequence: Synthetic oligonucleotide
aucugguaguauagaauuc

SEQ ID NO: 2155737 - RNA, 19 nt, Artificial Sequence
  Description of Artificial Sequence: Synthetic oligonucleotide
uacugauggcgguggagug

SEQ ID NO: 2155738 - RNA, 19 nt, Artificial Sequence
  Description of Artificial Sequence: Synthetic oligonucleotide
gaaguauuguauauacagu

SEQ ID NO: 2155739 - RNA, 19 nt, Artificial Sequence
  Description of Artificial Sequence: Synthetic oligonucleotide
aucugaacauaaaggggag

SEQ ID NO: 2155740 - RNA, 19 nt, Artificial Sequence
  Description of Artificial Sequence: Synthetic oligonucleotide
gaccaguuggccuggcaac

SEQ ID NO: 2155741 - RNA, 19 nt, Artificial Sequence
  Description of Artificial Sequence: Synthetic oligonucleotide
guucuauccgcucaaggcu

SEQ ID NO: 2155742 - RNA, 19 nt, Artificial Sequence
  Description of Artificial Sequence: Synthetic oligonucleotide
ucugaacauaaaggggaga

SEQ ID NO: 2155743 - RNA, 19 nt, Artificial Sequence
  Description of Artificial Sequence: Synthetic oligonucleotide
uggcaacguaacaaauggu

SEQ ID NO: 2155744 - RNA, 19 nt, Artificial Sequence
  Description of Artificial Sequence: Synthetic oligonucleotide
ggcaacguaacaaaugguc

SEQ ID NO: 2155745 - RNA, 19 nt, Artificial Sequence
  Description of Artificial Sequence: Synthetic oligonucleotide
ugccaagaccaguuggccu

SEQ ID NO: 2155746 - RNA, 19 nt, Artificial Sequence
  Description of Artificial Sequence: Synthetic oligonucleotide
auaaaggggagaaggaaua

SEQ ID NO: 2155747 - RNA, 19 nt, Artificial Sequence
  Description of Artificial Sequence: Synthetic oligonucleotide
aucugaagugucauuaaau

SEQ ID NO: 2155748 - RNA, 19 nt, Artificial Sequence
  Description of Artificial Sequence: Synthetic oligonucleotide
ucucuugauuccagcccgc

SEQ ID NO: 2155749 - RNA, 19 nt, Artificial Sequence
  Description of Artificial Sequence: Synthetic oligonucleotide
agcggucugacaggaaggg

SEQ ID NO: 2155750 - RNA, 19 nt, Artificial Sequence
  Description of Artificial Sequence: Synthetic oligonucleotide
acuuagcuaauggaaccug

SEQ ID NO: 2155751 - RNA, 19 nt, Artificial Sequence
  Description of Artificial Sequence: Synthetic oligonucleotide
uauugugacugcccugcua

SEQ ID NO: 2155752 - RNA, 19 nt, Artificial Sequence
  Description of Artificial Sequence: Synthetic oligonucleotide
aagguaaucugaacauaaa

SEQ ID NO: 2155753 - RNA, 19 nt, Artificial Sequence
  Description of Artificial Sequence: Synthetic oligonucleotide
cuuuaguccaaagauuuua

SEQ ID NO: 2155754 - RNA, 19 nt, Artificial Sequence
  Description of Artificial Sequence: Synthetic oligonucleotide
accaguuggccuggcaacg

SEQ ID NO: 2155755 - RNA, 19 nt, Artificial Sequence
  Description of Artificial Sequence: Synthetic oligonucleotide
aagaccaguuggccuggca

SEQ ID NO: 2155756 - RNA, 19 nt, Artificial Sequence
  Description of Artificial Sequence: Synthetic oligonucleotide
uuggccuggcaacguaaca

SEQ ID NO: 2155757 - RNA, 19 nt, Artificial Sequence
  Description of Artificial Sequence: Synthetic oligonucleotide
gagaaacaagcaagcagca

SEQ ID NO: 2155758 - RNA, 19 nt, Artificial Sequence
  Description of Artificial Sequence: Synthetic oligonucleotide
aaauggguccugaguucuc

SEQ ID NO: 2155759 - RNA, 19 nt, Artificial Sequence
  Description of Artificial Sequence: Synthetic oligonucleotide
gugauggaaguauuguaua

SEQ ID NO: 2155760 - RNA, 19 nt, Artificial Sequence
  Description of Artificial Sequence: Synthetic oligonucleotide
cuguacaagguaaucugaa

SEQ ID NO: 2155761 - RNA, 19 nt, Artificial Sequence
  Description of Artificial Sequence: Synthetic oligonucleotide
cugguaagguccccaccgg

SEQ ID NO: 2155762 - RNA, 19 nt, Artificial Sequence
  Description of Artificial Sequence: Synthetic oligonucleotide
cauaaaggggagaaggaau

SEQ ID NO: 2155763 - RNA, 19 nt, Artificial Sequence
  Description of Artificial Sequence: Synthetic oligonucleotide
uacagucacuuagcuaaug

SEQ ID NO: 2155764 - RNA, 19 nt, Artificial Sequence
  Description of Artificial Sequence: Synthetic oligonucleotide
uggccuggcaacguaacaa

SEQ ID NO: 2155765 - RNA, 19 nt, Artificial Sequence
  Description of Artificial Sequence: Synthetic oligonucleotide
ggccuggugagaaacaagc

SEQ ID NO: 2155766 - RNA, 19 nt, Artificial Sequence
  Description of Artificial Sequence: Synthetic oligonucleotide
ggcguggacuuuaauauug

SEQ ID NO: 2155767 - RNA, 19 nt, Artificial Sequence
  Description of Artificial Sequence: Synthetic oligonucleotide
aagugucauuaaauacuca

SEQ ID NO: 2155768 - RNA, 19 nt, Artificial Sequence
  Description of Artificial Sequence: Synthetic oligonucleotide
gguaagguccccaccgggg

SEQ ID NO: 2155769 - RNA, 19 nt, Artificial Sequence
  Description of Artificial Sequence: Synthetic oligonucleotide
acaaauggucucaggaaaa

SEQ ID NO: 2155770 - RNA, 19 nt, Artificial Sequence
  Description of Artificial Sequence: Synthetic oligonucleotide
cagaagcgcugucugcugc

SEQ ID NO: 2155771 - RNA, 19 nt, Artificial Sequence
  Description of Artificial Sequence: Synthetic oligonucleotide
ugggaccuuucaucugaag

SEQ ID NO: 2155772 - RNA, 19 nt, Artificial Sequence
  Description of Artificial Sequence: Synthetic oligonucleotide
agcuuuugaaagagcauaa

SEQ ID NO: 2155773 - RNA, 19 nt, Artificial Sequence
  Description of Artificial Sequence: Synthetic oligonucleotide
gacagcaccagguacccau

SEQ ID NO: 2155774 - RNA, 19 nt, Artificial Sequence
  Description of Artificial Sequence: Synthetic oligonucleotide
ccuggcaacguaacaaaug

SEQ ID NO: 2155775 - RNA, 19 nt, Artificial Sequence
  Description of Artificial Sequence: Synthetic oligonucleotide
gcagucauagaguucuauc

SEQ ID NO: 2155776 - RNA, 19 nt, Artificial Sequence
  Description of Artificial Sequence: Synthetic oligonucleotide
uuggcgcaggccuggugag

SEQ ID NO: 2155777 - RNA, 19 nt, Artificial Sequence
  Description of Artificial Sequence: Synthetic oligonucleotide
ggcgucggugaucagcggg

SEQ ID NO: 2155778 - RNA, 19 nt, Artificial Sequence
  Description of Artificial Sequence: Synthetic oligonucleotide
guaagguccccaccgggga

SEQ ID NO: 2155779 - RNA, 19 nt, Artificial Sequence
  Description of Artificial Sequence: Synthetic oligonucleotide
gacuaggggugcaggagug

SEQ ID NO: 2155780 - RNA, 19 nt, Artificial Sequence
  Description of Artificial Sequence: Synthetic oligonucleotide
gguuguccagcucaaucac

SEQ ID NO: 2155781 - RNA, 19 nt, Artificial Sequence
  Description of Artificial Sequence: Synthetic oligonucleotide
accggggaacugugcaggg

SEQ ID NO: 2155782 - RNA, 19 nt, Artificial Sequence
  Description of Artificial Sequence: Synthetic oligonucleotide
cugaguguuggcgcaggcc

SEQ ID NO: 2155783 - RNA, 19 nt, Artificial Sequence
  Description of Artificial Sequence: Synthetic oligonucleotide
uugugacugcccugcuacc

SEQ ID NO: 2155784 - RNA, 19 nt, Artificial Sequence
  Description of Artificial Sequence: Synthetic oligonucleotide
agguaugauacagcaccug

SEQ ID NO: 2155785 - RNA, 19 nt, Artificial Sequence
  Description of Artificial Sequence: Synthetic oligonucleotide
ggugccaagaccaguuggc

SEQ ID NO: 2155786 - RNA, 19 nt, Artificial Sequence
  Description of Artificial Sequence: Synthetic oligonucleotide
gaacugugcagggccuggg

SEQ ID NO: 2155787 - RNA, 19 nt, Artificial Sequence
  Description of Artificial Sequence: Synthetic oligonucleotide
guggacuuuaauauugggu

SEQ ID NO: 2155788 - RNA, 19 nt, Artificial Sequence
  Description of Artificial Sequence: Synthetic oligonucleotide
caucugaagugucauuaaa

SEQ ID NO: 2155789 - RNA, 19 nt, Artificial Sequence
  Description of Artificial Sequence: Synthetic oligonucleotide
cauugucauagguaugaua

SEQ ID NO: 2155790 - RNA, 19 nt, Artificial Sequence
  Description of Artificial Sequence: Synthetic oligonucleotide
guuccagggauggcgucgg

SEQ ID NO: 2155791 - RNA, 19 nt, Artificial Sequence
  Description of Artificial Sequence: Synthetic oligonucleotide
ccauacaaaaguccagguc

SEQ ID NO: 2155792 - RNA, 19 nt, Artificial Sequence
  Description of Artificial Sequence: Synthetic oligonucleotide
cuggcagucauagaguucu

SEQ ID NO: 2155793 - RNA, 19 nt, Artificial Sequence
  Description of Artificial Sequence: Synthetic oligonucleotide
acguaacaaauggucucag

SEQ ID NO: 2155794 - RNA, 19 nt, Artificial Sequence
  Description of Artificial Sequence: Synthetic oligonucleotide
agcccgcgugaucugcugg

SEQ ID NO: 2155795 - RNA, 19 nt, Artificial Sequence
  Description of Artificial Sequence: Synthetic oligonucleotide
cugauggcgguggagugac

SEQ ID NO: 2155796 - RNA, 19 nt, Artificial Sequence
  Description of Artificial Sequence: Synthetic oligonucleotide
caccggggaacugugcagg

SEQ ID NO: 2155797 - RNA, 19 nt, Artificial Sequence
  Description of Artificial Sequence: Synthetic oligonucleotide
agaguucuauccgcucaag

SEQ ID NO: 2155798 - RNA, 19 nt, Artificial Sequence
  Description of Artificial Sequence: Synthetic oligonucleotide
uccgcucaaggcugugaca

SEQ ID NO: 2155799 - RNA, 19 nt, Artificial Sequence
  Description of Artificial Sequence: Synthetic oligonucleotide
auauugugacugcccugcu

SEQ ID NO: 2155800 - RNA, 19 nt, Artificial Sequence
  Description of Artificial Sequence: Synthetic oligonucleotide
aggcugugacagcuucuuc

SEQ ID NO: 2155801 - RNA, 19 nt, Artificial Sequence
  Description of Artificial Sequence: Synthetic oligonucleotide
cagcucccauacaaaaguc

SEQ ID NO: 2155802 - RNA, 19 nt, Artificial Sequence
  Description of Artificial Sequence: Synthetic oligonucleotide
aguguuccagggauggcgu

SEQ ID NO: 2155803 - RNA, 19 nt, Artificial Sequence
  Description of Artificial Sequence: Synthetic oligonucleotide
accuuucaucugaaguguc

SEQ ID NO: 2155804 - RNA, 19 nt, Artificial Sequence
  Description of Artificial Sequence: Synthetic oligonucleotide
auuggguaaauggguccug

SEQ ID NO: 2155805 - RNA, 19 nt, Artificial Sequence
  Description of Artificial Sequence: Synthetic oligonucleotide
caccauccuugggugaugg

SEQ ID NO: 2155806 - RNA, 19 nt, Artificial Sequence
  Description of Artificial Sequence: Synthetic oligonucleotide
gauuccagcccgcgugauc

SEQ ID NO: 2155807 - RNA, 19 nt, Artificial Sequence
  Description of Artificial Sequence: Synthetic oligonucleotide
guauagaauucugggaccu

SEQ ID NO: 2155808 - RNA, 19 nt, Artificial Sequence
  Description of Artificial Sequence: Synthetic oligonucleotide
aggguucaugauauuguga

SEQ ID NO: 2155809 - RNA, 19 nt, Artificial Sequence
  Description of Artificial Sequence: Synthetic oligonucleotide
gaccuuucaucugaagugu

SEQ ID NO: 2155810 - RNA, 19 nt, Artificial Sequence
  Description of Artificial Sequence: Synthetic oligonucleotide
gggaguggcugaguguugg

SEQ ID NO: 2155811 - RNA, 19 nt, Artificial Sequence
  Description of Artificial Sequence: Synthetic oligonucleotide
gugccaagaccaguuggcc

SEQ ID NO: 2155812 - RNA, 19 nt, Artificial Sequence
  Description of Artificial Sequence: Synthetic oligonucleotide
gggaccuuucaucugaagu

SEQ ID NO: 2155813 - RNA, 19 nt, Artificial Sequence
  Description of Artificial Sequence: Synthetic oligonucleotide
uauagaauucugggaccuu

SEQ ID NO: 2155814 - RNA, 19 nt, Artificial Sequence
  Description of Artificial Sequence: Synthetic oligonucleotide
accuccauugucauaggua

SEQ ID NO: 2155815 - RNA, 19 nt, Artificial Sequence
  Description of Artificial Sequence: Synthetic oligonucleotide
ggccccauucccuaaguga

SEQ ID NO: 2155816 - RNA, 19 nt, Artificial Sequence
  Description of Artificial Sequence: Synthetic oligonucleotide
cguaacaaauggucucagg

SEQ ID NO: 2155817 - RNA, 19 nt, Artificial Sequence
  Description of Artificial Sequence: Synthetic oligonucleotide
gaaccugguaaggucccca

SEQ ID NO: 2155818 - RNA, 19 nt, Artificial Sequence
  Description of Artificial Sequence: Synthetic oligonucleotide
cugaguucucuugauucca

SEQ ID NO: 2155819 - RNA, 19 nt, Artificial Sequence
  Description of Artificial Sequence: Synthetic oligonucleotide
uccccaccggggaacugug

SEQ ID NO: 2155820 - RNA, 19 nt, Artificial Sequence
  Description of Artificial Sequence: Synthetic oligonucleotide
aggccccauucccuaagug

SEQ ID NO: 2155821 - RNA, 19 nt, Artificial Sequence
  Description of Artificial Sequence: Synthetic oligonucleotide
cguggacuuuaauauuggg

SEQ ID NO: 2155822 - RNA, 19 nt, Artificial Sequence
  Description of Artificial Sequence: Synthetic oligonucleotide
aggugcgaaguaggcgugg

SEQ ID NO: 2155823 - RNA, 19 nt, Artificial Sequence
  Description of Artificial Sequence: Synthetic oligonucleotide
aguaggcguggacuuuaau

SEQ ID NO: 2155824 - RNA, 19 nt, Artificial Sequence
  Description of Artificial Sequence: Synthetic oligonucleotide
aggcguggacuuuaauauu

SEQ ID NO: 2155825 - RNA, 19 nt, Artificial Sequence
  Description of Artificial Sequence: Synthetic oligonucleotide
uaaguacuacugccuccuu

SEQ ID NO: 2155826 - RNA, 19 nt, Artificial Sequence
  Description of Artificial Sequence: Synthetic oligonucleotide
agugaagaugagaguuccu

SEQ ID NO: 2155827 - RNA, 19 nt, Artificial Sequence
  Description of Artificial Sequence: Synthetic oligonucleotide
caaguguuccagggauggc

SEQ ID NO: 2155828 - RNA, 19 nt, Artificial Sequence
  Description of Artificial Sequence: Synthetic oligonucleotide
gcguggacuuuaauauugg

SEQ ID NO: 2155829 - RNA, 19 nt, Artificial Sequence
  Description of Artificial Sequence: Synthetic oligonucleotide
ccgcucaaggcugugacag

SEQ ID NO: 2155830 - RNA, 19 nt, Artificial Sequence
  Description of Artificial Sequence: Synthetic oligonucleotide
caggugccaagaccaguug

SEQ ID NO: 2155831 - RNA, 19 nt, Artificial Sequence
  Description of Artificial Sequence: Synthetic oligonucleotide
ccuggugagaaacaagcaa

SEQ ID NO: 2155832 - RNA, 19 nt, Artificial Sequence
  Description of Artificial Sequence: Synthetic oligonucleotide
gaguguuggcgcaggccug

SEQ ID NO: 2155833 - RNA, 19 nt, Artificial Sequence
  Description of Artificial Sequence: Synthetic oligonucleotide
caggugcgaaguaggcgug

SEQ ID NO: 2155834 - RNA, 19 nt, Artificial Sequence
  Description of Artificial Sequence: Synthetic oligonucleotide
uccagcccgcgugaucugc

SEQ ID NO: 2155835 - RNA, 19 nt, Artificial Sequence
  Description of Artificial Sequence: Synthetic oligonucleotide
gccccauucccuaagugac

SEQ ID NO: 2155836 - RNA, 19 nt, Artificial Sequence
  Description of Artificial Sequence: Synthetic oligonucleotide
uggcgucggugaucagcgg

SEQ ID NO: 2155837 - RNA, 19 nt, Artificial Sequence
  Description of Artificial Sequence: Synthetic oligonucleotide
gguacccauccaccugucc

SEQ ID NO: 2155838 - RNA, 19 nt, Artificial Sequence
  Description of Artificial Sequence: Synthetic oligonucleotide
gcaacguaacaaauggucu

SEQ ID NO: 2155839 - RNA, 19 nt, Artificial Sequence
  Description of Artificial Sequence: Synthetic oligonucleotide
gggugauggaaguauugua

SEQ ID NO: 2155840 - RNA, 19 nt, Artificial Sequence
  Description of Artificial Sequence: Synthetic oligonucleotide
uggcugaguguuggcgcag

SEQ ID NO: 2155841 - RNA, 19 nt, Artificial Sequence
  Description of Artificial Sequence: Synthetic oligonucleotide
acuaggggugcaggaguga

SEQ ID NO: 2155842 - RNA, 19 nt, Artificial Sequence
  Description of Artificial Sequence: Synthetic oligonucleotide
gugcgaaguaggcguggac

SEQ ID NO: 2155843 - RNA, 19 nt, Artificial Sequence
  Description of Artificial Sequence: Synthetic oligonucleotide
aaguaggcguggacuuuaa

SEQ ID NO: 2155844 - RNA, 19 nt, Artificial Sequence
  Description of Artificial Sequence: Synthetic oligonucleotide
gguggagugacaggugcga

SEQ ID NO: 2155845 - RNA, 19 nt, Artificial Sequence
  Description of Artificial Sequence: Synthetic oligonucleotide
ccuccauugucauagguau

SEQ ID NO: 2155846 - RNA, 19 nt, Artificial Sequence
  Description of Artificial Sequence: Synthetic oligonucleotide
acuggagcccaggugccaa

SEQ ID NO: 2155847 - RNA, 19 nt, Artificial Sequence
  Description of Artificial Sequence: Synthetic oligonucleotide
uuccagcccgcgugaucug

SEQ ID NO: 2155848 - RNA, 19 nt, Artificial Sequence
  Description of Artificial Sequence: Synthetic oligonucleotide
ggagugacaggugcgaagu

SEQ ID NO: 2155849 - RNA, 19 nt, Artificial Sequence
  Description of Artificial Sequence: Synthetic oligonucleotide
uccuugggugauggaagua

SEQ ID NO: 2155850 - RNA, 19 nt, Artificial Sequence
  Description of Artificial Sequence: Synthetic oligonucleotide
gggaguuggcaaagacuag

SEQ ID NO: 2155851 - RNA, 19 nt, Artificial Sequence
  Description of Artificial Sequence: Synthetic oligonucleotide
auacagucacuuagcuaau

SEQ ID NO: 2155852 - RNA, 19 nt, Artificial Sequence
  Description of Artificial Sequence: Synthetic oligonucleotide
cuaggggugcaggagugaa

SEQ ID NO: 2155853 - RNA, 19 nt, Artificial Sequence
  Description of Artificial Sequence: Synthetic oligonucleotide
gcuggucaccuccauuguc

SEQ ID NO: 2155854 - RNA, 19 nt, Artificial Sequence
  Description of Artificial Sequence: Synthetic oligonucleotide
ggggcagucugcacagugc

SEQ ID NO: 2155855 - RNA, 19 nt, Artificial Sequence
  Description of Artificial Sequence: Synthetic oligonucleotide
cccuuacugauggcggugg

SEQ ID NO: 2155856 - RNA, 19 nt, Artificial Sequence
  Description of Artificial Sequence: Synthetic oligonucleotide
caggagugaagaugagagu

SEQ ID NO: 2155857 - RNA, 19 nt, Artificial Sequence
  Description of Artificial Sequence: Synthetic oligonucleotide
ggccuggcaacguaacaaa

SEQ ID NO: 2155858 - RNA, 19 nt, Artificial Sequence
  Description of Artificial Sequence: Synthetic oligonucleotide
guguuccagggauggcguc

SEQ ID NO: 2155859 - RNA, 19 nt, Artificial Sequence
  Description of Artificial Sequence: Synthetic oligonucleotide
gcugaguguuggcgcaggc

SEQ ID NO: 2155860 - RNA, 19 nt, Artificial Sequence
  Description of Artificial Sequence: Synthetic oligonucleotide
gagugacaggugcgaagua

SEQ ID NO: 2155861 - RNA, 19 nt, Artificial Sequence
  Description of Artificial Sequence: Synthetic oligonucleotide
gggcgcaggccccauuccc

SEQ ID NO: 2155862 - RNA, 19 nt, Artificial Sequence
  Description of Artificial Sequence: Synthetic oligonucleotide
agguacccauccaccuguc

SEQ ID NO: 2155863 - RNA, 19 nt, Artificial Sequence
  Description of Artificial Sequence: Synthetic oligonucleotide
gggcacaggguucaugaua

SEQ ID NO: 2155864 - RNA, 19 nt, Artificial Sequence
  Description of Artificial Sequence: Synthetic oligonucleotide
uggcagucauagaguucua

SEQ ID NO: 2155865 - RNA, 19 nt, Artificial Sequence
  Description of Artificial Sequence: Synthetic oligonucleotide
cuugggugauggaaguauu

SEQ ID NO: 2155866 - RNA, 19 nt, Artificial Sequence
  Description of Artificial Sequence: Synthetic oligonucleotide
gucccugagcggucugaca

SEQ ID NO: 2155867 - RNA, 19 nt, Artificial Sequence
  Description of Artificial Sequence: Synthetic oligonucleotide
ccaccggggaacugugcag

SEQ ID NO: 2155868 - RNA, 19 nt, Artificial Sequence
  Description of Artificial Sequence: Synthetic oligonucleotide
caggccuggugagaaacaa

SEQ ID NO: 2155869 - RNA, 19 nt, Artificial Sequence
  Description of Artificial Sequence: Synthetic oligonucleotide
gugcaggagugaagaugag

SEQ ID NO: 2155870 - RNA, 19 nt, Artificial Sequence
  Description of Artificial Sequence: Synthetic oligonucleotide
cagcccgcgugaucugcug

SEQ ID NO: 2155871 - RNA, 19 nt, Artificial Sequence
  Description of Artificial Sequence: Synthetic oligonucleotide
gcgucggugaucagcgggc

SEQ ID NO: 2155872 - RNA, 19 nt, Artificial Sequence
  Description of Artificial Sequence: Synthetic oligonucleotide
gcggucugacaggaagggg

SEQ ID NO: 2155873 - RNA, 19 nt, Artificial Sequence
  Description of Artificial Sequence: Synthetic oligonucleotide
gcccgcgugaucugcuggc

SEQ ID NO: 2155874 - RNA, 19 nt, Artificial Sequence
  Description of Artificial Sequence: Synthetic oligonucleotide
ggucaugggcgcaggcccc

SEQ ID NO: 2155875 - RNA, 19 nt, Artificial Sequence
  Description of Artificial Sequence: Synthetic oligonucleotide
caaucaccuccagcugguc

SEQ ID NO: 2155876 - RNA, 19 nt, Artificial Sequence
  Description of Artificial Sequence: Synthetic oligonucleotide
guacuacugccuccuuggu

SEQ ID NO: 2155877 - RNA, 19 nt, Artificial Sequence
  Description of Artificial Sequence: Synthetic oligonucleotide
caccaaggcuggucaccuc

SEQ ID NO: 2155878 - RNA, 19 nt, Artificial Sequence
  Description of Artificial Sequence: Synthetic oligonucleotide
cugggaccuuucaucugaa

SEQ ID NO: 2155879 - RNA, 19 nt, Artificial Sequence
  Description of Artificial Sequence: Synthetic oligonucleotide
caccugucccugagcgguc

SEQ ID NO: 2155880 - RNA, 19 nt, Artificial Sequence
  Description of Artificial Sequence: Synthetic oligonucleotide
agacagcaccagguaccca

SEQ ID NO: 2155881 - RNA, 19 nt, Artificial Sequence
  Description of Artificial Sequence: Synthetic oligonucleotide
guggagugacaggugcgaa

SEQ ID NO: 2155882 - RNA, 19 nt, Artificial Sequence
  Description of Artificial Sequence: Synthetic oligonucleotide
cugucugcugccccuuacu

SEQ ID NO: 2155883 - RNA, 19 nt, Artificial Sequence
  Description of Artificial Sequence: Synthetic oligonucleotide
gccuggugagaaacaagca

SEQ ID NO: 2155884 - RNA, 19 nt, Artificial Sequence
  Description of Artificial Sequence: Synthetic oligonucleotide
gaucagcgggcagguuguc

SEQ ID NO: 2155885 - RNA, 19 nt, Artificial Sequence
  Description of Artificial Sequence: Synthetic oligonucleotide
cccaccggggaacugugca

SEQ ID NO: 2155886 - RNA, 19 nt, Artificial Sequence
  Description of Artificial Sequence: Synthetic oligonucleotide
gucaugggcgcaggcccca

SEQ ID NO: 2155887 - RNA, 19 nt, Artificial Sequence
  Description of Artificial Sequence: Synthetic oligonucleotide
ggcgguggagugacaggug

SEQ ID NO: 2155888 - RNA, 19 nt, Artificial Sequence
  Description of Artificial Sequence: Synthetic oligonucleotide
cccauacaaaaguccaggu

SEQ ID NO: 2155889 - RNA, 19 nt, Artificial Sequence
  Description of Artificial Sequence: Synthetic oligonucleotide
ccgcgugaucugcuggcag

SEQ ID NO: 2155890 - RNA, 19 nt, Artificial Sequence
  Description of Artificial Sequence: Synthetic oligonucleotide
caccugcagaagcgcuguc

SEQ ID NO: 2155891 - RNA, 19 nt, Artificial Sequence
  Description of Artificial Sequence: Synthetic oligonucleotide
gcuuuugaaagagcauaau

SEQ ID NO: 2155892 - RNA, 19 nt, Artificial Sequence
  Description of Artificial Sequence: Synthetic oligonucleotide
ccaaggcuggucaccucca

SEQ ID NO: 2155893 - RNA, 19 nt, Artificial Sequence
  Description of Artificial Sequence: Synthetic oligonucleotide
cugagcggucugacaggaa

SEQ ID NO: 2155894 - RNA, 19 nt, Artificial Sequence
  Description of Artificial Sequence: Synthetic oligonucleotide
cucaaggcugugacagcuu

SEQ ID NO: 2155895 - RNA, 19 nt, Artificial Sequence
  Description of Artificial Sequence: Synthetic oligonucleotide
ccccuuacugauggcggug

SEQ ID NO: 2155896 - RNA, 19 nt, Artificial Sequence
  Description of Artificial Sequence: Synthetic oligonucleotide
ccucagacagcaccaggua

SEQ ID NO: 2155897 - RNA, 19 nt, Artificial Sequence
  Description of Artificial Sequence: Synthetic oligonucleotide
ccggggaacugugcagggc

SEQ ID NO: 2155898 - RNA, 19 nt, Artificial Sequence
  Description of Artificial Sequence: Synthetic oligonucleotide
ggcagucauagaguucuau

SEQ ID NO: 2155899 - RNA, 19 nt, Artificial Sequence
  Description of Artificial Sequence: Synthetic oligonucleotide
ccuugggugauggaaguau

SEQ ID NO: 2155900 - RNA, 19 nt, Artificial Sequence
  Description of Artificial Sequence: Synthetic oligonucleotide
ccuuacugauggcggugga

SEQ ID NO: 2155901 - RNA, 19 nt, Artificial Sequence
  Description of Artificial Sequence: Synthetic oligonucleotide
ccccaccggggaacugugc

SEQ ID NO: 2155902 - RNA, 19 nt, Artificial Sequence
  Description of Artificial Sequence: Synthetic oligonucleotide
gccccuuacugauggcggu

SEQ ID NO: 2155903 - RNA, 19 nt, Artificial Sequence
  Description of Artificial Sequence: Synthetic oligonucleotide
gcgggcagguuguccagcu

SEQ ID NO: 2155904 - RNA, 19 nt, Artificial Sequence
  Description of Artificial Sequence: Synthetic oligonucleotide
cuacugccuccuugguuuu

SEQ ID NO: 2155905 - RNA, 19 nt, Artificial Sequence
  Description of Artificial Sequence: Synthetic oligonucleotide
ggcgcaggccccauucccu

SEQ ID NO: 2155906 - RNA, 19 nt, Artificial Sequence
  Description of Artificial Sequence: Synthetic oligonucleotide
gcgcaggccccauucccua

SEQ ID NO: 2155907 - RNA, 19 nt, Artificial Sequence
  Description of Artificial Sequence: Synthetic oligonucleotide
gccuggcaacguaacaaau

SEQ ID NO: 2155908 - RNA, 19 nt, Artificial Sequence
  Description of Artificial Sequence: Synthetic oligonucleotide
cgcgugaucugcuggcagu

SEQ ID NO: 2155909 - RNA, 19 nt, Artificial Sequence
  Description of Artificial Sequence: Synthetic oligonucleotide
cccgcgugaucugcuggca

SEQ ID NO: 2155910 - RNA, 19 nt, Artificial Sequence
  Description of Artificial Sequence: Synthetic oligonucleotide
gcgcaggccuggugagaaa

SEQ ID NO: 2155911 - RNA, 19 nt, Artificial Sequence
  Description of Artificial Sequence: Synthetic oligonucleotide
cccaccauccuugggugau

SEQ ID NO: 2155912 - RNA, 19 nt, Artificial Sequence
  Description of Artificial Sequence: Synthetic oligonucleotide
caugggcgcaggccccauu

SEQ ID NO: 2155913 - RNA, 19 nt, Artificial Sequence
  Description of Artificial Sequence: Synthetic oligonucleotide
ccagcccgcgugaucugcu

SEQ ID NO: 2155914 - RNA, 19 nt, Artificial Sequence
  Description of Artificial Sequence: Synthetic oligonucleotide
ccaguuggccuggcaacgu

SEQ ID NO: 2155915 - RNA, 19 nt, Artificial Sequence
  Description of Artificial Sequence: Synthetic oligonucleotide
cccaggugccaagaccagu

SEQ ID NO: 2155916 - RNA, 19 nt, Artificial Sequence
  Description of Artificial Sequence: Synthetic oligonucleotide
ggugaucagcgggcagguu

SEQ ID NO: 2155917 - RNA, 19 nt, Artificial Sequence
  Description of Artificial Sequence: Synthetic oligonucleotide
gccuggggaguggcugagu

SEQ ID NO: 2155918 - RNA, 19 nt, Artificial Sequence
  Description of Artificial Sequence: Synthetic oligonucleotide
gcgcugucugcugccccuu

SEQ ID NO: 2155919 - RNA, 19 nt, Artificial Sequence
  Description of Artificial Sequence: Synthetic oligonucleotide
aaagcaagaaacuugaacu

SEQ ID NO: 2155920 - RNA, 19 nt, Artificial Sequence
  Description of Artificial Sequence: Synthetic oligonucleotide
aaaauauaaaauugcauca

SEQ ID NO: 2155921 - RNA, 19 nt, Artificial Sequence
  Description of Artificial Sequence: Synthetic oligonucleotide
uuuuguuuugcccagaggc

SEQ ID NO: 2155922 - RNA, 19 nt, Artificial Sequence
  Description of Artificial Sequence: Synthetic oligonucleotide
uuugauggaacuuuuagug

SEQ ID NO: 2155923 - RNA, 19 nt, Artificial Sequence
  Description of Artificial Sequence: Synthetic oligonucleotide
ugaauuuauauuuaacuug

SEQ ID NO: 2155924 - RNA, 19 nt, Artificial Sequence
  Description of Artificial Sequence: Synthetic oligonucleotide
uacauuuucccucauaggc

SEQ ID NO: 2155925 - RNA, 19 nt, Artificial Sequence
  Description of Artificial Sequence: Synthetic oligonucleotide
uuuacauuugccuugguac

SEQ ID NO: 2155926 - RNA, 19 nt, Artificial Sequence
  Description of Artificial Sequence: Synthetic oligonucleotide
auaaaauugcaucagaaaa

SEQ ID NO: 2155927 - RNA, 19 nt, Artificial Sequence
  Description of Artificial Sequence: Synthetic oligonucleotide
ugguccacaacacaggugg

SEQ ID NO: 2155928 - RNA, 19 nt, Artificial Sequence
  Description of Artificial Sequence: Synthetic oligonucleotide
aaaagguacugccaacuac

SEQ ID NO: 2155929 - RNA, 19 nt, Artificial Sequence
  Description of Artificial Sequence: Synthetic oligonucleotide
uuugcuuugauacauuuuc

SEQ ID NO: 2155930 - RNA, 19 nt, Artificial Sequence
  Description of Artificial Sequence: Synthetic oligonucleotide
aacuuuuagugacacauug

SEQ ID NO: 2155931 - RNA, 19 nt, Artificial Sequence
  Description of Artificial Sequence: Synthetic oligonucleotide
aucauucccacacagguac

SEQ ID NO: 2155932 - RNA, 19 nt, Artificial Sequence
  Description of Artificial Sequence: Synthetic oligonucleotide
aaguguaacuuucaccuuc

SEQ ID NO: 2155933 - RNA, 19 nt, Artificial Sequence
  Description of Artificial Sequence: Synthetic oligonucleotide
aauccaaucgaucugccca

SEQ ID NO: 2155934 - RNA, 19 nt, Artificial Sequence
  Description of Artificial Sequence: Synthetic oligonucleotide
gaauuuauauuuaacuugc

SEQ ID NO: 2155935 - RNA, 19 nt, Artificial Sequence
  Description of Artificial Sequence: Synthetic oligonucleotide
ucauaggcuaauccaaucg

SEQ ID NO: 2155936 - RNA, 19 nt, Artificial Sequence
  Description of Artificial Sequence: Synthetic oligonucleotide
aacacugaaugacagguug

SEQ ID NO: 2155937 - RNA, 19 nt, Artificial Sequence
  Description of Artificial Sequence: Synthetic oligonucleotide
aacugauaaagcuuugaug

SEQ ID NO: 2155938 - RNA, 19 nt, Artificial Sequence
  Description of Artificial Sequence: Synthetic oligonucleotide
ucugagauggaguugcaag

SEQ ID NO: 2155939 - RNA, 19 nt, Artificial Sequence
  Description of Artificial Sequence: Synthetic oligonucleotide
cacuucaucauuuauuuac

SEQ ID NO: 2155940 - RNA, 19 nt, Artificial Sequence
  Description of Artificial Sequence: Synthetic oligonucleotide
aaacuugaacugauaaagc

SEQ ID NO: 2155941 - RNA, 19 nt, Artificial Sequence
  Description of Artificial Sequence: Synthetic oligonucleotide
uucaccuuccuuuagacuc

SEQ ID NO: 2155942 - RNA, 19 nt, Artificial Sequence
  Description of Artificial Sequence: Synthetic oligonucleotide
ugaaaguguaacuuucacc

SEQ ID NO: 2155943 - RNA, 19 nt, Artificial Sequence
  Description of Artificial Sequence: Synthetic oligonucleotide
uccuuuagacuccugacgc

SEQ ID NO: 2155944 - RNA, 19 nt, Artificial Sequence
  Description of Artificial Sequence: Synthetic oligonucleotide
aaguauuaugaaaagcaag

SEQ ID NO: 2155945 - RNA, 19 nt, Artificial Sequence
  Description of Artificial Sequence: Synthetic oligonucleotide
uuccuuuagacuccugacg

SEQ ID NO: 2155946 - RNA, 19 nt, Artificial Sequence
  Description of Artificial Sequence: Synthetic oligonucleotide
uuugccuugguacuggacu

SEQ ID NO: 2155947 - RNA, 19 nt, Artificial Sequence
  Description of Artificial Sequence: Synthetic oligonucleotide
agauggaguugcaagaucc

SEQ ID NO: 2155948 - RNA, 19 nt, Artificial Sequence
  Description of Artificial Sequence: Synthetic oligonucleotide
auacauugcacauuuacau

SEQ ID NO: 2155949 - RNA, 19 nt, Artificial Sequence
  Description of Artificial Sequence: Synthetic oligonucleotide
uugcacauuuacaugguag

SEQ ID NO: 2155950 - RNA, 19 nt, Artificial Sequence
  Description of Artificial Sequence: Synthetic oligonucleotide
uuacaugguagaaaaguac

SEQ ID NO: 2155951 - RNA, 19 nt, Artificial Sequence
  Description of Artificial Sequence: Synthetic oligonucleotide
uuugauacauuuucccuca

SEQ ID NO: 2155952 - RNA, 19 nt, Artificial Sequence
  Description of Artificial Sequence: Synthetic oligonucleotide
acuagaguaagucacucca

SEQ ID NO: 2155953 - RNA, 19 nt, Artificial Sequence
  Description of Artificial Sequence: Synthetic oligonucleotide
aggagaaacacugaaugac

SEQ ID NO: 2155954 - RNA, 19 nt, Artificial Sequence
  Description of Artificial Sequence: Synthetic oligonucleotide
caggacuuugcuuugauac

SEQ ID NO: 2155955 - RNA, 19 nt, Artificial Sequence
  Description of Artificial Sequence: Synthetic oligonucleotide
augaauuuauauuuaacuu

SEQ ID NO: 2155956 - RNA, 19 nt, Artificial Sequence
  Description of Artificial Sequence: Synthetic oligonucleotide
gauaggaaaguuguagucc

SEQ ID NO: 2155957 - RNA, 19 nt, Artificial Sequence
  Description of Artificial Sequence: Synthetic oligonucleotide
agagauaggaaaguuguag

SEQ ID NO: 2155958 - RNA, 19 nt, Artificial Sequence
  Description of Artificial Sequence: Synthetic oligonucleotide
aguugcaagauccggagug

SEQ ID NO: 2155959 - RNA, 19 nt, Artificial Sequence
  Description of Artificial Sequence: Synthetic oligonucleotide
ugguagaaaaguacaaaac

SEQ ID NO: 2155960 - RNA, 19 nt, Artificial Sequence
  Description of Artificial Sequence: Synthetic oligonucleotide
ugauggaacuuuuagugac

SEQ ID NO: 2155961 - RNA, 19 nt, Artificial Sequence
  Description of Artificial Sequence: Synthetic oligonucleotide
caacacugaacacuggugg

SEQ ID NO: 2155962 - RNA, 19 nt, Artificial Sequence
  Description of Artificial Sequence: Synthetic oligonucleotide
uaacuuuuauauacauugc

SEQ ID NO: 2155963 - RNA, 19 nt, Artificial Sequence
  Description of Artificial Sequence: Synthetic oligonucleotide
uaugucaacacugaacacu

SEQ ID NO: 2155964 - RNA, 19 nt, Artificial Sequence
  Description of Artificial Sequence: Synthetic oligonucleotide
cuuuuauauacauugcaca

SEQ ID NO: 2155965 - RNA, 19 nt, Artificial Sequence
  Description of Artificial Sequence: Synthetic oligonucleotide
uagaauggaagagauagga

SEQ ID NO: 2155966 - RNA, 19 nt, Artificial Sequence
  Description of Artificial Sequence: Synthetic oligonucleotide
aaccuugaaaucccacagg

SEQ ID NO: 2155967 - RNA, 19 nt, Artificial Sequence
  Description of Artificial Sequence: Synthetic oligonucleotide
ugcuuugauacauuuuccc

SEQ ID NO: 2155968 - RNA, 19 nt, Artificial Sequence
  Description of Artificial Sequence: Synthetic oligonucleotide
auugaaaagguacugccaa

SEQ ID NO: 2155969 - RNA, 19 nt, Artificial Sequence
  Description of Artificial Sequence: Synthetic oligonucleotide
cuuugauacauuuucccuc

SEQ ID NO: 2155970 - RNA, 19 nt, Artificial Sequence
  Description of Artificial Sequence: Synthetic oligonucleotide
aacauguggccuuucucag

SEQ ID NO: 2155971 - RNA, 19 nt, Artificial Sequence
  Description of Artificial Sequence: Synthetic oligonucleotide
uuacugucagggcagagcu

SEQ ID NO: 2155972 - RNA, 19 nt, Artificial Sequence
  Description of Artificial Sequence: Synthetic oligonucleotide
uaccacucuagaauggaag

SEQ ID NO: 2155973 - RNA, 19 nt, Artificial Sequence
  Description of Artificial Sequence: Synthetic oligonucleotide
uauauuuaacuugccaugu

SEQ ID NO: 2155974 - RNA, 19 nt, Artificial Sequence
  Description of Artificial Sequence: Synthetic oligonucleotide
auaggaaaguuguaguccu

SEQ ID NO: 2155975 - RNA, 19 nt, Artificial Sequence
  Description of Artificial Sequence: Synthetic oligonucleotide
ucaacacugaacacuggug

SEQ ID NO: 2155976 - RNA, 19 nt, Artificial Sequence
  Description of Artificial Sequence: Synthetic oligonucleotide
acuccugacgcccacauca

SEQ ID NO: 2155977 - RNA, 19 nt, Artificial Sequence
  Description of Artificial Sequence: Synthetic oligonucleotide
ugcacauuuacaugguaga

SEQ ID NO: 2155978 - RNA, 19 nt, Artificial Sequence
  Description of Artificial Sequence: Synthetic oligonucleotide
cuaauugaaaagguacugc

SEQ ID NO: 2155979 - RNA, 19 nt, Artificial Sequence
  Description of Artificial Sequence: Synthetic oligonucleotide
auacauuuucccucauagg

SEQ ID NO: 2155980 - RNA, 19 nt, Artificial Sequence
  Description of Artificial Sequence: Synthetic oligonucleotide
aacuaauugaaaagguacu

SEQ ID NO: 2155981 - RNA, 19 nt, Artificial Sequence
  Description of Artificial Sequence: Synthetic oligonucleotide
uuuguuuugcccagaggcu

SEQ ID NO: 2155982 - RNA, 19 nt, Artificial Sequence
  Description of Artificial Sequence: Synthetic oligonucleotide
uguguuuuguuuugcccag

SEQ ID NO: 2155983 - RNA, 19 nt, Artificial Sequence
  Description of Artificial Sequence: Synthetic oligonucleotide
uugaaaguguaacuuucac

SEQ ID NO: 2155984 - RNA, 19 nt, Artificial Sequence
  Description of Artificial Sequence: Synthetic oligonucleotide
aaagcuuugauggaacuuu

SEQ ID NO: 2155985 - RNA, 19 nt, Artificial Sequence
  Description of Artificial Sequence: Synthetic oligonucleotide
uuuuacauuugccuuggua

SEQ ID NO: 2155986 - RNA, 19 nt, Artificial Sequence
  Description of Artificial Sequence: Synthetic oligonucleotide
acuaauugaaaagguacug

SEQ ID NO: 2155987 - RNA, 19 nt, Artificial Sequence
  Description of Artificial Sequence: Synthetic oligonucleotide
aaauccgauugcaugucac

SEQ ID NO: 2155988 - RNA, 19 nt, Artificial Sequence
  Description of Artificial Sequence: Synthetic oligonucleotide
uuagugacacauugguuga

SEQ ID NO: 2155989 - RNA, 19 nt, Artificial Sequence
  Description of Artificial Sequence: Synthetic oligonucleotide
gauugcaugucacacagua

SEQ ID NO: 2155990 - RNA, 19 nt, Artificial Sequence
  Description of Artificial Sequence: Synthetic oligonucleotide
ugcccagcaaacauguggc

SEQ ID NO: 2155991 - RNA, 19 nt, Artificial Sequence
  Description of Artificial Sequence: Synthetic oligonucleotide
uugauggaacuuuuaguga

SEQ ID NO: 2155992 - RNA, 19 nt, Artificial Sequence
  Description of Artificial Sequence: Synthetic oligonucleotide
uggaucuguaacaucauuu

SEQ ID NO: 2155993 - RNA, 19 nt, Artificial Sequence
  Description of Artificial Sequence: Synthetic oligonucleotide
guaggcauuguuugucugg

SEQ ID NO: 2155994 - RNA, 19 nt, Artificial Sequence
  Description of Artificial Sequence: Synthetic oligonucleotide
ucaucaugucuuuggaucu

SEQ ID NO: 2155995 - RNA, 19 nt, Artificial Sequence
  Description of Artificial Sequence: Synthetic oligonucleotide
aggcuaauccaaucgaucu

SEQ ID NO: 2155996 - RNA, 19 nt, Artificial Sequence
  Description of Artificial Sequence: Synthetic oligonucleotide
uucauggcacacucgcugg

SEQ ID NO: 2155997 - RNA, 19 nt, Artificial Sequence
  Description of Artificial Sequence: Synthetic oligonucleotide
aauccgauugcaugucaca

SEQ ID NO: 2155998 - RNA, 19 nt, Artificial Sequence
  Description of Artificial Sequence: Synthetic oligonucleotide
cugccaacuaccucaaaag

SEQ ID NO: 2155999 - RNA, 19 nt, Artificial Sequence
  Description of Artificial Sequence: Synthetic oligonucleotide
aaugacagguugaaagugu

SEQ ID NO: 2156000 - RNA, 19 nt, Artificial Sequence
  Description of Artificial Sequence: Synthetic oligonucleotide
ugaaaagguacugccaacu

SEQ ID NO: 2156001 - RNA, 19 nt, Artificial Sequence
  Description of Artificial Sequence: Synthetic oligonucleotide
agaguaagucacuccauca

SEQ ID NO: 2156002 - RNA, 19 nt, Artificial Sequence
  Description of Artificial Sequence: Synthetic oligonucleotide
gguacugccaacuaccuca

SEQ ID NO: 2156003 - RNA, 19 nt, Artificial Sequence
  Description of Artificial Sequence: Synthetic oligonucleotide
aguguaacuuucaccuucc

SEQ ID NO: 2156004 - RNA, 19 nt, Artificial Sequence
  Description of Artificial Sequence: Synthetic oligonucleotide
cacuccaucauucccacac

SEQ ID NO: 2156005 - RNA, 19 nt, Artificial Sequence
  Description of Artificial Sequence: Synthetic oligonucleotide
ucggccaaccuugaaaucc

SEQ ID NO: 2156006 - RNA, 19 nt, Artificial Sequence
  Description of Artificial Sequence: Synthetic oligonucleotide
aucacagagagagcaacgg

SEQ ID NO: 2156007 - RNA, 19 nt, Artificial Sequence
  Description of Artificial Sequence: Synthetic oligonucleotide
uaagucacuccaucauucc

SEQ ID NO: 2156008 - RNA, 19 nt, Artificial Sequence
  Description of Artificial Sequence: Synthetic oligonucleotide
uucccucauaggcuaaucc

SEQ ID NO: 2156009 - RNA, 19 nt, Artificial Sequence
  Description of Artificial Sequence: Synthetic oligonucleotide
agcagcacgccagaggagc

SEQ ID NO: 2156010 - RNA, 19 nt, Artificial Sequence
  Description of Artificial Sequence: Synthetic oligonucleotide
uagaguaagucacuccauc

SEQ ID NO: 2156011 - RNA, 19 nt, Artificial Sequence
  Description of Artificial Sequence: Synthetic oligonucleotide
agagcaacggccucggcca

SEQ ID NO: 2156012 - RNA, 19 nt, Artificial Sequence
  Description of Artificial Sequence: Synthetic oligonucleotide
uggaguugcaagauccgga

SEQ ID NO: 2156013 - RNA, 19 nt, Artificial Sequence
  Description of Artificial Sequence: Synthetic oligonucleotide
gacagguugaaaguguaac

SEQ ID NO: 2156014 - RNA, 19 nt, Artificial Sequence
  Description of Artificial Sequence: Synthetic oligonucleotide
agaacaucccggcaagucu

SEQ ID NO: 2156015 - RNA, 19 nt, Artificial Sequence
  Description of Artificial Sequence: Synthetic oligonucleotide
acagguugaaaguguaacu

SEQ ID NO: 2156016 - RNA, 19 nt, Artificial Sequence
  Description of Artificial Sequence: Synthetic oligonucleotide
ucccucauaggcuaaucca

SEQ ID NO: 2156017 - RNA, 19 nt, Artificial Sequence
  Description of Artificial Sequence: Synthetic oligonucleotide
ugcaugucacacaguaggc

SEQ ID NO: 2156018 - RNA, 19 nt, Artificial Sequence
  Description of Artificial Sequence: Synthetic oligonucleotide
acugccaacuaccucaaaa

SEQ ID NO: 2156019 - RNA, 19 nt, Artificial Sequence
  Description of Artificial Sequence: Synthetic oligonucleotide
acagagaacaucccggcaa

SEQ ID NO: 2156020 - RNA, 19 nt, Artificial Sequence
  Description of Artificial Sequence: Synthetic oligonucleotide
caucacagagagagcaacg

SEQ ID NO: 2156021 - RNA, 19 nt, Artificial Sequence
  Description of Artificial Sequence: Synthetic oligonucleotide
uuuaccacucuagaaugga

SEQ ID NO: 2156022 - RNA, 19 nt, Artificial Sequence
  Description of Artificial Sequence: Synthetic oligonucleotide
ccaacuaccucaaaaggag

SEQ ID NO: 2156023 - RNA, 19 nt, Artificial Sequence
  Description of Artificial Sequence: Synthetic oligonucleotide
aggaaaguuguaguccugg

SEQ ID NO: 2156024 - RNA, 19 nt, Artificial Sequence
  Description of Artificial Sequence: Synthetic oligonucleotide
acuuuuagugacacauugg

SEQ ID NO: 2156025 - RNA, 19 nt, Artificial Sequence
  Description of Artificial Sequence: Synthetic oligonucleotide
acacauuauaacuuuuaua

SEQ ID NO: 2156026 - RNA, 19 nt, Artificial Sequence
  Description of Artificial Sequence: Synthetic oligonucleotide
aacuuucaccuuccuuuag

SEQ ID NO: 2156027 - RNA, 19 nt, Artificial Sequence
  Description of Artificial Sequence: Synthetic oligonucleotide
auggaacuuuuagugacac

SEQ ID NO: 2156028 - RNA, 19 nt, Artificial Sequence
  Description of Artificial Sequence: Synthetic oligonucleotide
uaauccaaucgaucugccc

SEQ ID NO: 2156029 - RNA, 19 nt, Artificial Sequence
  Description of Artificial Sequence: Synthetic oligonucleotide
cuuuagacuccugacgccc

SEQ ID NO: 2156030 - RNA, 19 nt, Artificial Sequence
  Description of Artificial Sequence: Synthetic oligonucleotide
acaguaggcauuguuuguc

SEQ ID NO: 2156031 - RNA, 19 nt, Artificial Sequence
  Description of Artificial Sequence: Synthetic oligonucleotide
uaggcuaauccaaucgauc

SEQ ID NO: 2156032 - RNA, 19 nt, Artificial Sequence
  Description of Artificial Sequence: Synthetic oligonucleotide
ugaacugauaaagcuuuga

SEQ ID NO: 2156033 - RNA, 19 nt, Artificial Sequence
  Description of Artificial Sequence: Synthetic oligonucleotide
gguagaaaaguacaaaacu

SEQ ID NO: 2156034 - RNA, 19 nt, Artificial Sequence
  Description of Artificial Sequence: Synthetic oligonucleotide
guacuggacuuccaguucc

SEQ ID NO: 2156035 - RNA, 19 nt, Artificial Sequence
  Description of Artificial Sequence: Synthetic oligonucleotide
uccggagugcuucacuuca

SEQ ID NO: 2156036 - RNA, 19 nt, Artificial Sequence
  Description of Artificial Sequence: Synthetic oligonucleotide
accacucuagaauggaaga

SEQ ID NO: 2156037 - RNA, 19 nt, Artificial Sequence
  Description of Artificial Sequence: Synthetic oligonucleotide
cucugggcaaauccgauug

SEQ ID NO: 2156038 - RNA, 19 nt, Artificial Sequence
  Description of Artificial Sequence: Synthetic oligonucleotide
auccgauugcaugucacac

SEQ ID NO: 2156039 - RNA, 19 nt, Artificial Sequence
  Description of Artificial Sequence: Synthetic oligonucleotide
uaaguggcauugucacugg

SEQ ID NO: 2156040 - RNA, 19 nt, Artificial Sequence
  Description of Artificial Sequence: Synthetic oligonucleotide
gauggaguugcaagauccg

SEQ ID NO: 2156041 - RNA, 19 nt, Artificial Sequence
  Description of Artificial Sequence: Synthetic oligonucleotide
cuuacugucagggcagagc

SEQ ID NO: 2156042 - RNA, 19 nt, Artificial Sequence
  Description of Artificial Sequence: Synthetic oligonucleotide
acuucaagcagcacgccag

SEQ ID NO: 2156043 - RNA, 19 nt, Artificial Sequence
  Description of Artificial Sequence: Synthetic oligonucleotide
acauuauaacuuuuauaua

SEQ ID NO: 2156044 - RNA, 19 nt, Artificial Sequence
  Description of Artificial Sequence: Synthetic oligonucleotide
uccacaacacagguggagc

SEQ ID NO: 2156045 - RNA, 19 nt, Artificial Sequence
  Description of Artificial Sequence: Synthetic oligonucleotide
auccgacuuacugucaggg

SEQ ID NO: 2156046 - RNA, 19 nt, Artificial Sequence
  Description of Artificial Sequence: Synthetic oligonucleotide
ugucaacacugaacacugg

SEQ ID NO: 2156047 - RNA, 19 nt, Artificial Sequence
  Description of Artificial Sequence: Synthetic oligonucleotide
agagagagcaacggccucg

SEQ ID NO: 2156048 - RNA, 19 nt, Artificial Sequence
  Description of Artificial Sequence: Synthetic oligonucleotide
auccaaucgaucugcccag

SEQ ID NO: 2156049 - RNA, 19 nt, Artificial Sequence
  Description of Artificial Sequence: Synthetic oligonucleotide
ugguggagcguuuaccacu

SEQ ID NO: 2156050 - RNA, 19 nt, Artificial Sequence
  Description of Artificial Sequence: Synthetic oligonucleotide
guuuaccacucuagaaugg

SEQ ID NO: 2156051 - RNA, 19 nt, Artificial Sequence
  Description of Artificial Sequence: Synthetic oligonucleotide
gcauaaguggcauugucac

SEQ ID NO: 2156052 - RNA, 19 nt, Artificial Sequence
  Description of Artificial Sequence: Synthetic oligonucleotide
uuuagacuccugacgccca

SEQ ID NO: 2156053 - RNA, 19 nt, Artificial Sequence
  Description of Artificial Sequence: Synthetic oligonucleotide
uacuggacuuccaguuccg

SEQ ID NO: 2156054 - RNA, 19 nt, Artificial Sequence
  Description of Artificial Sequence: Synthetic oligonucleotide
aacuaccucaaaaggagaa

SEQ ID NO: 2156055 - RNA, 19 nt, Artificial Sequence
  Description of Artificial Sequence: Synthetic oligonucleotide
cacuagaguaagucacucc

SEQ ID NO: 2156056 - RNA, 19 nt, Artificial Sequence
  Description of Artificial Sequence: Synthetic oligonucleotide
acauguggccuuucucagg

SEQ ID NO: 2156057 - RNA, 19 nt, Artificial Sequence
  Description of Artificial Sequence: Synthetic oligonucleotide
cuaauccaaucgaucugcc

SEQ ID NO: 2156058 - RNA, 19 nt, Artificial Sequence
  Description of Artificial Sequence: Synthetic oligonucleotide
caguggaugucuucacagg

SEQ ID NO: 2156059 - RNA, 19 nt, Artificial Sequence
  Description of Artificial Sequence: Synthetic oligonucleotide
uccgauugcaugucacaca

SEQ ID NO: 2156060 - RNA, 19 nt, Artificial Sequence
  Description of Artificial Sequence: Synthetic oligonucleotide
acucgcuggcauaaguggc

SEQ ID NO: 2156061 - RNA, 19 nt, Artificial Sequence
  Description of Artificial Sequence: Synthetic oligonucleotide
aggacuuugcuuugauaca

SEQ ID NO: 2156062 - RNA, 19 nt, Artificial Sequence
  Description of Artificial Sequence: Synthetic oligonucleotide
agcaagaaacuugaacuga

SEQ ID NO: 2156063 - RNA, 19 nt, Artificial Sequence
  Description of Artificial Sequence: Synthetic oligonucleotide
uacauuugccuugguacug

SEQ ID NO: 2156064 - RNA, 19 nt, Artificial Sequence
  Description of Artificial Sequence: Synthetic oligonucleotide
aguaggcauuguuugucug

SEQ ID NO: 2156065 - RNA, 19 nt, Artificial Sequence
  Description of Artificial Sequence: Synthetic oligonucleotide
auggaguugcaagauccgg

SEQ ID NO: 2156066 - RNA, 19 nt, Artificial Sequence
  Description of Artificial Sequence: Synthetic oligonucleotide
uuaccacucuagaauggaa

SEQ ID NO: 2156067 - RNA, 19 nt, Artificial Sequence
  Description of Artificial Sequence: Synthetic oligonucleotide
uuuggaucuguaacaucau

SEQ ID NO: 2156068 - RNA, 19 nt, Artificial Sequence
  Description of Artificial Sequence: Synthetic oligonucleotide
agaacuaauugaaaaggua

SEQ ID NO: 2156069 - RNA, 19 nt, Artificial Sequence
  Description of Artificial Sequence: Synthetic oligonucleotide
agcguuuaccacucuagaa

SEQ ID NO: 2156070 - RNA, 19 nt, Artificial Sequence
  Description of Artificial Sequence: Synthetic oligonucleotide
acauuugccuugguacugg

SEQ ID NO: 2156071 - RNA, 19 nt, Artificial Sequence
  Description of Artificial Sequence: Synthetic oligonucleotide
cucauaggcuaauccaauc

SEQ ID NO: 2156072 - RNA, 19 nt, Artificial Sequence
  Description of Artificial Sequence: Synthetic oligonucleotide
cauaggcuaauccaaucga

SEQ ID NO: 2156073 - RNA, 19 nt, Artificial Sequence
  Description of Artificial Sequence: Synthetic oligonucleotide
uguuugucugguccacaac

SEQ ID NO: 2156074 - RNA, 19 nt, Artificial Sequence
  Description of Artificial Sequence: Synthetic oligonucleotide
acauuuucccucauaggcu

SEQ ID NO: 2156075 - RNA, 19 nt, Artificial Sequence
  Description of Artificial Sequence: Synthetic oligonucleotide
caaacauguggccuuucuc

SEQ ID NO: 2156076 - RNA, 19 nt, Artificial Sequence
  Description of Artificial Sequence: Synthetic oligonucleotide
acuucaucauuuauuuaca

SEQ ID NO: 2156077 - RNA, 19 nt, Artificial Sequence
  Description of Artificial Sequence: Synthetic oligonucleotide
ggaagagauaggaaaguug

SEQ ID NO: 2156078 - RNA, 19 nt, Artificial Sequence
  Description of Artificial Sequence: Synthetic oligonucleotide
cugagauggaguugcaaga

SEQ ID NO: 2156079 - RNA, 19 nt, Artificial Sequence
  Description of Artificial Sequence: Synthetic oligonucleotide
cuggacuuccaguuccggc

SEQ ID NO: 2156080 - RNA, 19 nt, Artificial Sequence
  Description of Artificial Sequence: Synthetic oligonucleotide
ugaaaucccacaggcauuu

SEQ ID NO: 2156081 - RNA, 19 nt, Artificial Sequence
  Description of Artificial Sequence: Synthetic oligonucleotide
uaacuuucaccuuccuuua

SEQ ID NO: 2156082 - RNA, 19 nt, Artificial Sequence
  Description of Artificial Sequence: Synthetic oligonucleotide
cuaugucaacacugaacac

SEQ ID NO: 2156083 - RNA, 19 nt, Artificial Sequence
  Description of Artificial Sequence: Synthetic oligonucleotide
agguugaaaguguaacuuu

SEQ ID NO: 2156084 - RNA, 19 nt, Artificial Sequence
  Description of Artificial Sequence: Synthetic oligonucleotide
cuccaucauucccacacag

SEQ ID NO: 2156085 - RNA, 19 nt, Artificial Sequence
  Description of Artificial Sequence: Synthetic oligonucleotide
uaggaaaguuguaguccug

SEQ ID NO: 2156086 - RNA, 19 nt, Artificial Sequence
  Description of Artificial Sequence: Synthetic oligonucleotide
cagagaacaucccggcaag

SEQ ID NO: 2156087 - RNA, 19 nt, Artificial Sequence
  Description of Artificial Sequence: Synthetic oligonucleotide
agaggagcaggcagcuucc

SEQ ID NO: 2156088 - RNA, 19 nt, Artificial Sequence
  Description of Artificial Sequence: Synthetic oligonucleotide
agguacugccaacuaccuc

SEQ ID NO: 2156089 - RNA, 19 nt, Artificial Sequence
  Description of Artificial Sequence: Synthetic oligonucleotide
cuugaacugauaaagcuuu

SEQ ID NO: 2156090 - RNA, 19 nt, Artificial Sequence
  Description of Artificial Sequence: Synthetic oligonucleotide
accacaguggaugucuuca

SEQ ID NO: 2156091 - RNA, 19 nt, Artificial Sequence
  Description of Artificial Sequence: Synthetic oligonucleotide
cuuugauggaacuuuuagu

SEQ ID NO: 2156092 - RNA, 19 nt, Artificial Sequence
  Description of Artificial Sequence: Synthetic oligonucleotide
acgccagaggagcaggcag

SEQ ID NO: 2156093 - RNA, 19 nt, Artificial Sequence
  Description of Artificial Sequence: Synthetic oligonucleotide
ugacagguugaaaguguaa

SEQ ID NO: 2156094 - RNA, 19 nt, Artificial Sequence
  Description of Artificial Sequence: Synthetic oligonucleotide
aagauccggagugcuucac

SEQ ID NO: 2156095 - RNA, 19 nt, Artificial Sequence
  Description of Artificial Sequence: Synthetic oligonucleotide
uguuuugcccagaggcuau

SEQ ID NO: 2156096 - RNA, 19 nt, Artificial Sequence
  Description of Artificial Sequence: Synthetic oligonucleotide
acuugaacugauaaagcuu

SEQ ID NO: 2156097 - RNA, 19 nt, Artificial Sequence
  Description of Artificial Sequence: Synthetic oligonucleotide
ucauggcacacucgcuggc

SEQ ID NO: 2156098 - RNA, 19 nt, Artificial Sequence
  Description of Artificial Sequence: Synthetic oligonucleotide
gaacugauaaagcuuugau

SEQ ID NO: 2156099 - RNA, 19 nt, Artificial Sequence
  Description of Artificial Sequence: Synthetic oligonucleotide
auauuuaacuugccauguu

SEQ ID NO: 2156100 - RNA, 19 nt, Artificial Sequence
  Description of Artificial Sequence: Synthetic oligonucleotide
uccgacuuacugucagggc

SEQ ID NO: 2156101 - RNA, 19 nt, Artificial Sequence
  Description of Artificial Sequence: Synthetic oligonucleotide
gaucugcccagcaaacaug

SEQ ID NO: 2156102 - RNA, 19 nt, Artificial Sequence
  Description of Artificial Sequence: Synthetic oligonucleotide
auggaagagauaggaaagu

SEQ ID NO: 2156103 - RNA, 19 nt, Artificial Sequence
  Description of Artificial Sequence: Synthetic oligonucleotide
uaaagcuuugauggaacuu

SEQ ID NO: 2156104 - RNA, 19 nt, Artificial Sequence
  Description of Artificial Sequence: Synthetic oligonucleotide
aaguuguaguccuggucuu

SEQ ID NO: 2156105 - RNA, 19 nt, Artificial Sequence
  Description of Artificial Sequence: Synthetic oligonucleotide
gagauggaguugcaagauc

SEQ ID NO: 2156106 - RNA, 19 nt, Artificial Sequence
  Description of Artificial Sequence: Synthetic oligonucleotide
uaggcauuguuugucuggu

SEQ ID NO: 2156107 - RNA, 19 nt, Artificial Sequence
  Description of Artificial Sequence: Synthetic oligonucleotide
gaaaagguacugccaacua

SEQ ID NO: 2156108 - RNA, 19 nt, Artificial Sequence
  Description of Artificial Sequence: Synthetic oligonucleotide
acacugguggagcguuuac

SEQ ID NO: 2156109 - RNA, 19 nt, Artificial Sequence
  Description of Artificial Sequence: Synthetic oligonucleotide
uuguuuugcccagaggcua

SEQ ID NO: 2156110 - RNA, 19 nt, Artificial Sequence
  Description of Artificial Sequence: Synthetic oligonucleotide
guugaaaguguaacuuuca

SEQ ID NO: 2156111 - RNA, 19 nt, Artificial Sequence
  Description of Artificial Sequence: Synthetic oligonucleotide
ugggcaaauccgauugcau

SEQ ID NO: 2156112 - RNA, 19 nt, Artificial Sequence
  Description of Artificial Sequence: Synthetic oligonucleotide
uuagacuccugacgcccac

SEQ ID NO: 2156113 - RNA, 19 nt, Artificial Sequence
  Description of Artificial Sequence: Synthetic oligonucleotide
gauggaacuuuuagugaca

SEQ ID NO: 2156114 - RNA, 19 nt, Artificial Sequence
  Description of Artificial Sequence: Synthetic oligonucleotide
acucuagaauggaagagau

SEQ ID NO: 2156115 - RNA, 19 nt, Artificial Sequence
  Description of Artificial Sequence: Synthetic oligonucleotide
gaggcuaugucaacacuga

SEQ ID NO: 2156116 - RNA, 19 nt, Artificial Sequence
  Description of Artificial Sequence: Synthetic oligonucleotide
aguuguaguccuggucuuc

SEQ ID NO: 2156117 - RNA, 19 nt, Artificial Sequence
  Description of Artificial Sequence: Synthetic oligonucleotide
gagaacaucccggcaaguc

SEQ ID NO: 2156118 - RNA, 19 nt, Artificial Sequence
  Description of Artificial Sequence: Synthetic oligonucleotide
gagcguuuaccacucuaga

SEQ ID NO: 2156119 - RNA, 19 nt, Artificial Sequence
  Description of Artificial Sequence: Synthetic oligonucleotide
cauuuucccucauaggcua

SEQ ID NO: 2156120 - RNA, 19 nt, Artificial Sequence
  Description of Artificial Sequence: Synthetic oligonucleotide
ggaacuuuuagugacacau

SEQ ID NO: 2156121 - RNA, 19 nt, Artificial Sequence
  Description of Artificial Sequence: Synthetic oligonucleotide
ggagugcuucacuucaagc

SEQ ID NO: 2156122 - RNA, 19 nt, Artificial Sequence
  Description of Artificial Sequence: Synthetic oligonucleotide
aagguacugccaacuaccu

SEQ ID NO: 2156123 - RNA, 19 nt, Artificial Sequence
  Description of Artificial Sequence: Synthetic oligonucleotide
ccgauugcaugucacacag

SEQ ID NO: 2156124 - RNA, 19 nt, Artificial Sequence
  Description of Artificial Sequence: Synthetic oligonucleotide
augucuucugagauggagu

SEQ ID NO: 2156125 - RNA, 19 nt, Artificial Sequence
  Description of Artificial Sequence: Synthetic oligonucleotide
accggcucauccgacuuac

SEQ ID NO: 2156126 - RNA, 19 nt, Artificial Sequence
  Description of Artificial Sequence: Synthetic oligonucleotide
gguugaaaguguaacuuuc

SEQ ID NO: 2156127 - RNA, 19 nt, Artificial Sequence
  Description of Artificial Sequence: Synthetic oligonucleotide
auugcacauuuacauggua

SEQ ID NO: 2156128 - RNA, 19 nt, Artificial Sequence
  Description of Artificial Sequence: Synthetic oligonucleotide
cuucaucauuuauuuacaa

SEQ ID NO: 2156129 - RNA, 19 nt, Artificial Sequence
  Description of Artificial Sequence: Synthetic oligonucleotide
gacagagaacaucccggca

SEQ ID NO: 2156130 - RNA, 19 nt, Artificial Sequence
  Description of Artificial Sequence: Synthetic oligonucleotide
auuugccuugguacuggac

SEQ ID NO: 2156131 - RNA, 19 nt, Artificial Sequence
  Description of Artificial Sequence: Synthetic oligonucleotide
ggagcguuuaccacucuag

SEQ ID NO: 2156132 - RNA, 19 nt, Artificial Sequence
  Description of Artificial Sequence: Synthetic oligonucleotide
uggagcguuuaccacucua

SEQ ID NO: 2156133 - RNA, 19 nt, Artificial Sequence
  Description of Artificial Sequence: Synthetic oligonucleotide
gucacuggcgcagaccggc

SEQ ID NO: 2156134 - RNA, 19 nt, Artificial Sequence
  Description of Artificial Sequence: Synthetic oligonucleotide
uucaagcagcacgccagag

SEQ ID NO: 2156135 - RNA, 19 nt, Artificial Sequence
  Description of Artificial Sequence: Synthetic oligonucleotide
gucacuccaucauucccac

SEQ ID NO: 2156136 - RNA, 19 nt, Artificial Sequence
  Description of Artificial Sequence: Synthetic oligonucleotide
gguggcaggcacuagagua

SEQ ID NO: 2156137 - RNA, 19 nt, Artificial Sequence
  Description of Artificial Sequence: Synthetic oligonucleotide
agauccggagugcuucacu

SEQ ID NO: 2156138 - RNA, 19 nt, Artificial Sequence
  Description of Artificial Sequence: Synthetic oligonucleotide
caugucuuuggaucuguaa

SEQ ID NO: 2156139 - RNA, 19 nt, Artificial Sequence
  Description of Artificial Sequence: Synthetic oligonucleotide
gucaacacugaacacuggu

SEQ ID NO: 2156140 - RNA, 19 nt, Artificial Sequence
  Description of Artificial Sequence: Synthetic oligonucleotide
ugaacacugguggagcguu

SEQ ID NO: 2156141 - RNA, 19 nt, Artificial Sequence
  Description of Artificial Sequence: Synthetic oligonucleotide
auaggcuaauccaaucgau

SEQ ID NO: 2156142 - RNA, 19 nt, Artificial Sequence
  Description of Artificial Sequence: Synthetic oligonucleotide
ggcuaauccaaucgaucug

SEQ ID NO: 2156143 - RNA, 19 nt, Artificial Sequence
  Description of Artificial Sequence: Synthetic oligonucleotide
ugacgcccacaucaucaug

SEQ ID NO: 2156144 - RNA, 19 nt, Artificial Sequence
  Description of Artificial Sequence: Synthetic oligonucleotide
acgcccacaucaucauguc

SEQ ID NO: 2156145 - RNA, 19 nt, Artificial Sequence
  Description of Artificial Sequence: Synthetic oligonucleotide
uugccuugguacuggacuu

SEQ ID NO: 2156146 - RNA, 19 nt, Artificial Sequence
  Description of Artificial Sequence: Synthetic oligonucleotide
uggcaggcacuagaguaag

SEQ ID NO: 2156147 - RNA, 19 nt, Artificial Sequence
  Description of Artificial Sequence: Synthetic oligonucleotide
ggcauugucacuggcgcag

SEQ ID NO: 2156148 - RNA, 19 nt, Artificial Sequence
  Description of Artificial Sequence: Synthetic oligonucleotide
gaguaagucacuccaucau

SEQ ID NO: 2156149 - RNA, 19 nt, Artificial Sequence
  Description of Artificial Sequence: Synthetic oligonucleotide
guccacaacacagguggag

SEQ ID NO: 2156150 - RNA, 19 nt, Artificial Sequence
  Description of Artificial Sequence: Synthetic oligonucleotide
acuggcgcagaccggcuca

SEQ ID NO: 2156151 - RNA, 19 nt, Artificial Sequence
  Description of Artificial Sequence: Synthetic oligonucleotide
acacucgcuggcauaagug

SEQ ID NO: 2156152 - RNA, 19 nt, Artificial Sequence
  Description of Artificial Sequence: Synthetic oligonucleotide
ucgaucugcccagcaaaca

SEQ ID NO: 2156153 - RNA, 19 nt, Artificial Sequence
  Description of Artificial Sequence: Synthetic oligonucleotide
cugguggagcguuuaccac

SEQ ID NO: 2156154 - RNA, 19 nt, Artificial Sequence
  Description of Artificial Sequence: Synthetic oligonucleotide
cuugccauguuuugaaaau

SEQ ID NO: 2156155 - RNA, 19 nt, Artificial Sequence
  Description of Artificial Sequence: Synthetic oligonucleotide
cugguccacaacacaggug

SEQ ID NO: 2156156 - RNA, 19 nt, Artificial Sequence
  Description of Artificial Sequence: Synthetic oligonucleotide
cacugguggagcguuuacc

SEQ ID NO: 2156157 - RNA, 19 nt, Artificial Sequence
  Description of Artificial Sequence: Synthetic oligonucleotide
acuggacuuccaguuccgg

SEQ ID NO: 2156158 - RNA, 19 nt, Artificial Sequence
  Description of Artificial Sequence: Synthetic oligonucleotide
gugacacauugguugaaaa

SEQ ID NO: 2156159 - RNA, 19 nt, Artificial Sequence
  Description of Artificial Sequence: Synthetic oligonucleotide
uggcauugucacuggcgca

SEQ ID NO: 2156160 - RNA, 19 nt, Artificial Sequence
  Description of Artificial Sequence: Synthetic oligonucleotide
gguggagcugccaggacag

SEQ ID NO: 2156161 - RNA, 19 nt, Artificial Sequence
  Description of Artificial Sequence: Synthetic oligonucleotide
agcacgccagaggagcagg

SEQ ID NO: 2156162 - RNA, 19 nt, Artificial Sequence
  Description of Artificial Sequence: Synthetic oligonucleotide
ucaugucuuuggaucugua

SEQ ID NO: 2156163 - RNA, 19 nt, Artificial Sequence
  Description of Artificial Sequence: Synthetic oligonucleotide
aucaugucuuuggaucugu

SEQ ID NO: 2156164 - RNA, 19 nt, Artificial Sequence
  Description of Artificial Sequence: Synthetic oligonucleotide
cucgcuggcauaaguggca

SEQ ID NO: 2156165 - RNA, 19 nt, Artificial Sequence
  Description of Artificial Sequence: Synthetic oligonucleotide
ugccaggacagagaacauc

SEQ ID NO: 2156166 - RNA, 19 nt, Artificial Sequence
  Description of Artificial Sequence: Synthetic oligonucleotide
gacgcccacaucaucaugu

SEQ ID NO: 2156167 - RNA, 19 nt, Artificial Sequence
  Description of Artificial Sequence: Synthetic oligonucleotide
acaggacuuugcuuugaua

SEQ ID NO: 2156168 - RNA, 19 nt, Artificial Sequence
  Description of Artificial Sequence: Synthetic oligonucleotide
guacugcucagaagaggag

SEQ ID NO: 2156169 - RNA, 19 nt, Artificial Sequence
  Description of Artificial Sequence: Synthetic oligonucleotide
agacuccugacgcccacau

SEQ ID NO: 2156170 - RNA, 19 nt, Artificial Sequence
  Description of Artificial Sequence: Synthetic oligonucleotide
acggccucggccaaccuug

SEQ ID NO: 2156171 - RNA, 19 nt, Artificial Sequence
  Description of Artificial Sequence: Synthetic oligonucleotide
caagaaacuugaacugaua

SEQ ID NO: 2156172 - RNA, 19 nt, Artificial Sequence
  Description of Artificial Sequence: Synthetic oligonucleotide
ggcgcagaccggcucaucc

SEQ ID NO: 2156173 - RNA, 19 nt, Artificial Sequence
  Description of Artificial Sequence: Synthetic oligonucleotide
ucacuucaagcagcacgcc

SEQ ID NO: 2156174 - RNA, 19 nt, Artificial Sequence
  Description of Artificial Sequence: Synthetic oligonucleotide
caaauccgauugcauguca

SEQ ID NO: 2156175 - RNA, 19 nt, Artificial Sequence
  Description of Artificial Sequence: Synthetic oligonucleotide
gccuuucucagguggcagg

SEQ ID NO: 2156176 - RNA, 19 nt, Artificial Sequence
  Description of Artificial Sequence: Synthetic oligonucleotide
uuuucccucauaggcuaau

SEQ ID NO: 2156177 - RNA, 19 nt, Artificial Sequence
  Description of Artificial Sequence: Synthetic oligonucleotide
caacacagguggagcugcc

SEQ ID NO: 2156178 - RNA, 19 nt, Artificial Sequence
  Description of Artificial Sequence: Synthetic oligonucleotide
acuuacugucagggcagag

SEQ ID NO: 2156179 - RNA, 19 nt, Artificial Sequence
  Description of Artificial Sequence: Synthetic oligonucleotide
cauugucacuggcgcagac

SEQ ID NO: 2156180 - RNA, 19 nt, Artificial Sequence
  Description of Artificial Sequence: Synthetic oligonucleotide
ccaaccuugaaaucccaca

SEQ ID NO: 2156181 - RNA, 19 nt, Artificial Sequence
  Description of Artificial Sequence: Synthetic oligonucleotide
ccuuuagacuccugacgcc

SEQ ID NO: 2156182 - RNA, 19 nt, Artificial Sequence
  Description of Artificial Sequence: Synthetic oligonucleotide
ucucagguggcaggcacua

SEQ ID NO: 2156183 - RNA, 19 nt, Artificial Sequence
  Description of Artificial Sequence: Synthetic oligonucleotide
uacugucagggcagagcuc

SEQ ID NO: 2156184 - RNA, 19 nt, Artificial Sequence
  Description of Artificial Sequence: Synthetic oligonucleotide
gcaggcacuagaguaaguc

SEQ ID NO: 2156185 - RNA, 19 nt, Artificial Sequence
  Description of Artificial Sequence: Synthetic oligonucleotide
caaucgaucugcccagcaa

SEQ ID NO: 2156186 - RNA, 19 nt, Artificial Sequence
  Description of Artificial Sequence: Synthetic oligonucleotide
uggccuuucucagguggca

SEQ ID NO: 2156187 - RNA, 19 nt, Artificial Sequence
  Description of Artificial Sequence: Synthetic oligonucleotide
ccgacuuacugucagggca

SEQ ID NO: 2156188 - RNA, 19 nt, Artificial Sequence
  Description of Artificial Sequence: Synthetic oligonucleotide
aggcuaugucaacacugaa

SEQ ID NO: 2156189 - RNA, 19 nt, Artificial Sequence
  Description of Artificial Sequence: Synthetic oligonucleotide
auggcacacucgcuggcau

SEQ ID NO: 2156190 - RNA, 19 nt, Artificial Sequence
  Description of Artificial Sequence: Synthetic oligonucleotide
gcaagauccggagugcuuc

SEQ ID NO: 2156191 - RNA, 19 nt, Artificial Sequence
  Description of Artificial Sequence: Synthetic oligonucleotide
uccaaucgaucugcccagc

SEQ ID NO: 2156192 - RNA, 19 nt, Artificial Sequence
  Description of Artificial Sequence: Synthetic oligonucleotide
gucuucugagauggaguug

SEQ ID NO: 2156193 - RNA, 19 nt, Artificial Sequence
  Description of Artificial Sequence: Synthetic oligonucleotide
ggaucuguaacaucauuuu

SEQ ID NO: 2156194 - RNA, 19 nt, Artificial Sequence
  Description of Artificial Sequence: Synthetic oligonucleotide
gauccggagugcuucacuu

SEQ ID NO: 2156195 - RNA, 19 nt, Artificial Sequence
  Description of Artificial Sequence: Synthetic oligonucleotide
cugcucagaagaggagggc

SEQ ID NO: 2156196 - RNA, 19 nt, Artificial Sequence
  Description of Artificial Sequence: Synthetic oligonucleotide
gcguuuaccacucuagaau

SEQ ID NO: 2156197 - RNA, 19 nt, Artificial Sequence
  Description of Artificial Sequence: Synthetic oligonucleotide
agcaaacauguggccuuuc

SEQ ID NO: 2156198 - RNA, 19 nt, Artificial Sequence
  Description of Artificial Sequence: Synthetic oligonucleotide
agaccggcucauccgacuu

SEQ ID NO: 2156199 - RNA, 19 nt, Artificial Sequence
  Description of Artificial Sequence: Synthetic oligonucleotide
ucacuggcgcagaccggcu

SEQ ID NO: 2156200 - RNA, 19 nt, Artificial Sequence
  Description of Artificial Sequence: Synthetic oligonucleotide
gcaggcagcuuccuucaug

SEQ ID NO: 2156201 - RNA, 19 nt, Artificial Sequence
  Description of Artificial Sequence: Synthetic oligonucleotide
caagauccggagugcuuca

SEQ ID NO: 2156202 - RNA, 19 nt, Artificial Sequence
  Description of Artificial Sequence: Synthetic oligonucleotide
cucggccaaccuugaaauc

SEQ ID NO: 2156203 - RNA, 19 nt, Artificial Sequence
  Description of Artificial Sequence: Synthetic oligonucleotide
cgacuuacugucagggcag

SEQ ID NO: 2156204 - RNA, 19 nt, Artificial Sequence
  Description of Artificial Sequence: Synthetic oligonucleotide
uagugacacauugguugaa

SEQ ID NO: 2156205 - RNA, 19 nt, Artificial Sequence
  Description of Artificial Sequence: Synthetic oligonucleotide
uagacuccugacgcccaca

SEQ ID NO: 2156206 - RNA, 19 nt, Artificial Sequence
  Description of Artificial Sequence: Synthetic oligonucleotide
cauaaguggcauugucacu

SEQ ID NO: 2156207 - RNA, 19 nt, Artificial Sequence
  Description of Artificial Sequence: Synthetic oligonucleotide
ccaucauucccacacaggu

SEQ ID NO: 2156208 - RNA, 19 nt, Artificial Sequence
  Description of Artificial Sequence: Synthetic oligonucleotide
cucuagaauggaagagaua

SEQ ID NO: 2156209 - RNA, 19 nt, Artificial Sequence
  Description of Artificial Sequence: Synthetic oligonucleotide
ggcucauccgacuuacugu

SEQ ID NO: 2156210 - RNA, 19 nt, Artificial Sequence
  Description of Artificial Sequence: Synthetic oligonucleotide
gcgcagaccggcucauccg

SEQ ID NO: 2156211 - RNA, 19 nt, Artificial Sequence
  Description of Artificial Sequence: Synthetic oligonucleotide
cacaguaggcauuguuugu

SEQ ID NO: 2156212 - RNA, 19 nt, Artificial Sequence
  Description of Artificial Sequence: Synthetic oligonucleotide
agcaacggccucggccaac

SEQ ID NO: 2156213 - RNA, 19 nt, Artificial Sequence
  Description of Artificial Sequence: Synthetic oligonucleotide
cauuugccuugguacugga

SEQ ID NO: 2156214 - RNA, 19 nt, Artificial Sequence
  Description of Artificial Sequence: Synthetic oligonucleotide
guggcaggcacuagaguaa

SEQ ID NO: 2156215 - RNA, 19 nt, Artificial Sequence
  Description of Artificial Sequence: Synthetic oligonucleotide
cuagaguaagucacuccau

SEQ ID NO: 2156216 - RNA, 19 nt, Artificial Sequence
  Description of Artificial Sequence: Synthetic oligonucleotide
ccuuucucagguggcaggc

SEQ ID NO: 2156217 - RNA, 19 nt, Artificial Sequence
  Description of Artificial Sequence: Synthetic oligonucleotide
gaguugcaagauccggagu

SEQ ID NO: 2156218 - RNA, 19 nt, Artificial Sequence
  Description of Artificial Sequence: Synthetic oligonucleotide
gguggagcguuuaccacuc

SEQ ID NO: 2156219 - RNA, 19 nt, Artificial Sequence
  Description of Artificial Sequence: Synthetic oligonucleotide
gaacaucccggcaagucuu

SEQ ID NO: 2156220 - RNA, 19 nt, Artificial Sequence
  Description of Artificial Sequence: Synthetic oligonucleotide
ucgcuggcauaaguggcau

SEQ ID NO: 2156221 - RNA, 19 nt, Artificial Sequence
  Description of Artificial Sequence: Synthetic oligonucleotide
gacuuacugucagggcaga

SEQ ID NO: 2156222 - RNA, 19 nt, Artificial Sequence
  Description of Artificial Sequence: Synthetic oligonucleotide
caguaggcauuguuugucu

SEQ ID NO: 2156223 - RNA, 19 nt, Artificial Sequence
  Description of Artificial Sequence: Synthetic oligonucleotide
uacugccaacuaccucaaa

SEQ ID NO: 2156224 - RNA, 19 nt, Artificial Sequence
  Description of Artificial Sequence: Synthetic oligonucleotide
ccuugaaaucccacaggca

SEQ ID NO: 2156225 - RNA, 19 nt, Artificial Sequence
  Description of Artificial Sequence: Synthetic oligonucleotide
cccucauaggcuaauccaa

SEQ ID NO: 2156226 - RNA, 19 nt, Artificial Sequence
  Description of Artificial Sequence: Synthetic oligonucleotide
ggaaaguuguaguccuggu

SEQ ID NO: 2156227 - RNA, 19 nt, Artificial Sequence
  Description of Artificial Sequence: Synthetic oligonucleotide
gcacuagaguaagucacuc

SEQ ID NO: 2156228 - RNA, 19 nt, Artificial Sequence
  Description of Artificial Sequence: Synthetic oligonucleotide
agcuuugauggaacuuuua

SEQ ID NO: 2156229 - RNA, 19 nt, Artificial Sequence
  Description of Artificial Sequence: Synthetic oligonucleotide
gcacauuuacaugguagaa

SEQ ID NO: 2156230 - RNA, 19 nt, Artificial Sequence
  Description of Artificial Sequence: Synthetic oligonucleotide
cagcacgccagaggagcag

SEQ ID NO: 2156231 - RNA, 19 nt, Artificial Sequence
  Description of Artificial Sequence: Synthetic oligonucleotide
gccucggccaaccuugaaa

SEQ ID NO: 2156232 - RNA, 19 nt, Artificial Sequence
  Description of Artificial Sequence: Synthetic oligonucleotide
cacacucgcuggcauaagu

SEQ ID NO: 2156233 - RNA, 19 nt, Artificial Sequence
  Description of Artificial Sequence: Synthetic oligonucleotide
cacuggcgcagaccggcuc

SEQ ID NO: 2156234 - RNA, 19 nt, Artificial Sequence
  Description of Artificial Sequence: Synthetic oligonucleotide
cuuucucagguggcaggca

SEQ ID NO: 2156235 - RNA, 19 nt, Artificial Sequence
  Description of Artificial Sequence: Synthetic oligonucleotide
gcaacggccucggccaacc

SEQ ID NO: 2156236 - RNA, 19 nt, Artificial Sequence
  Description of Artificial Sequence: Synthetic oligonucleotide
cggcucauccgacuuacug

SEQ ID NO: 2156237 - RNA, 19 nt, Artificial Sequence
  Description of Artificial Sequence: Synthetic oligonucleotide
gcaagaaacuugaacugau

SEQ ID NO: 2156238 - RNA, 19 nt, Artificial Sequence
  Description of Artificial Sequence: Synthetic oligonucleotide
guacugccaacuaccucaa

SEQ ID NO: 2156239 - RNA, 19 nt, Artificial Sequence
  Description of Artificial Sequence: Synthetic oligonucleotide
gaccggcucauccgacuua

SEQ ID NO: 2156240 - RNA, 19 nt, Artificial Sequence
  Description of Artificial Sequence: Synthetic oligonucleotide
gccaaccuugaaaucccac

SEQ ID NO: 2156241 - RNA, 19 nt, Artificial Sequence
  Description of Artificial Sequence: Synthetic oligonucleotide
cggagugcuucacuucaag

SEQ ID NO: 2156242 - RNA, 19 nt, Artificial Sequence
  Description of Artificial Sequence: Synthetic oligonucleotide
cacgccagaggagcaggca

SEQ ID NO: 2156243 - RNA, 19 nt, Artificial Sequence
  Description of Artificial Sequence: Synthetic oligonucleotide
ggcacuagaguaagucacu

SEQ ID NO: 2156244 - RNA, 19 nt, Artificial Sequence
  Description of Artificial Sequence: Synthetic oligonucleotide
cccagaggcuaugucaaca

SEQ ID NO: 2156245 - RNA, 19 nt, Artificial Sequence
  Description of Artificial Sequence: Synthetic oligonucleotide
cagaccggcucauccgacu

SEQ ID NO: 2156246 - RNA, 19 nt, Artificial Sequence
  Description of Artificial Sequence: Synthetic oligonucleotide
ccaaucgaucugcccagca

SEQ ID NO: 2156247 - RNA, 19 nt, Artificial Sequence
  Description of Artificial Sequence: Synthetic oligonucleotide
cugacgcccacaucaucau

SEQ ID NO: 2156248 - RNA, 19 nt, Artificial Sequence
  Description of Artificial Sequence: Synthetic oligonucleotide
gagcaacggccucggccaa

SEQ ID NO: 2156249 - RNA, 19 nt, Artificial Sequence
  Description of Artificial Sequence: Synthetic oligonucleotide
gggcucugggcaaauccga

SEQ ID NO: 2156250 - RNA, 19 nt, Artificial Sequence
  Description of Artificial Sequence: Synthetic oligonucleotide
cugaacacugguggagcgu

SEQ ID NO: 2156251 - RNA, 19 nt, Artificial Sequence
  Description of Artificial Sequence: Synthetic oligonucleotide
acaucccggcaagucuuuu

SEQ ID NO: 2156252 - RNA, 19 nt, Artificial Sequence
  Description of Artificial Sequence: Synthetic oligonucleotide
caccaccacaguggauguc

SEQ ID NO: 2156253 - RNA, 19 nt, Artificial Sequence
  Description of Artificial Sequence: Synthetic oligonucleotide
gcacgccagaggagcaggc

SEQ ID NO: 2156254 - RNA, 19 nt, Artificial Sequence
  Description of Artificial Sequence: Synthetic oligonucleotide
gguccacaacacaggugga

SEQ ID NO: 2156255 - RNA, 19 nt, Artificial Sequence
  Description of Artificial Sequence: Synthetic oligonucleotide
gcagaccggcucauccgac

SEQ ID NO: 2156256 - RNA, 19 nt, Artificial Sequence
  Description of Artificial Sequence: Synthetic oligonucleotide
cuccugacgcccacaucau

SEQ ID NO: 2156257 - RNA, 19 nt, Artificial Sequence
  Description of Artificial Sequence: Synthetic oligonucleotide
gcauugucacuggcgcaga

SEQ ID NO: 2156258 - RNA, 19 nt, Artificial Sequence
  Description of Artificial Sequence: Synthetic oligonucleotide
uggcgcagaccggcucauc

SEQ ID NO: 2156259 - RNA, 19 nt, Artificial Sequence
  Description of Artificial Sequence: Synthetic oligonucleotide
guggagcugccaggacaga

SEQ ID NO: 2156260 - RNA, 19 nt, Artificial Sequence
  Description of Artificial Sequence: Synthetic oligonucleotide
gcucugggcaaauccgauu

SEQ ID NO: 2156261 - RNA, 19 nt, Artificial Sequence
  Description of Artificial Sequence: Synthetic oligonucleotide
cgcagaccggcucauccga

SEQ ID NO: 2156262 - RNA, 19 nt, Artificial Sequence
  Description of Artificial Sequence: Synthetic oligonucleotide
guggagcguuuaccacucu

SEQ ID NO: 2156263 - RNA, 19 nt, Artificial Sequence
  Description of Artificial Sequence: Synthetic oligonucleotide
ccggagugcuucacuucaa

SEQ ID NO: 2156264 - RNA, 19 nt, Artificial Sequence
  Description of Artificial Sequence: Synthetic oligonucleotide
cagcaaacauguggccuuu

SEQ ID NO: 2156265 - RNA, 19 nt, Artificial Sequence
  Description of Artificial Sequence: Synthetic oligonucleotide
ggcaggcacuagaguaagu

SEQ ID NO: 2156266 - RNA, 19 nt, Artificial Sequence
  Description of Artificial Sequence: Synthetic oligonucleotide
caacggccucggccaaccu

SEQ ID NO: 2156267 - RNA, 19 nt, Artificial Sequence
  Description of Artificial Sequence: Synthetic oligonucleotide
cuggcgcagaccggcucau

SEQ ID NO: 2156268 - RNA, 19 nt, Artificial Sequence
  Description of Artificial Sequence: Synthetic oligonucleotide
cgauugcaugucacacagu

SEQ ID NO: 2156269 - RNA, 19 nt, Artificial Sequence
  Description of Artificial Sequence: Synthetic oligonucleotide
cggccucggccaaccuuga

SEQ ID NO: 2156270 - RNA, 19 nt, Artificial Sequence
  Description of Artificial Sequence: Synthetic oligonucleotide
ccggcucauccgacuuacu

SEQ ID NO: 2156271 - RNA, 19 nt, Artificial Sequence
  Description of Artificial Sequence: Synthetic oligonucleotide
aauaauguccuccugaaag

SEQ ID NO: 2156272 - RNA, 19 nt, Artificial Sequence
  Description of Artificial Sequence: Synthetic oligonucleotide
aaaaccgagguucagaagg

SEQ ID NO: 2156273 - RNA, 19 nt, Artificial Sequence
  Description of Artificial Sequence: Synthetic oligonucleotide
ucaucuuuuaagcucaucg

SEQ ID NO: 2156274 - RNA, 19 nt, Artificial Sequence
  Description of Artificial Sequence: Synthetic oligonucleotide
agucgaaugauccacuugc

SEQ ID NO: 2156275 - RNA, 19 nt, Artificial Sequence
  Description of Artificial Sequence: Synthetic oligonucleotide
ugagauucucccaacagcg

SEQ ID NO: 2156276 - RNA, 19 nt, Artificial Sequence
  Description of Artificial Sequence: Synthetic oligonucleotide
agaacugcuccacagaggc

SEQ ID NO: 2156277 - RNA, 19 nt, Artificial Sequence
  Description of Artificial Sequence: Synthetic oligonucleotide
uuuagcaccauuuauuugu

SEQ ID NO: 2156278 - RNA, 19 nt, Artificial Sequence
  Description of Artificial Sequence: Synthetic oligonucleotide
uuuauuugugaucucagcu

SEQ ID NO: 2156279 - RNA, 19 nt, Artificial Sequence
  Description of Artificial Sequence: Synthetic oligonucleotide
cuugcagaagacaaaaccg

SEQ ID NO: 2156280 - RNA, 19 nt, Artificial Sequence
  Description of Artificial Sequence: Synthetic oligonucleotide
aacagcgggaugcuaagcc

SEQ ID NO: 2156281 - RNA, 19 nt, Artificial Sequence
  Description of Artificial Sequence: Synthetic oligonucleotide
uauuccauaaugguguugg

SEQ ID NO: 2156282 - RNA, 19 nt, Artificial Sequence
  Description of Artificial Sequence: Synthetic oligonucleotide
aacagaacaagagacuccg

SEQ ID NO: 2156283 - RNA, 19 nt, Artificial Sequence
  Description of Artificial Sequence: Synthetic oligonucleotide
auaauguccuccugaaagc

SEQ ID NO: 2156284 - RNA, 19 nt, Artificial Sequence
  Description of Artificial Sequence: Synthetic oligonucleotide
uccauaaugguguugggag

SEQ ID NO: 2156285 - RNA, 19 nt, Artificial Sequence
  Description of Artificial Sequence: Synthetic oligonucleotide
uucauucugaucauggucu

SEQ ID NO: 2156286 - RNA, 19 nt, Artificial Sequence
  Description of Artificial Sequence: Synthetic oligonucleotide
cuuaauuccuucuuugaag

SEQ ID NO: 2156287 - RNA, 19 nt, Artificial Sequence
  Description of Artificial Sequence: Synthetic oligonucleotide
augagauucucccaacagc

SEQ ID NO: 2156288 - RNA, 19 nt, Artificial Sequence
  Description of Artificial Sequence: Synthetic oligonucleotide
uuugaaaaggagccuuugg

SEQ ID NO: 2156289 - RNA, 19 nt, Artificial Sequence
  Description of Artificial Sequence: Synthetic oligonucleotide
ugauguucugcucauagcu

SEQ ID NO: 2156290 - RNA, 19 nt, Artificial Sequence
  Description of Artificial Sequence: Synthetic oligonucleotide
aacgcuacgacacgggcuc

SEQ ID NO: 2156291 - RNA, 19 nt, Artificial Sequence
  Description of Artificial Sequence: Synthetic oligonucleotide
gaugacgccagcuucaaug

SEQ ID NO: 2156292 - RNA, 19 nt, Artificial Sequence
  Description of Artificial Sequence: Synthetic oligonucleotide
uuauuugugaucucagcug

SEQ ID NO: 2156293 - RNA, 19 nt, Artificial Sequence
  Description of Artificial Sequence: Synthetic oligonucleotide
uguaaaacuuccagaacug

SEQ ID NO: 2156294 - RNA, 19 nt, Artificial Sequence
  Description of Artificial Sequence: Synthetic oligonucleotide
uccuagaguaccaaaaggu

SEQ ID NO: 2156295 - RNA, 19 nt, Artificial Sequence
  Description of Artificial Sequence: Synthetic oligonucleotide
cuucccaggacgcagagcg

SEQ ID NO: 2156296 - RNA, 19 nt, Artificial Sequence
  Description of Artificial Sequence: Synthetic oligonucleotide
agaaauaauguccuccuga

SEQ ID NO: 2156297 - RNA, 19 nt, Artificial Sequence
  Description of Artificial Sequence: Synthetic oligonucleotide
ccauauagaaauaaugucc

SEQ ID NO: 2156298 - RNA, 19 nt, Artificial Sequence
  Description of Artificial Sequence: Synthetic oligonucleotide
cugccuggcauuuugaugc

SEQ ID NO: 2156299 - RNA, 19 nt, Artificial Sequence
  Description of Artificial Sequence: Synthetic oligonucleotide
gagguuuugaaaaggagcc

SEQ ID NO: 2156300 - RNA, 19 nt, Artificial Sequence
  Description of Artificial Sequence: Synthetic oligonucleotide
uccauauagaaauaauguc

SEQ ID NO: 2156301 - RNA, 19 nt, Artificial Sequence
  Description of Artificial Sequence: Synthetic oligonucleotide
gacagaagggucuuccagg

SEQ ID NO: 2156302 - RNA, 19 nt, Artificial Sequence
  Description of Artificial Sequence: Synthetic oligonucleotide
gaacaagagacuccgauga

SEQ ID NO: 2156303 - RNA, 19 nt, Artificial Sequence
  Description of Artificial Sequence: Synthetic oligonucleotide
ugaacugguaggacggccg

SEQ ID NO: 2156304 - RNA, 19 nt, Artificial Sequence
  Description of Artificial Sequence: Synthetic oligonucleotide
aagaguaucccggauucgg

SEQ ID NO: 2156305 - RNA, 19 nt, Artificial Sequence
  Description of Artificial Sequence: Synthetic oligonucleotide
ugaguuuuguauuccauaa

SEQ ID NO: 2156306 - RNA, 19 nt, Artificial Sequence
  Description of Artificial Sequence: Synthetic oligonucleotide
gaugagauucucccaacag

SEQ ID NO: 2156307 - RNA, 19 nt, Artificial Sequence
  Description of Artificial Sequence: Synthetic oligonucleotide
ucuccuagaguaccaaaag

SEQ ID NO: 2156308 - RNA, 19 nt, Artificial Sequence
  Description of Artificial Sequence: Synthetic oligonucleotide
cugucaucaucuuuuaagc

SEQ ID NO: 2156309 - RNA, 19 nt, Artificial Sequence
  Description of Artificial Sequence: Synthetic oligonucleotide
ucaaagcauaacaugcucu

SEQ ID NO: 2156310 - RNA, 19 nt, Artificial Sequence
  Description of Artificial Sequence: Synthetic oligonucleotide
ucaaucgcggcuuccagag

SEQ ID NO: 2156311 - RNA, 19 nt, Artificial Sequence
  Description of Artificial Sequence: Synthetic oligonucleotide
agguagguuaagcacgcgc

SEQ ID NO: 2156312 - RNA, 19 nt, Artificial Sequence
  Description of Artificial Sequence: Synthetic oligonucleotide
agauucucccaacagcggg

SEQ ID NO: 2156313 - RNA, 19 nt, Artificial Sequence
  Description of Artificial Sequence: Synthetic oligonucleotide
agcucugugaacugguagg

SEQ ID NO: 2156314 - RNA, 19 nt, Artificial Sequence
  Description of Artificial Sequence: Synthetic oligonucleotide
uugaagagaugaaagucac

SEQ ID NO: 2156315 - RNA, 19 nt, Artificial Sequence
  Description of Artificial Sequence: Synthetic oligonucleotide
uugcagaagacaaaaccga

SEQ ID NO: 2156316 - RNA, 19 nt, Artificial Sequence
  Description of Artificial Sequence: Synthetic oligonucleotide
uuccgaagucgaaugaucc

SEQ ID NO: 2156317 - RNA, 19 nt, Artificial Sequence
  Description of Artificial Sequence: Synthetic oligonucleotide
auuccauauagaaauaaug

SEQ ID NO: 2156318 - RNA, 19 nt, Artificial Sequence
  Description of Artificial Sequence: Synthetic oligonucleotide
cauggcacauucaaucgcg

SEQ ID NO: 2156319 - RNA, 19 nt, Artificial Sequence
  Description of Artificial Sequence: Synthetic oligonucleotide
aacaagagacuccgaugac

SEQ ID NO: 2156320 - RNA, 19 nt, Artificial Sequence
  Description of Artificial Sequence: Synthetic oligonucleotide
caucuuuuaagcucaucgc

SEQ ID NO: 2156321 - RNA, 19 nt, Artificial Sequence
  Description of Artificial Sequence: Synthetic oligonucleotide
caagagacuccgaugacgc

SEQ ID NO: 2156322 - RNA, 19 nt, Artificial Sequence
  Description of Artificial Sequence: Synthetic oligonucleotide
guugcuuggucacuggcgg

SEQ ID NO: 2156323 - RNA, 19 nt, Artificial Sequence
  Description of Artificial Sequence: Synthetic oligonucleotide
uguaguuguacugcagggg

SEQ ID NO: 2156324 - RNA, 19 nt, Artificial Sequence
  Description of Artificial Sequence: Synthetic oligonucleotide
augaaagucacuguggccu

SEQ ID NO: 2156325 - RNA, 19 nt, Artificial Sequence
  Description of Artificial Sequence: Synthetic oligonucleotide
uuaagcacgcgccgaagag

SEQ ID NO: 2156326 - RNA, 19 nt, Artificial Sequence
  Description of Artificial Sequence: Synthetic oligonucleotide
aaucgcggcuuccagaggu

SEQ ID NO: 2156327 - RNA, 19 nt, Artificial Sequence
  Description of Artificial Sequence: Synthetic oligonucleotide
ucuuccguuccucuugucc

SEQ ID NO: 2156328 - RNA, 19 nt, Artificial Sequence
  Description of Artificial Sequence: Synthetic oligonucleotide
ugaaagcggacagagacca

SEQ ID NO: 2156329 - RNA, 19 nt, Artificial Sequence
  Description of Artificial Sequence: Synthetic oligonucleotide
agaacaagagacuccgaug

SEQ ID NO: 2156330 - RNA, 19 nt, Artificial Sequence
  Description of Artificial Sequence: Synthetic oligonucleotide
auauagaaauaauguccuc

SEQ ID NO: 2156331 - RNA, 19 nt, Artificial Sequence
  Description of Artificial Sequence: Synthetic oligonucleotide
cuuugaagagaugaaaguc

SEQ ID NO: 2156332 - RNA, 19 nt, Artificial Sequence
  Description of Artificial Sequence: Synthetic oligonucleotide
gucauggcacauucaaucg

SEQ ID NO: 2156333 - RNA, 19 nt, Artificial Sequence
  Description of Artificial Sequence: Synthetic oligonucleotide
cugaucauggucuccacug

SEQ ID NO: 2156334 - RNA, 19 nt, Artificial Sequence
  Description of Artificial Sequence: Synthetic oligonucleotide
cugugaacugguaggacgg

SEQ ID NO: 2156335 - RNA, 19 nt, Artificial Sequence
  Description of Artificial Sequence: Synthetic oligonucleotide
uaagccuuuccgaagucga

SEQ ID NO: 2156336 - RNA, 19 nt, Artificial Sequence
  Description of Artificial Sequence: Synthetic oligonucleotide
aaagcauaacaugcucuuc

SEQ ID NO: 2156337 - RNA, 19 nt, Artificial Sequence
  Description of Artificial Sequence: Synthetic oligonucleotide
uuauuugcaucauccuccc

SEQ ID NO: 2156338 - RNA, 19 nt, Artificial Sequence
  Description of Artificial Sequence: Synthetic oligonucleotide
uuuuaagcucaucgcagcu

SEQ ID NO: 2156339 - RNA, 19 nt, Artificial Sequence
  Description of Artificial Sequence: Synthetic oligonucleotide
ucauggcacauucaaucgc

SEQ ID NO: 2156340 - RNA, 19 nt, Artificial Sequence
  Description of Artificial Sequence: Synthetic oligonucleotide
uagaguaccaaaaggugua

SEQ ID NO: 2156341 - RNA, 19 nt, Artificial Sequence
  Description of Artificial Sequence: Synthetic oligonucleotide
gaaauaauguccuccugaa

SEQ ID NO: 2156342 - RNA, 19 nt, Artificial Sequence
  Description of Artificial Sequence: Synthetic oligonucleotide
cacgccaacagaacaagag

SEQ ID NO: 2156343 - RNA, 19 nt, Artificial Sequence
  Description of Artificial Sequence: Synthetic oligonucleotide
acaagagacuccgaugacg

SEQ ID NO: 2156344 - RNA, 19 nt, Artificial Sequence
  Description of Artificial Sequence: Synthetic oligonucleotide
gaugcuaagccuuuccgaa

SEQ ID NO: 2156345 - RNA, 19 nt, Artificial Sequence
  Description of Artificial Sequence: Synthetic oligonucleotide
ugguuuagcaccauuuauu

SEQ ID NO: 2156346 - RNA, 19 nt, Artificial Sequence
  Description of Artificial Sequence: Synthetic oligonucleotide
ucucccaacagcgggaugc

SEQ ID NO: 2156347 - RNA, 19 nt, Artificial Sequence
  Description of Artificial Sequence: Synthetic oligonucleotide
uuauuccauauagaaauaa

SEQ ID NO: 2156348 - RNA, 19 nt, Artificial Sequence
  Description of Artificial Sequence: Synthetic oligonucleotide
uuagcaccauuuauuugug

SEQ ID NO: 2156349 - RNA, 19 nt, Artificial Sequence
  Description of Artificial Sequence: Synthetic oligonucleotide
cauauagaaauaauguccu

SEQ ID NO: 2156350 - RNA, 19 nt, Artificial Sequence
  Description of Artificial Sequence: Synthetic oligonucleotide
aguaccaaaagguguaguu

SEQ ID NO: 2156351 - RNA, 19 nt, Artificial Sequence
  Description of Artificial Sequence: Synthetic oligonucleotide
ucgaaugauccacuugcca

SEQ ID NO: 2156352 - RNA, 19 nt, Artificial Sequence
  Description of Artificial Sequence: Synthetic oligonucleotide
aaagcggacagagaccaca

SEQ ID NO: 2156353 - RNA, 19 nt, Artificial Sequence
  Description of Artificial Sequence: Synthetic oligonucleotide
aagguguaguuguacugca

SEQ ID NO: 2156354 - RNA, 19 nt, Artificial Sequence
  Description of Artificial Sequence: Synthetic oligonucleotide
ugcuaagccuuuccgaagu

SEQ ID NO: 2156355 - RNA, 19 nt, Artificial Sequence
  Description of Artificial Sequence: Synthetic oligonucleotide
agcaccauuuauuugugau

SEQ ID NO: 2156356 - RNA, 19 nt, Artificial Sequence
  Description of Artificial Sequence: Synthetic oligonucleotide
uaccauguggcuguaaaac

SEQ ID NO: 2156357 - RNA, 19 nt, Artificial Sequence
  Description of Artificial Sequence: Synthetic oligonucleotide
uuugugaucucagcuguug

SEQ ID NO: 2156358 - RNA, 19 nt, Artificial Sequence
  Description of Artificial Sequence: Synthetic oligonucleotide
guagguuaagcacgcgccg

SEQ ID NO: 2156359 - RNA, 19 nt, Artificial Sequence
  Description of Artificial Sequence: Synthetic oligonucleotide
aaugguguugggagguagg

SEQ ID NO: 2156360 - RNA, 19 nt, Artificial Sequence
  Description of Artificial Sequence: Synthetic oligonucleotide
agccccgcagauuuccucc

SEQ ID NO: 2156361 - RNA, 19 nt, Artificial Sequence
  Description of Artificial Sequence: Synthetic oligonucleotide
aauguccuccugaaagcgg

SEQ ID NO: 2156362 - RNA, 19 nt, Artificial Sequence
  Description of Artificial Sequence: Synthetic oligonucleotide
aaauaauguccuccugaaa

SEQ ID NO: 2156363 - RNA, 19 nt, Artificial Sequence
  Description of Artificial Sequence: Synthetic oligonucleotide
acgacacgggcucuguuac

SEQ ID NO: 2156364 - RNA, 19 nt, Artificial Sequence
  Description of Artificial Sequence: Synthetic oligonucleotide
gucacuguggccugucagg

SEQ ID NO: 2156365 - RNA, 19 nt, Artificial Sequence
  Description of Artificial Sequence: Synthetic oligonucleotide
aaaccgagguucagaaggg

SEQ ID NO: 2156366 - RNA, 19 nt, Artificial Sequence
  Description of Artificial Sequence: Synthetic oligonucleotide
ucacuggcggucuuauucc

SEQ ID NO: 2156367 - RNA, 19 nt, Artificial Sequence
  Description of Artificial Sequence: Synthetic oligonucleotide
cagagguuuugaaaaggag

SEQ ID NO: 2156368 - RNA, 19 nt, Artificial Sequence
  Description of Artificial Sequence: Synthetic oligonucleotide
gacacgggcucuguuaccg

SEQ ID NO: 2156369 - RNA, 19 nt, Artificial Sequence
  Description of Artificial Sequence: Synthetic oligonucleotide
guaguuguacugcagggga

SEQ ID NO: 2156370 - RNA, 19 nt, Artificial Sequence
  Description of Artificial Sequence: Synthetic oligonucleotide
ugugaguuuuguauuccau

SEQ ID NO: 2156371 - RNA, 19 nt, Artificial Sequence
  Description of Artificial Sequence: Synthetic oligonucleotide
ccugaaagcggacagagac

SEQ ID NO: 2156372 - RNA, 19 nt, Artificial Sequence
  Description of Artificial Sequence: Synthetic oligonucleotide
uggcauuuugaugcugucg

SEQ ID NO: 2156373 - RNA, 19 nt, Artificial Sequence
  Description of Artificial Sequence: Synthetic oligonucleotide
uggcuguaaaacuuccaga

SEQ ID NO: 2156374 - RNA, 19 nt, Artificial Sequence
  Description of Artificial Sequence: Synthetic oligonucleotide
ggucuuauuccauauagaa

SEQ ID NO: 2156375 - RNA, 19 nt, Artificial Sequence
  Description of Artificial Sequence: Synthetic oligonucleotide
ggucauggcacauucaauc

SEQ ID NO: 2156376 - RNA, 19 nt, Artificial Sequence
  Description of Artificial Sequence: Synthetic oligonucleotide
gaguaucccggauucgggc

SEQ ID NO: 2156377 - RNA, 19 nt, Artificial Sequence
  Description of Artificial Sequence: Synthetic oligonucleotide
cugaaagcggacagagacc

SEQ ID NO: 2156378 - RNA, 19 nt, Artificial Sequence
  Description of Artificial Sequence: Synthetic oligonucleotide
ucugaucauggucuccacu

SEQ ID NO: 2156379 - RNA, 19 nt, Artificial Sequence
  Description of Artificial Sequence: Synthetic oligonucleotide
accauguggcuguaaaacu

SEQ ID NO: 2156380 - RNA, 19 nt, Artificial Sequence
  Description of Artificial Sequence: Synthetic oligonucleotide
cucaaagcauaacaugcuc

SEQ ID NO: 2156381 - RNA, 19 nt, Artificial Sequence
  Description of Artificial Sequence: Synthetic oligonucleotide
guaccaaaagguguaguug

SEQ ID NO: 2156382 - RNA, 19 nt, Artificial Sequence
  Description of Artificial Sequence: Synthetic oligonucleotide
ugcucuggcucuugucucg

SEQ ID NO: 2156383 - RNA, 19 nt, Artificial Sequence
  Description of Artificial Sequence: Synthetic oligonucleotide
uuccauaaugguguuggga

SEQ ID NO: 2156384 - RNA, 19 nt, Artificial Sequence
  Description of Artificial Sequence: Synthetic oligonucleotide
guuuagcaccauuuauuug

SEQ ID NO: 2156385 - RNA, 19 nt, Artificial Sequence
  Description of Artificial Sequence: Synthetic oligonucleotide
agggagagggucauggcac

SEQ ID NO: 2156386 - RNA, 19 nt, Artificial Sequence
  Description of Artificial Sequence: Synthetic oligonucleotide
uguggcuguaaaacuucca

SEQ ID NO: 2156387 - RNA, 19 nt, Artificial Sequence
  Description of Artificial Sequence: Synthetic oligonucleotide
uccuccccaaccaugaauu

SEQ ID NO: 2156388 - RNA, 19 nt, Artificial Sequence
  Description of Artificial Sequence: Synthetic oligonucleotide
cauguggcuguaaaacuuc

SEQ ID NO: 2156389 - RNA, 19 nt, Artificial Sequence
  Description of Artificial Sequence: Synthetic oligonucleotide
uucaaucgcggcuuccaga

SEQ ID NO: 2156390 - RNA, 19 nt, Artificial Sequence
  Description of Artificial Sequence: Synthetic oligonucleotide
auuccauaaugguguuggg

SEQ ID NO: 2156391 - RNA, 19 nt, Artificial Sequence
  Description of Artificial Sequence: Synthetic oligonucleotide
cuaagccuuuccgaagucg

SEQ ID NO: 2156392 - RNA, 19 nt, Artificial Sequence
  Description of Artificial Sequence: Synthetic oligonucleotide
ucuguuaccguccccgcuu

SEQ ID NO: 2156393 - RNA, 19 nt, Artificial Sequence
  Description of Artificial Sequence: Synthetic oligonucleotide
gcggucuuauuccauauag

SEQ ID NO: 2156394 - RNA, 19 nt, Artificial Sequence
  Description of Artificial Sequence: Synthetic oligonucleotide
uuaccguccccgcuugcag

SEQ ID NO: 2156395 - RNA, 19 nt, Artificial Sequence
  Description of Artificial Sequence: Synthetic oligonucleotide
ugaucucagcuguuguugu

SEQ ID NO: 2156396 - RNA, 19 nt, Artificial Sequence
  Description of Artificial Sequence: Synthetic oligonucleotide
acgccaacagaacaagaga

SEQ ID NO: 2156397 - RNA, 19 nt, Artificial Sequence
  Description of Artificial Sequence: Synthetic oligonucleotide
ccaaccaugaauugcuccc

SEQ ID NO: 2156398 - RNA, 19 nt, Artificial Sequence
  Description of Artificial Sequence: Synthetic oligonucleotide
aguaucccggauucgggcu

SEQ ID NO: 2156399 - RNA, 19 nt, Artificial Sequence
  Description of Artificial Sequence: Synthetic oligonucleotide
agggucauggcacauucaa

SEQ ID NO: 2156400 - RNA, 19 nt, Artificial Sequence
  Description of Artificial Sequence: Synthetic oligonucleotide
uugugaucucagcuguugu

SEQ ID NO: 2156401 - RNA, 19 nt, Artificial Sequence
  Description of Artificial Sequence: Synthetic oligonucleotide
caaugauggugccauccag

SEQ ID NO: 2156402 - RNA, 19 nt, Artificial Sequence
  Description of Artificial Sequence: Synthetic oligonucleotide
uccgaagucgaaugaucca

SEQ ID NO: 2156403 - RNA, 19 nt, Artificial Sequence
  Description of Artificial Sequence: Synthetic oligonucleotide
cagaacugcuccacagagg

SEQ ID NO: 2156404 - RNA, 19 nt, Artificial Sequence
  Description of Artificial Sequence: Synthetic oligonucleotide
accgagguucagaaggggc

SEQ ID NO: 2156405 - RNA, 19 nt, Artificial Sequence
  Description of Artificial Sequence: Synthetic oligonucleotide
accacagccccgcagauuu

SEQ ID NO: 2156406 - RNA, 19 nt, Artificial Sequence
  Description of Artificial Sequence: Synthetic oligonucleotide
gccaggaugagauucuccc

SEQ ID NO: 2156407 - RNA, 19 nt, Artificial Sequence
  Description of Artificial Sequence: Synthetic oligonucleotide
uguucugcucauagcucug

SEQ ID NO: 2156408 - RNA, 19 nt, Artificial Sequence
  Description of Artificial Sequence: Synthetic oligonucleotide
cuagaguaccaaaaggugu

SEQ ID NO: 2156409 - RNA, 19 nt, Artificial Sequence
  Description of Artificial Sequence: Synthetic oligonucleotide
gagauucucccaacagcgg

SEQ ID NO: 2156410 - RNA, 19 nt, Artificial Sequence
  Description of Artificial Sequence: Synthetic oligonucleotide
agagacuccgaugacgcca

SEQ ID NO: 2156411 - RNA, 19 nt, Artificial Sequence
  Description of Artificial Sequence: Synthetic oligonucleotide
acgccagcuucaaugaugg

SEQ ID NO: 2156412 - RNA, 19 nt, Artificial Sequence
  Description of Artificial Sequence: Synthetic oligonucleotide
ucuugucucguuccguuuu

SEQ ID NO: 2156413 - RNA, 19 nt, Artificial Sequence
  Description of Artificial Sequence: Synthetic oligonucleotide
gacgccagcuucaaugaug

SEQ ID NO: 2156414 - RNA, 19 nt, Artificial Sequence
  Description of Artificial Sequence: Synthetic oligonucleotide
augcuaagccuuuccgaag

SEQ ID NO: 2156415 - RNA, 19 nt, Artificial Sequence
  Description of Artificial Sequence: Synthetic oligonucleotide
ggcuguaaaacuuccagaa

SEQ ID NO: 2156416 - RNA, 19 nt, Artificial Sequence
  Description of Artificial Sequence: Synthetic oligonucleotide
gaagaguaucccggauucg

SEQ ID NO: 2156417 - RNA, 19 nt, Artificial Sequence
  Description of Artificial Sequence: Synthetic oligonucleotide
gguagguuaagcacgcgcc

SEQ ID NO: 2156418 - RNA, 19 nt, Artificial Sequence
  Description of Artificial Sequence: Synthetic oligonucleotide
aaccgagguucagaagggg

SEQ ID NO: 2156419 - RNA, 19 nt, Artificial Sequence
  Description of Artificial Sequence: Synthetic oligonucleotide
ucaucgcagcugcccaacg

SEQ ID NO: 2156420 - RNA, 19 nt, Artificial Sequence
  Description of Artificial Sequence: Synthetic oligonucleotide
ccuagaguaccaaaaggug

SEQ ID NO: 2156421 - RNA, 19 nt, Artificial Sequence
  Description of Artificial Sequence: Synthetic oligonucleotide
ugguugcuuggucacuggc

SEQ ID NO: 2156422 - RNA, 19 nt, Artificial Sequence
  Description of Artificial Sequence: Synthetic oligonucleotide
aaggugccaaucugcuuga

SEQ ID NO: 2156423 - RNA, 19 nt, Artificial Sequence
  Description of Artificial Sequence: Synthetic oligonucleotide
aguuguacugcaggggaug

SEQ ID NO: 2156424 - RNA, 19 nt, Artificial Sequence
  Description of Artificial Sequence: Synthetic oligonucleotide
uggcacauucaaucgcggc

SEQ ID NO: 2156425 - RNA, 19 nt, Artificial Sequence
  Description of Artificial Sequence: Synthetic oligonucleotide
caaaaccgagguucagaag

SEQ ID NO: 2156426 - RNA, 19 nt, Artificial Sequence
  Description of Artificial Sequence: Synthetic oligonucleotide
cuugccgcugcucuggcuc

SEQ ID NO: 2156427 - RNA, 19 nt, Artificial Sequence
  Description of Artificial Sequence: Synthetic oligonucleotide
gggaugcuaagccuuuccg

SEQ ID NO: 2156428 - RNA, 19 nt, Artificial Sequence
  Description of Artificial Sequence: Synthetic oligonucleotide
ugcccaacgcuacgacacg

SEQ ID NO: 2156429 - RNA, 19 nt, Artificial Sequence
  Description of Artificial Sequence: Synthetic oligonucleotide
gaugcugucggugugaguu

SEQ ID NO: 2156430 - RNA, 19 nt, Artificial Sequence
  Description of Artificial Sequence: Synthetic oligonucleotide
agaguaucccggauucggg

SEQ ID NO: 2156431 - RNA, 19 nt, Artificial Sequence
  Description of Artificial Sequence: Synthetic oligonucleotide
acagcgggaugcuaagccu

SEQ ID NO: 2156432 - RNA, 19 nt, Artificial Sequence
  Description of Artificial Sequence: Synthetic oligonucleotide
agagaccacagccccgcag

SEQ ID NO: 2156433 - RNA, 19 nt, Artificial Sequence
  Description of Artificial Sequence: Synthetic oligonucleotide
guuaagcacgcgccgaaga

SEQ ID NO: 2156434 - RNA, 19 nt, Artificial Sequence
  Description of Artificial Sequence: Synthetic oligonucleotide
uacgacacgggcucuguua

SEQ ID NO: 2156435 - RNA, 19 nt, Artificial Sequence
  Description of Artificial Sequence: Synthetic oligonucleotide
guccccaggacguaccaug

SEQ ID NO: 2156436 - RNA, 19 nt, Artificial Sequence
  Description of Artificial Sequence: Synthetic oligonucleotide
ucggugugaguuuuguauu

SEQ ID NO: 2156437 - RNA, 19 nt, Artificial Sequence
  Description of Artificial Sequence: Synthetic oligonucleotide
uggcacgccaacagaacaa

SEQ ID NO: 2156438 - RNA, 19 nt, Artificial Sequence
  Description of Artificial Sequence: Synthetic oligonucleotide
gugaguuuuguauuccaua

SEQ ID NO: 2156439 - RNA, 19 nt, Artificial Sequence
  Description of Artificial Sequence: Synthetic oligonucleotide
uguauuccauaaugguguu

SEQ ID NO: 2156440 - RNA, 19 nt, Artificial Sequence
  Description of Artificial Sequence: Synthetic oligonucleotide
uuccuccccaaccaugaau

SEQ ID NO: 2156441 - RNA, 19 nt, Artificial Sequence
  Description of Artificial Sequence: Synthetic oligonucleotide
gucagccuguucucaaagc

SEQ ID NO: 2156442 - RNA, 19 nt, Artificial Sequence
  Description of Artificial Sequence: Synthetic oligonucleotide
agcugcccaacgcuacgac

SEQ ID NO: 2156443 - RNA, 19 nt, Artificial Sequence
  Description of Artificial Sequence: Synthetic oligonucleotide
ggacagagaccacagcccc

SEQ ID NO: 2156444 - RNA, 19 nt, Artificial Sequence
  Description of Artificial Sequence: Synthetic oligonucleotide
aggacguaccauguggcug

SEQ ID NO: 2156445 - RNA, 19 nt, Artificial Sequence
  Description of Artificial Sequence: Synthetic oligonucleotide
uagguuaagcacgcgccga

SEQ ID NO: 2156446 - RNA, 19 nt, Artificial Sequence
  Description of Artificial Sequence: Synthetic oligonucleotide
cuccccaaccaugaauugc

SEQ ID NO: 2156447 - RNA, 19 nt, Artificial Sequence
  Description of Artificial Sequence: Synthetic oligonucleotide
gagacuccgaugacgccag

SEQ ID NO: 2156448 - RNA, 19 nt, Artificial Sequence
  Description of Artificial Sequence: Synthetic oligonucleotide
cgaaugauccacuugccac

SEQ ID NO: 2156449 - RNA, 19 nt, Artificial Sequence
  Description of Artificial Sequence: Synthetic oligonucleotide
gguugcuuggucacuggcg

SEQ ID NO: 2156450 - RNA, 19 nt, Artificial Sequence
  Description of Artificial Sequence: Synthetic oligonucleotide
uaagcacgcgccgaagagu

SEQ ID NO: 2156451 - RNA, 19 nt, Artificial Sequence
  Description of Artificial Sequence: Synthetic oligonucleotide
caaccaugaauugcucccc

SEQ ID NO: 2156452 - RNA, 19 nt, Artificial Sequence
  Description of Artificial Sequence: Synthetic oligonucleotide
gacagagaccacagccccg

SEQ ID NO: 2156453 - RNA, 19 nt, Artificial Sequence
  Description of Artificial Sequence: Synthetic oligonucleotide
uccugaaagcggacagaga

SEQ ID NO: 2156454 - RNA, 19 nt, Artificial Sequence
  Description of Artificial Sequence: Synthetic oligonucleotide
uaguuguacugcaggggau

SEQ ID NO: 2156455 - RNA, 19 nt, Artificial Sequence
  Description of Artificial Sequence: Synthetic oligonucleotide
ggcucuguuaccguccccg

SEQ ID NO: 2156456 - RNA, 19 nt, Artificial Sequence
  Description of Artificial Sequence: Synthetic oligonucleotide
ggggauguucugcuggucc

SEQ ID NO: 2156457 - RNA, 19 nt, Artificial Sequence
  Description of Artificial Sequence: Synthetic oligonucleotide
ccauaaugguguugggagg

SEQ ID NO: 2156458 - RNA, 19 nt, Artificial Sequence
  Description of Artificial Sequence: Synthetic oligonucleotide
caucgcagcugcccaacgc

SEQ ID NO: 2156459 - RNA, 19 nt, Artificial Sequence
  Description of Artificial Sequence: Synthetic oligonucleotide
agcucaucgcagcugccca

SEQ ID NO: 2156460 - RNA, 19 nt, Artificial Sequence
  Description of Artificial Sequence: Synthetic oligonucleotide
ucgggcugugguugcuugg

SEQ ID NO: 2156461 - RNA, 19 nt, Artificial Sequence
  Description of Artificial Sequence: Synthetic oligonucleotide
caucauccucccacauagg

SEQ ID NO: 2156462 - RNA, 19 nt, Artificial Sequence
  Description of Artificial Sequence: Synthetic oligonucleotide
cccaggacguaccaugugg

SEQ ID NO: 2156463 - RNA, 19 nt, Artificial Sequence
  Description of Artificial Sequence: Synthetic oligonucleotide
caggaugagauucucccaa

SEQ ID NO: 2156464 - RNA, 19 nt, Artificial Sequence
  Description of Artificial Sequence: Synthetic oligonucleotide
uagcaccauuuauuuguga

SEQ ID NO: 2156465 - RNA, 19 nt, Artificial Sequence
  Description of Artificial Sequence: Synthetic oligonucleotide
acgggcucuguuaccgucc

SEQ ID NO: 2156466 - RNA, 19 nt, Artificial Sequence
  Description of Artificial Sequence: Synthetic oligonucleotide
gaagggucuuccagguggc

SEQ ID NO: 2156467 - RNA, 19 nt, Artificial Sequence
  Description of Artificial Sequence: Synthetic oligonucleotide
ugugaacugguaggacggc

SEQ ID NO: 2156468 - RNA, 19 nt, Artificial Sequence
  Description of Artificial Sequence: Synthetic oligonucleotide
aucauggucuccacuguca

SEQ ID NO: 2156469 - RNA, 19 nt, Artificial Sequence
  Description of Artificial Sequence: Synthetic oligonucleotide
gaaggggcaggugaccuuc

SEQ ID NO: 2156470 - RNA, 19 nt, Artificial Sequence
  Description of Artificial Sequence: Synthetic oligonucleotide
gcuuaauuccuucuuugaa

SEQ ID NO: 2156471 - RNA, 19 nt, Artificial Sequence
  Description of Artificial Sequence: Synthetic oligonucleotide
cauaacaugcucuuccguu

SEQ ID NO: 2156472 - RNA, 19 nt, Artificial Sequence
  Description of Artificial Sequence: Synthetic oligonucleotide
uguugggagguagguuaag

SEQ ID NO: 2156473 - RNA, 19 nt, Artificial Sequence
  Description of Artificial Sequence: Synthetic oligonucleotide
ggaugcuaagccuuuccga

SEQ ID NO: 2156474 - RNA, 19 nt, Artificial Sequence
  Description of Artificial Sequence: Synthetic oligonucleotide
uucugaucauggucuccac

SEQ ID NO: 2156475 - RNA, 19 nt, Artificial Sequence
  Description of Artificial Sequence: Synthetic oligonucleotide
aagcacgcgccgaagagua

SEQ ID NO: 2156476 - RNA, 19 nt, Artificial Sequence
  Description of Artificial Sequence: Synthetic oligonucleotide
auguccuccugaaagcgga

SEQ ID NO: 2156477 - RNA, 19 nt, Artificial Sequence
  Description of Artificial Sequence: Synthetic oligonucleotide
gugaacugguaggacggcc

SEQ ID NO: 2156478 - RNA, 19 nt, Artificial Sequence
  Description of Artificial Sequence: Synthetic oligonucleotide
ggcuuaauuccuucuuuga

SEQ ID NO: 2156479 - RNA, 19 nt, Artificial Sequence
  Description of Artificial Sequence: Synthetic oligonucleotide
gucgaaugauccacuugcc

SEQ ID NO: 2156480 - RNA, 19 nt, Artificial Sequence
  Description of Artificial Sequence: Synthetic oligonucleotide
agacaaaaccgagguucag

SEQ ID NO: 2156481 - RNA, 19 nt, Artificial Sequence
  Description of Artificial Sequence: Synthetic oligonucleotide
ggugugaguuuuguauucc

SEQ ID NO: 2156482 - RNA, 19 nt, Artificial Sequence
  Description of Artificial Sequence: Synthetic oligonucleotide
auggcacauucaaucgcgg

SEQ ID NO: 2156483 - RNA, 19 nt, Artificial Sequence
  Description of Artificial Sequence: Synthetic oligonucleotide
gccuuuccgaagucgaaug

SEQ ID NO: 2156484 - RNA, 19 nt, Artificial Sequence
  Description of Artificial Sequence: Synthetic oligonucleotide
ggugccaaucugcuugaug

SEQ ID NO: 2156485 - RNA, 19 nt, Artificial Sequence
  Description of Artificial Sequence: Synthetic oligonucleotide
guauuccauaaugguguug

SEQ ID NO: 2156486 - RNA, 19 nt, Artificial Sequence
  Description of Artificial Sequence: Synthetic oligonucleotide
uguccuccugaaagcggac

SEQ ID NO: 2156487 - RNA, 19 nt, Artificial Sequence
  Description of Artificial Sequence: Synthetic oligonucleotide
ucucaccaucuuucugugu

SEQ ID NO: 2156488 - RNA, 19 nt, Artificial Sequence
  Description of Artificial Sequence: Synthetic oligonucleotide
agguuaagcacgcgccgaa

SEQ ID NO: 2156489 - RNA, 19 nt, Artificial Sequence
  Description of Artificial Sequence: Synthetic oligonucleotide
ggagguagguuaagcacgc

SEQ ID NO: 2156490 - RNA, 19 nt, Artificial Sequence
  Description of Artificial Sequence: Synthetic oligonucleotide
cacagccccgcagauuucc

SEQ ID NO: 2156491 - RNA, 19 nt, Artificial Sequence
  Description of Artificial Sequence: Synthetic oligonucleotide
ugccauccagagagggaga

SEQ ID NO: 2156492 - RNA, 19 nt, Artificial Sequence
  Description of Artificial Sequence: Synthetic oligonucleotide
uguuaccguccccgcuugc

SEQ ID NO: 2156493 - RNA, 19 nt, Artificial Sequence
  Description of Artificial Sequence: Synthetic oligonucleotide
cauucaaucgcggcuucca

SEQ ID NO: 2156494 - RNA, 19 nt, Artificial Sequence
  Description of Artificial Sequence: Synthetic oligonucleotide
ccaggacguaccauguggc

SEQ ID NO: 2156495 - RNA, 19 nt, Artificial Sequence
  Description of Artificial Sequence: Synthetic oligonucleotide
cuggcauuuugaugcuguc

SEQ ID NO: 2156496 - RNA, 19 nt, Artificial Sequence
  Description of Artificial Sequence: Synthetic oligonucleotide
ggaugagauucucccaaca

SEQ ID NO: 2156497 - RNA, 19 nt, Artificial Sequence
  Description of Artificial Sequence: Synthetic oligonucleotide
gguuuagcaccauuuauuu

SEQ ID NO: 2156498 - RNA, 19 nt, Artificial Sequence
  Description of Artificial Sequence: Synthetic oligonucleotide
cugcucuggcucuugucuc

SEQ ID NO: 2156499 - RNA, 19 nt, Artificial Sequence
  Description of Artificial Sequence: Synthetic oligonucleotide
gaguuuuguauuccauaau

SEQ ID NO: 2156500 - RNA, 19 nt, Artificial Sequence
  Description of Artificial Sequence: Synthetic oligonucleotide
cagcuucaaugauggugcc

SEQ ID NO: 2156501 - RNA, 19 nt, Artificial Sequence
  Description of Artificial Sequence: Synthetic oligonucleotide
cauaaugguguugggaggu

SEQ ID NO: 2156502 - RNA, 19 nt, Artificial Sequence
  Description of Artificial Sequence: Synthetic oligonucleotide
ugucggugugaguuuugua

SEQ ID NO: 2156503 - RNA, 19 nt, Artificial Sequence
  Description of Artificial Sequence: Synthetic oligonucleotide
ucagguccccaggacguac

SEQ ID NO: 2156504 - RNA, 19 nt, Artificial Sequence
  Description of Artificial Sequence: Synthetic oligonucleotide
cauagcucugugaacuggu

SEQ ID NO: 2156505 - RNA, 19 nt, Artificial Sequence
  Description of Artificial Sequence: Synthetic oligonucleotide
ugacgccagcuucaaugau

SEQ ID NO: 2156506 - RNA, 19 nt, Artificial Sequence
  Description of Artificial Sequence: Synthetic oligonucleotide
uugcuuggucacuggcggu

SEQ ID NO: 2156507 - RNA, 19 nt, Artificial Sequence
  Description of Artificial Sequence: Synthetic oligonucleotide
cagaacaagagacuccgau

SEQ ID NO: 2156508 - RNA, 19 nt, Artificial Sequence
  Description of Artificial Sequence: Synthetic oligonucleotide
cgaagaguaucccggauuc

SEQ ID NO: 2156509 - RNA, 19 nt, Artificial Sequence
  Description of Artificial Sequence: Synthetic oligonucleotide
gcugugguugcuuggucac

SEQ ID NO: 2156510 - RNA, 19 nt, Artificial Sequence
  Description of Artificial Sequence: Synthetic oligonucleotide
agguucagaaggggcaggu

SEQ ID NO: 2156511 - RNA, 19 nt, Artificial Sequence
  Description of Artificial Sequence: Synthetic oligonucleotide
caaucgcggcuuccagagg

SEQ ID NO: 2156512 - RNA, 19 nt, Artificial Sequence
  Description of Artificial Sequence: Synthetic oligonucleotide
cagccugccuggcauuuug

SEQ ID NO: 2156513 - RNA, 19 nt, Artificial Sequence
  Description of Artificial Sequence: Synthetic oligonucleotide
gaucucagcuguuguugua

SEQ ID NO: 2156514 - RNA, 19 nt, Artificial Sequence
  Description of Artificial Sequence: Synthetic oligonucleotide
agcuucaaugauggugcca

SEQ ID NO: 2156515 - RNA, 19 nt, Artificial Sequence
  Description of Artificial Sequence: Synthetic oligonucleotide
caacagccuuccucuugcc

SEQ ID NO: 2156516 - RNA, 19 nt, Artificial Sequence
  Description of Artificial Sequence: Synthetic oligonucleotide
ggcaggugaccuucccagg

SEQ ID NO: 2156517 - RNA, 19 nt, Artificial Sequence
  Description of Artificial Sequence: Synthetic oligonucleotide
gaagucgaaugauccacuu

SEQ ID NO: 2156518 - RNA, 19 nt, Artificial Sequence
  Description of Artificial Sequence: Synthetic oligonucleotide
ggcacauucaaucgcggcu

SEQ ID NO: 2156519 - RNA, 19 nt, Artificial Sequence
  Description of Artificial Sequence: Synthetic oligonucleotide
ccaaaagguguaguuguac

SEQ ID NO: 2156520 - RNA, 19 nt, Artificial Sequence
  Description of Artificial Sequence: Synthetic oligonucleotide
agccuuuccgaagucgaau

SEQ ID NO: 2156521 - RNA, 19 nt, Artificial Sequence
  Description of Artificial Sequence: Synthetic oligonucleotide
cuguuaccguccccgcuug

SEQ ID NO: 2156522 - RNA, 19 nt, Artificial Sequence
  Description of Artificial Sequence: Synthetic oligonucleotide
cacgggcucuguuaccguc

SEQ ID NO: 2156523 - RNA, 19 nt, Artificial Sequence
  Description of Artificial Sequence: Synthetic oligonucleotide
ggcugugguugcuugguca

SEQ ID NO: 2156524 - RNA, 19 nt, Artificial Sequence
  Description of Artificial Sequence: Synthetic oligonucleotide
gcgccgaagaguaucccgg

SEQ ID NO: 2156525 - RNA, 19 nt, Artificial Sequence
  Description of Artificial Sequence: Synthetic oligonucleotide
ccgaagucgaaugauccac

SEQ ID NO: 2156526 - RNA, 19 nt, Artificial Sequence
  Description of Artificial Sequence: Synthetic oligonucleotide
gcucauagcucugugaacu

SEQ ID NO: 2156527 - RNA, 19 nt, Artificial Sequence
  Description of Artificial Sequence: Synthetic oligonucleotide
caacagcgggaugcuaagc

SEQ ID NO: 2156528 - RNA, 19 nt, Artificial Sequence
  Description of Artificial Sequence: Synthetic oligonucleotide
ggcacgccaacagaacaag

SEQ ID NO: 2156529 - RNA, 19 nt, Artificial Sequence
  Description of Artificial Sequence: Synthetic oligonucleotide
auccacuugccaccauuuu

SEQ ID NO: 2156530 - RNA, 19 nt, Artificial Sequence
  Description of Artificial Sequence: Synthetic oligonucleotide
ugccuggcauuuugaugcu

SEQ ID NO: 2156531 - RNA, 19 nt, Artificial Sequence
  Description of Artificial Sequence: Synthetic oligonucleotide
guuaccguccccgcuugca

SEQ ID NO: 2156532 - RNA, 19 nt, Artificial Sequence
  Description of Artificial Sequence: Synthetic oligonucleotide
cucaucgcagcugcccaac

SEQ ID NO: 2156533 - RNA, 19 nt, Artificial Sequence
  Description of Artificial Sequence: Synthetic oligonucleotide
gggguucuccuagaguacc

SEQ ID NO: 2156534 - RNA, 19 nt, Artificial Sequence
  Description of Artificial Sequence: Synthetic oligonucleotide
ccaacgcuacgacacgggc

SEQ ID NO: 2156535 - RNA, 19 nt, Artificial Sequence
  Description of Artificial Sequence: Synthetic oligonucleotide
aggggauguucugcugguc

SEQ ID NO: 2156536 - RNA, 19 nt, Artificial Sequence
  Description of Artificial Sequence: Synthetic oligonucleotide
ugaugcugucggugugagu

SEQ ID NO: 2156537 - RNA, 19 nt, Artificial Sequence
  Description of Artificial Sequence: Synthetic oligonucleotide
ucccggauucgggcugugg

SEQ ID NO: 2156538 - RNA, 19 nt, Artificial Sequence
  Description of Artificial Sequence: Synthetic oligonucleotide
uccccgcuugcagaagaca

SEQ ID NO: 2156539 - RNA, 19 nt, Artificial Sequence
  Description of Artificial Sequence: Synthetic oligonucleotide
agguggcacgccaacagaa

SEQ ID NO: 2156540 - RNA, 19 nt, Artificial Sequence
  Description of Artificial Sequence: Synthetic oligonucleotide
acgcgccgaagaguauccc

SEQ ID NO: 2156541 - RNA, 19 nt, Artificial Sequence
  Description of Artificial Sequence: Synthetic oligonucleotide
cuguggccugucagguccc

SEQ ID NO: 2156542 - RNA, 19 nt, Artificial Sequence
  Description of Artificial Sequence: Synthetic oligonucleotide
cccaacgcuacgacacggg

SEQ ID NO: 2156543 - RNA, 19 nt, Artificial Sequence
  Description of Artificial Sequence: Synthetic oligonucleotide
gguuaagcacgcgccgaag

SEQ ID NO: 2156544 - RNA, 19 nt, Artificial Sequence
  Description of Artificial Sequence: Synthetic oligonucleotide
ggacguaccauguggcugu

SEQ ID NO: 2156545 - RNA, 19 nt, Artificial Sequence
  Description of Artificial Sequence: Synthetic oligonucleotide
gaaagcggacagagaccac

SEQ ID NO: 2156546 - RNA, 19 nt, Artificial Sequence
  Description of Artificial Sequence: Synthetic oligonucleotide
caacgcuacgacacgggcu

SEQ ID NO: 2156547 - RNA, 19 nt, Artificial Sequence
  Description of Artificial Sequence: Synthetic oligonucleotide
acacgggcucuguuaccgu

SEQ ID NO: 2156548 - RNA, 19 nt, Artificial Sequence
  Description of Artificial Sequence: Synthetic oligonucleotide
ugcugucggugugaguuuu

SEQ ID NO: 2156549 - RNA, 19 nt, Artificial Sequence
  Description of Artificial Sequence: Synthetic oligonucleotide
cuggcggucuuauuccaua

SEQ ID NO: 2156550 - RNA, 19 nt, Artificial Sequence
  Description of Artificial Sequence: Synthetic oligonucleotide
gaguaccaaaagguguagu

SEQ ID NO: 2156551 - RNA, 19 nt, Artificial Sequence
  Description of Artificial Sequence: Synthetic oligonucleotide
cacuguggccugucagguc

SEQ ID NO: 2156552 - RNA, 19 nt, Artificial Sequence
  Description of Artificial Sequence: Synthetic oligonucleotide
cucuugccgcugcucuggc

SEQ ID NO: 2156553 - RNA, 19 nt, Artificial Sequence
  Description of Artificial Sequence: Synthetic oligonucleotide
accaaaagguguaguugua

SEQ ID NO: 2156554 - RNA, 19 nt, Artificial Sequence
  Description of Artificial Sequence: Synthetic oligonucleotide
ccgagguucagaaggggca

SEQ ID NO: 2156555 - RNA, 19 nt, Artificial Sequence
  Description of Artificial Sequence: Synthetic oligonucleotide
augcugucggugugaguuu

SEQ ID NO: 2156556 - RNA, 19 nt, Artificial Sequence
  Description of Artificial Sequence: Synthetic oligonucleotide
cacuggcggucuuauucca

SEQ ID NO: 2156557 - RNA, 19 nt, Artificial Sequence
  Description of Artificial Sequence: Synthetic oligonucleotide
cuuccagguggcacgccaa

SEQ ID NO: 2156558 - RNA, 19 nt, Artificial Sequence
  Description of Artificial Sequence: Synthetic oligonucleotide
ccuguucucaaagcauaac

SEQ ID NO: 2156559 - RNA, 19 nt, Artificial Sequence
  Description of Artificial Sequence: Synthetic oligonucleotide
cagccccgcagauuuccuc

SEQ ID NO: 2156560 - RNA, 19 nt, Artificial Sequence
  Description of Artificial Sequence: Synthetic oligonucleotide
gauccacuugccaccauuu

SEQ ID NO: 2156561 - RNA, 19 nt, Artificial Sequence
  Description of Artificial Sequence: Synthetic oligonucleotide
auuugugaucucagcuguu

SEQ ID NO: 2156562 - RNA, 19 nt, Artificial Sequence
  Description of Artificial Sequence: Synthetic oligonucleotide
gguggcacgccaacagaac

SEQ ID NO: 2156563 - RNA, 19 nt, Artificial Sequence
  Description of Artificial Sequence: Synthetic oligonucleotide
gguucagaaggggcaggug

SEQ ID NO: 2156564 - RNA, 19 nt, Artificial Sequence
  Description of Artificial Sequence: Synthetic oligonucleotide
cuuuccgaagucgaaugau

SEQ ID NO: 2156565 - RNA, 19 nt, Artificial Sequence
  Description of Artificial Sequence: Synthetic oligonucleotide
gcucuguuaccguccccgc

SEQ ID NO: 2156566 - RNA, 19 nt, Artificial Sequence
  Description of Artificial Sequence: Synthetic oligonucleotide
gcugcccaacgcuacgaca

SEQ ID NO: 2156567 - RNA, 19 nt, Artificial Sequence
  Description of Artificial Sequence: Synthetic oligonucleotide
gcccaacgcuacgacacgg

SEQ ID NO: 2156568 - RNA, 19 nt, Artificial Sequence
  Description of Artificial Sequence: Synthetic oligonucleotide
gacuccgaugacgccagcu

SEQ ID NO: 2156569 - RNA, 19 nt, Artificial Sequence
  Description of Artificial Sequence: Synthetic oligonucleotide
gugaccuucccaggacgca

SEQ ID NO: 2156570 - RNA, 19 nt, Artificial Sequence
  Description of Artificial Sequence: Synthetic oligonucleotide
ggucuccacugucaucauc

SEQ ID NO: 2156571 - RNA, 19 nt, Artificial Sequence
  Description of Artificial Sequence: Synthetic oligonucleotide
gggagagggucauggcaca

SEQ ID NO: 2156572 - RNA, 19 nt, Artificial Sequence
  Description of Artificial Sequence: Synthetic oligonucleotide
cagccuguucucaaagcau

SEQ ID NO: 2156573 - RNA, 19 nt, Artificial Sequence
  Description of Artificial Sequence: Synthetic oligonucleotide
cucuuccguuccucuuguc

SEQ ID NO: 2156574 - RNA, 19 nt, Artificial Sequence
  Description of Artificial Sequence: Synthetic oligonucleotide
augauccacuugccaccau

SEQ ID NO: 2156575 - RNA, 19 nt, Artificial Sequence
  Description of Artificial Sequence: Synthetic oligonucleotide
cacauaggcuuaauuccuu

SEQ ID NO: 2156576 - RNA, 19 nt, Artificial Sequence
  Description of Artificial Sequence: Synthetic oligonucleotide
cgggaugcuaagccuuucc

SEQ ID NO: 2156577 - RNA, 19 nt, Artificial Sequence
  Description of Artificial Sequence: Synthetic oligonucleotide
ccccaacauggccaggaug

SEQ ID NO: 2156578 - RNA, 19 nt, Artificial Sequence
  Description of Artificial Sequence: Synthetic oligonucleotide
ccuuuccgaagucgaauga

SEQ ID NO: 2156579 - RNA, 19 nt, Artificial Sequence
  Description of Artificial Sequence: Synthetic oligonucleotide
ggggcaggugaccuuccca

SEQ ID NO: 2156580 - RNA, 19 nt, Artificial Sequence
  Description of Artificial Sequence: Synthetic oligonucleotide
caggacguaccauguggcu

SEQ ID NO: 2156581 - RNA, 19 nt, Artificial Sequence
  Description of Artificial Sequence: Synthetic oligonucleotide
gccaacagaacaagagacu

SEQ ID NO: 2156582 - RNA, 19 nt, Artificial Sequence
  Description of Artificial Sequence: Synthetic oligonucleotide
ucgcggcuuccagagguuu

SEQ ID NO: 2156583 - RNA, 19 nt, Artificial Sequence
  Description of Artificial Sequence: Synthetic oligonucleotide
ccaucuuucugugugcugu

SEQ ID NO: 2156584 - RNA, 19 nt, Artificial Sequence
  Description of Artificial Sequence: Synthetic oligonucleotide
guccccgcuugcagaagac

SEQ ID NO: 2156585 - RNA, 19 nt, Artificial Sequence
  Description of Artificial Sequence: Synthetic oligonucleotide
agcgggaugcuaagccuuu

SEQ ID NO: 2156586 - RNA, 19 nt, Artificial Sequence
  Description of Artificial Sequence: Synthetic oligonucleotide
gccugucagguccccagga

SEQ ID NO: 2156587 - RNA, 19 nt, Artificial Sequence
  Description of Artificial Sequence: Synthetic oligonucleotide
caaaggugccaaucugcuu

SEQ ID NO: 2156588 - RNA, 19 nt, Artificial Sequence
  Description of Artificial Sequence: Synthetic oligonucleotide
ccccgcuugcagaagacaa

SEQ ID NO: 2156589 - RNA, 19 nt, Artificial Sequence
  Description of Artificial Sequence: Synthetic oligonucleotide
gccccgcagauuuccuccc

SEQ ID NO: 2156590 - RNA, 19 nt, Artificial Sequence
  Description of Artificial Sequence: Synthetic oligonucleotide
gcauuuugaugcugucggu

SEQ ID NO: 2156591 - RNA, 19 nt, Artificial Sequence
  Description of Artificial Sequence: Synthetic oligonucleotide
cggucuuauuccauauaga

SEQ ID NO: 2156592 - RNA, 19 nt, Artificial Sequence
  Description of Artificial Sequence: Synthetic oligonucleotide
cggauucgggcugugguug

SEQ ID NO: 2156593 - RNA, 19 nt, Artificial Sequence
  Description of Artificial Sequence: Synthetic oligonucleotide
ggcggucuuauuccauaua

SEQ ID NO: 2156594 - RNA, 19 nt, Artificial Sequence
  Description of Artificial Sequence: Synthetic oligonucleotide
ggguucuccuagaguacca

SEQ ID NO: 2156595 - RNA, 19 nt, Artificial Sequence
  Description of Artificial Sequence: Synthetic oligonucleotide
gauucgggcugugguugcu

SEQ ID NO: 2156596 - RNA, 19 nt, Artificial Sequence
  Description of Artificial Sequence: Synthetic oligonucleotide
caccaucuuucugugugcu

SEQ ID NO: 2156597 - RNA, 19 nt, Artificial Sequence
  Description of Artificial Sequence: Synthetic oligonucleotide
cagcugcccaacgcuacga

SEQ ID NO: 2156598 - RNA, 19 nt, Artificial Sequence
  Description of Artificial Sequence: Synthetic oligonucleotide
cugucggugugaguuuugu

SEQ ID NO: 2156599 - RNA, 19 nt, Artificial Sequence
  Description of Artificial Sequence: Synthetic oligonucleotide
gagagggucauggcacauu

SEQ ID NO: 2156600 - RNA, 19 nt, Artificial Sequence
  Description of Artificial Sequence: Synthetic oligonucleotide
caucuuucugugugcuguu

SEQ ID NO: 2156601 - RNA, 19 nt, Artificial Sequence
  Description of Artificial Sequence: Synthetic oligonucleotide
cagcgggaugcuaagccuu

SEQ ID NO: 2156602 - RNA, 19 nt, Artificial Sequence
  Description of Artificial Sequence: Synthetic oligonucleotide
ccgcuugcagaagacaaaa

SEQ ID NO: 2156603 - RNA, 19 nt, Artificial Sequence
  Description of Artificial Sequence: Synthetic oligonucleotide
gcugucggugugaguuuug

SEQ ID NO: 2156604 - RNA, 19 nt, Artificial Sequence
  Description of Artificial Sequence: Synthetic oligonucleotide
gggcugugguugcuugguc

SEQ ID NO: 2156605 - RNA, 19 nt, Artificial Sequence
  Description of Artificial Sequence: Synthetic oligonucleotide
gcacauucaaucgcggcuu

SEQ ID NO: 2156606 - RNA, 19 nt, Artificial Sequence
  Description of Artificial Sequence: Synthetic oligonucleotide
gcucaucgcagcugcccaa

SEQ ID NO: 2156607 - RNA, 19 nt, Artificial Sequence
  Description of Artificial Sequence: Synthetic oligonucleotide
gcacgccaacagaacaaga

SEQ ID NO: 2156608 - RNA, 19 nt, Artificial Sequence
  Description of Artificial Sequence: Synthetic oligonucleotide
cccgcuugcagaagacaaa

SEQ ID NO: 2156609 - RNA, 19 nt, Artificial Sequence
  Description of Artificial Sequence: Synthetic oligonucleotide
gggcucuguuaccgucccc

SEQ ID NO: 2156610 - RNA, 19 nt, Artificial Sequence
  Description of Artificial Sequence: Synthetic oligonucleotide
aucgcggcuuccagagguu

SEQ ID NO: 2156611 - RNA, 19 nt, Artificial Sequence
  Description of Artificial Sequence: Synthetic oligonucleotide
ccccgcagauuuccucccc

SEQ ID NO: 2156612 - RNA, 19 nt, Artificial Sequence
  Description of Artificial Sequence: Synthetic oligonucleotide
acgcuacgacacgggcucu

SEQ ID NO: 2156613 - RNA, 19 nt, Artificial Sequence
  Description of Artificial Sequence: Synthetic oligonucleotide
ccccaggacguaccaugug

SEQ ID NO: 2156614 - RNA, 19 nt, Artificial Sequence
  Description of Artificial Sequence: Synthetic oligonucleotide
aggugccaaucugcuugau

SEQ ID NO: 2156615 - RNA, 19 nt, Artificial Sequence
  Description of Artificial Sequence: Synthetic oligonucleotide
aucccggauucgggcugug

SEQ ID NO: 2156616 - RNA, 19 nt, Artificial Sequence
  Description of Artificial Sequence: Synthetic oligonucleotide
cccgcagauuuccucccca

SEQ ID NO: 2156617 - RNA, 19 nt, Artificial Sequence
  Description of Artificial Sequence: Synthetic oligonucleotide
gacguaccauguggcugua

SEQ ID NO: 2156618 - RNA, 19 nt, Artificial Sequence
  Description of Artificial Sequence: Synthetic oligonucleotide
agcacgcgccgaagaguau

SEQ ID NO: 2156619 - RNA, 19 nt, Artificial Sequence
  Description of Artificial Sequence: Synthetic oligonucleotide
gucagguccccaggacgua

SEQ ID NO: 2156620 - RNA, 19 nt, Artificial Sequence
  Description of Artificial Sequence: Synthetic oligonucleotide
ccuccugaaagcggacaga

SEQ ID NO: 2156621 - RNA, 19 nt, Artificial Sequence
  Description of Artificial Sequence: Synthetic oligonucleotide
cgaagucgaaugauccacu

SEQ ID NO: 2156622 - RNA, 19 nt, Artificial Sequence
  Description of Artificial Sequence: Synthetic oligonucleotide
ccguuccucuuguccagga

SEQ ID NO: 2156623 - RNA, 19 nt, Artificial Sequence
  Description of Artificial Sequence: Synthetic oligonucleotide
ccgaagaguaucccggauu

SEQ ID NO: 2156624 - RNA, 19 nt, Artificial Sequence
  Description of Artificial Sequence: Synthetic oligonucleotide
gccgaagaguaucccggau

SEQ ID NO: 2156625 - RNA, 19 nt, Artificial Sequence
  Description of Artificial Sequence: Synthetic oligonucleotide
gggucauggcacauucaau

SEQ ID NO: 2156626 - RNA, 19 nt, Artificial Sequence
  Description of Artificial Sequence: Synthetic oligonucleotide
gaccacagccccgcagauu

SEQ ID NO: 2156627 - RNA, 19 nt, Artificial Sequence
  Description of Artificial Sequence: Synthetic oligonucleotide
gccugccuggcauuuugau

SEQ ID NO: 2156628 - RNA, 19 nt, Artificial Sequence
  Description of Artificial Sequence: Synthetic oligonucleotide
ggcucuugucucguuccgu

SEQ ID NO: 2156629 - RNA, 19 nt, Artificial Sequence
  Description of Artificial Sequence: Synthetic oligonucleotide
cuacgacacgggcucuguu

SEQ ID NO: 2156630 - RNA, 19 nt, Artificial Sequence
  Description of Artificial Sequence: Synthetic oligonucleotide
gcgggaugcuaagccuuuc

SEQ ID NO: 2156631 - RNA, 19 nt, Artificial Sequence
  Description of Artificial Sequence: Synthetic oligonucleotide
gcuacgacacgggcucugu

SEQ ID NO: 2156632 - RNA, 19 nt, Artificial Sequence
  Description of Artificial Sequence: Synthetic oligonucleotide
ccacagccccgcagauuuc

SEQ ID NO: 2156633 - RNA, 19 nt, Artificial Sequence
  Description of Artificial Sequence: Synthetic oligonucleotide
cgccgaagaguaucccgga

SEQ ID NO: 2156634 - RNA, 19 nt, Artificial Sequence
  Description of Artificial Sequence: Synthetic oligonucleotide
ggagagggucauggcacau

SEQ ID NO: 2156635 - RNA, 19 nt, Artificial Sequence
  Description of Artificial Sequence: Synthetic oligonucleotide
cgcuacgacacgggcucug

SEQ ID NO: 2156636 - RNA, 19 nt, Artificial Sequence
  Description of Artificial Sequence: Synthetic oligonucleotide
ccgaugacgccagcuucaa

SEQ ID NO: 2156637 - RNA, 19 nt, Artificial Sequence
  Description of Artificial Sequence: Synthetic oligonucleotide
ggucacuggcggucuuauu

SEQ ID NO: 2156638 - RNA, 19 nt, Artificial Sequence
  Description of Artificial Sequence: Synthetic oligonucleotide
ccguccccgcuugcagaag

SEQ ID NO: 2156639 - RNA, 19 nt, Artificial Sequence
  Description of Artificial Sequence: Synthetic oligonucleotide
cccagccugccuggcauuu

SEQ ID NO: 2156640 - RNA, 19 nt, Artificial Sequence
  Description of Artificial Sequence: Synthetic oligonucleotide
cgaugacgccagcuucaau

SEQ ID NO: 2156641 - RNA, 19 nt, Artificial Sequence
  Description of Artificial Sequence: Synthetic oligonucleotide
agagguaugauucucaucc

SEQ ID NO: 2156642 - RNA, 19 nt, Artificial Sequence
  Description of Artificial Sequence: Synthetic oligonucleotide
aaaagagcauucuaggccg

SEQ ID NO: 2156643 - RNA, 19 nt, Artificial Sequence
  Description of Artificial Sequence: Synthetic oligonucleotide
aaugaacugaauaucauac

SEQ ID NO: 2156644 - RNA, 19 nt, Artificial Sequence
  Description of Artificial Sequence: Synthetic oligonucleotide
aaaguaaucaagugaauga

SEQ ID NO: 2156645 - RNA, 19 nt, Artificial Sequence
  Description of Artificial Sequence: Synthetic oligonucleotide
uuaaguagagguaugauuc

SEQ ID NO: 2156646 - RNA, 19 nt, Artificial Sequence
  Description of Artificial Sequence: Synthetic oligonucleotide
acaguuauuaaguagaggu

SEQ ID NO: 2156647 - RNA, 19 nt, Artificial Sequence
  Description of Artificial Sequence: Synthetic oligonucleotide
auacaguauauacaguugc

SEQ ID NO: 2156648 - RNA, 19 nt, Artificial Sequence
  Description of Artificial Sequence: Synthetic oligonucleotide
aaauaauccguuuagguua

SEQ ID NO: 2156649 - RNA, 19 nt, Artificial Sequence
  Description of Artificial Sequence: Synthetic oligonucleotide
uuaaggacaaugaaaauaa

SEQ ID NO: 2156650 - RNA, 19 nt, Artificial Sequence
  Description of Artificial Sequence: Synthetic oligonucleotide
auugcuuacaguuauuaag

SEQ ID NO: 2156651 - RNA, 19 nt, Artificial Sequence
  Description of Artificial Sequence: Synthetic oligonucleotide
aaaagcacuauccguuacc

SEQ ID NO: 2156652 - RNA, 19 nt, Artificial Sequence
  Description of Artificial Sequence: Synthetic oligonucleotide
ucaaaugacugguuaaugg

SEQ ID NO: 2156653 - RNA, 19 nt, Artificial Sequence
  Description of Artificial Sequence: Synthetic oligonucleotide
aaccccauaaguuagccag

SEQ ID NO: 2156654 - RNA, 19 nt, Artificial Sequence
  Description of Artificial Sequence: Synthetic oligonucleotide
uaucauacaucucaaaaga

SEQ ID NO: 2156655 - RNA, 19 nt, Artificial Sequence
  Description of Artificial Sequence: Synthetic oligonucleotide
auaucauacaucucaaaag

SEQ ID NO: 2156656 - RNA, 19 nt, Artificial Sequence
  Description of Artificial Sequence: Synthetic oligonucleotide
aagagcaaauaacuaagag

SEQ ID NO: 2156657 - RNA, 19 nt, Artificial Sequence
  Description of Artificial Sequence: Synthetic oligonucleotide
aaaucaaguuauuaaacau

SEQ ID NO: 2156658 - RNA, 19 nt, Artificial Sequence
  Description of Artificial Sequence: Synthetic oligonucleotide
ucgccauucauacucaacg

SEQ ID NO: 2156659 - RNA, 19 nt, Artificial Sequence
  Description of Artificial Sequence: Synthetic oligonucleotide
cuaauuauaaaucacugca

SEQ ID NO: 2156660 - RNA, 19 nt, Artificial Sequence
  Description of Artificial Sequence: Synthetic oligonucleotide
aaaauaauccguuuagguu

SEQ ID NO: 2156661 - RNA, 19 nt, Artificial Sequence
  Description of Artificial Sequence: Synthetic oligonucleotide
ucuaauuauaaaucacugc

SEQ ID NO: 2156662 - RNA, 19 nt, Artificial Sequence
  Description of Artificial Sequence: Synthetic oligonucleotide
uuggcuaucucgauggagg

SEQ ID NO: 2156663 - RNA, 19 nt, Artificial Sequence
  Description of Artificial Sequence: Synthetic oligonucleotide
aaugaaaauaauccguuua

SEQ ID NO: 2156664 - RNA, 19 nt, Artificial Sequence
  Description of Artificial Sequence: Synthetic oligonucleotide
uuaaaucuuccugacaagg

SEQ ID NO: 2156665 - RNA, 19 nt, Artificial Sequence
  Description of Artificial Sequence: Synthetic oligonucleotide
acacaugugaaauguaaac

SEQ ID NO: 2156666 - RNA, 19 nt, Artificial Sequence
  Description of Artificial Sequence: Synthetic oligonucleotide
uuaaguaccagugaacccc

SEQ ID NO: 2156667 - RNA, 19 nt, Artificial Sequence
  Description of Artificial Sequence: Synthetic oligonucleotide
gucgcuuucauccaggucc

SEQ ID NO: 2156668 - RNA, 19 nt, Artificial Sequence
  Description of Artificial Sequence: Synthetic oligonucleotide
ucaugcuugagccucuugg

SEQ ID NO: 2156669 - RNA, 19 nt, Artificial Sequence
  Description of Artificial Sequence: Synthetic oligonucleotide
acuaagagaggauaauuag

SEQ ID NO: 2156670 - RNA, 19 nt, Artificial Sequence
  Description of Artificial Sequence: Synthetic oligonucleotide
uagguuauacaguauauac

SEQ ID NO: 2156671 - RNA, 19 nt, Artificial Sequence
  Description of Artificial Sequence: Synthetic oligonucleotide
augaaaauaauccguuuag

SEQ ID NO: 2156672 - RNA, 19 nt, Artificial Sequence
  Description of Artificial Sequence: Synthetic oligonucleotide
uugacauaagucaaacuug

SEQ ID NO: 2156673 - RNA, 19 nt, Artificial Sequence
  Description of Artificial Sequence: Synthetic oligonucleotide
cuaagagaggauaauuagg

SEQ ID NO: 2156674 - RNA, 19 nt, Artificial Sequence
  Description of Artificial Sequence: Synthetic oligonucleotide
uuggcgauguccaauggcg

SEQ ID NO: 2156675 - RNA, 19 nt, Artificial Sequence
  Description of Artificial Sequence: Synthetic oligonucleotide
ugacucauuggcuaucucg

SEQ ID NO: 2156676 - RNA, 19 nt, Artificial Sequence
  Description of Artificial Sequence: Synthetic oligonucleotide
uuuccuagucaaaugacug

SEQ ID NO: 2156677 - RNA, 19 nt, Artificial Sequence
  Description of Artificial Sequence: Synthetic oligonucleotide
aacuagaccaaaguaauca

SEQ ID NO: 2156678 - RNA, 19 nt, Artificial Sequence
  Description of Artificial Sequence: Synthetic oligonucleotide
uuauacaguauauacaguu

SEQ ID NO: 2156679 - RNA, 19 nt, Artificial Sequence
  Description of Artificial Sequence: Synthetic oligonucleotide
auccguuuagguuauacag

SEQ ID NO: 2156680 - RNA, 19 nt, Artificial Sequence
  Description of Artificial Sequence: Synthetic oligonucleotide
aaaagcccgaauuccacag

SEQ ID NO: 2156681 - RNA, 19 nt, Artificial Sequence
  Description of Artificial Sequence: Synthetic oligonucleotide
ugaacugaauaucauacau

SEQ ID NO: 2156682 - RNA, 19 nt, Artificial Sequence
  Description of Artificial Sequence: Synthetic oligonucleotide
aaauggugcagaugcgugg

SEQ ID NO: 2156683 - RNA, 19 nt, Artificial Sequence
  Description of Artificial Sequence: Synthetic oligonucleotide
aaucaaguuauuaaacaug

SEQ ID NO: 2156684 - RNA, 19 nt, Artificial Sequence
  Description of Artificial Sequence: Synthetic oligonucleotide
uugcaaagagcaaauaacu

SEQ ID NO: 2156685 - RNA, 19 nt, Artificial Sequence
  Description of Artificial Sequence: Synthetic oligonucleotide
ugcaacuagaccaaaguaa

SEQ ID NO: 2156686 - RNA, 19 nt, Artificial Sequence
  Description of Artificial Sequence: Synthetic oligonucleotide
uugcuuacaguuauuaagu

SEQ ID NO: 2156687 - RNA, 19 nt, Artificial Sequence
  Description of Artificial Sequence: Synthetic oligonucleotide
uuaaugggaaaucaaguua

SEQ ID NO: 2156688 - RNA, 19 nt, Artificial Sequence
  Description of Artificial Sequence: Synthetic oligonucleotide
gagagagagagagagagag

SEQ ID NO: 2156689 - RNA, 19 nt, Artificial Sequence
  Description of Artificial Sequence: Synthetic oligonucleotide
aguagugcagggcucgugc

SEQ ID NO: 2156690 - RNA, 19 nt, Artificial Sequence
  Description of Artificial Sequence: Synthetic oligonucleotide
ugaaaauaauccguuuagg

SEQ ID NO: 2156691 - RNA, 19 nt, Artificial Sequence
  Description of Artificial Sequence: Synthetic oligonucleotide
aaagcacuauccguuaccg

SEQ ID NO: 2156692 - RNA, 19 nt, Artificial Sequence
  Description of Artificial Sequence: Synthetic oligonucleotide
caugcucuaauuauaaauc

SEQ ID NO: 2156693 - RNA, 19 nt, Artificial Sequence
  Description of Artificial Sequence: Synthetic oligonucleotide
gagagagagagagagauug

SEQ ID NO: 2156694 - RNA, 19 nt, Artificial Sequence
  Description of Artificial Sequence: Synthetic oligonucleotide
uuuccuuugaguuacuuuu

SEQ ID NO: 2156695 - RNA, 19 nt, Artificial Sequence
  Description of Artificial Sequence: Synthetic oligonucleotide
agagagauugcuuacaguu

SEQ ID NO: 2156696 - RNA, 19 nt, Artificial Sequence
  Description of Artificial Sequence: Synthetic oligonucleotide
gauaauuaggaggaaaguc

SEQ ID NO: 2156697 - RNA, 19 nt, Artificial Sequence
  Description of Artificial Sequence: Synthetic oligonucleotide
acaguauauacaguugcgc

SEQ ID NO: 2156698 - RNA, 19 nt, Artificial Sequence
  Description of Artificial Sequence: Synthetic oligonucleotide
auaagucaaacuuguuuuc

SEQ ID NO: 2156699 - RNA, 19 nt, Artificial Sequence
  Description of Artificial Sequence: Synthetic oligonucleotide
cucuaauuauaaaucacug

SEQ ID NO: 2156700 - RNA, 19 nt, Artificial Sequence
  Description of Artificial Sequence: Synthetic oligonucleotide
uuuuccuagucaaaugacu

SEQ ID NO: 2156701 - RNA, 19 nt, Artificial Sequence
  Description of Artificial Sequence: Synthetic oligonucleotide
uucaaauguugacauaagu

SEQ ID NO: 2156702 - RNA, 19 nt, Artificial Sequence
  Description of Artificial Sequence: Synthetic oligonucleotide
uauacaguugcgcugcaac

SEQ ID NO: 2156703 - RNA, 19 nt, Artificial Sequence
  Description of Artificial Sequence: Synthetic oligonucleotide
ucaauagaauuucucuucu

SEQ ID NO: 2156704 - RNA, 19 nt, Artificial Sequence
  Description of Artificial Sequence: Synthetic oligonucleotide
uccguuaccgcacaauagc

SEQ ID NO: 2156705 - RNA, 19 nt, Artificial Sequence
  Description of Artificial Sequence: Synthetic oligonucleotide
augauucucauccacguca

SEQ ID NO: 2156706 - RNA, 19 nt, Artificial Sequence
  Description of Artificial Sequence: Synthetic oligonucleotide
guuuaaguaccagugaacc

SEQ ID NO: 2156707 - RNA, 19 nt, Artificial Sequence
  Description of Artificial Sequence: Synthetic oligonucleotide
auaauuaggaggaaaguca

SEQ ID NO: 2156708 - RNA, 19 nt, Artificial Sequence
  Description of Artificial Sequence: Synthetic oligonucleotide
ugggaaaucaaguuauuaa

SEQ ID NO: 2156709 - RNA, 19 nt, Artificial Sequence
  Description of Artificial Sequence: Synthetic oligonucleotide
uuuaaguaccagugaaccc

SEQ ID NO: 2156710 - RNA, 19 nt, Artificial Sequence
  Description of Artificial Sequence: Synthetic oligonucleotide
uccuagguguuuaaguacc

SEQ ID NO: 2156711 - RNA, 19 nt, Artificial Sequence
  Description of Artificial Sequence: Synthetic oligonucleotide
ugggaguuaaaucuuccug

SEQ ID NO: 2156712 - RNA, 19 nt, Artificial Sequence
  Description of Artificial Sequence: Synthetic oligonucleotide
aauccguuuagguuauaca

SEQ ID NO: 2156713 - RNA, 19 nt, Artificial Sequence
  Description of Artificial Sequence: Synthetic oligonucleotide
uugucagucaagcagcagu

SEQ ID NO: 2156714 - RNA, 19 nt, Artificial Sequence
  Description of Artificial Sequence: Synthetic oligonucleotide
uaauuauaaaucacugcau

SEQ ID NO: 2156715 - RNA, 19 nt, Artificial Sequence
  Description of Artificial Sequence: Synthetic oligonucleotide
auaaaucacugcauuaagg

SEQ ID NO: 2156716 - RNA, 19 nt, Artificial Sequence
  Description of Artificial Sequence: Synthetic oligonucleotide
uugcgcugcaacuagacca

SEQ ID NO: 2156717 - RNA, 19 nt, Artificial Sequence
  Description of Artificial Sequence: Synthetic oligonucleotide
auuaaguagagguaugauu

SEQ ID NO: 2156718 - RNA, 19 nt, Artificial Sequence
  Description of Artificial Sequence: Synthetic oligonucleotide
uguuuaaguaccagugaac

SEQ ID NO: 2156719 - RNA, 19 nt, Artificial Sequence
  Description of Artificial Sequence: Synthetic oligonucleotide
ggacaaugaaaauaauccg

SEQ ID NO: 2156720 - RNA, 19 nt, Artificial Sequence
  Description of Artificial Sequence: Synthetic oligonucleotide
agcacuauccguuaccgca

SEQ ID NO: 2156721 - RNA, 19 nt, Artificial Sequence
  Description of Artificial Sequence: Synthetic oligonucleotide
aauaacuaagagaggauaa

SEQ ID NO: 2156722 - RNA, 19 nt, Artificial Sequence
  Description of Artificial Sequence: Synthetic oligonucleotide
uaaacaugcucuaauuaua

SEQ ID NO: 2156723 - RNA, 19 nt, Artificial Sequence
  Description of Artificial Sequence: Synthetic oligonucleotide
auuaaggacaaugaaaaua

SEQ ID NO: 2156724 - RNA, 19 nt, Artificial Sequence
  Description of Artificial Sequence: Synthetic oligonucleotide
acauaagucaaacuuguuu

SEQ ID NO: 2156725 - RNA, 19 nt, Artificial Sequence
  Description of Artificial Sequence: Synthetic oligonucleotide
caaaguaaucaagugaaug

SEQ ID NO: 2156726 - RNA, 19 nt, Artificial Sequence
  Description of Artificial Sequence: Synthetic oligonucleotide
aaauaacuaagagaggaua

SEQ ID NO: 2156727 - RNA, 19 nt, Artificial Sequence
  Description of Artificial Sequence: Synthetic oligonucleotide
uacucaacgugaacguggg

SEQ ID NO: 2156728 - RNA, 19 nt, Artificial Sequence
  Description of Artificial Sequence: Synthetic oligonucleotide
ugcucuaauuauaaaucac

SEQ ID NO: 2156729 - RNA, 19 nt, Artificial Sequence
  Description of Artificial Sequence: Synthetic oligonucleotide
guuaccgcacaauagcacc

SEQ ID NO: 2156730 - RNA, 19 nt, Artificial Sequence
  Description of Artificial Sequence: Synthetic oligonucleotide
auuaaacaugcucuaauua

SEQ ID NO: 2156731 - RNA, 19 nt, Artificial Sequence
  Description of Artificial Sequence: Synthetic oligonucleotide
ugaguuagcaacuccucac

SEQ ID NO: 2156732 - RNA, 19 nt, Artificial Sequence
  Description of Artificial Sequence: Synthetic oligonucleotide
uuauuaaguagagguauga

SEQ ID NO: 2156733 - RNA, 19 nt, Artificial Sequence
  Description of Artificial Sequence: Synthetic oligonucleotide
uauuaaacaugcucuaauu

SEQ ID NO: 2156734 - RNA, 19 nt, Artificial Sequence
  Description of Artificial Sequence: Synthetic oligonucleotide
gagaggauaauuaggagga

SEQ ID NO: 2156735 - RNA, 19 nt, Artificial Sequence
  Description of Artificial Sequence: Synthetic oligonucleotide
agguaugauucucauccac

SEQ ID NO: 2156736 - RNA, 19 nt, Artificial Sequence
  Description of Artificial Sequence: Synthetic oligonucleotide
cagagagagagagagagag

SEQ ID NO: 2156737 - RNA, 19 nt, Artificial Sequence
  Description of Artificial Sequence: Synthetic oligonucleotide
aguaaucaagugaaugaac

SEQ ID NO: 2156738 - RNA, 19 nt, Artificial Sequence
  Description of Artificial Sequence: Synthetic oligonucleotide
uuuccuagguguuuaagua

SEQ ID NO: 2156739 - RNA, 19 nt, Artificial Sequence
  Description of Artificial Sequence: Synthetic oligonucleotide
ggcauugucagucaagcag

SEQ ID NO: 2156740 - RNA, 19 nt, Artificial Sequence
  Description of Artificial Sequence: Synthetic oligonucleotide
cuagaccaaaguaaucaag

SEQ ID NO: 2156741 - RNA, 19 nt, Artificial Sequence
  Description of Artificial Sequence: Synthetic oligonucleotide
ucucuccugacucauuggc

SEQ ID NO: 2156742 - RNA, 19 nt, Artificial Sequence
  Description of Artificial Sequence: Synthetic oligonucleotide
aagcacuauccguuaccgc

SEQ ID NO: 2156743 - RNA, 19 nt, Artificial Sequence
  Description of Artificial Sequence: Synthetic oligonucleotide
agcaaaggccaaauggugc

SEQ ID NO: 2156744 - RNA, 19 nt, Artificial Sequence
  Description of Artificial Sequence: Synthetic oligonucleotide
aggauaauuaggaggaaag

SEQ ID NO: 2156745 - RNA, 19 nt, Artificial Sequence
  Description of Artificial Sequence: Synthetic oligonucleotide
ucauacucaacgugaacgu

SEQ ID NO: 2156746 - RNA, 19 nt, Artificial Sequence
  Description of Artificial Sequence: Synthetic oligonucleotide
aaguaaucaagugaaugaa

SEQ ID NO: 2156747 - RNA, 19 nt, Artificial Sequence
  Description of Artificial Sequence: Synthetic oligonucleotide
agagauugcuuacaguuau

SEQ ID NO: 2156748 - RNA, 19 nt, Artificial Sequence
  Description of Artificial Sequence: Synthetic oligonucleotide
auagauaucuacaauguuu

SEQ ID NO: 2156749 - RNA, 19 nt, Artificial Sequence
  Description of Artificial Sequence: Synthetic oligonucleotide
aggagcuugaggcacucgg

SEQ ID NO: 2156750 - RNA, 19 nt, Artificial Sequence
  Description of Artificial Sequence: Synthetic oligonucleotide
gaacgugggaguuaaaucu

SEQ ID NO: 2156751 - RNA, 19 nt, Artificial Sequence
  Description of Artificial Sequence: Synthetic oligonucleotide
aaguagagguaugauucuc

SEQ ID NO: 2156752 - RNA, 19 nt, Artificial Sequence
  Description of Artificial Sequence: Synthetic oligonucleotide
cucaacgugaacgugggag

SEQ ID NO: 2156753 - RNA, 19 nt, Artificial Sequence
  Description of Artificial Sequence: Synthetic oligonucleotide
uccguuuagguuauacagu

SEQ ID NO: 2156754 - RNA, 19 nt, Artificial Sequence
  Description of Artificial Sequence: Synthetic oligonucleotide
aaaugacugguuaauggga

SEQ ID NO: 2156755 - RNA, 19 nt, Artificial Sequence
  Description of Artificial Sequence: Synthetic oligonucleotide
ugaacgugggaguuaaauc

SEQ ID NO: 2156756 - RNA, 19 nt, Artificial Sequence
  Description of Artificial Sequence: Synthetic oligonucleotide
aauauuuccuagguguuua

SEQ ID NO: 2156757 - RNA, 19 nt, Artificial Sequence
  Description of Artificial Sequence: Synthetic oligonucleotide
guugacauaagucaaacuu

SEQ ID NO: 2156758 - RNA, 19 nt, Artificial Sequence
  Description of Artificial Sequence: Synthetic oligonucleotide
cuugccugucuguuuaucc

SEQ ID NO: 2156759 - RNA, 19 nt, Artificial Sequence
  Description of Artificial Sequence: Synthetic oligonucleotide
ugcaaagagcaaauaacua

SEQ ID NO: 2156760 - RNA, 19 nt, Artificial Sequence
  Description of Artificial Sequence: Synthetic oligonucleotide
accagugaaccccauaagu

SEQ ID NO: 2156761 - RNA, 19 nt, Artificial Sequence
  Description of Artificial Sequence: Synthetic oligonucleotide
caccaggucagcaaaggcc

SEQ ID NO: 2156762 - RNA, 19 nt, Artificial Sequence
  Description of Artificial Sequence: Synthetic oligonucleotide
agucaauagaauuucucuu

SEQ ID NO: 2156763 - RNA, 19 nt, Artificial Sequence
  Description of Artificial Sequence: Synthetic oligonucleotide
guuaaaucuuccugacaag

SEQ ID NO: 2156764 - RNA, 19 nt, Artificial Sequence
  Description of Artificial Sequence: Synthetic oligonucleotide
aacuaagagaggauaauua

SEQ ID NO: 2156765 - RNA, 19 nt, Artificial Sequence
  Description of Artificial Sequence: Synthetic oligonucleotide
uagguguuuaaguaccagu

SEQ ID NO: 2156766 - RNA, 19 nt, Artificial Sequence
  Description of Artificial Sequence: Synthetic oligonucleotide
aauggcgucucuccugacu

SEQ ID NO: 2156767 - RNA, 19 nt, Artificial Sequence
  Description of Artificial Sequence: Synthetic oligonucleotide
aguuagcaacuccucacag

SEQ ID NO: 2156768 - RNA, 19 nt, Artificial Sequence
  Description of Artificial Sequence: Synthetic oligonucleotide
agauaucuacaauguuuuc

SEQ ID NO: 2156769 - RNA, 19 nt, Artificial Sequence
  Description of Artificial Sequence: Synthetic oligonucleotide
aaagagcaaauaacuaaga

SEQ ID NO: 2156770 - RNA, 19 nt, Artificial Sequence
  Description of Artificial Sequence: Synthetic oligonucleotide
caaacuuguuuucuccaag

SEQ ID NO: 2156771 - RNA, 19 nt, Artificial Sequence
  Description of Artificial Sequence: Synthetic oligonucleotide
aguuauuaaacaugcucua

SEQ ID NO: 2156772 - RNA, 19 nt, Artificial Sequence
  Description of Artificial Sequence: Synthetic oligonucleotide
gaaugaacugaauaucaua

SEQ ID NO: 2156773 - RNA, 19 nt, Artificial Sequence
  Description of Artificial Sequence: Synthetic oligonucleotide
uaaguagagguaugauucu

SEQ ID NO: 2156774 - RNA, 19 nt, Artificial Sequence
  Description of Artificial Sequence: Synthetic oligonucleotide
aaacaugcucuaauuauaa

SEQ ID NO: 2156775 - RNA, 19 nt, Artificial Sequence
  Description of Artificial Sequence: Synthetic oligonucleotide
ucaacgugaacgugggagu

SEQ ID NO: 2156776 - RNA, 19 nt, Artificial Sequence
  Description of Artificial Sequence: Synthetic oligonucleotide
uauccguuaccgcacaaua

SEQ ID NO: 2156777 - RNA, 19 nt, Artificial Sequence
  Description of Artificial Sequence: Synthetic oligonucleotide
uuccuagguguuuaaguac

SEQ ID NO: 2156778 - RNA, 19 nt, Artificial Sequence
  Description of Artificial Sequence: Synthetic oligonucleotide
agggacuggaguucaaaug

SEQ ID NO: 2156779 - RNA, 19 nt, Artificial Sequence
  Description of Artificial Sequence: Synthetic oligonucleotide
cugacaaggccugaguuag

SEQ ID NO: 2156780 - RNA, 19 nt, Artificial Sequence
  Description of Artificial Sequence: Synthetic oligonucleotide
gagagagagagauugcuua

SEQ ID NO: 2156781 - RNA, 19 nt, Artificial Sequence
  Description of Artificial Sequence: Synthetic oligonucleotide
ucgauggaggccuuucccc

SEQ ID NO: 2156782 - RNA, 19 nt, Artificial Sequence
  Description of Artificial Sequence: Synthetic oligonucleotide
acugcauuaaggacaauga

SEQ ID NO: 2156783 - RNA, 19 nt, Artificial Sequence
  Description of Artificial Sequence: Synthetic oligonucleotide
gacaaugaaaauaauccgu

SEQ ID NO: 2156784 - RNA, 19 nt, Artificial Sequence
  Description of Artificial Sequence: Synthetic oligonucleotide
agguguuuaaguaccagug

SEQ ID NO: 2156785 - RNA, 19 nt, Artificial Sequence
  Description of Artificial Sequence: Synthetic oligonucleotide
caaauggugcagaugcgug

SEQ ID NO: 2156786 - RNA, 19 nt, Artificial Sequence
  Description of Artificial Sequence: Synthetic oligonucleotide
uaaguaccagugaacccca

SEQ ID NO: 2156787 - RNA, 19 nt, Artificial Sequence
  Description of Artificial Sequence: Synthetic oligonucleotide
ucggcauugucagucaagc

SEQ ID NO: 2156788 - RNA, 19 nt, Artificial Sequence
  Description of Artificial Sequence: Synthetic oligonucleotide
uagcagucgccauucauac

SEQ ID NO: 2156789 - RNA, 19 nt, Artificial Sequence
  Description of Artificial Sequence: Synthetic oligonucleotide
aaugacugguuaaugggaa

SEQ ID NO: 2156790 - RNA, 19 nt, Artificial Sequence
  Description of Artificial Sequence: Synthetic oligonucleotide
uagucaaaugacugguuaa

SEQ ID NO: 2156791 - RNA, 19 nt, Artificial Sequence
  Description of Artificial Sequence: Synthetic oligonucleotide
uguugacauaagucaaacu

SEQ ID NO: 2156792 - RNA, 19 nt, Artificial Sequence
  Description of Artificial Sequence: Synthetic oligonucleotide
uuaccgcacaauagcacca

SEQ ID NO: 2156793 - RNA, 19 nt, Artificial Sequence
  Description of Artificial Sequence: Synthetic oligonucleotide
ggcagagagagagagagag

SEQ ID NO: 2156794 - RNA, 19 nt, Artificial Sequence
  Description of Artificial Sequence: Synthetic oligonucleotide
ugcuugagccucuuggcga

SEQ ID NO: 2156795 - RNA, 19 nt, Artificial Sequence
  Description of Artificial Sequence: Synthetic oligonucleotide
aauguugacauaagucaaa

SEQ ID NO: 2156796 - RNA, 19 nt, Artificial Sequence
  Description of Artificial Sequence: Synthetic oligonucleotide
agugaaccccauaaguuag

SEQ ID NO: 2156797 - RNA, 19 nt, Artificial Sequence
  Description of Artificial Sequence: Synthetic oligonucleotide
ucuuggcgauguccaaugg

SEQ ID NO: 2156798 - RNA, 19 nt, Artificial Sequence
  Description of Artificial Sequence: Synthetic oligonucleotide
gguaugauucucauccacg

SEQ ID NO: 2156799 - RNA, 19 nt, Artificial Sequence
  Description of Artificial Sequence: Synthetic oligonucleotide
guuauuaaguagagguaug

SEQ ID NO: 2156800 - RNA, 19 nt, Artificial Sequence
  Description of Artificial Sequence: Synthetic oligonucleotide
gugaaugaacugaauauca

SEQ ID NO: 2156801 - RNA, 19 nt, Artificial Sequence
  Description of Artificial Sequence: Synthetic oligonucleotide
aaagagcauucuaggccgc

SEQ ID NO: 2156802 - RNA, 19 nt, Artificial Sequence
  Description of Artificial Sequence: Synthetic oligonucleotide
acugguuaaugggaaauca

SEQ ID NO: 2156803 - RNA, 19 nt, Artificial Sequence
  Description of Artificial Sequence: Synthetic oligonucleotide
ugucagucaagcagcagua

SEQ ID NO: 2156804 - RNA, 19 nt, Artificial Sequence
  Description of Artificial Sequence: Synthetic oligonucleotide
accaccagaaaguggaaaa

SEQ ID NO: 2156805 - RNA, 19 nt, Artificial Sequence
  Description of Artificial Sequence: Synthetic oligonucleotide
uaugauucucauccacguc

SEQ ID NO: 2156806 - RNA, 19 nt, Artificial Sequence
  Description of Artificial Sequence: Synthetic oligonucleotide
uccuagucaaaugacuggu

SEQ ID NO: 2156807 - RNA, 19 nt, Artificial Sequence
  Description of Artificial Sequence: Synthetic oligonucleotide
aucuacaauguuuuccuuu

SEQ ID NO: 2156808 - RNA, 19 nt, Artificial Sequence
  Description of Artificial Sequence: Synthetic oligonucleotide
cauucuaggccgcagguca

SEQ ID NO: 2156809 - RNA, 19 nt, Artificial Sequence
  Description of Artificial Sequence: Synthetic oligonucleotide
cuuggcgauguccaauggc

SEQ ID NO: 2156810 - RNA, 19 nt, Artificial Sequence
  Description of Artificial Sequence: Synthetic oligonucleotide
guguuuaaguaccagugaa

SEQ ID NO: 2156811 - RNA, 19 nt, Artificial Sequence
  Description of Artificial Sequence: Synthetic oligonucleotide
uaauccguuuagguuauac

SEQ ID NO: 2156812 - RNA, 19 nt, Artificial Sequence
  Description of Artificial Sequence: Synthetic oligonucleotide
guaaucaagugaaugaacu

SEQ ID NO: 2156813 - RNA, 19 nt, Artificial Sequence
  Description of Artificial Sequence: Synthetic oligonucleotide
aggcacucggcauugucag

SEQ ID NO: 2156814 - RNA, 19 nt, Artificial Sequence
  Description of Artificial Sequence: Synthetic oligonucleotide
uuccauuuaaaaguacuuu

SEQ ID NO: 2156815 - RNA, 19 nt, Artificial Sequence
  Description of Artificial Sequence: Synthetic oligonucleotide
uauuaaguagagguaugau

SEQ ID NO: 2156816 - RNA, 19 nt, Artificial Sequence
  Description of Artificial Sequence: Synthetic oligonucleotide
ugaaccccauaaguuagcc

SEQ ID NO: 2156817 - RNA, 19 nt, Artificial Sequence
  Description of Artificial Sequence: Synthetic oligonucleotide
auacaguugcgcugcaacu

SEQ ID NO: 2156818 - RNA, 19 nt, Artificial Sequence
  Description of Artificial Sequence: Synthetic oligonucleotide
uaacuaagagaggauaauu

SEQ ID NO: 2156819 - RNA, 19 nt, Artificial Sequence
  Description of Artificial Sequence: Synthetic oligonucleotide
caagugaaugaacugaaua

SEQ ID NO: 2156820 - RNA, 19 nt, Artificial Sequence
  Description of Artificial Sequence: Synthetic oligonucleotide
ucaagugaaugaacugaau

SEQ ID NO: 2156821 - RNA, 19 nt, Artificial Sequence
  Description of Artificial Sequence: Synthetic oligonucleotide
agguuauacaguauauaca

SEQ ID NO: 2156822 - RNA, 19 nt, Artificial Sequence
  Description of Artificial Sequence: Synthetic oligonucleotide
acaucucaaaagagcauuc

SEQ ID NO: 2156823 - RNA, 19 nt, Artificial Sequence
  Description of Artificial Sequence: Synthetic oligonucleotide
aaguuagccagggacugga

SEQ ID NO: 2156824 - RNA, 19 nt, Artificial Sequence
  Description of Artificial Sequence: Synthetic oligonucleotide
uccaauggcgucucuccug

SEQ ID NO: 2156825 - RNA, 19 nt, Artificial Sequence
  Description of Artificial Sequence: Synthetic oligonucleotide
agagagagagagagauugc

SEQ ID NO: 2156826 - RNA, 19 nt, Artificial Sequence
  Description of Artificial Sequence: Synthetic oligonucleotide
gggaguuaaaucuuccuga

SEQ ID NO: 2156827 - RNA, 19 nt, Artificial Sequence
  Description of Artificial Sequence: Synthetic oligonucleotide
aauaauccguuuagguuau

SEQ ID NO: 2156828 - RNA, 19 nt, Artificial Sequence
  Description of Artificial Sequence: Synthetic oligonucleotide
gggaaaucaaguuauuaaa

SEQ ID NO: 2156829 - RNA, 19 nt, Artificial Sequence
  Description of Artificial Sequence: Synthetic oligonucleotide
uaaguuagccagggacugg

SEQ ID NO: 2156830 - RNA, 19 nt, Artificial Sequence
  Description of Artificial Sequence: Synthetic oligonucleotide
uguagcagucgccauucau

SEQ ID NO: 2156831 - RNA, 19 nt, Artificial Sequence
  Description of Artificial Sequence: Synthetic oligonucleotide
gacucauuggcuaucucga

SEQ ID NO: 2156832 - RNA, 19 nt, Artificial Sequence
  Description of Artificial Sequence: Synthetic oligonucleotide
cagcaaaggccaaauggug

SEQ ID NO: 2156833 - RNA, 19 nt, Artificial Sequence
  Description of Artificial Sequence: Synthetic oligonucleotide
guuaaugggaaaucaaguu

SEQ ID NO: 2156834 - RNA, 19 nt, Artificial Sequence
  Description of Artificial Sequence: Synthetic oligonucleotide
gacuggaguucaaauguug

SEQ ID NO: 2156835 - RNA, 19 nt, Artificial Sequence
  Description of Artificial Sequence: Synthetic oligonucleotide
gaguuagcaacuccucaca

SEQ ID NO: 2156836 - RNA, 19 nt, Artificial Sequence
  Description of Artificial Sequence: Synthetic oligonucleotide
ugauucucauccacgucau

SEQ ID NO: 2156837 - RNA, 19 nt, Artificial Sequence
  Description of Artificial Sequence: Synthetic oligonucleotide
cucgauggaggccuuuccc

SEQ ID NO: 2156838 - RNA, 19 nt, Artificial Sequence
  Description of Artificial Sequence: Synthetic oligonucleotide
aguugcgcugcaacuagac

SEQ ID NO: 2156839 - RNA, 19 nt, Artificial Sequence
  Description of Artificial Sequence: Synthetic oligonucleotide
auuggcuaucucgauggag

SEQ ID NO: 2156840 - RNA, 19 nt, Artificial Sequence
  Description of Artificial Sequence: Synthetic oligonucleotide
accgcacaauagcaccacc

SEQ ID NO: 2156841 - RNA, 19 nt, Artificial Sequence
  Description of Artificial Sequence: Synthetic oligonucleotide
agcaacuccucacaguguu

SEQ ID NO: 2156842 - RNA, 19 nt, Artificial Sequence
  Description of Artificial Sequence: Synthetic oligonucleotide
aaggccaaauggugcagau

SEQ ID NO: 2156843 - RNA, 19 nt, Artificial Sequence
  Description of Artificial Sequence: Synthetic oligonucleotide
ggggcagagagagagagag

SEQ ID NO: 2156844 - RNA, 19 nt, Artificial Sequence
  Description of Artificial Sequence: Synthetic oligonucleotide
cucuuggcgauguccaaug

SEQ ID NO: 2156845 - RNA, 19 nt, Artificial Sequence
  Description of Artificial Sequence: Synthetic oligonucleotide
gucuguuuauccagguucc

SEQ ID NO: 2156846 - RNA, 19 nt, Artificial Sequence
  Description of Artificial Sequence: Synthetic oligonucleotide
ggaguuaaaucuuccugac

SEQ ID NO: 2156847 - RNA, 19 nt, Artificial Sequence
  Description of Artificial Sequence: Synthetic oligonucleotide
gcagucgccauucauacuc

SEQ ID NO: 2156848 - RNA, 19 nt, Artificial Sequence
  Description of Artificial Sequence: Synthetic oligonucleotide
gucaaaugacugguuaaug

SEQ ID NO: 2156849 - RNA, 19 nt, Artificial Sequence
  Description of Artificial Sequence: Synthetic oligonucleotide
uggcuaucucgauggaggc

SEQ ID NO: 2156850 - RNA, 19 nt, Artificial Sequence
  Description of Artificial Sequence: Synthetic oligonucleotide
aguagagguaugauucuca

SEQ ID NO: 2156851 - RNA, 19 nt, Artificial Sequence
  Description of Artificial Sequence: Synthetic oligonucleotide
ugcuuacaguuauuaagua

SEQ ID NO: 2156852 - RNA, 19 nt, Artificial Sequence
  Description of Artificial Sequence: Synthetic oligonucleotide
gagagagagagagagagau

SEQ ID NO: 2156853 - RNA, 19 nt, Artificial Sequence
  Description of Artificial Sequence: Synthetic oligonucleotide
agcauucuaggccgcaggu

SEQ ID NO: 2156854 - RNA, 19 nt, Artificial Sequence
  Description of Artificial Sequence: Synthetic oligonucleotide
ugacugguuaaugggaaau

SEQ ID NO: 2156855 - RNA, 19 nt, Artificial Sequence
  Description of Artificial Sequence: Synthetic oligonucleotide
agucaaaugacugguuaau

SEQ ID NO: 2156856 - RNA, 19 nt, Artificial Sequence
  Description of Artificial Sequence: Synthetic oligonucleotide
ugcgcugcaacuagaccaa

SEQ ID NO: 2156857 - RNA, 19 nt, Artificial Sequence
  Description of Artificial Sequence: Synthetic oligonucleotide
cuagucaaaugacugguua

SEQ ID NO: 2156858 - RNA, 19 nt, Artificial Sequence
  Description of Artificial Sequence: Synthetic oligonucleotide
guaugauucucauccacgu

SEQ ID NO: 2156859 - RNA, 19 nt, Artificial Sequence
  Description of Artificial Sequence: Synthetic oligonucleotide
uauauacaguugcgcugca

SEQ ID NO: 2156860 - RNA, 19 nt, Artificial Sequence
  Description of Artificial Sequence: Synthetic oligonucleotide
guuauuaaacaugcucuaa

SEQ ID NO: 2156861 - RNA, 19 nt, Artificial Sequence
  Description of Artificial Sequence: Synthetic oligonucleotide
uaggccgcaggucauucuc

SEQ ID NO: 2156862 - RNA, 19 nt, Artificial Sequence
  Description of Artificial Sequence: Synthetic oligonucleotide
gacaaggccugaguuagca

SEQ ID NO: 2156863 - RNA, 19 nt, Artificial Sequence
  Description of Artificial Sequence: Synthetic oligonucleotide
uuuccccgcaggaggagcu

SEQ ID NO: 2156864 - RNA, 19 nt, Artificial Sequence
  Description of Artificial Sequence: Synthetic oligonucleotide
uagagguaugauucucauc

SEQ ID NO: 2156865 - RNA, 19 nt, Artificial Sequence
  Description of Artificial Sequence: Synthetic oligonucleotide
cucggcauugucagucaag

SEQ ID NO: 2156866 - RNA, 19 nt, Artificial Sequence
  Description of Artificial Sequence: Synthetic oligonucleotide
aucaagugaaugaacugaa

SEQ ID NO: 2156867 - RNA, 19 nt, Artificial Sequence
  Description of Artificial Sequence: Synthetic oligonucleotide
ucauccagguccucgugua

SEQ ID NO: 2156868 - RNA, 19 nt, Artificial Sequence
  Description of Artificial Sequence: Synthetic oligonucleotide
ucuguuuauccagguuccc

SEQ ID NO: 2156869 - RNA, 19 nt, Artificial Sequence
  Description of Artificial Sequence: Synthetic oligonucleotide
uccucguguagcagucgcc

SEQ ID NO: 2156870 - RNA, 19 nt, Artificial Sequence
  Description of Artificial Sequence: Synthetic oligonucleotide
cauucauacucaacgugaa

SEQ ID NO: 2156871 - RNA, 19 nt, Artificial Sequence
  Description of Artificial Sequence: Synthetic oligonucleotide
caguauauacaguugcgcu

SEQ ID NO: 2156872 - RNA, 19 nt, Artificial Sequence
  Description of Artificial Sequence: Synthetic oligonucleotide
auguccaauggcgucucuc

SEQ ID NO: 2156873 - RNA, 19 nt, Artificial Sequence
  Description of Artificial Sequence: Synthetic oligonucleotide
cauacucaacgugaacgug

SEQ ID NO: 2156874 - RNA, 19 nt, Artificial Sequence
  Description of Artificial Sequence: Synthetic oligonucleotide
ucgcuuucauccagguccu

SEQ ID NO: 2156875 - RNA, 19 nt, Artificial Sequence
  Description of Artificial Sequence: Synthetic oligonucleotide
cugaguuagcaacuccuca

SEQ ID NO: 2156876 - RNA, 19 nt, Artificial Sequence
  Description of Artificial Sequence: Synthetic oligonucleotide
ugaggcacucggcauuguc

SEQ ID NO: 2156877 - RNA, 19 nt, Artificial Sequence
  Description of Artificial Sequence: Synthetic oligonucleotide
auccguuaccgcacaauag

SEQ ID NO: 2156878 - RNA, 19 nt, Artificial Sequence
  Description of Artificial Sequence: Synthetic oligonucleotide
gaaccccauaaguuagcca

SEQ ID NO: 2156879 - RNA, 19 nt, Artificial Sequence
  Description of Artificial Sequence: Synthetic oligonucleotide
ggccuuuccccgcaggagg

SEQ ID NO: 2156880 - RNA, 19 nt, Artificial Sequence
  Description of Artificial Sequence: Synthetic oligonucleotide
aucucgauggaggccuuuc

SEQ ID NO: 2156881 - RNA, 19 nt, Artificial Sequence
  Description of Artificial Sequence: Synthetic oligonucleotide
uggcgauguccaauggcgu

SEQ ID NO: 2156882 - RNA, 19 nt, Artificial Sequence
  Description of Artificial Sequence: Synthetic oligonucleotide
cagugaaccccauaaguua

SEQ ID NO: 2156883 - RNA, 19 nt, Artificial Sequence
  Description of Artificial Sequence: Synthetic oligonucleotide
gacugguuaaugggaaauc

SEQ ID NO: 2156884 - RNA, 19 nt, Artificial Sequence
  Description of Artificial Sequence: Synthetic oligonucleotide
gagguaugauucucaucca

SEQ ID NO: 2156885 - RNA, 19 nt, Artificial Sequence
  Description of Artificial Sequence: Synthetic oligonucleotide
augacugguuaaugggaaa

SEQ ID NO: 2156886 - RNA, 19 nt, Artificial Sequence
  Description of Artificial Sequence: Synthetic oligonucleotide
aucacugcauuaaggacaa

SEQ ID NO: 2156887 - RNA, 19 nt, Artificial Sequence
  Description of Artificial Sequence: Synthetic oligonucleotide
caguuauuaaguagaggua

SEQ ID NO: 2156888 - RNA, 19 nt, Artificial Sequence
  Description of Artificial Sequence: Synthetic oligonucleotide
augggaaaucaaguuauua

SEQ ID NO: 2156889 - RNA, 19 nt, Artificial Sequence
  Description of Artificial Sequence: Synthetic oligonucleotide
uaucuacaauguuuuccuu

SEQ ID NO: 2156890 - RNA, 19 nt, Artificial Sequence
  Description of Artificial Sequence: Synthetic oligonucleotide
guccucguguagcagucgc

SEQ ID NO: 2156891 - RNA, 19 nt, Artificial Sequence
  Description of Artificial Sequence: Synthetic oligonucleotide
gcuuucauccagguccucg

SEQ ID NO: 2156892 - RNA, 19 nt, Artificial Sequence
  Description of Artificial Sequence: Synthetic oligonucleotide
uagcaacuccucacagugu

SEQ ID NO: 2156893 - RNA, 19 nt, Artificial Sequence
  Description of Artificial Sequence: Synthetic oligonucleotide
auugucagucaagcagcag

SEQ ID NO: 2156894 - RNA, 19 nt, Artificial Sequence
  Description of Artificial Sequence: Synthetic oligonucleotide
agagcauucuaggccgcag

SEQ ID NO: 2156895 - RNA, 19 nt, Artificial Sequence
  Description of Artificial Sequence: Synthetic oligonucleotide
aacgugggaguuaaaucuu

SEQ ID NO: 2156896 - RNA, 19 nt, Artificial Sequence
  Description of Artificial Sequence: Synthetic oligonucleotide
gaggcacucggcauuguca

SEQ ID NO: 2156897 - RNA, 19 nt, Artificial Sequence
  Description of Artificial Sequence: Synthetic oligonucleotide
gagagagagagagauugcu

SEQ ID NO: 2156898 - RNA, 19 nt, Artificial Sequence
  Description of Artificial Sequence: Synthetic oligonucleotide
caucgucgcuuucauccag

SEQ ID NO: 2156899 - RNA, 19 nt, Artificial Sequence
  Description of Artificial Sequence: Synthetic oligonucleotide
aagagcauucuaggccgca

SEQ ID NO: 2156900 - RNA, 19 nt, Artificial Sequence
  Description of Artificial Sequence: Synthetic oligonucleotide
acgugggaguuaaaucuuc

SEQ ID NO: 2156901 - RNA, 19 nt, Artificial Sequence
  Description of Artificial Sequence: Synthetic oligonucleotide
ugacaaggccugaguuagc

SEQ ID NO: 2156902 - RNA, 19 nt, Artificial Sequence
  Description of Artificial Sequence: Synthetic oligonucleotide
cuuccugacaaggccugag

SEQ ID NO: 2156903 - RNA, 19 nt, Artificial Sequence
  Description of Artificial Sequence: Synthetic oligonucleotide
aguaccagugaaccccaua

SEQ ID NO: 2156904 - RNA, 19 nt, Artificial Sequence
  Description of Artificial Sequence: Synthetic oligonucleotide
cugcauuaaggacaaugaa

SEQ ID NO: 2156905 - RNA, 19 nt, Artificial Sequence
  Description of Artificial Sequence: Synthetic oligonucleotide
cauugucagucaagcagca

SEQ ID NO: 2156906 - RNA, 19 nt, Artificial Sequence
  Description of Artificial Sequence: Synthetic oligonucleotide
aucgucgcuuucauccagg

SEQ ID NO: 2156907 - RNA, 19 nt, Artificial Sequence
  Description of Artificial Sequence: Synthetic oligonucleotide
guuagcaacuccucacagu

SEQ ID NO: 2156908 - RNA, 19 nt, Artificial Sequence
  Description of Artificial Sequence: Synthetic oligonucleotide
guagcagucgccauucaua

SEQ ID NO: 2156909 - RNA, 19 nt, Artificial Sequence
  Description of Artificial Sequence: Synthetic oligonucleotide
acucauuggcuaucucgau

SEQ ID NO: 2156910 - RNA, 19 nt, Artificial Sequence
  Description of Artificial Sequence: Synthetic oligonucleotide
caugugaaauguaaacuuu

SEQ ID NO: 2156911 - RNA, 19 nt, Artificial Sequence
  Description of Artificial Sequence: Synthetic oligonucleotide
gagagauugcuuacaguua

SEQ ID NO: 2156912 - RNA, 19 nt, Artificial Sequence
  Description of Artificial Sequence: Synthetic oligonucleotide
auacaucucaaaagagcau

SEQ ID NO: 2156913 - RNA, 19 nt, Artificial Sequence
  Description of Artificial Sequence: Synthetic oligonucleotide
gguuaaugggaaaucaagu

SEQ ID NO: 2156914 - RNA, 19 nt, Artificial Sequence
  Description of Artificial Sequence: Synthetic oligonucleotide
cugcaacuagaccaaagua

SEQ ID NO: 2156915 - RNA, 19 nt, Artificial Sequence
  Description of Artificial Sequence: Synthetic oligonucleotide
ucgucgcuuucauccaggu

SEQ ID NO: 2156916 - RNA, 19 nt, Artificial Sequence
  Description of Artificial Sequence: Synthetic oligonucleotide
gagagagauugcuuacagu

SEQ ID NO: 2156917 - RNA, 19 nt, Artificial Sequence
  Description of Artificial Sequence: Synthetic oligonucleotide
cacaguguucaugcuugag

SEQ ID NO: 2156918 - RNA, 19 nt, Artificial Sequence
  Description of Artificial Sequence: Synthetic oligonucleotide
agguccucguguagcaguc

SEQ ID NO: 2156919 - RNA, 19 nt, Artificial Sequence
  Description of Artificial Sequence: Synthetic oligonucleotide
cuuuccccgcaggaggagc

SEQ ID NO: 2156920 - RNA, 19 nt, Artificial Sequence
  Description of Artificial Sequence: Synthetic oligonucleotide
accccauaaguuagccagg

SEQ ID NO: 2156921 - RNA, 19 nt, Artificial Sequence
  Description of Artificial Sequence: Synthetic oligonucleotide
agagagagagagauugcuu

SEQ ID NO: 2156922 - RNA, 19 nt, Artificial Sequence
  Description of Artificial Sequence: Synthetic oligonucleotide
gcucuaauuauaaaucacu

SEQ ID NO: 2156923 - RNA, 19 nt, Artificial Sequence
  Description of Artificial Sequence: Synthetic oligonucleotide
aggccugaguuagcaacuc

SEQ ID NO: 2156924 - RNA, 19 nt, Artificial Sequence
  Description of Artificial Sequence: Synthetic oligonucleotide
gaguucaaauguugacaua

SEQ ID NO: 2156925 - RNA, 19 nt, Artificial Sequence
  Description of Artificial Sequence: Synthetic oligonucleotide
cacagcugacacaugugaa

SEQ ID NO: 2156926 - RNA, 19 nt, Artificial Sequence
  Description of Artificial Sequence: Synthetic oligonucleotide
ucuaggccgcaggucauuc

SEQ ID NO: 2156927 - RNA, 19 nt, Artificial Sequence
  Description of Artificial Sequence: Synthetic oligonucleotide
aacgugaacgugggaguua

SEQ ID NO: 2156928 - RNA, 19 nt, Artificial Sequence
  Description of Artificial Sequence: Synthetic oligonucleotide
uaccgcacaauagcaccac

SEQ ID NO: 2156929 - RNA, 19 nt, Artificial Sequence
  Description of Artificial Sequence: Synthetic oligonucleotide
gugaaccccauaaguuagc

SEQ ID NO: 2156930 - RNA, 19 nt, Artificial Sequence
  Description of Artificial Sequence: Synthetic oligonucleotide
agagagagagagagagaga

SEQ ID NO: 2156931 - RNA, 19 nt, Artificial Sequence
  Description of Artificial Sequence: Synthetic oligonucleotide
guagagguaugauucucau

SEQ ID NO: 2156932 - RNA, 19 nt, Artificial Sequence
  Description of Artificial Sequence: Synthetic oligonucleotide
guuagccagggacuggagu

SEQ ID NO: 2156933 - RNA, 19 nt, Artificial Sequence
  Description of Artificial Sequence: Synthetic oligonucleotide
acgugaacgugggaguuaa

SEQ ID NO: 2156934 - RNA, 19 nt, Artificial Sequence
  Description of Artificial Sequence: Synthetic oligonucleotide
aggccuuuccccgcaggag

SEQ ID NO: 2156935 - RNA, 19 nt, Artificial Sequence
  Description of Artificial Sequence: Synthetic oligonucleotide
ggucagcaaaggccaaaug

SEQ ID NO: 2156936 - RNA, 19 nt, Artificial Sequence
  Description of Artificial Sequence: Synthetic oligonucleotide
ccugaguuagcaacuccuc

SEQ ID NO: 2156937 - RNA, 19 nt, Artificial Sequence
  Description of Artificial Sequence: Synthetic oligonucleotide
gaggagcuugaggcacucg

SEQ ID NO: 2156938 - RNA, 19 nt, Artificial Sequence
  Description of Artificial Sequence: Synthetic oligonucleotide
caaugaaaauaauccguuu

SEQ ID NO: 2156939 - RNA, 19 nt, Artificial Sequence
  Description of Artificial Sequence: Synthetic oligonucleotide
acuauccguuaccgcacaa

SEQ ID NO: 2156940 - RNA, 19 nt, Artificial Sequence
  Description of Artificial Sequence: Synthetic oligonucleotide
uggaggccuuuccccgcag

SEQ ID NO: 2156941 - RNA, 19 nt, Artificial Sequence
  Description of Artificial Sequence: Synthetic oligonucleotide
agucgccauucauacucaa

SEQ ID NO: 2156942 - RNA, 19 nt, Artificial Sequence
  Description of Artificial Sequence: Synthetic oligonucleotide
gcccgaauuccacagcuga

SEQ ID NO: 2156943 - RNA, 19 nt, Artificial Sequence
  Description of Artificial Sequence: Synthetic oligonucleotide
ucgugcugcccuugccugu

SEQ ID NO: 2156944 - RNA, 19 nt, Artificial Sequence
  Description of Artificial Sequence: Synthetic oligonucleotide
cgugggaguuaaaucuucc

SEQ ID NO: 2156945 - RNA, 19 nt, Artificial Sequence
  Description of Artificial Sequence: Synthetic oligonucleotide
agaggauaauuaggaggaa

SEQ ID NO: 2156946 - RNA, 19 nt, Artificial Sequence
  Description of Artificial Sequence: Synthetic oligonucleotide
gugaacgugggaguuaaau

SEQ ID NO: 2156947 - RNA, 19 nt, Artificial Sequence
  Description of Artificial Sequence: Synthetic oligonucleotide
cgaauuccacagcugacac

SEQ ID NO: 2156948 - RNA, 19 nt, Artificial Sequence
  Description of Artificial Sequence: Synthetic oligonucleotide
ggcgauguccaauggcguc

SEQ ID NO: 2156949 - RNA, 19 nt, Artificial Sequence
  Description of Artificial Sequence: Synthetic oligonucleotide
acucggcauugucagucaa

SEQ ID NO: 2156950 - RNA, 19 nt, Artificial Sequence
  Description of Artificial Sequence: Synthetic oligonucleotide
ccguuuagguuauacagua

SEQ ID NO: 2156951 - RNA, 19 nt, Artificial Sequence
  Description of Artificial Sequence: Synthetic oligonucleotide
aguuagccagggacuggag

SEQ ID NO: 2156952 - RNA, 19 nt, Artificial Sequence
  Description of Artificial Sequence: Synthetic oligonucleotide
cagcaguagugcagggcuc

SEQ ID NO: 2156953 - RNA, 19 nt, Artificial Sequence
  Description of Artificial Sequence: Synthetic oligonucleotide
acucaacgugaacguggga

SEQ ID NO: 2156954 - RNA, 19 nt, Artificial Sequence
  Description of Artificial Sequence: Synthetic oligonucleotide
uccugacucauuggcuauc

SEQ ID NO: 2156955 - RNA, 19 nt, Artificial Sequence
  Description of Artificial Sequence: Synthetic oligonucleotide
gcuaucucgauggaggccu

SEQ ID NO: 2156956 - RNA, 19 nt, Artificial Sequence
  Description of Artificial Sequence: Synthetic oligonucleotide
gcaacuagaccaaaguaau

SEQ ID NO: 2156957 - RNA, 19 nt, Artificial Sequence
  Description of Artificial Sequence: Synthetic oligonucleotide
ggauaauuaggaggaaagu

SEQ ID NO: 2156958 - RNA, 19 nt, Artificial Sequence
  Description of Artificial Sequence: Synthetic oligonucleotide
ccccauaaguuagccaggg

SEQ ID NO: 2156959 - RNA, 19 nt, Artificial Sequence
  Description of Artificial Sequence: Synthetic oligonucleotide
cugacucauuggcuaucuc

SEQ ID NO: 2156960 - RNA, 19 nt, Artificial Sequence
  Description of Artificial Sequence: Synthetic oligonucleotide
gccugucuguuuauccagg

SEQ ID NO: 2156961 - RNA, 19 nt, Artificial Sequence
  Description of Artificial Sequence: Synthetic oligonucleotide
cguuaccgcacaauagcac

SEQ ID NO: 2156962 - RNA, 19 nt, Artificial Sequence
  Description of Artificial Sequence: Synthetic oligonucleotide
cugacacaugugaaaugua

SEQ ID NO: 2156963 - RNA, 19 nt, Artificial Sequence
  Description of Artificial Sequence: Synthetic oligonucleotide
gcacucggcauugucaguc

SEQ ID NO: 2156964 - RNA, 19 nt, Artificial Sequence
  Description of Artificial Sequence: Synthetic oligonucleotide
uccccgcaggaggagcuug

SEQ ID NO: 2156965 - RNA, 19 nt, Artificial Sequence
  Description of Artificial Sequence: Synthetic oligonucleotide
cagucgccauucauacuca

SEQ ID NO: 2156966 - RNA, 19 nt, Artificial Sequence
  Description of Artificial Sequence: Synthetic oligonucleotide
cgucucuccugacucauug

SEQ ID NO: 2156967 - RNA, 19 nt, Artificial Sequence
  Description of Artificial Sequence: Synthetic oligonucleotide
agagagagagagagagauu

SEQ ID NO: 2156968 - RNA, 19 nt, Artificial Sequence
  Description of Artificial Sequence: Synthetic oligonucleotide
ugcccuugccugucuguuu

SEQ ID NO: 2156969 - RNA, 19 nt, Artificial Sequence
  Description of Artificial Sequence: Synthetic oligonucleotide
ggcuaucucgauggaggcc

SEQ ID NO: 2156970 - RNA, 19 nt, Artificial Sequence
  Description of Artificial Sequence: Synthetic oligonucleotide
cacuauccguuaccgcaca

SEQ ID NO: 2156971 - RNA, 19 nt, Artificial Sequence
  Description of Artificial Sequence: Synthetic oligonucleotide
cacucggcauugucaguca

SEQ ID NO: 2156972 - RNA, 19 nt, Artificial Sequence
  Description of Artificial Sequence: Synthetic oligonucleotide
cccgaauuccacagcugac

SEQ ID NO: 2156973 - RNA, 19 nt, Artificial Sequence
  Description of Artificial Sequence: Synthetic oligonucleotide
agcccgaauuccacagcug

SEQ ID NO: 2156974 - RNA, 19 nt, Artificial Sequence
  Description of Artificial Sequence: Synthetic oligonucleotide
guagugcagggcucgugcu

SEQ ID NO: 2156975 - RNA, 19 nt, Artificial Sequence
  Description of Artificial Sequence: Synthetic oligonucleotide
cauuggcuaucucgaugga

SEQ ID NO: 2156976 - RNA, 19 nt, Artificial Sequence
  Description of Artificial Sequence: Synthetic oligonucleotide
gcacuauccguuaccgcac

SEQ ID NO: 2156977 - RNA, 19 nt, Artificial Sequence
  Description of Artificial Sequence: Synthetic oligonucleotide
caauggcgucucuccugac

SEQ ID NO: 2156978 - RNA, 19 nt, Artificial Sequence
  Description of Artificial Sequence: Synthetic oligonucleotide
ccaauggcgucucuccuga

SEQ ID NO: 2156979 - RNA, 19 nt, Artificial Sequence
  Description of Artificial Sequence: Synthetic oligonucleotide
ccgcacaauagcaccacca

SEQ ID NO: 2156980 - RNA, 19 nt, Artificial Sequence
  Description of Artificial Sequence: Synthetic oligonucleotide
ccguuaccgcacaauagca

SEQ ID NO: 2156981 - RNA, 19 nt, Artificial Sequence
  Description of Artificial Sequence: Synthetic oligonucleotide
uucuaggccgcaggucauu

SEQ ID NO: 2156982 - RNA, 19 nt, Artificial Sequence
  Description of Artificial Sequence: Synthetic oligonucleotide
caguugcgcugcaacuaga

SEQ ID NO: 2156983 - RNA, 19 nt, Artificial Sequence
  Description of Artificial Sequence: Synthetic oligonucleotide
auucuaggccgcaggucau

SEQ ID NO: 2156984 - RNA, 19 nt, Artificial Sequence
  Description of Artificial Sequence: Synthetic oligonucleotide
gguccucguguagcagucg

SEQ ID NO: 2156985 - RNA, 19 nt, Artificial Sequence
  Description of Artificial Sequence: Synthetic oligonucleotide
ccgaauuccacagcugaca

SEQ ID NO: 2156986 - RNA, 19 nt, Artificial Sequence
  Description of Artificial Sequence: Synthetic oligonucleotide
ccuagguguuuaaguacca

SEQ ID NO: 2156987 - RNA, 19 nt, Artificial Sequence
  Description of Artificial Sequence: Synthetic oligonucleotide
gacauaagucaaacuuguu

SEQ ID NO: 2156988 - RNA, 19 nt, Artificial Sequence
  Description of Artificial Sequence: Synthetic oligonucleotide
aaguaccagugaaccccau

SEQ ID NO: 2156989 - RNA, 19 nt, Artificial Sequence
  Description of Artificial Sequence: Synthetic oligonucleotide
uaucucgauggaggccuuu

SEQ ID NO: 2156990 - RNA, 19 nt, Artificial Sequence
  Description of Artificial Sequence: Synthetic oligonucleotide
ccagugaaccccauaaguu

SEQ ID NO: 2156991 - RNA, 19 nt, Artificial Sequence
  Description of Artificial Sequence: Synthetic oligonucleotide
gauguccaauggcgucucu

SEQ ID NO: 2156992 - RNA, 19 nt, Artificial Sequence
  Description of Artificial Sequence: Synthetic oligonucleotide
gccugaguuagcaacuccu

SEQ ID NO: 2156993 - RNA, 19 nt, Artificial Sequence
  Description of Artificial Sequence: Synthetic oligonucleotide
cuauccguuaccgcacaau

SEQ ID NO: 2156994 - RNA, 19 nt, Artificial Sequence
  Description of Artificial Sequence: Synthetic oligonucleotide
gcagagagagagagagaga

SEQ ID NO: 2156995 - RNA, 19 nt, Artificial Sequence
  Description of Artificial Sequence: Synthetic oligonucleotide
gcccuugccugucuguuua

SEQ ID NO: 2156996 - RNA, 19 nt, Artificial Sequence
  Description of Artificial Sequence: Synthetic oligonucleotide
ccucguguagcagucgcca

SEQ ID NO: 2156997 - RNA, 19 nt, Artificial Sequence
  Description of Artificial Sequence: Synthetic oligonucleotide
gcucgugcugcccuugccu

SEQ ID NO: 2156998 - RNA, 19 nt, Artificial Sequence
  Description of Artificial Sequence: Synthetic oligonucleotide
cuaggccgcaggucauucu

SEQ ID NO: 2156999 - RNA, 19 nt, Artificial Sequence
  Description of Artificial Sequence: Synthetic oligonucleotide
ccaaauggugcagaugcgu

SEQ ID NO: 2157000 - RNA, 19 nt, Artificial Sequence
  Description of Artificial Sequence: Synthetic oligonucleotide
auaauccguuuagguuaua

SEQ ID NO: 2157001 - RNA, 19 nt, Artificial Sequence
  Description of Artificial Sequence: Synthetic oligonucleotide
gcuugagccucuuggcgau

SEQ ID NO: 2157002 - RNA, 19 nt, Artificial Sequence
  Description of Artificial Sequence: Synthetic oligonucleotide
gggcucgugcugcccuugc

SEQ ID NO: 2157003 - RNA, 19 nt, Artificial Sequence
  Description of Artificial Sequence: Synthetic oligonucleotide
cucguguagcagucgccau

SEQ ID NO: 2157004 - RNA, 19 nt, Artificial Sequence
  Description of Artificial Sequence: Synthetic oligonucleotide
uuccccgcaggaggagcuu

SEQ ID NO: 2157005 - RNA, 19 nt, Artificial Sequence
  Description of Artificial Sequence: Synthetic oligonucleotide
cccauaaguuagccaggga

SEQ ID NO: 2157006 - RNA, 19 nt, Artificial Sequence
  Description of Artificial Sequence: Synthetic oligonucleotide
ucacugcauuaaggacaau

SEQ ID NO: 2157007 - RNA, 19 nt, Artificial Sequence
  Description of Artificial Sequence: Synthetic oligonucleotide
caacgugaacgugggaguu

SEQ ID NO: 2157008 - RNA, 19 nt, Artificial Sequence
  Description of Artificial Sequence: Synthetic oligonucleotide
gggcagagagagagagaga

SEQ ID NO: 2157009 - RNA, 19 nt, Artificial Sequence
  Description of Artificial Sequence: Synthetic oligonucleotide
cgucgcuuucauccagguc

SEQ ID NO: 2157010 - RNA, 19 nt, Artificial Sequence
  Description of Artificial Sequence: Synthetic oligonucleotide
ccuagucaaaugacugguu

SEQ ID NO: 2157011 - RNA, 19 nt, Artificial Sequence
  Description of Artificial Sequence: Synthetic oligonucleotide
cgccauucauacucaacgu

SEQ ID NO: 2157012 - RNA, 19 nt, Artificial Sequence
  Description of Artificial Sequence: Synthetic oligonucleotide
ccagggacuggaguucaaa

SEQ ID NO: 2157013 - RNA, 19 nt, Artificial Sequence
  Description of Artificial Sequence: Synthetic oligonucleotide
cuaucucgauggaggccuu

SEQ ID NO: 2157014 - RNA, 19 nt, Artificial Sequence
  Description of Artificial Sequence: Synthetic oligonucleotide
ggcacucggcauugucagu

SEQ ID NO: 2157015 - RNA, 19 nt, Artificial Sequence
  Description of Artificial Sequence: Synthetic oligonucleotide
cgauguccaauggcgucuc

SEQ ID NO: 2157016 - RNA, 19 nt, Artificial Sequence
  Description of Artificial Sequence: Synthetic oligonucleotide
gcaggucauucuccacccu

SEQ ID NO: 2157017 - RNA, 19 nt, Artificial Sequence
  Description of Artificial Sequence: Synthetic oligonucleotide
cauccacgucaucgucgcu

SEQ ID NO: 2157018 - RNA, 19 nt, Artificial Sequence
  Description of Artificial Sequence: Synthetic oligonucleotide
ccacgucaucgucgcuuuc

SEQ ID NO: 2157019 - RNA, 19 nt, Artificial Sequence
  Description of Artificial Sequence: Synthetic oligonucleotide
ccucuuggcgauguccaau

SEQ ID NO: 2157020 - RNA, 19 nt, Artificial Sequence
  Description of Artificial Sequence: Synthetic oligonucleotide
cagggcucgugcugcccuu

SEQ ID NO: 2157021 - RNA, 19 nt, Artificial Sequence
  Description of Artificial Sequence: Synthetic oligonucleotide
gcgcugcaacuagaccaaa

SEQ ID NO: 2157022 - RNA, 19 nt, Artificial Sequence
  Description of Artificial Sequence: Synthetic oligonucleotide
cgugaacgugggaguuaaa

SEQ ID NO: 2157023 - RNA, 19 nt, Artificial Sequence
  Description of Artificial Sequence: Synthetic oligonucleotide
aaaaggauuaaacagaacc

SEQ ID NO: 2157024 - RNA, 19 nt, Artificial Sequence
  Description of Artificial Sequence: Synthetic oligonucleotide
uuuaauuucucuuggaaug

SEQ ID NO: 2157025 - RNA, 19 nt, Artificial Sequence
  Description of Artificial Sequence: Synthetic oligonucleotide
aaagaaaguaaacuaaagu

SEQ ID NO: 2157026 - RNA, 19 nt, Artificial Sequence
  Description of Artificial Sequence: Synthetic oligonucleotide
ugagcuucgauuuaaacug

SEQ ID NO: 2157027 - RNA, 19 nt, Artificial Sequence
  Description of Artificial Sequence: Synthetic oligonucleotide
cauacuuuugcuuuucucg

SEQ ID NO: 2157028 - RNA, 19 nt, Artificial Sequence
  Description of Artificial Sequence: Synthetic oligonucleotide
aauguauucaucaggaucu

SEQ ID NO: 2157029 - RNA, 19 nt, Artificial Sequence
  Description of Artificial Sequence: Synthetic oligonucleotide
ucaucaaaaggauuaaaca

SEQ ID NO: 2157030 - RNA, 19 nt, Artificial Sequence
  Description of Artificial Sequence: Synthetic oligonucleotide
auacuuuugcuuuucucgc

SEQ ID NO: 2157031 - RNA, 19 nt, Artificial Sequence
  Description of Artificial Sequence: Synthetic oligonucleotide
acugacucgguucacuucc

SEQ ID NO: 2157032 - RNA, 19 nt, Artificial Sequence
  Description of Artificial Sequence: Synthetic oligonucleotide
uuaaacagaaccucacagc

SEQ ID NO: 2157033 - RNA, 19 nt, Artificial Sequence
  Description of Artificial Sequence: Synthetic oligonucleotide
ucuugauuucuucauccgg

SEQ ID NO: 2157034 - RNA, 19 nt, Artificial Sequence
  Description of Artificial Sequence: Synthetic oligonucleotide
uucgauuuaaacuggcuca

SEQ ID NO: 2157035 - RNA, 19 nt, Artificial Sequence
  Description of Artificial Sequence: Synthetic oligonucleotide
ucaauaauugcuugaguga

SEQ ID NO: 2157036 - RNA, 19 nt, Artificial Sequence
  Description of Artificial Sequence: Synthetic oligonucleotide
uuugacucuauguggauug

SEQ ID NO: 2157037 - RNA, 19 nt, Artificial Sequence
  Description of Artificial Sequence: Synthetic oligonucleotide
agacguucccuucuuaggc

SEQ ID NO: 2157038 - RNA, 19 nt, Artificial Sequence
  Description of Artificial Sequence: Synthetic oligonucleotide
uggaucguccuuaagcagg

SEQ ID NO: 2157039 - RNA, 19 nt, Artificial Sequence
  Description of Artificial Sequence: Synthetic oligonucleotide
aucaaugucuacuucuguc

SEQ ID NO: 2157040 - RNA, 19 nt, Artificial Sequence
  Description of Artificial Sequence: Synthetic oligonucleotide
ucaaaaggauuaaacagaa

SEQ ID NO: 2157041 - RNA, 19 nt, Artificial Sequence
  Description of Artificial Sequence: Synthetic oligonucleotide
aaaaguucccgcuucaguu

SEQ ID NO: 2157042 - RNA, 19 nt, Artificial Sequence
  Description of Artificial Sequence: Synthetic oligonucleotide
uguauucugccacagcgcc

SEQ ID NO: 2157043 - RNA, 19 nt, Artificial Sequence
  Description of Artificial Sequence: Synthetic oligonucleotide
uuuacuucuucccuucaug

SEQ ID NO: 2157044 - RNA, 19 nt, Artificial Sequence
  Description of Artificial Sequence: Synthetic oligonucleotide
ucuucuaaaucuccuguug

SEQ ID NO: 2157045 - RNA, 19 nt, Artificial Sequence
  Description of Artificial Sequence: Synthetic oligonucleotide
ucucucaacagcuucuugc

SEQ ID NO: 2157046 - RNA, 19 nt, Artificial Sequence
  Description of Artificial Sequence: Synthetic oligonucleotide
agcuuuugacucuaugugg

SEQ ID NO: 2157047 - RNA, 19 nt, Artificial Sequence
  Description of Artificial Sequence: Synthetic oligonucleotide
uguggaucguccuuaagca

SEQ ID NO: 2157048 - RNA, 19 nt, Artificial Sequence
  Description of Artificial Sequence: Synthetic oligonucleotide
aacagaaccucacagcuuu

SEQ ID NO: 2157049 - RNA, 19 nt, Artificial Sequence
  Description of Artificial Sequence: Synthetic oligonucleotide
auuuaaacuggcucagcag

SEQ ID NO: 2157050 - RNA, 19 nt, Artificial Sequence
  Description of Artificial Sequence: Synthetic oligonucleotide
augucuacuucugucaggc

SEQ ID NO: 2157051 - RNA, 19 nt, Artificial Sequence
  Description of Artificial Sequence: Synthetic oligonucleotide
caucaauguauucaucagg

SEQ ID NO: 2157052 - RNA, 19 nt, Artificial Sequence
  Description of Artificial Sequence: Synthetic oligonucleotide
ucguagaucucaaaugugu

SEQ ID NO: 2157053 - RNA, 19 nt, Artificial Sequence
  Description of Artificial Sequence: Synthetic oligonucleotide
ggaacuuagguguggaucg

SEQ ID NO: 2157054 - RNA, 19 nt, Artificial Sequence
  Description of Artificial Sequence: Synthetic oligonucleotide
uggaaugaugucaucaaaa

SEQ ID NO: 2157055 - RNA, 19 nt, Artificial Sequence
  Description of Artificial Sequence: Synthetic oligonucleotide
uuacuucuucccuucaugc

SEQ ID NO: 2157056 - RNA, 19 nt, Artificial Sequence
  Description of Artificial Sequence: Synthetic oligonucleotide
aaccucacagcuuuugacu

SEQ ID NO: 2157057 - RNA, 19 nt, Artificial Sequence
  Description of Artificial Sequence: Synthetic oligonucleotide
gauuuaaacuggcucagca

SEQ ID NO: 2157058 - RNA, 19 nt, Artificial Sequence
  Description of Artificial Sequence: Synthetic oligonucleotide
uuugcaauucuuucucuca

SEQ ID NO: 2157059 - RNA, 19 nt, Artificial Sequence
  Description of Artificial Sequence: Synthetic oligonucleotide
acagcuuuugacucuaugu

SEQ ID NO: 2157060 - RNA, 19 nt, Artificial Sequence
  Description of Artificial Sequence: Synthetic oligonucleotide
caauguauucaucaggauc

SEQ ID NO: 2157061 - RNA, 19 nt, Artificial Sequence
  Description of Artificial Sequence: Synthetic oligonucleotide
ucugaguccugcaugcuug

SEQ ID NO: 2157062 - RNA, 19 nt, Artificial Sequence
  Description of Artificial Sequence: Synthetic oligonucleotide
uuucuucucucucaacagc

SEQ ID NO: 2157063 - RNA, 19 nt, Artificial Sequence
  Description of Artificial Sequence: Synthetic oligonucleotide
uuccccaaaagaaaguaaa

SEQ ID NO: 2157064 - RNA, 19 nt, Artificial Sequence
  Description of Artificial Sequence: Synthetic oligonucleotide
guuucaauaauugcuugag

SEQ ID NO: 2157065 - RNA, 19 nt, Artificial Sequence
  Description of Artificial Sequence: Synthetic oligonucleotide
uuaaacuggcucagcagug

SEQ ID NO: 2157066 - RNA, 19 nt, Artificial Sequence
  Description of Artificial Sequence: Synthetic oligonucleotide
cuucuaaaucuccuguugc

SEQ ID NO: 2157067 - RNA, 19 nt, Artificial Sequence
  Description of Artificial Sequence: Synthetic oligonucleotide
ucuuuuguucaccggauuc

SEQ ID NO: 2157068 - RNA, 19 nt, Artificial Sequence
  Description of Artificial Sequence: Synthetic oligonucleotide
ucuuucucucaucagguuc

SEQ ID NO: 2157069 - RNA, 19 nt, Artificial Sequence
  Description of Artificial Sequence: Synthetic oligonucleotide
ugugucugaguccugcaug

SEQ ID NO: 2157070 - RNA, 19 nt, Artificial Sequence
  Description of Artificial Sequence: Synthetic oligonucleotide
uccuuuucacuuuccacag

SEQ ID NO: 2157071 - RNA, 19 nt, Artificial Sequence
  Description of Artificial Sequence: Synthetic oligonucleotide
uuugcagcuaaaaguuccc

SEQ ID NO: 2157072 - RNA, 19 nt, Artificial Sequence
  Description of Artificial Sequence: Synthetic oligonucleotide
aucaaaaggauuaaacaga

SEQ ID NO: 2157073 - RNA, 19 nt, Artificial Sequence
  Description of Artificial Sequence: Synthetic oligonucleotide
cuucauuuccuuucucugc

SEQ ID NO: 2157074 - RNA, 19 nt, Artificial Sequence
  Description of Artificial Sequence: Synthetic oligonucleotide
uagaucucaaaugugucug

SEQ ID NO: 2157075 - RNA, 19 nt, Artificial Sequence
  Description of Artificial Sequence: Synthetic oligonucleotide
ucaucuucuaaaucuccug

SEQ ID NO: 2157076 - RNA, 19 nt, Artificial Sequence
  Description of Artificial Sequence: Synthetic oligonucleotide
acucuauguggauugcggg

SEQ ID NO: 2157077 - RNA, 19 nt, Artificial Sequence
  Description of Artificial Sequence: Synthetic oligonucleotide
uuuuguucaccggauuccg

SEQ ID NO: 2157078 - RNA, 19 nt, Artificial Sequence
  Description of Artificial Sequence: Synthetic oligonucleotide
guguggaucguccuuaagc

SEQ ID NO: 2157079 - RNA, 19 nt, Artificial Sequence
  Description of Artificial Sequence: Synthetic oligonucleotide
uaaaaguucccgcuucagu

SEQ ID NO: 2157080 - RNA, 19 nt, Artificial Sequence
  Description of Artificial Sequence: Synthetic oligonucleotide
agaaaguaaacuaaaguuu

SEQ ID NO: 2157081 - RNA, 19 nt, Artificial Sequence
  Description of Artificial Sequence: Synthetic oligonucleotide
ucaauuucuugauuucuuc

SEQ ID NO: 2157082 - RNA, 19 nt, Artificial Sequence
  Description of Artificial Sequence: Synthetic oligonucleotide
uucuaaaucuccuguugca

SEQ ID NO: 2157083 - RNA, 19 nt, Artificial Sequence
  Description of Artificial Sequence: Synthetic oligonucleotide
ugacauccauccuucauca

SEQ ID NO: 2157084 - RNA, 19 nt, Artificial Sequence
  Description of Artificial Sequence: Synthetic oligonucleotide
uuguucaccggauuccgag

SEQ ID NO: 2157085 - RNA, 19 nt, Artificial Sequence
  Description of Artificial Sequence: Synthetic oligonucleotide
uuaagcaggucauggcugc

SEQ ID NO: 2157086 - RNA, 19 nt, Artificial Sequence
  Description of Artificial Sequence: Synthetic oligonucleotide
agcuaaaaguucccgcuuc

SEQ ID NO: 2157087 - RNA, 19 nt, Artificial Sequence
  Description of Artificial Sequence: Synthetic oligonucleotide
cuucgauuuaaacuggcuc

SEQ ID NO: 2157088 - RNA, 19 nt, Artificial Sequence
  Description of Artificial Sequence: Synthetic oligonucleotide
uucaucaggaucugcacuc

SEQ ID NO: 2157089 - RNA, 19 nt, Artificial Sequence
  Description of Artificial Sequence: Synthetic oligonucleotide
gagacguucccuucuuagg

SEQ ID NO: 2157090 - RNA, 19 nt, Artificial Sequence
  Description of Artificial Sequence: Synthetic oligonucleotide
cucuauguggauugcgggg

SEQ ID NO: 2157091 - RNA, 19 nt, Artificial Sequence
  Description of Artificial Sequence: Synthetic oligonucleotide
gacucuauguggauugcgg

SEQ ID NO: 2157092 - RNA, 19 nt, Artificial Sequence
  Description of Artificial Sequence: Synthetic oligonucleotide
aaacuggagcacaugugac

SEQ ID NO: 2157093 - RNA, 19 nt, Artificial Sequence
  Description of Artificial Sequence: Synthetic oligonucleotide
aagggucugaucuucccga

SEQ ID NO: 2157094 - RNA, 19 nt, Artificial Sequence
  Description of Artificial Sequence: Synthetic oligonucleotide
aacuggagcacaugugaca

SEQ ID NO: 2157095 - RNA, 19 nt, Artificial Sequence
  Description of Artificial Sequence: Synthetic oligonucleotide
auaauugcuugagugagcu

SEQ ID NO: 2157096 - RNA, 19 nt, Artificial Sequence
  Description of Artificial Sequence: Synthetic oligonucleotide
uucacuuuccacagcuggc

SEQ ID NO: 2157097 - RNA, 19 nt, Artificial Sequence
  Description of Artificial Sequence: Synthetic oligonucleotide
aggaacagugcucucaggu

SEQ ID NO: 2157098 - RNA, 19 nt, Artificial Sequence
  Description of Artificial Sequence: Synthetic oligonucleotide
uggcacggaacuuaggugu

SEQ ID NO: 2157099 - RNA, 19 nt, Artificial Sequence
  Description of Artificial Sequence: Synthetic oligonucleotide
cuuaagcaggucauggcug

SEQ ID NO: 2157100 - RNA, 19 nt, Artificial Sequence
  Description of Artificial Sequence: Synthetic oligonucleotide
gucaucaaaaggauuaaac

SEQ ID NO: 2157101 - RNA, 19 nt, Artificial Sequence
  Description of Artificial Sequence: Synthetic oligonucleotide
aguccugcaugcuugcauc

SEQ ID NO: 2157102 - RNA, 19 nt, Artificial Sequence
  Description of Artificial Sequence: Synthetic oligonucleotide
ucuucacugcggcuggccg

SEQ ID NO: 2157103 - RNA, 19 nt, Artificial Sequence
  Description of Artificial Sequence: Synthetic oligonucleotide
gaucguagaucucaaaugu

SEQ ID NO: 2157104 - RNA, 19 nt, Artificial Sequence
  Description of Artificial Sequence: Synthetic oligonucleotide
uauucaucaggaucugcac

SEQ ID NO: 2157105 - RNA, 19 nt, Artificial Sequence
  Description of Artificial Sequence: Synthetic oligonucleotide
ugcagcuaaaaguucccgc

SEQ ID NO: 2157106 - RNA, 19 nt, Artificial Sequence
  Description of Artificial Sequence: Synthetic oligonucleotide
caugcucugacugacucgg

SEQ ID NO: 2157107 - RNA, 19 nt, Artificial Sequence
  Description of Artificial Sequence: Synthetic oligonucleotide
uuuugggccuuuuaauuuc

SEQ ID NO: 2157108 - RNA, 19 nt, Artificial Sequence
  Description of Artificial Sequence: Synthetic oligonucleotide
ucucaucagguucuuuuca

SEQ ID NO: 2157109 - RNA, 19 nt, Artificial Sequence
  Description of Artificial Sequence: Synthetic oligonucleotide
ugccacagcgccaucuggg

SEQ ID NO: 2157110 - RNA, 19 nt, Artificial Sequence
  Description of Artificial Sequence: Synthetic oligonucleotide
aggaucguagaucucaaau

SEQ ID NO: 2157111 - RNA, 19 nt, Artificial Sequence
  Description of Artificial Sequence: Synthetic oligonucleotide
gcacaugugacauccaucc

SEQ ID NO: 2157112 - RNA, 19 nt, Artificial Sequence
  Description of Artificial Sequence: Synthetic oligonucleotide
agguguuucaauaauugcu

SEQ ID NO: 2157113 - RNA, 19 nt, Artificial Sequence
  Description of Artificial Sequence: Synthetic oligonucleotide
ucugaucuucccgagacgu

SEQ ID NO: 2157114 - RNA, 19 nt, Artificial Sequence
  Description of Artificial Sequence: Synthetic oligonucleotide
uuuugucuucaaacuggag

SEQ ID NO: 2157115 - RNA, 19 nt, Artificial Sequence
  Description of Artificial Sequence: Synthetic oligonucleotide
uguucaccggauuccgagg

SEQ ID NO: 2157116 - RNA, 19 nt, Artificial Sequence
  Description of Artificial Sequence: Synthetic oligonucleotide
cagcuuuugacucuaugug

SEQ ID NO: 2157117 - RNA, 19 nt, Artificial Sequence
  Description of Artificial Sequence: Synthetic oligonucleotide
uuccgaggaucguagaucu

SEQ ID NO: 2157118 - RNA, 19 nt, Artificial Sequence
  Description of Artificial Sequence: Synthetic oligonucleotide
acuuagguguggaucgucc

SEQ ID NO: 2157119 - RNA, 19 nt, Artificial Sequence
  Description of Artificial Sequence: Synthetic oligonucleotide
ucaugcucugacugacucg

SEQ ID NO: 2157120 - RNA, 19 nt, Artificial Sequence
  Description of Artificial Sequence: Synthetic oligonucleotide
cuuuuguucaccggauucc

SEQ ID NO: 2157121 - RNA, 19 nt, Artificial Sequence
  Description of Artificial Sequence: Synthetic oligonucleotide
cagguguuucaauaauugc

SEQ ID NO: 2157122 - RNA, 19 nt, Artificial Sequence
  Description of Artificial Sequence: Synthetic oligonucleotide
ugcaucuuucacuuuccug

SEQ ID NO: 2157123 - RNA, 19 nt, Artificial Sequence
  Description of Artificial Sequence: Synthetic oligonucleotide
ucgauuuaaacuggcucag

SEQ ID NO: 2157124 - RNA, 19 nt, Artificial Sequence
  Description of Artificial Sequence: Synthetic oligonucleotide
guugcaucauccuuuucac

SEQ ID NO: 2157125 - RNA, 19 nt, Artificial Sequence
  Description of Artificial Sequence: Synthetic oligonucleotide
auucaucaggaucugcacu

SEQ ID NO: 2157126 - RNA, 19 nt, Artificial Sequence
  Description of Artificial Sequence: Synthetic oligonucleotide
acuuuccacagcuggcacg

SEQ ID NO: 2157127 - RNA, 19 nt, Artificial Sequence
  Description of Artificial Sequence: Synthetic oligonucleotide
cuaaaucuccuguugcauc

SEQ ID NO: 2157128 - RNA, 19 nt, Artificial Sequence
  Description of Artificial Sequence: Synthetic oligonucleotide
uuucugagcucuucacugc

SEQ ID NO: 2157129 - RNA, 19 nt, Artificial Sequence
  Description of Artificial Sequence: Synthetic oligonucleotide
ucucuuggaaugaugucau

SEQ ID NO: 2157130 - RNA, 19 nt, Artificial Sequence
  Description of Artificial Sequence: Synthetic oligonucleotide
uuuugugccuuuaggcuuc

SEQ ID NO: 2157131 - RNA, 19 nt, Artificial Sequence
  Description of Artificial Sequence: Synthetic oligonucleotide
ucagguucuuuucaucauc

SEQ ID NO: 2157132 - RNA, 19 nt, Artificial Sequence
  Description of Artificial Sequence: Synthetic oligonucleotide
gaaccucacagcuuuugac

SEQ ID NO: 2157133 - RNA, 19 nt, Artificial Sequence
  Description of Artificial Sequence: Synthetic oligonucleotide
auuccgaggaucguagauc

SEQ ID NO: 2157134 - RNA, 19 nt, Artificial Sequence
  Description of Artificial Sequence: Synthetic oligonucleotide
aauuucucuuggaaugaug

SEQ ID NO: 2157135 - RNA, 19 nt, Artificial Sequence
  Description of Artificial Sequence: Synthetic oligonucleotide
ucugagcucuucacugcgg

SEQ ID NO: 2157136 - RNA, 19 nt, Artificial Sequence
  Description of Artificial Sequence: Synthetic oligonucleotide
aaugugucugaguccugca

SEQ ID NO: 2157137 - RNA, 19 nt, Artificial Sequence
  Description of Artificial Sequence: Synthetic oligonucleotide
uacuuuugcuuuucucgcc

SEQ ID NO: 2157138 - RNA, 19 nt, Artificial Sequence
  Description of Artificial Sequence: Synthetic oligonucleotide
caaacuggagcacauguga

SEQ ID NO: 2157139 - RNA, 19 nt, Artificial Sequence
  Description of Artificial Sequence: Synthetic oligonucleotide
ggaucguagaucucaaaug

SEQ ID NO: 2157140 - RNA, 19 nt, Artificial Sequence
  Description of Artificial Sequence: Synthetic oligonucleotide
ucugucaggcguagcaugu

SEQ ID NO: 2157141 - RNA, 19 nt, Artificial Sequence
  Description of Artificial Sequence: Synthetic oligonucleotide
ucauacuuuugcuuuucuc

SEQ ID NO: 2157142 - RNA, 19 nt, Artificial Sequence
  Description of Artificial Sequence: Synthetic oligonucleotide
agcuucauacuuuugcuuu

SEQ ID NO: 2157143 - RNA, 19 nt, Artificial Sequence
  Description of Artificial Sequence: Synthetic oligonucleotide
ucuauguggauugcggggu

SEQ ID NO: 2157144 - RNA, 19 nt, Artificial Sequence
  Description of Artificial Sequence: Synthetic oligonucleotide
uuuucacuuuccacagcug

SEQ ID NO: 2157145 - RNA, 19 nt, Artificial Sequence
  Description of Artificial Sequence: Synthetic oligonucleotide
aucguccuuaagcagguca

SEQ ID NO: 2157146 - RNA, 19 nt, Artificial Sequence
  Description of Artificial Sequence: Synthetic oligonucleotide
caaugucuacuucugucag

SEQ ID NO: 2157147 - RNA, 19 nt, Artificial Sequence
  Description of Artificial Sequence: Synthetic oligonucleotide
uucugucaggcguagcaug

SEQ ID NO: 2157148 - RNA, 19 nt, Artificial Sequence
  Description of Artificial Sequence: Synthetic oligonucleotide
uccuuaagcaggucauggc

SEQ ID NO: 2157149 - RNA, 19 nt, Artificial Sequence
  Description of Artificial Sequence: Synthetic oligonucleotide
cuucuuaggcuguugcuuc

SEQ ID NO: 2157150 - RNA, 19 nt, Artificial Sequence
  Description of Artificial Sequence: Synthetic oligonucleotide
gugacauccauccuucauc

SEQ ID NO: 2157151 - RNA, 19 nt, Artificial Sequence
  Description of Artificial Sequence: Synthetic oligonucleotide
cuguauucugccacagcgc

SEQ ID NO: 2157152 - RNA, 19 nt, Artificial Sequence
  Description of Artificial Sequence: Synthetic oligonucleotide
ugucaggcguagcauguug

SEQ ID NO: 2157153 - RNA, 19 nt, Artificial Sequence
  Description of Artificial Sequence: Synthetic oligonucleotide
gacucgguucacuuccucc

SEQ ID NO: 2157154 - RNA, 19 nt, Artificial Sequence
  Description of Artificial Sequence: Synthetic oligonucleotide
aaacuggcucagcagugca

SEQ ID NO: 2157155 - RNA, 19 nt, Artificial Sequence
  Description of Artificial Sequence: Synthetic oligonucleotide
ugugccuuuaggcuucaau

SEQ ID NO: 2157156 - RNA, 19 nt, Artificial Sequence
  Description of Artificial Sequence: Synthetic oligonucleotide
caagggucugaucuucccg

SEQ ID NO: 2157157 - RNA, 19 nt, Artificial Sequence
  Description of Artificial Sequence: Synthetic oligonucleotide
ucccuucuuaggcuguugc

SEQ ID NO: 2157158 - RNA, 19 nt, Artificial Sequence
  Description of Artificial Sequence: Synthetic oligonucleotide
aagcuucauacuuuugcuu

SEQ ID NO: 2157159 - RNA, 19 nt, Artificial Sequence
  Description of Artificial Sequence: Synthetic oligonucleotide
ucuucaaacuggagcacau

SEQ ID NO: 2157160 - RNA, 19 nt, Artificial Sequence
  Description of Artificial Sequence: Synthetic oligonucleotide
gaucucaaaugugucugag

SEQ ID NO: 2157161 - RNA, 19 nt, Artificial Sequence
  Description of Artificial Sequence: Synthetic oligonucleotide
uccuguugcaucauccuuu

SEQ ID NO: 2157162 - RNA, 19 nt, Artificial Sequence
  Description of Artificial Sequence: Synthetic oligonucleotide
ucucagguguuucaauaau

SEQ ID NO: 2157163 - RNA, 19 nt, Artificial Sequence
  Description of Artificial Sequence: Synthetic oligonucleotide
uucaggaacagugcucuca

SEQ ID NO: 2157164 - RNA, 19 nt, Artificial Sequence
  Description of Artificial Sequence: Synthetic oligonucleotide
auugcggggucuuucuuca

SEQ ID NO: 2157165 - RNA, 19 nt, Artificial Sequence
  Description of Artificial Sequence: Synthetic oligonucleotide
gugagcuucgauuuaaacu

SEQ ID NO: 2157166 - RNA, 19 nt, Artificial Sequence
  Description of Artificial Sequence: Synthetic oligonucleotide
guauucaucaggaucugca

SEQ ID NO: 2157167 - RNA, 19 nt, Artificial Sequence
  Description of Artificial Sequence: Synthetic oligonucleotide
uuugggccuuuuaauuucu

SEQ ID NO: 2157168 - RNA, 19 nt, Artificial Sequence
  Description of Artificial Sequence: Synthetic oligonucleotide
uuuucucgccuguauucug

SEQ ID NO: 2157169 - RNA, 19 nt, Artificial Sequence
  Description of Artificial Sequence: Synthetic oligonucleotide
uugcaauucuuucucucau

SEQ ID NO: 2157170 - RNA, 19 nt, Artificial Sequence
  Description of Artificial Sequence: Synthetic oligonucleotide
uucauacuuuugcuuuucu

SEQ ID NO: 2157171 - RNA, 19 nt, Artificial Sequence
  Description of Artificial Sequence: Synthetic oligonucleotide
aguugccuugcuucuuuuc

SEQ ID NO: 2157172 - RNA, 19 nt, Artificial Sequence
  Description of Artificial Sequence: Synthetic oligonucleotide
ugacucuauguggauugcg

SEQ ID NO: 2157173 - RNA, 19 nt, Artificial Sequence
  Description of Artificial Sequence: Synthetic oligonucleotide
gugucugaguccugcaugc

SEQ ID NO: 2157174 - RNA, 19 nt, Artificial Sequence
  Description of Artificial Sequence: Synthetic oligonucleotide
ucuaaaucuccuguugcau

SEQ ID NO: 2157175 - RNA, 19 nt, Artificial Sequence
  Description of Artificial Sequence: Synthetic oligonucleotide
uuaggcuguugcuuccuca

SEQ ID NO: 2157176 - RNA, 19 nt, Artificial Sequence
  Description of Artificial Sequence: Synthetic oligonucleotide
ugccuuuaggcuucaauuu

SEQ ID NO: 2157177 - RNA, 19 nt, Artificial Sequence
  Description of Artificial Sequence: Synthetic oligonucleotide
gauugcggggucuuucuuc

SEQ ID NO: 2157178 - RNA, 19 nt, Artificial Sequence
  Description of Artificial Sequence: Synthetic oligonucleotide
acucgguucacuuccuccu

SEQ ID NO: 2157179 - RNA, 19 nt, Artificial Sequence
  Description of Artificial Sequence: Synthetic oligonucleotide
gauuucacauuugcacuug

SEQ ID NO: 2157180 - RNA, 19 nt, Artificial Sequence
  Description of Artificial Sequence: Synthetic oligonucleotide
cugcuuuuguuguagucuc

SEQ ID NO: 2157181 - RNA, 19 nt, Artificial Sequence
  Description of Artificial Sequence: Synthetic oligonucleotide
caauucuuucucucaucag

SEQ ID NO: 2157182 - RNA, 19 nt, Artificial Sequence
  Description of Artificial Sequence: Synthetic oligonucleotide
aggucauggcugcuuuuac

SEQ ID NO: 2157183 - RNA, 19 nt, Artificial Sequence
  Description of Artificial Sequence: Synthetic oligonucleotide
agaaccucacagcuuuuga

SEQ ID NO: 2157184 - RNA, 19 nt, Artificial Sequence
  Description of Artificial Sequence: Synthetic oligonucleotide
ugggccuuuuaauuucucu

SEQ ID NO: 2157185 - RNA, 19 nt, Artificial Sequence
  Description of Artificial Sequence: Synthetic oligonucleotide
aggauuaaacagaaccuca

SEQ ID NO: 2157186 - RNA, 19 nt, Artificial Sequence
  Description of Artificial Sequence: Synthetic oligonucleotide
uugcagcuaaaaguucccg

SEQ ID NO: 2157187 - RNA, 19 nt, Artificial Sequence
  Description of Artificial Sequence: Synthetic oligonucleotide
uugccuugcuucuuuucug

SEQ ID NO: 2157188 - RNA, 19 nt, Artificial Sequence
  Description of Artificial Sequence: Synthetic oligonucleotide
ucaauguauucaucaggau

SEQ ID NO: 2157189 - RNA, 19 nt, Artificial Sequence
  Description of Artificial Sequence: Synthetic oligonucleotide
uuuguucaccggauuccga

SEQ ID NO: 2157190 - RNA, 19 nt, Artificial Sequence
  Description of Artificial Sequence: Synthetic oligonucleotide
ugaugucaucaaaaggauu

SEQ ID NO: 2157191 - RNA, 19 nt, Artificial Sequence
  Description of Artificial Sequence: Synthetic oligonucleotide
ucuuccccaaaagaaagua

SEQ ID NO: 2157192 - RNA, 19 nt, Artificial Sequence
  Description of Artificial Sequence: Synthetic oligonucleotide
ugaucuucccgagacguuc

SEQ ID NO: 2157193 - RNA, 19 nt, Artificial Sequence
  Description of Artificial Sequence: Synthetic oligonucleotide
uguauucaucaggaucugc

SEQ ID NO: 2157194 - RNA, 19 nt, Artificial Sequence
  Description of Artificial Sequence: Synthetic oligonucleotide
ucugccacagcgccaucug

SEQ ID NO: 2157195 - RNA, 19 nt, Artificial Sequence
  Description of Artificial Sequence: Synthetic oligonucleotide
caccggauuccgaggaucg

SEQ ID NO: 2157196 - RNA, 19 nt, Artificial Sequence
  Description of Artificial Sequence: Synthetic oligonucleotide
uucuguuuugcagcuaaaa

SEQ ID NO: 2157197 - RNA, 19 nt, Artificial Sequence
  Description of Artificial Sequence: Synthetic oligonucleotide
auugcuugagugagcuucg

SEQ ID NO: 2157198 - RNA, 19 nt, Artificial Sequence
  Description of Artificial Sequence: Synthetic oligonucleotide
agcuucgauuuaaacuggc

SEQ ID NO: 2157199 - RNA, 19 nt, Artificial Sequence
  Description of Artificial Sequence: Synthetic oligonucleotide
uucuuaggcuguugcuucc

SEQ ID NO: 2157200 - RNA, 19 nt, Artificial Sequence
  Description of Artificial Sequence: Synthetic oligonucleotide
ugccuugcuucuuuucuga

SEQ ID NO: 2157201 - RNA, 19 nt, Artificial Sequence
  Description of Artificial Sequence: Synthetic oligonucleotide
cuuggaaugaugucaucaa

SEQ ID NO: 2157202 - RNA, 19 nt, Artificial Sequence
  Description of Artificial Sequence: Synthetic oligonucleotide
ucguccuuaagcaggucau

SEQ ID NO: 2157203 - RNA, 19 nt, Artificial Sequence
  Description of Artificial Sequence: Synthetic oligonucleotide
ugcuucaggaacagugcuc

SEQ ID NO: 2157204 - RNA, 19 nt, Artificial Sequence
  Description of Artificial Sequence: Synthetic oligonucleotide
cucgccuguauucugccac

SEQ ID NO: 2157205 - RNA, 19 nt, Artificial Sequence
  Description of Artificial Sequence: Synthetic oligonucleotide
augcuugcaucuuucacuu

SEQ ID NO: 2157206 - RNA, 19 nt, Artificial Sequence
  Description of Artificial Sequence: Synthetic oligonucleotide
ugcaagggucugaucuucc

SEQ ID NO: 2157207 - RNA, 19 nt, Artificial Sequence
  Description of Artificial Sequence: Synthetic oligonucleotide
cuucacugcggcuggccgg

SEQ ID NO: 2157208 - RNA, 19 nt, Artificial Sequence
  Description of Artificial Sequence: Synthetic oligonucleotide
ugagugagcuucgauuuaa

SEQ ID NO: 2157209 - RNA, 19 nt, Artificial Sequence
  Description of Artificial Sequence: Synthetic oligonucleotide
gguucuuuucaucaucauc

SEQ ID NO: 2157210 - RNA, 19 nt, Artificial Sequence
  Description of Artificial Sequence: Synthetic oligonucleotide
aucuucccgagacguuccc

SEQ ID NO: 2157211 - RNA, 19 nt, Artificial Sequence
  Description of Artificial Sequence: Synthetic oligonucleotide
ugcuuuuacuucuucccuu

SEQ ID NO: 2157212 - RNA, 19 nt, Artificial Sequence
  Description of Artificial Sequence: Synthetic oligonucleotide
cuuuucacuuuccacagcu

SEQ ID NO: 2157213 - RNA, 19 nt, Artificial Sequence
  Description of Artificial Sequence: Synthetic oligonucleotide
gagcuucgauuuaaacugg

SEQ ID NO: 2157214 - RNA, 19 nt, Artificial Sequence
  Description of Artificial Sequence: Synthetic oligonucleotide
ugucuacuucugucaggcg

SEQ ID NO: 2157215 - RNA, 19 nt, Artificial Sequence
  Description of Artificial Sequence: Synthetic oligonucleotide
agaucucaaaugugucuga

SEQ ID NO: 2157216 - RNA, 19 nt, Artificial Sequence
  Description of Artificial Sequence: Synthetic oligonucleotide
caugcuugcaucuuucacu

SEQ ID NO: 2157217 - RNA, 19 nt, Artificial Sequence
  Description of Artificial Sequence: Synthetic oligonucleotide
agcacaugugacauccauc

SEQ ID NO: 2157218 - RNA, 19 nt, Artificial Sequence
  Description of Artificial Sequence: Synthetic oligonucleotide
ugcucucuucccuucuucu

SEQ ID NO: 2157219 - RNA, 19 nt, Artificial Sequence
  Description of Artificial Sequence: Synthetic oligonucleotide
ucacuuuccugguuuuguc

SEQ ID NO: 2157220 - RNA, 19 nt, Artificial Sequence
  Description of Artificial Sequence: Synthetic oligonucleotide
ggucugaucuucccgagac

SEQ ID NO: 2157221 - RNA, 19 nt, Artificial Sequence
  Description of Artificial Sequence: Synthetic oligonucleotide
cuaaaaguucccgcuucag

SEQ ID NO: 2157222 - RNA, 19 nt, Artificial Sequence
  Description of Artificial Sequence: Synthetic oligonucleotide
guggaucguccuuaagcag

SEQ ID NO: 2157223 - RNA, 19 nt, Artificial Sequence
  Description of Artificial Sequence: Synthetic oligonucleotide
cuggcacggaacuuaggug

SEQ ID NO: 2157224 - RNA, 19 nt, Artificial Sequence
  Description of Artificial Sequence: Synthetic oligonucleotide
guagaucucaaaugugucu

SEQ ID NO: 2157225 - RNA, 19 nt, Artificial Sequence
  Description of Artificial Sequence: Synthetic oligonucleotide
uaggcuguugcuuccucaa

SEQ ID NO: 2157226 - RNA, 19 nt, Artificial Sequence
  Description of Artificial Sequence: Synthetic oligonucleotide
uggauugcggggucuuucu

SEQ ID NO: 2157227 - RNA, 19 nt, Artificial Sequence
  Description of Artificial Sequence: Synthetic oligonucleotide
ugcaugcuugcaucuuuca

SEQ ID NO: 2157228 - RNA, 19 nt, Artificial Sequence
  Description of Artificial Sequence: Synthetic oligonucleotide
uugcaucuuucacuuuccu

SEQ ID NO: 2157229 - RNA, 19 nt, Artificial Sequence
  Description of Artificial Sequence: Synthetic oligonucleotide
acuggagcacaugugacau

SEQ ID NO: 2157230 - RNA, 19 nt, Artificial Sequence
  Description of Artificial Sequence: Synthetic oligonucleotide
ggaacagugcucucaggug

SEQ ID NO: 2157231 - RNA, 19 nt, Artificial Sequence
  Description of Artificial Sequence: Synthetic oligonucleotide
uucuuuuguucaccggauu

SEQ ID NO: 2157232 - RNA, 19 nt, Artificial Sequence
  Description of Artificial Sequence: Synthetic oligonucleotide
acguucccuucuuaggcug

SEQ ID NO: 2157233 - RNA, 19 nt, Artificial Sequence
  Description of Artificial Sequence: Synthetic oligonucleotide
aucagguucuuuucaucau

SEQ ID NO: 2157234 - RNA, 19 nt, Artificial Sequence
  Description of Artificial Sequence: Synthetic oligonucleotide
ucgguucacuuccuccucu

SEQ ID NO: 2157235 - RNA, 19 nt, Artificial Sequence
  Description of Artificial Sequence: Synthetic oligonucleotide
gcuugcaucuuucacuuuc

SEQ ID NO: 2157236 - RNA, 19 nt, Artificial Sequence
  Description of Artificial Sequence: Synthetic oligonucleotide
gucugaucuucccgagacg

SEQ ID NO: 2157237 - RNA, 19 nt, Artificial Sequence
  Description of Artificial Sequence: Synthetic oligonucleotide
agcgccaucuggggcagcc

SEQ ID NO: 2157238 - RNA, 19 nt, Artificial Sequence
  Description of Artificial Sequence: Synthetic oligonucleotide
gggucuuucuucaucauca

SEQ ID NO: 2157239 - RNA, 19 nt, Artificial Sequence
  Description of Artificial Sequence: Synthetic oligonucleotide
uccugguuuugucuucaaa

SEQ ID NO: 2157240 - RNA, 19 nt, Artificial Sequence
  Description of Artificial Sequence: Synthetic oligonucleotide
cuuucucucaucagguucu

SEQ ID NO: 2157241 - RNA, 19 nt, Artificial Sequence
  Description of Artificial Sequence: Synthetic oligonucleotide
ggauuaaacagaaccucac

SEQ ID NO: 2157242 - RNA, 19 nt, Artificial Sequence
  Description of Artificial Sequence: Synthetic oligonucleotide
ucuggggcagccucuuccu

SEQ ID NO: 2157243 - RNA, 19 nt, Artificial Sequence
  Description of Artificial Sequence: Synthetic oligonucleotide
uggggcagccucuuccucu

SEQ ID NO: 2157244 - RNA, 19 nt, Artificial Sequence
  Description of Artificial Sequence: Synthetic oligonucleotide
gucuacuucugucaggcgu

SEQ ID NO: 2157245 - RNA, 19 nt, Artificial Sequence
  Description of Artificial Sequence: Synthetic oligonucleotide
guucaccggauuccgagga

SEQ ID NO: 2157246 - RNA, 19 nt, Artificial Sequence
  Description of Artificial Sequence: Synthetic oligonucleotide
cagugcaagggucugaucu

SEQ ID NO: 2157247 - RNA, 19 nt, Artificial Sequence
  Description of Artificial Sequence: Synthetic oligonucleotide
ugcggggucuuucuucauc

SEQ ID NO: 2157248 - RNA, 19 nt, Artificial Sequence
  Description of Artificial Sequence: Synthetic oligonucleotide
ugcucugacugacucgguu

SEQ ID NO: 2157249 - RNA, 19 nt, Artificial Sequence
  Description of Artificial Sequence: Synthetic oligonucleotide
guugccuugcuucuuuucu

SEQ ID NO: 2157250 - RNA, 19 nt, Artificial Sequence
  Description of Artificial Sequence: Synthetic oligonucleotide
ugacugacucgguucacuu

SEQ ID NO: 2157251 - RNA, 19 nt, Artificial Sequence
  Description of Artificial Sequence: Synthetic oligonucleotide
agugcaagggucugaucuu

SEQ ID NO: 2157252 - RNA, 19 nt, Artificial Sequence
  Description of Artificial Sequence: Synthetic oligonucleotide
gcuuuucucgccuguauuc

SEQ ID NO: 2157253 - RNA, 19 nt, Artificial Sequence
  Description of Artificial Sequence: Synthetic oligonucleotide
agggucugaucuucccgag

SEQ ID NO: 2157254 - RNA, 19 nt, Artificial Sequence
  Description of Artificial Sequence: Synthetic oligonucleotide
uugacucuauguggauugc

SEQ ID NO: 2157255 - RNA, 19 nt, Artificial Sequence
  Description of Artificial Sequence: Synthetic oligonucleotide
cuucauacuuuugcuuuuc

SEQ ID NO: 2157256 - RNA, 19 nt, Artificial Sequence
  Description of Artificial Sequence: Synthetic oligonucleotide
cugaguccugcaugcuugc

SEQ ID NO: 2157257 - RNA, 19 nt, Artificial Sequence
  Description of Artificial Sequence: Synthetic oligonucleotide
gacugacucgguucacuuc

SEQ ID NO: 2157258 - RNA, 19 nt, Artificial Sequence
  Description of Artificial Sequence: Synthetic oligonucleotide
uucuuucucucaucagguu

SEQ ID NO: 2157259 - RNA, 19 nt, Artificial Sequence
  Description of Artificial Sequence: Synthetic oligonucleotide
augugucugaguccugcau

SEQ ID NO: 2157260 - RNA, 19 nt, Artificial Sequence
  Description of Artificial Sequence: Synthetic oligonucleotide
aaacagaaccucacagcuu

SEQ ID NO: 2157261 - RNA, 19 nt, Artificial Sequence
  Description of Artificial Sequence: Synthetic oligonucleotide
uccuuucucugcuuuuguu

SEQ ID NO: 2157262 - RNA, 19 nt, Artificial Sequence
  Description of Artificial Sequence: Synthetic oligonucleotide
ucucaccuucuuucuuucu

SEQ ID NO: 2157263 - RNA, 19 nt, Artificial Sequence
  Description of Artificial Sequence: Synthetic oligonucleotide
uauguggauugcggggucu

SEQ ID NO: 2157264 - RNA, 19 nt, Artificial Sequence
  Description of Artificial Sequence: Synthetic oligonucleotide
cacagcgccaucuggggca

SEQ ID NO: 2157265 - RNA, 19 nt, Artificial Sequence
  Description of Artificial Sequence: Synthetic oligonucleotide
gcuuuuacuucuucccuuc

SEQ ID NO: 2157266 - RNA, 19 nt, Artificial Sequence
  Description of Artificial Sequence: Synthetic oligonucleotide
uuugcuuuucucgccugua

SEQ ID NO: 2157267 - RNA, 19 nt, Artificial Sequence
  Description of Artificial Sequence: Synthetic oligonucleotide
cucucaccuucuuucuuuc

SEQ ID NO: 2157268 - RNA, 19 nt, Artificial Sequence
  Description of Artificial Sequence: Synthetic oligonucleotide
cucucagguguuucaauaa

SEQ ID NO: 2157269 - RNA, 19 nt, Artificial Sequence
  Description of Artificial Sequence: Synthetic oligonucleotide
caucuucuaaaucuccugu

SEQ ID NO: 2157270 - RNA, 19 nt, Artificial Sequence
  Description of Artificial Sequence: Synthetic oligonucleotide
ucgccuguauucugccaca

SEQ ID NO: 2157271 - RNA, 19 nt, Artificial Sequence
  Description of Artificial Sequence: Synthetic oligonucleotide
uagguguggaucguccuua

SEQ ID NO: 2157272 - RNA, 19 nt, Artificial Sequence
  Description of Artificial Sequence: Synthetic oligonucleotide
cucugacugacucgguuca

SEQ ID NO: 2157273 - RNA, 19 nt, Artificial Sequence
  Description of Artificial Sequence: Synthetic oligonucleotide
cuucaaacuggagcacaug

SEQ ID NO: 2157274 - RNA, 19 nt, Artificial Sequence
  Description of Artificial Sequence: Synthetic oligonucleotide
gcuuuugacucuaugugga

SEQ ID NO: 2157275 - RNA, 19 nt, Artificial Sequence
  Description of Artificial Sequence: Synthetic oligonucleotide
caggaacagugcucucagg

SEQ ID NO: 2157276 - RNA, 19 nt, Artificial Sequence
  Description of Artificial Sequence: Synthetic oligonucleotide
ucuuaggcuguugcuuccu

SEQ ID NO: 2157277 - RNA, 19 nt, Artificial Sequence
  Description of Artificial Sequence: Synthetic oligonucleotide
ucaccggauuccgaggauc

SEQ ID NO: 2157278 - RNA, 19 nt, Artificial Sequence
  Description of Artificial Sequence: Synthetic oligonucleotide
ucucgccuguauucugcca

SEQ ID NO: 2157279 - RNA, 19 nt, Artificial Sequence
  Description of Artificial Sequence: Synthetic oligonucleotide
uucauccgguuucucuuuu

SEQ ID NO: 2157280 - RNA, 19 nt, Artificial Sequence
  Description of Artificial Sequence: Synthetic oligonucleotide
augucaucaaaaggauuaa

SEQ ID NO: 2157281 - RNA, 19 nt, Artificial Sequence
  Description of Artificial Sequence: Synthetic oligonucleotide
gccuuuaggcuucaauuuc

SEQ ID NO: 2157282 - RNA, 19 nt, Artificial Sequence
  Description of Artificial Sequence: Synthetic oligonucleotide
gugccuuuaggcuucaauu

SEQ ID NO: 2157283 - RNA, 19 nt, Artificial Sequence
  Description of Artificial Sequence: Synthetic oligonucleotide
ugcucucagguguuucaau

SEQ ID NO: 2157284 - RNA, 19 nt, Artificial Sequence
  Description of Artificial Sequence: Synthetic oligonucleotide
cugccacagcgccaucugg

SEQ ID NO: 2157285 - RNA, 19 nt, Artificial Sequence
  Description of Artificial Sequence: Synthetic oligonucleotide
uugggccuuuuaauuucuc

SEQ ID NO: 2157286 - RNA, 19 nt, Artificial Sequence
  Description of Artificial Sequence: Synthetic oligonucleotide
ugacucgguucacuuccuc

SEQ ID NO: 2157287 - RNA, 19 nt, Artificial Sequence
  Description of Artificial Sequence: Synthetic oligonucleotide
cuauguggauugcgggguc

SEQ ID NO: 2157288 - RNA, 19 nt, Artificial Sequence
  Description of Artificial Sequence: Synthetic oligonucleotide
uucaccggauuccgaggau

SEQ ID NO: 2157289 - RNA, 19 nt, Artificial Sequence
  Description of Artificial Sequence: Synthetic oligonucleotide
cuuaggcuguugcuuccuc

SEQ ID NO: 2157290 - RNA, 19 nt, Artificial Sequence
  Description of Artificial Sequence: Synthetic oligonucleotide
gacguucccuucuuaggcu

SEQ ID NO: 2157291 - RNA, 19 nt, Artificial Sequence
  Description of Artificial Sequence: Synthetic oligonucleotide
uccucucaccuucuuucuu

SEQ ID NO: 2157292 - RNA, 19 nt, Artificial Sequence
  Description of Artificial Sequence: Synthetic oligonucleotide
gcaugcuugcaucuuucac

SEQ ID NO: 2157293 - RNA, 19 nt, Artificial Sequence
  Description of Artificial Sequence: Synthetic oligonucleotide
cagcuggcacggaacuuag

SEQ ID NO: 2157294 - RNA, 19 nt, Artificial Sequence
  Description of Artificial Sequence: Synthetic oligonucleotide
accucugcuucaggaacag

SEQ ID NO: 2157295 - RNA, 19 nt, Artificial Sequence
  Description of Artificial Sequence: Synthetic oligonucleotide
caaaugugucugaguccug

SEQ ID NO: 2157296 - RNA, 19 nt, Artificial Sequence
  Description of Artificial Sequence: Synthetic oligonucleotide
agcagugcaagggucugau

SEQ ID NO: 2157297 - RNA, 19 nt, Artificial Sequence
  Description of Artificial Sequence: Synthetic oligonucleotide
aguucccgcuucaguugcc

SEQ ID NO: 2157298 - RNA, 19 nt, Artificial Sequence
  Description of Artificial Sequence: Synthetic oligonucleotide
gcaagggucugaucuuccc

SEQ ID NO: 2157299 - RNA, 19 nt, Artificial Sequence
  Description of Artificial Sequence: Synthetic oligonucleotide
gcucugacugacucgguuc

SEQ ID NO: 2157300 - RNA, 19 nt, Artificial Sequence
  Description of Artificial Sequence: Synthetic oligonucleotide
cuacuucugucaggcguag

SEQ ID NO: 2157301 - RNA, 19 nt, Artificial Sequence
  Description of Artificial Sequence: Synthetic oligonucleotide
cguagaucucaaauguguc

SEQ ID NO: 2157302 - RNA, 19 nt, Artificial Sequence
  Description of Artificial Sequence: Synthetic oligonucleotide
gaggaucguagaucucaaa

SEQ ID NO: 2157303 - RNA, 19 nt, Artificial Sequence
  Description of Artificial Sequence: Synthetic oligonucleotide
cucgguucacuuccuccuc

SEQ ID NO: 2157304 - RNA, 19 nt, Artificial Sequence
  Description of Artificial Sequence: Synthetic oligonucleotide
ucuucccgagacguucccu

SEQ ID NO: 2157305 - RNA, 19 nt, Artificial Sequence
  Description of Artificial Sequence: Synthetic oligonucleotide
uaauugcuugagugagcuu

SEQ ID NO: 2157306 - RNA, 19 nt, Artificial Sequence
  Description of Artificial Sequence: Synthetic oligonucleotide
gagcacaugugacauccau

SEQ ID NO: 2157307 - RNA, 19 nt, Artificial Sequence
  Description of Artificial Sequence: Synthetic oligonucleotide
uucccuucuuaggcuguug

SEQ ID NO: 2157308 - RNA, 19 nt, Artificial Sequence
  Description of Artificial Sequence: Synthetic oligonucleotide
cgagacguucccuucuuag

SEQ ID NO: 2157309 - RNA, 19 nt, Artificial Sequence
  Description of Artificial Sequence: Synthetic oligonucleotide
cucuuggaaugaugucauc

SEQ ID NO: 2157310 - RNA, 19 nt, Artificial Sequence
  Description of Artificial Sequence: Synthetic oligonucleotide
ucugacugacucgguucac

SEQ ID NO: 2157311 - RNA, 19 nt, Artificial Sequence
  Description of Artificial Sequence: Synthetic oligonucleotide
gcuggcacggaacuuaggu

SEQ ID NO: 2157312 - RNA, 19 nt, Artificial Sequence
  Description of Artificial Sequence: Synthetic oligonucleotide
aacuggcucagcagugcaa

SEQ ID NO: 2157313 - RNA, 19 nt, Artificial Sequence
  Description of Artificial Sequence: Synthetic oligonucleotide
acggaacuuagguguggau

SEQ ID NO: 2157314 - RNA, 19 nt, Artificial Sequence
  Description of Artificial Sequence: Synthetic oligonucleotide
gguguuucaauaauugcuu

SEQ ID NO: 2157315 - RNA, 19 nt, Artificial Sequence
  Description of Artificial Sequence: Synthetic oligonucleotide
ccaccucugcuucaggaac

SEQ ID NO: 2157316 - RNA, 19 nt, Artificial Sequence
  Description of Artificial Sequence: Synthetic oligonucleotide
cuuagguguggaucguccu

SEQ ID NO: 2157317 - RNA, 19 nt, Artificial Sequence
  Description of Artificial Sequence: Synthetic oligonucleotide
gaguccugcaugcuugcau

SEQ ID NO: 2157318 - RNA, 19 nt, Artificial Sequence
  Description of Artificial Sequence: Synthetic oligonucleotide
cucagcagugcaagggucu

SEQ ID NO: 2157319 - RNA, 19 nt, Artificial Sequence
  Description of Artificial Sequence: Synthetic oligonucleotide
gguguggaucguccuuaag

SEQ ID NO: 2157320 - RNA, 19 nt, Artificial Sequence
  Description of Artificial Sequence: Synthetic oligonucleotide
guggauugcggggucuuuc

SEQ ID NO: 2157321 - RNA, 19 nt, Artificial Sequence
  Description of Artificial Sequence: Synthetic oligonucleotide
cacuuuccugguuuugucu

SEQ ID NO: 2157322 - RNA, 19 nt, Artificial Sequence
  Description of Artificial Sequence: Synthetic oligonucleotide
cucagguguuucaauaauu

SEQ ID NO: 2157323 - RNA, 19 nt, Artificial Sequence
  Description of Artificial Sequence: Synthetic oligonucleotide
cugcuuuuacuucuucccu

SEQ ID NO: 2157324 - RNA, 19 nt, Artificial Sequence
  Description of Artificial Sequence: Synthetic oligonucleotide
gcggggucuuucuucauca

SEQ ID NO: 2157325 - RNA, 19 nt, Artificial Sequence
  Description of Artificial Sequence: Synthetic oligonucleotide
uccgaggaucguagaucuc

SEQ ID NO: 2157326 - RNA, 19 nt, Artificial Sequence
  Description of Artificial Sequence: Synthetic oligonucleotide
gcucucagguguuucaaua

SEQ ID NO: 2157327 - RNA, 19 nt, Artificial Sequence
  Description of Artificial Sequence: Synthetic oligonucleotide
ccagcugauuucacauuug

SEQ ID NO: 2157328 - RNA, 19 nt, Artificial Sequence
  Description of Artificial Sequence: Synthetic oligonucleotide
accacucuccucucaccuu

SEQ ID NO: 2157329 - RNA, 19 nt, Artificial Sequence
  Description of Artificial Sequence: Synthetic oligonucleotide
uuccugguuuugucuucaa

SEQ ID NO: 2157330 - RNA, 19 nt, Artificial Sequence
  Description of Artificial Sequence: Synthetic oligonucleotide
cuggagcacaugugacauc

SEQ ID NO: 2157331 - RNA, 19 nt, Artificial Sequence
  Description of Artificial Sequence: Synthetic oligonucleotide
cuuuucucgccuguauucu

SEQ ID NO: 2157332 - RNA, 19 nt, Artificial Sequence
  Description of Artificial Sequence: Synthetic oligonucleotide
gugcaagggucugaucuuc

SEQ ID NO: 2157333 - RNA, 19 nt, Artificial Sequence
  Description of Artificial Sequence: Synthetic oligonucleotide
uugcuugagugagcuucga

SEQ ID NO: 2157334 - RNA, 19 nt, Artificial Sequence
  Description of Artificial Sequence: Synthetic oligonucleotide
ucacagcuuuugacucuau

SEQ ID NO: 2157335 - RNA, 19 nt, Artificial Sequence
  Description of Artificial Sequence: Synthetic oligonucleotide
ugcuuccucaaagcuucau

SEQ ID NO: 2157336 - RNA, 19 nt, Artificial Sequence
  Description of Artificial Sequence: Synthetic oligonucleotide
cggauuccgaggaucguag

SEQ ID NO: 2157337 - RNA, 19 nt, Artificial Sequence
  Description of Artificial Sequence: Synthetic oligonucleotide
acugcggcuggccggcuuu

SEQ ID NO: 2157338 - RNA, 19 nt, Artificial Sequence
  Description of Artificial Sequence: Synthetic oligonucleotide
aggcuguugcuuccucaaa

SEQ ID NO: 2157339 - RNA, 19 nt, Artificial Sequence
  Description of Artificial Sequence: Synthetic oligonucleotide
caucaaugucuacuucugu

SEQ ID NO: 2157340 - RNA, 19 nt, Artificial Sequence
  Description of Artificial Sequence: Synthetic oligonucleotide
acagcgccaucuggggcag

SEQ ID NO: 2157341 - RNA, 19 nt, Artificial Sequence
  Description of Artificial Sequence: Synthetic oligonucleotide
ccacucuccucucaccuuc

SEQ ID NO: 2157342 - RNA, 19 nt, Artificial Sequence
  Description of Artificial Sequence: Synthetic oligonucleotide
cuuuugacucuauguggau

SEQ ID NO: 2157343 - RNA, 19 nt, Artificial Sequence
  Description of Artificial Sequence: Synthetic oligonucleotide
gagugagcuucgauuuaaa

SEQ ID NO: 2157344 - RNA, 19 nt, Artificial Sequence
  Description of Artificial Sequence: Synthetic oligonucleotide
cacggaacuuaggugugga

SEQ ID NO: 2157345 - RNA, 19 nt, Artificial Sequence
  Description of Artificial Sequence: Synthetic oligonucleotide
uguggauugcggggucuuu

SEQ ID NO: 2157346 - RNA, 19 nt, Artificial Sequence
  Description of Artificial Sequence: Synthetic oligonucleotide
ggucauggcugcuuuuacu

SEQ ID NO: 2157347 - RNA, 19 nt, Artificial Sequence
  Description of Artificial Sequence: Synthetic oligonucleotide
uccugcaugcuugcaucuu

SEQ ID NO: 2157348 - RNA, 19 nt, Artificial Sequence
  Description of Artificial Sequence: Synthetic oligonucleotide
agcuggcacggaacuuagg

SEQ ID NO: 2157349 - RNA, 19 nt, Artificial Sequence
  Description of Artificial Sequence: Synthetic oligonucleotide
gcacggaacuuaggugugg

SEQ ID NO: 2157350 - RNA, 19 nt, Artificial Sequence
  Description of Artificial Sequence: Synthetic oligonucleotide
cggaacuuagguguggauc

SEQ ID NO: 2157351 - RNA, 19 nt, Artificial Sequence
  Description of Artificial Sequence: Synthetic oligonucleotide
ccgaggaucguagaucuca

SEQ ID NO: 2157352 - RNA, 19 nt, Artificial Sequence
  Description of Artificial Sequence: Synthetic oligonucleotide
ugcuugcaucuuucacuuu

SEQ ID NO: 2157353 - RNA, 19 nt, Artificial Sequence
  Description of Artificial Sequence: Synthetic oligonucleotide
ggcacggaacuuaggugug

SEQ ID NO: 2157354 - RNA, 19 nt, Artificial Sequence
  Description of Artificial Sequence: Synthetic oligonucleotide
caggucauggcugcuuuua

SEQ ID NO: 2157355 - RNA, 19 nt, Artificial Sequence
  Description of Artificial Sequence: Synthetic oligonucleotide
ggauuccgaggaucguaga

SEQ ID NO: 2157356 - RNA, 19 nt, Artificial Sequence
  Description of Artificial Sequence: Synthetic oligonucleotide
gaacuuagguguggaucgu

SEQ ID NO: 2157357 - RNA, 19 nt, Artificial Sequence
  Description of Artificial Sequence: Synthetic oligonucleotide
cuucaugcucugacugacu

SEQ ID NO: 2157358 - RNA, 19 nt, Artificial Sequence
  Description of Artificial Sequence: Synthetic oligonucleotide
gaucguccuuaagcagguc

SEQ ID NO: 2157359 - RNA, 19 nt, Artificial Sequence
  Description of Artificial Sequence: Synthetic oligonucleotide
gcuuuuguuguagucuccu

SEQ ID NO: 2157360 - RNA, 19 nt, Artificial Sequence
  Description of Artificial Sequence: Synthetic oligonucleotide
cuuuuguuguagucuccuu

SEQ ID NO: 2157361 - RNA, 19 nt, Artificial Sequence
  Description of Artificial Sequence: Synthetic oligonucleotide
auguggauugcggggucuu

SEQ ID NO: 2157362 - RNA, 19 nt, Artificial Sequence
  Description of Artificial Sequence: Synthetic oligonucleotide
cuucccgagacguucccuu

SEQ ID NO: 2157363 - RNA, 19 nt, Artificial Sequence
  Description of Artificial Sequence: Synthetic oligonucleotide
cccgcuucaguugccuugc

SEQ ID NO: 2157364 - RNA, 19 nt, Artificial Sequence
  Description of Artificial Sequence: Synthetic oligonucleotide
accggauuccgaggaucgu

SEQ ID NO: 2157365 - RNA, 19 nt, Artificial Sequence
  Description of Artificial Sequence: Synthetic oligonucleotide
cuccucucaccuucuuucu

SEQ ID NO: 2157366 - RNA, 19 nt, Artificial Sequence
  Description of Artificial Sequence: Synthetic oligonucleotide
caucuggggcagccucuuc

SEQ ID NO: 2157367 - RNA, 19 nt, Artificial Sequence
  Description of Artificial Sequence: Synthetic oligonucleotide
gggucugaucuucccgaga

SEQ ID NO: 2157368 - RNA, 19 nt, Artificial Sequence
  Description of Artificial Sequence: Synthetic oligonucleotide
gugcucucagguguuucaa

SEQ ID NO: 2157369 - RNA, 19 nt, Artificial Sequence
  Description of Artificial Sequence: Synthetic oligonucleotide
uugcggggucuuucuucau

SEQ ID NO: 2157370 - RNA, 19 nt, Artificial Sequence
  Description of Artificial Sequence: Synthetic oligonucleotide
cuucauccgguuucucuuu

SEQ ID NO: 2157371 - RNA, 19 nt, Artificial Sequence
  Description of Artificial Sequence: Synthetic oligonucleotide
cgauuuaaacuggcucagc

SEQ ID NO: 2157372 - RNA, 19 nt, Artificial Sequence
  Description of Artificial Sequence: Synthetic oligonucleotide
gacauccauccuucaucau

SEQ ID NO: 2157373 - RNA, 19 nt, Artificial Sequence
  Description of Artificial Sequence: Synthetic oligonucleotide
cugacugacucgguucacu

SEQ ID NO: 2157374 - RNA, 19 nt, Artificial Sequence
  Description of Artificial Sequence: Synthetic oligonucleotide
gcucagcagugcaaggguc

SEQ ID NO: 2157375 - RNA, 19 nt, Artificial Sequence
  Description of Artificial Sequence: Synthetic oligonucleotide
cacaugugacauccauccu

SEQ ID NO: 2157376 - RNA, 19 nt, Artificial Sequence
  Description of Artificial Sequence: Synthetic oligonucleotide
gcuucgauuuaaacuggcu

SEQ ID NO: 2157377 - RNA, 19 nt, Artificial Sequence
  Description of Artificial Sequence: Synthetic oligonucleotide
cuucugucaggcguagcau

SEQ ID NO: 2157378 - RNA, 19 nt, Artificial Sequence
  Description of Artificial Sequence: Synthetic oligonucleotide
cagcuaaaaguucccgcuu

SEQ ID NO: 2157379 - RNA, 19 nt, Artificial Sequence
  Description of Artificial Sequence: Synthetic oligonucleotide
ggaucguccuuaagcaggu

SEQ ID NO: 2157380 - RNA, 19 nt, Artificial Sequence
  Description of Artificial Sequence: Synthetic oligonucleotide
guucccgcuucaguugccu

SEQ ID NO: 2157381 - RNA, 19 nt, Artificial Sequence
  Description of Artificial Sequence: Synthetic oligonucleotide
acagaaccucacagcuuuu

SEQ ID NO: 2157382 - RNA, 19 nt, Artificial Sequence
  Description of Artificial Sequence: Synthetic oligonucleotide
cugacucgguucacuuccu

SEQ ID NO: 2157383 - RNA, 19 nt, Artificial Sequence
  Description of Artificial Sequence: Synthetic oligonucleotide
gcagugcaagggucugauc

SEQ ID NO: 2157384 - RNA, 19 nt, Artificial Sequence
  Description of Artificial Sequence: Synthetic oligonucleotide
cuugcucucuucccuucuu

SEQ ID NO: 2157385 - RNA, 19 nt, Artificial Sequence
  Description of Artificial Sequence: Synthetic oligonucleotide
ccucaaagcuucauacuuu

SEQ ID NO: 2157386 - RNA, 19 nt, Artificial Sequence
  Description of Artificial Sequence: Synthetic oligonucleotide
augcucugacugacucggu

SEQ ID NO: 2157387 - RNA, 19 nt, Artificial Sequence
  Description of Artificial Sequence: Synthetic oligonucleotide
cuccagcugauuucacauu

SEQ ID NO: 2157388 - RNA, 19 nt, Artificial Sequence
  Description of Artificial Sequence: Synthetic oligonucleotide
cugaucuucccgagacguu

SEQ ID NO: 2157389 - RNA, 19 nt, Artificial Sequence
  Description of Artificial Sequence: Synthetic oligonucleotide
cguccuuaagcaggucaug

SEQ ID NO: 2157390 - RNA, 19 nt, Artificial Sequence
  Description of Artificial Sequence: Synthetic oligonucleotide
ggagcacaugugacaucca

SEQ ID NO: 2157391 - RNA, 19 nt, Artificial Sequence
  Description of Artificial Sequence: Synthetic oligonucleotide
cgaggaucguagaucucaa

SEQ ID NO: 2157392 - RNA, 19 nt, Artificial Sequence
  Description of Artificial Sequence: Synthetic oligonucleotide
ucacugcggcuggccggcu

SEQ ID NO: 2157393 - RNA, 19 nt, Artificial Sequence
  Description of Artificial Sequence: Synthetic oligonucleotide
cccuucuuaggcuguugcu

SEQ ID NO: 2157394 - RNA, 19 nt, Artificial Sequence
  Description of Artificial Sequence: Synthetic oligonucleotide
ccggauuccgaggaucgua

SEQ ID NO: 2157395 - RNA, 19 nt, Artificial Sequence
  Description of Artificial Sequence: Synthetic oligonucleotide
ggauugcggggucuuucuu

SEQ ID NO: 2157396 - RNA, 19 nt, Artificial Sequence
  Description of Artificial Sequence: Synthetic oligonucleotide
cagcgccaucuggggcagc

SEQ ID NO: 2157397 - RNA, 19 nt, Artificial Sequence
  Description of Artificial Sequence: Synthetic oligonucleotide
cugucaggcguagcauguu

SEQ ID NO: 2157398 - RNA, 19 nt, Artificial Sequence
  Description of Artificial Sequence: Synthetic oligonucleotide
ccgagacguucccuucuua

SEQ ID NO: 2157399 - RNA, 19 nt, Artificial Sequence
  Description of Artificial Sequence: Synthetic oligonucleotide
cguucccuucuuaggcugu

SEQ ID NO: 2157400 - RNA, 19 nt, Artificial Sequence
  Description of Artificial Sequence: Synthetic oligonucleotide
cacugcggcuggccggcuu

SEQ ID NO: 2157401 - RNA, 19 nt, Artificial Sequence
  Description of Artificial Sequence: Synthetic oligonucleotide
cccgagacguucccuucuu

SEQ ID NO: 2157402 - RNA, 19 nt, Artificial Sequence
  Description of Artificial Sequence: Synthetic oligonucleotide
gcgccaucuggggcagccu

SEQ ID NO: 2157403 - RNA, 19 nt, Artificial Sequence
  Description of Artificial Sequence: Synthetic oligonucleotide
cugcggcuggccggcuuuu

SEQ ID NO: 2157404 - RNA, 19 nt, Artificial Sequence
  Description of Artificial Sequence: Synthetic oligonucleotide
ccgcuucaguugccuugcu

SEQ ID NO: 2157405 - RNA, 19 nt, Artificial Sequence
  Description of Artificial Sequence: Synthetic oligonucleotide
aaaagagcaaaagugagcc

SEQ ID NO: 2157406 - RNA, 19 nt, Artificial Sequence
  Description of Artificial Sequence: Synthetic oligonucleotide
gauaauuccacaucuaacg

SEQ ID NO: 2157407 - RNA, 19 nt, Artificial Sequence
  Description of Artificial Sequence: Synthetic oligonucleotide
ucagcaaugauuuggaggc

SEQ ID NO: 2157408 - RNA, 19 nt, Artificial Sequence
  Description of Artificial Sequence: Synthetic oligonucleotide
ucagacagaguccaaaggg

SEQ ID NO: 2157409 - RNA, 19 nt, Artificial Sequence
  Description of Artificial Sequence: Synthetic oligonucleotide
auaauuccacaucuaacgc

SEQ ID NO: 2157410 - RNA, 19 nt, Artificial Sequence
  Description of Artificial Sequence: Synthetic oligonucleotide
aaguaaccggcuuugagag

SEQ ID NO: 2157411 - RNA, 19 nt, Artificial Sequence
  Description of Artificial Sequence: Synthetic oligonucleotide
ugaaguugaaguaaccggc

SEQ ID NO: 2157412 - RNA, 19 nt, Artificial Sequence
  Description of Artificial Sequence: Synthetic oligonucleotide
aaaagauggccauaggcca

SEQ ID NO: 2157413 - RNA, 19 nt, Artificial Sequence
  Description of Artificial Sequence: Synthetic oligonucleotide
agaaucuccggucaaacuc

SEQ ID NO: 2157414 - RNA, 19 nt, Artificial Sequence
  Description of Artificial Sequence: Synthetic oligonucleotide
ucuuccacccucuugagag

SEQ ID NO: 2157415 - RNA, 19 nt, Artificial Sequence
  Description of Artificial Sequence: Synthetic oligonucleotide
ugacugacagccaacagag

SEQ ID NO: 2157416 - RNA, 19 nt, Artificial Sequence
  Description of Artificial Sequence: Synthetic oligonucleotide
aauuccacaucuaacgccg

SEQ ID NO: 2157417 - RNA, 19 nt, Artificial Sequence
  Description of Artificial Sequence: Synthetic oligonucleotide
uaaucuuccacccucuuga

SEQ ID NO: 2157418 - RNA, 19 nt, Artificial Sequence
  Description of Artificial Sequence: Synthetic oligonucleotide
uuuugugggagaaaagggc

SEQ ID NO: 2157419 - RNA, 19 nt, Artificial Sequence
  Description of Artificial Sequence: Synthetic oligonucleotide
aggucauaacuccaaaggc

SEQ ID NO: 2157420 - RNA, 19 nt, Artificial Sequence
  Description of Artificial Sequence: Synthetic oligonucleotide
aaacaccugguuuuguggg

SEQ ID NO: 2157421 - RNA, 19 nt, Artificial Sequence
  Description of Artificial Sequence: Synthetic oligonucleotide
gaaaagauggccauaggcc

SEQ ID NO: 2157422 - RNA, 19 nt, Artificial Sequence
  Description of Artificial Sequence: Synthetic oligonucleotide
ugauuuggaggccaaaagc

SEQ ID NO: 2157423 - RNA, 19 nt, Artificial Sequence
  Description of Artificial Sequence: Synthetic oligonucleotide
uguugagccgaucacaaca

SEQ ID NO: 2157424 - RNA, 19 nt, Artificial Sequence
  Description of Artificial Sequence: Synthetic oligonucleotide
auggccauaggccaagggc

SEQ ID NO: 2157425 - RNA, 19 nt, Artificial Sequence
  Description of Artificial Sequence: Synthetic oligonucleotide
ugaagucuggaaaacaccu

SEQ ID NO: 2157426 - RNA, 19 nt, Artificial Sequence
  Description of Artificial Sequence: Synthetic oligonucleotide
uagauguuauacugcagcg

SEQ ID NO: 2157427 - RNA, 19 nt, Artificial Sequence
  Description of Artificial Sequence: Synthetic oligonucleotide
gugaaguugaaguaaccgg

SEQ ID NO: 2157428 - RNA, 19 nt, Artificial Sequence
  Description of Artificial Sequence: Synthetic oligonucleotide
ucuaacgccgcacuggagc

SEQ ID NO: 2157429 - RNA, 19 nt, Artificial Sequence
  Description of Artificial Sequence: Synthetic oligonucleotide
gauuuggaggccaaaagcc

SEQ ID NO: 2157430 - RNA, 19 nt, Artificial Sequence
  Description of Artificial Sequence: Synthetic oligonucleotide
uucugcuugacugacagcc

SEQ ID NO: 2157431 - RNA, 19 nt, Artificial Sequence
  Description of Artificial Sequence: Synthetic oligonucleotide
agacauugcuagcaggggc

SEQ ID NO: 2157432 - RNA, 19 nt, Artificial Sequence
  Description of Artificial Sequence: Synthetic oligonucleotide
uguuuguauggcuucagug

SEQ ID NO: 2157433 - RNA, 19 nt, Artificial Sequence
  Description of Artificial Sequence: Synthetic oligonucleotide
uugacugacagccaacaga

SEQ ID NO: 2157434 - RNA, 19 nt, Artificial Sequence
  Description of Artificial Sequence: Synthetic oligonucleotide
guaacauaccaacagcacc

SEQ ID NO: 2157435 - RNA, 19 nt, Artificial Sequence
  Description of Artificial Sequence: Synthetic oligonucleotide
ucuugcuggaauaccacag

SEQ ID NO: 2157436 - RNA, 19 nt, Artificial Sequence
  Description of Artificial Sequence: Synthetic oligonucleotide
gauguuauacugcagcguc

SEQ ID NO: 2157437 - RNA, 19 nt, Artificial Sequence
  Description of Artificial Sequence: Synthetic oligonucleotide
uaauuccacaucuaacgcc

SEQ ID NO: 2157438 - RNA, 19 nt, Artificial Sequence
  Description of Artificial Sequence: Synthetic oligonucleotide
cauuugacacccuaugaag

SEQ ID NO: 2157439 - RNA, 19 nt, Artificial Sequence
  Description of Artificial Sequence: Synthetic oligonucleotide
gaucacaacaggcccaucc

SEQ ID NO: 2157440 - RNA, 19 nt, Artificial Sequence
  Description of Artificial Sequence: Synthetic oligonucleotide
ggaaucgucagauaauucc

SEQ ID NO: 2157441 - RNA, 19 nt, Artificial Sequence
  Description of Artificial Sequence: Synthetic oligonucleotide
gagaacacauuugacaccc

SEQ ID NO: 2157442 - RNA, 19 nt, Artificial Sequence
  Description of Artificial Sequence: Synthetic oligonucleotide
ugaguucaggguaggaucc

SEQ ID NO: 2157443 - RNA, 19 nt, Artificial Sequence
  Description of Artificial Sequence: Synthetic oligonucleotide
uuuguauggcuucagugaa

SEQ ID NO: 2157444 - RNA, 19 nt, Artificial Sequence
  Description of Artificial Sequence: Synthetic oligonucleotide
cauugagcauaccagagac

SEQ ID NO: 2157445 - RNA, 19 nt, Artificial Sequence
  Description of Artificial Sequence: Synthetic oligonucleotide
aacgccagcggccucaucu

SEQ ID NO: 2157446 - RNA, 19 nt, Artificial Sequence
  Description of Artificial Sequence: Synthetic oligonucleotide
aaagccuggcuccuucuuc

SEQ ID NO: 2157447 - RNA, 19 nt, Artificial Sequence
  Description of Artificial Sequence: Synthetic oligonucleotide
gaaguaaccggcuuugaga

SEQ ID NO: 2157448 - RNA, 19 nt, Artificial Sequence
  Description of Artificial Sequence: Synthetic oligonucleotide
uccaaagggucccucgugg

SEQ ID NO: 2157449 - RNA, 19 nt, Artificial Sequence
  Description of Artificial Sequence: Synthetic oligonucleotide
uguucagcaaugauuugga

SEQ ID NO: 2157450 - RNA, 19 nt, Artificial Sequence
  Description of Artificial Sequence: Synthetic oligonucleotide
gaaaacaccugguuuugug

SEQ ID NO: 2157451 - RNA, 19 nt, Artificial Sequence
  Description of Artificial Sequence: Synthetic oligonucleotide
ugcauucaauucuucuugg

SEQ ID NO: 2157452 - RNA, 19 nt, Artificial Sequence
  Description of Artificial Sequence: Synthetic oligonucleotide
agcaggggcaauccggucc

SEQ ID NO: 2157453 - RNA, 19 nt, Artificial Sequence
  Description of Artificial Sequence: Synthetic oligonucleotide
ugagccgaucacaacaggc

SEQ ID NO: 2157454 - RNA, 19 nt, Artificial Sequence
  Description of Artificial Sequence: Synthetic oligonucleotide
agauaauuccacaucuaac

SEQ ID NO: 2157455 - RNA, 19 nt, Artificial Sequence
  Description of Artificial Sequence: Synthetic oligonucleotide
augauuuggaggccaaaag

SEQ ID NO: 2157456 - RNA, 19 nt, Artificial Sequence
  Description of Artificial Sequence: Synthetic oligonucleotide
guuuugugggagaaaaggg

SEQ ID NO: 2157457 - RNA, 19 nt, Artificial Sequence
  Description of Artificial Sequence: Synthetic oligonucleotide
aagcccgccaggcaggcac

SEQ ID NO: 2157458 - RNA, 19 nt, Artificial Sequence
  Description of Artificial Sequence: Synthetic oligonucleotide
ugacauugagcauaccaga

SEQ ID NO: 2157459 - RNA, 19 nt, Artificial Sequence
  Description of Artificial Sequence: Synthetic oligonucleotide
guuuguauggcuucaguga

SEQ ID NO: 2157460 - RNA, 19 nt, Artificial Sequence
  Description of Artificial Sequence: Synthetic oligonucleotide
cuaaaggcaguccuguuug

SEQ ID NO: 2157461 - RNA, 19 nt, Artificial Sequence
  Description of Artificial Sequence: Synthetic oligonucleotide
uuauacugcagcgucaggu

SEQ ID NO: 2157462 - RNA, 19 nt, Artificial Sequence
  Description of Artificial Sequence: Synthetic oligonucleotide
uugccaguaacauaccaac

SEQ ID NO: 2157463 - RNA, 19 nt, Artificial Sequence
  Description of Artificial Sequence: Synthetic oligonucleotide
aagagcaaaagugagccau

SEQ ID NO: 2157464 - RNA, 19 nt, Artificial Sequence
  Description of Artificial Sequence: Synthetic oligonucleotide
gagccaacaccacaaacgc

SEQ ID NO: 2157465 - RNA, 19 nt, Artificial Sequence
  Description of Artificial Sequence: Synthetic oligonucleotide
guagguaauaguugcugag

SEQ ID NO: 2157466 - RNA, 19 nt, Artificial Sequence
  Description of Artificial Sequence: Synthetic oligonucleotide
aguaacauaccaacagcac

SEQ ID NO: 2157467 - RNA, 19 nt, Artificial Sequence
  Description of Artificial Sequence: Synthetic oligonucleotide
uugagcauaccagagacaa

SEQ ID NO: 2157468 - RNA, 19 nt, Artificial Sequence
  Description of Artificial Sequence: Synthetic oligonucleotide
gguuuugugggagaaaagg

SEQ ID NO: 2157469 - RNA, 19 nt, Artificial Sequence
  Description of Artificial Sequence: Synthetic oligonucleotide
uccacagcguaucuguuca

SEQ ID NO: 2157470 - RNA, 19 nt, Artificial Sequence
  Description of Artificial Sequence: Synthetic oligonucleotide
uguuauacugcagcgucag

SEQ ID NO: 2157471 - RNA, 19 nt, Artificial Sequence
  Description of Artificial Sequence: Synthetic oligonucleotide
cuugacauugagcauacca

SEQ ID NO: 2157472 - RNA, 19 nt, Artificial Sequence
  Description of Artificial Sequence: Synthetic oligonucleotide
aguucacauugccaguaac

SEQ ID NO: 2157473 - RNA, 19 nt, Artificial Sequence
  Description of Artificial Sequence: Synthetic oligonucleotide
augaagucuggaaaacacc

SEQ ID NO: 2157474 - RNA, 19 nt, Artificial Sequence
  Description of Artificial Sequence: Synthetic oligonucleotide
acauuugacacccuaugaa

SEQ ID NO: 2157475 - RNA, 19 nt, Artificial Sequence
  Description of Artificial Sequence: Synthetic oligonucleotide
gagccaucaacucaagcac

SEQ ID NO: 2157476 - RNA, 19 nt, Artificial Sequence
  Description of Artificial Sequence: Synthetic oligonucleotide
agcagagggaugccuaugg

SEQ ID NO: 2157477 - RNA, 19 nt, Artificial Sequence
  Description of Artificial Sequence: Synthetic oligonucleotide
cuuggcgggacccucaagc

SEQ ID NO: 2157478 - RNA, 19 nt, Artificial Sequence
  Description of Artificial Sequence: Synthetic oligonucleotide
acauuguagauguuauacu

SEQ ID NO: 2157479 - RNA, 19 nt, Artificial Sequence
  Description of Artificial Sequence: Synthetic oligonucleotide
uuugacacccuaugaaguc

SEQ ID NO: 2157480 - RNA, 19 nt, Artificial Sequence
  Description of Artificial Sequence: Synthetic oligonucleotide
cuugagaggagcugccagg

SEQ ID NO: 2157481 - RNA, 19 nt, Artificial Sequence
  Description of Artificial Sequence: Synthetic oligonucleotide
gagggaugccuauggaagg

SEQ ID NO: 2157482 - RNA, 19 nt, Artificial Sequence
  Description of Artificial Sequence: Synthetic oligonucleotide
cauaccagagacaaugcca

SEQ ID NO: 2157483 - RNA, 19 nt, Artificial Sequence
  Description of Artificial Sequence: Synthetic oligonucleotide
agguaauaguugcugaggu

SEQ ID NO: 2157484 - RNA, 19 nt, Artificial Sequence
  Description of Artificial Sequence: Synthetic oligonucleotide
gacauugagcauaccagag

SEQ ID NO: 2157485 - RNA, 19 nt, Artificial Sequence
  Description of Artificial Sequence: Synthetic oligonucleotide
gaaggcaaggucauaacuc

SEQ ID NO: 2157486 - RNA, 19 nt, Artificial Sequence
  Description of Artificial Sequence: Synthetic oligonucleotide
uaggccaagggccaagaga

SEQ ID NO: 2157487 - RNA, 19 nt, Artificial Sequence
  Description of Artificial Sequence: Synthetic oligonucleotide
cugcauucaauucuucuug

SEQ ID NO: 2157488 - RNA, 19 nt, Artificial Sequence
  Description of Artificial Sequence: Synthetic oligonucleotide
cuugcuggaauaccacagg

SEQ ID NO: 2157489 - RNA, 19 nt, Artificial Sequence
  Description of Artificial Sequence: Synthetic oligonucleotide
gucauaacuccaaaggcug

SEQ ID NO: 2157490 - RNA, 19 nt, Artificial Sequence
  Description of Artificial Sequence: Synthetic oligonucleotide
auugcuagcaggggcaauc

SEQ ID NO: 2157491 - RNA, 19 nt, Artificial Sequence
  Description of Artificial Sequence: Synthetic oligonucleotide
agagggaugccuauggaag

SEQ ID NO: 2157492 - RNA, 19 nt, Artificial Sequence
  Description of Artificial Sequence: Synthetic oligonucleotide
gaaucuccggucaaacucc

SEQ ID NO: 2157493 - RNA, 19 nt, Artificial Sequence
  Description of Artificial Sequence: Synthetic oligonucleotide
auaacuccaaaggcugccc

SEQ ID NO: 2157494 - RNA, 19 nt, Artificial Sequence
  Description of Artificial Sequence: Synthetic oligonucleotide
acaucuaacgccgcacugg

SEQ ID NO: 2157495 - RNA, 19 nt, Artificial Sequence
  Description of Artificial Sequence: Synthetic oligonucleotide
aaagagcaaaagugagcca

SEQ ID NO: 2157496 - RNA, 19 nt, Artificial Sequence
  Description of Artificial Sequence: Synthetic oligonucleotide
agcggcgccacacuccagc

SEQ ID NO: 2157497 - RNA, 19 nt, Artificial Sequence
  Description of Artificial Sequence: Synthetic oligonucleotide
aauaguugcugaggugaag

SEQ ID NO: 2157498 - RNA, 19 nt, Artificial Sequence
  Description of Artificial Sequence: Synthetic oligonucleotide
gcaaaagugagccaucaac

SEQ ID NO: 2157499 - RNA, 19 nt, Artificial Sequence
  Description of Artificial Sequence: Synthetic oligonucleotide
gccaguaacauaccaacag

SEQ ID NO: 2157500 - RNA, 19 nt, Artificial Sequence
  Description of Artificial Sequence: Synthetic oligonucleotide
ugaggugaaguugaaguaa

SEQ ID NO: 2157501 - RNA, 19 nt, Artificial Sequence
  Description of Artificial Sequence: Synthetic oligonucleotide
aaggaaucgucagauaauu

SEQ ID NO: 2157502 - RNA, 19 nt, Artificial Sequence
  Description of Artificial Sequence: Synthetic oligonucleotide
ucaagcacggaaagcccgc

SEQ ID NO: 2157503 - RNA, 19 nt, Artificial Sequence
  Description of Artificial Sequence: Synthetic oligonucleotide
gaaucgucagauaauucca

SEQ ID NO: 2157504 - RNA, 19 nt, Artificial Sequence
  Description of Artificial Sequence: Synthetic oligonucleotide
uccugggccaaguagguaa

SEQ ID NO: 2157505 - RNA, 19 nt, Artificial Sequence
  Description of Artificial Sequence: Synthetic oligonucleotide
aaucuccggucaaacuccc

SEQ ID NO: 2157506 - RNA, 19 nt, Artificial Sequence
  Description of Artificial Sequence: Synthetic oligonucleotide
auaguugcugaggugaagu

SEQ ID NO: 2157507 - RNA, 19 nt, Artificial Sequence
  Description of Artificial Sequence: Synthetic oligonucleotide
ugacacccuaugaagucug

SEQ ID NO: 2157508 - RNA, 19 nt, Artificial Sequence
  Description of Artificial Sequence: Synthetic oligonucleotide
ucgucagauaauuccacau

SEQ ID NO: 2157509 - RNA, 19 nt, Artificial Sequence
  Description of Artificial Sequence: Synthetic oligonucleotide
guaucguauuuccucuugc

SEQ ID NO: 2157510 - RNA, 19 nt, Artificial Sequence
  Description of Artificial Sequence: Synthetic oligonucleotide
augccuauggaaggcaagg

SEQ ID NO: 2157511 - RNA, 19 nt, Artificial Sequence
  Description of Artificial Sequence: Synthetic oligonucleotide
uugagccgaucacaacagg

SEQ ID NO: 2157512 - RNA, 19 nt, Artificial Sequence
  Description of Artificial Sequence: Synthetic oligonucleotide
aacaccugguuuuguggga

SEQ ID NO: 2157513 - RNA, 19 nt, Artificial Sequence
  Description of Artificial Sequence: Synthetic oligonucleotide
cauaacuccaaaggcugcc

SEQ ID NO: 2157514 - RNA, 19 nt, Artificial Sequence
  Description of Artificial Sequence: Synthetic oligonucleotide
gacagaguccaaagggucc

SEQ ID NO: 2157515 - RNA, 19 nt, Artificial Sequence
  Description of Artificial Sequence: Synthetic oligonucleotide
auuugacacccuaugaagu

SEQ ID NO: 2157516 - RNA, 19 nt, Artificial Sequence
  Description of Artificial Sequence: Synthetic oligonucleotide
gagacauugcuagcagggg

SEQ ID NO: 2157517 - RNA, 19 nt, Artificial Sequence
  Description of Artificial Sequence: Synthetic oligonucleotide
acccucaagccccaaagcu

SEQ ID NO: 2157518 - RNA, 19 nt, Artificial Sequence
  Description of Artificial Sequence: Synthetic oligonucleotide
ugggccaaguagguaauag

SEQ ID NO: 2157519 - RNA, 19 nt, Artificial Sequence
  Description of Artificial Sequence: Synthetic oligonucleotide
agcguaucuguucagcaau

SEQ ID NO: 2157520 - RNA, 19 nt, Artificial Sequence
  Description of Artificial Sequence: Synthetic oligonucleotide
cuaacgccgcacuggagcc

SEQ ID NO: 2157521 - RNA, 19 nt, Artificial Sequence
  Description of Artificial Sequence: Synthetic oligonucleotide
acagcguaucuguucagca

SEQ ID NO: 2157522 - RNA, 19 nt, Artificial Sequence
  Description of Artificial Sequence: Synthetic oligonucleotide
agcauaccagagacaaugc

SEQ ID NO: 2157523 - RNA, 19 nt, Artificial Sequence
  Description of Artificial Sequence: Synthetic oligonucleotide
uccaaaggcugcccagucc

SEQ ID NO: 2157524 - RNA, 19 nt, Artificial Sequence
  Description of Artificial Sequence: Synthetic oligonucleotide
ugccaguaacauaccaaca

SEQ ID NO: 2157525 - RNA, 19 nt, Artificial Sequence
  Description of Artificial Sequence: Synthetic oligonucleotide
aucacaacaggcccauccu

SEQ ID NO: 2157526 - RNA, 19 nt, Artificial Sequence
  Description of Artificial Sequence: Synthetic oligonucleotide
aagugagccaucaacucaa

SEQ ID NO: 2157527 - RNA, 19 nt, Artificial Sequence
  Description of Artificial Sequence: Synthetic oligonucleotide
uacugcagcgucagguccc

SEQ ID NO: 2157528 - RNA, 19 nt, Artificial Sequence
  Description of Artificial Sequence: Synthetic oligonucleotide
acucaagcacggaaagccc

SEQ ID NO: 2157529 - RNA, 19 nt, Artificial Sequence
  Description of Artificial Sequence: Synthetic oligonucleotide
agcacggaaagcccgccag

SEQ ID NO: 2157530 - RNA, 19 nt, Artificial Sequence
  Description of Artificial Sequence: Synthetic oligonucleotide
gagccgaucacaacaggcc

SEQ ID NO: 2157531 - RNA, 19 nt, Artificial Sequence
  Description of Artificial Sequence: Synthetic oligonucleotide
aucgucagauaauuccaca

SEQ ID NO: 2157532 - RNA, 19 nt, Artificial Sequence
  Description of Artificial Sequence: Synthetic oligonucleotide
aaguugaaguaaccggcuu

SEQ ID NO: 2157533 - RNA, 19 nt, Artificial Sequence
  Description of Artificial Sequence: Synthetic oligonucleotide
ucaagccccaaagcugugg

SEQ ID NO: 2157534 - RNA, 19 nt, Artificial Sequence
  Description of Artificial Sequence: Synthetic oligonucleotide
uauuuccucuugcuggaau

SEQ ID NO: 2157535 - RNA, 19 nt, Artificial Sequence
  Description of Artificial Sequence: Synthetic oligonucleotide
aguugaaguaaccggcuuu

SEQ ID NO: 2157536 - RNA, 19 nt, Artificial Sequence
  Description of Artificial Sequence: Synthetic oligonucleotide
cacggugugggagacauug

SEQ ID NO: 2157537 - RNA, 19 nt, Artificial Sequence
  Description of Artificial Sequence: Synthetic oligonucleotide
acccuaugaagucuggaaa

SEQ ID NO: 2157538 - RNA, 19 nt, Artificial Sequence
  Description of Artificial Sequence: Synthetic oligonucleotide
ugcuagcaggggcaauccg

SEQ ID NO: 2157539 - RNA, 19 nt, Artificial Sequence
  Description of Artificial Sequence: Synthetic oligonucleotide
aguaaccggcuuugagagg

SEQ ID NO: 2157540 - RNA, 19 nt, Artificial Sequence
  Description of Artificial Sequence: Synthetic oligonucleotide
guugagccgaucacaacag

SEQ ID NO: 2157541 - RNA, 19 nt, Artificial Sequence
  Description of Artificial Sequence: Synthetic oligonucleotide
ucugcuugacugacagcca

SEQ ID NO: 2157542 - RNA, 19 nt, Artificial Sequence
  Description of Artificial Sequence: Synthetic oligonucleotide
gaggugaaguugaaguaac

SEQ ID NO: 2157543 - RNA, 19 nt, Artificial Sequence
  Description of Artificial Sequence: Synthetic oligonucleotide
aggagcugccaggaaaugg

SEQ ID NO: 2157544 - RNA, 19 nt, Artificial Sequence
  Description of Artificial Sequence: Synthetic oligonucleotide
aacacugcauucaauucuu

SEQ ID NO: 2157545 - RNA, 19 nt, Artificial Sequence
  Description of Artificial Sequence: Synthetic oligonucleotide
uugagcggcgccacacucc

SEQ ID NO: 2157546 - RNA, 19 nt, Artificial Sequence
  Description of Artificial Sequence: Synthetic oligonucleotide
cagauaauuccacaucuaa

SEQ ID NO: 2157547 - RNA, 19 nt, Artificial Sequence
  Description of Artificial Sequence: Synthetic oligonucleotide
cuugacugacagccaacag

SEQ ID NO: 2157548 - RNA, 19 nt, Artificial Sequence
  Description of Artificial Sequence: Synthetic oligonucleotide
aaggcugcccaguccagaa

SEQ ID NO: 2157549 - RNA, 19 nt, Artificial Sequence
  Description of Artificial Sequence: Synthetic oligonucleotide
agauguuauacugcagcgu

SEQ ID NO: 2157550 - RNA, 19 nt, Artificial Sequence
  Description of Artificial Sequence: Synthetic oligonucleotide
aggcaguccuguuuguaug

SEQ ID NO: 2157551 - RNA, 19 nt, Artificial Sequence
  Description of Artificial Sequence: Synthetic oligonucleotide
uugacacccuaugaagucu

SEQ ID NO: 2157552 - RNA, 19 nt, Artificial Sequence
  Description of Artificial Sequence: Synthetic oligonucleotide
auaccagagacaaugccaa

SEQ ID NO: 2157553 - RNA, 19 nt, Artificial Sequence
  Description of Artificial Sequence: Synthetic oligonucleotide
uuccacaucuaacgccgca

SEQ ID NO: 2157554 - RNA, 19 nt, Artificial Sequence
  Description of Artificial Sequence: Synthetic oligonucleotide
uuggcgggacccucaagcc

SEQ ID NO: 2157555 - RNA, 19 nt, Artificial Sequence
  Description of Artificial Sequence: Synthetic oligonucleotide
ccaguaacauaccaacagc

SEQ ID NO: 2157556 - RNA, 19 nt, Artificial Sequence
  Description of Artificial Sequence: Synthetic oligonucleotide
ucaggucccgcccuuccac

SEQ ID NO: 2157557 - RNA, 19 nt, Artificial Sequence
  Description of Artificial Sequence: Synthetic oligonucleotide
accggcuuugagaggacgc

SEQ ID NO: 2157558 - RNA, 19 nt, Artificial Sequence
  Description of Artificial Sequence: Synthetic oligonucleotide
gacccucaagccccaaagc

SEQ ID NO: 2157559 - RNA, 19 nt, Artificial Sequence
  Description of Artificial Sequence: Synthetic oligonucleotide
aaccggcuuugagaggacg

SEQ ID NO: 2157560 - RNA, 19 nt, Artificial Sequence
  Description of Artificial Sequence: Synthetic oligonucleotide
aguccaaagggucccucgu

SEQ ID NO: 2157561 - RNA, 19 nt, Artificial Sequence
  Description of Artificial Sequence: Synthetic oligonucleotide
agcaaugauuuggaggcca

SEQ ID NO: 2157562 - RNA, 19 nt, Artificial Sequence
  Description of Artificial Sequence: Synthetic oligonucleotide
uuccacagcguaucuguuc

SEQ ID NO: 2157563 - RNA, 19 nt, Artificial Sequence
  Description of Artificial Sequence: Synthetic oligonucleotide
ugggccaggauuccucccu

SEQ ID NO: 2157564 - RNA, 19 nt, Artificial Sequence
  Description of Artificial Sequence: Synthetic oligonucleotide
aucaacucaagcacggaaa

SEQ ID NO: 2157565 - RNA, 19 nt, Artificial Sequence
  Description of Artificial Sequence: Synthetic oligonucleotide
aggccaagggccaagagaa

SEQ ID NO: 2157566 - RNA, 19 nt, Artificial Sequence
  Description of Artificial Sequence: Synthetic oligonucleotide
ggcaguccuguuuguaugg

SEQ ID NO: 2157567 - RNA, 19 nt, Artificial Sequence
  Description of Artificial Sequence: Synthetic oligonucleotide
gguaucguauuuccucuug

SEQ ID NO: 2157568 - RNA, 19 nt, Artificial Sequence
  Description of Artificial Sequence: Synthetic oligonucleotide
aggaaucgucagauaauuc

SEQ ID NO: 2157569 - RNA, 19 nt, Artificial Sequence
  Description of Artificial Sequence: Synthetic oligonucleotide
agccccacggccucaucgg

SEQ ID NO: 2157570 - RNA, 19 nt, Artificial Sequence
  Description of Artificial Sequence: Synthetic oligonucleotide
ccuauggaaggcaagguca

SEQ ID NO: 2157571 - RNA, 19 nt, Artificial Sequence
  Description of Artificial Sequence: Synthetic oligonucleotide
uccacaucuaacgccgcac

SEQ ID NO: 2157572 - RNA, 19 nt, Artificial Sequence
  Description of Artificial Sequence: Synthetic oligonucleotide
auaggccaagggccaagag

SEQ ID NO: 2157573 - RNA, 19 nt, Artificial Sequence
  Description of Artificial Sequence: Synthetic oligonucleotide
cauucugguugaguucagg

SEQ ID NO: 2157574 - RNA, 19 nt, Artificial Sequence
  Description of Artificial Sequence: Synthetic oligonucleotide
uggcuaaaggcaguccugu

SEQ ID NO: 2157575 - RNA, 19 nt, Artificial Sequence
  Description of Artificial Sequence: Synthetic oligonucleotide
ugcuugacugacagccaac

SEQ ID NO: 2157576 - RNA, 19 nt, Artificial Sequence
  Description of Artificial Sequence: Synthetic oligonucleotide
agccaacaccacaaacgcc

SEQ ID NO: 2157577 - RNA, 19 nt, Artificial Sequence
  Description of Artificial Sequence: Synthetic oligonucleotide
accuugagcggcgccacac

SEQ ID NO: 2157578 - RNA, 19 nt, Artificial Sequence
  Description of Artificial Sequence: Synthetic oligonucleotide
gcuagcaggggcaauccgg

SEQ ID NO: 2157579 - RNA, 19 nt, Artificial Sequence
  Description of Artificial Sequence: Synthetic oligonucleotide
gguaggauccaggaaaaga

SEQ ID NO: 2157580 - RNA, 19 nt, Artificial Sequence
  Description of Artificial Sequence: Synthetic oligonucleotide
aagcacggaaagcccgcca

SEQ ID NO: 2157581 - RNA, 19 nt, Artificial Sequence
  Description of Artificial Sequence: Synthetic oligonucleotide
caaagggucccucguggac

SEQ ID NO: 2157582 - RNA, 19 nt, Artificial Sequence
  Description of Artificial Sequence: Synthetic oligonucleotide
cuaugaagucuggaaaaca

SEQ ID NO: 2157583 - RNA, 19 nt, Artificial Sequence
  Description of Artificial Sequence: Synthetic oligonucleotide
acaccugguuuugugggag

SEQ ID NO: 2157584 - RNA, 19 nt, Artificial Sequence
  Description of Artificial Sequence: Synthetic oligonucleotide
gucccgcccuuccacagcg

SEQ ID NO: 2157585 - RNA, 19 nt, Artificial Sequence
  Description of Artificial Sequence: Synthetic oligonucleotide
cacagcguaucuguucagc

SEQ ID NO: 2157586 - RNA, 19 nt, Artificial Sequence
  Description of Artificial Sequence: Synthetic oligonucleotide
gcauaccagagacaaugcc

SEQ ID NO: 2157587 - RNA, 19 nt, Artificial Sequence
  Description of Artificial Sequence: Synthetic oligonucleotide
acagcaccuuggcgggacc

SEQ ID NO: 2157588 - RNA, 19 nt, Artificial Sequence
  Description of Artificial Sequence: Synthetic oligonucleotide
guaggauccaggaaaagau

SEQ ID NO: 2157589 - RNA, 19 nt, Artificial Sequence
  Description of Artificial Sequence: Synthetic oligonucleotide
ugugggagaaaagggccaa

SEQ ID NO: 2157590 - RNA, 19 nt, Artificial Sequence
  Description of Artificial Sequence: Synthetic oligonucleotide
cuggagcccacauuguaga

SEQ ID NO: 2157591 - RNA, 19 nt, Artificial Sequence
  Description of Artificial Sequence: Synthetic oligonucleotide
uuguugagccgaucacaac

SEQ ID NO: 2157592 - RNA, 19 nt, Artificial Sequence
  Description of Artificial Sequence: Synthetic oligonucleotide
gagcaaaagugagccauca

SEQ ID NO: 2157593 - RNA, 19 nt, Artificial Sequence
  Description of Artificial Sequence: Synthetic oligonucleotide
cugcauucugguugaguuc

SEQ ID NO: 2157594 - RNA, 19 nt, Artificial Sequence
  Description of Artificial Sequence: Synthetic oligonucleotide
cagccccacggccucaucg

SEQ ID NO: 2157595 - RNA, 19 nt, Artificial Sequence
  Description of Artificial Sequence: Synthetic oligonucleotide
cugguuuugugggagaaaa

SEQ ID NO: 2157596 - RNA, 19 nt, Artificial Sequence
  Description of Artificial Sequence: Synthetic oligonucleotide
caucaacucaagcacggaa

SEQ ID NO: 2157597 - RNA, 19 nt, Artificial Sequence
  Description of Artificial Sequence: Synthetic oligonucleotide
uuccacccucuugagagga

SEQ ID NO: 2157598 - RNA, 19 nt, Artificial Sequence
  Description of Artificial Sequence: Synthetic oligonucleotide
cacggaaagcccgccaggc

SEQ ID NO: 2157599 - RNA, 19 nt, Artificial Sequence
  Description of Artificial Sequence: Synthetic oligonucleotide
ugagcauaccagagacaau

SEQ ID NO: 2157600 - RNA, 19 nt, Artificial Sequence
  Description of Artificial Sequence: Synthetic oligonucleotide
auuccacaucuaacgccgc

SEQ ID NO: 2157601 - RNA, 19 nt, Artificial Sequence
  Description of Artificial Sequence: Synthetic oligonucleotide
cuugagcggcgccacacuc

SEQ ID NO: 2157602 - RNA, 19 nt, Artificial Sequence
  Description of Artificial Sequence: Synthetic oligonucleotide
agcaaaagugagccaucaa

SEQ ID NO: 2157603 - RNA, 19 nt, Artificial Sequence
  Description of Artificial Sequence: Synthetic oligonucleotide
gaaguugaaguaaccggcu

SEQ ID NO: 2157604 - RNA, 19 nt, Artificial Sequence
  Description of Artificial Sequence: Synthetic oligonucleotide
uugaaguaaccggcuuuga

SEQ ID NO: 2157605 - RNA, 19 nt, Artificial Sequence
  Description of Artificial Sequence: Synthetic oligonucleotide
uccacccucuugagaggag

SEQ ID NO: 2157606 - RNA, 19 nt, Artificial Sequence
  Description of Artificial Sequence: Synthetic oligonucleotide
ccaaggaaacacugcauuc

SEQ ID NO: 2157607 - RNA, 19 nt, Artificial Sequence
  Description of Artificial Sequence: Synthetic oligonucleotide
caucuaacgccgcacugga

SEQ ID NO: 2157608 - RNA, 19 nt, Artificial Sequence
  Description of Artificial Sequence: Synthetic oligonucleotide
agaggacgcaggaccacgg

SEQ ID NO: 2157609 - RNA, 19 nt, Artificial Sequence
  Description of Artificial Sequence: Synthetic oligonucleotide
ggcgccacacuccagcccc

SEQ ID NO: 2157610 - RNA, 19 nt, Artificial Sequence
  Description of Artificial Sequence: Synthetic oligonucleotide
caacagagccaacaccaca

SEQ ID NO: 2157611 - RNA, 19 nt, Artificial Sequence
  Description of Artificial Sequence: Synthetic oligonucleotide
gacgcaggaccacggugug

SEQ ID NO: 2157612 - RNA, 19 nt, Artificial Sequence
  Description of Artificial Sequence: Synthetic oligonucleotide
aagggccaagagaacacau

SEQ ID NO: 2157613 - RNA, 19 nt, Artificial Sequence
  Description of Artificial Sequence: Synthetic oligonucleotide
aacgccgcacuggagccca

SEQ ID NO: 2157614 - RNA, 19 nt, Artificial Sequence
  Description of Artificial Sequence: Synthetic oligonucleotide
cagagggaugccuauggaa

SEQ ID NO: 2157615 - RNA, 19 nt, Artificial Sequence
  Description of Artificial Sequence: Synthetic oligonucleotide
acuugacauugagcauacc

SEQ ID NO: 2157616 - RNA, 19 nt, Artificial Sequence
  Description of Artificial Sequence: Synthetic oligonucleotide
uaguugcugaggugaaguu

SEQ ID NO: 2157617 - RNA, 19 nt, Artificial Sequence
  Description of Artificial Sequence: Synthetic oligonucleotide
auugagcauaccagagaca

SEQ ID NO: 2157618 - RNA, 19 nt, Artificial Sequence
  Description of Artificial Sequence: Synthetic oligonucleotide
gcccaguccagaaaauggg

SEQ ID NO: 2157619 - RNA, 19 nt, Artificial Sequence
  Description of Artificial Sequence: Synthetic oligonucleotide
accacggugugggagacau

SEQ ID NO: 2157620 - RNA, 19 nt, Artificial Sequence
  Description of Artificial Sequence: Synthetic oligonucleotide
guggcuaaaggcaguccug

SEQ ID NO: 2157621 - RNA, 19 nt, Artificial Sequence
  Description of Artificial Sequence: Synthetic oligonucleotide
cccaagaguucacauugcc

SEQ ID NO: 2157622 - RNA, 19 nt, Artificial Sequence
  Description of Artificial Sequence: Synthetic oligonucleotide
auguuauacugcagcguca

SEQ ID NO: 2157623 - RNA, 19 nt, Artificial Sequence
  Description of Artificial Sequence: Synthetic oligonucleotide
agcacuuguugagccgauc

SEQ ID NO: 2157624 - RNA, 19 nt, Artificial Sequence
  Description of Artificial Sequence: Synthetic oligonucleotide
ggucauaacuccaaaggcu

SEQ ID NO: 2157625 - RNA, 19 nt, Artificial Sequence
  Description of Artificial Sequence: Synthetic oligonucleotide
cugcccaguccagaaaaug

SEQ ID NO: 2157626 - RNA, 19 nt, Artificial Sequence
  Description of Artificial Sequence: Synthetic oligonucleotide
gaguucacauugccaguaa

SEQ ID NO: 2157627 - RNA, 19 nt, Artificial Sequence
  Description of Artificial Sequence: Synthetic oligonucleotide
acggugugggagacauugc

SEQ ID NO: 2157628 - RNA, 19 nt, Artificial Sequence
  Description of Artificial Sequence: Synthetic oligonucleotide
ccaggauuccucccugucc

SEQ ID NO: 2157629 - RNA, 19 nt, Artificial Sequence
  Description of Artificial Sequence: Synthetic oligonucleotide
acggaaagcccgccaggca

SEQ ID NO: 2157630 - RNA, 19 nt, Artificial Sequence
  Description of Artificial Sequence: Synthetic oligonucleotide
gaaggcagggaggcucgcc

SEQ ID NO: 2157631 - RNA, 19 nt, Artificial Sequence
  Description of Artificial Sequence: Synthetic oligonucleotide
ggagaaucuccggucaaac

SEQ ID NO: 2157632 - RNA, 19 nt, Artificial Sequence
  Description of Artificial Sequence: Synthetic oligonucleotide
ccuaugaagucuggaaaac

SEQ ID NO: 2157633 - RNA, 19 nt, Artificial Sequence
  Description of Artificial Sequence: Synthetic oligonucleotide
aaacgccagcggccucauc

SEQ ID NO: 2157634 - RNA, 19 nt, Artificial Sequence
  Description of Artificial Sequence: Synthetic oligonucleotide
ccaagggccaagagaacac

SEQ ID NO: 2157635 - RNA, 19 nt, Artificial Sequence
  Description of Artificial Sequence: Synthetic oligonucleotide
caauccggucccacuugac

SEQ ID NO: 2157636 - RNA, 19 nt, Artificial Sequence
  Description of Artificial Sequence: Synthetic oligonucleotide
gccuauggaaggcaagguc

SEQ ID NO: 2157637 - RNA, 19 nt, Artificial Sequence
  Description of Artificial Sequence: Synthetic oligonucleotide
ucccuguccaggagcacuu

SEQ ID NO: 2157638 - RNA, 19 nt, Artificial Sequence
  Description of Artificial Sequence: Synthetic oligonucleotide
cuccaaaggcugcccaguc

SEQ ID NO: 2157639 - RNA, 19 nt, Artificial Sequence
  Description of Artificial Sequence: Synthetic oligonucleotide
ggaaggcaaggucauaacu

SEQ ID NO: 2157640 - RNA, 19 nt, Artificial Sequence
  Description of Artificial Sequence: Synthetic oligonucleotide
uaccagagacaaugccaaa

SEQ ID NO: 2157641 - RNA, 19 nt, Artificial Sequence
  Description of Artificial Sequence: Synthetic oligonucleotide
uggagcccacauuguagau

SEQ ID NO: 2157642 - RNA, 19 nt, Artificial Sequence
  Description of Artificial Sequence: Synthetic oligonucleotide
cacggccucaucggcagcc

SEQ ID NO: 2157643 - RNA, 19 nt, Artificial Sequence
  Description of Artificial Sequence: Synthetic oligonucleotide
uaaccggcuuugagaggac

SEQ ID NO: 2157644 - RNA, 19 nt, Artificial Sequence
  Description of Artificial Sequence: Synthetic oligonucleotide
ggaaagcccgccaggcagg

SEQ ID NO: 2157645 - RNA, 19 nt, Artificial Sequence
  Description of Artificial Sequence: Synthetic oligonucleotide
caaguagguaauaguugcu

SEQ ID NO: 2157646 - RNA, 19 nt, Artificial Sequence
  Description of Artificial Sequence: Synthetic oligonucleotide
caagcacggaaagcccgcc

SEQ ID NO: 2157647 - RNA, 19 nt, Artificial Sequence
  Description of Artificial Sequence: Synthetic oligonucleotide
acacccuaugaagucugga

SEQ ID NO: 2157648 - RNA, 19 nt, Artificial Sequence
  Description of Artificial Sequence: Synthetic oligonucleotide
agccccaaagcuguggcua

SEQ ID NO: 2157649 - RNA, 19 nt, Artificial Sequence
  Description of Artificial Sequence: Synthetic oligonucleotide
agauggccauaggccaagg

SEQ ID NO: 2157650 - RNA, 19 nt, Artificial Sequence
  Description of Artificial Sequence: Synthetic oligonucleotide
aggggcaauccggucccac

SEQ ID NO: 2157651 - RNA, 19 nt, Artificial Sequence
  Description of Artificial Sequence: Synthetic oligonucleotide
cuagcaggggcaauccggu

SEQ ID NO: 2157652 - RNA, 19 nt, Artificial Sequence
  Description of Artificial Sequence: Synthetic oligonucleotide
cagcguaucuguucagcaa

SEQ ID NO: 2157653 - RNA, 19 nt, Artificial Sequence
  Description of Artificial Sequence: Synthetic oligonucleotide
ggccaagagaacacauuug

SEQ ID NO: 2157654 - RNA, 19 nt, Artificial Sequence
  Description of Artificial Sequence: Synthetic oligonucleotide
uauggaaggcaaggucaua

SEQ ID NO: 2157655 - RNA, 19 nt, Artificial Sequence
  Description of Artificial Sequence: Synthetic oligonucleotide
agugagccaucaacucaag

SEQ ID NO: 2157656 - RNA, 19 nt, Artificial Sequence
  Description of Artificial Sequence: Synthetic oligonucleotide
gugucagacagaguccaaa

SEQ ID NO: 2157657 - RNA, 19 nt, Artificial Sequence
  Description of Artificial Sequence: Synthetic oligonucleotide
aggguaggauccaggaaaa

SEQ ID NO: 2157658 - RNA, 19 nt, Artificial Sequence
  Description of Artificial Sequence: Synthetic oligonucleotide
cagcaaugauuuggaggcc

SEQ ID NO: 2157659 - RNA, 19 nt, Artificial Sequence
  Description of Artificial Sequence: Synthetic oligonucleotide
ggcaauccggucccacuug

SEQ ID NO: 2157660 - RNA, 19 nt, Artificial Sequence
  Description of Artificial Sequence: Synthetic oligonucleotide
uaacgccgcacuggagccc

SEQ ID NO: 2157661 - RNA, 19 nt, Artificial Sequence
  Description of Artificial Sequence: Synthetic oligonucleotide
gcacggaaagcccgccagg

SEQ ID NO: 2157662 - RNA, 19 nt, Artificial Sequence
  Description of Artificial Sequence: Synthetic oligonucleotide
cucaagccccaaagcugug

SEQ ID NO: 2157663 - RNA, 19 nt, Artificial Sequence
  Description of Artificial Sequence: Synthetic oligonucleotide
ccaggcaggcaccuugagc

SEQ ID NO: 2157664 - RNA, 19 nt, Artificial Sequence
  Description of Artificial Sequence: Synthetic oligonucleotide
cccuaugaagucuggaaaa

SEQ ID NO: 2157665 - RNA, 19 nt, Artificial Sequence
  Description of Artificial Sequence: Synthetic oligonucleotide
aggcaaggucauaacucca

SEQ ID NO: 2157666 - RNA, 19 nt, Artificial Sequence
  Description of Artificial Sequence: Synthetic oligonucleotide
gcuugacugacagccaaca

SEQ ID NO: 2157667 - RNA, 19 nt, Artificial Sequence
  Description of Artificial Sequence: Synthetic oligonucleotide
caagggccaagagaacaca

SEQ ID NO: 2157668 - RNA, 19 nt, Artificial Sequence
  Description of Artificial Sequence: Synthetic oligonucleotide
gggguaucguauuuccucu

SEQ ID NO: 2157669 - RNA, 19 nt, Artificial Sequence
  Description of Artificial Sequence: Synthetic oligonucleotide
acauugcuagcaggggcaa

SEQ ID NO: 2157670 - RNA, 19 nt, Artificial Sequence
  Description of Artificial Sequence: Synthetic oligonucleotide
aucuaacgccgcacuggag

SEQ ID NO: 2157671 - RNA, 19 nt, Artificial Sequence
  Description of Artificial Sequence: Synthetic oligonucleotide
gggaggcucgcccaagcuc

SEQ ID NO: 2157672 - RNA, 19 nt, Artificial Sequence
  Description of Artificial Sequence: Synthetic oligonucleotide
gcggccucaucuuuggaaa

SEQ ID NO: 2157673 - RNA, 19 nt, Artificial Sequence
  Description of Artificial Sequence: Synthetic oligonucleotide
ugcccucugcauucugguu

SEQ ID NO: 2157674 - RNA, 19 nt, Artificial Sequence
  Description of Artificial Sequence: Synthetic oligonucleotide
aggagcagagggaugccua

SEQ ID NO: 2157675 - RNA, 19 nt, Artificial Sequence
  Description of Artificial Sequence: Synthetic oligonucleotide
acgcaggaccacggugugg

SEQ ID NO: 2157676 - RNA, 19 nt, Artificial Sequence
  Description of Artificial Sequence: Synthetic oligonucleotide
agggccaagagaacacauu

SEQ ID NO: 2157677 - RNA, 19 nt, Artificial Sequence
  Description of Artificial Sequence: Synthetic oligonucleotide
cauaggccaagggccaaga

SEQ ID NO: 2157678 - RNA, 19 nt, Artificial Sequence
  Description of Artificial Sequence: Synthetic oligonucleotide
ccaggagcacuuguugagc

SEQ ID NO: 2157679 - RNA, 19 nt, Artificial Sequence
  Description of Artificial Sequence: Synthetic oligonucleotide
cagcaccuuggcgggaccc

SEQ ID NO: 2157680 - RNA, 19 nt, Artificial Sequence
  Description of Artificial Sequence: Synthetic oligonucleotide
ggcaaggucauaacuccaa

SEQ ID NO: 2157681 - RNA, 19 nt, Artificial Sequence
  Description of Artificial Sequence: Synthetic oligonucleotide
agcaccuuggcgggacccu

SEQ ID NO: 2157682 - RNA, 19 nt, Artificial Sequence
  Description of Artificial Sequence: Synthetic oligonucleotide
gcaauccggucccacuuga

SEQ ID NO: 2157683 - RNA, 19 nt, Artificial Sequence
  Description of Artificial Sequence: Synthetic oligonucleotide
gcuaaaggcaguccuguuu

SEQ ID NO: 2157684 - RNA, 19 nt, Artificial Sequence
  Description of Artificial Sequence: Synthetic oligonucleotide
agaacacauuugacacccu

SEQ ID NO: 2157685 - RNA, 19 nt, Artificial Sequence
  Description of Artificial Sequence: Synthetic oligonucleotide
agcuguggcuaaaggcagu

SEQ ID NO: 2157686 - RNA, 19 nt, Artificial Sequence
  Description of Artificial Sequence: Synthetic oligonucleotide
ccccaagaguucacauugc

SEQ ID NO: 2157687 - RNA, 19 nt, Artificial Sequence
  Description of Artificial Sequence: Synthetic oligonucleotide
gcucgcccaagcucccagg

SEQ ID NO: 2157688 - RNA, 19 nt, Artificial Sequence
  Description of Artificial Sequence: Synthetic oligonucleotide
ggcucgcccaagcucccag

SEQ ID NO: 2157689 - RNA, 19 nt, Artificial Sequence
  Description of Artificial Sequence: Synthetic oligonucleotide
gcguaucuguucagcaaug

SEQ ID NO: 2157690 - RNA, 19 nt, Artificial Sequence
  Description of Artificial Sequence: Synthetic oligonucleotide
aaagcccgccaggcaggca

SEQ ID NO: 2157691 - RNA, 19 nt, Artificial Sequence
  Description of Artificial Sequence: Synthetic oligonucleotide
accuuggcgggacccucaa

SEQ ID NO: 2157692 - RNA, 19 nt, Artificial Sequence
  Description of Artificial Sequence: Synthetic oligonucleotide
agcccgccaggcaggcacc

SEQ ID NO: 2157693 - RNA, 19 nt, Artificial Sequence
  Description of Artificial Sequence: Synthetic oligonucleotide
ggccaaguagguaauaguu

SEQ ID NO: 2157694 - RNA, 19 nt, Artificial Sequence
  Description of Artificial Sequence: Synthetic oligonucleotide
gcaggcaccuugagcggcg

SEQ ID NO: 2157695 - RNA, 19 nt, Artificial Sequence
  Description of Artificial Sequence: Synthetic oligonucleotide
gcaguccuguuuguauggc

SEQ ID NO: 2157696 - RNA, 19 nt, Artificial Sequence
  Description of Artificial Sequence: Synthetic oligonucleotide
caggcccauccuccugggc

SEQ ID NO: 2157697 - RNA, 19 nt, Artificial Sequence
  Description of Artificial Sequence: Synthetic oligonucleotide
ccacuugacauugagcaua

SEQ ID NO: 2157698 - RNA, 19 nt, Artificial Sequence
  Description of Artificial Sequence: Synthetic oligonucleotide
gcuguggcuaaaggcaguc

SEQ ID NO: 2157699 - RNA, 19 nt, Artificial Sequence
  Description of Artificial Sequence: Synthetic oligonucleotide
gggccaaguagguaauagu

SEQ ID NO: 2157700 - RNA, 19 nt, Artificial Sequence
  Description of Artificial Sequence: Synthetic oligonucleotide
ccacccucuugagaggagc

SEQ ID NO: 2157701 - RNA, 19 nt, Artificial Sequence
  Description of Artificial Sequence: Synthetic oligonucleotide
acgccagcggccucaucuu

SEQ ID NO: 2157702 - RNA, 19 nt, Artificial Sequence
  Description of Artificial Sequence: Synthetic oligonucleotide
gaggcucgcccaagcuccc

SEQ ID NO: 2157703 - RNA, 19 nt, Artificial Sequence
  Description of Artificial Sequence: Synthetic oligonucleotide
gaggacgcaggaccacggu

SEQ ID NO: 2157704 - RNA, 19 nt, Artificial Sequence
  Description of Artificial Sequence: Synthetic oligonucleotide
caccugguuuugugggaga

SEQ ID NO: 2157705 - RNA, 19 nt, Artificial Sequence
  Description of Artificial Sequence: Synthetic oligonucleotide
ggggaaggaaucgucagau

SEQ ID NO: 2157706 - RNA, 19 nt, Artificial Sequence
  Description of Artificial Sequence: Synthetic oligonucleotide
ggucccgcccuuccacagc

SEQ ID NO: 2157707 - RNA, 19 nt, Artificial Sequence
  Description of Artificial Sequence: Synthetic oligonucleotide
ggugugggagacauugcua

SEQ ID NO: 2157708 - RNA, 19 nt, Artificial Sequence
  Description of Artificial Sequence: Synthetic oligonucleotide
agcgucaggucccgcccuu

SEQ ID NO: 2157709 - RNA, 19 nt, Artificial Sequence
  Description of Artificial Sequence: Synthetic oligonucleotide
caggucccgcccuuccaca

SEQ ID NO: 2157710 - RNA, 19 nt, Artificial Sequence
  Description of Artificial Sequence: Synthetic oligonucleotide
cacaaacgccagcggccuc

SEQ ID NO: 2157711 - RNA, 19 nt, Artificial Sequence
  Description of Artificial Sequence: Synthetic oligonucleotide
caccuuggcgggacccuca

SEQ ID NO: 2157712 - RNA, 19 nt, Artificial Sequence
  Description of Artificial Sequence: Synthetic oligonucleotide
ggacgcaggaccacggugu

SEQ ID NO: 2157713 - RNA, 19 nt, Artificial Sequence
  Description of Artificial Sequence: Synthetic oligonucleotide
cacccucuugagaggagcu

SEQ ID NO: 2157714 - RNA, 19 nt, Artificial Sequence
  Description of Artificial Sequence: Synthetic oligonucleotide
ggaugccuauggaaggcaa

SEQ ID NO: 2157715 - RNA, 19 nt, Artificial Sequence
  Description of Artificial Sequence: Synthetic oligonucleotide
caggcaccuugagcggcgc

SEQ ID NO: 2157716 - RNA, 19 nt, Artificial Sequence
  Description of Artificial Sequence: Synthetic oligonucleotide
ccaaagggucccucgugga

SEQ ID NO: 2157717 - RNA, 19 nt, Artificial Sequence
  Description of Artificial Sequence: Synthetic oligonucleotide
gccagcggccucaucuuug

SEQ ID NO: 2157718 - RNA, 19 nt, Artificial Sequence
  Description of Artificial Sequence: Synthetic oligonucleotide
gccgaucacaacaggccca

SEQ ID NO: 2157719 - RNA, 19 nt, Artificial Sequence
  Description of Artificial Sequence: Synthetic oligonucleotide
ucccgcccuuccacagcgu

SEQ ID NO: 2157720 - RNA, 19 nt, Artificial Sequence
  Description of Artificial Sequence: Synthetic oligonucleotide
gccaggcaggcaccuugag

SEQ ID NO: 2157721 - RNA, 19 nt, Artificial Sequence
  Description of Artificial Sequence: Synthetic oligonucleotide
gggagaaucuccggucaaa

SEQ ID NO: 2157722 - RNA, 19 nt, Artificial Sequence
  Description of Artificial Sequence: Synthetic oligonucleotide
gcggcgccacacuccagcc

SEQ ID NO: 2157723 - RNA, 19 nt, Artificial Sequence
  Description of Artificial Sequence: Synthetic oligonucleotide
ccgccaggcaggcaccuug

SEQ ID NO: 2157724 - RNA, 19 nt, Artificial Sequence
  Description of Artificial Sequence: Synthetic oligonucleotide
ccacagcguaucuguucag

SEQ ID NO: 2157725 - RNA, 19 nt, Artificial Sequence
  Description of Artificial Sequence: Synthetic oligonucleotide
cucccuguccaggagcacu

SEQ ID NO: 2157726 - RNA, 19 nt, Artificial Sequence
  Description of Artificial Sequence: Synthetic oligonucleotide
ggaaaacaccugguuuugu

SEQ ID NO: 2157727 - RNA, 19 nt, Artificial Sequence
  Description of Artificial Sequence: Synthetic oligonucleotide
ggaccacggugugggagac

SEQ ID NO: 2157728 - RNA, 19 nt, Artificial Sequence
  Description of Artificial Sequence: Synthetic oligonucleotide
ggggcaauccggucccacu

SEQ ID NO: 2157729 - RNA, 19 nt, Artificial Sequence
  Description of Artificial Sequence: Synthetic oligonucleotide
gagcggcgccacacuccag

SEQ ID NO: 2157730 - RNA, 19 nt, Artificial Sequence
  Description of Artificial Sequence: Synthetic oligonucleotide
cggcuuugagaggacgcag

SEQ ID NO: 2157731 - RNA, 19 nt, Artificial Sequence
  Description of Artificial Sequence: Synthetic oligonucleotide
gggcaauccggucccacuu

SEQ ID NO: 2157732 - RNA, 19 nt, Artificial Sequence
  Description of Artificial Sequence: Synthetic oligonucleotide
ccuuggcgggacccucaag

SEQ ID NO: 2157733 - RNA, 19 nt, Artificial Sequence
  Description of Artificial Sequence: Synthetic oligonucleotide
aggcucgcccaagcuccca

SEQ ID NO: 2157734 - RNA, 19 nt, Artificial Sequence
  Description of Artificial Sequence: Synthetic oligonucleotide
caccuugagcggcgccaca

SEQ ID NO: 2157735 - RNA, 19 nt, Artificial Sequence
  Description of Artificial Sequence: Synthetic oligonucleotide
ccggcuuugagaggacgca

SEQ ID NO: 2157736 - RNA, 19 nt, Artificial Sequence
  Description of Artificial Sequence: Synthetic oligonucleotide
ccacaucuaacgccgcacu

SEQ ID NO: 2157737 - RNA, 19 nt, Artificial Sequence
  Description of Artificial Sequence: Synthetic oligonucleotide
cagcggccucaucuuugga

SEQ ID NO: 2157738 - RNA, 19 nt, Artificial Sequence
  Description of Artificial Sequence: Synthetic oligonucleotide
cgcccuuccacagcguauc

SEQ ID NO: 2157739 - RNA, 19 nt, Artificial Sequence
  Description of Artificial Sequence: Synthetic oligonucleotide
caacagcaccuuggcggga

SEQ ID NO: 2157740 - RNA, 19 nt, Artificial Sequence
  Description of Artificial Sequence: Synthetic oligonucleotide
gagcacuuguugagccgau

SEQ ID NO: 2157741 - RNA, 19 nt, Artificial Sequence
  Description of Artificial Sequence: Synthetic oligonucleotide
ggguaucguauuuccucuu

SEQ ID NO: 2157742 - RNA, 19 nt, Artificial Sequence
  Description of Artificial Sequence: Synthetic oligonucleotide
cugcagcgucaggucccgc

SEQ ID NO: 2157743 - RNA, 19 nt, Artificial Sequence
  Description of Artificial Sequence: Synthetic oligonucleotide
cugggccaaguagguaaua

SEQ ID NO: 2157744 - RNA, 19 nt, Artificial Sequence
  Description of Artificial Sequence: Synthetic oligonucleotide
ggccaaggaaacacugcau

SEQ ID NO: 2157745 - RNA, 19 nt, Artificial Sequence
  Description of Artificial Sequence: Synthetic oligonucleotide
ggcuaaaggcaguccuguu

SEQ ID NO: 2157746 - RNA, 19 nt, Artificial Sequence
  Description of Artificial Sequence: Synthetic oligonucleotide
cagcgucaggucccgcccu

SEQ ID NO: 2157747 - RNA, 19 nt, Artificial Sequence
  Description of Artificial Sequence: Synthetic oligonucleotide
cauugcuagcaggggcaau

SEQ ID NO: 2157748 - RNA, 19 nt, Artificial Sequence
  Description of Artificial Sequence: Synthetic oligonucleotide
cggcgccacacuccagccc

SEQ ID NO: 2157749 - RNA, 19 nt, Artificial Sequence
  Description of Artificial Sequence: Synthetic oligonucleotide
ccacggccucaucggcagc

SEQ ID NO: 2157750 - RNA, 19 nt, Artificial Sequence
  Description of Artificial Sequence: Synthetic oligonucleotide
cagugaaggcagggaggcu

SEQ ID NO: 2157751 - RNA, 19 nt, Artificial Sequence
  Description of Artificial Sequence: Synthetic oligonucleotide
cggccucaucggcagccgc

SEQ ID NO: 2157752 - RNA, 19 nt, Artificial Sequence
  Description of Artificial Sequence: Synthetic oligonucleotide
gccgcacuggagcccacau

SEQ ID NO: 2157753 - RNA, 19 nt, Artificial Sequence
  Description of Artificial Sequence: Synthetic oligonucleotide
gcccuuccacagcguaucu

SEQ ID NO: 2157754 - RNA, 19 nt, Artificial Sequence
  Description of Artificial Sequence: Synthetic oligonucleotide
ccuugagcggcgccacacu

SEQ ID NO: 2157755 - RNA, 19 nt, Artificial Sequence
  Description of Artificial Sequence: Synthetic oligonucleotide
ccucccuguccaggagcac

SEQ ID NO: 2157756 - RNA, 19 nt, Artificial Sequence
  Description of Artificial Sequence: Synthetic oligonucleotide
cccgcccuuccacagcgua

SEQ ID NO: 2157757 - RNA, 19 nt, Artificial Sequence
  Description of Artificial Sequence: Synthetic oligonucleotide
cggccucaucuuuggaaaa

SEQ ID NO: 2157758 - RNA, 19 nt, Artificial Sequence
  Description of Artificial Sequence: Synthetic oligonucleotide
gcgucaggucccgcccuuc

SEQ ID NO: 2157759 - RNA, 19 nt, Artificial Sequence
  Description of Artificial Sequence: Synthetic oligonucleotide
caaacgccagcggccucau

SEQ ID NO: 2157760 - RNA, 19 nt, Artificial Sequence
  Description of Artificial Sequence: Synthetic oligonucleotide
cgccaggcaggcaccuuga

SEQ ID NO: 2157761 - RNA, 19 nt, Artificial Sequence
  Description of Artificial Sequence: Synthetic oligonucleotide
ccgaucacaacaggcccau

SEQ ID NO: 2157762 - RNA, 19 nt, Artificial Sequence
  Description of Artificial Sequence: Synthetic oligonucleotide
gccaaaagccuggcuccuu

SEQ ID NO: 2157763 - RNA, 19 nt, Artificial Sequence
  Description of Artificial Sequence: Synthetic oligonucleotide
ccccaaagcuguggcuaaa

SEQ ID NO: 2157764 - RNA, 19 nt, Artificial Sequence
  Description of Artificial Sequence: Synthetic oligonucleotide
cgaucacaacaggcccauc

SEQ ID NO: 2157765 - RNA, 19 nt, Artificial Sequence
  Description of Artificial Sequence: Synthetic oligonucleotide
gcgccacacuccagcccca

SEQ ID NO: 2157766 - RNA, 19 nt, Artificial Sequence
  Description of Artificial Sequence: Synthetic oligonucleotide
ccgcccuuccacagcguau

SEQ ID NO: 2157767 - RNA, 19 nt, Artificial Sequence
  Description of Artificial Sequence: Synthetic oligonucleotide
ccgcacuggagcccacauu

SEQ ID NO: 2157768 - RNA, 19 nt, Artificial Sequence
  Description of Artificial Sequence: Synthetic oligonucleotide
ccacggugugggagacauu

SEQ ID NO: 2157769 - RNA, 19 nt, Artificial Sequence
  Description of Artificial Sequence: Synthetic oligonucleotide
cgccagcggccucaucuuu

SEQ ID NO: 2157770 - RNA, 19 nt, Artificial Sequence
  Description of Artificial Sequence: Synthetic oligonucleotide
uuagacaacacgaacaccg

SEQ ID NO: 2157771 - RNA, 19 nt, Artificial Sequence
  Description of Artificial Sequence: Synthetic oligonucleotide
aaugccuuugguuucgcgg

SEQ ID NO: 2157772 - RNA, 19 nt, Artificial Sequence
  Description of Artificial Sequence: Synthetic oligonucleotide
aagauucugaggcuggaac

SEQ ID NO: 2157773 - RNA, 19 nt, Artificial Sequence
  Description of Artificial Sequence: Synthetic oligonucleotide
ugagcauugguaaacuggg

SEQ ID NO: 2157774 - RNA, 19 nt, Artificial Sequence
  Description of Artificial Sequence: Synthetic oligonucleotide
aaguggaggaacuacagca

SEQ ID NO: 2157775 - RNA, 19 nt, Artificial Sequence
  Description of Artificial Sequence: Synthetic oligonucleotide
uucccgaagauucugaggc

SEQ ID NO: 2157776 - RNA, 19 nt, Artificial Sequence
  Description of Artificial Sequence: Synthetic oligonucleotide
guuuccaauggucaggugg

SEQ ID NO: 2157777 - RNA, 19 nt, Artificial Sequence
  Description of Artificial Sequence: Synthetic oligonucleotide
ugcgggauaauaccaagcg

SEQ ID NO: 2157778 - RNA, 19 nt, Artificial Sequence
  Description of Artificial Sequence: Synthetic oligonucleotide
uuuccaauggucagguggg

SEQ ID NO: 2157779 - RNA, 19 nt, Artificial Sequence
  Description of Artificial Sequence: Synthetic oligonucleotide
aacaccggucaguaguucc

SEQ ID NO: 2157780 - RNA, 19 nt, Artificial Sequence
  Description of Artificial Sequence: Synthetic oligonucleotide
aacuguguagggcaugagg

SEQ ID NO: 2157781 - RNA, 19 nt, Artificial Sequence
  Description of Artificial Sequence: Synthetic oligonucleotide
cuuacugcccuucuuaggg

SEQ ID NO: 2157782 - RNA, 19 nt, Artificial Sequence
  Description of Artificial Sequence: Synthetic oligonucleotide
uggucuauuacccucacaa

SEQ ID NO: 2157783 - RNA, 19 nt, Artificial Sequence
  Description of Artificial Sequence: Synthetic oligonucleotide
gucgagagaacuucaaugg

SEQ ID NO: 2157784 - RNA, 19 nt, Artificial Sequence
  Description of Artificial Sequence: Synthetic oligonucleotide
guugcugucucccuggugg

SEQ ID NO: 2157785 - RNA, 19 nt, Artificial Sequence
  Description of Artificial Sequence: Synthetic oligonucleotide
aguguucuggcaccaaacc

SEQ ID NO: 2157786 - RNA, 19 nt, Artificial Sequence
  Description of Artificial Sequence: Synthetic oligonucleotide
ugucgagagaacuucaaug

SEQ ID NO: 2157787 - RNA, 19 nt, Artificial Sequence
  Description of Artificial Sequence: Synthetic oligonucleotide
aauaccaagcguugcuguc

SEQ ID NO: 2157788 - RNA, 19 nt, Artificial Sequence
  Description of Artificial Sequence: Synthetic oligonucleotide
auccgagugacucccaacc

SEQ ID NO: 2157789 - RNA, 19 nt, Artificial Sequence
  Description of Artificial Sequence: Synthetic oligonucleotide
aacuacagcauuacagugg

SEQ ID NO: 2157790 - RNA, 19 nt, Artificial Sequence
  Description of Artificial Sequence: Synthetic oligonucleotide
caagcuucuccauagcacg

SEQ ID NO: 2157791 - RNA, 19 nt, Artificial Sequence
  Description of Artificial Sequence: Synthetic oligonucleotide
gucuauuacccucacaagc

SEQ ID NO: 2157792 - RNA, 19 nt, Artificial Sequence
  Description of Artificial Sequence: Synthetic oligonucleotide
acagcauuacaguggacac

SEQ ID NO: 2157793 - RNA, 19 nt, Artificial Sequence
  Description of Artificial Sequence: Synthetic oligonucleotide
augccuuugguuucgcggc

SEQ ID NO: 2157794 - RNA, 19 nt, Artificial Sequence
  Description of Artificial Sequence: Synthetic oligonucleotide
cauagcacgaacuguguag

SEQ ID NO: 2157795 - RNA, 19 nt, Artificial Sequence
  Description of Artificial Sequence: Synthetic oligonucleotide
gaacaugcgggauaauacc

SEQ ID NO: 2157796 - RNA, 19 nt, Artificial Sequence
  Description of Artificial Sequence: Synthetic oligonucleotide
uugguaccgagguagaaug

SEQ ID NO: 2157797 - RNA, 19 nt, Artificial Sequence
  Description of Artificial Sequence: Synthetic oligonucleotide
uugguuucgcggcuggugg

SEQ ID NO: 2157798 - RNA, 19 nt, Artificial Sequence
  Description of Artificial Sequence: Synthetic oligonucleotide
uguguagggcaugaggugg

SEQ ID NO: 2157799 - RNA, 19 nt, Artificial Sequence
  Description of Artificial Sequence: Synthetic oligonucleotide
uucuccauagcacgaacug

SEQ ID NO: 2157800 - RNA, 19 nt, Artificial Sequence
  Description of Artificial Sequence: Synthetic oligonucleotide
aggaacuacagcauuacag

SEQ ID NO: 2157801 - RNA, 19 nt, Artificial Sequence
  Description of Artificial Sequence: Synthetic oligonucleotide
auagcaccccauuuccgcc

SEQ ID NO: 2157802 - RNA, 19 nt, Artificial Sequence
  Description of Artificial Sequence: Synthetic oligonucleotide
gcaauggugacacuugugg

SEQ ID NO: 2157803 - RNA, 19 nt, Artificial Sequence
  Description of Artificial Sequence: Synthetic oligonucleotide
ugacucccaacccauagca

SEQ ID NO: 2157804 - RNA, 19 nt, Artificial Sequence
  Description of Artificial Sequence: Synthetic oligonucleotide
ugugguugggagcuuagac

SEQ ID NO: 2157805 - RNA, 19 nt, Artificial Sequence
  Description of Artificial Sequence: Synthetic oligonucleotide
cuugcugggaggaucagac

SEQ ID NO: 2157806 - RNA, 19 nt, Artificial Sequence
  Description of Artificial Sequence: Synthetic oligonucleotide
agcauugguaaacugggca

SEQ ID NO: 2157807 - RNA, 19 nt, Artificial Sequence
  Description of Artificial Sequence: Synthetic oligonucleotide
augagcauugguaaacugg

SEQ ID NO: 2157808 - RNA, 19 nt, Artificial Sequence
  Description of Artificial Sequence: Synthetic oligonucleotide
uguagcaucagccgcugac

SEQ ID NO: 2157809 - RNA, 19 nt, Artificial Sequence
  Description of Artificial Sequence: Synthetic oligonucleotide
gaagggguagccaagcuug

SEQ ID NO: 2157810 - RNA, 19 nt, Artificial Sequence
  Description of Artificial Sequence: Synthetic oligonucleotide
uuggagcugaaccacugcc

SEQ ID NO: 2157811 - RNA, 19 nt, Artificial Sequence
  Description of Artificial Sequence: Synthetic oligonucleotide
uagacaacacgaacaccgg

SEQ ID NO: 2157812 - RNA, 19 nt, Artificial Sequence
  Description of Artificial Sequence: Synthetic oligonucleotide
uggguaacauaccuggagu

SEQ ID NO: 2157813 - RNA, 19 nt, Artificial Sequence
  Description of Artificial Sequence: Synthetic oligonucleotide
gagagaacuucaauggcag

SEQ ID NO: 2157814 - RNA, 19 nt, Artificial Sequence
  Description of Artificial Sequence: Synthetic oligonucleotide
accgagguagaaugugugc

SEQ ID NO: 2157815 - RNA, 19 nt, Artificial Sequence
  Description of Artificial Sequence: Synthetic oligonucleotide
ugggagcuuagacaacacg

SEQ ID NO: 2157816 - RNA, 19 nt, Artificial Sequence
  Description of Artificial Sequence: Synthetic oligonucleotide
cauagcaccccauuuccgc

SEQ ID NO: 2157817 - RNA, 19 nt, Artificial Sequence
  Description of Artificial Sequence: Synthetic oligonucleotide
caaaccucaaagugugcgg

SEQ ID NO: 2157818 - RNA, 19 nt, Artificial Sequence
  Description of Artificial Sequence: Synthetic oligonucleotide
cugggcauugaaaauggag

SEQ ID NO: 2157819 - RNA, 19 nt, Artificial Sequence
  Description of Artificial Sequence: Synthetic oligonucleotide
ucuuacaggucaacucucc

SEQ ID NO: 2157820 - RNA, 19 nt, Artificial Sequence
  Description of Artificial Sequence: Synthetic oligonucleotide
aaugaucacgaagggguag

SEQ ID NO: 2157821 - RNA, 19 nt, Artificial Sequence
  Description of Artificial Sequence: Synthetic oligonucleotide
ugguugggagcuuagacaa

SEQ ID NO: 2157822 - RNA, 19 nt, Artificial Sequence
  Description of Artificial Sequence: Synthetic oligonucleotide
acgaacaccggucaguagu

SEQ ID NO: 2157823 - RNA, 19 nt, Artificial Sequence
  Description of Artificial Sequence: Synthetic oligonucleotide
ucgagagaacuucaauggc

SEQ ID NO: 2157824 - RNA, 19 nt, Artificial Sequence
  Description of Artificial Sequence: Synthetic oligonucleotide
acuuguggguaacauaccu

SEQ ID NO: 2157825 - RNA, 19 nt, Artificial Sequence
  Description of Artificial Sequence: Synthetic oligonucleotide
auaccuggagugcuggcgg

SEQ ID NO: 2157826 - RNA, 19 nt, Artificial Sequence
  Description of Artificial Sequence: Synthetic oligonucleotide
aaccucaaagugugcgggg

SEQ ID NO: 2157827 - RNA, 19 nt, Artificial Sequence
  Description of Artificial Sequence: Synthetic oligonucleotide
cucggugaugucaucauac

SEQ ID NO: 2157828 - RNA, 19 nt, Artificial Sequence
  Description of Artificial Sequence: Synthetic oligonucleotide
caauggugacacuuguggg

SEQ ID NO: 2157829 - RNA, 19 nt, Artificial Sequence
  Description of Artificial Sequence: Synthetic oligonucleotide
uuuggugaggaagaccacc

SEQ ID NO: 2157830 - RNA, 19 nt, Artificial Sequence
  Description of Artificial Sequence: Synthetic oligonucleotide
agagaacuucaauggcagc

SEQ ID NO: 2157831 - RNA, 19 nt, Artificial Sequence
  Description of Artificial Sequence: Synthetic oligonucleotide
acaagcuucuccauagcac

SEQ ID NO: 2157832 - RNA, 19 nt, Artificial Sequence
  Description of Artificial Sequence: Synthetic oligonucleotide
cauguugauuuccugcccc

SEQ ID NO: 2157833 - RNA, 19 nt, Artificial Sequence
  Description of Artificial Sequence: Synthetic oligonucleotide
acggaugcagucuucuguc

SEQ ID NO: 2157834 - RNA, 19 nt, Artificial Sequence
  Description of Artificial Sequence: Synthetic oligonucleotide
auagcacgaacuguguagg

SEQ ID NO: 2157835 - RNA, 19 nt, Artificial Sequence
  Description of Artificial Sequence: Synthetic oligonucleotide
aagaccaccucaccagugu

SEQ ID NO: 2157836 - RNA, 19 nt, Artificial Sequence
  Description of Artificial Sequence: Synthetic oligonucleotide
gacucuuacaggucaacuc

SEQ ID NO: 2157837 - RNA, 19 nt, Artificial Sequence
  Description of Artificial Sequence: Synthetic oligonucleotide
agcauuacaguggacacca

SEQ ID NO: 2157838 - RNA, 19 nt, Artificial Sequence
  Description of Artificial Sequence: Synthetic oligonucleotide
caccaaaccucaaagugug

SEQ ID NO: 2157839 - RNA, 19 nt, Artificial Sequence
  Description of Artificial Sequence: Synthetic oligonucleotide
ccggcaaugaucacgaagg

SEQ ID NO: 2157840 - RNA, 19 nt, Artificial Sequence
  Description of Artificial Sequence: Synthetic oligonucleotide
acccauagcaccccauuuc

SEQ ID NO: 2157841 - RNA, 19 nt, Artificial Sequence
  Description of Artificial Sequence: Synthetic oligonucleotide
guggguaacauaccuggag

SEQ ID NO: 2157842 - RNA, 19 nt, Artificial Sequence
  Description of Artificial Sequence: Synthetic oligonucleotide
agcacgaacuguguagggc

SEQ ID NO: 2157843 - RNA, 19 nt, Artificial Sequence
  Description of Artificial Sequence: Synthetic oligonucleotide
aauggaggaguacuuggua

SEQ ID NO: 2157844 - RNA, 19 nt, Artificial Sequence
  Description of Artificial Sequence: Synthetic oligonucleotide
uagaaugugugccccacuc

SEQ ID NO: 2157845 - RNA, 19 nt, Artificial Sequence
  Description of Artificial Sequence: Synthetic oligonucleotide
cauuacaguggacaccaag

SEQ ID NO: 2157846 - RNA, 19 nt, Artificial Sequence
  Description of Artificial Sequence: Synthetic oligonucleotide
guuggcgucuuucagucug

SEQ ID NO: 2157847 - RNA, 19 nt, Artificial Sequence
  Description of Artificial Sequence: Synthetic oligonucleotide
augaucacgaagggguagc

SEQ ID NO: 2157848 - RNA, 19 nt, Artificial Sequence
  Description of Artificial Sequence: Synthetic oligonucleotide
ugugcgggguccuccaggg

SEQ ID NO: 2157849 - RNA, 19 nt, Artificial Sequence
  Description of Artificial Sequence: Synthetic oligonucleotide
caugacucccucuuuggug

SEQ ID NO: 2157850 - RNA, 19 nt, Artificial Sequence
  Description of Artificial Sequence: Synthetic oligonucleotide
aggaguacuugguaccgag

SEQ ID NO: 2157851 - RNA, 19 nt, Artificial Sequence
  Description of Artificial Sequence: Synthetic oligonucleotide
acccacuuguagcaucagc

SEQ ID NO: 2157852 - RNA, 19 nt, Artificial Sequence
  Description of Artificial Sequence: Synthetic oligonucleotide
aacaugcgggauaauacca

SEQ ID NO: 2157853 - RNA, 19 nt, Artificial Sequence
  Description of Artificial Sequence: Synthetic oligonucleotide
uauuacccucacaagcuuc

SEQ ID NO: 2157854 - RNA, 19 nt, Artificial Sequence
  Description of Artificial Sequence: Synthetic oligonucleotide
guagccaagcuuguuggcg

SEQ ID NO: 2157855 - RNA, 19 nt, Artificial Sequence
  Description of Artificial Sequence: Synthetic oligonucleotide
uuguuggcgucuuucaguc

SEQ ID NO: 2157856 - RNA, 19 nt, Artificial Sequence
  Description of Artificial Sequence: Synthetic oligonucleotide
uccuuacugcccuucuuag

SEQ ID NO: 2157857 - RNA, 19 nt, Artificial Sequence
  Description of Artificial Sequence: Synthetic oligonucleotide
cuuguggguaacauaccug

SEQ ID NO: 2157858 - RNA, 19 nt, Artificial Sequence
  Description of Artificial Sequence: Synthetic oligonucleotide
auaauaccaagcguugcug

SEQ ID NO: 2157859 - RNA, 19 nt, Artificial Sequence
  Description of Artificial Sequence: Synthetic oligonucleotide
ugggcaauggugacacuug

SEQ ID NO: 2157860 - RNA, 19 nt, Artificial Sequence
  Description of Artificial Sequence: Synthetic oligonucleotide
agcuuagacaacacgaaca

SEQ ID NO: 2157861 - RNA, 19 nt, Artificial Sequence
  Description of Artificial Sequence: Synthetic oligonucleotide
gagcuuagacaacacgaac

SEQ ID NO: 2157862 - RNA, 19 nt, Artificial Sequence
  Description of Artificial Sequence: Synthetic oligonucleotide
ucuucugucgagagaacuu

SEQ ID NO: 2157863 - RNA, 19 nt, Artificial Sequence
  Description of Artificial Sequence: Synthetic oligonucleotide
cacuuguagcaucagccgc

SEQ ID NO: 2157864 - RNA, 19 nt, Artificial Sequence
  Description of Artificial Sequence: Synthetic oligonucleotide
guguucugcaucucgucag

SEQ ID NO: 2157865 - RNA, 19 nt, Artificial Sequence
  Description of Artificial Sequence: Synthetic oligonucleotide
ugguaaacugggcauugaa

SEQ ID NO: 2157866 - RNA, 19 nt, Artificial Sequence
  Description of Artificial Sequence: Synthetic oligonucleotide
uccccaugagcauugguaa

SEQ ID NO: 2157867 - RNA, 19 nt, Artificial Sequence
  Description of Artificial Sequence: Synthetic oligonucleotide
uuuccgccagcaaaggguc

SEQ ID NO: 2157868 - RNA, 19 nt, Artificial Sequence
  Description of Artificial Sequence: Synthetic oligonucleotide
auuuccgccagcaaagggu

SEQ ID NO: 2157869 - RNA, 19 nt, Artificial Sequence
  Description of Artificial Sequence: Synthetic oligonucleotide
aacacgaacaccggucagu

SEQ ID NO: 2157870 - RNA, 19 nt, Artificial Sequence
  Description of Artificial Sequence: Synthetic oligonucleotide
caugcgggauaauaccaag

SEQ ID NO: 2157871 - RNA, 19 nt, Artificial Sequence
  Description of Artificial Sequence: Synthetic oligonucleotide
uuugguuucgcggcuggug

SEQ ID NO: 2157872 - RNA, 19 nt, Artificial Sequence
  Description of Artificial Sequence: Synthetic oligonucleotide
agcguugcugucucccugg

SEQ ID NO: 2157873 - RNA, 19 nt, Artificial Sequence
  Description of Artificial Sequence: Synthetic oligonucleotide
gaacuucaauggcagcagc

SEQ ID NO: 2157874 - RNA, 19 nt, Artificial Sequence
  Description of Artificial Sequence: Synthetic oligonucleotide
gacaacacgaacaccgguc

SEQ ID NO: 2157875 - RNA, 19 nt, Artificial Sequence
  Description of Artificial Sequence: Synthetic oligonucleotide
uccccuuggagcugaacca

SEQ ID NO: 2157876 - RNA, 19 nt, Artificial Sequence
  Description of Artificial Sequence: Synthetic oligonucleotide
uccuggucuauuacccuca

SEQ ID NO: 2157877 - RNA, 19 nt, Artificial Sequence
  Description of Artificial Sequence: Synthetic oligonucleotide
ucugucgagagaacuucaa

SEQ ID NO: 2157878 - RNA, 19 nt, Artificial Sequence
  Description of Artificial Sequence: Synthetic oligonucleotide
uggaggaacuacagcauua

SEQ ID NO: 2157879 - RNA, 19 nt, Artificial Sequence
  Description of Artificial Sequence: Synthetic oligonucleotide
cauuuccgccagcaaaggg

SEQ ID NO: 2157880 - RNA, 19 nt, Artificial Sequence
  Description of Artificial Sequence: Synthetic oligonucleotide
gagcugaaccacugccucg

SEQ ID NO: 2157881 - RNA, 19 nt, Artificial Sequence
  Description of Artificial Sequence: Synthetic oligonucleotide
augcgggauaauaccaagc

SEQ ID NO: 2157882 - RNA, 19 nt, Artificial Sequence
  Description of Artificial Sequence: Synthetic oligonucleotide
gcuuagacaacacgaacac

SEQ ID NO: 2157883 - RNA, 19 nt, Artificial Sequence
  Description of Artificial Sequence: Synthetic oligonucleotide
uccgagugacucccaaccc

SEQ ID NO: 2157884 - RNA, 19 nt, Artificial Sequence
  Description of Artificial Sequence: Synthetic oligonucleotide
ucggugaugucaucauaca

SEQ ID NO: 2157885 - RNA, 19 nt, Artificial Sequence
  Description of Artificial Sequence: Synthetic oligonucleotide
ggguagccaagcuuguugg

SEQ ID NO: 2157886 - RNA, 19 nt, Artificial Sequence
  Description of Artificial Sequence: Synthetic oligonucleotide
caugagcauugguaaacug

SEQ ID NO: 2157887 - RNA, 19 nt, Artificial Sequence
  Description of Artificial Sequence: Synthetic oligonucleotide
caccucaccaguguucugg

SEQ ID NO: 2157888 - RNA, 19 nt, Artificial Sequence
  Description of Artificial Sequence: Synthetic oligonucleotide
uccauagcacgaacugugu

SEQ ID NO: 2157889 - RNA, 19 nt, Artificial Sequence
  Description of Artificial Sequence: Synthetic oligonucleotide
cuuagacaacacgaacacc

SEQ ID NO: 2157890 - RNA, 19 nt, Artificial Sequence
  Description of Artificial Sequence: Synthetic oligonucleotide
acuucaauggcagcagcca

SEQ ID NO: 2157891 - RNA, 19 nt, Artificial Sequence
  Description of Artificial Sequence: Synthetic oligonucleotide
uagcacgaacuguguaggg

SEQ ID NO: 2157892 - RNA, 19 nt, Artificial Sequence
  Description of Artificial Sequence: Synthetic oligonucleotide
agcagccaagauccgagug

SEQ ID NO: 2157893 - RNA, 19 nt, Artificial Sequence
  Description of Artificial Sequence: Synthetic oligonucleotide
cugcaucucgucagcagcc

SEQ ID NO: 2157894 - RNA, 19 nt, Artificial Sequence
  Description of Artificial Sequence: Synthetic oligonucleotide
uggaacaugcgggauaaua

SEQ ID NO: 2157895 - RNA, 19 nt, Artificial Sequence
  Description of Artificial Sequence: Synthetic oligonucleotide
aggacuugcugggaggauc

SEQ ID NO: 2157896 - RNA, 19 nt, Artificial Sequence
  Description of Artificial Sequence: Synthetic oligonucleotide
agaaugugugccccacuca

SEQ ID NO: 2157897 - RNA, 19 nt, Artificial Sequence
  Description of Artificial Sequence: Synthetic oligonucleotide
cagccgcugacucuuacag

SEQ ID NO: 2157898 - RNA, 19 nt, Artificial Sequence
  Description of Artificial Sequence: Synthetic oligonucleotide
gaguacuugguaccgaggu

SEQ ID NO: 2157899 - RNA, 19 nt, Artificial Sequence
  Description of Artificial Sequence: Synthetic oligonucleotide
cucaaagugugcggggucc

SEQ ID NO: 2157900 - RNA, 19 nt, Artificial Sequence
  Description of Artificial Sequence: Synthetic oligonucleotide
agucuguuuccaaugguca

SEQ ID NO: 2157901 - RNA, 19 nt, Artificial Sequence
  Description of Artificial Sequence: Synthetic oligonucleotide
caguguucuggcaccaaac

SEQ ID NO: 2157902 - RNA, 19 nt, Artificial Sequence
  Description of Artificial Sequence: Synthetic oligonucleotide
cucaaugccuuugguuucg

SEQ ID NO: 2157903 - RNA, 19 nt, Artificial Sequence
  Description of Artificial Sequence: Synthetic oligonucleotide
ugacucuuacaggucaacu

SEQ ID NO: 2157904 - RNA, 19 nt, Artificial Sequence
  Description of Artificial Sequence: Synthetic oligonucleotide
agacaacacgaacaccggu

SEQ ID NO: 2157905 - RNA, 19 nt, Artificial Sequence
  Description of Artificial Sequence: Synthetic oligonucleotide
ggaacaugcgggauaauac

SEQ ID NO: 2157906 - RNA, 19 nt, Artificial Sequence
  Description of Artificial Sequence: Synthetic oligonucleotide
ccaauggucaggugggucc

SEQ ID NO: 2157907 - RNA, 19 nt, Artificial Sequence
  Description of Artificial Sequence: Synthetic oligonucleotide
cuguguagggcaugaggug

SEQ ID NO: 2157908 - RNA, 19 nt, Artificial Sequence
  Description of Artificial Sequence: Synthetic oligonucleotide
aguaguuccaugacucccu

SEQ ID NO: 2157909 - RNA, 19 nt, Artificial Sequence
  Description of Artificial Sequence: Synthetic oligonucleotide
gacuugguaaggagccagg

SEQ ID NO: 2157910 - RNA, 19 nt, Artificial Sequence
  Description of Artificial Sequence: Synthetic oligonucleotide
agcaaaggguccccaugag

SEQ ID NO: 2157911 - RNA, 19 nt, Artificial Sequence
  Description of Artificial Sequence: Synthetic oligonucleotide
guugggagcuuagacaaca

SEQ ID NO: 2157912 - RNA, 19 nt, Artificial Sequence
  Description of Artificial Sequence: Synthetic oligonucleotide
cuucugucgagagaacuuc

SEQ ID NO: 2157913 - RNA, 19 nt, Artificial Sequence
  Description of Artificial Sequence: Synthetic oligonucleotide
ggaacuacagcauuacagu

SEQ ID NO: 2157914 - RNA, 19 nt, Artificial Sequence
  Description of Artificial Sequence: Synthetic oligonucleotide
uugcugucucccugguggg

SEQ ID NO: 2157915 - RNA, 19 nt, Artificial Sequence
  Description of Artificial Sequence: Synthetic oligonucleotide
uggcaccaaaccucaaagu

SEQ ID NO: 2157916 - RNA, 19 nt, Artificial Sequence
  Description of Artificial Sequence: Synthetic oligonucleotide
gugugccccacucaaugcc

SEQ ID NO: 2157917 - RNA, 19 nt, Artificial Sequence
  Description of Artificial Sequence: Synthetic oligonucleotide
gguaacauaccuggagugc

SEQ ID NO: 2157918 - RNA, 19 nt, Artificial Sequence
  Description of Artificial Sequence: Synthetic oligonucleotide
ugggccaacggaugcaguc

SEQ ID NO: 2157919 - RNA, 19 nt, Artificial Sequence
  Description of Artificial Sequence: Synthetic oligonucleotide
gggcauguugauuuccugc

SEQ ID NO: 2157920 - RNA, 19 nt, Artificial Sequence
  Description of Artificial Sequence: Synthetic oligonucleotide
cucuuacaggucaacucuc

SEQ ID NO: 2157921 - RNA, 19 nt, Artificial Sequence
  Description of Artificial Sequence: Synthetic oligonucleotide
ugggcauguugauuuccug

SEQ ID NO: 2157922 - RNA, 19 nt, Artificial Sequence
  Description of Artificial Sequence: Synthetic oligonucleotide
gcagacuugguaaggagcc

SEQ ID NO: 2157923 - RNA, 19 nt, Artificial Sequence
  Description of Artificial Sequence: Synthetic oligonucleotide
ccaaaccucaaagugugcg

SEQ ID NO: 2157924 - RNA, 19 nt, Artificial Sequence
  Description of Artificial Sequence: Synthetic oligonucleotide
aucagccgcugacucuuac

SEQ ID NO: 2157925 - RNA, 19 nt, Artificial Sequence
  Description of Artificial Sequence: Synthetic oligonucleotide
auuacccucacaagcuucu

SEQ ID NO: 2157926 - RNA, 19 nt, Artificial Sequence
  Description of Artificial Sequence: Synthetic oligonucleotide
uacuugguaccgagguaga

SEQ ID NO: 2157927 - RNA, 19 nt, Artificial Sequence
  Description of Artificial Sequence: Synthetic oligonucleotide
ucuccuggucuauuacccu

SEQ ID NO: 2157928 - RNA, 19 nt, Artificial Sequence
  Description of Artificial Sequence: Synthetic oligonucleotide
gugacucccaacccauagc

SEQ ID NO: 2157929 - RNA, 19 nt, Artificial Sequence
  Description of Artificial Sequence: Synthetic oligonucleotide
ucagccgcugacucuuaca

SEQ ID NO: 2157930 - RNA, 19 nt, Artificial Sequence
  Description of Artificial Sequence: Synthetic oligonucleotide
gauccgagugacucccaac

SEQ ID NO: 2157931 - RNA, 19 nt, Artificial Sequence
  Description of Artificial Sequence: Synthetic oligonucleotide
aagugugcgggguccucca

SEQ ID NO: 2157932 - RNA, 19 nt, Artificial Sequence
  Description of Artificial Sequence: Synthetic oligonucleotide
cacuuguggguaacauacc

SEQ ID NO: 2157933 - RNA, 19 nt, Artificial Sequence
  Description of Artificial Sequence: Synthetic oligonucleotide
uuucgcggcugguggcucg

SEQ ID NO: 2157934 - RNA, 19 nt, Artificial Sequence
  Description of Artificial Sequence: Synthetic oligonucleotide
ugcaucuccuggucuauua

SEQ ID NO: 2157935 - RNA, 19 nt, Artificial Sequence
  Description of Artificial Sequence: Synthetic oligonucleotide
agagagaaguggaggaacu

SEQ ID NO: 2157936 - RNA, 19 nt, Artificial Sequence
  Description of Artificial Sequence: Synthetic oligonucleotide
caaugccuuugguuucgcg

SEQ ID NO: 2157937 - RNA, 19 nt, Artificial Sequence
  Description of Artificial Sequence: Synthetic oligonucleotide
gacacuuguggguaacaua

SEQ ID NO: 2157938 - RNA, 19 nt, Artificial Sequence
  Description of Artificial Sequence: Synthetic oligonucleotide
auaccaagcguugcugucu

SEQ ID NO: 2157939 - RNA, 19 nt, Artificial Sequence
  Description of Artificial Sequence: Synthetic oligonucleotide
gggcauugaaaauggagga

SEQ ID NO: 2157940 - RNA, 19 nt, Artificial Sequence
  Description of Artificial Sequence: Synthetic oligonucleotide
cauugaaaauggaggagua

SEQ ID NO: 2157941 - RNA, 19 nt, Artificial Sequence
  Description of Artificial Sequence: Synthetic oligonucleotide
agccgcugacucuuacagg

SEQ ID NO: 2157942 - RNA, 19 nt, Artificial Sequence
  Description of Artificial Sequence: Synthetic oligonucleotide
gcaaugaucacgaaggggu

SEQ ID NO: 2157943 - RNA, 19 nt, Artificial Sequence
  Description of Artificial Sequence: Synthetic oligonucleotide
cccauuuccgccagcaaag

SEQ ID NO: 2157944 - RNA, 19 nt, Artificial Sequence
  Description of Artificial Sequence: Synthetic oligonucleotide
cacaagcuucuccauagca

SEQ ID NO: 2157945 - RNA, 19 nt, Artificial Sequence
  Description of Artificial Sequence: Synthetic oligonucleotide
gaagaccaccucaccagug

SEQ ID NO: 2157946 - RNA, 19 nt, Artificial Sequence
  Description of Artificial Sequence: Synthetic oligonucleotide
cagucuucugucgagagaa

SEQ ID NO: 2157947 - RNA, 19 nt, Artificial Sequence
  Description of Artificial Sequence: Synthetic oligonucleotide
ugguaccgagguagaaugu

SEQ ID NO: 2157948 - RNA, 19 nt, Artificial Sequence
  Description of Artificial Sequence: Synthetic oligonucleotide
ggcauugaaaauggaggag

SEQ ID NO: 2157949 - RNA, 19 nt, Artificial Sequence
  Description of Artificial Sequence: Synthetic oligonucleotide
uaccaagcguugcugucuc

SEQ ID NO: 2157950 - RNA, 19 nt, Artificial Sequence
  Description of Artificial Sequence: Synthetic oligonucleotide
gggguagccaagcuuguug

SEQ ID NO: 2157951 - RNA, 19 nt, Artificial Sequence
  Description of Artificial Sequence: Synthetic oligonucleotide
accaagcguugcugucucc

SEQ ID NO: 2157952 - RNA, 19 nt, Artificial Sequence
  Description of Artificial Sequence: Synthetic oligonucleotide
ggaggaguacuugguaccg

SEQ ID NO: 2157953 - RNA, 19 nt, Artificial Sequence
  Description of Artificial Sequence: Synthetic oligonucleotide
gguaacagccaggacuugc

SEQ ID NO: 2157954 - RNA, 19 nt, Artificial Sequence
  Description of Artificial Sequence: Synthetic oligonucleotide
ggauaauaccaagcguugc

SEQ ID NO: 2157955 - RNA, 19 nt, Artificial Sequence
  Description of Artificial Sequence: Synthetic oligonucleotide
cuuacaggucaacucucca

SEQ ID NO: 2157956 - RNA, 19 nt, Artificial Sequence
  Description of Artificial Sequence: Synthetic oligonucleotide
cagcauuacaguggacacc

SEQ ID NO: 2157957 - RNA, 19 nt, Artificial Sequence
  Description of Artificial Sequence: Synthetic oligonucleotide
gccggcaaugaucacgaag

SEQ ID NO: 2157958 - RNA, 19 nt, Artificial Sequence
  Description of Artificial Sequence: Synthetic oligonucleotide
cuccugccggcaaugauca

SEQ ID NO: 2157959 - RNA, 19 nt, Artificial Sequence
  Description of Artificial Sequence: Synthetic oligonucleotide
accaaaccucaaagugugc

SEQ ID NO: 2157960 - RNA, 19 nt, Artificial Sequence
  Description of Artificial Sequence: Synthetic oligonucleotide
gggauaauaccaagcguug

SEQ ID NO: 2157961 - RNA, 19 nt, Artificial Sequence
  Description of Artificial Sequence: Synthetic oligonucleotide
gugugcgggguccuccagg

SEQ ID NO: 2157962 - RNA, 19 nt, Artificial Sequence
  Description of Artificial Sequence: Synthetic oligonucleotide
gguaccgagguagaaugug

SEQ ID NO: 2157963 - RNA, 19 nt, Artificial Sequence
  Description of Artificial Sequence: Synthetic oligonucleotide
cccauagcaccccauuucc

SEQ ID NO: 2157964 - RNA, 19 nt, Artificial Sequence
  Description of Artificial Sequence: Synthetic oligonucleotide
ugguuucgcggcugguggc

SEQ ID NO: 2157965 - RNA, 19 nt, Artificial Sequence
  Description of Artificial Sequence: Synthetic oligonucleotide
uugguaaacugggcauuga

SEQ ID NO: 2157966 - RNA, 19 nt, Artificial Sequence
  Description of Artificial Sequence: Synthetic oligonucleotide
ugcaucucgucagcagccc

SEQ ID NO: 2157967 - RNA, 19 nt, Artificial Sequence
  Description of Artificial Sequence: Synthetic oligonucleotide
ggaggaucagacccacuug

SEQ ID NO: 2157968 - RNA, 19 nt, Artificial Sequence
  Description of Artificial Sequence: Synthetic oligonucleotide
cacgaagggguagccaagc

SEQ ID NO: 2157969 - RNA, 19 nt, Artificial Sequence
  Description of Artificial Sequence: Synthetic oligonucleotide
aucucgucagcagcccuuc

SEQ ID NO: 2157970 - RNA, 19 nt, Artificial Sequence
  Description of Artificial Sequence: Synthetic oligonucleotide
uuggcgucuuucagucugu

SEQ ID NO: 2157971 - RNA, 19 nt, Artificial Sequence
  Description of Artificial Sequence: Synthetic oligonucleotide
gcacgaacuguguagggca

SEQ ID NO: 2157972 - RNA, 19 nt, Artificial Sequence
  Description of Artificial Sequence: Synthetic oligonucleotide
caacacgaacaccggucag

SEQ ID NO: 2157973 - RNA, 19 nt, Artificial Sequence
  Description of Artificial Sequence: Synthetic oligonucleotide
ugccuuugguuucgcggcu

SEQ ID NO: 2157974 - RNA, 19 nt, Artificial Sequence
  Description of Artificial Sequence: Synthetic oligonucleotide
aaugugugccccacucaau

SEQ ID NO: 2157975 - RNA, 19 nt, Artificial Sequence
  Description of Artificial Sequence: Synthetic oligonucleotide
cugccggcaaugaucacga

SEQ ID NO: 2157976 - RNA, 19 nt, Artificial Sequence
  Description of Artificial Sequence: Synthetic oligonucleotide
ggagcugaaccacugccuc

SEQ ID NO: 2157977 - RNA, 19 nt, Artificial Sequence
  Description of Artificial Sequence: Synthetic oligonucleotide
gcagacaguguucugcauc

SEQ ID NO: 2157978 - RNA, 19 nt, Artificial Sequence
  Description of Artificial Sequence: Synthetic oligonucleotide
agauccgagugacucccaa

SEQ ID NO: 2157979 - RNA, 19 nt, Artificial Sequence
  Description of Artificial Sequence: Synthetic oligonucleotide
cagacccacuuguagcauc

SEQ ID NO: 2157980 - RNA, 19 nt, Artificial Sequence
  Description of Artificial Sequence: Synthetic oligonucleotide
uccaauggucagguggguc

SEQ ID NO: 2157981 - RNA, 19 nt, Artificial Sequence
  Description of Artificial Sequence: Synthetic oligonucleotide
gccaagauccgagugacuc

SEQ ID NO: 2157982 - RNA, 19 nt, Artificial Sequence
  Description of Artificial Sequence: Synthetic oligonucleotide
acgaagggguagccaagcu

SEQ ID NO: 2157983 - RNA, 19 nt, Artificial Sequence
  Description of Artificial Sequence: Synthetic oligonucleotide
cuuguagcaucagccgcug

SEQ ID NO: 2157984 - RNA, 19 nt, Artificial Sequence
  Description of Artificial Sequence: Synthetic oligonucleotide
ucagguggguccugucauc

SEQ ID NO: 2157985 - RNA, 19 nt, Artificial Sequence
  Description of Artificial Sequence: Synthetic oligonucleotide
accucaaagugugcggggu

SEQ ID NO: 2157986 - RNA, 19 nt, Artificial Sequence
  Description of Artificial Sequence: Synthetic oligonucleotide
ccgagguagaaugugugcc

SEQ ID NO: 2157987 - RNA, 19 nt, Artificial Sequence
  Description of Artificial Sequence: Synthetic oligonucleotide
gcauguugauuuccugccc

SEQ ID NO: 2157988 - RNA, 19 nt, Artificial Sequence
  Description of Artificial Sequence: Synthetic oligonucleotide
ggaggaacuacagcauuac

SEQ ID NO: 2157989 - RNA, 19 nt, Artificial Sequence
  Description of Artificial Sequence: Synthetic oligonucleotide
uggccaaggcagacagugu

SEQ ID NO: 2157990 - RNA, 19 nt, Artificial Sequence
  Description of Artificial Sequence: Synthetic oligonucleotide
ccugccggcaaugaucacg

SEQ ID NO: 2157991 - RNA, 19 nt, Artificial Sequence
  Description of Artificial Sequence: Synthetic oligonucleotide
gaagauucugaggcuggaa

SEQ ID NO: 2157992 - RNA, 19 nt, Artificial Sequence
  Description of Artificial Sequence: Synthetic oligonucleotide
gaacuguguagggcaugag

SEQ ID NO: 2157993 - RNA, 19 nt, Artificial Sequence
  Description of Artificial Sequence: Synthetic oligonucleotide
agucuucugucgagagaac

SEQ ID NO: 2157994 - RNA, 19 nt, Artificial Sequence
  Description of Artificial Sequence: Synthetic oligonucleotide
uuccgccagcaaagggucc

SEQ ID NO: 2157995 - RNA, 19 nt, Artificial Sequence
  Description of Artificial Sequence: Synthetic oligonucleotide
cuucaauggcagcagccaa

SEQ ID NO: 2157996 - RNA, 19 nt, Artificial Sequence
  Description of Artificial Sequence: Synthetic oligonucleotide
ucucgucagcagcccuucc

SEQ ID NO: 2157997 - RNA, 19 nt, Artificial Sequence
  Description of Artificial Sequence: Synthetic oligonucleotide
ccgaagauucugaggcugg

SEQ ID NO: 2157998 - RNA, 19 nt, Artificial Sequence
  Description of Artificial Sequence: Synthetic oligonucleotide
gcagccaagauccgaguga

SEQ ID NO: 2157999 - RNA, 19 nt, Artificial Sequence
  Description of Artificial Sequence: Synthetic oligonucleotide
ggaguacuugguaccgagg

SEQ ID NO: 2158000 - RNA, 19 nt, Artificial Sequence
  Description of Artificial Sequence: Synthetic oligonucleotide
gguagccaagcuuguuggc

SEQ ID NO: 2158001 - RNA, 19 nt, Artificial Sequence
  Description of Artificial Sequence: Synthetic oligonucleotide
cugacucuuacaggucaac

SEQ ID NO: 2158002 - RNA, 19 nt, Artificial Sequence
  Description of Artificial Sequence: Synthetic oligonucleotide
agggcaugaggugguaaca

SEQ ID NO: 2158003 - RNA, 19 nt, Artificial Sequence
  Description of Artificial Sequence: Synthetic oligonucleotide
ucaaugccuuugguuucgc

SEQ ID NO: 2158004 - RNA, 19 nt, Artificial Sequence
  Description of Artificial Sequence: Synthetic oligonucleotide
uuguagcaucagccgcuga

SEQ ID NO: 2158005 - RNA, 19 nt, Artificial Sequence
  Description of Artificial Sequence: Synthetic oligonucleotide
ccauagcaccccauuuccg

SEQ ID NO: 2158006 - RNA, 19 nt, Artificial Sequence
  Description of Artificial Sequence: Synthetic oligonucleotide
acaugcgggauaauaccaa

SEQ ID NO: 2158007 - RNA, 19 nt, Artificial Sequence
  Description of Artificial Sequence: Synthetic oligonucleotide
agcaccuggucuucccgaa

SEQ ID NO: 2158008 - RNA, 19 nt, Artificial Sequence
  Description of Artificial Sequence: Synthetic oligonucleotide
gguagaaugugugccccac

SEQ ID NO: 2158009 - RNA, 19 nt, Artificial Sequence
  Description of Artificial Sequence: Synthetic oligonucleotide
gacucccaacccauagcac

SEQ ID NO: 2158010 - RNA, 19 nt, Artificial Sequence
  Description of Artificial Sequence: Synthetic oligonucleotide
aagggguagccaagcuugu

SEQ ID NO: 2158011 - RNA, 19 nt, Artificial Sequence
  Description of Artificial Sequence: Synthetic oligonucleotide
gcauugaaaauggaggagu

SEQ ID NO: 2158012 - RNA, 19 nt, Artificial Sequence
  Description of Artificial Sequence: Synthetic oligonucleotide
ucgccacagcucagcuggg

SEQ ID NO: 2158013 - RNA, 19 nt, Artificial Sequence
  Description of Artificial Sequence: Synthetic oligonucleotide
acacgaacaccggucagua

SEQ ID NO: 2158014 - RNA, 19 nt, Artificial Sequence
  Description of Artificial Sequence: Synthetic oligonucleotide
caccuggucuucccgaaga

SEQ ID NO: 2158015 - RNA, 19 nt, Artificial Sequence
  Description of Artificial Sequence: Synthetic oligonucleotide
cgagagaacuucaauggca

SEQ ID NO: 2158016 - RNA, 19 nt, Artificial Sequence
  Description of Artificial Sequence: Synthetic oligonucleotide
caaugaucacgaaggggua

SEQ ID NO: 2158017 - RNA, 19 nt, Artificial Sequence
  Description of Artificial Sequence: Synthetic oligonucleotide
acaccggucaguaguucca

SEQ ID NO: 2158018 - RNA, 19 nt, Artificial Sequence
  Description of Artificial Sequence: Synthetic oligonucleotide
ggaugaggcagacuuggua

SEQ ID NO: 2158019 - RNA, 19 nt, Artificial Sequence
  Description of Artificial Sequence: Synthetic oligonucleotide
gccgcugacucuuacaggu

SEQ ID NO: 2158020 - RNA, 19 nt, Artificial Sequence
  Description of Artificial Sequence: Synthetic oligonucleotide
ggagcuuagacaacacgaa

SEQ ID NO: 2158021 - RNA, 19 nt, Artificial Sequence
  Description of Artificial Sequence: Synthetic oligonucleotide
uggugacacuuguggguaa

SEQ ID NO: 2158022 - RNA, 19 nt, Artificial Sequence
  Description of Artificial Sequence: Synthetic oligonucleotide
cccaugagcauugguaaac

SEQ ID NO: 2158023 - RNA, 19 nt, Artificial Sequence
  Description of Artificial Sequence: Synthetic oligonucleotide
ucagacccacuuguagcau

SEQ ID NO: 2158024 - RNA, 19 nt, Artificial Sequence
  Description of Artificial Sequence: Synthetic oligonucleotide
accuggucuucccgaagau

SEQ ID NO: 2158025 - RNA, 19 nt, Artificial Sequence
  Description of Artificial Sequence: Synthetic oligonucleotide
ucccaacccauagcacccc

SEQ ID NO: 2158026 - RNA, 19 nt, Artificial Sequence
  Description of Artificial Sequence: Synthetic oligonucleotide
acgaacuguguagggcaug

SEQ ID NO: 2158027 - RNA, 19 nt, Artificial Sequence
  Description of Artificial Sequence: Synthetic oligonucleotide
ccaagcguugcugucuccc

SEQ ID NO: 2158028 - RNA, 19 nt, Artificial Sequence
  Description of Artificial Sequence: Synthetic oligonucleotide
ugggaggaucagacccacu

SEQ ID NO: 2158029 - RNA, 19 nt, Artificial Sequence
  Description of Artificial Sequence: Synthetic oligonucleotide
agcuucuccauagcacgaa

SEQ ID NO: 2158030 - RNA, 19 nt, Artificial Sequence
  Description of Artificial Sequence: Synthetic oligonucleotide
ggucaguaguuccaugacu

SEQ ID NO: 2158031 - RNA, 19 nt, Artificial Sequence
  Description of Artificial Sequence: Synthetic oligonucleotide
gaacaccggucaguaguuc

SEQ ID NO: 2158032 - RNA, 19 nt, Artificial Sequence
  Description of Artificial Sequence: Synthetic oligonucleotide
gucuucugucgagagaacu

SEQ ID NO: 2158033 - RNA, 19 nt, Artificial Sequence
  Description of Artificial Sequence: Synthetic oligonucleotide
ggcaauggugacacuugug

SEQ ID NO: 2158034 - RNA, 19 nt, Artificial Sequence
  Description of Artificial Sequence: Synthetic oligonucleotide
gugguaacagccaggacuu

SEQ ID NO: 2158035 - RNA, 19 nt, Artificial Sequence
  Description of Artificial Sequence: Synthetic oligonucleotide
ccuuugguuucgcggcugg

SEQ ID NO: 2158036 - RNA, 19 nt, Artificial Sequence
  Description of Artificial Sequence: Synthetic oligonucleotide
uuacccucacaagcuucuc

SEQ ID NO: 2158037 - RNA, 19 nt, Artificial Sequence
  Description of Artificial Sequence: Synthetic oligonucleotide
agcccuuccaugacacccu

SEQ ID NO: 2158038 - RNA, 19 nt, Artificial Sequence
  Description of Artificial Sequence: Synthetic oligonucleotide
ccggucaguaguuccauga

SEQ ID NO: 2158039 - RNA, 19 nt, Artificial Sequence
  Description of Artificial Sequence: Synthetic oligonucleotide
gacccacuuguagcaucag

SEQ ID NO: 2158040 - RNA, 19 nt, Artificial Sequence
  Description of Artificial Sequence: Synthetic oligonucleotide
aagauccgagugacuccca

SEQ ID NO: 2158041 - RNA, 19 nt, Artificial Sequence
  Description of Artificial Sequence: Synthetic oligonucleotide
gcauugguaaacugggcau

SEQ ID NO: 2158042 - RNA, 19 nt, Artificial Sequence
  Description of Artificial Sequence: Synthetic oligonucleotide
ugguaacagccaggacuug

SEQ ID NO: 2158043 - RNA, 19 nt, Artificial Sequence
  Description of Artificial Sequence: Synthetic oligonucleotide
guagcaucagccgcugacu

SEQ ID NO: 2158044 - RNA, 19 nt, Artificial Sequence
  Description of Artificial Sequence: Synthetic oligonucleotide
gucagguggguccugucau

SEQ ID NO: 2158045 - RNA, 19 nt, Artificial Sequence
  Description of Artificial Sequence: Synthetic oligonucleotide
cuugguaccgagguagaau

SEQ ID NO: 2158046 - RNA, 19 nt, Artificial Sequence
  Description of Artificial Sequence: Synthetic oligonucleotide
guaccgagguagaaugugu

SEQ ID NO: 2158047 - RNA, 19 nt, Artificial Sequence
  Description of Artificial Sequence: Synthetic oligonucleotide
cacagcucagcugggcuga

SEQ ID NO: 2158048 - RNA, 19 nt, Artificial Sequence
  Description of Artificial Sequence: Synthetic oligonucleotide
uggucagguggguccuguc

SEQ ID NO: 2158049 - RNA, 19 nt, Artificial Sequence
  Description of Artificial Sequence: Synthetic oligonucleotide
ccagagagagcaccugguc

SEQ ID NO: 2158050 - RNA, 19 nt, Artificial Sequence
  Description of Artificial Sequence: Synthetic oligonucleotide
gcuggaacaugcgggauaa

SEQ ID NO: 2158051 - RNA, 19 nt, Artificial Sequence
  Description of Artificial Sequence: Synthetic oligonucleotide
guagaaugugugccccacu

SEQ ID NO: 2158052 - RNA, 19 nt, Artificial Sequence
  Description of Artificial Sequence: Synthetic oligonucleotide
ggugugguugggagcuuag

SEQ ID NO: 2158053 - RNA, 19 nt, Artificial Sequence
  Description of Artificial Sequence: Synthetic oligonucleotide
gcagucuucugucgagaga

SEQ ID NO: 2158054 - RNA, 19 nt, Artificial Sequence
  Description of Artificial Sequence: Synthetic oligonucleotide
guccugucauccagcagga

SEQ ID NO: 2158055 - RNA, 19 nt, Artificial Sequence
  Description of Artificial Sequence: Synthetic oligonucleotide
cuguuuccaauggucaggu

SEQ ID NO: 2158056 - RNA, 19 nt, Artificial Sequence
  Description of Artificial Sequence: Synthetic oligonucleotide
caaagugugcgggguccuc

SEQ ID NO: 2158057 - RNA, 19 nt, Artificial Sequence
  Description of Artificial Sequence: Synthetic oligonucleotide
guggaggaacuacagcauu

SEQ ID NO: 2158058 - RNA, 19 nt, Artificial Sequence
  Description of Artificial Sequence: Synthetic oligonucleotide
aggaucagacccacuugua

SEQ ID NO: 2158059 - RNA, 19 nt, Artificial Sequence
  Description of Artificial Sequence: Synthetic oligonucleotide
cugguggcucgccacagcu

SEQ ID NO: 2158060 - RNA, 19 nt, Artificial Sequence
  Description of Artificial Sequence: Synthetic oligonucleotide
cugucgagagaacuucaau

SEQ ID NO: 2158061 - RNA, 19 nt, Artificial Sequence
  Description of Artificial Sequence: Synthetic oligonucleotide
cagacuugguaaggagcca

SEQ ID NO: 2158062 - RNA, 19 nt, Artificial Sequence
  Description of Artificial Sequence: Synthetic oligonucleotide
gcaccuggucuucccgaag

SEQ ID NO: 2158063 - RNA, 19 nt, Artificial Sequence
  Description of Artificial Sequence: Synthetic oligonucleotide
gugggcaauggugacacuu

SEQ ID NO: 2158064 - RNA, 19 nt, Artificial Sequence
  Description of Artificial Sequence: Synthetic oligonucleotide
gucucccuggugggcaaug

SEQ ID NO: 2158065 - RNA, 19 nt, Artificial Sequence
  Description of Artificial Sequence: Synthetic oligonucleotide
gaaccacugccucggugau

SEQ ID NO: 2158066 - RNA, 19 nt, Artificial Sequence
  Description of Artificial Sequence: Synthetic oligonucleotide
gugugguugggagcuuaga

SEQ ID NO: 2158067 - RNA, 19 nt, Artificial Sequence
  Description of Artificial Sequence: Synthetic oligonucleotide
ccgagugacucccaaccca

SEQ ID NO: 2158068 - RNA, 19 nt, Artificial Sequence
  Description of Artificial Sequence: Synthetic oligonucleotide
cggcaaugaucacgaaggg

SEQ ID NO: 2158069 - RNA, 19 nt, Artificial Sequence
  Description of Artificial Sequence: Synthetic oligonucleotide
ccucaaagugugcgggguc

SEQ ID NO: 2158070 - RNA, 19 nt, Artificial Sequence
  Description of Artificial Sequence: Synthetic oligonucleotide
acagcucagcugggcugag

SEQ ID NO: 2158071 - RNA, 19 nt, Artificial Sequence
  Description of Artificial Sequence: Synthetic oligonucleotide
cgggauaauaccaagcguu

SEQ ID NO: 2158072 - RNA, 19 nt, Artificial Sequence
  Description of Artificial Sequence: Synthetic oligonucleotide
gcgggauaauaccaagcgu

SEQ ID NO: 2158073 - RNA, 19 nt, Artificial Sequence
  Description of Artificial Sequence: Synthetic oligonucleotide
ccuggucuauuacccucac

SEQ ID NO: 2158074 - RNA, 19 nt, Artificial Sequence
  Description of Artificial Sequence: Synthetic oligonucleotide
uccugccggcaaugaucac

SEQ ID NO: 2158075 - RNA, 19 nt, Artificial Sequence
  Description of Artificial Sequence: Synthetic oligonucleotide
guuucgcggcugguggcuc

SEQ ID NO: 2158076 - RNA, 19 nt, Artificial Sequence
  Description of Artificial Sequence: Synthetic oligonucleotide
aggcuggaacaugcgggau

SEQ ID NO: 2158077 - RNA, 19 nt, Artificial Sequence
  Description of Artificial Sequence: Synthetic oligonucleotide
agggguagccaagcuuguu

SEQ ID NO: 2158078 - RNA, 19 nt, Artificial Sequence
  Description of Artificial Sequence: Synthetic oligonucleotide
accaguguucuggcaccaa

SEQ ID NO: 2158079 - RNA, 19 nt, Artificial Sequence
  Description of Artificial Sequence: Synthetic oligonucleotide
guggcucgccacagcucag

SEQ ID NO: 2158080 - RNA, 19 nt, Artificial Sequence
  Description of Artificial Sequence: Synthetic oligonucleotide
agccaagauccgagugacu

SEQ ID NO: 2158081 - RNA, 19 nt, Artificial Sequence
  Description of Artificial Sequence: Synthetic oligonucleotide
agggcccuccugccggcaa

SEQ ID NO: 2158082 - RNA, 19 nt, Artificial Sequence
  Description of Artificial Sequence: Synthetic oligonucleotide
caucucgucagcagcccuu

SEQ ID NO: 2158083 - RNA, 19 nt, Artificial Sequence
  Description of Artificial Sequence: Synthetic oligonucleotide
gggcaauggugacacuugu

SEQ ID NO: 2158084 - RNA, 19 nt, Artificial Sequence
  Description of Artificial Sequence: Synthetic oligonucleotide
ugccggcaaugaucacgaa

SEQ ID NO: 2158085 - RNA, 19 nt, Artificial Sequence
  Description of Artificial Sequence: Synthetic oligonucleotide
gcggcugguggcucgccac

SEQ ID NO: 2158086 - RNA, 19 nt, Artificial Sequence
  Description of Artificial Sequence: Synthetic oligonucleotide
ugucucccuggugggcaau

SEQ ID NO: 2158087 - RNA, 19 nt, Artificial Sequence
  Description of Artificial Sequence: Synthetic oligonucleotide
ccccuuggagcugaaccac

SEQ ID NO: 2158088 - RNA, 19 nt, Artificial Sequence
  Description of Artificial Sequence: Synthetic oligonucleotide
guguagggcaugagguggu

SEQ ID NO: 2158089 - RNA, 19 nt, Artificial Sequence
  Description of Artificial Sequence: Synthetic oligonucleotide
cacgaacuguguagggcau

SEQ ID NO: 2158090 - RNA, 19 nt, Artificial Sequence
  Description of Artificial Sequence: Synthetic oligonucleotide
caauggucagguggguccu

SEQ ID NO: 2158091 - RNA, 19 nt, Artificial Sequence
  Description of Artificial Sequence: Synthetic oligonucleotide
gagugacucccaacccaua

SEQ ID NO: 2158092 - RNA, 19 nt, Artificial Sequence
  Description of Artificial Sequence: Synthetic oligonucleotide
cugucucccuggugggcaa

SEQ ID NO: 2158093 - RNA, 19 nt, Artificial Sequence
  Description of Artificial Sequence: Synthetic oligonucleotide
ccauagcacgaacugugua

SEQ ID NO: 2158094 - RNA, 19 nt, Artificial Sequence
  Description of Artificial Sequence: Synthetic oligonucleotide
gcugacucuuacaggucaa

SEQ ID NO: 2158095 - RNA, 19 nt, Artificial Sequence
  Description of Artificial Sequence: Synthetic oligonucleotide
ccgcugacucuuacagguc

SEQ ID NO: 2158096 - RNA, 19 nt, Artificial Sequence
  Description of Artificial Sequence: Synthetic oligonucleotide
cagcagccaagauccgagu

SEQ ID NO: 2158097 - RNA, 19 nt, Artificial Sequence
  Description of Artificial Sequence: Synthetic oligonucleotide
gguuucgcggcugguggcu

SEQ ID NO: 2158098 - RNA, 19 nt, Artificial Sequence
  Description of Artificial Sequence: Synthetic oligonucleotide
gggccaacggaugcagucu

SEQ ID NO: 2158099 - RNA, 19 nt, Artificial Sequence
  Description of Artificial Sequence: Synthetic oligonucleotide
caucagccgcugacucuua

SEQ ID NO: 2158100 - RNA, 19 nt, Artificial Sequence
  Description of Artificial Sequence: Synthetic oligonucleotide
ccaugagcauugguaaacu

SEQ ID NO: 2158101 - RNA, 19 nt, Artificial Sequence
  Description of Artificial Sequence: Synthetic oligonucleotide
gguccccaugagcauuggu

SEQ ID NO: 2158102 - RNA, 19 nt, Artificial Sequence
  Description of Artificial Sequence: Synthetic oligonucleotide
caauggcagcagccaagau

SEQ ID NO: 2158103 - RNA, 19 nt, Artificial Sequence
  Description of Artificial Sequence: Synthetic oligonucleotide
ccaccucaccaguguucug

SEQ ID NO: 2158104 - RNA, 19 nt, Artificial Sequence
  Description of Artificial Sequence: Synthetic oligonucleotide
gccucggugaugucaucau

SEQ ID NO: 2158105 - RNA, 19 nt, Artificial Sequence
  Description of Artificial Sequence: Synthetic oligonucleotide
ggccaacggaugcagucuu

SEQ ID NO: 2158106 - RNA, 19 nt, Artificial Sequence
  Description of Artificial Sequence: Synthetic oligonucleotide
ggcgucuuucagucuguuu

SEQ ID NO: 2158107 - RNA, 19 nt, Artificial Sequence
  Description of Artificial Sequence: Synthetic oligonucleotide
ggcagacaguguucugcau

SEQ ID NO: 2158108 - RNA, 19 nt, Artificial Sequence
  Description of Artificial Sequence: Synthetic oligonucleotide
caagcuuguuggcgucuuu

SEQ ID NO: 2158109 - RNA, 19 nt, Artificial Sequence
  Description of Artificial Sequence: Synthetic oligonucleotide
ccucggugaugucaucaua

SEQ ID NO: 2158110 - RNA, 19 nt, Artificial Sequence
  Description of Artificial Sequence: Synthetic oligonucleotide
gcaccccauuuccgccagc

SEQ ID NO: 2158111 - RNA, 19 nt, Artificial Sequence
  Description of Artificial Sequence: Synthetic oligonucleotide
cgagugacucccaacccau

SEQ ID NO: 2158112 - RNA, 19 nt, Artificial Sequence
  Description of Artificial Sequence: Synthetic oligonucleotide
caccggucaguaguuccau

SEQ ID NO: 2158113 - RNA, 19 nt, Artificial Sequence
  Description of Artificial Sequence: Synthetic oligonucleotide
cccuuggagcugaaccacu

SEQ ID NO: 2158114 - RNA, 19 nt, Artificial Sequence
  Description of Artificial Sequence: Synthetic oligonucleotide
gccaagcuuguuggcgucu

SEQ ID NO: 2158115 - RNA, 19 nt, Artificial Sequence
  Description of Artificial Sequence: Synthetic oligonucleotide
gcauuacaguggacaccaa

SEQ ID NO: 2158116 - RNA, 19 nt, Artificial Sequence
  Description of Artificial Sequence: Synthetic oligonucleotide
gugccccacucaaugccuu

SEQ ID NO: 2158117 - RNA, 19 nt, Artificial Sequence
  Description of Artificial Sequence: Synthetic oligonucleotide
cgaacaccggucaguaguu

SEQ ID NO: 2158118 - RNA, 19 nt, Artificial Sequence
  Description of Artificial Sequence: Synthetic oligonucleotide
caggacuugcugggaggau

SEQ ID NO: 2158119 - RNA, 19 nt, Artificial Sequence
  Description of Artificial Sequence: Synthetic oligonucleotide
gcguugcugucucccuggu

SEQ ID NO: 2158120 - RNA, 19 nt, Artificial Sequence
  Description of Artificial Sequence: Synthetic oligonucleotide
gcccuccugccggcaauga

SEQ ID NO: 2158121 - RNA, 19 nt, Artificial Sequence
  Description of Artificial Sequence: Synthetic oligonucleotide
cuggaacaugcgggauaau

SEQ ID NO: 2158122 - RNA, 19 nt, Artificial Sequence
  Description of Artificial Sequence: Synthetic oligonucleotide
cgcggcugguggcucgcca

SEQ ID NO: 2158123 - RNA, 19 nt, Artificial Sequence
  Description of Artificial Sequence: Synthetic oligonucleotide
cccuccugccggcaaugau

SEQ ID NO: 2158124 - RNA, 19 nt, Artificial Sequence
  Description of Artificial Sequence: Synthetic oligonucleotide
cgccagcaaagggucccca

SEQ ID NO: 2158125 - RNA, 19 nt, Artificial Sequence
  Description of Artificial Sequence: Synthetic oligonucleotide
aauuauuuugugaagaagc

SEQ ID NO: 2158126 - RNA, 19 nt, Artificial Sequence
  Description of Artificial Sequence: Synthetic oligonucleotide
acuaauuagacucuguagc

SEQ ID NO: 2158127 - RNA, 19 nt, Artificial Sequence
  Description of Artificial Sequence: Synthetic oligonucleotide
aaagcaaucauugugaaag

SEQ ID NO: 2158128 - RNA, 19 nt, Artificial Sequence
  Description of Artificial Sequence: Synthetic oligonucleotide
aauuagacucuguagcucc

SEQ ID NO: 2158129 - RNA, 19 nt, Artificial Sequence
  Description of Artificial Sequence: Synthetic oligonucleotide
uauuuugugaagaagcggg

SEQ ID NO: 2158130 - RNA, 19 nt, Artificial Sequence
  Description of Artificial Sequence: Synthetic oligonucleotide
uuuacauuacucuagaacu

SEQ ID NO: 2158131 - RNA, 19 nt, Artificial Sequence
  Description of Artificial Sequence: Synthetic oligonucleotide
uucuagaucagucagagcu

SEQ ID NO: 2158132 - RNA, 19 nt, Artificial Sequence
  Description of Artificial Sequence: Synthetic oligonucleotide
augacaagaauucaguugg

SEQ ID NO: 2158133 - RNA, 19 nt, Artificial Sequence
  Description of Artificial Sequence: Synthetic oligonucleotide
uuaacugccaaucaaaauc

SEQ ID NO: 2158134 - RNA, 19 nt, Artificial Sequence
  Description of Artificial Sequence: Synthetic oligonucleotide
aaaguggcgaucuugucac

SEQ ID NO: 2158135 - RNA, 19 nt, Artificial Sequence
  Description of Artificial Sequence: Synthetic oligonucleotide
aacuauuucucccaacagg

SEQ ID NO: 2158136 - RNA, 19 nt, Artificial Sequence
  Description of Artificial Sequence: Synthetic oligonucleotide
uaaagcauuaucuaaagau

SEQ ID NO: 2158137 - RNA, 19 nt, Artificial Sequence
  Description of Artificial Sequence: Synthetic oligonucleotide
ugagacaaagcaaucauug

SEQ ID NO: 2158138 - RNA, 19 nt, Artificial Sequence
  Description of Artificial Sequence: Synthetic oligonucleotide
ugcacaagaaauaucaacu

SEQ ID NO: 2158139 - RNA, 19 nt, Artificial Sequence
  Description of Artificial Sequence: Synthetic oligonucleotide
uugcuauucgaauagaagc

SEQ ID NO: 2158140 - RNA, 19 nt, Artificial Sequence
  Description of Artificial Sequence: Synthetic oligonucleotide
uuucgauaaagcauuaucu

SEQ ID NO: 2158141 - RNA, 19 nt, Artificial Sequence
  Description of Artificial Sequence: Synthetic oligonucleotide
aacuaauuagacucuguag

SEQ ID NO: 2158142 - RNA, 19 nt, Artificial Sequence
  Description of Artificial Sequence: Synthetic oligonucleotide
caaggaacuaauuagacuc

SEQ ID NO: 2158143 - RNA, 19 nt, Artificial Sequence
  Description of Artificial Sequence: Synthetic oligonucleotide
ugugaaagcacacauagua

SEQ ID NO: 2158144 - RNA, 19 nt, Artificial Sequence
  Description of Artificial Sequence: Synthetic oligonucleotide
uuauuuuaacugcaggacc

SEQ ID NO: 2158145 - RNA, 19 nt, Artificial Sequence
  Description of Artificial Sequence: Synthetic oligonucleotide
uguguuuacauuacucuag

SEQ ID NO: 2158146 - RNA, 19 nt, Artificial Sequence
  Description of Artificial Sequence: Synthetic oligonucleotide
aaucugguaauguugaaau

SEQ ID NO: 2158147 - RNA, 19 nt, Artificial Sequence
  Description of Artificial Sequence: Synthetic oligonucleotide
uauuuuaacugcaggacca

SEQ ID NO: 2158148 - RNA, 19 nt, Artificial Sequence
  Description of Artificial Sequence: Synthetic oligonucleotide
gaugacaagaauucaguug

SEQ ID NO: 2158149 - RNA, 19 nt, Artificial Sequence
  Description of Artificial Sequence: Synthetic oligonucleotide
gauaaagcauuaucuaaag

SEQ ID NO: 2158150 - RNA, 19 nt, Artificial Sequence
  Description of Artificial Sequence: Synthetic oligonucleotide
acaagaauucaguugguuc

SEQ ID NO: 2158151 - RNA, 19 nt, Artificial Sequence
  Description of Artificial Sequence: Synthetic oligonucleotide
aacaguucuguaugucugc

SEQ ID NO: 2158152 - RNA, 19 nt, Artificial Sequence
  Description of Artificial Sequence: Synthetic oligonucleotide
cuugucacuagaaagcgcc

SEQ ID NO: 2158153 - RNA, 19 nt, Artificial Sequence
  Description of Artificial Sequence: Synthetic oligonucleotide
uacaucuuccagaacaugc

SEQ ID NO: 2158154 - RNA, 19 nt, Artificial Sequence
  Description of Artificial Sequence: Synthetic oligonucleotide
ugaaagcacacauaguagc

SEQ ID NO: 2158155 - RNA, 19 nt, Artificial Sequence
  Description of Artificial Sequence: Synthetic oligonucleotide
aguuauuuuaacugcagga

SEQ ID NO: 2158156 - RNA, 19 nt, Artificial Sequence
  Description of Artificial Sequence: Synthetic oligonucleotide
ucgaauagaagcaacaguu

SEQ ID NO: 2158157 - RNA, 19 nt, Artificial Sequence
  Description of Artificial Sequence: Synthetic oligonucleotide
uaacugccaaucaaaaucc

SEQ ID NO: 2158158 - RNA, 19 nt, Artificial Sequence
  Description of Artificial Sequence: Synthetic oligonucleotide
uauuucucccaacagggcc

SEQ ID NO: 2158159 - RNA, 19 nt, Artificial Sequence
  Description of Artificial Sequence: Synthetic oligonucleotide
uuaccuuuucgauaaagca

SEQ ID NO: 2158160 - RNA, 19 nt, Artificial Sequence
  Description of Artificial Sequence: Synthetic oligonucleotide
guuuacauuacucuagaac

SEQ ID NO: 2158161 - RNA, 19 nt, Artificial Sequence
  Description of Artificial Sequence: Synthetic oligonucleotide
uuaucuaaagauuucucaa

SEQ ID NO: 2158162 - RNA, 19 nt, Artificial Sequence
  Description of Artificial Sequence: Synthetic oligonucleotide
uguaugucugcuuugugug

SEQ ID NO: 2158163 - RNA, 19 nt, Artificial Sequence
  Description of Artificial Sequence: Synthetic oligonucleotide
uaaaguggcgaucuuguca

SEQ ID NO: 2158164 - RNA, 19 nt, Artificial Sequence
  Description of Artificial Sequence: Synthetic oligonucleotide
aacaugcuuccauucaguc

SEQ ID NO: 2158165 - RNA, 19 nt, Artificial Sequence
  Description of Artificial Sequence: Synthetic oligonucleotide
acuauuucucccaacaggg

SEQ ID NO: 2158166 - RNA, 19 nt, Artificial Sequence
  Description of Artificial Sequence: Synthetic oligonucleotide
uauucgaauagaagcaaca

SEQ ID NO: 2158167 - RNA, 19 nt, Artificial Sequence
  Description of Artificial Sequence: Synthetic oligonucleotide
ugcuauucgaauagaagca

SEQ ID NO: 2158168 - RNA, 19 nt, Artificial Sequence
  Description of Artificial Sequence: Synthetic oligonucleotide
aagcaaucauugugaaagc

SEQ ID NO: 2158169 - RNA, 19 nt, Artificial Sequence
  Description of Artificial Sequence: Synthetic oligonucleotide
ugucuugcuauucgaauag

SEQ ID NO: 2158170 - RNA, 19 nt, Artificial Sequence
  Description of Artificial Sequence: Synthetic oligonucleotide
agcauuucauaacugcuuc

SEQ ID NO: 2158171 - RNA, 19 nt, Artificial Sequence
  Description of Artificial Sequence: Synthetic oligonucleotide
aaaauacaugucuugcuau

SEQ ID NO: 2158172 - RNA, 19 nt, Artificial Sequence
  Description of Artificial Sequence: Synthetic oligonucleotide
uguaaaguggcgaucuugu

SEQ ID NO: 2158173 - RNA, 19 nt, Artificial Sequence
  Description of Artificial Sequence: Synthetic oligonucleotide
aaagcgccagcuuuaacug

SEQ ID NO: 2158174 - RNA, 19 nt, Artificial Sequence
  Description of Artificial Sequence: Synthetic oligonucleotide
uuauuuugugaagaagcgg

SEQ ID NO: 2158175 - RNA, 19 nt, Artificial Sequence
  Description of Artificial Sequence: Synthetic oligonucleotide
aauacaugucuugcuauuc

SEQ ID NO: 2158176 - RNA, 19 nt, Artificial Sequence
  Description of Artificial Sequence: Synthetic oligonucleotide
cuuauuagcugcuuccaag

SEQ ID NO: 2158177 - RNA, 19 nt, Artificial Sequence
  Description of Artificial Sequence: Synthetic oligonucleotide
aauaaaugagacaaagcaa

SEQ ID NO: 2158178 - RNA, 19 nt, Artificial Sequence
  Description of Artificial Sequence: Synthetic oligonucleotide
cuugcuauucgaauagaag

SEQ ID NO: 2158179 - RNA, 19 nt, Artificial Sequence
  Description of Artificial Sequence: Synthetic oligonucleotide
uugaugacaagaauucagu

SEQ ID NO: 2158180 - RNA, 19 nt, Artificial Sequence
  Description of Artificial Sequence: Synthetic oligonucleotide
uuccauucagucaaauccc

SEQ ID NO: 2158181 - RNA, 19 nt, Artificial Sequence
  Description of Artificial Sequence: Synthetic oligonucleotide
uguagcauccaccuucuga

SEQ ID NO: 2158182 - RNA, 19 nt, Artificial Sequence
  Description of Artificial Sequence: Synthetic oligonucleotide
ucuaaagauuucucaaaca

SEQ ID NO: 2158183 - RNA, 19 nt, Artificial Sequence
  Description of Artificial Sequence: Synthetic oligonucleotide
auuuccaguuauuuuaacu

SEQ ID NO: 2158184 - RNA, 19 nt, Artificial Sequence
  Description of Artificial Sequence: Synthetic oligonucleotide
caucucuguaaucucagcg

SEQ ID NO: 2158185 - RNA, 19 nt, Artificial Sequence
  Description of Artificial Sequence: Synthetic oligonucleotide
auacaugucuugcuauucg

SEQ ID NO: 2158186 - RNA, 19 nt, Artificial Sequence
  Description of Artificial Sequence: Synthetic oligonucleotide
auaaaugagacaaagcaau

SEQ ID NO: 2158187 - RNA, 19 nt, Artificial Sequence
  Description of Artificial Sequence: Synthetic oligonucleotide
auuucucaaacauuuaaua

SEQ ID NO: 2158188 - RNA, 19 nt, Artificial Sequence
  Description of Artificial Sequence: Synthetic oligonucleotide
uucgaauagaagcaacagu

SEQ ID NO: 2158189 - RNA, 19 nt, Artificial Sequence
  Description of Artificial Sequence: Synthetic oligonucleotide
cauaacugcuucuugauga

SEQ ID NO: 2158190 - RNA, 19 nt, Artificial Sequence
  Description of Artificial Sequence: Synthetic oligonucleotide
aaucauugugaaagcacac

SEQ ID NO: 2158191 - RNA, 19 nt, Artificial Sequence
  Description of Artificial Sequence: Synthetic oligonucleotide
aacaugguuacaucuucca

SEQ ID NO: 2158192 - RNA, 19 nt, Artificial Sequence
  Description of Artificial Sequence: Synthetic oligonucleotide
uuccaguuauuuuaacugc

SEQ ID NO: 2158193 - RNA, 19 nt, Artificial Sequence
  Description of Artificial Sequence: Synthetic oligonucleotide
aauagaagcaacaguucug

SEQ ID NO: 2158194 - RNA, 19 nt, Artificial Sequence
  Description of Artificial Sequence: Synthetic oligonucleotide
uuccaaggaacuaauuaga

SEQ ID NO: 2158195 - RNA, 19 nt, Artificial Sequence
  Description of Artificial Sequence: Synthetic oligonucleotide
augaagguuuaaaaguggc

SEQ ID NO: 2158196 - RNA, 19 nt, Artificial Sequence
  Description of Artificial Sequence: Synthetic oligonucleotide
ugaagguuuaaaaguggca

SEQ ID NO: 2158197 - RNA, 19 nt, Artificial Sequence
  Description of Artificial Sequence: Synthetic oligonucleotide
ucgauaaagcauuaucuaa

SEQ ID NO: 2158198 - RNA, 19 nt, Artificial Sequence
  Description of Artificial Sequence: Synthetic oligonucleotide
aaagcacacauaguagcuc

SEQ ID NO: 2158199 - RNA, 19 nt, Artificial Sequence
  Description of Artificial Sequence: Synthetic oligonucleotide
ucaauuauuuugugaagaa

SEQ ID NO: 2158200 - RNA, 19 nt, Artificial Sequence
  Description of Artificial Sequence: Synthetic oligonucleotide
acaauuuccuguucuuuag

SEQ ID NO: 2158201 - RNA, 19 nt, Artificial Sequence
  Description of Artificial Sequence: Synthetic oligonucleotide
cucauuucaacagaguaug

SEQ ID NO: 2158202 - RNA, 19 nt, Artificial Sequence
  Description of Artificial Sequence: Synthetic oligonucleotide
aguggcaucuguaaagugg

SEQ ID NO: 2158203 - RNA, 19 nt, Artificial Sequence
  Description of Artificial Sequence: Synthetic oligonucleotide
ugaucuacaugugaguucu

SEQ ID NO: 2158204 - RNA, 19 nt, Artificial Sequence
  Description of Artificial Sequence: Synthetic oligonucleotide
uuugccacggugcagcacu

SEQ ID NO: 2158205 - RNA, 19 nt, Artificial Sequence
  Description of Artificial Sequence: Synthetic oligonucleotide
uaagcucggccacacaugc

SEQ ID NO: 2158206 - RNA, 19 nt, Artificial Sequence
  Description of Artificial Sequence: Synthetic oligonucleotide
agaucagucagagcuacac

SEQ ID NO: 2158207 - RNA, 19 nt, Artificial Sequence
  Description of Artificial Sequence: Synthetic oligonucleotide
gguuacaucuuccagaaca

SEQ ID NO: 2158208 - RNA, 19 nt, Artificial Sequence
  Description of Artificial Sequence: Synthetic oligonucleotide
ugcugacagauuuucaucu

SEQ ID NO: 2158209 - RNA, 19 nt, Artificial Sequence
  Description of Artificial Sequence: Synthetic oligonucleotide
agauuucucaaacauuuaa

SEQ ID NO: 2158210 - RNA, 19 nt, Artificial Sequence
  Description of Artificial Sequence: Synthetic oligonucleotide
cugugcacaagaaauauca

SEQ ID NO: 2158211 - RNA, 19 nt, Artificial Sequence
  Description of Artificial Sequence: Synthetic oligonucleotide
ugcuguagcauccaccuuc

SEQ ID NO: 2158212 - RNA, 19 nt, Artificial Sequence
  Description of Artificial Sequence: Synthetic oligonucleotide
aucaauuauuuugugaaga

SEQ ID NO: 2158213 - RNA, 19 nt, Artificial Sequence
  Description of Artificial Sequence: Synthetic oligonucleotide
uucgauaaagcauuaucua

SEQ ID NO: 2158214 - RNA, 19 nt, Artificial Sequence
  Description of Artificial Sequence: Synthetic oligonucleotide
ucauuucaacagaguaugg

SEQ ID NO: 2158215 - RNA, 19 nt, Artificial Sequence
  Description of Artificial Sequence: Synthetic oligonucleotide
uuucaacagaguaugguuu

SEQ ID NO: 2158216 - RNA, 19 nt, Artificial Sequence
  Description of Artificial Sequence: Synthetic oligonucleotide
aaagcauuaucuaaagauu

SEQ ID NO: 2158217 - RNA, 19 nt, Artificial Sequence
  Description of Artificial Sequence: Synthetic oligonucleotide
auaaucauggugggcaggg

SEQ ID NO: 2158218 - RNA, 19 nt, Artificial Sequence
  Description of Artificial Sequence: Synthetic oligonucleotide
ucugaacacagcauucacu

SEQ ID NO: 2158219 - RNA, 19 nt, Artificial Sequence
  Description of Artificial Sequence: Synthetic oligonucleotide
ucuguaaucucagcguugc

SEQ ID NO: 2158220 - RNA, 19 nt, Artificial Sequence
  Description of Artificial Sequence: Synthetic oligonucleotide
aacagaguaugguuucacu

SEQ ID NO: 2158221 - RNA, 19 nt, Artificial Sequence
  Description of Artificial Sequence: Synthetic oligonucleotide
uuguguguuuacauuacuc

SEQ ID NO: 2158222 - RNA, 19 nt, Artificial Sequence
  Description of Artificial Sequence: Synthetic oligonucleotide
caguuauuuuaacugcagg

SEQ ID NO: 2158223 - RNA, 19 nt, Artificial Sequence
  Description of Artificial Sequence: Synthetic oligonucleotide
uuuaacugccaaucaaaau

SEQ ID NO: 2158224 - RNA, 19 nt, Artificial Sequence
  Description of Artificial Sequence: Synthetic oligonucleotide
uucaagcauuucauaacug

SEQ ID NO: 2158225 - RNA, 19 nt, Artificial Sequence
  Description of Artificial Sequence: Synthetic oligonucleotide
cugccaaucaaaauccuuc

SEQ ID NO: 2158226 - RNA, 19 nt, Artificial Sequence
  Description of Artificial Sequence: Synthetic oligonucleotide
ucaaaucccaaaugcugug

SEQ ID NO: 2158227 - RNA, 19 nt, Artificial Sequence
  Description of Artificial Sequence: Synthetic oligonucleotide
ucuugcuauucgaauagaa

SEQ ID NO: 2158228 - RNA, 19 nt, Artificial Sequence
  Description of Artificial Sequence: Synthetic oligonucleotide
aucuugucacuagaaagcg

SEQ ID NO: 2158229 - RNA, 19 nt, Artificial Sequence
  Description of Artificial Sequence: Synthetic oligonucleotide
auucgaauagaagcaacag

SEQ ID NO: 2158230 - RNA, 19 nt, Artificial Sequence
  Description of Artificial Sequence: Synthetic oligonucleotide
auaaagcauuaucuaaaga

SEQ ID NO: 2158231 - RNA, 19 nt, Artificial Sequence
  Description of Artificial Sequence: Synthetic oligonucleotide
aucucuguaaucucagcgu

SEQ ID NO: 2158232 - RNA, 19 nt, Artificial Sequence
  Description of Artificial Sequence: Synthetic oligonucleotide
aaaucugguaauguugaaa

SEQ ID NO: 2158233 - RNA, 19 nt, Artificial Sequence
  Description of Artificial Sequence: Synthetic oligonucleotide
uuacucuagaacuuauuuu

SEQ ID NO: 2158234 - RNA, 19 nt, Artificial Sequence
  Description of Artificial Sequence: Synthetic oligonucleotide
caucaauuauuuugugaag

SEQ ID NO: 2158235 - RNA, 19 nt, Artificial Sequence
  Description of Artificial Sequence: Synthetic oligonucleotide
ucuacaugugaguucuaga

SEQ ID NO: 2158236 - RNA, 19 nt, Artificial Sequence
  Description of Artificial Sequence: Synthetic oligonucleotide
ugauaaucauggugggcag

SEQ ID NO: 2158237 - RNA, 19 nt, Artificial Sequence
  Description of Artificial Sequence: Synthetic oligonucleotide
gaauagaagcaacaguucu

SEQ ID NO: 2158238 - RNA, 19 nt, Artificial Sequence
  Description of Artificial Sequence: Synthetic oligonucleotide
acuagaaagcgccagcuuu

SEQ ID NO: 2158239 - RNA, 19 nt, Artificial Sequence
  Description of Artificial Sequence: Synthetic oligonucleotide
ucuccuuuacauccagaug

SEQ ID NO: 2158240 - RNA, 19 nt, Artificial Sequence
  Description of Artificial Sequence: Synthetic oligonucleotide
uacaauuuccuguucuuua

SEQ ID NO: 2158241 - RNA, 19 nt, Artificial Sequence
  Description of Artificial Sequence: Synthetic oligonucleotide
aaaucccaaaugcugugau

SEQ ID NO: 2158242 - RNA, 19 nt, Artificial Sequence
  Description of Artificial Sequence: Synthetic oligonucleotide
caaucauugugaaagcaca

SEQ ID NO: 2158243 - RNA, 19 nt, Artificial Sequence
  Description of Artificial Sequence: Synthetic oligonucleotide
caccuuauuagcugcuucc

SEQ ID NO: 2158244 - RNA, 19 nt, Artificial Sequence
  Description of Artificial Sequence: Synthetic oligonucleotide
aucaacuauuucucccaac

SEQ ID NO: 2158245 - RNA, 19 nt, Artificial Sequence
  Description of Artificial Sequence: Synthetic oligonucleotide
aaaugcugugauaaucaug

SEQ ID NO: 2158246 - RNA, 19 nt, Artificial Sequence
  Description of Artificial Sequence: Synthetic oligonucleotide
aagcauuaucuaaagauuu

SEQ ID NO: 2158247 - RNA, 19 nt, Artificial Sequence
  Description of Artificial Sequence: Synthetic oligonucleotide
ugguucaacugcuggagug

SEQ ID NO: 2158248 - RNA, 19 nt, Artificial Sequence
  Description of Artificial Sequence: Synthetic oligonucleotide
gugcacaagaaauaucaac

SEQ ID NO: 2158249 - RNA, 19 nt, Artificial Sequence
  Description of Artificial Sequence: Synthetic oligonucleotide
uucaacagaguaugguuuc

SEQ ID NO: 2158250 - RNA, 19 nt, Artificial Sequence
  Description of Artificial Sequence: Synthetic oligonucleotide
uuacauuacucuagaacuu

SEQ ID NO: 2158251 - RNA, 19 nt, Artificial Sequence
  Description of Artificial Sequence: Synthetic oligonucleotide
auagaagcaacaguucugu

SEQ ID NO: 2158252 - RNA, 19 nt, Artificial Sequence
  Description of Artificial Sequence: Synthetic oligonucleotide
cuauucgaauagaagcaac

SEQ ID NO: 2158253 - RNA, 19 nt, Artificial Sequence
  Description of Artificial Sequence: Synthetic oligonucleotide
cagaguaugguuucacuuc

SEQ ID NO: 2158254 - RNA, 19 nt, Artificial Sequence
  Description of Artificial Sequence: Synthetic oligonucleotide
ucuugucacuagaaagcgc

SEQ ID NO: 2158255 - RNA, 19 nt, Artificial Sequence
  Description of Artificial Sequence: Synthetic oligonucleotide
aggaccaccuuauuagcug

SEQ ID NO: 2158256 - RNA, 19 nt, Artificial Sequence
  Description of Artificial Sequence: Synthetic oligonucleotide
gaacuaauuagacucugua

SEQ ID NO: 2158257 - RNA, 19 nt, Artificial Sequence
  Description of Artificial Sequence: Synthetic oligonucleotide
auuuccuguucuuuagggu

SEQ ID NO: 2158258 - RNA, 19 nt, Artificial Sequence
  Description of Artificial Sequence: Synthetic oligonucleotide
uccauucagucaaauccca

SEQ ID NO: 2158259 - RNA, 19 nt, Artificial Sequence
  Description of Artificial Sequence: Synthetic oligonucleotide
uucugaacacagcauucac

SEQ ID NO: 2158260 - RNA, 19 nt, Artificial Sequence
  Description of Artificial Sequence: Synthetic oligonucleotide
aguugguucaacugcugga

SEQ ID NO: 2158261 - RNA, 19 nt, Artificial Sequence
  Description of Artificial Sequence: Synthetic oligonucleotide
guagcauccaccuucugaa

SEQ ID NO: 2158262 - RNA, 19 nt, Artificial Sequence
  Description of Artificial Sequence: Synthetic oligonucleotide
gguaauguugaaauucacc

SEQ ID NO: 2158263 - RNA, 19 nt, Artificial Sequence
  Description of Artificial Sequence: Synthetic oligonucleotide
guugguucaacugcuggag

SEQ ID NO: 2158264 - RNA, 19 nt, Artificial Sequence
  Description of Artificial Sequence: Synthetic oligonucleotide
ccaaucaaaauccuucagc

SEQ ID NO: 2158265 - RNA, 19 nt, Artificial Sequence
  Description of Artificial Sequence: Synthetic oligonucleotide
gauaaucauggugggcagg

SEQ ID NO: 2158266 - RNA, 19 nt, Artificial Sequence
  Description of Artificial Sequence: Synthetic oligonucleotide
uguugaaauucaccauuuc

SEQ ID NO: 2158267 - RNA, 19 nt, Artificial Sequence
  Description of Artificial Sequence: Synthetic oligonucleotide
auuagcugcuuccaaggaa

SEQ ID NO: 2158268 - RNA, 19 nt, Artificial Sequence
  Description of Artificial Sequence: Synthetic oligonucleotide
uguucuuuagggugcugac

SEQ ID NO: 2158269 - RNA, 19 nt, Artificial Sequence
  Description of Artificial Sequence: Synthetic oligonucleotide
uucagcugugcacaagaaa

SEQ ID NO: 2158270 - RNA, 19 nt, Artificial Sequence
  Description of Artificial Sequence: Synthetic oligonucleotide
gugaaagcacacauaguag

SEQ ID NO: 2158271 - RNA, 19 nt, Artificial Sequence
  Description of Artificial Sequence: Synthetic oligonucleotide
cagaugaagguuuaaaagu

SEQ ID NO: 2158272 - RNA, 19 nt, Artificial Sequence
  Description of Artificial Sequence: Synthetic oligonucleotide
ugaugacaagaauucaguu

SEQ ID NO: 2158273 - RNA, 19 nt, Artificial Sequence
  Description of Artificial Sequence: Synthetic oligonucleotide
acacauaguagcuccaguu

SEQ ID NO: 2158274 - RNA, 19 nt, Artificial Sequence
  Description of Artificial Sequence: Synthetic oligonucleotide
auuuugugaagaagcgggg

SEQ ID NO: 2158275 - RNA, 19 nt, Artificial Sequence
  Description of Artificial Sequence: Synthetic oligonucleotide
aaguggcaucuguaaagug

SEQ ID NO: 2158276 - RNA, 19 nt, Artificial Sequence
  Description of Artificial Sequence: Synthetic oligonucleotide
ugugauaaucauggugggc

SEQ ID NO: 2158277 - RNA, 19 nt, Artificial Sequence
  Description of Artificial Sequence: Synthetic oligonucleotide
cuauuucucccaacagggc

SEQ ID NO: 2158278 - RNA, 19 nt, Artificial Sequence
  Description of Artificial Sequence: Synthetic oligonucleotide
uccggaggcaacuucugca

SEQ ID NO: 2158279 - RNA, 19 nt, Artificial Sequence
  Description of Artificial Sequence: Synthetic oligonucleotide
uguaaucucagcguugcuu

SEQ ID NO: 2158280 - RNA, 19 nt, Artificial Sequence
  Description of Artificial Sequence: Synthetic oligonucleotide
agcgccagcuuuaacugcc

SEQ ID NO: 2158281 - RNA, 19 nt, Artificial Sequence
  Description of Artificial Sequence: Synthetic oligonucleotide
ucuagaucagucagagcua

SEQ ID NO: 2158282 - RNA, 19 nt, Artificial Sequence
  Description of Artificial Sequence: Synthetic oligonucleotide
ucuguaugucugcuuugug

SEQ ID NO: 2158283 - RNA, 19 nt, Artificial Sequence
  Description of Artificial Sequence: Synthetic oligonucleotide
cugguaauguugaaauuca

SEQ ID NO: 2158284 - RNA, 19 nt, Artificial Sequence
  Description of Artificial Sequence: Synthetic oligonucleotide
acaugcuuccauucaguca

SEQ ID NO: 2158285 - RNA, 19 nt, Artificial Sequence
  Description of Artificial Sequence: Synthetic oligonucleotide
agcuuuaacugccaaucaa

SEQ ID NO: 2158286 - RNA, 19 nt, Artificial Sequence
  Description of Artificial Sequence: Synthetic oligonucleotide
aucuguaaaguggcgaucu

SEQ ID NO: 2158287 - RNA, 19 nt, Artificial Sequence
  Description of Artificial Sequence: Synthetic oligonucleotide
aucuacaugugaguucuag

SEQ ID NO: 2158288 - RNA, 19 nt, Artificial Sequence
  Description of Artificial Sequence: Synthetic oligonucleotide
uaauuagacucuguagcuc

SEQ ID NO: 2158289 - RNA, 19 nt, Artificial Sequence
  Description of Artificial Sequence: Synthetic oligonucleotide
gaagguuuaaaaguggcau

SEQ ID NO: 2158290 - RNA, 19 nt, Artificial Sequence
  Description of Artificial Sequence: Synthetic oligonucleotide
agcucggccacacaugcca

SEQ ID NO: 2158291 - RNA, 19 nt, Artificial Sequence
  Description of Artificial Sequence: Synthetic oligonucleotide
uuuuaacugcaggaccacc

SEQ ID NO: 2158292 - RNA, 19 nt, Artificial Sequence
  Description of Artificial Sequence: Synthetic oligonucleotide
augucuugcuauucgaaua

SEQ ID NO: 2158293 - RNA, 19 nt, Artificial Sequence
  Description of Artificial Sequence: Synthetic oligonucleotide
ucaguugguucaacugcug

SEQ ID NO: 2158294 - RNA, 19 nt, Artificial Sequence
  Description of Artificial Sequence: Synthetic oligonucleotide
uccaccuucugaacacagc

SEQ ID NO: 2158295 - RNA, 19 nt, Artificial Sequence
  Description of Artificial Sequence: Synthetic oligonucleotide
cuuuacucauuucaacaga

SEQ ID NO: 2158296 - RNA, 19 nt, Artificial Sequence
  Description of Artificial Sequence: Synthetic oligonucleotide
uugugaaagcacacauagu

SEQ ID NO: 2158297 - RNA, 19 nt, Artificial Sequence
  Description of Artificial Sequence: Synthetic oligonucleotide
ucuuccgccuccaucccga

SEQ ID NO: 2158298 - RNA, 19 nt, Artificial Sequence
  Description of Artificial Sequence: Synthetic oligonucleotide
uacauuacucuagaacuua

SEQ ID NO: 2158299 - RNA, 19 nt, Artificial Sequence
  Description of Artificial Sequence: Synthetic oligonucleotide
cugaucuacaugugaguuc

SEQ ID NO: 2158300 - RNA, 19 nt, Artificial Sequence
  Description of Artificial Sequence: Synthetic oligonucleotide
aucauugugaaagcacaca

SEQ ID NO: 2158301 - RNA, 19 nt, Artificial Sequence
  Description of Artificial Sequence: Synthetic oligonucleotide
cuagaucagucagagcuac

SEQ ID NO: 2158302 - RNA, 19 nt, Artificial Sequence
  Description of Artificial Sequence: Synthetic oligonucleotide
cuaauuagacucuguagcu

SEQ ID NO: 2158303 - RNA, 19 nt, Artificial Sequence
  Description of Artificial Sequence: Synthetic oligonucleotide
aaucccaaaugcugugaua

SEQ ID NO: 2158304 - RNA, 19 nt, Artificial Sequence
  Description of Artificial Sequence: Synthetic oligonucleotide
uuaacugcaggaccaccuu

SEQ ID NO: 2158305 - RNA, 19 nt, Artificial Sequence
  Description of Artificial Sequence: Synthetic oligonucleotide
ugcuccggaggcaacuucu

SEQ ID NO: 2158306 - RNA, 19 nt, Artificial Sequence
  Description of Artificial Sequence: Synthetic oligonucleotide
aggcaacuucugcagccgc

SEQ ID NO: 2158307 - RNA, 19 nt, Artificial Sequence
  Description of Artificial Sequence: Synthetic oligonucleotide
agccauacaauuuccuguu

SEQ ID NO: 2158308 - RNA, 19 nt, Artificial Sequence
  Description of Artificial Sequence: Synthetic oligonucleotide
cauucagucaaaucccaaa

SEQ ID NO: 2158309 - RNA, 19 nt, Artificial Sequence
  Description of Artificial Sequence: Synthetic oligonucleotide
agccugaucuacaugugag

SEQ ID NO: 2158310 - RNA, 19 nt, Artificial Sequence
  Description of Artificial Sequence: Synthetic oligonucleotide
accuuuucgauaaagcauu

SEQ ID NO: 2158311 - RNA, 19 nt, Artificial Sequence
  Description of Artificial Sequence: Synthetic oligonucleotide
agggugcugacagauuuuc

SEQ ID NO: 2158312 - RNA, 19 nt, Artificial Sequence
  Description of Artificial Sequence: Synthetic oligonucleotide
agcaaucauugugaaagca

SEQ ID NO: 2158313 - RNA, 19 nt, Artificial Sequence
  Description of Artificial Sequence: Synthetic oligonucleotide
cauucacuuugccacggug

SEQ ID NO: 2158314 - RNA, 19 nt, Artificial Sequence
  Description of Artificial Sequence: Synthetic oligonucleotide
uugucacuagaaagcgcca

SEQ ID NO: 2158315 - RNA, 19 nt, Artificial Sequence
  Description of Artificial Sequence: Synthetic oligonucleotide
cuguagcuccucuuuacuc

SEQ ID NO: 2158316 - RNA, 19 nt, Artificial Sequence
  Description of Artificial Sequence: Synthetic oligonucleotide
ugacaagaauucaguuggu

SEQ ID NO: 2158317 - RNA, 19 nt, Artificial Sequence
  Description of Artificial Sequence: Synthetic oligonucleotide
cuguaaaguggcgaucuug

SEQ ID NO: 2158318 - RNA, 19 nt, Artificial Sequence
  Description of Artificial Sequence: Synthetic oligonucleotide
ugccaucaauuauuuugug

SEQ ID NO: 2158319 - RNA, 19 nt, Artificial Sequence
  Description of Artificial Sequence: Synthetic oligonucleotide
agcauucacuuugccacgg

SEQ ID NO: 2158320 - RNA, 19 nt, Artificial Sequence
  Description of Artificial Sequence: Synthetic oligonucleotide
cagcauucacuuugccacg

SEQ ID NO: 2158321 - RNA, 19 nt, Artificial Sequence
  Description of Artificial Sequence: Synthetic oligonucleotide
aggaacuaauuagacucug

SEQ ID NO: 2158322 - RNA, 19 nt, Artificial Sequence
  Description of Artificial Sequence: Synthetic oligonucleotide
ucagcguugcuuccugcuc

SEQ ID NO: 2158323 - RNA, 19 nt, Artificial Sequence
  Description of Artificial Sequence: Synthetic oligonucleotide
uucaccauuuccaguuauu

SEQ ID NO: 2158324 - RNA, 19 nt, Artificial Sequence
  Description of Artificial Sequence: Synthetic oligonucleotide
guguguuuacauuacucua

SEQ ID NO: 2158325 - RNA, 19 nt, Artificial Sequence
  Description of Artificial Sequence: Synthetic oligonucleotide
guggcgaucuugucacuag

SEQ ID NO: 2158326 - RNA, 19 nt, Artificial Sequence
  Description of Artificial Sequence: Synthetic oligonucleotide
auucaccauuuccaguuau

SEQ ID NO: 2158327 - RNA, 19 nt, Artificial Sequence
  Description of Artificial Sequence: Synthetic oligonucleotide
ccaguuauuuuaacugcag

SEQ ID NO: 2158328 - RNA, 19 nt, Artificial Sequence
  Description of Artificial Sequence: Synthetic oligonucleotide
aacugcaggaccaccuuau

SEQ ID NO: 2158329 - RNA, 19 nt, Artificial Sequence
  Description of Artificial Sequence: Synthetic oligonucleotide
uggcgaucuugucacuaga

SEQ ID NO: 2158330 - RNA, 19 nt, Artificial Sequence
  Description of Artificial Sequence: Synthetic oligonucleotide
gaaagcacacauaguagcu

SEQ ID NO: 2158331 - RNA, 19 nt, Artificial Sequence
  Description of Artificial Sequence: Synthetic oligonucleotide
gcaaucauugugaaagcac

SEQ ID NO: 2158332 - RNA, 19 nt, Artificial Sequence
  Description of Artificial Sequence: Synthetic oligonucleotide
cagaacaugcuuccauuca

SEQ ID NO: 2158333 - RNA, 19 nt, Artificial Sequence
  Description of Artificial Sequence: Synthetic oligonucleotide
aggguaagcucggccacac

SEQ ID NO: 2158334 - RNA, 19 nt, Artificial Sequence
  Description of Artificial Sequence: Synthetic oligonucleotide
agugucucuucaucugaaa

SEQ ID NO: 2158335 - RNA, 19 nt, Artificial Sequence
  Description of Artificial Sequence: Synthetic oligonucleotide
cagcacugaaaucugguaa

SEQ ID NO: 2158336 - RNA, 19 nt, Artificial Sequence
  Description of Artificial Sequence: Synthetic oligonucleotide
gccaucaauuauuuuguga

SEQ ID NO: 2158337 - RNA, 19 nt, Artificial Sequence
  Description of Artificial Sequence: Synthetic oligonucleotide
cuguaugucugcuuugugu

SEQ ID NO: 2158338 - RNA, 19 nt, Artificial Sequence
  Description of Artificial Sequence: Synthetic oligonucleotide
guucuagaucagucagagc

SEQ ID NO: 2158339 - RNA, 19 nt, Artificial Sequence
  Description of Artificial Sequence: Synthetic oligonucleotide
guaagcucggccacacaug

SEQ ID NO: 2158340 - RNA, 19 nt, Artificial Sequence
  Description of Artificial Sequence: Synthetic oligonucleotide
aagcucggccacacaugcc

SEQ ID NO: 2158341 - RNA, 19 nt, Artificial Sequence
  Description of Artificial Sequence: Synthetic oligonucleotide
guaaaguggcgaucuuguc

SEQ ID NO: 2158342 - RNA, 19 nt, Artificial Sequence
  Description of Artificial Sequence: Synthetic oligonucleotide
cuagaaagcgccagcuuua

SEQ ID NO: 2158343 - RNA, 19 nt, Artificial Sequence
  Description of Artificial Sequence: Synthetic oligonucleotide
ugaacacagcauucacuuu

SEQ ID NO: 2158344 - RNA, 19 nt, Artificial Sequence
  Description of Artificial Sequence: Synthetic oligonucleotide
ccagcuuuaacugccaauc

SEQ ID NO: 2158345 - RNA, 19 nt, Artificial Sequence
  Description of Artificial Sequence: Synthetic oligonucleotide
gccaaucaaaauccuucag

SEQ ID NO: 2158346 - RNA, 19 nt, Artificial Sequence
  Description of Artificial Sequence: Synthetic oligonucleotide
accuuauuagcugcuucca

SEQ ID NO: 2158347 - RNA, 19 nt, Artificial Sequence
  Description of Artificial Sequence: Synthetic oligonucleotide
cauugugaaagcacacaua

SEQ ID NO: 2158348 - RNA, 19 nt, Artificial Sequence
  Description of Artificial Sequence: Synthetic oligonucleotide
acaguucuguaugucugcu

SEQ ID NO: 2158349 - RNA, 19 nt, Artificial Sequence
  Description of Artificial Sequence: Synthetic oligonucleotide
caacagaguaugguuucac

SEQ ID NO: 2158350 - RNA, 19 nt, Artificial Sequence
  Description of Artificial Sequence: Synthetic oligonucleotide
ccucuuuacucauuucaac

SEQ ID NO: 2158351 - RNA, 19 nt, Artificial Sequence
  Description of Artificial Sequence: Synthetic oligonucleotide
ucuguaaaguggcgaucuu

SEQ ID NO: 2158352 - RNA, 19 nt, Artificial Sequence
  Description of Artificial Sequence: Synthetic oligonucleotide
ucucagcguugcuuccugc

SEQ ID NO: 2158353 - RNA, 19 nt, Artificial Sequence
  Description of Artificial Sequence: Synthetic oligonucleotide
acggugcagcacugaaauc

SEQ ID NO: 2158354 - RNA, 19 nt, Artificial Sequence
  Description of Artificial Sequence: Synthetic oligonucleotide
auguugaaauucaccauuu

SEQ ID NO: 2158355 - RNA, 19 nt, Artificial Sequence
  Description of Artificial Sequence: Synthetic oligonucleotide
cagccauacaauuuccugu

SEQ ID NO: 2158356 - RNA, 19 nt, Artificial Sequence
  Description of Artificial Sequence: Synthetic oligonucleotide
acucuguagcuccucuuua

SEQ ID NO: 2158357 - RNA, 19 nt, Artificial Sequence
  Description of Artificial Sequence: Synthetic oligonucleotide
cuccggaggcaacuucugc

SEQ ID NO: 2158358 - RNA, 19 nt, Artificial Sequence
  Description of Artificial Sequence: Synthetic oligonucleotide
cauuucaacagaguauggu

SEQ ID NO: 2158359 - RNA, 19 nt, Artificial Sequence
  Description of Artificial Sequence: Synthetic oligonucleotide
uuagacucuguagcuccuc

SEQ ID NO: 2158360 - RNA, 19 nt, Artificial Sequence
  Description of Artificial Sequence: Synthetic oligonucleotide
cagucaaaucccaaaugcu

SEQ ID NO: 2158361 - RNA, 19 nt, Artificial Sequence
  Description of Artificial Sequence: Synthetic oligonucleotide
ugguuacaucuuccagaac

SEQ ID NO: 2158362 - RNA, 19 nt, Artificial Sequence
  Description of Artificial Sequence: Synthetic oligonucleotide
acaugucuugcuauucgaa

SEQ ID NO: 2158363 - RNA, 19 nt, Artificial Sequence
  Description of Artificial Sequence: Synthetic oligonucleotide
gcuuuaacugccaaucaaa

SEQ ID NO: 2158364 - RNA, 19 nt, Artificial Sequence
  Description of Artificial Sequence: Synthetic oligonucleotide
uagaagcaacaguucugua

SEQ ID NO: 2158365 - RNA, 19 nt, Artificial Sequence
  Description of Artificial Sequence: Synthetic oligonucleotide
caucuguaaaguggcgauc

SEQ ID NO: 2158366 - RNA, 19 nt, Artificial Sequence
  Description of Artificial Sequence: Synthetic oligonucleotide
cugacagauuuucaucucu

SEQ ID NO: 2158367 - RNA, 19 nt, Artificial Sequence
  Description of Artificial Sequence: Synthetic oligonucleotide
aaguggcgaucuugucacu

SEQ ID NO: 2158368 - RNA, 19 nt, Artificial Sequence
  Description of Artificial Sequence: Synthetic oligonucleotide
caugucuugcuauucgaau

SEQ ID NO: 2158369 - RNA, 19 nt, Artificial Sequence
  Description of Artificial Sequence: Synthetic oligonucleotide
auuagacucuguagcuccu

SEQ ID NO: 2158370 - RNA, 19 nt, Artificial Sequence
  Description of Artificial Sequence: Synthetic oligonucleotide
cuggagugucucuucaucu

SEQ ID NO: 2158371 - RNA, 19 nt, Artificial Sequence
  Description of Artificial Sequence: Synthetic oligonucleotide
ggugcugacagauuuucau

SEQ ID NO: 2158372 - RNA, 19 nt, Artificial Sequence
  Description of Artificial Sequence: Synthetic oligonucleotide
cgaauagaagcaacaguuc

SEQ ID NO: 2158373 - RNA, 19 nt, Artificial Sequence
  Description of Artificial Sequence: Synthetic oligonucleotide
cagcuuuaacugccaauca

SEQ ID NO: 2158374 - RNA, 19 nt, Artificial Sequence
  Description of Artificial Sequence: Synthetic oligonucleotide
acuucaccauucuccuuua

SEQ ID NO: 2158375 - RNA, 19 nt, Artificial Sequence
  Description of Artificial Sequence: Synthetic oligonucleotide
gaacaugcuuccauucagu

SEQ ID NO: 2158376 - RNA, 19 nt, Artificial Sequence
  Description of Artificial Sequence: Synthetic oligonucleotide
cagccugaucuacauguga

SEQ ID NO: 2158377 - RNA, 19 nt, Artificial Sequence
  Description of Artificial Sequence: Synthetic oligonucleotide
uccuguucuuuagggugcu

SEQ ID NO: 2158378 - RNA, 19 nt, Artificial Sequence
  Description of Artificial Sequence: Synthetic oligonucleotide
uugccacggugcagcacug

SEQ ID NO: 2158379 - RNA, 19 nt, Artificial Sequence
  Description of Artificial Sequence: Synthetic oligonucleotide
guucaacugcuggaguguc

SEQ ID NO: 2158380 - RNA, 19 nt, Artificial Sequence
  Description of Artificial Sequence: Synthetic oligonucleotide
gcauuaucuaaagauuucu

SEQ ID NO: 2158381 - RNA, 19 nt, Artificial Sequence
  Description of Artificial Sequence: Synthetic oligonucleotide
acaugccaucaauuauuuu

SEQ ID NO: 2158382 - RNA, 19 nt, Artificial Sequence
  Description of Artificial Sequence: Synthetic oligonucleotide
aguggcgaucuugucacua

SEQ ID NO: 2158383 - RNA, 19 nt, Artificial Sequence
  Description of Artificial Sequence: Synthetic oligonucleotide
ccggaggcaacuucugcag

SEQ ID NO: 2158384 - RNA, 19 nt, Artificial Sequence
  Description of Artificial Sequence: Synthetic oligonucleotide
gcugacagauuuucaucuc

SEQ ID NO: 2158385 - RNA, 19 nt, Artificial Sequence
  Description of Artificial Sequence: Synthetic oligonucleotide
cuucagcugugcacaagaa

SEQ ID NO: 2158386 - RNA, 19 nt, Artificial Sequence
  Description of Artificial Sequence: Synthetic oligonucleotide
guaugucugcuuugugugu

SEQ ID NO: 2158387 - RNA, 19 nt, Artificial Sequence
  Description of Artificial Sequence: Synthetic oligonucleotide
gcuauucgaauagaagcaa

SEQ ID NO: 2158388 - RNA, 19 nt, Artificial Sequence
  Description of Artificial Sequence: Synthetic oligonucleotide
cacacaugccaucaauuau

SEQ ID NO: 2158389 - RNA, 19 nt, Artificial Sequence
  Description of Artificial Sequence: Synthetic oligonucleotide
gacaagaauucaguugguu

SEQ ID NO: 2158390 - RNA, 19 nt, Artificial Sequence
  Description of Artificial Sequence: Synthetic oligonucleotide
caacuucugcagccgccac

SEQ ID NO: 2158391 - RNA, 19 nt, Artificial Sequence
  Description of Artificial Sequence: Synthetic oligonucleotide
cugcaggaccaccuuauua

SEQ ID NO: 2158392 - RNA, 19 nt, Artificial Sequence
  Description of Artificial Sequence: Synthetic oligonucleotide
gcgaucuugucacuagaaa

SEQ ID NO: 2158393 - RNA, 19 nt, Artificial Sequence
  Description of Artificial Sequence: Synthetic oligonucleotide
cuuuccuaucagccauaca

SEQ ID NO: 2158394 - RNA, 19 nt, Artificial Sequence
  Description of Artificial Sequence: Synthetic oligonucleotide
cucggccacacaugccauc

SEQ ID NO: 2158395 - RNA, 19 nt, Artificial Sequence
  Description of Artificial Sequence: Synthetic oligonucleotide
acauccagaugaagguuua

SEQ ID NO: 2158396 - RNA, 19 nt, Artificial Sequence
  Description of Artificial Sequence: Synthetic oligonucleotide
gucuugcuauucgaauaga

SEQ ID NO: 2158397 - RNA, 19 nt, Artificial Sequence
  Description of Artificial Sequence: Synthetic oligonucleotide
ggcggcguaccgucuuccg

SEQ ID NO: 2158398 - RNA, 19 nt, Artificial Sequence
  Description of Artificial Sequence: Synthetic oligonucleotide
cuuugccacggugcagcac

SEQ ID NO: 2158399 - RNA, 19 nt, Artificial Sequence
  Description of Artificial Sequence: Synthetic oligonucleotide
cuuccgccuccaucccgag

SEQ ID NO: 2158400 - RNA, 19 nt, Artificial Sequence
  Description of Artificial Sequence: Synthetic oligonucleotide
cucagcguugcuuccugcu

SEQ ID NO: 2158401 - RNA, 19 nt, Artificial Sequence
  Description of Artificial Sequence: Synthetic oligonucleotide
gggcaggguaagcucggcc

SEQ ID NO: 2158402 - RNA, 19 nt, Artificial Sequence
  Description of Artificial Sequence: Synthetic oligonucleotide
cggcguaccgucuuccgcc

SEQ ID NO: 2158403 - RNA, 19 nt, Artificial Sequence
  Description of Artificial Sequence: Synthetic oligonucleotide
cacaugccaucaauuauuu

SEQ ID NO: 2158404 - RNA, 19 nt, Artificial Sequence
  Description of Artificial Sequence: Synthetic oligonucleotide
ccuuuacauccagaugaag

SEQ ID NO: 2158405 - RNA, 19 nt, Artificial Sequence
  Description of Artificial Sequence: Synthetic oligonucleotide
gcaucuguaaaguggcgau

SEQ ID NO: 2158406 - RNA, 19 nt, Artificial Sequence
  Description of Artificial Sequence: Synthetic oligonucleotide
cacacauaguagcuccagu

SEQ ID NO: 2158407 - RNA, 19 nt, Artificial Sequence
  Description of Artificial Sequence: Synthetic oligonucleotide
accaccuuauuagcugcuu

SEQ ID NO: 2158408 - RNA, 19 nt, Artificial Sequence
  Description of Artificial Sequence: Synthetic oligonucleotide
agcugcuuccaaggaacua

SEQ ID NO: 2158409 - RNA, 19 nt, Artificial Sequence
  Description of Artificial Sequence: Synthetic oligonucleotide
cguaccgucuuccgccucc

SEQ ID NO: 2158410 - RNA, 19 nt, Artificial Sequence
  Description of Artificial Sequence: Synthetic oligonucleotide
ggaacuaauuagacucugu

SEQ ID NO: 2158411 - RNA, 19 nt, Artificial Sequence
  Description of Artificial Sequence: Synthetic oligonucleotide
cuguagcauccaccuucug

SEQ ID NO: 2158412 - RNA, 19 nt, Artificial Sequence
  Description of Artificial Sequence: Synthetic oligonucleotide
gcggcguaccgucuuccgc

SEQ ID NO: 2158413 - RNA, 19 nt, Artificial Sequence
  Description of Artificial Sequence: Synthetic oligonucleotide
ugccacggugcagcacuga

SEQ ID NO: 2158414 - RNA, 19 nt, Artificial Sequence
  Description of Artificial Sequence: Synthetic oligonucleotide
gguucaacugcuggagugu

SEQ ID NO: 2158415 - RNA, 19 nt, Artificial Sequence
  Description of Artificial Sequence: Synthetic oligonucleotide
ggcgaucuugucacuagaa

SEQ ID NO: 2158416 - RNA, 19 nt, Artificial Sequence
  Description of Artificial Sequence: Synthetic oligonucleotide
ccuuauuagcugcuuccaa

SEQ ID NO: 2158417 - RNA, 19 nt, Artificial Sequence
  Description of Artificial Sequence: Synthetic oligonucleotide
ccauucuccuuuacaucca

SEQ ID NO: 2158418 - RNA, 19 nt, Artificial Sequence
  Description of Artificial Sequence: Synthetic oligonucleotide
uaccgucuuccgccuccau

SEQ ID NO: 2158419 - RNA, 19 nt, Artificial Sequence
  Description of Artificial Sequence: Synthetic oligonucleotide
cauccagaugaagguuuaa

SEQ ID NO: 2158420 - RNA, 19 nt, Artificial Sequence
  Description of Artificial Sequence: Synthetic oligonucleotide
caggguaagcucggccaca

SEQ ID NO: 2158421 - RNA, 19 nt, Artificial Sequence
  Description of Artificial Sequence: Synthetic oligonucleotide
gccacagcggcggcguacc

SEQ ID NO: 2158422 - RNA, 19 nt, Artificial Sequence
  Description of Artificial Sequence: Synthetic oligonucleotide
gccacggugcagcacugaa

SEQ ID NO: 2158423 - RNA, 19 nt, Artificial Sequence
  Description of Artificial Sequence: Synthetic oligonucleotide
guaccgucuuccgccucca

SEQ ID NO: 2158424 - RNA, 19 nt, Artificial Sequence
  Description of Artificial Sequence: Synthetic oligonucleotide
gcuccggaggcaacuucug

SEQ ID NO: 2158425 - RNA, 19 nt, Artificial Sequence
  Description of Artificial Sequence: Synthetic oligonucleotide
gaucuacaugugaguucua

SEQ ID NO: 2158426 - RNA, 19 nt, Artificial Sequence
  Description of Artificial Sequence: Synthetic oligonucleotide
cacuagaaagcgccagcuu

SEQ ID NO: 2158427 - RNA, 19 nt, Artificial Sequence
  Description of Artificial Sequence: Synthetic oligonucleotide
gccagcuuuaacugccaau

SEQ ID NO: 2158428 - RNA, 19 nt, Artificial Sequence
  Description of Artificial Sequence: Synthetic oligonucleotide
cuguaaucucagcguugcu

SEQ ID NO: 2158429 - RNA, 19 nt, Artificial Sequence
  Description of Artificial Sequence: Synthetic oligonucleotide
augcuuccauucagucaaa

SEQ ID NO: 2158430 - RNA, 19 nt, Artificial Sequence
  Description of Artificial Sequence: Synthetic oligonucleotide
cagccgccacagcggcggc

SEQ ID NO: 2158431 - RNA, 19 nt, Artificial Sequence
  Description of Artificial Sequence: Synthetic oligonucleotide
cgucuuccgccuccauccc

SEQ ID NO: 2158432 - RNA, 19 nt, Artificial Sequence
  Description of Artificial Sequence: Synthetic oligonucleotide
gcauucacuuugccacggu

SEQ ID NO: 2158433 - RNA, 19 nt, Artificial Sequence
  Description of Artificial Sequence: Synthetic oligonucleotide
ggcguaccgucuuccgccu

SEQ ID NO: 2158434 - RNA, 19 nt, Artificial Sequence
  Description of Artificial Sequence: Synthetic oligonucleotide
ccacagcggcggcguaccg

SEQ ID NO: 2158435 - RNA, 19 nt, Artificial Sequence
  Description of Artificial Sequence: Synthetic oligonucleotide
gcguugcuuccugcucagc

SEQ ID NO: 2158436 - RNA, 19 nt, Artificial Sequence
  Description of Artificial Sequence: Synthetic oligonucleotide
gcguaccgucuuccgccuc

SEQ ID NO: 2158437 - RNA, 19 nt, Artificial Sequence
  Description of Artificial Sequence: Synthetic oligonucleotide
cugcuguagcauccaccuu

SEQ ID NO: 2158438 - RNA, 19 nt, Artificial Sequence
  Description of Artificial Sequence: Synthetic oligonucleotide
gccgccacagcggcggcgu

SEQ ID NO: 2158439 - RNA, 19 nt, Artificial Sequence
  Description of Artificial Sequence: Synthetic oligonucleotide
cggcggcguaccgucuucc

SEQ ID NO: 2158440 - RNA, 19 nt, Artificial Sequence
  Description of Artificial Sequence: Synthetic oligonucleotide
ccgccacagcggcggcgua

SEQ ID NO: 2158441 - RNA, 19 nt, Artificial Sequence
  Description of Artificial Sequence: Synthetic oligonucleotide
uuuacuuucaauuugaagc

SEQ ID NO: 2158442 - RNA, 19 nt, Artificial Sequence
  Description of Artificial Sequence: Synthetic oligonucleotide
uucaauuugaagcagaugg

SEQ ID NO: 2158443 - RNA, 19 nt, Artificial Sequence
  Description of Artificial Sequence: Synthetic oligonucleotide
acaggauguaguuacaggc

SEQ ID NO: 2158444 - RNA, 19 nt, Artificial Sequence
  Description of Artificial Sequence: Synthetic oligonucleotide
gaugugaacagcuuuggcc

SEQ ID NO: 2158445 - RNA, 19 nt, Artificial Sequence
  Description of Artificial Sequence: Synthetic oligonucleotide
uccugagugacccugagag

SEQ ID NO: 2158446 - RNA, 19 nt, Artificial Sequence
  Description of Artificial Sequence: Synthetic oligonucleotide
agggacaggauguaguuac

SEQ ID NO: 2158447 - RNA, 19 nt, Artificial Sequence
  Description of Artificial Sequence: Synthetic oligonucleotide
gaugguugcacacagaugu

SEQ ID NO: 2158448 - RNA, 19 nt, Artificial Sequence
  Description of Artificial Sequence: Synthetic oligonucleotide
ucgaaggcugcgcugaugg

SEQ ID NO: 2158449 - RNA, 19 nt, Artificial Sequence
  Description of Artificial Sequence: Synthetic oligonucleotide
agcgaaaccgcguuugcgc

SEQ ID NO: 2158450 - RNA, 19 nt, Artificial Sequence
  Description of Artificial Sequence: Synthetic oligonucleotide
ucccacugcgcccagagcg

SEQ ID NO: 2158451 - RNA, 19 nt, Artificial Sequence
  Description of Artificial Sequence: Synthetic oligonucleotide
uugaagaagacagcgagug

SEQ ID NO: 2158452 - RNA, 19 nt, Artificial Sequence
  Description of Artificial Sequence: Synthetic oligonucleotide
uuacaggcgauccucagga

SEQ ID NO: 2158453 - RNA, 19 nt, Artificial Sequence
  Description of Artificial Sequence: Synthetic oligonucleotide
aagacagcgagugaggcug

SEQ ID NO: 2158454 - RNA, 19 nt, Artificial Sequence
  Description of Artificial Sequence: Synthetic oligonucleotide
acuccuuacgcuucuuggc

SEQ ID NO: 2158455 - RNA, 19 nt, Artificial Sequence
  Description of Artificial Sequence: Synthetic oligonucleotide
aggagacugagagugaggc

SEQ ID NO: 2158456 - RNA, 19 nt, Artificial Sequence
  Description of Artificial Sequence: Synthetic oligonucleotide
augugaacagcuuuggccu

SEQ ID NO: 2158457 - RNA, 19 nt, Artificial Sequence
  Description of Artificial Sequence: Synthetic oligonucleotide
uauguugcagguuuuacuu

SEQ ID NO: 2158458 - RNA, 19 nt, Artificial Sequence
  Description of Artificial Sequence: Synthetic oligonucleotide
gacaggauguaguuacagg

SEQ ID NO: 2158459 - RNA, 19 nt, Artificial Sequence
  Description of Artificial Sequence: Synthetic oligonucleotide
uuccugagcgccucgaagg

SEQ ID NO: 2158460 - RNA, 19 nt, Artificial Sequence
  Description of Artificial Sequence: Synthetic oligonucleotide
ugggcugaguaucugguag

SEQ ID NO: 2158461 - RNA, 19 nt, Artificial Sequence
  Description of Artificial Sequence: Synthetic oligonucleotide
aguaagugggcugaguauc

SEQ ID NO: 2158462 - RNA, 19 nt, Artificial Sequence
  Description of Artificial Sequence: Synthetic oligonucleotide
ugaguaucugguagcaucu

SEQ ID NO: 2158463 - RNA, 19 nt, Artificial Sequence
  Description of Artificial Sequence: Synthetic oligonucleotide
agguuuuacuuucaauuug

SEQ ID NO: 2158464 - RNA, 19 nt, Artificial Sequence
  Description of Artificial Sequence: Synthetic oligonucleotide
auauguugcagguuuuacu

SEQ ID NO: 2158465 - RNA, 19 nt, Artificial Sequence
  Description of Artificial Sequence: Synthetic oligonucleotide
caggauguaguuacaggcg

SEQ ID NO: 2158466 - RNA, 19 nt, Artificial Sequence
  Description of Artificial Sequence: Synthetic oligonucleotide
auguaguuacaggcgaucc

SEQ ID NO: 2158467 - RNA, 19 nt, Artificial Sequence
  Description of Artificial Sequence: Synthetic oligonucleotide
cugaguaucugguagcauc

SEQ ID NO: 2158468 - RNA, 19 nt, Artificial Sequence
  Description of Artificial Sequence: Synthetic oligonucleotide
cugagugacccugagaggc

SEQ ID NO: 2158469 - RNA, 19 nt, Artificial Sequence
  Description of Artificial Sequence: Synthetic oligonucleotide
gccucuagcacauggagcg

SEQ ID NO: 2158470 - RNA, 19 nt, Artificial Sequence
  Description of Artificial Sequence: Synthetic oligonucleotide
uguaguuacaggcgauccu

SEQ ID NO: 2158471 - RNA, 19 nt, Artificial Sequence
  Description of Artificial Sequence: Synthetic oligonucleotide
ugaagcagaugguugcaca

SEQ ID NO: 2158472 - RNA, 19 nt, Artificial Sequence
  Description of Artificial Sequence: Synthetic oligonucleotide
guuacaggcgauccucagg

SEQ ID NO: 2158473 - RNA, 19 nt, Artificial Sequence
  Description of Artificial Sequence: Synthetic oligonucleotide
cucggagaaacugagguug

SEQ ID NO: 2158474 - RNA, 19 nt, Artificial Sequence
  Description of Artificial Sequence: Synthetic oligonucleotide
uguccgugccuccaccugg

SEQ ID NO: 2158475 - RNA, 19 nt, Artificial Sequence
  Description of Artificial Sequence: Synthetic oligonucleotide
uucgccuaggacuuucccc

SEQ ID NO: 2158476 - RNA, 19 nt, Artificial Sequence
  Description of Artificial Sequence: Synthetic oligonucleotide
cuuugaucuccguggaggc

SEQ ID NO: 2158477 - RNA, 19 nt, Artificial Sequence
  Description of Artificial Sequence: Synthetic oligonucleotide
cuggcguuggccaggagcc

SEQ ID NO: 2158478 - RNA, 19 nt, Artificial Sequence
  Description of Artificial Sequence: Synthetic oligonucleotide
gaagcagaugguugcacac

SEQ ID NO: 2158479 - RNA, 19 nt, Artificial Sequence
  Description of Artificial Sequence: Synthetic oligonucleotide
ucuagccuguggcagguca

SEQ ID NO: 2158480 - RNA, 19 nt, Artificial Sequence
  Description of Artificial Sequence: Synthetic oligonucleotide
cacuccuuacgcuucuugg

SEQ ID NO: 2158481 - RNA, 19 nt, Artificial Sequence
  Description of Artificial Sequence: Synthetic oligonucleotide
guaggaguagcauggcacc

SEQ ID NO: 2158482 - RNA, 19 nt, Artificial Sequence
  Description of Artificial Sequence: Synthetic oligonucleotide
aggauguaguuacaggcga

SEQ ID NO: 2158483 - RNA, 19 nt, Artificial Sequence
  Description of Artificial Sequence: Synthetic oligonucleotide
agagcgaaaccgcguuugc

SEQ ID NO: 2158484 - RNA, 19 nt, Artificial Sequence
  Description of Artificial Sequence: Synthetic oligonucleotide
uggccucuagcacauggag

SEQ ID NO: 2158485 - RNA, 19 nt, Artificial Sequence
  Description of Artificial Sequence: Synthetic oligonucleotide
uauauguugcagguuuuac

SEQ ID NO: 2158486 - RNA, 19 nt, Artificial Sequence
  Description of Artificial Sequence: Synthetic oligonucleotide
ucugggacggcgguggcgg

SEQ ID NO: 2158487 - RNA, 19 nt, Artificial Sequence
  Description of Artificial Sequence: Synthetic oligonucleotide
cuugccggccuuuccaagg

SEQ ID NO: 2158488 - RNA, 19 nt, Artificial Sequence
  Description of Artificial Sequence: Synthetic oligonucleotide
agagacccagagcaguguc

SEQ ID NO: 2158489 - RNA, 19 nt, Artificial Sequence
  Description of Artificial Sequence: Synthetic oligonucleotide
uacgcuucuuggcacggcc

SEQ ID NO: 2158490 - RNA, 19 nt, Artificial Sequence
  Description of Artificial Sequence: Synthetic oligonucleotide
ggcaccugcuuccugagcg

SEQ ID NO: 2158491 - RNA, 19 nt, Artificial Sequence
  Description of Artificial Sequence: Synthetic oligonucleotide
aucugguagcaucuugaag

SEQ ID NO: 2158492 - RNA, 19 nt, Artificial Sequence
  Description of Artificial Sequence: Synthetic oligonucleotide
uuuauauguugcagguuuu

SEQ ID NO: 2158493 - RNA, 19 nt, Artificial Sequence
  Description of Artificial Sequence: Synthetic oligonucleotide
ugcgcccagagcgaaaccg

SEQ ID NO: 2158494 - RNA, 19 nt, Artificial Sequence
  Description of Artificial Sequence: Synthetic oligonucleotide
cucccuauguccucuugcc

SEQ ID NO: 2158495 - RNA, 19 nt, Artificial Sequence
  Description of Artificial Sequence: Synthetic oligonucleotide
acaggcgauccucaggaug

SEQ ID NO: 2158496 - RNA, 19 nt, Artificial Sequence
  Description of Artificial Sequence: Synthetic oligonucleotide
guuugcgcgcgucugagac

SEQ ID NO: 2158497 - RNA, 19 nt, Artificial Sequence
  Description of Artificial Sequence: Synthetic oligonucleotide
uacuuucaauuugaagcag

SEQ ID NO: 2158498 - RNA, 19 nt, Artificial Sequence
  Description of Artificial Sequence: Synthetic oligonucleotide
gguagcaucuugaagaaga

SEQ ID NO: 2158499 - RNA, 19 nt, Artificial Sequence
  Description of Artificial Sequence: Synthetic oligonucleotide
uuugaucuccguggaggcg

SEQ ID NO: 2158500 - RNA, 19 nt, Artificial Sequence
  Description of Artificial Sequence: Synthetic oligonucleotide
gacccguaggaguagcaug

SEQ ID NO: 2158501 - RNA, 19 nt, Artificial Sequence
  Description of Artificial Sequence: Synthetic oligonucleotide
uugccggccuuuccaaggg

SEQ ID NO: 2158502 - RNA, 19 nt, Artificial Sequence
  Description of Artificial Sequence: Synthetic oligonucleotide
ucuagcacauggagcgggc

SEQ ID NO: 2158503 - RNA, 19 nt, Artificial Sequence
  Description of Artificial Sequence: Synthetic oligonucleotide
uggucuagccuguggcagg

SEQ ID NO: 2158504 - RNA, 19 nt, Artificial Sequence
  Description of Artificial Sequence: Synthetic oligonucleotide
gaaaccgcguuugcgcgcg

SEQ ID NO: 2158505 - RNA, 19 nt, Artificial Sequence
  Description of Artificial Sequence: Synthetic oligonucleotide
aguuacaggcgauccucag

SEQ ID NO: 2158506 - RNA, 19 nt, Artificial Sequence
  Description of Artificial Sequence: Synthetic oligonucleotide
ucacuccuuacgcuucuug

SEQ ID NO: 2158507 - RNA, 19 nt, Artificial Sequence
  Description of Artificial Sequence: Synthetic oligonucleotide
ucggagaaacugagguugc

SEQ ID NO: 2158508 - RNA, 19 nt, Artificial Sequence
  Description of Artificial Sequence: Synthetic oligonucleotide
uuugaagcagaugguugca

SEQ ID NO: 2158509 - RNA, 19 nt, Artificial Sequence
  Description of Artificial Sequence: Synthetic oligonucleotide
uagggcugcaccucgggac

SEQ ID NO: 2158510 - RNA, 19 nt, Artificial Sequence
  Description of Artificial Sequence: Synthetic oligonucleotide
uaguuacaggcgauccuca

SEQ ID NO: 2158511 - RNA, 19 nt, Artificial Sequence
  Description of Artificial Sequence: Synthetic oligonucleotide
guaguuacaggcgauccuc

SEQ ID NO: 2158512 - RNA, 19 nt, Artificial Sequence
  Description of Artificial Sequence: Synthetic oligonucleotide
ggugccaagcucugggacg

SEQ ID NO: 2158513 - RNA, 19 nt, Artificial Sequence
  Description of Artificial Sequence: Synthetic oligonucleotide
gaagagacccagagcagug

SEQ ID NO: 2158514 - RNA, 19 nt, Artificial Sequence
  Description of Artificial Sequence: Synthetic oligonucleotide
acugcgcccagagcgaaac

SEQ ID NO: 2158515 - RNA, 19 nt, Artificial Sequence
  Description of Artificial Sequence: Synthetic oligonucleotide
uuggccucuagcacaugga

SEQ ID NO: 2158516 - RNA, 19 nt, Artificial Sequence
  Description of Artificial Sequence: Synthetic oligonucleotide
ggggcacacagcaagaugc

SEQ ID NO: 2158517 - RNA, 19 nt, Artificial Sequence
  Description of Artificial Sequence: Synthetic oligonucleotide
ggcgcuguaguccagguca

SEQ ID NO: 2158518 - RNA, 19 nt, Artificial Sequence
  Description of Artificial Sequence: Synthetic oligonucleotide
uccugagcgccucgaaggc

SEQ ID NO: 2158519 - RNA, 19 nt, Artificial Sequence
  Description of Artificial Sequence: Synthetic oligonucleotide
cacacacucggagaaacug

SEQ ID NO: 2158520 - RNA, 19 nt, Artificial Sequence
  Description of Artificial Sequence: Synthetic oligonucleotide
uagucccggucccacugcg

SEQ ID NO: 2158521 - RNA, 19 nt, Artificial Sequence
  Description of Artificial Sequence: Synthetic oligonucleotide
ugcgcugauggugugcacc

SEQ ID NO: 2158522 - RNA, 19 nt, Artificial Sequence
  Description of Artificial Sequence: Synthetic oligonucleotide
acagcaagaugcggggacg

SEQ ID NO: 2158523 - RNA, 19 nt, Artificial Sequence
  Description of Artificial Sequence: Synthetic oligonucleotide
cacagcaagaugcggggac

SEQ ID NO: 2158524 - RNA, 19 nt, Artificial Sequence
  Description of Artificial Sequence: Synthetic oligonucleotide
ugguugcacacagauguga

SEQ ID NO: 2158525 - RNA, 19 nt, Artificial Sequence
  Description of Artificial Sequence: Synthetic oligonucleotide
gagguugcuguggucggcg

SEQ ID NO: 2158526 - RNA, 19 nt, Artificial Sequence
  Description of Artificial Sequence: Synthetic oligonucleotide
auggucuagccuguggcag

SEQ ID NO: 2158527 - RNA, 19 nt, Artificial Sequence
  Description of Artificial Sequence: Synthetic oligonucleotide
guaucugguagcaucuuga

SEQ ID NO: 2158528 - RNA, 19 nt, Artificial Sequence
  Description of Artificial Sequence: Synthetic oligonucleotide
uuauauguugcagguuuua

SEQ ID NO: 2158529 - RNA, 19 nt, Artificial Sequence
  Description of Artificial Sequence: Synthetic oligonucleotide
uagcacauggagcgggcac

SEQ ID NO: 2158530 - RNA, 19 nt, Artificial Sequence
  Description of Artificial Sequence: Synthetic oligonucleotide
gagcgaaaccgcguuugcg

SEQ ID NO: 2158531 - RNA, 19 nt, Artificial Sequence
  Description of Artificial Sequence: Synthetic oligonucleotide
ugcaccucgggacgcccgg

SEQ ID NO: 2158532 - RNA, 19 nt, Artificial Sequence
  Description of Artificial Sequence: Synthetic oligonucleotide
cugagcgccucgaaggcug

SEQ ID NO: 2158533 - RNA, 19 nt, Artificial Sequence
  Description of Artificial Sequence: Synthetic oligonucleotide
cugagguugcuguggucgg

SEQ ID NO: 2158534 - RNA, 19 nt, Artificial Sequence
  Description of Artificial Sequence: Synthetic oligonucleotide
cucuagcacauggagcggg

SEQ ID NO: 2158535 - RNA, 19 nt, Artificial Sequence
  Description of Artificial Sequence: Synthetic oligonucleotide
uccuuacgcuucuuggcac

SEQ ID NO: 2158536 - RNA, 19 nt, Artificial Sequence
  Description of Artificial Sequence: Synthetic oligonucleotide
cccuauguccucuugccgg

SEQ ID NO: 2158537 - RNA, 19 nt, Artificial Sequence
  Description of Artificial Sequence: Synthetic oligonucleotide
cagcgcugcacacacucgg

SEQ ID NO: 2158538 - RNA, 19 nt, Artificial Sequence
  Description of Artificial Sequence: Synthetic oligonucleotide
aagcagaugguugcacaca

SEQ ID NO: 2158539 - RNA, 19 nt, Artificial Sequence
  Description of Artificial Sequence: Synthetic oligonucleotide
cagagcaguguccaugguc

SEQ ID NO: 2158540 - RNA, 19 nt, Artificial Sequence
  Description of Artificial Sequence: Synthetic oligonucleotide
uccgccugcagggugcggg

SEQ ID NO: 2158541 - RNA, 19 nt, Artificial Sequence
  Description of Artificial Sequence: Synthetic oligonucleotide
ucuugccggccuuuccaag

SEQ ID NO: 2158542 - RNA, 19 nt, Artificial Sequence
  Description of Artificial Sequence: Synthetic oligonucleotide
aggggcacacagcaagaug

SEQ ID NO: 2158543 - RNA, 19 nt, Artificial Sequence
  Description of Artificial Sequence: Synthetic oligonucleotide
uuugcgcgcgucugagacc

SEQ ID NO: 2158544 - RNA, 19 nt, Artificial Sequence
  Description of Artificial Sequence: Synthetic oligonucleotide
aguguccauggucuagccu

SEQ ID NO: 2158545 - RNA, 19 nt, Artificial Sequence
  Description of Artificial Sequence: Synthetic oligonucleotide
uucgggaggcacaggcggc

SEQ ID NO: 2158546 - RNA, 19 nt, Artificial Sequence
  Description of Artificial Sequence: Synthetic oligonucleotide
uguccugguccugagugac

SEQ ID NO: 2158547 - RNA, 19 nt, Artificial Sequence
  Description of Artificial Sequence: Synthetic oligonucleotide
aagagacccagagcagugu

SEQ ID NO: 2158548 - RNA, 19 nt, Artificial Sequence
  Description of Artificial Sequence: Synthetic oligonucleotide
uggucggcgcuguagucca

SEQ ID NO: 2158549 - RNA, 19 nt, Artificial Sequence
  Description of Artificial Sequence: Synthetic oligonucleotide
ggcaggucacuccuuacgc

SEQ ID NO: 2158550 - RNA, 19 nt, Artificial Sequence
  Description of Artificial Sequence: Synthetic oligonucleotide
uugcgcgcgucugagaccu

SEQ ID NO: 2158551 - RNA, 19 nt, Artificial Sequence
  Description of Artificial Sequence: Synthetic oligonucleotide
caggauggccaguuuggac

SEQ ID NO: 2158552 - RNA, 19 nt, Artificial Sequence
  Description of Artificial Sequence: Synthetic oligonucleotide
uguguccgugccuccaccu

SEQ ID NO: 2158553 - RNA, 19 nt, Artificial Sequence
  Description of Artificial Sequence: Synthetic oligonucleotide
cuuacgcuucuuggcacgg

SEQ ID NO: 2158554 - RNA, 19 nt, Artificial Sequence
  Description of Artificial Sequence: Synthetic oligonucleotide
gaggcaguaagugggcuga

SEQ ID NO: 2158555 - RNA, 19 nt, Artificial Sequence
  Description of Artificial Sequence: Synthetic oligonucleotide
cagcgagugaggcuggcug

SEQ ID NO: 2158556 - RNA, 19 nt, Artificial Sequence
  Description of Artificial Sequence: Synthetic oligonucleotide
uccccuggucccuuccucc

SEQ ID NO: 2158557 - RNA, 19 nt, Artificial Sequence
  Description of Artificial Sequence: Synthetic oligonucleotide
cuucgccuaggacuuuccc

SEQ ID NO: 2158558 - RNA, 19 nt, Artificial Sequence
  Description of Artificial Sequence: Synthetic oligonucleotide
cgggcacuggcuuugaacg

SEQ ID NO: 2158559 - RNA, 19 nt, Artificial Sequence
  Description of Artificial Sequence: Synthetic oligonucleotide
ucaggauggccaguuugga

SEQ ID NO: 2158560 - RNA, 19 nt, Artificial Sequence
  Description of Artificial Sequence: Synthetic oligonucleotide
agaugcggggacgcagagc

SEQ ID NO: 2158561 - RNA, 19 nt, Artificial Sequence
  Description of Artificial Sequence: Synthetic oligonucleotide
ugauggugugcacccgcgu

SEQ ID NO: 2158562 - RNA, 19 nt, Artificial Sequence
  Description of Artificial Sequence: Synthetic oligonucleotide
guagcaucuugaagaagac

SEQ ID NO: 2158563 - RNA, 19 nt, Artificial Sequence
  Description of Artificial Sequence: Synthetic oligonucleotide
cuccuuacgcuucuuggca

SEQ ID NO: 2158564 - RNA, 19 nt, Artificial Sequence
  Description of Artificial Sequence: Synthetic oligonucleotide
ucucguggcgccgcugggg

SEQ ID NO: 2158565 - RNA, 19 nt, Artificial Sequence
  Description of Artificial Sequence: Synthetic oligonucleotide
cguaggaguagcauggcac

SEQ ID NO: 2158566 - RNA, 19 nt, Artificial Sequence
  Description of Artificial Sequence: Synthetic oligonucleotide
cacucggagaaacugaggu

SEQ ID NO: 2158567 - RNA, 19 nt, Artificial Sequence
  Description of Artificial Sequence: Synthetic oligonucleotide
ggauggccaguuuggacag

SEQ ID NO: 2158568 - RNA, 19 nt, Artificial Sequence
  Description of Artificial Sequence: Synthetic oligonucleotide
ugggguucgggaggcacag

SEQ ID NO: 2158569 - RNA, 19 nt, Artificial Sequence
  Description of Artificial Sequence: Synthetic oligonucleotide
agcgagugaggcuggcugu

SEQ ID NO: 2158570 - RNA, 19 nt, Artificial Sequence
  Description of Artificial Sequence: Synthetic oligonucleotide
cagagcgaaaccgcguuug

SEQ ID NO: 2158571 - RNA, 19 nt, Artificial Sequence
  Description of Artificial Sequence: Synthetic oligonucleotide
caacugggaagagacccag

SEQ ID NO: 2158572 - RNA, 19 nt, Artificial Sequence
  Description of Artificial Sequence: Synthetic oligonucleotide
cuagccuguggcaggucac

SEQ ID NO: 2158573 - RNA, 19 nt, Artificial Sequence
  Description of Artificial Sequence: Synthetic oligonucleotide
agcgccucgaaggcugcgc

SEQ ID NO: 2158574 - RNA, 19 nt, Artificial Sequence
  Description of Artificial Sequence: Synthetic oligonucleotide
ggaguagcauggcaccugc

SEQ ID NO: 2158575 - RNA, 19 nt, Artificial Sequence
  Description of Artificial Sequence: Synthetic oligonucleotide
uccucaggcccaacuggga

SEQ ID NO: 2158576 - RNA, 19 nt, Artificial Sequence
  Description of Artificial Sequence: Synthetic oligonucleotide
gagugacccugagaggcag

SEQ ID NO: 2158577 - RNA, 19 nt, Artificial Sequence
  Description of Artificial Sequence: Synthetic oligonucleotide
gcgaaaccgcguuugcgcg

SEQ ID NO: 2158578 - RNA, 19 nt, Artificial Sequence
  Description of Artificial Sequence: Synthetic oligonucleotide
acucggagaaacugagguu

SEQ ID NO: 2158579 - RNA, 19 nt, Artificial Sequence
  Description of Artificial Sequence: Synthetic oligonucleotide
ugaucuccguggaggcggc

SEQ ID NO: 2158580 - RNA, 19 nt, Artificial Sequence
  Description of Artificial Sequence: Synthetic oligonucleotide
agagccggcucgcgguagg

SEQ ID NO: 2158581 - RNA, 19 nt, Artificial Sequence
  Description of Artificial Sequence: Synthetic oligonucleotide
gucccggucccacugcgcc

SEQ ID NO: 2158582 - RNA, 19 nt, Artificial Sequence
  Description of Artificial Sequence: Synthetic oligonucleotide
uaggaguagcauggcaccu

SEQ ID NO: 2158583 - RNA, 19 nt, Artificial Sequence
  Description of Artificial Sequence: Synthetic oligonucleotide
agaugguugcacacagaug

SEQ ID NO: 2158584 - RNA, 19 nt, Artificial Sequence
  Description of Artificial Sequence: Synthetic oligonucleotide
aucuccguggaggcggcgg

SEQ ID NO: 2158585 - RNA, 19 nt, Artificial Sequence
  Description of Artificial Sequence: Synthetic oligonucleotide
caguguccauggucuagcc

SEQ ID NO: 2158586 - RNA, 19 nt, Artificial Sequence
  Description of Artificial Sequence: Synthetic oligonucleotide
gaagacagcgagugaggcu

SEQ ID NO: 2158587 - RNA, 19 nt, Artificial Sequence
  Description of Artificial Sequence: Synthetic oligonucleotide
ggacaggauguaguuacag

SEQ ID NO: 2158588 - RNA, 19 nt, Artificial Sequence
  Description of Artificial Sequence: Synthetic oligonucleotide
aggaguagcauggcaccug

SEQ ID NO: 2158589 - RNA, 19 nt, Artificial Sequence
  Description of Artificial Sequence: Synthetic oligonucleotide
cuucugacccguaggagua

SEQ ID NO: 2158590 - RNA, 19 nt, Artificial Sequence
  Description of Artificial Sequence: Synthetic oligonucleotide
ggucgcuucgccuaggacu

SEQ ID NO: 2158591 - RNA, 19 nt, Artificial Sequence
  Description of Artificial Sequence: Synthetic oligonucleotide
caagaugcggggacgcaga

SEQ ID NO: 2158592 - RNA, 19 nt, Artificial Sequence
  Description of Artificial Sequence: Synthetic oligonucleotide
agcacauggagcgggcacu

SEQ ID NO: 2158593 - RNA, 19 nt, Artificial Sequence
  Description of Artificial Sequence: Synthetic oligonucleotide
aggucacuccuuacgcuuc

SEQ ID NO: 2158594 - RNA, 19 nt, Artificial Sequence
  Description of Artificial Sequence: Synthetic oligonucleotide
gucccuuccucccuauguc

SEQ ID NO: 2158595 - RNA, 19 nt, Artificial Sequence
  Description of Artificial Sequence: Synthetic oligonucleotide
uguggucggcgcuguaguc

SEQ ID NO: 2158596 - RNA, 19 nt, Artificial Sequence
  Description of Artificial Sequence: Synthetic oligonucleotide
cauacuggcccauuccccu

SEQ ID NO: 2158597 - RNA, 19 nt, Artificial Sequence
  Description of Artificial Sequence: Synthetic oligonucleotide
ccuuacgcuucuuggcacg

SEQ ID NO: 2158598 - RNA, 19 nt, Artificial Sequence
  Description of Artificial Sequence: Synthetic oligonucleotide
uucugacccguaggaguag

SEQ ID NO: 2158599 - RNA, 19 nt, Artificial Sequence
  Description of Artificial Sequence: Synthetic oligonucleotide
ugacccguaggaguagcau

SEQ ID NO: 2158600 - RNA, 19 nt, Artificial Sequence
  Description of Artificial Sequence: Synthetic oligonucleotide
ucgcgguagggcugcaccu

SEQ ID NO: 2158601 - RNA, 19 nt, Artificial Sequence
  Description of Artificial Sequence: Synthetic oligonucleotide
ugagcgccucgaaggcugc

SEQ ID NO: 2158602 - RNA, 19 nt, Artificial Sequence
  Description of Artificial Sequence: Synthetic oligonucleotide
guagucccggucccacugc

SEQ ID NO: 2158603 - RNA, 19 nt, Artificial Sequence
  Description of Artificial Sequence: Synthetic oligonucleotide
uuccccuggucccuuccuc

SEQ ID NO: 2158604 - RNA, 19 nt, Artificial Sequence
  Description of Artificial Sequence: Synthetic oligonucleotide
cagguuuuacuuucaauuu

SEQ ID NO: 2158605 - RNA, 19 nt, Artificial Sequence
  Description of Artificial Sequence: Synthetic oligonucleotide
aaccgcguuugcgcgcguc

SEQ ID NO: 2158606 - RNA, 19 nt, Artificial Sequence
  Description of Artificial Sequence: Synthetic oligonucleotide
gagagugaggcaggcugac

SEQ ID NO: 2158607 - RNA, 19 nt, Artificial Sequence
  Description of Artificial Sequence: Synthetic oligonucleotide
auuccccuggucccuuccu

SEQ ID NO: 2158608 - RNA, 19 nt, Artificial Sequence
  Description of Artificial Sequence: Synthetic oligonucleotide
gcaguaagugggcugagua

SEQ ID NO: 2158609 - RNA, 19 nt, Artificial Sequence
  Description of Artificial Sequence: Synthetic oligonucleotide
cuguguccgugccuccacc

SEQ ID NO: 2158610 - RNA, 19 nt, Artificial Sequence
  Description of Artificial Sequence: Synthetic oligonucleotide
uuacgcuucuuggcacggc

SEQ ID NO: 2158611 - RNA, 19 nt, Artificial Sequence
  Description of Artificial Sequence: Synthetic oligonucleotide
acgcccgggugccaagcuc

SEQ ID NO: 2158612 - RNA, 19 nt, Artificial Sequence
  Description of Artificial Sequence: Synthetic oligonucleotide
cagcuucugacccguagga

SEQ ID NO: 2158613 - RNA, 19 nt, Artificial Sequence
  Description of Artificial Sequence: Synthetic oligonucleotide
gggacgcagagccggcucg

SEQ ID NO: 2158614 - RNA, 19 nt, Artificial Sequence
  Description of Artificial Sequence: Synthetic oligonucleotide
gggcugaguaucugguagc

SEQ ID NO: 2158615 - RNA, 19 nt, Artificial Sequence
  Description of Artificial Sequence: Synthetic oligonucleotide
gcugcacacacucggagaa

SEQ ID NO: 2158616 - RNA, 19 nt, Artificial Sequence
  Description of Artificial Sequence: Synthetic oligonucleotide
uggcaccugcuuccugagc

SEQ ID NO: 2158617 - RNA, 19 nt, Artificial Sequence
  Description of Artificial Sequence: Synthetic oligonucleotide
cacuggcuuugaacgugcc

SEQ ID NO: 2158618 - RNA, 19 nt, Artificial Sequence
  Description of Artificial Sequence: Synthetic oligonucleotide
cccuuccccacauacuggc

SEQ ID NO: 2158619 - RNA, 19 nt, Artificial Sequence
  Description of Artificial Sequence: Synthetic oligonucleotide
ugccggccuuuccaagggc

SEQ ID NO: 2158620 - RNA, 19 nt, Artificial Sequence
  Description of Artificial Sequence: Synthetic oligonucleotide
guugcagguuuuacuuuca

SEQ ID NO: 2158621 - RNA, 19 nt, Artificial Sequence
  Description of Artificial Sequence: Synthetic oligonucleotide
gcagggugcgggugcagcg

SEQ ID NO: 2158622 - RNA, 19 nt, Artificial Sequence
  Description of Artificial Sequence: Synthetic oligonucleotide
accgcguuugcgcgcgucu

SEQ ID NO: 2158623 - RNA, 19 nt, Artificial Sequence
  Description of Artificial Sequence: Synthetic oligonucleotide
cagcaagaugcggggacgc

SEQ ID NO: 2158624 - RNA, 19 nt, Artificial Sequence
  Description of Artificial Sequence: Synthetic oligonucleotide
cugcaccucgggacgcccg

SEQ ID NO: 2158625 - RNA, 19 nt, Artificial Sequence
  Description of Artificial Sequence: Synthetic oligonucleotide
gacgcagagccggcucgcg

SEQ ID NO: 2158626 - RNA, 19 nt, Artificial Sequence
  Description of Artificial Sequence: Synthetic oligonucleotide
aacugggaagagacccaga

SEQ ID NO: 2158627 - RNA, 19 nt, Artificial Sequence
  Description of Artificial Sequence: Synthetic oligonucleotide
gguucgggaggcacaggcg

SEQ ID NO: 2158628 - RNA, 19 nt, Artificial Sequence
  Description of Artificial Sequence: Synthetic oligonucleotide
uggguagucccggucccac

SEQ ID NO: 2158629 - RNA, 19 nt, Artificial Sequence
  Description of Artificial Sequence: Synthetic oligonucleotide
ccaagcucugggacggcgg

SEQ ID NO: 2158630 - RNA, 19 nt, Artificial Sequence
  Description of Artificial Sequence: Synthetic oligonucleotide
ucggcgcuguaguccaggu

SEQ ID NO: 2158631 - RNA, 19 nt, Artificial Sequence
  Description of Artificial Sequence: Synthetic oligonucleotide
agucccggucccacugcgc

SEQ ID NO: 2158632 - RNA, 19 nt, Artificial Sequence
  Description of Artificial Sequence: Synthetic oligonucleotide
agccuguggcaggucacuc

SEQ ID NO: 2158633 - RNA, 19 nt, Artificial Sequence
  Description of Artificial Sequence: Synthetic oligonucleotide
ggcacuggcuuugaacgug

SEQ ID NO: 2158634 - RNA, 19 nt, Artificial Sequence
  Description of Artificial Sequence: Synthetic oligonucleotide
gcguggguagucccggucc

SEQ ID NO: 2158635 - RNA, 19 nt, Artificial Sequence
  Description of Artificial Sequence: Synthetic oligonucleotide
auggagcgggcacuggcuu

SEQ ID NO: 2158636 - RNA, 19 nt, Artificial Sequence
  Description of Artificial Sequence: Synthetic oligonucleotide
ugcacccgcguccgcuccc

SEQ ID NO: 2158637 - RNA, 19 nt, Artificial Sequence
  Description of Artificial Sequence: Synthetic oligonucleotide
cucaggcgcuccgaugccc

SEQ ID NO: 2158638 - RNA, 19 nt, Artificial Sequence
  Description of Artificial Sequence: Synthetic oligonucleotide
agccgcgccagggacagga

SEQ ID NO: 2158639 - RNA, 19 nt, Artificial Sequence
  Description of Artificial Sequence: Synthetic oligonucleotide
gcacaggcggcguggggcg

SEQ ID NO: 2158640 - RNA, 19 nt, Artificial Sequence
  Description of Artificial Sequence: Synthetic oligonucleotide
caccugcuuccugagcgcc

SEQ ID NO: 2158641 - RNA, 19 nt, Artificial Sequence
  Description of Artificial Sequence: Synthetic oligonucleotide
agggugcgggugcagcgcu

SEQ ID NO: 2158642 - RNA, 19 nt, Artificial Sequence
  Description of Artificial Sequence: Synthetic oligonucleotide
ucccggucccacugcgccc

SEQ ID NO: 2158643 - RNA, 19 nt, Artificial Sequence
  Description of Artificial Sequence: Synthetic oligonucleotide
gcgguagggcugcaccucg

SEQ ID NO: 2158644 - RNA, 19 nt, Artificial Sequence
  Description of Artificial Sequence: Synthetic oligonucleotide
cagcuggcaggagacugag

SEQ ID NO: 2158645 - RNA, 19 nt, Artificial Sequence
  Description of Artificial Sequence: Synthetic oligonucleotide
gggcacacagcaagaugcg

SEQ ID NO: 2158646 - RNA, 19 nt, Artificial Sequence
  Description of Artificial Sequence: Synthetic oligonucleotide
uacaggcgauccucaggau

SEQ ID NO: 2158647 - RNA, 19 nt, Artificial Sequence
  Description of Artificial Sequence: Synthetic oligonucleotide
ccuuccgccugcagggugc

SEQ ID NO: 2158648 - RNA, 19 nt, Artificial Sequence
  Description of Artificial Sequence: Synthetic oligonucleotide
cucugggacggcgguggcg

SEQ ID NO: 2158649 - RNA, 19 nt, Artificial Sequence
  Description of Artificial Sequence: Synthetic oligonucleotide
gggugccaagcucugggac

SEQ ID NO: 2158650 - RNA, 19 nt, Artificial Sequence
  Description of Artificial Sequence: Synthetic oligonucleotide
gcgggcacuggcuuugaac

SEQ ID NO: 2158651 - RNA, 19 nt, Artificial Sequence
  Description of Artificial Sequence: Synthetic oligonucleotide
cgcgucugagaccucaggc

SEQ ID NO: 2158652 - RNA, 19 nt, Artificial Sequence
  Description of Artificial Sequence: Synthetic oligonucleotide
uggcggcguggguaguccc

SEQ ID NO: 2158653 - RNA, 19 nt, Artificial Sequence
  Description of Artificial Sequence: Synthetic oligonucleotide
cucgggacgcccgggugcc

SEQ ID NO: 2158654 - RNA, 19 nt, Artificial Sequence
  Description of Artificial Sequence: Synthetic oligonucleotide
gauggccaguuuggacagc

SEQ ID NO: 2158655 - RNA, 19 nt, Artificial Sequence
  Description of Artificial Sequence: Synthetic oligonucleotide
agcaagaugcggggacgca

SEQ ID NO: 2158656 - RNA, 19 nt, Artificial Sequence
  Description of Artificial Sequence: Synthetic oligonucleotide
guccugagugacccugaga

SEQ ID NO: 2158657 - RNA, 19 nt, Artificial Sequence
  Description of Artificial Sequence: Synthetic oligonucleotide
cagggugcgggugcagcgc

SEQ ID NO: 2158658 - RNA, 19 nt, Artificial Sequence
  Description of Artificial Sequence: Synthetic oligonucleotide
gacagcgagugaggcuggc

SEQ ID NO: 2158659 - RNA, 19 nt, Artificial Sequence
  Description of Artificial Sequence: Synthetic oligonucleotide
cacauggagcgggcacugg

SEQ ID NO: 2158660 - RNA, 19 nt, Artificial Sequence
  Description of Artificial Sequence: Synthetic oligonucleotide
aggcccaacugggaagaga

SEQ ID NO: 2158661 - RNA, 19 nt, Artificial Sequence
  Description of Artificial Sequence: Synthetic oligonucleotide
cugggguucgggaggcaca

SEQ ID NO: 2158662 - RNA, 19 nt, Artificial Sequence
  Description of Artificial Sequence: Synthetic oligonucleotide
aggcggcggucgcuucgcc

SEQ ID NO: 2158663 - RNA, 19 nt, Artificial Sequence
  Description of Artificial Sequence: Synthetic oligonucleotide
cugacccguaggaguagca

SEQ ID NO: 2158664 - RNA, 19 nt, Artificial Sequence
  Description of Artificial Sequence: Synthetic oligonucleotide
cccugagaggcaguaagug

SEQ ID NO: 2158665 - RNA, 19 nt, Artificial Sequence
  Description of Artificial Sequence: Synthetic oligonucleotide
gaucuccguggaggcggcg

SEQ ID NO: 2158666 - RNA, 19 nt, Artificial Sequence
  Description of Artificial Sequence: Synthetic oligonucleotide
caguaagugggcugaguau

SEQ ID NO: 2158667 - RNA, 19 nt, Artificial Sequence
  Description of Artificial Sequence: Synthetic oligonucleotide
cuuccgccugcagggugcg

SEQ ID NO: 2158668 - RNA, 19 nt, Artificial Sequence
  Description of Artificial Sequence: Synthetic oligonucleotide
gaggcggcggucgcuucgc

SEQ ID NO: 2158669 - RNA, 19 nt, Artificial Sequence
  Description of Artificial Sequence: Synthetic oligonucleotide
uccgcucccuggcguuggc

SEQ ID NO: 2158670 - RNA, 19 nt, Artificial Sequence
  Description of Artificial Sequence: Synthetic oligonucleotide
cggccuuccgccugcaggg

SEQ ID NO: 2158671 - RNA, 19 nt, Artificial Sequence
  Description of Artificial Sequence: Synthetic oligonucleotide
ggaagagacccagagcagu

SEQ ID NO: 2158672 - RNA, 19 nt, Artificial Sequence
  Description of Artificial Sequence: Synthetic oligonucleotide
ggucccuuccucccuaugu

SEQ ID NO: 2158673 - RNA, 19 nt, Artificial Sequence
  Description of Artificial Sequence: Synthetic oligonucleotide
guggcggcguggguagucc

SEQ ID NO: 2158674 - RNA, 19 nt, Artificial Sequence
  Description of Artificial Sequence: Synthetic oligonucleotide
gcaccugcuuccugagcgc

SEQ ID NO: 2158675 - RNA, 19 nt, Artificial Sequence
  Description of Artificial Sequence: Synthetic oligonucleotide
ggcugaguaucugguagca

SEQ ID NO: 2158676 - RNA, 19 nt, Artificial Sequence
  Description of Artificial Sequence: Synthetic oligonucleotide
ccccuuccccacauacugg

SEQ ID NO: 2158677 - RNA, 19 nt, Artificial Sequence
  Description of Artificial Sequence: Synthetic oligonucleotide
agcgcugcacacacucgga

SEQ ID NO: 2158678 - RNA, 19 nt, Artificial Sequence
  Description of Artificial Sequence: Synthetic oligonucleotide
ggagcgggcacuggcuuug

SEQ ID NO: 2158679 - RNA, 19 nt, Artificial Sequence
  Description of Artificial Sequence: Synthetic oligonucleotide
aaaccgcguuugcgcgcgu

SEQ ID NO: 2158680 - RNA, 19 nt, Artificial Sequence
  Description of Artificial Sequence: Synthetic oligonucleotide
cugcgcccagagcgaaacc

SEQ ID NO: 2158681 - RNA, 19 nt, Artificial Sequence
  Description of Artificial Sequence: Synthetic oligonucleotide
cuagcacauggagcgggca

SEQ ID NO: 2158682 - RNA, 19 nt, Artificial Sequence
  Description of Artificial Sequence: Synthetic oligonucleotide
gagcgccucgaaggcugcg

SEQ ID NO: 2158683 - RNA, 19 nt, Artificial Sequence
  Description of Artificial Sequence: Synthetic oligonucleotide
caggucacuccuuacgcuu

SEQ ID NO: 2158684 - RNA, 19 nt, Artificial Sequence
  Description of Artificial Sequence: Synthetic oligonucleotide
gcgcgucugagaccucagg

SEQ ID NO: 2158685 - RNA, 19 nt, Artificial Sequence
  Description of Artificial Sequence: Synthetic oligonucleotide
aggcaguaagugggcugag

SEQ ID NO: 2158686 - RNA, 19 nt, Artificial Sequence
  Description of Artificial Sequence: Synthetic oligonucleotide
gcgauccucaggauggcca

SEQ ID NO: 2158687 - RNA, 19 nt, Artificial Sequence
  Description of Artificial Sequence: Synthetic oligonucleotide
gcacuggcuuugaacgugc

SEQ ID NO: 2158688 - RNA, 19 nt, Artificial Sequence
  Description of Artificial Sequence: Synthetic oligonucleotide
guccgcucccuggcguugg

SEQ ID NO: 2158689 - RNA, 19 nt, Artificial Sequence
  Description of Artificial Sequence: Synthetic oligonucleotide
cugagaccucaggcgcucc

SEQ ID NO: 2158690 - RNA, 19 nt, Artificial Sequence
  Description of Artificial Sequence: Synthetic oligonucleotide
gcguggggcgcgcggaggg

SEQ ID NO: 2158691 - RNA, 19 nt, Artificial Sequence
  Description of Artificial Sequence: Synthetic oligonucleotide
ccaacugggaagagaccca

SEQ ID NO: 2158692 - RNA, 19 nt, Artificial Sequence
  Description of Artificial Sequence: Synthetic oligonucleotide
acgcuucuuggcacggccu

SEQ ID NO: 2158693 - RNA, 19 nt, Artificial Sequence
  Description of Artificial Sequence: Synthetic oligonucleotide
cuugauggacucagcuuuu

SEQ ID NO: 2158694 - RNA, 19 nt, Artificial Sequence
  Description of Artificial Sequence: Synthetic oligonucleotide
guccugguccugagugacc

SEQ ID NO: 2158695 - RNA, 19 nt, Artificial Sequence
  Description of Artificial Sequence: Synthetic oligonucleotide
gcagcgcugcacacacucg

SEQ ID NO: 2158696 - RNA, 19 nt, Artificial Sequence
  Description of Artificial Sequence: Synthetic oligonucleotide
ccucgggacgcccgggugc

SEQ ID NO: 2158697 - RNA, 19 nt, Artificial Sequence
  Description of Artificial Sequence: Synthetic oligonucleotide
ggugcgggugcagcgcugc

SEQ ID NO: 2158698 - RNA, 19 nt, Artificial Sequence
  Description of Artificial Sequence: Synthetic oligonucleotide
ucccuggcguuggccagga

SEQ ID NO: 2158699 - RNA, 19 nt, Artificial Sequence
  Description of Artificial Sequence: Synthetic oligonucleotide
gcuguguccgugccuccac

SEQ ID NO: 2158700 - RNA, 19 nt, Artificial Sequence
  Description of Artificial Sequence: Synthetic oligonucleotide
cuguggucggcgcuguagu

SEQ ID NO: 2158701 - RNA, 19 nt, Artificial Sequence
  Description of Artificial Sequence: Synthetic oligonucleotide
gcugcgcugauggugugca

SEQ ID NO: 2158702 - RNA, 19 nt, Artificial Sequence
  Description of Artificial Sequence: Synthetic oligonucleotide
agugacccugagaggcagu

SEQ ID NO: 2158703 - RNA, 19 nt, Artificial Sequence
  Description of Artificial Sequence: Synthetic oligonucleotide
gugacccugagaggcagua

SEQ ID NO: 2158704 - RNA, 19 nt, Artificial Sequence
  Description of Artificial Sequence: Synthetic oligonucleotide
gucgcuucgccuaggacuu

SEQ ID NO: 2158705 - RNA, 19 nt, Artificial Sequence
  Description of Artificial Sequence: Synthetic oligonucleotide
guggggcgcgcggaggggc

SEQ ID NO: 2158706 - RNA, 19 nt, Artificial Sequence
  Description of Artificial Sequence: Synthetic oligonucleotide
cgcccagagcgaaaccgcg

SEQ ID NO: 2158707 - RNA, 19 nt, Artificial Sequence
  Description of Artificial Sequence: Synthetic oligonucleotide
uuccucccuauguccucuu

SEQ ID NO: 2158708 - RNA, 19 nt, Artificial Sequence
  Description of Artificial Sequence: Synthetic oligonucleotide
aggcugcgcugauggugug

SEQ ID NO: 2158709 - RNA, 19 nt, Artificial Sequence
  Description of Artificial Sequence: Synthetic oligonucleotide
gcguuugcgcgcgucugag

SEQ ID NO: 2158710 - RNA, 19 nt, Artificial Sequence
  Description of Artificial Sequence: Synthetic oligonucleotide
cugcgcugauggugugcac

SEQ ID NO: 2158711 - RNA, 19 nt, Artificial Sequence
  Description of Artificial Sequence: Synthetic oligonucleotide
cgaaaccgcguuugcgcgc

SEQ ID NO: 2158712 - RNA, 19 nt, Artificial Sequence
  Description of Artificial Sequence: Synthetic oligonucleotide
cagagccggcucgcgguag

SEQ ID NO: 2158713 - RNA, 19 nt, Artificial Sequence
  Description of Artificial Sequence: Synthetic oligonucleotide
caagcucugggacggcggu

SEQ ID NO: 2158714 - RNA, 19 nt, Artificial Sequence
  Description of Artificial Sequence: Synthetic oligonucleotide
ggcgauccucaggauggcc

SEQ ID NO: 2158715 - RNA, 19 nt, Artificial Sequence
  Description of Artificial Sequence: Synthetic oligonucleotide
cugggacggcgguggcggc

SEQ ID NO: 2158716 - RNA, 19 nt, Artificial Sequence
  Description of Artificial Sequence: Synthetic oligonucleotide
gcacauggagcgggcacug

SEQ ID NO: 2158717 - RNA, 19 nt, Artificial Sequence
  Description of Artificial Sequence: Synthetic oligonucleotide
uuccgccugcagggugcgg

SEQ ID NO: 2158718 - RNA, 19 nt, Artificial Sequence
  Description of Artificial Sequence: Synthetic oligonucleotide
cguggguagucccgguccc

SEQ ID NO: 2158719 - RNA, 19 nt, Artificial Sequence
  Description of Artificial Sequence: Synthetic oligonucleotide
ggaggggcacacagcaaga

SEQ ID NO: 2158720 - RNA, 19 nt, Artificial Sequence
  Description of Artificial Sequence: Synthetic oligonucleotide
ggcguggguagucccgguc

SEQ ID NO: 2158721 - RNA, 19 nt, Artificial Sequence
  Description of Artificial Sequence: Synthetic oligonucleotide
ccucuagcacauggagcgg

SEQ ID NO: 2158722 - RNA, 19 nt, Artificial Sequence
  Description of Artificial Sequence: Synthetic oligonucleotide
cgcgcggaggggcacacag

SEQ ID NO: 2158723 - RNA, 19 nt, Artificial Sequence
  Description of Artificial Sequence: Synthetic oligonucleotide
cuggcccauuccccugguc

SEQ ID NO: 2158724 - RNA, 19 nt, Artificial Sequence
  Description of Artificial Sequence: Synthetic oligonucleotide
gcuucgccuaggacuuucc

SEQ ID NO: 2158725 - RNA, 19 nt, Artificial Sequence
  Description of Artificial Sequence: Synthetic oligonucleotide
ccccuggucccuuccuccc

SEQ ID NO: 2158726 - RNA, 19 nt, Artificial Sequence
  Description of Artificial Sequence: Synthetic oligonucleotide
gcgcccagagcgaaaccgc

SEQ ID NO: 2158727 - RNA, 19 nt, Artificial Sequence
  Description of Artificial Sequence: Synthetic oligonucleotide
aggcgcuccgaugccccug

SEQ ID NO: 2158728 - RNA, 19 nt, Artificial Sequence
  Description of Artificial Sequence: Synthetic oligonucleotide
ggcggcguggggcgcgcgg

SEQ ID NO: 2158729 - RNA, 19 nt, Artificial Sequence
  Description of Artificial Sequence: Synthetic oligonucleotide
ggggacgcagagccggcuc

SEQ ID NO: 2158730 - RNA, 19 nt, Artificial Sequence
  Description of Artificial Sequence: Synthetic oligonucleotide
ccuccgggucugcugcagg

SEQ ID NO: 2158731 - RNA, 19 nt, Artificial Sequence
  Description of Artificial Sequence: Synthetic oligonucleotide
cacggccuuccgccugcag

SEQ ID NO: 2158732 - RNA, 19 nt, Artificial Sequence
  Description of Artificial Sequence: Synthetic oligonucleotide
gccuuccgccugcagggug

SEQ ID NO: 2158733 - RNA, 19 nt, Artificial Sequence
  Description of Artificial Sequence: Synthetic oligonucleotide
cagggacaggauguaguua

SEQ ID NO: 2158734 - RNA, 19 nt, Artificial Sequence
  Description of Artificial Sequence: Synthetic oligonucleotide
ggggacucucguggcgccg

SEQ ID NO: 2158735 - RNA, 19 nt, Artificial Sequence
  Description of Artificial Sequence: Synthetic oligonucleotide
ggcguuggccaggagccuc

SEQ ID NO: 2158736 - RNA, 19 nt, Artificial Sequence
  Description of Artificial Sequence: Synthetic oligonucleotide
ggacgcagagccggcucgc

SEQ ID NO: 2158737 - RNA, 19 nt, Artificial Sequence
  Description of Artificial Sequence: Synthetic oligonucleotide
ggcgccgcugggguucggg

SEQ ID NO: 2158738 - RNA, 19 nt, Artificial Sequence
  Description of Artificial Sequence: Synthetic oligonucleotide
gcgcuguaguccaggucag

SEQ ID NO: 2158739 - RNA, 19 nt, Artificial Sequence
  Description of Artificial Sequence: Synthetic oligonucleotide
ccguaggaguagcauggca

SEQ ID NO: 2158740 - RNA, 19 nt, Artificial Sequence
  Description of Artificial Sequence: Synthetic oligonucleotide
ggucacuccuuacgcuucu

SEQ ID NO: 2158741 - RNA, 19 nt, Artificial Sequence
  Description of Artificial Sequence: Synthetic oligonucleotide
ggcgcuccgaugccccuga

SEQ ID NO: 2158742 - RNA, 19 nt, Artificial Sequence
  Description of Artificial Sequence: Synthetic oligonucleotide
ccucaggcgcuccgaugcc

SEQ ID NO: 2158743 - RNA, 19 nt, Artificial Sequence
  Description of Artificial Sequence: Synthetic oligonucleotide
gccggccuuuccaagggca

SEQ ID NO: 2158744 - RNA, 19 nt, Artificial Sequence
  Description of Artificial Sequence: Synthetic oligonucleotide
gcguuggccaggagccucc

SEQ ID NO: 2158745 - RNA, 19 nt, Artificial Sequence
  Description of Artificial Sequence: Synthetic oligonucleotide
cacaggcggcguggggcgc

SEQ ID NO: 2158746 - RNA, 19 nt, Artificial Sequence
  Description of Artificial Sequence: Synthetic oligonucleotide
ggcguggggcgcgcggagg

SEQ ID NO: 2158747 - RNA, 19 nt, Artificial Sequence
  Description of Artificial Sequence: Synthetic oligonucleotide
gcccaacugggaagagacc

SEQ ID NO: 2158748 - RNA, 19 nt, Artificial Sequence
  Description of Artificial Sequence: Synthetic oligonucleotide
gcggcggucgcuucgccua

SEQ ID NO: 2158749 - RNA, 19 nt, Artificial Sequence
  Description of Artificial Sequence: Synthetic oligonucleotide
ggugugcacccgcguccgc

SEQ ID NO: 2158750 - RNA, 19 nt, Artificial Sequence
  Description of Artificial Sequence: Synthetic oligonucleotide
gggacgcccgggugccaag

SEQ ID NO: 2158751 - RNA, 19 nt, Artificial Sequence
  Description of Artificial Sequence: Synthetic oligonucleotide
cccguaggaguagcauggc

SEQ ID NO: 2158752 - RNA, 19 nt, Artificial Sequence
  Description of Artificial Sequence: Synthetic oligonucleotide
cuccguggaggcggcgguc

SEQ ID NO: 2158753 - RNA, 19 nt, Artificial Sequence
  Description of Artificial Sequence: Synthetic oligonucleotide
gugugcacccgcguccgcu

SEQ ID NO: 2158754 - RNA, 19 nt, Artificial Sequence
  Description of Artificial Sequence: Synthetic oligonucleotide
ucguggcgccgcugggguu

SEQ ID NO: 2158755 - RNA, 19 nt, Artificial Sequence
  Description of Artificial Sequence: Synthetic oligonucleotide
gcugcaccucgggacgccc

SEQ ID NO: 2158756 - RNA, 19 nt, Artificial Sequence
  Description of Artificial Sequence: Synthetic oligonucleotide
cugcacacacucggagaaa

SEQ ID NO: 2158757 - RNA, 19 nt, Artificial Sequence
  Description of Artificial Sequence: Synthetic oligonucleotide
ggacgcccgggugccaagc

SEQ ID NO: 2158758 - RNA, 19 nt, Artificial Sequence
  Description of Artificial Sequence: Synthetic oligonucleotide
gggugcagcgcugcacaca

SEQ ID NO: 2158759 - RNA, 19 nt, Artificial Sequence
  Description of Artificial Sequence: Synthetic oligonucleotide
gcgagugaggcuggcuguc

SEQ ID NO: 2158760 - RNA, 19 nt, Artificial Sequence
  Description of Artificial Sequence: Synthetic oligonucleotide
cccacugcgcccagagcga

SEQ ID NO: 2158761 - RNA, 19 nt, Artificial Sequence
  Description of Artificial Sequence: Synthetic oligonucleotide
gggcacuggcuuugaacgu

SEQ ID NO: 2158762 - RNA, 19 nt, Artificial Sequence
  Description of Artificial Sequence: Synthetic oligonucleotide
cgcuccgaugccccugagc

SEQ ID NO: 2158763 - RNA, 19 nt, Artificial Sequence
  Description of Artificial Sequence: Synthetic oligonucleotide
gggguucgggaggcacagg

SEQ ID NO: 2158764 - RNA, 19 nt, Artificial Sequence
  Description of Artificial Sequence: Synthetic oligonucleotide
cgcugcacacacucggaga

SEQ ID NO: 2158765 - RNA, 19 nt, Artificial Sequence
  Description of Artificial Sequence: Synthetic oligonucleotide
cacugcgcccagagcgaaa

SEQ ID NO: 2158766 - RNA, 19 nt, Artificial Sequence
  Description of Artificial Sequence: Synthetic oligonucleotide
ggcggucgcuucgccuagg

SEQ ID NO: 2158767 - RNA, 19 nt, Artificial Sequence
  Description of Artificial Sequence: Synthetic oligonucleotide
gcggucgcuucgccuagga

SEQ ID NO: 2158768 - RNA, 19 nt, Artificial Sequence
  Description of Artificial Sequence: Synthetic oligonucleotide
cgccgcugggguucgggag

SEQ ID NO: 2158769 - RNA, 19 nt, Artificial Sequence
  Description of Artificial Sequence: Synthetic oligonucleotide
gcaccucgggacgcccggg

SEQ ID NO: 2158770 - RNA, 19 nt, Artificial Sequence
  Description of Artificial Sequence: Synthetic oligonucleotide
gagcgggcacuggcuuuga

SEQ ID NO: 2158771 - RNA, 19 nt, Artificial Sequence
  Description of Artificial Sequence: Synthetic oligonucleotide
ugcgcgcgucugagaccuc

SEQ ID NO: 2158772 - RNA, 19 nt, Artificial Sequence
  Description of Artificial Sequence: Synthetic oligonucleotide
cggccuuuccaagggcagc

SEQ ID NO: 2158773 - RNA, 19 nt, Artificial Sequence
  Description of Artificial Sequence: Synthetic oligonucleotide
cgcgcgucugagaccucag

SEQ ID NO: 2158774 - RNA, 19 nt, Artificial Sequence
  Description of Artificial Sequence: Synthetic oligonucleotide
gcgcgcgucugagaccuca

SEQ ID NO: 2158775 - RNA, 19 nt, Artificial Sequence
  Description of Artificial Sequence: Synthetic oligonucleotide
cacccgcguccgcucccug

SEQ ID NO: 2158776 - RNA, 19 nt, Artificial Sequence
  Description of Artificial Sequence: Synthetic oligonucleotide
cguggcgccgcugggguuc

SEQ ID NO: 2158777 - RNA, 19 nt, Artificial Sequence
  Description of Artificial Sequence: Synthetic oligonucleotide
gcgcggaggggcacacagc

SEQ ID NO: 2158778 - RNA, 19 nt, Artificial Sequence
  Description of Artificial Sequence: Synthetic oligonucleotide
ucgcuucgccuaggacuuu

SEQ ID NO: 2158779 - RNA, 19 nt, Artificial Sequence
  Description of Artificial Sequence: Synthetic oligonucleotide
ggucugcugcagggcuuug

SEQ ID NO: 2158780 - RNA, 19 nt, Artificial Sequence
  Description of Artificial Sequence: Synthetic oligonucleotide
cgcugauggugugcacccg

SEQ ID NO: 2158781 - RNA, 19 nt, Artificial Sequence
  Description of Artificial Sequence: Synthetic oligonucleotide
ccgcguuugcgcgcgucug

SEQ ID NO: 2158782 - RNA, 19 nt, Artificial Sequence
  Description of Artificial Sequence: Synthetic oligonucleotide
gcacacacucggagaaacu

SEQ ID NO: 2158783 - RNA, 19 nt, Artificial Sequence
  Description of Artificial Sequence: Synthetic oligonucleotide
ccgcguccgcucccuggcg

SEQ ID NO: 2158784 - RNA, 19 nt, Artificial Sequence
  Description of Artificial Sequence: Synthetic oligonucleotide
ggguagucccggucccacu

SEQ ID NO: 2158785 - RNA, 19 nt, Artificial Sequence
  Description of Artificial Sequence: Synthetic oligonucleotide
ggucggcgcuguaguccag

SEQ ID NO: 2158786 - RNA, 19 nt, Artificial Sequence
  Description of Artificial Sequence: Synthetic oligonucleotide
gcugaguaucugguagcau

SEQ ID NO: 2158787 - RNA, 19 nt, Artificial Sequence
  Description of Artificial Sequence: Synthetic oligonucleotide
cgccucgaaggcugcgcug

SEQ ID NO: 2158788 - RNA, 19 nt, Artificial Sequence
  Description of Artificial Sequence: Synthetic oligonucleotide
cggucgcuucgccuaggac

SEQ ID NO: 2158789 - RNA, 19 nt, Artificial Sequence
  Description of Artificial Sequence: Synthetic oligonucleotide
gcgccucgaaggcugcgcu

SEQ ID NO: 2158790 - RNA, 19 nt, Artificial Sequence
  Description of Artificial Sequence: Synthetic oligonucleotide
ggcggcggucgcuucgccu

SEQ ID NO: 2158791 - RNA, 19 nt, Artificial Sequence
  Description of Artificial Sequence: Synthetic oligonucleotide
gccagccgcgccagggaca

SEQ ID NO: 2158792 - RNA, 19 nt, Artificial Sequence
  Description of Artificial Sequence: Synthetic oligonucleotide
cgcuucgccuaggacuuuc

SEQ ID NO: 2158793 - RNA, 19 nt, Artificial Sequence
  Description of Artificial Sequence: Synthetic oligonucleotide
cccagagcgaaaccgcguu

SEQ ID NO: 2158794 - RNA, 19 nt, Artificial Sequence
  Description of Artificial Sequence: Synthetic oligonucleotide
cgggugcagcgcugcacac

SEQ ID NO: 2158795 - RNA, 19 nt, Artificial Sequence
  Description of Artificial Sequence: Synthetic oligonucleotide
cgcgguagggcugcaccuc

SEQ ID NO: 2158796 - RNA, 19 nt, Artificial Sequence
  Description of Artificial Sequence: Synthetic oligonucleotide
cccggucccacugcgccca

SEQ ID NO: 2158797 - RNA, 19 nt, Artificial Sequence
  Description of Artificial Sequence: Synthetic oligonucleotide
ggcgcgcggaggggcacac

SEQ ID NO: 2158798 - RNA, 19 nt, Artificial Sequence
  Description of Artificial Sequence: Synthetic oligonucleotide
cuguggcaggucacuccuu

SEQ ID NO: 2158799 - RNA, 19 nt, Artificial Sequence
  Description of Artificial Sequence: Synthetic oligonucleotide
cguuugcgcgcgucugaga

SEQ ID NO: 2158800 - RNA, 19 nt, Artificial Sequence
  Description of Artificial Sequence: Synthetic oligonucleotide
gcgcuccgaugccccugag

SEQ ID NO: 2158801 - RNA, 19 nt, Artificial Sequence
  Description of Artificial Sequence: Synthetic oligonucleotide
gcccgggugccaagcucug

SEQ ID NO: 2158802 - RNA, 19 nt, Artificial Sequence
  Description of Artificial Sequence: Synthetic oligonucleotide
cgcguuugcgcgcgucuga

SEQ ID NO: 2158803 - RNA, 19 nt, Artificial Sequence
  Description of Artificial Sequence: Synthetic oligonucleotide
gucacuccuuacgcuucuu

SEQ ID NO: 2158804 - RNA, 19 nt, Artificial Sequence
  Description of Artificial Sequence: Synthetic oligonucleotide
cggcgcuguaguccagguc

SEQ ID NO: 2158805 - RNA, 19 nt, Artificial Sequence
  Description of Artificial Sequence: Synthetic oligonucleotide
gcccagagcgaaaccgcgu

SEQ ID NO: 2158806 - RNA, 19 nt, Artificial Sequence
  Description of Artificial Sequence: Synthetic oligonucleotide
cagccgcgccagggacagg

SEQ ID NO: 2158807 - RNA, 19 nt, Artificial Sequence
  Description of Artificial Sequence: Synthetic oligonucleotide
ggacucucguggcgccgcu

SEQ ID NO: 2158808 - RNA, 19 nt, Artificial Sequence
  Description of Artificial Sequence: Synthetic oligonucleotide
cggcggucgcuucgccuag

SEQ ID NO: 2158809 - RNA, 19 nt, Artificial Sequence
  Description of Artificial Sequence: Synthetic oligonucleotide
gcggaggggcacacagcaa

SEQ ID NO: 2158810 - RNA, 19 nt, Artificial Sequence
  Description of Artificial Sequence: Synthetic oligonucleotide
cgcccgggugccaagcucu

SEQ ID NO: 2158811 - RNA, 19 nt, Artificial Sequence
  Description of Artificial Sequence: Synthetic oligonucleotide
ggggcgcgcggaggggcac

SEQ ID NO: 2158812 - RNA, 19 nt, Artificial Sequence
  Description of Artificial Sequence: Synthetic oligonucleotide
ccugagcgccucgaaggcu

SEQ ID NO: 2158813 - RNA, 19 nt, Artificial Sequence
  Description of Artificial Sequence: Synthetic oligonucleotide
gcucccuggcuguguccgu

SEQ ID NO: 2158814 - RNA, 19 nt, Artificial Sequence
  Description of Artificial Sequence: Synthetic oligonucleotide
cguccgcucccuggcguug

SEQ ID NO: 2158815 - RNA, 19 nt, Artificial Sequence
  Description of Artificial Sequence: Synthetic oligonucleotide
ccagagcgaaaccgcguuu

SEQ ID NO: 2158816 - RNA, 19 nt, Artificial Sequence
  Description of Artificial Sequence: Synthetic oligonucleotide
gcgccagggacaggaugua

SEQ ID NO: 2158817 - RNA, 19 nt, Artificial Sequence
  Description of Artificial Sequence: Synthetic oligonucleotide
cggcguggggcgcgcggag

SEQ ID NO: 2158818 - RNA, 19 nt, Artificial Sequence
  Description of Artificial Sequence: Synthetic oligonucleotide
cccuggcguuggccaggag

SEQ ID NO: 2158819 - RNA, 19 nt, Artificial Sequence
  Description of Artificial Sequence: Synthetic oligonucleotide
ccggucccacugcgcccag

SEQ ID NO: 2158820 - RNA, 19 nt, Artificial Sequence
  Description of Artificial Sequence: Synthetic oligonucleotide
gggcgcgcggaggggcaca

SEQ ID NO: 2158821 - RNA, 19 nt, Artificial Sequence
  Description of Artificial Sequence: Synthetic oligonucleotide
gcguccgcucccuggcguu

SEQ ID NO: 2158822 - RNA, 19 nt, Artificial Sequence
  Description of Artificial Sequence: Synthetic oligonucleotide
ggccuuccgccugcagggu

SEQ ID NO: 2158823 - RNA, 19 nt, Artificial Sequence
  Description of Artificial Sequence: Synthetic oligonucleotide
cggagaaacugagguugcu

SEQ ID NO: 2158824 - RNA, 19 nt, Artificial Sequence
  Description of Artificial Sequence: Synthetic oligonucleotide
gcacccgcguccgcucccu

SEQ ID NO: 2158825 - RNA, 19 nt, Artificial Sequence
  Description of Artificial Sequence: Synthetic oligonucleotide
ccucgaaggcugcgcugau

SEQ ID NO: 2158826 - RNA, 19 nt, Artificial Sequence
  Description of Artificial Sequence: Synthetic oligonucleotide
cgcguccgcucccuggcgu

SEQ ID NO: 2158827 - RNA, 19 nt, Artificial Sequence
  Description of Artificial Sequence: Synthetic oligonucleotide
gcgcgcggaggggcacaca

SEQ ID NO: 2158828 - RNA, 19 nt, Artificial Sequence
  Description of Artificial Sequence: Synthetic oligonucleotide
cgggacgcccgggugccaa

SEQ ID NO: 2158829 - RNA, 19 nt, Artificial Sequence
  Description of Artificial Sequence: Synthetic oligonucleotide
cgcugggguucgggaggca

SEQ ID NO: 2158830 - RNA, 19 nt, Artificial Sequence
  Description of Artificial Sequence: Synthetic oligonucleotide
cgggaggcacaggcggcgu

SEQ ID NO: 2158831 - RNA, 19 nt, Artificial Sequence
  Description of Artificial Sequence: Synthetic oligonucleotide
cgguggcggcguggguagu

SEQ ID NO: 2158832 - RNA, 19 nt, Artificial Sequence
  Description of Artificial Sequence: Synthetic oligonucleotide
acgucuagcacgcagaugc

SEQ ID NO: 2158833 - RNA, 19 nt, Artificial Sequence
  Description of Artificial Sequence: Synthetic oligonucleotide
ugcacagagauguauaugg

SEQ ID NO: 2158834 - RNA, 19 nt, Artificial Sequence
  Description of Artificial Sequence: Synthetic oligonucleotide
acucuaaaacaauaguuac

SEQ ID NO: 2158835 - RNA, 19 nt, Artificial Sequence
  Description of Artificial Sequence: Synthetic oligonucleotide
uuuauuaggaugucagucc

SEQ ID NO: 2158836 - RNA, 19 nt, Artificial Sequence
  Description of Artificial Sequence: Synthetic oligonucleotide
uguaguaugggacacgcug

SEQ ID NO: 2158837 - RNA, 19 nt, Artificial Sequence
  Description of Artificial Sequence: Synthetic oligonucleotide
uucaguuucggcaagccag

SEQ ID NO: 2158838 - RNA, 19 nt, Artificial Sequence
  Description of Artificial Sequence: Synthetic oligonucleotide
uacuuuauuaggaugucag

SEQ ID NO: 2158839 - RNA, 19 nt, Artificial Sequence
  Description of Artificial Sequence: Synthetic oligonucleotide
uaugacaaguccuuggugc

SEQ ID NO: 2158840 - RNA, 19 nt, Artificial Sequence
  Description of Artificial Sequence: Synthetic oligonucleotide
aauaaauguggguacauuu

SEQ ID NO: 2158841 - RNA, 19 nt, Artificial Sequence
  Description of Artificial Sequence: Synthetic oligonucleotide
aauaucacgcugcaucauc

SEQ ID NO: 2158842 - RNA, 19 nt, Artificial Sequence
  Description of Artificial Sequence: Synthetic oligonucleotide
ugaagagccaccauguggc

SEQ ID NO: 2158843 - RNA, 19 nt, Artificial Sequence
  Description of Artificial Sequence: Synthetic oligonucleotide
uaggucaacgucuagcacg

SEQ ID NO: 2158844 - RNA, 19 nt, Artificial Sequence
  Description of Artificial Sequence: Synthetic oligonucleotide
aauaguuacuuuauuagga

SEQ ID NO: 2158845 - RNA, 19 nt, Artificial Sequence
  Description of Artificial Sequence: Synthetic oligonucleotide
aggacuacgucacagcggc

SEQ ID NO: 2158846 - RNA, 19 nt, Artificial Sequence
  Description of Artificial Sequence: Synthetic oligonucleotide
uccaaguugucauugauga

SEQ ID NO: 2158847 - RNA, 19 nt, Artificial Sequence
  Description of Artificial Sequence: Synthetic oligonucleotide
ugcaauaucacgcugcauc

SEQ ID NO: 2158848 - RNA, 19 nt, Artificial Sequence
  Description of Artificial Sequence: Synthetic oligonucleotide
agaucagucuucuugaugu

SEQ ID NO: 2158849 - RNA, 19 nt, Artificial Sequence
  Description of Artificial Sequence: Synthetic oligonucleotide
aggaugucaguccugcucc

SEQ ID NO: 2158850 - RNA, 19 nt, Artificial Sequence
  Description of Artificial Sequence: Synthetic oligonucleotide
guauaugggacgcagauca

SEQ ID NO: 2158851 - RNA, 19 nt, Artificial Sequence
  Description of Artificial Sequence: Synthetic oligonucleotide
uaggcuuuauccaaguugu

SEQ ID NO: 2158852 - RNA, 19 nt, Artificial Sequence
  Description of Artificial Sequence: Synthetic oligonucleotide
uaaauguggguacauuuca

SEQ ID NO: 2158853 - RNA, 19 nt, Artificial Sequence
  Description of Artificial Sequence: Synthetic oligonucleotide
ugacacucuaaaacaauag

SEQ ID NO: 2158854 - RNA, 19 nt, Artificial Sequence
  Description of Artificial Sequence: Synthetic oligonucleotide
gaauccuucaguuucggca

SEQ ID NO: 2158855 - RNA, 19 nt, Artificial Sequence
  Description of Artificial Sequence: Synthetic oligonucleotide
agagauguauaugggacgc

SEQ ID NO: 2158856 - RNA, 19 nt, Artificial Sequence
  Description of Artificial Sequence: Synthetic oligonucleotide
acagagauguauaugggac

SEQ ID NO: 2158857 - RNA, 19 nt, Artificial Sequence
  Description of Artificial Sequence: Synthetic oligonucleotide
agcacuacuggccuaggac

SEQ ID NO: 2158858 - RNA, 19 nt, Artificial Sequence
  Description of Artificial Sequence: Synthetic oligonucleotide
aauguggguacauuucaga

SEQ ID NO: 2158859 - RNA, 19 nt, Artificial Sequence
  Description of Artificial Sequence: Synthetic oligonucleotide
uguaggucaacgucuagca

SEQ ID NO: 2158860 - RNA, 19 nt, Artificial Sequence
  Description of Artificial Sequence: Synthetic oligonucleotide
agcaugcucaaugaagucc

SEQ ID NO: 2158861 - RNA, 19 nt, Artificial Sequence
  Description of Artificial Sequence: Synthetic oligonucleotide
augacaaguccuuggugcc

SEQ ID NO: 2158862 - RNA, 19 nt, Artificial Sequence
  Description of Artificial Sequence: Synthetic oligonucleotide
gauuuccucagaaagugcc

SEQ ID NO: 2158863 - RNA, 19 nt, Artificial Sequence
  Description of Artificial Sequence: Synthetic oligonucleotide
gaacucagcaugcucaaug

SEQ ID NO: 2158864 - RNA, 19 nt, Artificial Sequence
  Description of Artificial Sequence: Synthetic oligonucleotide
aucacgcugcaucaucucc

SEQ ID NO: 2158865 - RNA, 19 nt, Artificial Sequence
  Description of Artificial Sequence: Synthetic oligonucleotide
cuuuauuaggaugucaguc

SEQ ID NO: 2158866 - RNA, 19 nt, Artificial Sequence
  Description of Artificial Sequence: Synthetic oligonucleotide
agcacauccagugagggag

SEQ ID NO: 2158867 - RNA, 19 nt, Artificial Sequence
  Description of Artificial Sequence: Synthetic oligonucleotide
aaguaguaaucuuugccau

SEQ ID NO: 2158868 - RNA, 19 nt, Artificial Sequence
  Description of Artificial Sequence: Synthetic oligonucleotide
aguuacuuuauuaggaugu

SEQ ID NO: 2158869 - RNA, 19 nt, Artificial Sequence
  Description of Artificial Sequence: Synthetic oligonucleotide
caaagaucaccccaccucc

SEQ ID NO: 2158870 - RNA, 19 nt, Artificial Sequence
  Description of Artificial Sequence: Synthetic oligonucleotide
aggaugaagagccaccaug

SEQ ID NO: 2158871 - RNA, 19 nt, Artificial Sequence
  Description of Artificial Sequence: Synthetic oligonucleotide
uaguuacuuuauuaggaug

SEQ ID NO: 2158872 - RNA, 19 nt, Artificial Sequence
  Description of Artificial Sequence: Synthetic oligonucleotide
auggccgguucccugagcc

SEQ ID NO: 2158873 - RNA, 19 nt, Artificial Sequence
  Description of Artificial Sequence: Synthetic oligonucleotide
aacucagcaugcucaauga

SEQ ID NO: 2158874 - RNA, 19 nt, Artificial Sequence
  Description of Artificial Sequence: Synthetic oligonucleotide
uggggcaccagcaucauuc

SEQ ID NO: 2158875 - RNA, 19 nt, Artificial Sequence
  Description of Artificial Sequence: Synthetic oligonucleotide
auaguuacuuuauuaggau

SEQ ID NO: 2158876 - RNA, 19 nt, Artificial Sequence
  Description of Artificial Sequence: Synthetic oligonucleotide
ucuucagucucaguguugc

SEQ ID NO: 2158877 - RNA, 19 nt, Artificial Sequence
  Description of Artificial Sequence: Synthetic oligonucleotide
cagagauguauaugggacg

SEQ ID NO: 2158878 - RNA, 19 nt, Artificial Sequence
  Description of Artificial Sequence: Synthetic oligonucleotide
uccuacuccacaguggaag

SEQ ID NO: 2158879 - RNA, 19 nt, Artificial Sequence
  Description of Artificial Sequence: Synthetic oligonucleotide
ucaacgucuagcacgcaga

SEQ ID NO: 2158880 - RNA, 19 nt, Artificial Sequence
  Description of Artificial Sequence: Synthetic oligonucleotide
uggauuccguguaguaugg

SEQ ID NO: 2158881 - RNA, 19 nt, Artificial Sequence
  Description of Artificial Sequence: Synthetic oligonucleotide
guugcgcacacccuguagg

SEQ ID NO: 2158882 - RNA, 19 nt, Artificial Sequence
  Description of Artificial Sequence: Synthetic oligonucleotide
ugcauaggcuuuauccaag

SEQ ID NO: 2158883 - RNA, 19 nt, Artificial Sequence
  Description of Artificial Sequence: Synthetic oligonucleotide
uaugggacacgcugaagcc

SEQ ID NO: 2158884 - RNA, 19 nt, Artificial Sequence
  Description of Artificial Sequence: Synthetic oligonucleotide
acaguggaagccuaugaca

SEQ ID NO: 2158885 - RNA, 19 nt, Artificial Sequence
  Description of Artificial Sequence: Synthetic oligonucleotide
acgcagaugcgguucaugg

SEQ ID NO: 2158886 - RNA, 19 nt, Artificial Sequence
  Description of Artificial Sequence: Synthetic oligonucleotide
guggauuccguguaguaug

SEQ ID NO: 2158887 - RNA, 19 nt, Artificial Sequence
  Description of Artificial Sequence: Synthetic oligonucleotide
aaguugucauugaugauca

SEQ ID NO: 2158888 - RNA, 19 nt, Artificial Sequence
  Description of Artificial Sequence: Synthetic oligonucleotide
auuccguguaguaugggac

SEQ ID NO: 2158889 - RNA, 19 nt, Artificial Sequence
  Description of Artificial Sequence: Synthetic oligonucleotide
uccuggagcaacuucuuga

SEQ ID NO: 2158890 - RNA, 19 nt, Artificial Sequence
  Description of Artificial Sequence: Synthetic oligonucleotide
acgcagaucagucuucuug

SEQ ID NO: 2158891 - RNA, 19 nt, Artificial Sequence
  Description of Artificial Sequence: Synthetic oligonucleotide
ucagucucaguguugcgca

SEQ ID NO: 2158892 - RNA, 19 nt, Artificial Sequence
  Description of Artificial Sequence: Synthetic oligonucleotide
guugcauaggcuuuaucca

SEQ ID NO: 2158893 - RNA, 19 nt, Artificial Sequence
  Description of Artificial Sequence: Synthetic oligonucleotide
aaacaauaguuacuuuauu

SEQ ID NO: 2158894 - RNA, 19 nt, Artificial Sequence
  Description of Artificial Sequence: Synthetic oligonucleotide
uaugggacgcagaucaguc

SEQ ID NO: 2158895 - RNA, 19 nt, Artificial Sequence
  Description of Artificial Sequence: Synthetic oligonucleotide
aaauguggguacauuucag

SEQ ID NO: 2158896 - RNA, 19 nt, Artificial Sequence
  Description of Artificial Sequence: Synthetic oligonucleotide
ucuagcacgcagaugcggu

SEQ ID NO: 2158897 - RNA, 19 nt, Artificial Sequence
  Description of Artificial Sequence: Synthetic oligonucleotide
acagccgccuugcuugucc

SEQ ID NO: 2158898 - RNA, 19 nt, Artificial Sequence
  Description of Artificial Sequence: Synthetic oligonucleotide
augucaguccugcuccagc

SEQ ID NO: 2158899 - RNA, 19 nt, Artificial Sequence
  Description of Artificial Sequence: Synthetic oligonucleotide
ucaguuucggcaagccagc

SEQ ID NO: 2158900 - RNA, 19 nt, Artificial Sequence
  Description of Artificial Sequence: Synthetic oligonucleotide
agcugcaauaucacgcugc

SEQ ID NO: 2158901 - RNA, 19 nt, Artificial Sequence
  Description of Artificial Sequence: Synthetic oligonucleotide
auguauaugggacgcagau

SEQ ID NO: 2158902 - RNA, 19 nt, Artificial Sequence
  Description of Artificial Sequence: Synthetic oligonucleotide
uccuccuacuccacagugg

SEQ ID NO: 2158903 - RNA, 19 nt, Artificial Sequence
  Description of Artificial Sequence: Synthetic oligonucleotide
cacgcugaagccaaagaug

SEQ ID NO: 2158904 - RNA, 19 nt, Artificial Sequence
  Description of Artificial Sequence: Synthetic oligonucleotide
uucagucucaguguugcgc

SEQ ID NO: 2158905 - RNA, 19 nt, Artificial Sequence
  Description of Artificial Sequence: Synthetic oligonucleotide
gaucaccccaccuccaggc

SEQ ID NO: 2158906 - RNA, 19 nt, Artificial Sequence
  Description of Artificial Sequence: Synthetic oligonucleotide
gaaugaagcaggcccucag

SEQ ID NO: 2158907 - RNA, 19 nt, Artificial Sequence
  Description of Artificial Sequence: Synthetic oligonucleotide
agauguauaugggacgcag

SEQ ID NO: 2158908 - RNA, 19 nt, Artificial Sequence
  Description of Artificial Sequence: Synthetic oligonucleotide
gauuccguguaguauggga

SEQ ID NO: 2158909 - RNA, 19 nt, Artificial Sequence
  Description of Artificial Sequence: Synthetic oligonucleotide
cacucuaaaacaauaguua

SEQ ID NO: 2158910 - RNA, 19 nt, Artificial Sequence
  Description of Artificial Sequence: Synthetic oligonucleotide
acuuuauuaggaugucagu

SEQ ID NO: 2158911 - RNA, 19 nt, Artificial Sequence
  Description of Artificial Sequence: Synthetic oligonucleotide
aguuucggcaagccagcac

SEQ ID NO: 2158912 - RNA, 19 nt, Artificial Sequence
  Description of Artificial Sequence: Synthetic oligonucleotide
ggugccuuggcaaagauca

SEQ ID NO: 2158913 - RNA, 19 nt, Artificial Sequence
  Description of Artificial Sequence: Synthetic oligonucleotide
uuauccaaguugucauuga

SEQ ID NO: 2158914 - RNA, 19 nt, Artificial Sequence
  Description of Artificial Sequence: Synthetic oligonucleotide
uuacuuuauuaggauguca

SEQ ID NO: 2158915 - RNA, 19 nt, Artificial Sequence
  Description of Artificial Sequence: Synthetic oligonucleotide
cucagaaagugccugcuuc

SEQ ID NO: 2158916 - RNA, 19 nt, Artificial Sequence
  Description of Artificial Sequence: Synthetic oligonucleotide
aggucaacgucuagcacgc

SEQ ID NO: 2158917 - RNA, 19 nt, Artificial Sequence
  Description of Artificial Sequence: Synthetic oligonucleotide
uauuaggaugucaguccug

SEQ ID NO: 2158918 - RNA, 19 nt, Artificial Sequence
  Description of Artificial Sequence: Synthetic oligonucleotide
ggagaauaaauguggguac

SEQ ID NO: 2158919 - RNA, 19 nt, Artificial Sequence
  Description of Artificial Sequence: Synthetic oligonucleotide
uugcauaggcuuuauccaa

SEQ ID NO: 2158920 - RNA, 19 nt, Artificial Sequence
  Description of Artificial Sequence: Synthetic oligonucleotide
agugagggaggcugcacag

SEQ ID NO: 2158921 - RNA, 19 nt, Artificial Sequence
  Description of Artificial Sequence: Synthetic oligonucleotide
gucaacgucuagcacgcag

SEQ ID NO: 2158922 - RNA, 19 nt, Artificial Sequence
  Description of Artificial Sequence: Synthetic oligonucleotide
acacgcugaagccaaagau

SEQ ID NO: 2158923 - RNA, 19 nt, Artificial Sequence
  Description of Artificial Sequence: Synthetic oligonucleotide
uuccguguaguaugggaca

SEQ ID NO: 2158924 - RNA, 19 nt, Artificial Sequence
  Description of Artificial Sequence: Synthetic oligonucleotide
cacaggaugaagagccacc

SEQ ID NO: 2158925 - RNA, 19 nt, Artificial Sequence
  Description of Artificial Sequence: Synthetic oligonucleotide
guucccagagaacucagca

SEQ ID NO: 2158926 - RNA, 19 nt, Artificial Sequence
  Description of Artificial Sequence: Synthetic oligonucleotide
ugucaguccugcuccagca

SEQ ID NO: 2158927 - RNA, 19 nt, Artificial Sequence
  Description of Artificial Sequence: Synthetic oligonucleotide
ugaagcaggcccucaggca

SEQ ID NO: 2158928 - RNA, 19 nt, Artificial Sequence
  Description of Artificial Sequence: Synthetic oligonucleotide
acacucuaaaacaauaguu

SEQ ID NO: 2158929 - RNA, 19 nt, Artificial Sequence
  Description of Artificial Sequence: Synthetic oligonucleotide
agggagaauaaaugugggu

SEQ ID NO: 2158930 - RNA, 19 nt, Artificial Sequence
  Description of Artificial Sequence: Synthetic oligonucleotide
gauuuggggcaccagcauc

SEQ ID NO: 2158931 - RNA, 19 nt, Artificial Sequence
  Description of Artificial Sequence: Synthetic oligonucleotide
uucuugagcagggugcucu

SEQ ID NO: 2158932 - RNA, 19 nt, Artificial Sequence
  Description of Artificial Sequence: Synthetic oligonucleotide
ugcucuccaugucagccug

SEQ ID NO: 2158933 - RNA, 19 nt, Artificial Sequence
  Description of Artificial Sequence: Synthetic oligonucleotide
acuacgucacagcggcgcg

SEQ ID NO: 2158934 - RNA, 19 nt, Artificial Sequence
  Description of Artificial Sequence: Synthetic oligonucleotide
uuucggcaagccagcacag

SEQ ID NO: 2158935 - RNA, 19 nt, Artificial Sequence
  Description of Artificial Sequence: Synthetic oligonucleotide
aaacucucuucagucucag

SEQ ID NO: 2158936 - RNA, 19 nt, Artificial Sequence
  Description of Artificial Sequence: Synthetic oligonucleotide
caggacuacgucacagcgg

SEQ ID NO: 2158937 - RNA, 19 nt, Artificial Sequence
  Description of Artificial Sequence: Synthetic oligonucleotide
auguggccagacaaggggc

SEQ ID NO: 2158938 - RNA, 19 nt, Artificial Sequence
  Description of Artificial Sequence: Synthetic oligonucleotide
agaucaccccaccuccagg

SEQ ID NO: 2158939 - RNA, 19 nt, Artificial Sequence
  Description of Artificial Sequence: Synthetic oligonucleotide
ugccagcccgaccagcggg

SEQ ID NO: 2158940 - RNA, 19 nt, Artificial Sequence
  Description of Artificial Sequence: Synthetic oligonucleotide
gucccauacagguucccag

SEQ ID NO: 2158941 - RNA, 19 nt, Artificial Sequence
  Description of Artificial Sequence: Synthetic oligonucleotide
cuaugacaaguccuuggug

SEQ ID NO: 2158942 - RNA, 19 nt, Artificial Sequence
  Description of Artificial Sequence: Synthetic oligonucleotide
acuaggccacaccgaagcg

SEQ ID NO: 2158943 - RNA, 19 nt, Artificial Sequence
  Description of Artificial Sequence: Synthetic oligonucleotide
ucccauacagguucccaga

SEQ ID NO: 2158944 - RNA, 19 nt, Artificial Sequence
  Description of Artificial Sequence: Synthetic oligonucleotide
ugcuucaauguugcauagg

SEQ ID NO: 2158945 - RNA, 19 nt, Artificial Sequence
  Description of Artificial Sequence: Synthetic oligonucleotide
cauccagugagggaggcug

SEQ ID NO: 2158946 - RNA, 19 nt, Artificial Sequence
  Description of Artificial Sequence: Synthetic oligonucleotide
uggguacauuucagaaucc

SEQ ID NO: 2158947 - RNA, 19 nt, Artificial Sequence
  Description of Artificial Sequence: Synthetic oligonucleotide
agcaacuucuugagcaggg

SEQ ID NO: 2158948 - RNA, 19 nt, Artificial Sequence
  Description of Artificial Sequence: Synthetic oligonucleotide
gcaggacuacgucacagcg

SEQ ID NO: 2158949 - RNA, 19 nt, Artificial Sequence
  Description of Artificial Sequence: Synthetic oligonucleotide
cacagagauguauauggga

SEQ ID NO: 2158950 - RNA, 19 nt, Artificial Sequence
  Description of Artificial Sequence: Synthetic oligonucleotide
gagaauaaauguggguaca

SEQ ID NO: 2158951 - RNA, 19 nt, Artificial Sequence
  Description of Artificial Sequence: Synthetic oligonucleotide
caugccguccgcaggcacg

SEQ ID NO: 2158952 - RNA, 19 nt, Artificial Sequence
  Description of Artificial Sequence: Synthetic oligonucleotide
ugggacacgcugaagccaa

SEQ ID NO: 2158953 - RNA, 19 nt, Artificial Sequence
  Description of Artificial Sequence: Synthetic oligonucleotide
uaguaugggacacgcugaa

SEQ ID NO: 2158954 - RNA, 19 nt, Artificial Sequence
  Description of Artificial Sequence: Synthetic oligonucleotide
caucucccuggucacaaag

SEQ ID NO: 2158955 - RNA, 19 nt, Artificial Sequence
  Description of Artificial Sequence: Synthetic oligonucleotide
ugggacgcagaucagucuu

SEQ ID NO: 2158956 - RNA, 19 nt, Artificial Sequence
  Description of Artificial Sequence: Synthetic oligonucleotide
ccuugcuugucccauacag

SEQ ID NO: 2158957 - RNA, 19 nt, Artificial Sequence
  Description of Artificial Sequence: Synthetic oligonucleotide
aguguugcgcagccgcaag

SEQ ID NO: 2158958 - RNA, 19 nt, Artificial Sequence
  Description of Artificial Sequence: Synthetic oligonucleotide
uggccuaggaccugccaug

SEQ ID NO: 2158959 - RNA, 19 nt, Artificial Sequence
  Description of Artificial Sequence: Synthetic oligonucleotide
auuuggggcaccagcauca

SEQ ID NO: 2158960 - RNA, 19 nt, Artificial Sequence
  Description of Artificial Sequence: Synthetic oligonucleotide
uuuccucaccaggucgugg

SEQ ID NO: 2158961 - RNA, 19 nt, Artificial Sequence
  Description of Artificial Sequence: Synthetic oligonucleotide
uguauaugggacgcagauc

SEQ ID NO: 2158962 - RNA, 19 nt, Artificial Sequence
  Description of Artificial Sequence: Synthetic oligonucleotide
cagaucagucuucuugaug

SEQ ID NO: 2158963 - RNA, 19 nt, Artificial Sequence
  Description of Artificial Sequence: Synthetic oligonucleotide
gcagauuuggggcaccagc

SEQ ID NO: 2158964 - RNA, 19 nt, Artificial Sequence
  Description of Artificial Sequence: Synthetic oligonucleotide
gccuaugacaaguccuugg

SEQ ID NO: 2158965 - RNA, 19 nt, Artificial Sequence
  Description of Artificial Sequence: Synthetic oligonucleotide
cagauuuggggcaccagca

SEQ ID NO: 2158966 - RNA, 19 nt, Artificial Sequence
  Description of Artificial Sequence: Synthetic oligonucleotide
auguugcauaggcuuuauc

SEQ ID NO: 2158967 - RNA, 19 nt, Artificial Sequence
  Description of Artificial Sequence: Synthetic oligonucleotide
aagaugcugccauguuccu

SEQ ID NO: 2158968 - RNA, 19 nt, Artificial Sequence
  Description of Artificial Sequence: Synthetic oligonucleotide
agaauaaauguggguacau

SEQ ID NO: 2158969 - RNA, 19 nt, Artificial Sequence
  Description of Artificial Sequence: Synthetic oligonucleotide
ccuaggaccugccaugccg

SEQ ID NO: 2158970 - RNA, 19 nt, Artificial Sequence
  Description of Artificial Sequence: Synthetic oligonucleotide
ggaagccuaugacaagucc

SEQ ID NO: 2158971 - RNA, 19 nt, Artificial Sequence
  Description of Artificial Sequence: Synthetic oligonucleotide
gcaaagaucaccccaccuc

SEQ ID NO: 2158972 - RNA, 19 nt, Artificial Sequence
  Description of Artificial Sequence: Synthetic oligonucleotide
gcuugucccauacagguuc

SEQ ID NO: 2158973 - RNA, 19 nt, Artificial Sequence
  Description of Artificial Sequence: Synthetic oligonucleotide
agucgcuuugccaaacucu

SEQ ID NO: 2158974 - RNA, 19 nt, Artificial Sequence
  Description of Artificial Sequence: Synthetic oligonucleotide
ccagacaaggggcagcucc

SEQ ID NO: 2158975 - RNA, 19 nt, Artificial Sequence
  Description of Artificial Sequence: Synthetic oligonucleotide
gaagccuaugacaaguccu

SEQ ID NO: 2158976 - RNA, 19 nt, Artificial Sequence
  Description of Artificial Sequence: Synthetic oligonucleotide
auaucacgcugcaucaucu

SEQ ID NO: 2158977 - RNA, 19 nt, Artificial Sequence
  Description of Artificial Sequence: Synthetic oligonucleotide
uggaagccuaugacaaguc

SEQ ID NO: 2158978 - RNA, 19 nt, Artificial Sequence
  Description of Artificial Sequence: Synthetic oligonucleotide
gaagagccaccauguggcc

SEQ ID NO: 2158979 - RNA, 19 nt, Artificial Sequence
  Description of Artificial Sequence: Synthetic oligonucleotide
ucaggcauggccgguuccc

SEQ ID NO: 2158980 - RNA, 19 nt, Artificial Sequence
  Description of Artificial Sequence: Synthetic oligonucleotide
auaugggacgcagaucagu

SEQ ID NO: 2158981 - RNA, 19 nt, Artificial Sequence
  Description of Artificial Sequence: Synthetic oligonucleotide
cugcuucaauguugcauag

SEQ ID NO: 2158982 - RNA, 19 nt, Artificial Sequence
  Description of Artificial Sequence: Synthetic oligonucleotide
cacccuguaggucaacguc

SEQ ID NO: 2158983 - RNA, 19 nt, Artificial Sequence
  Description of Artificial Sequence: Synthetic oligonucleotide
aagccuaugacaaguccuu

SEQ ID NO: 2158984 - RNA, 19 nt, Artificial Sequence
  Description of Artificial Sequence: Synthetic oligonucleotide
guuacuuuauuaggauguc

SEQ ID NO: 2158985 - RNA, 19 nt, Artificial Sequence
  Description of Artificial Sequence: Synthetic oligonucleotide
gucucaguguugcgcagcc

SEQ ID NO: 2158986 - RNA, 19 nt, Artificial Sequence
  Description of Artificial Sequence: Synthetic oligonucleotide
aauguugcauaggcuuuau

SEQ ID NO: 2158987 - RNA, 19 nt, Artificial Sequence
  Description of Artificial Sequence: Synthetic oligonucleotide
uugcgcacacccuguaggu

SEQ ID NO: 2158988 - RNA, 19 nt, Artificial Sequence
  Description of Artificial Sequence: Synthetic oligonucleotide
agaaagugccugcuucaau

SEQ ID NO: 2158989 - RNA, 19 nt, Artificial Sequence
  Description of Artificial Sequence: Synthetic oligonucleotide
acugccagcccgaccagcg

SEQ ID NO: 2158990 - RNA, 19 nt, Artificial Sequence
  Description of Artificial Sequence: Synthetic oligonucleotide
gggagaauaaaugugggua

SEQ ID NO: 2158991 - RNA, 19 nt, Artificial Sequence
  Description of Artificial Sequence: Synthetic oligonucleotide
gauguauaugggacgcaga

SEQ ID NO: 2158992 - RNA, 19 nt, Artificial Sequence
  Description of Artificial Sequence: Synthetic oligonucleotide
uccacaguggaagccuaug

SEQ ID NO: 2158993 - RNA, 19 nt, Artificial Sequence
  Description of Artificial Sequence: Synthetic oligonucleotide
agauuuggggcaccagcau

SEQ ID NO: 2158994 - RNA, 19 nt, Artificial Sequence
  Description of Artificial Sequence: Synthetic oligonucleotide
aaagaucaccccaccucca

SEQ ID NO: 2158995 - RNA, 19 nt, Artificial Sequence
  Description of Artificial Sequence: Synthetic oligonucleotide
cuucagucucaguguugcg

SEQ ID NO: 2158996 - RNA, 19 nt, Artificial Sequence
  Description of Artificial Sequence: Synthetic oligonucleotide
gcaauaucacgcugcauca

SEQ ID NO: 2158997 - RNA, 19 nt, Artificial Sequence
  Description of Artificial Sequence: Synthetic oligonucleotide
gucuagcacgcagaugcgg

SEQ ID NO: 2158998 - RNA, 19 nt, Artificial Sequence
  Description of Artificial Sequence: Synthetic oligonucleotide
accagcgggcgccacagca

SEQ ID NO: 2158999 - RNA, 19 nt, Artificial Sequence
  Description of Artificial Sequence: Synthetic oligonucleotide
guaguaugggacacgcuga

SEQ ID NO: 2159000 - RNA, 19 nt, Artificial Sequence
  Description of Artificial Sequence: Synthetic oligonucleotide
acacccuguaggucaacgu

SEQ ID NO: 2159001 - RNA, 19 nt, Artificial Sequence
  Description of Artificial Sequence: Synthetic oligonucleotide
ggaccugccaugccguccg

SEQ ID NO: 2159002 - RNA, 19 nt, Artificial Sequence
  Description of Artificial Sequence: Synthetic oligonucleotide
guaggucaacgucuagcac

SEQ ID NO: 2159003 - RNA, 19 nt, Artificial Sequence
  Description of Artificial Sequence: Synthetic oligonucleotide
ugucccauacagguuccca

SEQ ID NO: 2159004 - RNA, 19 nt, Artificial Sequence
  Description of Artificial Sequence: Synthetic oligonucleotide
cagcaucagagaccgcccg

SEQ ID NO: 2159005 - RNA, 19 nt, Artificial Sequence
  Description of Artificial Sequence: Synthetic oligonucleotide
aacgucuagcacgcagaug

SEQ ID NO: 2159006 - RNA, 19 nt, Artificial Sequence
  Description of Artificial Sequence: Synthetic oligonucleotide
gucgcuuugccaaacucuc

SEQ ID NO: 2159007 - RNA, 19 nt, Artificial Sequence
  Description of Artificial Sequence: Synthetic oligonucleotide
auacagguucccagagaac

SEQ ID NO: 2159008 - RNA, 19 nt, Artificial Sequence
  Description of Artificial Sequence: Synthetic oligonucleotide
caugcucaaugaagucccc

SEQ ID NO: 2159009 - RNA, 19 nt, Artificial Sequence
  Description of Artificial Sequence: Synthetic oligonucleotide
uucggcaagccagcacagg

SEQ ID NO: 2159010 - RNA, 19 nt, Artificial Sequence
  Description of Artificial Sequence: Synthetic oligonucleotide
agcccgaccagcgggcgcc

SEQ ID NO: 2159011 - RNA, 19 nt, Artificial Sequence
  Description of Artificial Sequence: Synthetic oligonucleotide
cuccuccuacuccacagug

SEQ ID NO: 2159012 - RNA, 19 nt, Artificial Sequence
  Description of Artificial Sequence: Synthetic oligonucleotide
cacacccuguaggucaacg

SEQ ID NO: 2159013 - RNA, 19 nt, Artificial Sequence
  Description of Artificial Sequence: Synthetic oligonucleotide
uaucacgcugcaucaucuc

SEQ ID NO: 2159014 - RNA, 19 nt, Artificial Sequence
  Description of Artificial Sequence: Synthetic oligonucleotide
uccguguaguaugggacac

SEQ ID NO: 2159015 - RNA, 19 nt, Artificial Sequence
  Description of Artificial Sequence: Synthetic oligonucleotide
caaacucucuucagucuca

SEQ ID NO: 2159016 - RNA, 19 nt, Artificial Sequence
  Description of Artificial Sequence: Synthetic oligonucleotide
cuggagcaacuucuugagc

SEQ ID NO: 2159017 - RNA, 19 nt, Artificial Sequence
  Description of Artificial Sequence: Synthetic oligonucleotide
cgaacagccgccuugcuug

SEQ ID NO: 2159018 - RNA, 19 nt, Artificial Sequence
  Description of Artificial Sequence: Synthetic oligonucleotide
auuuccucagaaagugccu

SEQ ID NO: 2159019 - RNA, 19 nt, Artificial Sequence
  Description of Artificial Sequence: Synthetic oligonucleotide
uacgucacagcggcgcgcc

SEQ ID NO: 2159020 - RNA, 19 nt, Artificial Sequence
  Description of Artificial Sequence: Synthetic oligonucleotide
uggugccuuggcaaagauc

SEQ ID NO: 2159021 - RNA, 19 nt, Artificial Sequence
  Description of Artificial Sequence: Synthetic oligonucleotide
cuggucacaaaguaguaau

SEQ ID NO: 2159022 - RNA, 19 nt, Artificial Sequence
  Description of Artificial Sequence: Synthetic oligonucleotide
uccucagaaagugccugcu

SEQ ID NO: 2159023 - RNA, 19 nt, Artificial Sequence
  Description of Artificial Sequence: Synthetic oligonucleotide
agcccgaacagccgccuug

SEQ ID NO: 2159024 - RNA, 19 nt, Artificial Sequence
  Description of Artificial Sequence: Synthetic oligonucleotide
augggacgcagaucagucu

SEQ ID NO: 2159025 - RNA, 19 nt, Artificial Sequence
  Description of Artificial Sequence: Synthetic oligonucleotide
uuuuccucaccaggucgug

SEQ ID NO: 2159026 - RNA, 19 nt, Artificial Sequence
  Description of Artificial Sequence: Synthetic oligonucleotide
agagaccgcccgcaggacu

SEQ ID NO: 2159027 - RNA, 19 nt, Artificial Sequence
  Description of Artificial Sequence: Synthetic oligonucleotide
cagaauccuucaguuucgg

SEQ ID NO: 2159028 - RNA, 19 nt, Artificial Sequence
  Description of Artificial Sequence: Synthetic oligonucleotide
cugccagucgcuuugccaa

SEQ ID NO: 2159029 - RNA, 19 nt, Artificial Sequence
  Description of Artificial Sequence: Synthetic oligonucleotide
aguaugggacacgcugaag

SEQ ID NO: 2159030 - RNA, 19 nt, Artificial Sequence
  Description of Artificial Sequence: Synthetic oligonucleotide
cugauggcccacucagcac

SEQ ID NO: 2159031 - RNA, 19 nt, Artificial Sequence
  Description of Artificial Sequence: Synthetic oligonucleotide
ggcuuuauccaaguuguca

SEQ ID NO: 2159032 - RNA, 19 nt, Artificial Sequence
  Description of Artificial Sequence: Synthetic oligonucleotide
caccaggucguggauuccg

SEQ ID NO: 2159033 - RNA, 19 nt, Artificial Sequence
  Description of Artificial Sequence: Synthetic oligonucleotide
ugcugccauguuccuggag

SEQ ID NO: 2159034 - RNA, 19 nt, Artificial Sequence
  Description of Artificial Sequence: Synthetic oligonucleotide
ucucaguguugcgcagccg

SEQ ID NO: 2159035 - RNA, 19 nt, Artificial Sequence
  Description of Artificial Sequence: Synthetic oligonucleotide
cugcacagagauguauaug

SEQ ID NO: 2159036 - RNA, 19 nt, Artificial Sequence
  Description of Artificial Sequence: Synthetic oligonucleotide
ucguggauuccguguagua

SEQ ID NO: 2159037 - RNA, 19 nt, Artificial Sequence
  Description of Artificial Sequence: Synthetic oligonucleotide
aaguccccagcugcaauau

SEQ ID NO: 2159038 - RNA, 19 nt, Artificial Sequence
  Description of Artificial Sequence: Synthetic oligonucleotide
cagccgcaagcguugcucc

SEQ ID NO: 2159039 - RNA, 19 nt, Artificial Sequence
  Description of Artificial Sequence: Synthetic oligonucleotide
ugcaccugauggcccacuc

SEQ ID NO: 2159040 - RNA, 19 nt, Artificial Sequence
  Description of Artificial Sequence: Synthetic oligonucleotide
agcacgcagaugcgguuca

SEQ ID NO: 2159041 - RNA, 19 nt, Artificial Sequence
  Description of Artificial Sequence: Synthetic oligonucleotide
uuggugccuuggcaaagau

SEQ ID NO: 2159042 - RNA, 19 nt, Artificial Sequence
  Description of Artificial Sequence: Synthetic oligonucleotide
uggcccacucagcacuacu

SEQ ID NO: 2159043 - RNA, 19 nt, Artificial Sequence
  Description of Artificial Sequence: Synthetic oligonucleotide
agcaucauucuggaaugaa

SEQ ID NO: 2159044 - RNA, 19 nt, Artificial Sequence
  Description of Artificial Sequence: Synthetic oligonucleotide
cagcaugcucaaugaaguc

SEQ ID NO: 2159045 - RNA, 19 nt, Artificial Sequence
  Description of Artificial Sequence: Synthetic oligonucleotide
aggucguggauuccgugua

SEQ ID NO: 2159046 - RNA, 19 nt, Artificial Sequence
  Description of Artificial Sequence: Synthetic oligonucleotide
accugauggcccacucagc

SEQ ID NO: 2159047 - RNA, 19 nt, Artificial Sequence
  Description of Artificial Sequence: Synthetic oligonucleotide
guaguaaucuuugccauuu

SEQ ID NO: 2159048 - RNA, 19 nt, Artificial Sequence
  Description of Artificial Sequence: Synthetic oligonucleotide
ccuacuccacaguggaagc

SEQ ID NO: 2159049 - RNA, 19 nt, Artificial Sequence
  Description of Artificial Sequence: Synthetic oligonucleotide
ugcgguucauggccugcac

SEQ ID NO: 2159050 - RNA, 19 nt, Artificial Sequence
  Description of Artificial Sequence: Synthetic oligonucleotide
cacagcccgaacagccgcc

SEQ ID NO: 2159051 - RNA, 19 nt, Artificial Sequence
  Description of Artificial Sequence: Synthetic oligonucleotide
agaugcugccauguuccug

SEQ ID NO: 2159052 - RNA, 19 nt, Artificial Sequence
  Description of Artificial Sequence: Synthetic oligonucleotide
gcaggcacgcgacccaggg

SEQ ID NO: 2159053 - RNA, 19 nt, Artificial Sequence
  Description of Artificial Sequence: Synthetic oligonucleotide
cuucaauguugcauaggcu

SEQ ID NO: 2159054 - RNA, 19 nt, Artificial Sequence
  Description of Artificial Sequence: Synthetic oligonucleotide
acuggccuaggaccugcca

SEQ ID NO: 2159055 - RNA, 19 nt, Artificial Sequence
  Description of Artificial Sequence: Synthetic oligonucleotide
aagcguugcuccagcacau

SEQ ID NO: 2159056 - RNA, 19 nt, Artificial Sequence
  Description of Artificial Sequence: Synthetic oligonucleotide
cucaggcauggccgguucc

SEQ ID NO: 2159057 - RNA, 19 nt, Artificial Sequence
  Description of Artificial Sequence: Synthetic oligonucleotide
uagcacgcagaugcgguuc

SEQ ID NO: 2159058 - RNA, 19 nt, Artificial Sequence
  Description of Artificial Sequence: Synthetic oligonucleotide
gcugcaauaucacgcugca

SEQ ID NO: 2159059 - RNA, 19 nt, Artificial Sequence
  Description of Artificial Sequence: Synthetic oligonucleotide
aacagccgccuugcuuguc

SEQ ID NO: 2159060 - RNA, 19 nt, Artificial Sequence
  Description of Artificial Sequence: Synthetic oligonucleotide
gagauguauaugggacgca

SEQ ID NO: 2159061 - RNA, 19 nt, Artificial Sequence
  Description of Artificial Sequence: Synthetic oligonucleotide
aucucccuggucacaaagu

SEQ ID NO: 2159062 - RNA, 19 nt, Artificial Sequence
  Description of Artificial Sequence: Synthetic oligonucleotide
agccuaugacaaguccuug

SEQ ID NO: 2159063 - RNA, 19 nt, Artificial Sequence
  Description of Artificial Sequence: Synthetic oligonucleotide
ccugcuucaauguugcaua

SEQ ID NO: 2159064 - RNA, 19 nt, Artificial Sequence
  Description of Artificial Sequence: Synthetic oligonucleotide
aggcauggccgguucccug

SEQ ID NO: 2159065 - RNA, 19 nt, Artificial Sequence
  Description of Artificial Sequence: Synthetic oligonucleotide
acuacuggccuaggaccug

SEQ ID NO: 2159066 - RNA, 19 nt, Artificial Sequence
  Description of Artificial Sequence: Synthetic oligonucleotide
cuggaaugaagcaggcccu

SEQ ID NO: 2159067 - RNA, 19 nt, Artificial Sequence
  Description of Artificial Sequence: Synthetic oligonucleotide
gucacagcggcgcgccggc

SEQ ID NO: 2159068 - RNA, 19 nt, Artificial Sequence
  Description of Artificial Sequence: Synthetic oligonucleotide
uugucccauacagguuccc

SEQ ID NO: 2159069 - RNA, 19 nt, Artificial Sequence
  Description of Artificial Sequence: Synthetic oligonucleotide
gcaagcguugcuccagcac

SEQ ID NO: 2159070 - RNA, 19 nt, Artificial Sequence
  Description of Artificial Sequence: Synthetic oligonucleotide
aggcuuuauccaaguuguc

SEQ ID NO: 2159071 - RNA, 19 nt, Artificial Sequence
  Description of Artificial Sequence: Synthetic oligonucleotide
ggucguggauuccguguag

SEQ ID NO: 2159072 - RNA, 19 nt, Artificial Sequence
  Description of Artificial Sequence: Synthetic oligonucleotide
cuacgucacagcggcgcgc

SEQ ID NO: 2159073 - RNA, 19 nt, Artificial Sequence
  Description of Artificial Sequence: Synthetic oligonucleotide
agggacagcccagggagaa

SEQ ID NO: 2159074 - RNA, 19 nt, Artificial Sequence
  Description of Artificial Sequence: Synthetic oligonucleotide
gcacagcccgaacagccgc

SEQ ID NO: 2159075 - RNA, 19 nt, Artificial Sequence
  Description of Artificial Sequence: Synthetic oligonucleotide
cagccgccuugcuuguccc

SEQ ID NO: 2159076 - RNA, 19 nt, Artificial Sequence
  Description of Artificial Sequence: Synthetic oligonucleotide
cacuacuggccuaggaccu

SEQ ID NO: 2159077 - RNA, 19 nt, Artificial Sequence
  Description of Artificial Sequence: Synthetic oligonucleotide
cacgcagaugcgguucaug

SEQ ID NO: 2159078 - RNA, 19 nt, Artificial Sequence
  Description of Artificial Sequence: Synthetic oligonucleotide
ggcgccacagcaucagaga

SEQ ID NO: 2159079 - RNA, 19 nt, Artificial Sequence
  Description of Artificial Sequence: Synthetic oligonucleotide
guggccagacaaggggcag

SEQ ID NO: 2159080 - RNA, 19 nt, Artificial Sequence
  Description of Artificial Sequence: Synthetic oligonucleotide
ugccagucgcuuugccaaa

SEQ ID NO: 2159081 - RNA, 19 nt, Artificial Sequence
  Description of Artificial Sequence: Synthetic oligonucleotide
ccuccuacuccacagugga

SEQ ID NO: 2159082 - RNA, 19 nt, Artificial Sequence
  Description of Artificial Sequence: Synthetic oligonucleotide
ggacacgcugaagccaaag

SEQ ID NO: 2159083 - RNA, 19 nt, Artificial Sequence
  Description of Artificial Sequence: Synthetic oligonucleotide
ccuuggcaaagaucacccc

SEQ ID NO: 2159084 - RNA, 19 nt, Artificial Sequence
  Description of Artificial Sequence: Synthetic oligonucleotide
ggcgcgccggcccacuagg

SEQ ID NO: 2159085 - RNA, 19 nt, Artificial Sequence
  Description of Artificial Sequence: Synthetic oligonucleotide
auggcccacucagcacuac

SEQ ID NO: 2159086 - RNA, 19 nt, Artificial Sequence
  Description of Artificial Sequence: Synthetic oligonucleotide
agccgcaagcguugcucca

SEQ ID NO: 2159087 - RNA, 19 nt, Artificial Sequence
  Description of Artificial Sequence: Synthetic oligonucleotide
cauggccgguucccugagc

SEQ ID NO: 2159088 - RNA, 19 nt, Artificial Sequence
  Description of Artificial Sequence: Synthetic oligonucleotide
caggcacgcgacccagggc

SEQ ID NO: 2159089 - RNA, 19 nt, Artificial Sequence
  Description of Artificial Sequence: Synthetic oligonucleotide
uaggaccugccaugccguc

SEQ ID NO: 2159090 - RNA, 19 nt, Artificial Sequence
  Description of Artificial Sequence: Synthetic oligonucleotide
ggauuccguguaguauggg

SEQ ID NO: 2159091 - RNA, 19 nt, Artificial Sequence
  Description of Artificial Sequence: Synthetic oligonucleotide
uggccgguucccugagccu

SEQ ID NO: 2159092 - RNA, 19 nt, Artificial Sequence
  Description of Artificial Sequence: Synthetic oligonucleotide
caauguugcauaggcuuua

SEQ ID NO: 2159093 - RNA, 19 nt, Artificial Sequence
  Description of Artificial Sequence: Synthetic oligonucleotide
uuuggggcaccagcaucau

SEQ ID NO: 2159094 - RNA, 19 nt, Artificial Sequence
  Description of Artificial Sequence: Synthetic oligonucleotide
cagcacauccagugaggga

SEQ ID NO: 2159095 - RNA, 19 nt, Artificial Sequence
  Description of Artificial Sequence: Synthetic oligonucleotide
ggcccacucagcacuacug

SEQ ID NO: 2159096 - RNA, 19 nt, Artificial Sequence
  Description of Artificial Sequence: Synthetic oligonucleotide
caggucguggauuccgugu

SEQ ID NO: 2159097 - RNA, 19 nt, Artificial Sequence
  Description of Artificial Sequence: Synthetic oligonucleotide
gggcgccacagcaucagag

SEQ ID NO: 2159098 - RNA, 19 nt, Artificial Sequence
  Description of Artificial Sequence: Synthetic oligonucleotide
gguucauggccugcacagc

SEQ ID NO: 2159099 - RNA, 19 nt, Artificial Sequence
  Description of Artificial Sequence: Synthetic oligonucleotide
agcacaggaugaagagcca

SEQ ID NO: 2159100 - RNA, 19 nt, Artificial Sequence
  Description of Artificial Sequence: Synthetic oligonucleotide
gagaccgcccgcaggacua

SEQ ID NO: 2159101 - RNA, 19 nt, Artificial Sequence
  Description of Artificial Sequence: Synthetic oligonucleotide
augcgguucauggccugca

SEQ ID NO: 2159102 - RNA, 19 nt, Artificial Sequence
  Description of Artificial Sequence: Synthetic oligonucleotide
cagcgggcgccacagcauc

SEQ ID NO: 2159103 - RNA, 19 nt, Artificial Sequence
  Description of Artificial Sequence: Synthetic oligonucleotide
agaccgcccgcaggacuac

SEQ ID NO: 2159104 - RNA, 19 nt, Artificial Sequence
  Description of Artificial Sequence: Synthetic oligonucleotide
acgucacagcggcgcgccg

SEQ ID NO: 2159105 - RNA, 19 nt, Artificial Sequence
  Description of Artificial Sequence: Synthetic oligonucleotide
acagcccgaacagccgccu

SEQ ID NO: 2159106 - RNA, 19 nt, Artificial Sequence
  Description of Artificial Sequence: Synthetic oligonucleotide
ggcaaagaucaccccaccu

SEQ ID NO: 2159107 - RNA, 19 nt, Artificial Sequence
  Description of Artificial Sequence: Synthetic oligonucleotide
cagaaagugccugcuucaa

SEQ ID NO: 2159108 - RNA, 19 nt, Artificial Sequence
  Description of Artificial Sequence: Synthetic oligonucleotide
cgcaggacuacgucacagc

SEQ ID NO: 2159109 - RNA, 19 nt, Artificial Sequence
  Description of Artificial Sequence: Synthetic oligonucleotide
ccaugucagccugugcagc

SEQ ID NO: 2159110 - RNA, 19 nt, Artificial Sequence
  Description of Artificial Sequence: Synthetic oligonucleotide
gacagcccagggagaauaa

SEQ ID NO: 2159111 - RNA, 19 nt, Artificial Sequence
  Description of Artificial Sequence: Synthetic oligonucleotide
gaccgcccgcaggacuacg

SEQ ID NO: 2159112 - RNA, 19 nt, Artificial Sequence
  Description of Artificial Sequence: Synthetic oligonucleotide
gcugcacagagauguauau

SEQ ID NO: 2159113 - RNA, 19 nt, Artificial Sequence
  Description of Artificial Sequence: Synthetic oligonucleotide
ggaaugaagcaggcccuca

SEQ ID NO: 2159114 - RNA, 19 nt, Artificial Sequence
  Description of Artificial Sequence: Synthetic oligonucleotide
gcagccgcaagcguugcuc

SEQ ID NO: 2159115 - RNA, 19 nt, Artificial Sequence
  Description of Artificial Sequence: Synthetic oligonucleotide
gccaaacucucuucagucu

SEQ ID NO: 2159116 - RNA, 19 nt, Artificial Sequence
  Description of Artificial Sequence: Synthetic oligonucleotide
ccacaguggaagccuauga

SEQ ID NO: 2159117 - RNA, 19 nt, Artificial Sequence
  Description of Artificial Sequence: Synthetic oligonucleotide
ccacuaggccacaccgaag

SEQ ID NO: 2159118 - RNA, 19 nt, Artificial Sequence
  Description of Artificial Sequence: Synthetic oligonucleotide
cuggccuaggaccugccau

SEQ ID NO: 2159119 - RNA, 19 nt, Artificial Sequence
  Description of Artificial Sequence: Synthetic oligonucleotide
gcaucagagaccgcccgca

SEQ ID NO: 2159120 - RNA, 19 nt, Artificial Sequence
  Description of Artificial Sequence: Synthetic oligonucleotide
cagaugcgguucauggccu

SEQ ID NO: 2159121 - RNA, 19 nt, Artificial Sequence
  Description of Artificial Sequence: Synthetic oligonucleotide
agccgccuugcuuguccca

SEQ ID NO: 2159122 - RNA, 19 nt, Artificial Sequence
  Description of Artificial Sequence: Synthetic oligonucleotide
ggccuaggaccugccaugc

SEQ ID NO: 2159123 - RNA, 19 nt, Artificial Sequence
  Description of Artificial Sequence: Synthetic oligonucleotide
gugagggaggcugcacaga

SEQ ID NO: 2159124 - RNA, 19 nt, Artificial Sequence
  Description of Artificial Sequence: Synthetic oligonucleotide
ggaugucaguccugcucca

SEQ ID NO: 2159125 - RNA, 19 nt, Artificial Sequence
  Description of Artificial Sequence: Synthetic oligonucleotide
ggccacaccgaagcgcggc

SEQ ID NO: 2159126 - RNA, 19 nt, Artificial Sequence
  Description of Artificial Sequence: Synthetic oligonucleotide
gggcaccagcaucauucug

SEQ ID NO: 2159127 - RNA, 19 nt, Artificial Sequence
  Description of Artificial Sequence: Synthetic oligonucleotide
ggguacauuucagaauccu

SEQ ID NO: 2159128 - RNA, 19 nt, Artificial Sequence
  Description of Artificial Sequence: Synthetic oligonucleotide
gccaccauguggccagaca

SEQ ID NO: 2159129 - RNA, 19 nt, Artificial Sequence
  Description of Artificial Sequence: Synthetic oligonucleotide
gccgcaagcguugcuccag

SEQ ID NO: 2159130 - RNA, 19 nt, Artificial Sequence
  Description of Artificial Sequence: Synthetic oligonucleotide
guugcgcagccgcaagcgu

SEQ ID NO: 2159131 - RNA, 19 nt, Artificial Sequence
  Description of Artificial Sequence: Synthetic oligonucleotide
gcgguucauggccugcaca

SEQ ID NO: 2159132 - RNA, 19 nt, Artificial Sequence
  Description of Artificial Sequence: Synthetic oligonucleotide
ggacagcccagggagaaua

SEQ ID NO: 2159133 - RNA, 19 nt, Artificial Sequence
  Description of Artificial Sequence: Synthetic oligonucleotide
gauggcccacucagcacua

SEQ ID NO: 2159134 - RNA, 19 nt, Artificial Sequence
  Description of Artificial Sequence: Synthetic oligonucleotide
gaccagcgggcgccacagc

SEQ ID NO: 2159135 - RNA, 19 nt, Artificial Sequence
  Description of Artificial Sequence: Synthetic oligonucleotide
cagcccgaccagcgggcgc

SEQ ID NO: 2159136 - RNA, 19 nt, Artificial Sequence
  Description of Artificial Sequence: Synthetic oligonucleotide
gaccugccaugccguccgc

SEQ ID NO: 2159137 - RNA, 19 nt, Artificial Sequence
  Description of Artificial Sequence: Synthetic oligonucleotide
cgucuagcacgcagaugcg

SEQ ID NO: 2159138 - RNA, 19 nt, Artificial Sequence
  Description of Artificial Sequence: Synthetic oligonucleotide
cauaggcuuuauccaaguu

SEQ ID NO: 2159139 - RNA, 19 nt, Artificial Sequence
  Description of Artificial Sequence: Synthetic oligonucleotide
gcaccugauggcccacuca

SEQ ID NO: 2159140 - RNA, 19 nt, Artificial Sequence
  Description of Artificial Sequence: Synthetic oligonucleotide
cccacuaggccacaccgaa

SEQ ID NO: 2159141 - RNA, 19 nt, Artificial Sequence
  Description of Artificial Sequence: Synthetic oligonucleotide
gcauggccgguucccugag

SEQ ID NO: 2159142 - RNA, 19 nt, Artificial Sequence
  Description of Artificial Sequence: Synthetic oligonucleotide
ccuuggugccuuggcaaag

SEQ ID NO: 2159143 - RNA, 19 nt, Artificial Sequence
  Description of Artificial Sequence: Synthetic oligonucleotide
caacgucuagcacgcagau

SEQ ID NO: 2159144 - RNA, 19 nt, Artificial Sequence
  Description of Artificial Sequence: Synthetic oligonucleotide
cauggccugcacagcccga

SEQ ID NO: 2159145 - RNA, 19 nt, Artificial Sequence
  Description of Artificial Sequence: Synthetic oligonucleotide
ccguguaguaugggacacg

SEQ ID NO: 2159146 - RNA, 19 nt, Artificial Sequence
  Description of Artificial Sequence: Synthetic oligonucleotide
gcgccggcccacuaggcca

SEQ ID NO: 2159147 - RNA, 19 nt, Artificial Sequence
  Description of Artificial Sequence: Synthetic oligonucleotide
gucguggauuccguguagu

SEQ ID NO: 2159148 - RNA, 19 nt, Artificial Sequence
  Description of Artificial Sequence: Synthetic oligonucleotide
gcccgcaggacuacgucac

SEQ ID NO: 2159149 - RNA, 19 nt, Artificial Sequence
  Description of Artificial Sequence: Synthetic oligonucleotide
ccgcaggacuacgucacag

SEQ ID NO: 2159150 - RNA, 19 nt, Artificial Sequence
  Description of Artificial Sequence: Synthetic oligonucleotide
cagagaccgcccgcaggac

SEQ ID NO: 2159151 - RNA, 19 nt, Artificial Sequence
  Description of Artificial Sequence: Synthetic oligonucleotide
accgcccgcaggacuacgu

SEQ ID NO: 2159152 - RNA, 19 nt, Artificial Sequence
  Description of Artificial Sequence: Synthetic oligonucleotide
gcccgaacagccgccuugc

SEQ ID NO: 2159153 - RNA, 19 nt, Artificial Sequence
  Description of Artificial Sequence: Synthetic oligonucleotide
caguuucggcaagccagca

SEQ ID NO: 2159154 - RNA, 19 nt, Artificial Sequence
  Description of Artificial Sequence: Synthetic oligonucleotide
ugccguccgcaggcacgcg

SEQ ID NO: 2159155 - RNA, 19 nt, Artificial Sequence
  Description of Artificial Sequence: Synthetic oligonucleotide
gccuaggaccugccaugcc

SEQ ID NO: 2159156 - RNA, 19 nt, Artificial Sequence
  Description of Artificial Sequence: Synthetic oligonucleotide
ggacuacgucacagcggcg

SEQ ID NO: 2159157 - RNA, 19 nt, Artificial Sequence
  Description of Artificial Sequence: Synthetic oligonucleotide
ggcacgcgacccagggcgg

SEQ ID NO: 2159158 - RNA, 19 nt, Artificial Sequence
  Description of Artificial Sequence: Synthetic oligonucleotide
ccaggcagauuuggggcac

SEQ ID NO: 2159159 - RNA, 19 nt, Artificial Sequence
  Description of Artificial Sequence: Synthetic oligonucleotide
gggacgcagaucagucuuc

SEQ ID NO: 2159160 - RNA, 19 nt, Artificial Sequence
  Description of Artificial Sequence: Synthetic oligonucleotide
gaggcugcacagagaugua

SEQ ID NO: 2159161 - RNA, 19 nt, Artificial Sequence
  Description of Artificial Sequence: Synthetic oligonucleotide
gccugcuucaauguugcau

SEQ ID NO: 2159162 - RNA, 19 nt, Artificial Sequence
  Description of Artificial Sequence: Synthetic oligonucleotide
ccgcaagcguugcuccagc

SEQ ID NO: 2159163 - RNA, 19 nt, Artificial Sequence
  Description of Artificial Sequence: Synthetic oligonucleotide
agcgggcgccacagcauca

SEQ ID NO: 2159164 - RNA, 19 nt, Artificial Sequence
  Description of Artificial Sequence: Synthetic oligonucleotide
gccacaccgaagcgcggca

SEQ ID NO: 2159165 - RNA, 19 nt, Artificial Sequence
  Description of Artificial Sequence: Synthetic oligonucleotide
cgccuugcuugucccauac

SEQ ID NO: 2159166 - RNA, 19 nt, Artificial Sequence
  Description of Artificial Sequence: Synthetic oligonucleotide
caggaugaagagccaccau

SEQ ID NO: 2159167 - RNA, 19 nt, Artificial Sequence
  Description of Artificial Sequence: Synthetic oligonucleotide
caccagcaucauucuggaa

SEQ ID NO: 2159168 - RNA, 19 nt, Artificial Sequence
  Description of Artificial Sequence: Synthetic oligonucleotide
gcagaucagucuucuugau

SEQ ID NO: 2159169 - RNA, 19 nt, Artificial Sequence
  Description of Artificial Sequence: Synthetic oligonucleotide
ccaugccguccgcaggcac

SEQ ID NO: 2159170 - RNA, 19 nt, Artificial Sequence
  Description of Artificial Sequence: Synthetic oligonucleotide
ggacgcagaucagucuucu

SEQ ID NO: 2159171 - RNA, 19 nt, Artificial Sequence
  Description of Artificial Sequence: Synthetic oligonucleotide
gccuugcuugucccauaca

SEQ ID NO: 2159172 - RNA, 19 nt, Artificial Sequence
  Description of Artificial Sequence: Synthetic oligonucleotide
ggggcaccagcaucauucu

SEQ ID NO: 2159173 - RNA, 19 nt, Artificial Sequence
  Description of Artificial Sequence: Synthetic oligonucleotide
gccguccgcaggcacgcga

SEQ ID NO: 2159174 - RNA, 19 nt, Artificial Sequence
  Description of Artificial Sequence: Synthetic oligonucleotide
cccuguaggucaacgucua

SEQ ID NO: 2159175 - RNA, 19 nt, Artificial Sequence
  Description of Artificial Sequence: Synthetic oligonucleotide
gcaacuucuugagcagggu

SEQ ID NO: 2159176 - RNA, 19 nt, Artificial Sequence
  Description of Artificial Sequence: Synthetic oligonucleotide
cuccacaguggaagccuau

SEQ ID NO: 2159177 - RNA, 19 nt, Artificial Sequence
  Description of Artificial Sequence: Synthetic oligonucleotide
cgcgccggcccacuaggcc

SEQ ID NO: 2159178 - RNA, 19 nt, Artificial Sequence
  Description of Artificial Sequence: Synthetic oligonucleotide
ggccagacaaggggcagcu

SEQ ID NO: 2159179 - RNA, 19 nt, Artificial Sequence
  Description of Artificial Sequence: Synthetic oligonucleotide
gcccacuaggccacaccga

SEQ ID NO: 2159180 - RNA, 19 nt, Artificial Sequence
  Description of Artificial Sequence: Synthetic oligonucleotide
cccuggucacaaaguagua

SEQ ID NO: 2159181 - RNA, 19 nt, Artificial Sequence
  Description of Artificial Sequence: Synthetic oligonucleotide
ccaaguugucauugaugau

SEQ ID NO: 2159182 - RNA, 19 nt, Artificial Sequence
  Description of Artificial Sequence: Synthetic oligonucleotide
cgcaggcacgcgacccagg

SEQ ID NO: 2159183 - RNA, 19 nt, Artificial Sequence
  Description of Artificial Sequence: Synthetic oligonucleotide
ccgcccgcaggacuacguc

SEQ ID NO: 2159184 - RNA, 19 nt, Artificial Sequence
  Description of Artificial Sequence: Synthetic oligonucleotide
gcacgcgacccagggcggc

SEQ ID NO: 2159185 - RNA, 19 nt, Artificial Sequence
  Description of Artificial Sequence: Synthetic oligonucleotide
cgcccgcaggacuacguca

SEQ ID NO: 2159186 - RNA, 19 nt, Artificial Sequence
  Description of Artificial Sequence: Synthetic oligonucleotide
agcggcgcgccggcccacu

SEQ ID NO: 2159187 - RNA, 19 nt, Artificial Sequence
  Description of Artificial Sequence: Synthetic oligonucleotide
ccgcaggcacgcgacccag

SEQ ID NO: 2159188 - RNA, 19 nt, Artificial Sequence
  Description of Artificial Sequence: Synthetic oligonucleotide
cugcaauaucacgcugcau

SEQ ID NO: 2159189 - RNA, 19 nt, Artificial Sequence
  Description of Artificial Sequence: Synthetic oligonucleotide
cgacccagggcggccacug

SEQ ID NO: 2159190 - RNA, 19 nt, Artificial Sequence
  Description of Artificial Sequence: Synthetic oligonucleotide
gcggccacugccagcccga

SEQ ID NO: 2159191 - RNA, 19 nt, Artificial Sequence
  Description of Artificial Sequence: Synthetic oligonucleotide
ggucaacgucuagcacgca

SEQ ID NO: 2159192 - RNA, 19 nt, Artificial Sequence
  Description of Artificial Sequence: Synthetic oligonucleotide
cgcaagcguugcuccagca

SEQ ID NO: 2159193 - RNA, 19 nt, Artificial Sequence
  Description of Artificial Sequence: Synthetic oligonucleotide
ggccgguucccugagccuu

SEQ ID NO: 2159194 - RNA, 19 nt, Artificial Sequence
  Description of Artificial Sequence: Synthetic oligonucleotide
ccgaccagcgggcgccaca

SEQ ID NO: 2159195 - RNA, 19 nt, Artificial Sequence
  Description of Artificial Sequence: Synthetic oligonucleotide
gccaugccguccgcaggca

SEQ ID NO: 2159196 - RNA, 19 nt, Artificial Sequence
  Description of Artificial Sequence: Synthetic oligonucleotide
ccgaacagccgccuugcuu

SEQ ID NO: 2159197 - RNA, 19 nt, Artificial Sequence
  Description of Artificial Sequence: Synthetic oligonucleotide
cugcaccugauggcccacu

SEQ ID NO: 2159198 - RNA, 19 nt, Artificial Sequence
  Description of Artificial Sequence: Synthetic oligonucleotide
cccgcaggacuacgucaca

SEQ ID NO: 2159199 - RNA, 19 nt, Artificial Sequence
  Description of Artificial Sequence: Synthetic oligonucleotide
gccgccuugcuugucccau

SEQ ID NO: 2159200 - RNA, 19 nt, Artificial Sequence
  Description of Artificial Sequence: Synthetic oligonucleotide
gggacacgcugaagccaaa

SEQ ID NO: 2159201 - RNA, 19 nt, Artificial Sequence
  Description of Artificial Sequence: Synthetic oligonucleotide
gcgcgccggcccacuaggc

SEQ ID NO: 2159202 - RNA, 19 nt, Artificial Sequence
  Description of Artificial Sequence: Synthetic oligonucleotide
cgcacacccuguaggucaa

SEQ ID NO: 2159203 - RNA, 19 nt, Artificial Sequence
  Description of Artificial Sequence: Synthetic oligonucleotide
ccagcgggcgccacagcau

SEQ ID NO: 2159204 - RNA, 19 nt, Artificial Sequence
  Description of Artificial Sequence: Synthetic oligonucleotide
cggcgcgccggcccacuag

SEQ ID NO: 2159205 - RNA, 19 nt, Artificial Sequence
  Description of Artificial Sequence: Synthetic oligonucleotide
ccgccuugcuugucccaua

SEQ ID NO: 2159206 - RNA, 19 nt, Artificial Sequence
  Description of Artificial Sequence: Synthetic oligonucleotide
cagcccgaacagccgccuu

SEQ ID NO: 2159207 - RNA, 19 nt, Artificial Sequence
  Description of Artificial Sequence: Synthetic oligonucleotide
ccucaccaggucguggauu

SEQ ID NO: 2159208 - RNA, 19 nt, Artificial Sequence
  Description of Artificial Sequence: Synthetic oligonucleotide
cccgaccagcgggcgccac

SEQ ID NO: 2159209 - RNA, 19 nt, Artificial Sequence
  Description of Artificial Sequence: Synthetic oligonucleotide
gcacgcagaugcgguucau

SEQ ID NO: 2159210 - RNA, 19 nt, Artificial Sequence
  Description of Artificial Sequence: Synthetic oligonucleotide
cccgaacagccgccuugcu

SEQ ID NO: 2159211 - RNA, 19 nt, Artificial Sequence
  Description of Artificial Sequence: Synthetic oligonucleotide
gcccgaccagcgggcgcca

SEQ ID NO: 2159212 - RNA, 19 nt, Artificial Sequence
  Description of Artificial Sequence: Synthetic oligonucleotide
cggccacugccagcccgac

SEQ ID NO: 2159213 - RNA, 19 nt, Artificial Sequence
  Description of Artificial Sequence: Synthetic oligonucleotide
gccggcccacuaggccaca

SEQ ID NO: 2159214 - RNA, 19 nt, Artificial Sequence
  Description of Artificial Sequence: Synthetic oligonucleotide
cgcagccgcaagcguugcu

SEQ ID NO: 2159215 - RNA, 19 nt, Artificial Sequence
  Description of Artificial Sequence: Synthetic oligonucleotide
ccccaccuccaggcagauu

SEQ ID NO: 2159216 - RNA, 19 nt, Artificial Sequence
  Description of Artificial Sequence: Synthetic oligonucleotide
uuaaauauggagacagggg

SEQ ID NO: 2159217 - RNA, 19 nt, Artificial Sequence
  Description of Artificial Sequence: Synthetic oligonucleotide
uuauuaauuggucuggaug

SEQ ID NO: 2159218 - RNA, 19 nt, Artificial Sequence
  Description of Artificial Sequence: Synthetic oligonucleotide
aauuguagguacaagagag

SEQ ID NO: 2159219 - RNA, 19 nt, Artificial Sequence
  Description of Artificial Sequence: Synthetic oligonucleotide
aaagcuaacucaaaucggc

SEQ ID NO: 2159220 - RNA, 19 nt, Artificial Sequence
  Description of Artificial Sequence: Synthetic oligonucleotide
uguucaaaguaauuguagg

SEQ ID NO: 2159221 - RNA, 19 nt, Artificial Sequence
  Description of Artificial Sequence: Synthetic oligonucleotide
uauuaauuggucuggauga

SEQ ID NO: 2159222 - RNA, 19 nt, Artificial Sequence
  Description of Artificial Sequence: Synthetic oligonucleotide
augacuaugaaaugucccc

SEQ ID NO: 2159223 - RNA, 19 nt, Artificial Sequence
  Description of Artificial Sequence: Synthetic oligonucleotide
auucauaccaguuagcgga

SEQ ID NO: 2159224 - RNA, 19 nt, Artificial Sequence
  Description of Artificial Sequence: Synthetic oligonucleotide
aguauuagcccaaagugcc

SEQ ID NO: 2159225 - RNA, 19 nt, Artificial Sequence
  Description of Artificial Sequence: Synthetic oligonucleotide
aaggguuuggcuuccacuc

SEQ ID NO: 2159226 - RNA, 19 nt, Artificial Sequence
  Description of Artificial Sequence: Synthetic oligonucleotide
uuauacaacauuccuguca

SEQ ID NO: 2159227 - RNA, 19 nt, Artificial Sequence
  Description of Artificial Sequence: Synthetic oligonucleotide
aguaauuguagguacaaga

SEQ ID NO: 2159228 - RNA, 19 nt, Artificial Sequence
  Description of Artificial Sequence: Synthetic oligonucleotide
guagguacaagagagaaag

SEQ ID NO: 2159229 - RNA, 19 nt, Artificial Sequence
  Description of Artificial Sequence: Synthetic oligonucleotide
aaaucagagugcgaguagc

SEQ ID NO: 2159230 - RNA, 19 nt, Artificial Sequence
  Description of Artificial Sequence: Synthetic oligonucleotide
uacauuuauacaacauucc

SEQ ID NO: 2159231 - RNA, 19 nt, Artificial Sequence
  Description of Artificial Sequence: Synthetic oligonucleotide
agaacacauacucagugag

SEQ ID NO: 2159232 - RNA, 19 nt, Artificial Sequence
  Description of Artificial Sequence: Synthetic oligonucleotide
uagaguauuagcccaaagu

SEQ ID NO: 2159233 - RNA, 19 nt, Artificial Sequence
  Description of Artificial Sequence: Synthetic oligonucleotide
uauccugaacaagauaucg

SEQ ID NO: 2159234 - RNA, 19 nt, Artificial Sequence
  Description of Artificial Sequence: Synthetic oligonucleotide
ucaaaguaauuguagguac

SEQ ID NO: 2159235 - RNA, 19 nt, Artificial Sequence
  Description of Artificial Sequence: Synthetic oligonucleotide
caaugauaacaccaaaugc

SEQ ID NO: 2159236 - RNA, 19 nt, Artificial Sequence
  Description of Artificial Sequence: Synthetic oligonucleotide
uagagcaaagccaaggaac

SEQ ID NO: 2159237 - RNA, 19 nt, Artificial Sequence
  Description of Artificial Sequence: Synthetic oligonucleotide
ugcuauuccucgaagacca

SEQ ID NO: 2159238 - RNA, 19 nt, Artificial Sequence
  Description of Artificial Sequence: Synthetic oligonucleotide
ugacuuauuaauuggucug

SEQ ID NO: 2159239 - RNA, 19 nt, Artificial Sequence
  Description of Artificial Sequence: Synthetic oligonucleotide
uguacauuuauacaacauu

SEQ ID NO: 2159240 - RNA, 19 nt, Artificial Sequence
  Description of Artificial Sequence: Synthetic oligonucleotide
aaaagcuaacucaaaucgg

SEQ ID NO: 2159241 - RNA, 19 nt, Artificial Sequence
  Description of Artificial Sequence: Synthetic oligonucleotide
agugcauagagacugguga

SEQ ID NO: 2159242 - RNA, 19 nt, Artificial Sequence
  Description of Artificial Sequence: Synthetic oligonucleotide
caauccuagccgaagaccg

SEQ ID NO: 2159243 - RNA, 19 nt, Artificial Sequence
  Description of Artificial Sequence: Synthetic oligonucleotide
uauacaacauuccugucau

SEQ ID NO: 2159244 - RNA, 19 nt, Artificial Sequence
  Description of Artificial Sequence: Synthetic oligonucleotide
uaauuguagguacaagaga

SEQ ID NO: 2159245 - RNA, 19 nt, Artificial Sequence
  Description of Artificial Sequence: Synthetic oligonucleotide
gaaccuagaguauuagccc

SEQ ID NO: 2159246 - RNA, 19 nt, Artificial Sequence
  Description of Artificial Sequence: Synthetic oligonucleotide
ucagagugcgaguagcccg

SEQ ID NO: 2159247 - RNA, 19 nt, Artificial Sequence
  Description of Artificial Sequence: Synthetic oligonucleotide
uccugaacaagauaucgug

SEQ ID NO: 2159248 - RNA, 19 nt, Artificial Sequence
  Description of Artificial Sequence: Synthetic oligonucleotide
agacugacuuauuaauugg

SEQ ID NO: 2159249 - RNA, 19 nt, Artificial Sequence
  Description of Artificial Sequence: Synthetic oligonucleotide
aggcuaaccauccaugauc

SEQ ID NO: 2159250 - RNA, 19 nt, Artificial Sequence
  Description of Artificial Sequence: Synthetic oligonucleotide
uggcaaaaugaacucauca

SEQ ID NO: 2159251 - RNA, 19 nt, Artificial Sequence
  Description of Artificial Sequence: Synthetic oligonucleotide
guaauuguagguacaagag

SEQ ID NO: 2159252 - RNA, 19 nt, Artificial Sequence
  Description of Artificial Sequence: Synthetic oligonucleotide
agugcgaguagcccgcucc

SEQ ID NO: 2159253 - RNA, 19 nt, Artificial Sequence
  Description of Artificial Sequence: Synthetic oligonucleotide
ugagugucaguccugccag

SEQ ID NO: 2159254 - RNA, 19 nt, Artificial Sequence
  Description of Artificial Sequence: Synthetic oligonucleotide
uaaccauccaugaucuuca

SEQ ID NO: 2159255 - RNA, 19 nt, Artificial Sequence
  Description of Artificial Sequence: Synthetic oligonucleotide
ugaucuucaucacagcaaa

SEQ ID NO: 2159256 - RNA, 19 nt, Artificial Sequence
  Description of Artificial Sequence: Synthetic oligonucleotide
gauaacaccaaaugcacua

SEQ ID NO: 2159257 - RNA, 19 nt, Artificial Sequence
  Description of Artificial Sequence: Synthetic oligonucleotide
aaaggguuuggcuuccacu

SEQ ID NO: 2159258 - RNA, 19 nt, Artificial Sequence
  Description of Artificial Sequence: Synthetic oligonucleotide
cagacugacuuauuaauug

SEQ ID NO: 2159259 - RNA, 19 nt, Artificial Sequence
  Description of Artificial Sequence: Synthetic oligonucleotide
aacauuccugucaugguuc

SEQ ID NO: 2159260 - RNA, 19 nt, Artificial Sequence
  Description of Artificial Sequence: Synthetic oligonucleotide
aaccuagaguauuagccca

SEQ ID NO: 2159261 - RNA, 19 nt, Artificial Sequence
  Description of Artificial Sequence: Synthetic oligonucleotide
ugccuagucaccauauuca

SEQ ID NO: 2159262 - RNA, 19 nt, Artificial Sequence
  Description of Artificial Sequence: Synthetic oligonucleotide
aggaaccuagaguauuagc

SEQ ID NO: 2159263 - RNA, 19 nt, Artificial Sequence
  Description of Artificial Sequence: Synthetic oligonucleotide
agguuuuguugccacuucc

SEQ ID NO: 2159264 - RNA, 19 nt, Artificial Sequence
  Description of Artificial Sequence: Synthetic oligonucleotide
aguauccugaacaagauau

SEQ ID NO: 2159265 - RNA, 19 nt, Artificial Sequence
  Description of Artificial Sequence: Synthetic oligonucleotide
auaucguggauccacauuu

SEQ ID NO: 2159266 - RNA, 19 nt, Artificial Sequence
  Description of Artificial Sequence: Synthetic oligonucleotide
aaucagagugcgaguagcc

SEQ ID NO: 2159267 - RNA, 19 nt, Artificial Sequence
  Description of Artificial Sequence: Synthetic oligonucleotide
uuuguuagcuccaguuggc

SEQ ID NO: 2159268 - RNA, 19 nt, Artificial Sequence
  Description of Artificial Sequence: Synthetic oligonucleotide
gaugacuaugaaauguccc

SEQ ID NO: 2159269 - RNA, 19 nt, Artificial Sequence
  Description of Artificial Sequence: Synthetic oligonucleotide
aagcuaacucaaaucggcc

SEQ ID NO: 2159270 - RNA, 19 nt, Artificial Sequence
  Description of Artificial Sequence: Synthetic oligonucleotide
auacagugcauagagacug

SEQ ID NO: 2159271 - RNA, 19 nt, Artificial Sequence
  Description of Artificial Sequence: Synthetic oligonucleotide
gacuuauuaauuggucugg

SEQ ID NO: 2159272 - RNA, 19 nt, Artificial Sequence
  Description of Artificial Sequence: Synthetic oligonucleotide
cugucaugcaacauccucc

SEQ ID NO: 2159273 - RNA, 19 nt, Artificial Sequence
  Description of Artificial Sequence: Synthetic oligonucleotide
uauuccucgaagaccaccu

SEQ ID NO: 2159274 - RNA, 19 nt, Artificial Sequence
  Description of Artificial Sequence: Synthetic oligonucleotide
ucacuaagggcaagcauug

SEQ ID NO: 2159275 - RNA, 19 nt, Artificial Sequence
  Description of Artificial Sequence: Synthetic oligonucleotide
cuauagagcaaagccaagg

SEQ ID NO: 2159276 - RNA, 19 nt, Artificial Sequence
  Description of Artificial Sequence: Synthetic oligonucleotide
aaaugcacuauagagcaaa

SEQ ID NO: 2159277 - RNA, 19 nt, Artificial Sequence
  Description of Artificial Sequence: Synthetic oligonucleotide
gaguauuagcccaaagugc

SEQ ID NO: 2159278 - RNA, 19 nt, Artificial Sequence
  Description of Artificial Sequence: Synthetic oligonucleotide
uauacagugcauagagacu

SEQ ID NO: 2159279 - RNA, 19 nt, Artificial Sequence
  Description of Artificial Sequence: Synthetic oligonucleotide
cuucaucacagcaaaucag

SEQ ID NO: 2159280 - RNA, 19 nt, Artificial Sequence
  Description of Artificial Sequence: Synthetic oligonucleotide
ucuugguuuagaccaggcc

SEQ ID NO: 2159281 - RNA, 19 nt, Artificial Sequence
  Description of Artificial Sequence: Synthetic oligonucleotide
agacaggggauucauacca

SEQ ID NO: 2159282 - RNA, 19 nt, Artificial Sequence
  Description of Artificial Sequence: Synthetic oligonucleotide
ggaaccuagaguauuagcc

SEQ ID NO: 2159283 - RNA, 19 nt, Artificial Sequence
  Description of Artificial Sequence: Synthetic oligonucleotide
uccaauuguucaaaguaau

SEQ ID NO: 2159284 - RNA, 19 nt, Artificial Sequence
  Description of Artificial Sequence: Synthetic oligonucleotide
ucaugcaacauccuccaau

SEQ ID NO: 2159285 - RNA, 19 nt, Artificial Sequence
  Description of Artificial Sequence: Synthetic oligonucleotide
acucaaaucggccucgggu

SEQ ID NO: 2159286 - RNA, 19 nt, Artificial Sequence
  Description of Artificial Sequence: Synthetic oligonucleotide
aaaguaauuguagguacaa

SEQ ID NO: 2159287 - RNA, 19 nt, Artificial Sequence
  Description of Artificial Sequence: Synthetic oligonucleotide
guuuuguuagcuccaguug

SEQ ID NO: 2159288 - RNA, 19 nt, Artificial Sequence
  Description of Artificial Sequence: Synthetic oligonucleotide
agugcggugggcuucccac

SEQ ID NO: 2159289 - RNA, 19 nt, Artificial Sequence
  Description of Artificial Sequence: Synthetic oligonucleotide
ucgaagaccaccuguacau

SEQ ID NO: 2159290 - RNA, 19 nt, Artificial Sequence
  Description of Artificial Sequence: Synthetic oligonucleotide
cucggguuuuguuagcucc

SEQ ID NO: 2159291 - RNA, 19 nt, Artificial Sequence
  Description of Artificial Sequence: Synthetic oligonucleotide
uggaugacuaugaaauguc

SEQ ID NO: 2159292 - RNA, 19 nt, Artificial Sequence
  Description of Artificial Sequence: Synthetic oligonucleotide
auaccaguuagcggaacgc

SEQ ID NO: 2159293 - RNA, 19 nt, Artificial Sequence
  Description of Artificial Sequence: Synthetic oligonucleotide
agccaaggaaccuagagua

SEQ ID NO: 2159294 - RNA, 19 nt, Artificial Sequence
  Description of Artificial Sequence: Synthetic oligonucleotide
gacgucgcagcaaagugcg

SEQ ID NO: 2159295 - RNA, 19 nt, Artificial Sequence
  Description of Artificial Sequence: Synthetic oligonucleotide
guuuucucaaugauaacac

SEQ ID NO: 2159296 - RNA, 19 nt, Artificial Sequence
  Description of Artificial Sequence: Synthetic oligonucleotide
cuuccacucacuaagggca

SEQ ID NO: 2159297 - RNA, 19 nt, Artificial Sequence
  Description of Artificial Sequence: Synthetic oligonucleotide
ugacgucgcagcaaagugc

SEQ ID NO: 2159298 - RNA, 19 nt, Artificial Sequence
  Description of Artificial Sequence: Synthetic oligonucleotide
acuaagggcaagcauugca

SEQ ID NO: 2159299 - RNA, 19 nt, Artificial Sequence
  Description of Artificial Sequence: Synthetic oligonucleotide
uugccuagucaccauauuc

SEQ ID NO: 2159300 - RNA, 19 nt, Artificial Sequence
  Description of Artificial Sequence: Synthetic oligonucleotide
ugucaugcaacauccucca

SEQ ID NO: 2159301 - RNA, 19 nt, Artificial Sequence
  Description of Artificial Sequence: Synthetic oligonucleotide
ggauucauaccaguuagcg

SEQ ID NO: 2159302 - RNA, 19 nt, Artificial Sequence
  Description of Artificial Sequence: Synthetic oligonucleotide
agggcaagcauugcagucc

SEQ ID NO: 2159303 - RNA, 19 nt, Artificial Sequence
  Description of Artificial Sequence: Synthetic oligonucleotide
caagcauugcaguccaggc

SEQ ID NO: 2159304 - RNA, 19 nt, Artificial Sequence
  Description of Artificial Sequence: Synthetic oligonucleotide
acugacuuauuaauugguc

SEQ ID NO: 2159305 - RNA, 19 nt, Artificial Sequence
  Description of Artificial Sequence: Synthetic oligonucleotide
cauaccaguuagcggaacg

SEQ ID NO: 2159306 - RNA, 19 nt, Artificial Sequence
  Description of Artificial Sequence: Synthetic oligonucleotide
cagggaaccuuucaugugc

SEQ ID NO: 2159307 - RNA, 19 nt, Artificial Sequence
  Description of Artificial Sequence: Synthetic oligonucleotide
aaguaauuguagguacaag

SEQ ID NO: 2159308 - RNA, 19 nt, Artificial Sequence
  Description of Artificial Sequence: Synthetic oligonucleotide
auuaauuggucuggaugac

SEQ ID NO: 2159309 - RNA, 19 nt, Artificial Sequence
  Description of Artificial Sequence: Synthetic oligonucleotide
ugacuguuggagcagggaa

SEQ ID NO: 2159310 - RNA, 19 nt, Artificial Sequence
  Description of Artificial Sequence: Synthetic oligonucleotide
ucaucaguauccugaacaa

SEQ ID NO: 2159311 - RNA, 19 nt, Artificial Sequence
  Description of Artificial Sequence: Synthetic oligonucleotide
cucagugagucaccaaagg

SEQ ID NO: 2159312 - RNA, 19 nt, Artificial Sequence
  Description of Artificial Sequence: Synthetic oligonucleotide
uauuagcccaaagugcccc

SEQ ID NO: 2159313 - RNA, 19 nt, Artificial Sequence
  Description of Artificial Sequence: Synthetic oligonucleotide
ucuggaugacuaugaaaug

SEQ ID NO: 2159314 - RNA, 19 nt, Artificial Sequence
  Description of Artificial Sequence: Synthetic oligonucleotide
uuguagguacaagagagaa

SEQ ID NO: 2159315 - RNA, 19 nt, Artificial Sequence
  Description of Artificial Sequence: Synthetic oligonucleotide
acuggugagugucaguccu

SEQ ID NO: 2159316 - RNA, 19 nt, Artificial Sequence
  Description of Artificial Sequence: Synthetic oligonucleotide
uccaggcuaaccauccaug

SEQ ID NO: 2159317 - RNA, 19 nt, Artificial Sequence
  Description of Artificial Sequence: Synthetic oligonucleotide
augacgucgcagcaaagug

SEQ ID NO: 2159318 - RNA, 19 nt, Artificial Sequence
  Description of Artificial Sequence: Synthetic oligonucleotide
aaaugcagccccugucaug

SEQ ID NO: 2159319 - RNA, 19 nt, Artificial Sequence
  Description of Artificial Sequence: Synthetic oligonucleotide
aucagagugcgaguagccc

SEQ ID NO: 2159320 - RNA, 19 nt, Artificial Sequence
  Description of Artificial Sequence: Synthetic oligonucleotide
caaaaugaacucaucagua

SEQ ID NO: 2159321 - RNA, 19 nt, Artificial Sequence
  Description of Artificial Sequence: Synthetic oligonucleotide
uguacauuucuugguuuag

SEQ ID NO: 2159322 - RNA, 19 nt, Artificial Sequence
  Description of Artificial Sequence: Synthetic oligonucleotide
uacagugcauagagacugg

SEQ ID NO: 2159323 - RNA, 19 nt, Artificial Sequence
  Description of Artificial Sequence: Synthetic oligonucleotide
agcuaacucaaaucggccu

SEQ ID NO: 2159324 - RNA, 19 nt, Artificial Sequence
  Description of Artificial Sequence: Synthetic oligonucleotide
cugucaugguuccagcugc

SEQ ID NO: 2159325 - RNA, 19 nt, Artificial Sequence
  Description of Artificial Sequence: Synthetic oligonucleotide
uguagguacaagagagaaa

SEQ ID NO: 2159326 - RNA, 19 nt, Artificial Sequence
  Description of Artificial Sequence: Synthetic oligonucleotide
ugaacaagauaucguggau

SEQ ID NO: 2159327 - RNA, 19 nt, Artificial Sequence
  Description of Artificial Sequence: Synthetic oligonucleotide
agcauugcaguccaggcua

SEQ ID NO: 2159328 - RNA, 19 nt, Artificial Sequence
  Description of Artificial Sequence: Synthetic oligonucleotide
ggggauucauaccaguuag

SEQ ID NO: 2159329 - RNA, 19 nt, Artificial Sequence
  Description of Artificial Sequence: Synthetic oligonucleotide
agacccgcguuccuacugc

SEQ ID NO: 2159330 - RNA, 19 nt, Artificial Sequence
  Description of Artificial Sequence: Synthetic oligonucleotide
agugucaguccugccaggc

SEQ ID NO: 2159331 - RNA, 19 nt, Artificial Sequence
  Description of Artificial Sequence: Synthetic oligonucleotide
auagagcaaagccaaggaa

SEQ ID NO: 2159332 - RNA, 19 nt, Artificial Sequence
  Description of Artificial Sequence: Synthetic oligonucleotide
aaggaaccuagaguauuag

SEQ ID NO: 2159333 - RNA, 19 nt, Artificial Sequence
  Description of Artificial Sequence: Synthetic oligonucleotide
uccaugacgucgcagcaaa

SEQ ID NO: 2159334 - RNA, 19 nt, Artificial Sequence
  Description of Artificial Sequence: Synthetic oligonucleotide
cauugccccaaaugcagcc

SEQ ID NO: 2159335 - RNA, 19 nt, Artificial Sequence
  Description of Artificial Sequence: Synthetic oligonucleotide
uucuugguuuagaccaggc

SEQ ID NO: 2159336 - RNA, 19 nt, Artificial Sequence
  Description of Artificial Sequence: Synthetic oligonucleotide
cacuauagagcaaagccaa

SEQ ID NO: 2159337 - RNA, 19 nt, Artificial Sequence
  Description of Artificial Sequence: Synthetic oligonucleotide
aaauauggagacaggggau

SEQ ID NO: 2159338 - RNA, 19 nt, Artificial Sequence
  Description of Artificial Sequence: Synthetic oligonucleotide
agcgggaagacccgcguuc

SEQ ID NO: 2159339 - RNA, 19 nt, Artificial Sequence
  Description of Artificial Sequence: Synthetic oligonucleotide
ccaaaugcacuauagagca

SEQ ID NO: 2159340 - RNA, 19 nt, Artificial Sequence
  Description of Artificial Sequence: Synthetic oligonucleotide
uacuguguugaggucaucu

SEQ ID NO: 2159341 - RNA, 19 nt, Artificial Sequence
  Description of Artificial Sequence: Synthetic oligonucleotide
ccauauucaaaaucuguac

SEQ ID NO: 2159342 - RNA, 19 nt, Artificial Sequence
  Description of Artificial Sequence: Synthetic oligonucleotide
gagcagggaaccuuucaug

SEQ ID NO: 2159343 - RNA, 19 nt, Artificial Sequence
  Description of Artificial Sequence: Synthetic oligonucleotide
aagacccgcguuccuacug

SEQ ID NO: 2159344 - RNA, 19 nt, Artificial Sequence
  Description of Artificial Sequence: Synthetic oligonucleotide
gugcauagagacuggugag

SEQ ID NO: 2159345 - RNA, 19 nt, Artificial Sequence
  Description of Artificial Sequence: Synthetic oligonucleotide
auugccccaaaugcagccc

SEQ ID NO: 2159346 - RNA, 19 nt, Artificial Sequence
  Description of Artificial Sequence: Synthetic oligonucleotide
caaaucagagugcgaguag

SEQ ID NO: 2159347 - RNA, 19 nt, Artificial Sequence
  Description of Artificial Sequence: Synthetic oligonucleotide
gaagaccguucauugcccc

SEQ ID NO: 2159348 - RNA, 19 nt, Artificial Sequence
  Description of Artificial Sequence: Synthetic oligonucleotide
uuaauuggucuggaugacu

SEQ ID NO: 2159349 - RNA, 19 nt, Artificial Sequence
  Description of Artificial Sequence: Synthetic oligonucleotide
caaaguaauuguagguaca

SEQ ID NO: 2159350 - RNA, 19 nt, Artificial Sequence
  Description of Artificial Sequence: Synthetic oligonucleotide
aacgccggccaaaucagag

SEQ ID NO: 2159351 - RNA, 19 nt, Artificial Sequence
  Description of Artificial Sequence: Synthetic oligonucleotide
cguucauugccccaaaugc

SEQ ID NO: 2159352 - RNA, 19 nt, Artificial Sequence
  Description of Artificial Sequence: Synthetic oligonucleotide
ucgugcuauuccucgaaga

SEQ ID NO: 2159353 - RNA, 19 nt, Artificial Sequence
  Description of Artificial Sequence: Synthetic oligonucleotide
ucggccgugguccccacag

SEQ ID NO: 2159354 - RNA, 19 nt, Artificial Sequence
  Description of Artificial Sequence: Synthetic oligonucleotide
ucguggauccacauuuaaa

SEQ ID NO: 2159355 - RNA, 19 nt, Artificial Sequence
  Description of Artificial Sequence: Synthetic oligonucleotide
cuagaguauuagcccaaag

SEQ ID NO: 2159356 - RNA, 19 nt, Artificial Sequence
  Description of Artificial Sequence: Synthetic oligonucleotide
uggguuuccuucaauccua

SEQ ID NO: 2159357 - RNA, 19 nt, Artificial Sequence
  Description of Artificial Sequence: Synthetic oligonucleotide
guguguucggccguggucc

SEQ ID NO: 2159358 - RNA, 19 nt, Artificial Sequence
  Description of Artificial Sequence: Synthetic oligonucleotide
uggcuuccacucacuaagg

SEQ ID NO: 2159359 - RNA, 19 nt, Artificial Sequence
  Description of Artificial Sequence: Synthetic oligonucleotide
auauggagacaggggauuc

SEQ ID NO: 2159360 - RNA, 19 nt, Artificial Sequence
  Description of Artificial Sequence: Synthetic oligonucleotide
agagucuccaauuguucaa

SEQ ID NO: 2159361 - RNA, 19 nt, Artificial Sequence
  Description of Artificial Sequence: Synthetic oligonucleotide
agcuccaguuggcaaaaug

SEQ ID NO: 2159362 - RNA, 19 nt, Artificial Sequence
  Description of Artificial Sequence: Synthetic oligonucleotide
uguuagcuccaguuggcaa

SEQ ID NO: 2159363 - RNA, 19 nt, Artificial Sequence
  Description of Artificial Sequence: Synthetic oligonucleotide
aagaccguucauugcccca

SEQ ID NO: 2159364 - RNA, 19 nt, Artificial Sequence
  Description of Artificial Sequence: Synthetic oligonucleotide
agagagaaagcaacuccag

SEQ ID NO: 2159365 - RNA, 19 nt, Artificial Sequence
  Description of Artificial Sequence: Synthetic oligonucleotide
acacgcugaccuuccgggc

SEQ ID NO: 2159366 - RNA, 19 nt, Artificial Sequence
  Description of Artificial Sequence: Synthetic oligonucleotide
accauauucaaaaucugua

SEQ ID NO: 2159367 - RNA, 19 nt, Artificial Sequence
  Description of Artificial Sequence: Synthetic oligonucleotide
gucuggaugacuaugaaau

SEQ ID NO: 2159368 - RNA, 19 nt, Artificial Sequence
  Description of Artificial Sequence: Synthetic oligonucleotide
uggagcagggaaccuuuca

SEQ ID NO: 2159369 - RNA, 19 nt, Artificial Sequence
  Description of Artificial Sequence: Synthetic oligonucleotide
ucggguuuuguuagcucca

SEQ ID NO: 2159370 - RNA, 19 nt, Artificial Sequence
  Description of Artificial Sequence: Synthetic oligonucleotide
guuagcuccaguuggcaaa

SEQ ID NO: 2159371 - RNA, 19 nt, Artificial Sequence
  Description of Artificial Sequence: Synthetic oligonucleotide
agaagagaacacauacuca

SEQ ID NO: 2159372 - RNA, 19 nt, Artificial Sequence
  Description of Artificial Sequence: Synthetic oligonucleotide
caccucgugcuauuccucg

SEQ ID NO: 2159373 - RNA, 19 nt, Artificial Sequence
  Description of Artificial Sequence: Synthetic oligonucleotide
acagcaaaucagagucucc

SEQ ID NO: 2159374 - RNA, 19 nt, Artificial Sequence
  Description of Artificial Sequence: Synthetic oligonucleotide
uuccugagguggcaaaguc

SEQ ID NO: 2159375 - RNA, 19 nt, Artificial Sequence
  Description of Artificial Sequence: Synthetic oligonucleotide
caguuggcaaaaugaacuc

SEQ ID NO: 2159376 - RNA, 19 nt, Artificial Sequence
  Description of Artificial Sequence: Synthetic oligonucleotide
cuccaauuguucaaaguaa

SEQ ID NO: 2159377 - RNA, 19 nt, Artificial Sequence
  Description of Artificial Sequence: Synthetic oligonucleotide
cugacuuauuaauuggucu

SEQ ID NO: 2159378 - RNA, 19 nt, Artificial Sequence
  Description of Artificial Sequence: Synthetic oligonucleotide
cacgcugaccuuccgggcg

SEQ ID NO: 2159379 - RNA, 19 nt, Artificial Sequence
  Description of Artificial Sequence: Synthetic oligonucleotide
uaccaguuagcggaacgcc

SEQ ID NO: 2159380 - RNA, 19 nt, Artificial Sequence
  Description of Artificial Sequence: Synthetic oligonucleotide
ggccaaaucagagugcgag

SEQ ID NO: 2159381 - RNA, 19 nt, Artificial Sequence
  Description of Artificial Sequence: Synthetic oligonucleotide
aguuggcaaaaugaacuca

SEQ ID NO: 2159382 - RNA, 19 nt, Artificial Sequence
  Description of Artificial Sequence: Synthetic oligonucleotide
accaguuagcggaacgccg

SEQ ID NO: 2159383 - RNA, 19 nt, Artificial Sequence
  Description of Artificial Sequence: Synthetic oligonucleotide
uccucgaagaccaccugua

SEQ ID NO: 2159384 - RNA, 19 nt, Artificial Sequence
  Description of Artificial Sequence: Synthetic oligonucleotide
ugcauagagacuggugagu

SEQ ID NO: 2159385 - RNA, 19 nt, Artificial Sequence
  Description of Artificial Sequence: Synthetic oligonucleotide
cagagugcgaguagcccgc

SEQ ID NO: 2159386 - RNA, 19 nt, Artificial Sequence
  Description of Artificial Sequence: Synthetic oligonucleotide
aacauccuccaaugguaaa

SEQ ID NO: 2159387 - RNA, 19 nt, Artificial Sequence
  Description of Artificial Sequence: Synthetic oligonucleotide
aguuagcggaacgccggcc

SEQ ID NO: 2159388 - RNA, 19 nt, Artificial Sequence
  Description of Artificial Sequence: Synthetic oligonucleotide
cuucacacgcugaccuucc

SEQ ID NO: 2159389 - RNA, 19 nt, Artificial Sequence
  Description of Artificial Sequence: Synthetic oligonucleotide
acgcugaccuuccgggcgc

SEQ ID NO: 2159390 - RNA, 19 nt, Artificial Sequence
  Description of Artificial Sequence: Synthetic oligonucleotide
aacagcgggaagacccgcg

SEQ ID NO: 2159391 - RNA, 19 nt, Artificial Sequence
  Description of Artificial Sequence: Synthetic oligonucleotide
gaagccagcuaagccgccg

SEQ ID NO: 2159392 - RNA, 19 nt, Artificial Sequence
  Description of Artificial Sequence: Synthetic oligonucleotide
agucaccaaaggguuuggc

SEQ ID NO: 2159393 - RNA, 19 nt, Artificial Sequence
  Description of Artificial Sequence: Synthetic oligonucleotide
ggaaccuuucaugugcucc

SEQ ID NO: 2159394 - RNA, 19 nt, Artificial Sequence
  Description of Artificial Sequence: Synthetic oligonucleotide
uucauaccaguuagcggaa

SEQ ID NO: 2159395 - RNA, 19 nt, Artificial Sequence
  Description of Artificial Sequence: Synthetic oligonucleotide
uagagacuggugaguguca

SEQ ID NO: 2159396 - RNA, 19 nt, Artificial Sequence
  Description of Artificial Sequence: Synthetic oligonucleotide
acuuauuaauuggucugga

SEQ ID NO: 2159397 - RNA, 19 nt, Artificial Sequence
  Description of Artificial Sequence: Synthetic oligonucleotide
acacauacucagugaguca

SEQ ID NO: 2159398 - RNA, 19 nt, Artificial Sequence
  Description of Artificial Sequence: Synthetic oligonucleotide
acaggggauucauaccagu

SEQ ID NO: 2159399 - RNA, 19 nt, Artificial Sequence
  Description of Artificial Sequence: Synthetic oligonucleotide
gggaucguguguucggccg

SEQ ID NO: 2159400 - RNA, 19 nt, Artificial Sequence
  Description of Artificial Sequence: Synthetic oligonucleotide
ccgaagaccguucauugcc

SEQ ID NO: 2159401 - RNA, 19 nt, Artificial Sequence
  Description of Artificial Sequence: Synthetic oligonucleotide
cacagcaaaucagagucuc

SEQ ID NO: 2159402 - RNA, 19 nt, Artificial Sequence
  Description of Artificial Sequence: Synthetic oligonucleotide
gugcuauuccucgaagacc

SEQ ID NO: 2159403 - RNA, 19 nt, Artificial Sequence
  Description of Artificial Sequence: Synthetic oligonucleotide
gagugacuguuggagcagg

SEQ ID NO: 2159404 - RNA, 19 nt, Artificial Sequence
  Description of Artificial Sequence: Synthetic oligonucleotide
uaacucaaaucggccucgg

SEQ ID NO: 2159405 - RNA, 19 nt, Artificial Sequence
  Description of Artificial Sequence: Synthetic oligonucleotide
augaucuucaucacagcaa

SEQ ID NO: 2159406 - RNA, 19 nt, Artificial Sequence
  Description of Artificial Sequence: Synthetic oligonucleotide
uggugagugucaguccugc

SEQ ID NO: 2159407 - RNA, 19 nt, Artificial Sequence
  Description of Artificial Sequence: Synthetic oligonucleotide
ucggccucggguuuuguua

SEQ ID NO: 2159408 - RNA, 19 nt, Artificial Sequence
  Description of Artificial Sequence: Synthetic oligonucleotide
caucaguauccugaacaag

SEQ ID NO: 2159409 - RNA, 19 nt, Artificial Sequence
  Description of Artificial Sequence: Synthetic oligonucleotide
ucaaaucggccucggguuu

SEQ ID NO: 2159410 - RNA, 19 nt, Artificial Sequence
  Description of Artificial Sequence: Synthetic oligonucleotide
cagugcauagagacuggug

SEQ ID NO: 2159411 - RNA, 19 nt, Artificial Sequence
  Description of Artificial Sequence: Synthetic oligonucleotide
cuccgaagaagccagcuaa

SEQ ID NO: 2159412 - RNA, 19 nt, Artificial Sequence
  Description of Artificial Sequence: Synthetic oligonucleotide
uccugucaugguuccagcu

SEQ ID NO: 2159413 - RNA, 19 nt, Artificial Sequence
  Description of Artificial Sequence: Synthetic oligonucleotide
auuguagguacaagagaga

SEQ ID NO: 2159414 - RNA, 19 nt, Artificial Sequence
  Description of Artificial Sequence: Synthetic oligonucleotide
ugcggugggcuucccacca

SEQ ID NO: 2159415 - RNA, 19 nt, Artificial Sequence
  Description of Artificial Sequence: Synthetic oligonucleotide
uuccugucaugguuccagc

SEQ ID NO: 2159416 - RNA, 19 nt, Artificial Sequence
  Description of Artificial Sequence: Synthetic oligonucleotide
guuagcggaacgccggcca

SEQ ID NO: 2159417 - RNA, 19 nt, Artificial Sequence
  Description of Artificial Sequence: Synthetic oligonucleotide
acuguguugaggucaucuu

SEQ ID NO: 2159418 - RNA, 19 nt, Artificial Sequence
  Description of Artificial Sequence: Synthetic oligonucleotide
gacaggggauucauaccag

SEQ ID NO: 2159419 - RNA, 19 nt, Artificial Sequence
  Description of Artificial Sequence: Synthetic oligonucleotide
acuauagagcaaagccaag

SEQ ID NO: 2159420 - RNA, 19 nt, Artificial Sequence
  Description of Artificial Sequence: Synthetic oligonucleotide
gcuaacucaaaucggccuc

SEQ ID NO: 2159421 - RNA, 19 nt, Artificial Sequence
  Description of Artificial Sequence: Synthetic oligonucleotide
ggaugacuaugaaaugucc

SEQ ID NO: 2159422 - RNA, 19 nt, Artificial Sequence
  Description of Artificial Sequence: Synthetic oligonucleotide
aucuucugcaccccguguu

SEQ ID NO: 2159423 - RNA, 19 nt, Artificial Sequence
  Description of Artificial Sequence: Synthetic oligonucleotide
accccguguuuucucaaug

SEQ ID NO: 2159424 - RNA, 19 nt, Artificial Sequence
  Description of Artificial Sequence: Synthetic oligonucleotide
aucguggauccacauuuaa

SEQ ID NO: 2159425 - RNA, 19 nt, Artificial Sequence
  Description of Artificial Sequence: Synthetic oligonucleotide
uaucguggauccacauuua

SEQ ID NO: 2159426 - RNA, 19 nt, Artificial Sequence
  Description of Artificial Sequence: Synthetic oligonucleotide
auaacaccaaaugcacuau

SEQ ID NO: 2159427 - RNA, 19 nt, Artificial Sequence
  Description of Artificial Sequence: Synthetic oligonucleotide
gucgcagcaaagugcggug

SEQ ID NO: 2159428 - RNA, 19 nt, Artificial Sequence
  Description of Artificial Sequence: Synthetic oligonucleotide
auuagcccaaagugccccu

SEQ ID NO: 2159429 - RNA, 19 nt, Artificial Sequence
  Description of Artificial Sequence: Synthetic oligonucleotide
auuccucgaagaccaccug

SEQ ID NO: 2159430 - RNA, 19 nt, Artificial Sequence
  Description of Artificial Sequence: Synthetic oligonucleotide
cucgugcuauuccucgaag

SEQ ID NO: 2159431 - RNA, 19 nt, Artificial Sequence
  Description of Artificial Sequence: Synthetic oligonucleotide
guauuagcccaaagugccc

SEQ ID NO: 2159432 - RNA, 19 nt, Artificial Sequence
  Description of Artificial Sequence: Synthetic oligonucleotide
auccugaacaagauaucgu

SEQ ID NO: 2159433 - RNA, 19 nt, Artificial Sequence
  Description of Artificial Sequence: Synthetic oligonucleotide
uuccacucacuaagggcaa

SEQ ID NO: 2159434 - RNA, 19 nt, Artificial Sequence
  Description of Artificial Sequence: Synthetic oligonucleotide
ugccccuugccuagucacc

SEQ ID NO: 2159435 - RNA, 19 nt, Artificial Sequence
  Description of Artificial Sequence: Synthetic oligonucleotide
ccugcuccgaagaagccag

SEQ ID NO: 2159436 - RNA, 19 nt, Artificial Sequence
  Description of Artificial Sequence: Synthetic oligonucleotide
caagaccaucuccaaagga

SEQ ID NO: 2159437 - RNA, 19 nt, Artificial Sequence
  Description of Artificial Sequence: Synthetic oligonucleotide
caaaggguuuggcuuccac

SEQ ID NO: 2159438 - RNA, 19 nt, Artificial Sequence
  Description of Artificial Sequence: Synthetic oligonucleotide
cagcaaaucagagucucca

SEQ ID NO: 2159439 - RNA, 19 nt, Artificial Sequence
  Description of Artificial Sequence: Synthetic oligonucleotide
gucaccaaaggguuuggcu

SEQ ID NO: 2159440 - RNA, 19 nt, Artificial Sequence
  Description of Artificial Sequence: Synthetic oligonucleotide
aauccuagccgaagaccgu

SEQ ID NO: 2159441 - RNA, 19 nt, Artificial Sequence
  Description of Artificial Sequence: Synthetic oligonucleotide
agugacuguuggagcaggg

SEQ ID NO: 2159442 - RNA, 19 nt, Artificial Sequence
  Description of Artificial Sequence: Synthetic oligonucleotide
uuagcggaacgccggccaa

SEQ ID NO: 2159443 - RNA, 19 nt, Artificial Sequence
  Description of Artificial Sequence: Synthetic oligonucleotide
aagaccaccuguacauuua

SEQ ID NO: 2159444 - RNA, 19 nt, Artificial Sequence
  Description of Artificial Sequence: Synthetic oligonucleotide
uguguucggccgugguccc

SEQ ID NO: 2159445 - RNA, 19 nt, Artificial Sequence
  Description of Artificial Sequence: Synthetic oligonucleotide
aggguuuggcuuccacuca

SEQ ID NO: 2159446 - RNA, 19 nt, Artificial Sequence
  Description of Artificial Sequence: Synthetic oligonucleotide
auuccugagguggcaaagu

SEQ ID NO: 2159447 - RNA, 19 nt, Artificial Sequence
  Description of Artificial Sequence: Synthetic oligonucleotide
agaccaccuguacauuuau

SEQ ID NO: 2159448 - RNA, 19 nt, Artificial Sequence
  Description of Artificial Sequence: Synthetic oligonucleotide
cuccagacugacuuauuaa

SEQ ID NO: 2159449 - RNA, 19 nt, Artificial Sequence
  Description of Artificial Sequence: Synthetic oligonucleotide
aaaucggccucggguuuug

SEQ ID NO: 2159450 - RNA, 19 nt, Artificial Sequence
  Description of Artificial Sequence: Synthetic oligonucleotide
caaggaaccuagaguauua

SEQ ID NO: 2159451 - RNA, 19 nt, Artificial Sequence
  Description of Artificial Sequence: Synthetic oligonucleotide
gcacuauagagcaaagcca

SEQ ID NO: 2159452 - RNA, 19 nt, Artificial Sequence
  Description of Artificial Sequence: Synthetic oligonucleotide
ugcagccccugucaugcaa

SEQ ID NO: 2159453 - RNA, 19 nt, Artificial Sequence
  Description of Artificial Sequence: Synthetic oligonucleotide
aagugcggugggcuuccca

SEQ ID NO: 2159454 - RNA, 19 nt, Artificial Sequence
  Description of Artificial Sequence: Synthetic oligonucleotide
cuggaugacuaugaaaugu

SEQ ID NO: 2159455 - RNA, 19 nt, Artificial Sequence
  Description of Artificial Sequence: Synthetic oligonucleotide
gcauagagacuggugagug

SEQ ID NO: 2159456 - RNA, 19 nt, Artificial Sequence
  Description of Artificial Sequence: Synthetic oligonucleotide
guauccugaacaagauauc

SEQ ID NO: 2159457 - RNA, 19 nt, Artificial Sequence
  Description of Artificial Sequence: Synthetic oligonucleotide
aaagugcggugggcuuccc

SEQ ID NO: 2159458 - RNA, 19 nt, Artificial Sequence
  Description of Artificial Sequence: Synthetic oligonucleotide
agugccccuugccuaguca

SEQ ID NO: 2159459 - RNA, 19 nt, Artificial Sequence
  Description of Artificial Sequence: Synthetic oligonucleotide
cugccaggccaccucgugc

SEQ ID NO: 2159460 - RNA, 19 nt, Artificial Sequence
  Description of Artificial Sequence: Synthetic oligonucleotide
gauaucguggauccacauu

SEQ ID NO: 2159461 - RNA, 19 nt, Artificial Sequence
  Description of Artificial Sequence: Synthetic oligonucleotide
gaagaccaccuguacauuu

SEQ ID NO: 2159462 - RNA, 19 nt, Artificial Sequence
  Description of Artificial Sequence: Synthetic oligonucleotide
uccacucacuaagggcaag

SEQ ID NO: 2159463 - RNA, 19 nt, Artificial Sequence
  Description of Artificial Sequence: Synthetic oligonucleotide
uagccgaagaccguucauu

SEQ ID NO: 2159464 - RNA, 19 nt, Artificial Sequence
  Description of Artificial Sequence: Synthetic oligonucleotide
uccuagccgaagaccguuc

SEQ ID NO: 2159465 - RNA, 19 nt, Artificial Sequence
  Description of Artificial Sequence: Synthetic oligonucleotide
uucugcaccccguguuuuc

SEQ ID NO: 2159466 - RNA, 19 nt, Artificial Sequence
  Description of Artificial Sequence: Synthetic oligonucleotide
ugguuuagaccaggccaug

SEQ ID NO: 2159467 - RNA, 19 nt, Artificial Sequence
  Description of Artificial Sequence: Synthetic oligonucleotide
acagugcauagagacuggu

SEQ ID NO: 2159468 - RNA, 19 nt, Artificial Sequence
  Description of Artificial Sequence: Synthetic oligonucleotide
ggaagacccgcguuccuac

SEQ ID NO: 2159469 - RNA, 19 nt, Artificial Sequence
  Description of Artificial Sequence: Synthetic oligonucleotide
ugcucccaguuguuauaca

SEQ ID NO: 2159470 - RNA, 19 nt, Artificial Sequence
  Description of Artificial Sequence: Synthetic oligonucleotide
ucguguguucggccguggu

SEQ ID NO: 2159471 - RNA, 19 nt, Artificial Sequence
  Description of Artificial Sequence: Synthetic oligonucleotide
cuggugagugucaguccug

SEQ ID NO: 2159472 - RNA, 19 nt, Artificial Sequence
  Description of Artificial Sequence: Synthetic oligonucleotide
acgccggccaaaucagagu

SEQ ID NO: 2159473 - RNA, 19 nt, Artificial Sequence
  Description of Artificial Sequence: Synthetic oligonucleotide
ggaacgccggccaaaucag

SEQ ID NO: 2159474 - RNA, 19 nt, Artificial Sequence
  Description of Artificial Sequence: Synthetic oligonucleotide
auacucagugagucaccaa

SEQ ID NO: 2159475 - RNA, 19 nt, Artificial Sequence
  Description of Artificial Sequence: Synthetic oligonucleotide
cgugcuauuccucgaagac

SEQ ID NO: 2159476 - RNA, 19 nt, Artificial Sequence
  Description of Artificial Sequence: Synthetic oligonucleotide
gaucguguguucggccgug

SEQ ID NO: 2159477 - RNA, 19 nt, Artificial Sequence
  Description of Artificial Sequence: Synthetic oligonucleotide
gacccgcguuccuacugcc

SEQ ID NO: 2159478 - RNA, 19 nt, Artificial Sequence
  Description of Artificial Sequence: Synthetic oligonucleotide
ucaggccgggaucgugugu

SEQ ID NO: 2159479 - RNA, 19 nt, Artificial Sequence
  Description of Artificial Sequence: Synthetic oligonucleotide
cccgccacccuccaugacg

SEQ ID NO: 2159480 - RNA, 19 nt, Artificial Sequence
  Description of Artificial Sequence: Synthetic oligonucleotide
cccaguuguuauacagugc

SEQ ID NO: 2159481 - RNA, 19 nt, Artificial Sequence
  Description of Artificial Sequence: Synthetic oligonucleotide
gcagggaaccuuucaugug

SEQ ID NO: 2159482 - RNA, 19 nt, Artificial Sequence
  Description of Artificial Sequence: Synthetic oligonucleotide
ccguucauugccccaaaug

SEQ ID NO: 2159483 - RNA, 19 nt, Artificial Sequence
  Description of Artificial Sequence: Synthetic oligonucleotide
accucgugcuauuccucga

SEQ ID NO: 2159484 - RNA, 19 nt, Artificial Sequence
  Description of Artificial Sequence: Synthetic oligonucleotide
gaacacauacucagugagu

SEQ ID NO: 2159485 - RNA, 19 nt, Artificial Sequence
  Description of Artificial Sequence: Synthetic oligonucleotide
cucaaaucggccucggguu

SEQ ID NO: 2159486 - RNA, 19 nt, Artificial Sequence
  Description of Artificial Sequence: Synthetic oligonucleotide
ccggccaaaucagagugcg

SEQ ID NO: 2159487 - RNA, 19 nt, Artificial Sequence
  Description of Artificial Sequence: Synthetic oligonucleotide
acaagauaucguggaucca

SEQ ID NO: 2159488 - RNA, 19 nt, Artificial Sequence
  Description of Artificial Sequence: Synthetic oligonucleotide
agaccguucauugccccaa

SEQ ID NO: 2159489 - RNA, 19 nt, Artificial Sequence
  Description of Artificial Sequence: Synthetic oligonucleotide
cucaggccgggaucgugug

SEQ ID NO: 2159490 - RNA, 19 nt, Artificial Sequence
  Description of Artificial Sequence: Synthetic oligonucleotide
gccaccuucacacgcugac

SEQ ID NO: 2159491 - RNA, 19 nt, Artificial Sequence
  Description of Artificial Sequence: Synthetic oligonucleotide
cacuaagggcaagcauugc

SEQ ID NO: 2159492 - RNA, 19 nt, Artificial Sequence
  Description of Artificial Sequence: Synthetic oligonucleotide
gcaacagcgggaagacccg

SEQ ID NO: 2159493 - RNA, 19 nt, Artificial Sequence
  Description of Artificial Sequence: Synthetic oligonucleotide
gccacccuccaugacgucg

SEQ ID NO: 2159494 - RNA, 19 nt, Artificial Sequence
  Description of Artificial Sequence: Synthetic oligonucleotide
ccgccggagguuuuguugc

SEQ ID NO: 2159495 - RNA, 19 nt, Artificial Sequence
  Description of Artificial Sequence: Synthetic oligonucleotide
gccgaagaccguucauugc

SEQ ID NO: 2159496 - RNA, 19 nt, Artificial Sequence
  Description of Artificial Sequence: Synthetic oligonucleotide
agggaaccuuucaugugcu

SEQ ID NO: 2159497 - RNA, 19 nt, Artificial Sequence
  Description of Artificial Sequence: Synthetic oligonucleotide
gccgccggagguuuuguug

SEQ ID NO: 2159498 - RNA, 19 nt, Artificial Sequence
  Description of Artificial Sequence: Synthetic oligonucleotide
aucguguguucggccgugg

SEQ ID NO: 2159499 - RNA, 19 nt, Artificial Sequence
  Description of Artificial Sequence: Synthetic oligonucleotide
gugacuguuggagcaggga

SEQ ID NO: 2159500 - RNA, 19 nt, Artificial Sequence
  Description of Artificial Sequence: Synthetic oligonucleotide
gguuuccuucaauccuagc

SEQ ID NO: 2159501 - RNA, 19 nt, Artificial Sequence
  Description of Artificial Sequence: Synthetic oligonucleotide
gccgggaucguguguucgg

SEQ ID NO: 2159502 - RNA, 19 nt, Artificial Sequence
  Description of Artificial Sequence: Synthetic oligonucleotide
accguucauugccccaaau

SEQ ID NO: 2159503 - RNA, 19 nt, Artificial Sequence
  Description of Artificial Sequence: Synthetic oligonucleotide
gugcggugggcuucccacc

SEQ ID NO: 2159504 - RNA, 19 nt, Artificial Sequence
  Description of Artificial Sequence: Synthetic oligonucleotide
gccccugucaugcaacauc

SEQ ID NO: 2159505 - RNA, 19 nt, Artificial Sequence
  Description of Artificial Sequence: Synthetic oligonucleotide
caaagccaaggaaccuaga

SEQ ID NO: 2159506 - RNA, 19 nt, Artificial Sequence
  Description of Artificial Sequence: Synthetic oligonucleotide
gggauucauaccaguuagc

SEQ ID NO: 2159507 - RNA, 19 nt, Artificial Sequence
  Description of Artificial Sequence: Synthetic oligonucleotide
aggccgggaucguguguuc

SEQ ID NO: 2159508 - RNA, 19 nt, Artificial Sequence
  Description of Artificial Sequence: Synthetic oligonucleotide
ccacccuccaugacgucgc

SEQ ID NO: 2159509 - RNA, 19 nt, Artificial Sequence
  Description of Artificial Sequence: Synthetic oligonucleotide
caacagcgggaagacccgc

SEQ ID NO: 2159510 - RNA, 19 nt, Artificial Sequence
  Description of Artificial Sequence: Synthetic oligonucleotide
caguauccugaacaagaua

SEQ ID NO: 2159511 - RNA, 19 nt, Artificial Sequence
  Description of Artificial Sequence: Synthetic oligonucleotide
gugggcuucccaccaccac

SEQ ID NO: 2159512 - RNA, 19 nt, Artificial Sequence
  Description of Artificial Sequence: Synthetic oligonucleotide
cgaagaccguucauugccc

SEQ ID NO: 2159513 - RNA, 19 nt, Artificial Sequence
  Description of Artificial Sequence: Synthetic oligonucleotide
ggugcaagaccaucuccaa

SEQ ID NO: 2159514 - RNA, 19 nt, Artificial Sequence
  Description of Artificial Sequence: Synthetic oligonucleotide
cauagagacuggugagugu

SEQ ID NO: 2159515 - RNA, 19 nt, Artificial Sequence
  Description of Artificial Sequence: Synthetic oligonucleotide
cacucacuaagggcaagca

SEQ ID NO: 2159516 - RNA, 19 nt, Artificial Sequence
  Description of Artificial Sequence: Synthetic oligonucleotide
auccuagccgaagaccguu

SEQ ID NO: 2159517 - RNA, 19 nt, Artificial Sequence
  Description of Artificial Sequence: Synthetic oligonucleotide
agccagcuaagccgccgga

SEQ ID NO: 2159518 - RNA, 19 nt, Artificial Sequence
  Description of Artificial Sequence: Synthetic oligonucleotide
ggcuaaccauccaugaucu

SEQ ID NO: 2159519 - RNA, 19 nt, Artificial Sequence
  Description of Artificial Sequence: Synthetic oligonucleotide
aucggccucggguuuuguu

SEQ ID NO: 2159520 - RNA, 19 nt, Artificial Sequence
  Description of Artificial Sequence: Synthetic oligonucleotide
gccuagucaccauauucaa

SEQ ID NO: 2159521 - RNA, 19 nt, Artificial Sequence
  Description of Artificial Sequence: Synthetic oligonucleotide
cguggauccacauuuaaau

SEQ ID NO: 2159522 - RNA, 19 nt, Artificial Sequence
  Description of Artificial Sequence: Synthetic oligonucleotide
ccaggcuaaccauccauga

SEQ ID NO: 2159523 - RNA, 19 nt, Artificial Sequence
  Description of Artificial Sequence: Synthetic oligonucleotide
cauugcaguccaggcuaac

SEQ ID NO: 2159524 - RNA, 19 nt, Artificial Sequence
  Description of Artificial Sequence: Synthetic oligonucleotide
gucaguccugccaggccac

SEQ ID NO: 2159525 - RNA, 19 nt, Artificial Sequence
  Description of Artificial Sequence: Synthetic oligonucleotide
uucggccgugguccccaca

SEQ ID NO: 2159526 - RNA, 19 nt, Artificial Sequence
  Description of Artificial Sequence: Synthetic oligonucleotide
aaucggccucggguuuugu

SEQ ID NO: 2159527 - RNA, 19 nt, Artificial Sequence
  Description of Artificial Sequence: Synthetic oligonucleotide
agcggaacgccggccaaau

SEQ ID NO: 2159528 - RNA, 19 nt, Artificial Sequence
  Description of Artificial Sequence: Synthetic oligonucleotide
gaagacccgcguuccuacu

SEQ ID NO: 2159529 - RNA, 19 nt, Artificial Sequence
  Description of Artificial Sequence: Synthetic oligonucleotide
cccgcguuccuacugccac

SEQ ID NO: 2159530 - RNA, 19 nt, Artificial Sequence
  Description of Artificial Sequence: Synthetic oligonucleotide
gagugcgaguagcccgcuc

SEQ ID NO: 2159531 - RNA, 19 nt, Artificial Sequence
  Description of Artificial Sequence: Synthetic oligonucleotide
ccucgaagaccaccuguac

SEQ ID NO: 2159532 - RNA, 19 nt, Artificial Sequence
  Description of Artificial Sequence: Synthetic oligonucleotide
ccggagguuuuguugccac

SEQ ID NO: 2159533 - RNA, 19 nt, Artificial Sequence
  Description of Artificial Sequence: Synthetic oligonucleotide
cguuccuacugccaccuuc

SEQ ID NO: 2159534 - RNA, 19 nt, Artificial Sequence
  Description of Artificial Sequence: Synthetic oligonucleotide
ugcgaguagcccgcuccuc

SEQ ID NO: 2159535 - RNA, 19 nt, Artificial Sequence
  Description of Artificial Sequence: Synthetic oligonucleotide
gaacgccggccaaaucaga

SEQ ID NO: 2159536 - RNA, 19 nt, Artificial Sequence
  Description of Artificial Sequence: Synthetic oligonucleotide
ccaaaucagagugcgagua

SEQ ID NO: 2159537 - RNA, 19 nt, Artificial Sequence
  Description of Artificial Sequence: Synthetic oligonucleotide
gaccguucauugccccaaa

SEQ ID NO: 2159538 - RNA, 19 nt, Artificial Sequence
  Description of Artificial Sequence: Synthetic oligonucleotide
cgccggccaaaucagagug

SEQ ID NO: 2159539 - RNA, 19 nt, Artificial Sequence
  Description of Artificial Sequence: Synthetic oligonucleotide
acccuccaugacgucgcag

SEQ ID NO: 2159540 - RNA, 19 nt, Artificial Sequence
  Description of Artificial Sequence: Synthetic oligonucleotide
ggccgggaucguguguucg

SEQ ID NO: 2159541 - RNA, 19 nt, Artificial Sequence
  Description of Artificial Sequence: Synthetic oligonucleotide
caaaugcagccccugucau

SEQ ID NO: 2159542 - RNA, 19 nt, Artificial Sequence
  Description of Artificial Sequence: Synthetic oligonucleotide
ccuagucaccauauucaaa

SEQ ID NO: 2159543 - RNA, 19 nt, Artificial Sequence
  Description of Artificial Sequence: Synthetic oligonucleotide
guuggagcagggaaccuuu

SEQ ID NO: 2159544 - RNA, 19 nt, Artificial Sequence
  Description of Artificial Sequence: Synthetic oligonucleotide
gccagcuaagccgccggag

SEQ ID NO: 2159545 - RNA, 19 nt, Artificial Sequence
  Description of Artificial Sequence: Synthetic oligonucleotide
gaccaccuguacauuuaua

SEQ ID NO: 2159546 - RNA, 19 nt, Artificial Sequence
  Description of Artificial Sequence: Synthetic oligonucleotide
caggggauucauaccaguu

SEQ ID NO: 2159547 - RNA, 19 nt, Artificial Sequence
  Description of Artificial Sequence: Synthetic oligonucleotide
ccguguuuucucaaugaua

SEQ ID NO: 2159548 - RNA, 19 nt, Artificial Sequence
  Description of Artificial Sequence: Synthetic oligonucleotide
acgucgcagcaaagugcgg

SEQ ID NO: 2159549 - RNA, 19 nt, Artificial Sequence
  Description of Artificial Sequence: Synthetic oligonucleotide
gggaaccuuucaugugcuc

SEQ ID NO: 2159550 - RNA, 19 nt, Artificial Sequence
  Description of Artificial Sequence: Synthetic oligonucleotide
gccaccucgugcuauuccu

SEQ ID NO: 2159551 - RNA, 19 nt, Artificial Sequence
  Description of Artificial Sequence: Synthetic oligonucleotide
gcgggaagacccgcguucc

SEQ ID NO: 2159552 - RNA, 19 nt, Artificial Sequence
  Description of Artificial Sequence: Synthetic oligonucleotide
caggcuaaccauccaugau

SEQ ID NO: 2159553 - RNA, 19 nt, Artificial Sequence
  Description of Artificial Sequence: Synthetic oligonucleotide
cagcuaagccgccggaggu

SEQ ID NO: 2159554 - RNA, 19 nt, Artificial Sequence
  Description of Artificial Sequence: Synthetic oligonucleotide
agagugcgaguagcccgcu

SEQ ID NO: 2159555 - RNA, 19 nt, Artificial Sequence
  Description of Artificial Sequence: Synthetic oligonucleotide
cggccucggguuuuguuag

SEQ ID NO: 2159556 - RNA, 19 nt, Artificial Sequence
  Description of Artificial Sequence: Synthetic oligonucleotide
ccucggguuuuguuagcuc

SEQ ID NO: 2159557 - RNA, 19 nt, Artificial Sequence
  Description of Artificial Sequence: Synthetic oligonucleotide
gccaaaucagagugcgagu

SEQ ID NO: 2159558 - RNA, 19 nt, Artificial Sequence
  Description of Artificial Sequence: Synthetic oligonucleotide
cuccaugacgucgcagcaa

SEQ ID NO: 2159559 - RNA, 19 nt, Artificial Sequence
  Description of Artificial Sequence: Synthetic oligonucleotide
ccaugacgucgcagcaaag

SEQ ID NO: 2159560 - RNA, 19 nt, Artificial Sequence
  Description of Artificial Sequence: Synthetic oligonucleotide
gcuccgaagaagccagcua

SEQ ID NO: 2159561 - RNA, 19 nt, Artificial Sequence
  Description of Artificial Sequence: Synthetic oligonucleotide
ccuagccgaagaccguuca

SEQ ID NO: 2159562 - RNA, 19 nt, Artificial Sequence
  Description of Artificial Sequence: Synthetic oligonucleotide
ggagguuuuguugccacuu

SEQ ID NO: 2159563 - RNA, 19 nt, Artificial Sequence
  Description of Artificial Sequence: Synthetic oligonucleotide
ggccucggguuuuguuagc

SEQ ID NO: 2159564 - RNA, 19 nt, Artificial Sequence
  Description of Artificial Sequence: Synthetic oligonucleotide
ccagacugacuuauuaauu

SEQ ID NO: 2159565 - RNA, 19 nt, Artificial Sequence
  Description of Artificial Sequence: Synthetic oligonucleotide
ccaauuguucaaaguaauu

SEQ ID NO: 2159566 - RNA, 19 nt, Artificial Sequence
  Description of Artificial Sequence: Synthetic oligonucleotide
ccgcguuccuacugccacc

SEQ ID NO: 2159567 - RNA, 19 nt, Artificial Sequence
  Description of Artificial Sequence: Synthetic oligonucleotide
gucaugguuccagcugcua

SEQ ID NO: 2159568 - RNA, 19 nt, Artificial Sequence
  Description of Artificial Sequence: Synthetic oligonucleotide
cuugccuagucaccauauu

SEQ ID NO: 2159569 - RNA, 19 nt, Artificial Sequence
  Description of Artificial Sequence: Synthetic oligonucleotide
agccccugucaugcaacau

SEQ ID NO: 2159570 - RNA, 19 nt, Artificial Sequence
  Description of Artificial Sequence: Synthetic oligonucleotide
gugcgaguagcccgcuccu

SEQ ID NO: 2159571 - RNA, 19 nt, Artificial Sequence
  Description of Artificial Sequence: Synthetic oligonucleotide
cuagccgaagaccguucau

SEQ ID NO: 2159572 - RNA, 19 nt, Artificial Sequence
  Description of Artificial Sequence: Synthetic oligonucleotide
ccgggaucguguguucggc

SEQ ID NO: 2159573 - RNA, 19 nt, Artificial Sequence
  Description of Artificial Sequence: Synthetic oligonucleotide
acccgcguuccuacugcca

SEQ ID NO: 2159574 - RNA, 19 nt, Artificial Sequence
  Description of Artificial Sequence: Synthetic oligonucleotide
uagcuccaguuggcaaaau

SEQ ID NO: 2159575 - RNA, 19 nt, Artificial Sequence
  Description of Artificial Sequence: Synthetic oligonucleotide
ggaucguguguucggccgu

SEQ ID NO: 2159576 - RNA, 19 nt, Artificial Sequence
  Description of Artificial Sequence: Synthetic oligonucleotide
ggcaagcauugcaguccag

SEQ ID NO: 2159577 - RNA, 19 nt, Artificial Sequence
  Description of Artificial Sequence: Synthetic oligonucleotide
gccccaaaugcagccccug

SEQ ID NO: 2159578 - RNA, 19 nt, Artificial Sequence
  Description of Artificial Sequence: Synthetic oligonucleotide
ccucgugcuauuccucgaa

SEQ ID NO: 2159579 - RNA, 19 nt, Artificial Sequence
  Description of Artificial Sequence: Synthetic oligonucleotide
ccuugccuagucaccauau

SEQ ID NO: 2159580 - RNA, 19 nt, Artificial Sequence
  Description of Artificial Sequence: Synthetic oligonucleotide
ccuagaguauuagcccaaa

SEQ ID NO: 2159581 - RNA, 19 nt, Artificial Sequence
  Description of Artificial Sequence: Synthetic oligonucleotide
caccccguguuuucucaau

SEQ ID NO: 2159582 - RNA, 19 nt, Artificial Sequence
  Description of Artificial Sequence: Synthetic oligonucleotide
gccggagguuuuguugcca

SEQ ID NO: 2159583 - RNA, 19 nt, Artificial Sequence
  Description of Artificial Sequence: Synthetic oligonucleotide
cgccggagguuuuguugcc

SEQ ID NO: 2159584 - RNA, 19 nt, Artificial Sequence
  Description of Artificial Sequence: Synthetic oligonucleotide
gguuuggcuuccacucacu

SEQ ID NO: 2159585 - RNA, 19 nt, Artificial Sequence
  Description of Artificial Sequence: Synthetic oligonucleotide
gcaccccguguuuucucaa

SEQ ID NO: 2159586 - RNA, 19 nt, Artificial Sequence
  Description of Artificial Sequence: Synthetic oligonucleotide
cacccuccaugacgucgca

SEQ ID NO: 2159587 - RNA, 19 nt, Artificial Sequence
  Description of Artificial Sequence: Synthetic oligonucleotide
caggccgggaucguguguu

SEQ ID NO: 2159588 - RNA, 19 nt, Artificial Sequence
  Description of Artificial Sequence: Synthetic oligonucleotide
caaaucggccucggguuuu

SEQ ID NO: 2159589 - RNA, 19 nt, Artificial Sequence
  Description of Artificial Sequence: Synthetic oligonucleotide
cccguguuuucucaaugau

SEQ ID NO: 2159590 - RNA, 19 nt, Artificial Sequence
  Description of Artificial Sequence: Synthetic oligonucleotide
cuucugcaccccguguuuu

SEQ ID NO: 2159591 - RNA, 19 nt, Artificial Sequence
  Description of Artificial Sequence: Synthetic oligonucleotide
gcggugggcuucccaccac

SEQ ID NO: 2159592 - RNA, 19 nt, Artificial Sequence
  Description of Artificial Sequence: Synthetic oligonucleotide
caccaccucaggccgggau

SEQ ID NO: 2159593 - RNA, 19 nt, Artificial Sequence
  Description of Artificial Sequence: Synthetic oligonucleotide
ccucaggccgggaucgugu

SEQ ID NO: 2159594 - RNA, 19 nt, Artificial Sequence
  Description of Artificial Sequence: Synthetic oligonucleotide
ggcuucccaccaccaccuc

SEQ ID NO: 2159595 - RNA, 19 nt, Artificial Sequence
  Description of Artificial Sequence: Synthetic oligonucleotide
gcggaacgccggccaaauc

SEQ ID NO: 2159596 - RNA, 19 nt, Artificial Sequence
  Description of Artificial Sequence: Synthetic oligonucleotide
cccuugccuagucaccaua

SEQ ID NO: 2159597 - RNA, 19 nt, Artificial Sequence
  Description of Artificial Sequence: Synthetic oligonucleotide
gccgugguccccacagcaa

SEQ ID NO: 2159598 - RNA, 19 nt, Artificial Sequence
  Description of Artificial Sequence: Synthetic oligonucleotide
gcuaagccgccggagguuu

SEQ ID NO: 2159599 - RNA, 19 nt, Artificial Sequence
  Description of Artificial Sequence: Synthetic oligonucleotide
cgucgcagcaaagugcggu

SEQ ID NO: 2159600 - RNA, 19 nt, Artificial Sequence
  Description of Artificial Sequence: Synthetic oligonucleotide
gcuaaccauccaugaucuu

SEQ ID NO: 2159601 - RNA, 19 nt, Artificial Sequence
  Description of Artificial Sequence: Synthetic oligonucleotide
ccccauuccugagguggca

SEQ ID NO: 2159602 - RNA, 19 nt, Artificial Sequence
  Description of Artificial Sequence: Synthetic oligonucleotide
cggccgugguccccacagc

SEQ ID NO: 2159603 - RNA, 19 nt, Artificial Sequence
  Description of Artificial Sequence: Synthetic oligonucleotide
gccaggccaccucgugcua

SEQ ID NO: 2159604 - RNA, 19 nt, Artificial Sequence
  Description of Artificial Sequence: Synthetic oligonucleotide
ccccgccacccuccaugac

SEQ ID NO: 2159605 - RNA, 19 nt, Artificial Sequence
  Description of Artificial Sequence: Synthetic oligonucleotide
cgcguuccuacugccaccu

SEQ ID NO: 2159606 - RNA, 19 nt, Artificial Sequence
  Description of Artificial Sequence: Synthetic oligonucleotide
caccucaggccgggaucgu

SEQ ID NO: 2159607 - RNA, 19 nt, Artificial Sequence
  Description of Artificial Sequence: Synthetic oligonucleotide
ccgcuccuccugcuccgaa

SEQ ID NO: 2159608 - RNA, 19 nt, Artificial Sequence
  Description of Artificial Sequence: Synthetic oligonucleotide
ccccuugccuagucaccau

SEQ ID NO: 2159609 - RNA, 19 nt, Artificial Sequence
  Description of Artificial Sequence: Synthetic oligonucleotide
gcguuccuacugccaccuu

SEQ ID NO: 2159610 - RNA, 19 nt, Artificial Sequence
  Description of Artificial Sequence: Synthetic oligonucleotide
agugcauugaauuugacgg

SEQ ID NO: 2159611 - RNA, 19 nt, Artificial Sequence
  Description of Artificial Sequence: Synthetic oligonucleotide
uuuauuaaaguucugucag

SEQ ID NO: 2159612 - RNA, 19 nt, Artificial Sequence
  Description of Artificial Sequence: Synthetic oligonucleotide
uuuaaauuacuuaauuacc

SEQ ID NO: 2159613 - RNA, 19 nt, Artificial Sequence
  Description of Artificial Sequence: Synthetic oligonucleotide
ucuuuguugacgauggagg

SEQ ID NO: 2159614 - RNA, 19 nt, Artificial Sequence
  Description of Artificial Sequence: Synthetic oligonucleotide
auacauuucaguuuuggag

SEQ ID NO: 2159615 - RNA, 19 nt, Artificial Sequence
  Description of Artificial Sequence: Synthetic oligonucleotide
aguuuuggagacuucagac

SEQ ID NO: 2159616 - RNA, 19 nt, Artificial Sequence
  Description of Artificial Sequence: Synthetic oligonucleotide
uuuuggagacuucagaccc

SEQ ID NO: 2159617 - RNA, 19 nt, Artificial Sequence
  Description of Artificial Sequence: Synthetic oligonucleotide
aauucaugggugacgaagc

SEQ ID NO: 2159618 - RNA, 19 nt, Artificial Sequence
  Description of Artificial Sequence: Synthetic oligonucleotide
ucguggaugacaaagggug

SEQ ID NO: 2159619 - RNA, 19 nt, Artificial Sequence
  Description of Artificial Sequence: Synthetic oligonucleotide
gaugggagcacccagcaag

SEQ ID NO: 2159620 - RNA, 19 nt, Artificial Sequence
  Description of Artificial Sequence: Synthetic oligonucleotide
uguggcacguucaugaggc

SEQ ID NO: 2159621 - RNA, 19 nt, Artificial Sequence
  Description of Artificial Sequence: Synthetic oligonucleotide
uuugacggcaaacucaaac

SEQ ID NO: 2159622 - RNA, 19 nt, Artificial Sequence
  Description of Artificial Sequence: Synthetic oligonucleotide
gaugaaaagcgccagguca

SEQ ID NO: 2159623 - RNA, 19 nt, Artificial Sequence
  Description of Artificial Sequence: Synthetic oligonucleotide
uaccauuuauuaaaguucu

SEQ ID NO: 2159624 - RNA, 19 nt, Artificial Sequence
  Description of Artificial Sequence: Synthetic oligonucleotide
acugccauuggccaccagc

SEQ ID NO: 2159625 - RNA, 19 nt, Artificial Sequence
  Description of Artificial Sequence: Synthetic oligonucleotide
agacuucagacccugagag

SEQ ID NO: 2159626 - RNA, 19 nt, Artificial Sequence
  Description of Artificial Sequence: Synthetic oligonucleotide
aauuacuuaauuaccauuu

SEQ ID NO: 2159627 - RNA, 19 nt, Artificial Sequence
  Description of Artificial Sequence: Synthetic oligonucleotide
acuuaauuaccauuuauua

SEQ ID NO: 2159628 - RNA, 19 nt, Artificial Sequence
  Description of Artificial Sequence: Synthetic oligonucleotide
auagaagacgugcacacug

SEQ ID NO: 2159629 - RNA, 19 nt, Artificial Sequence
  Description of Artificial Sequence: Synthetic oligonucleotide
ugucguggaugacaaaggg

SEQ ID NO: 2159630 - RNA, 19 nt, Artificial Sequence
  Description of Artificial Sequence: Synthetic oligonucleotide
ugcgcaagaauucaugggu

SEQ ID NO: 2159631 - RNA, 19 nt, Artificial Sequence
  Description of Artificial Sequence: Synthetic oligonucleotide
cauuuauuaaaguucuguc

SEQ ID NO: 2159632 - RNA, 19 nt, Artificial Sequence
  Description of Artificial Sequence: Synthetic oligonucleotide
gaauucaugggugacgaag

SEQ ID NO: 2159633 - RNA, 19 nt, Artificial Sequence
  Description of Artificial Sequence: Synthetic oligonucleotide
guucaugaggccuggacgg

SEQ ID NO: 2159634 - RNA, 19 nt, Artificial Sequence
  Description of Artificial Sequence: Synthetic oligonucleotide
acugcgcaagaauucaugg

SEQ ID NO: 2159635 - RNA, 19 nt, Artificial Sequence
  Description of Artificial Sequence: Synthetic oligonucleotide
aaagauggccucgugcacg

SEQ ID NO: 2159636 - RNA, 19 nt, Artificial Sequence
  Description of Artificial Sequence: Synthetic oligonucleotide
aagauggccucgugcacgc

SEQ ID NO: 2159637 - RNA, 19 nt, Artificial Sequence
  Description of Artificial Sequence: Synthetic oligonucleotide
acauuucaguuuuggagac

SEQ ID NO: 2159638 - RNA, 19 nt, Artificial Sequence
  Description of Artificial Sequence: Synthetic oligonucleotide
uacuuaauuaccauuuauu

SEQ ID NO: 2159639 - RNA, 19 nt, Artificial Sequence
  Description of Artificial Sequence: Synthetic oligonucleotide
auauacauuucaguuuugg

SEQ ID NO: 2159640 - RNA, 19 nt, Artificial Sequence
  Description of Artificial Sequence: Synthetic oligonucleotide
ugaauuugacggcaaacuc

SEQ ID NO: 2159641 - RNA, 19 nt, Artificial Sequence
  Description of Artificial Sequence: Synthetic oligonucleotide
uuacuuaauuaccauuuau

SEQ ID NO: 2159642 - RNA, 19 nt, Artificial Sequence
  Description of Artificial Sequence: Synthetic oligonucleotide
uugaauuugacggcaaacu

SEQ ID NO: 2159643 - RNA, 19 nt, Artificial Sequence
  Description of Artificial Sequence: Synthetic oligonucleotide
auucaugggugacgaagcc

SEQ ID NO: 2159644 - RNA, 19 nt, Artificial Sequence
  Description of Artificial Sequence: Synthetic oligonucleotide
gaggagagucaccuggucg

SEQ ID NO: 2159645 - RNA, 19 nt, Artificial Sequence
  Description of Artificial Sequence: Synthetic oligonucleotide
aaagcgccaggucacuguc

SEQ ID NO: 2159646 - RNA, 19 nt, Artificial Sequence
  Description of Artificial Sequence: Synthetic oligonucleotide
uugacggcaaacucaaacu

SEQ ID NO: 2159647 - RNA, 19 nt, Artificial Sequence
  Description of Artificial Sequence: Synthetic oligonucleotide
agcgauagaagacgugcac

SEQ ID NO: 2159648 - RNA, 19 nt, Artificial Sequence
  Description of Artificial Sequence: Synthetic oligonucleotide
accgucuccaccguggugc

SEQ ID NO: 2159649 - RNA, 19 nt, Artificial Sequence
  Description of Artificial Sequence: Synthetic oligonucleotide
aguuccagugcauugaauu

SEQ ID NO: 2159650 - RNA, 19 nt, Artificial Sequence
  Description of Artificial Sequence: Synthetic oligonucleotide
ucugucagucuguauacac

SEQ ID NO: 2159651 - RNA, 19 nt, Artificial Sequence
  Description of Artificial Sequence: Synthetic oligonucleotide
aauuugacggcaaacucaa

SEQ ID NO: 2159652 - RNA, 19 nt, Artificial Sequence
  Description of Artificial Sequence: Synthetic oligonucleotide
aaaagcgccaggucacugu

SEQ ID NO: 2159653 - RNA, 19 nt, Artificial Sequence
  Description of Artificial Sequence: Synthetic oligonucleotide
aagguuucgcucucugucu

SEQ ID NO: 2159654 - RNA, 19 nt, Artificial Sequence
  Description of Artificial Sequence: Synthetic oligonucleotide
gaugcucuuggcgaacucg

SEQ ID NO: 2159655 - RNA, 19 nt, Artificial Sequence
  Description of Artificial Sequence: Synthetic oligonucleotide
uuggggaugcucuuggcga

SEQ ID NO: 2159656 - RNA, 19 nt, Artificial Sequence
  Description of Artificial Sequence: Synthetic oligonucleotide
agagguacgggcugucagg

SEQ ID NO: 2159657 - RNA, 19 nt, Artificial Sequence
  Description of Artificial Sequence: Synthetic oligonucleotide
gacgauggaggccagcaug

SEQ ID NO: 2159658 - RNA, 19 nt, Artificial Sequence
  Description of Artificial Sequence: Synthetic oligonucleotide
uuguugacgauggaggcca

SEQ ID NO: 2159659 - RNA, 19 nt, Artificial Sequence
  Description of Artificial Sequence: Synthetic oligonucleotide
ucagugaccagcugccuca

SEQ ID NO: 2159660 - RNA, 19 nt, Artificial Sequence
  Description of Artificial Sequence: Synthetic oligonucleotide
accuguggcacguucauga

SEQ ID NO: 2159661 - RNA, 19 nt, Artificial Sequence
  Description of Artificial Sequence: Synthetic oligonucleotide
ucuaccuguggcacguuca

SEQ ID NO: 2159662 - RNA, 19 nt, Artificial Sequence
  Description of Artificial Sequence: Synthetic oligonucleotide
acguucaugaggccuggac

SEQ ID NO: 2159663 - RNA, 19 nt, Artificial Sequence
  Description of Artificial Sequence: Synthetic oligonucleotide
caagaauucaugggugacg

SEQ ID NO: 2159664 - RNA, 19 nt, Artificial Sequence
  Description of Artificial Sequence: Synthetic oligonucleotide
augaaaagcgccaggucac

SEQ ID NO: 2159665 - RNA, 19 nt, Artificial Sequence
  Description of Artificial Sequence: Synthetic oligonucleotide
caagguuucgcucucuguc

SEQ ID NO: 2159666 - RNA, 19 nt, Artificial Sequence
  Description of Artificial Sequence: Synthetic oligonucleotide
ugaccagccaggcgaaaag

SEQ ID NO: 2159667 - RNA, 19 nt, Artificial Sequence
  Description of Artificial Sequence: Synthetic oligonucleotide
gauggccucgugcacgccg

SEQ ID NO: 2159668 - RNA, 19 nt, Artificial Sequence
  Description of Artificial Sequence: Synthetic oligonucleotide
aaacuugggcucaaugaug

SEQ ID NO: 2159669 - RNA, 19 nt, Artificial Sequence
  Description of Artificial Sequence: Synthetic oligonucleotide
gacuucagacccugagagg

SEQ ID NO: 2159670 - RNA, 19 nt, Artificial Sequence
  Description of Artificial Sequence: Synthetic oligonucleotide
cuggcagcgauagaagacg

SEQ ID NO: 2159671 - RNA, 19 nt, Artificial Sequence
  Description of Artificial Sequence: Synthetic oligonucleotide
ucgaugucguggaugacaa

SEQ ID NO: 2159672 - RNA, 19 nt, Artificial Sequence
  Description of Artificial Sequence: Synthetic oligonucleotide
aaugauggcugcgaugaaa

SEQ ID NO: 2159673 - RNA, 19 nt, Artificial Sequence
  Description of Artificial Sequence: Synthetic oligonucleotide
uagaagacgugcacacuga

SEQ ID NO: 2159674 - RNA, 19 nt, Artificial Sequence
  Description of Artificial Sequence: Synthetic oligonucleotide
cugcgcaagaauucauggg

SEQ ID NO: 2159675 - RNA, 19 nt, Artificial Sequence
  Description of Artificial Sequence: Synthetic oligonucleotide
cugucgucgaguuccagug

SEQ ID NO: 2159676 - RNA, 19 nt, Artificial Sequence
  Description of Artificial Sequence: Synthetic oligonucleotide
gucuuuguugacgauggag

SEQ ID NO: 2159677 - RNA, 19 nt, Artificial Sequence
  Description of Artificial Sequence: Synthetic oligonucleotide
acugaucuccuuguagggg

SEQ ID NO: 2159678 - RNA, 19 nt, Artificial Sequence
  Description of Artificial Sequence: Synthetic oligonucleotide
cacugaucuccuuguaggg

SEQ ID NO: 2159679 - RNA, 19 nt, Artificial Sequence
  Description of Artificial Sequence: Synthetic oligonucleotide
agugucucgaugucgugga

SEQ ID NO: 2159680 - RNA, 19 nt, Artificial Sequence
  Description of Artificial Sequence: Synthetic oligonucleotide
ugcacgccguacuugagga

SEQ ID NO: 2159681 - RNA, 19 nt, Artificial Sequence
  Description of Artificial Sequence: Synthetic oligonucleotide
ucagucuguauacacuauu

SEQ ID NO: 2159682 - RNA, 19 nt, Artificial Sequence
  Description of Artificial Sequence: Synthetic oligonucleotide
acuggcagcgauagaagac

SEQ ID NO: 2159683 - RNA, 19 nt, Artificial Sequence
  Description of Artificial Sequence: Synthetic oligonucleotide
ugccacagugucucgaugu

SEQ ID NO: 2159684 - RNA, 19 nt, Artificial Sequence
  Description of Artificial Sequence: Synthetic oligonucleotide
cacuuguagcugcagcugg

SEQ ID NO: 2159685 - RNA, 19 nt, Artificial Sequence
  Description of Artificial Sequence: Synthetic oligonucleotide
ugacggcaaacucaaacuu

SEQ ID NO: 2159686 - RNA, 19 nt, Artificial Sequence
  Description of Artificial Sequence: Synthetic oligonucleotide
ucuuggcgaacucggugag

SEQ ID NO: 2159687 - RNA, 19 nt, Artificial Sequence
  Description of Artificial Sequence: Synthetic oligonucleotide
guggaugacaaagggugcg

SEQ ID NO: 2159688 - RNA, 19 nt, Artificial Sequence
  Description of Artificial Sequence: Synthetic oligonucleotide
cacacagaaugauggcugc

SEQ ID NO: 2159689 - RNA, 19 nt, Artificial Sequence
  Description of Artificial Sequence: Synthetic oligonucleotide
auacacuauuuauauuaaa

SEQ ID NO: 2159690 - RNA, 19 nt, Artificial Sequence
  Description of Artificial Sequence: Synthetic oligonucleotide
ugggugacgaagccacugc

SEQ ID NO: 2159691 - RNA, 19 nt, Artificial Sequence
  Description of Artificial Sequence: Synthetic oligonucleotide
uuggcgaacucggugagcu

SEQ ID NO: 2159692 - RNA, 19 nt, Artificial Sequence
  Description of Artificial Sequence: Synthetic oligonucleotide
accguggugcacuggcagc

SEQ ID NO: 2159693 - RNA, 19 nt, Artificial Sequence
  Description of Artificial Sequence: Synthetic oligonucleotide
guugacuugcagguggacc

SEQ ID NO: 2159694 - RNA, 19 nt, Artificial Sequence
  Description of Artificial Sequence: Synthetic oligonucleotide
acugucgucgaguuccagu

SEQ ID NO: 2159695 - RNA, 19 nt, Artificial Sequence
  Description of Artificial Sequence: Synthetic oligonucleotide
agucuguauacacuauuua

SEQ ID NO: 2159696 - RNA, 19 nt, Artificial Sequence
  Description of Artificial Sequence: Synthetic oligonucleotide
gacgugcacacugaucucc

SEQ ID NO: 2159697 - RNA, 19 nt, Artificial Sequence
  Description of Artificial Sequence: Synthetic oligonucleotide
uuuggagacuucagacccu

SEQ ID NO: 2159698 - RNA, 19 nt, Artificial Sequence
  Description of Artificial Sequence: Synthetic oligonucleotide
agguccgccaucuucugca

SEQ ID NO: 2159699 - RNA, 19 nt, Artificial Sequence
  Description of Artificial Sequence: Synthetic oligonucleotide
ucggugagcucgcgcaccg

SEQ ID NO: 2159700 - RNA, 19 nt, Artificial Sequence
  Description of Artificial Sequence: Synthetic oligonucleotide
gucucgaugucguggauga

SEQ ID NO: 2159701 - RNA, 19 nt, Artificial Sequence
  Description of Artificial Sequence: Synthetic oligonucleotide
augucguggaugacaaagg

SEQ ID NO: 2159702 - RNA, 19 nt, Artificial Sequence
  Description of Artificial Sequence: Synthetic oligonucleotide
gucgaguuccagugcauug

SEQ ID NO: 2159703 - RNA, 19 nt, Artificial Sequence
  Description of Artificial Sequence: Synthetic oligonucleotide
cuugcggagacugcgcaag

SEQ ID NO: 2159704 - RNA, 19 nt, Artificial Sequence
  Description of Artificial Sequence: Synthetic oligonucleotide
uucagacccugagaggagc

SEQ ID NO: 2159705 - RNA, 19 nt, Artificial Sequence
  Description of Artificial Sequence: Synthetic oligonucleotide
cuguggcacguucaugagg

SEQ ID NO: 2159706 - RNA, 19 nt, Artificial Sequence
  Description of Artificial Sequence: Synthetic oligonucleotide
ucgugcacgccguacuuga

SEQ ID NO: 2159707 - RNA, 19 nt, Artificial Sequence
  Description of Artificial Sequence: Synthetic oligonucleotide
uucaugggugacgaagcca

SEQ ID NO: 2159708 - RNA, 19 nt, Artificial Sequence
  Description of Artificial Sequence: Synthetic oligonucleotide
gugcacgccguacuugagg

SEQ ID NO: 2159709 - RNA, 19 nt, Artificial Sequence
  Description of Artificial Sequence: Synthetic oligonucleotide
gacugcgcaagaauucaug

SEQ ID NO: 2159710 - RNA, 19 nt, Artificial Sequence
  Description of Artificial Sequence: Synthetic oligonucleotide
cagaaugauggcugcgaug

SEQ ID NO: 2159711 - RNA, 19 nt, Artificial Sequence
  Description of Artificial Sequence: Synthetic oligonucleotide
agggcuugcggagacugcg

SEQ ID NO: 2159712 - RNA, 19 nt, Artificial Sequence
  Description of Artificial Sequence: Synthetic oligonucleotide
gaaguuggggaugcucuug

SEQ ID NO: 2159713 - RNA, 19 nt, Artificial Sequence
  Description of Artificial Sequence: Synthetic oligonucleotide
cuccacacagaaugauggc

SEQ ID NO: 2159714 - RNA, 19 nt, Artificial Sequence
  Description of Artificial Sequence: Synthetic oligonucleotide
ccgucuuuguugacgaugg

SEQ ID NO: 2159715 - RNA, 19 nt, Artificial Sequence
  Description of Artificial Sequence: Synthetic oligonucleotide
ggcaaagauggccucgugc

SEQ ID NO: 2159716 - RNA, 19 nt, Artificial Sequence
  Description of Artificial Sequence: Synthetic oligonucleotide
ugucgucgaguuccagugc

SEQ ID NO: 2159717 - RNA, 19 nt, Artificial Sequence
  Description of Artificial Sequence: Synthetic oligonucleotide
gugcacacugaucuccuug

SEQ ID NO: 2159718 - RNA, 19 nt, Artificial Sequence
  Description of Artificial Sequence: Synthetic oligonucleotide
cuggacggucuccacacag

SEQ ID NO: 2159719 - RNA, 19 nt, Artificial Sequence
  Description of Artificial Sequence: Synthetic oligonucleotide
aggccaagcuucuuggaaa

SEQ ID NO: 2159720 - RNA, 19 nt, Artificial Sequence
  Description of Artificial Sequence: Synthetic oligonucleotide
augggagcacccagcaagc

SEQ ID NO: 2159721 - RNA, 19 nt, Artificial Sequence
  Description of Artificial Sequence: Synthetic oligonucleotide
agggaugggagcacccagc

SEQ ID NO: 2159722 - RNA, 19 nt, Artificial Sequence
  Description of Artificial Sequence: Synthetic oligonucleotide
gguacgggcugucagggug

SEQ ID NO: 2159723 - RNA, 19 nt, Artificial Sequence
  Description of Artificial Sequence: Synthetic oligonucleotide
gcagcgauagaagacgugc

SEQ ID NO: 2159724 - RNA, 19 nt, Artificial Sequence
  Description of Artificial Sequence: Synthetic oligonucleotide
gaagcugcgcuccuagcaa

SEQ ID NO: 2159725 - RNA, 19 nt, Artificial Sequence
  Description of Artificial Sequence: Synthetic oligonucleotide
uggacggucuccacacaga

SEQ ID NO: 2159726 - RNA, 19 nt, Artificial Sequence
  Description of Artificial Sequence: Synthetic oligonucleotide
cucuuggcgaacucgguga

SEQ ID NO: 2159727 - RNA, 19 nt, Artificial Sequence
  Description of Artificial Sequence: Synthetic oligonucleotide
agcaagguuucgcucucug

SEQ ID NO: 2159728 - RNA, 19 nt, Artificial Sequence
  Description of Artificial Sequence: Synthetic oligonucleotide
agucaccuggucguugagg

SEQ ID NO: 2159729 - RNA, 19 nt, Artificial Sequence
  Description of Artificial Sequence: Synthetic oligonucleotide
gagacugcgcaagaauuca

SEQ ID NO: 2159730 - RNA, 19 nt, Artificial Sequence
  Description of Artificial Sequence: Synthetic oligonucleotide
aagggcuugcggagacugc

SEQ ID NO: 2159731 - RNA, 19 nt, Artificial Sequence
  Description of Artificial Sequence: Synthetic oligonucleotide
ugguugacuugcaggugga

SEQ ID NO: 2159732 - RNA, 19 nt, Artificial Sequence
  Description of Artificial Sequence: Synthetic oligonucleotide
cuucagacccugagaggag

SEQ ID NO: 2159733 - RNA, 19 nt, Artificial Sequence
  Description of Artificial Sequence: Synthetic oligonucleotide
acacagaaugauggcugcg

SEQ ID NO: 2159734 - RNA, 19 nt, Artificial Sequence
  Description of Artificial Sequence: Synthetic oligonucleotide
caguuuuggagacuucaga

SEQ ID NO: 2159735 - RNA, 19 nt, Artificial Sequence
  Description of Artificial Sequence: Synthetic oligonucleotide
caaagauggccucgugcac

SEQ ID NO: 2159736 - RNA, 19 nt, Artificial Sequence
  Description of Artificial Sequence: Synthetic oligonucleotide
uucgcucucugucuucuuu

SEQ ID NO: 2159737 - RNA, 19 nt, Artificial Sequence
  Description of Artificial Sequence: Synthetic oligonucleotide
ggcgaacucggugagcucg

SEQ ID NO: 2159738 - RNA, 19 nt, Artificial Sequence
  Description of Artificial Sequence: Synthetic oligonucleotide
agcccgucuuuguugacga

SEQ ID NO: 2159739 - RNA, 19 nt, Artificial Sequence
  Description of Artificial Sequence: Synthetic oligonucleotide
agcgccaggucacugucgu

SEQ ID NO: 2159740 - RNA, 19 nt, Artificial Sequence
  Description of Artificial Sequence: Synthetic oligonucleotide
aggcgaaaagagaaggcca

SEQ ID NO: 2159741 - RNA, 19 nt, Artificial Sequence
  Description of Artificial Sequence: Synthetic oligonucleotide
agaagacgugcacacugau

SEQ ID NO: 2159742 - RNA, 19 nt, Artificial Sequence
  Description of Artificial Sequence: Synthetic oligonucleotide
cagccaggcgaaaagagaa

SEQ ID NO: 2159743 - RNA, 19 nt, Artificial Sequence
  Description of Artificial Sequence: Synthetic oligonucleotide
ggcgaaaagagaaggccag

SEQ ID NO: 2159744 - RNA, 19 nt, Artificial Sequence
  Description of Artificial Sequence: Synthetic oligonucleotide
gaaaagcgccaggucacug

SEQ ID NO: 2159745 - RNA, 19 nt, Artificial Sequence
  Description of Artificial Sequence: Synthetic oligonucleotide
gaacucggugagcucgcgc

SEQ ID NO: 2159746 - RNA, 19 nt, Artificial Sequence
  Description of Artificial Sequence: Synthetic oligonucleotide
gucgucgaguuccagugca

SEQ ID NO: 2159747 - RNA, 19 nt, Artificial Sequence
  Description of Artificial Sequence: Synthetic oligonucleotide
uggcagcgauagaagacgu

SEQ ID NO: 2159748 - RNA, 19 nt, Artificial Sequence
  Description of Artificial Sequence: Synthetic oligonucleotide
ggugcacuggcagcgauag

SEQ ID NO: 2159749 - RNA, 19 nt, Artificial Sequence
  Description of Artificial Sequence: Synthetic oligonucleotide
cguucaugaggccuggacg

SEQ ID NO: 2159750 - RNA, 19 nt, Artificial Sequence
  Description of Artificial Sequence: Synthetic oligonucleotide
aagcugcgcuccuagcaaa

SEQ ID NO: 2159751 - RNA, 19 nt, Artificial Sequence
  Description of Artificial Sequence: Synthetic oligonucleotide
aaguucugucagucuguau

SEQ ID NO: 2159752 - RNA, 19 nt, Artificial Sequence
  Description of Artificial Sequence: Synthetic oligonucleotide
cucagugaccagcugccuc

SEQ ID NO: 2159753 - RNA, 19 nt, Artificial Sequence
  Description of Artificial Sequence: Synthetic oligonucleotide
gaagacgugcacacugauc

SEQ ID NO: 2159754 - RNA, 19 nt, Artificial Sequence
  Description of Artificial Sequence: Synthetic oligonucleotide
cugaaguuggggaugcucu

SEQ ID NO: 2159755 - RNA, 19 nt, Artificial Sequence
  Description of Artificial Sequence: Synthetic oligonucleotide
accagccaggcgaaaagag

SEQ ID NO: 2159756 - RNA, 19 nt, Artificial Sequence
  Description of Artificial Sequence: Synthetic oligonucleotide
ggccaagcuucuuggaaag

SEQ ID NO: 2159757 - RNA, 19 nt, Artificial Sequence
  Description of Artificial Sequence: Synthetic oligonucleotide
augggugacgaagccacug

SEQ ID NO: 2159758 - RNA, 19 nt, Artificial Sequence
  Description of Artificial Sequence: Synthetic oligonucleotide
caccguggugcacuggcag

SEQ ID NO: 2159759 - RNA, 19 nt, Artificial Sequence
  Description of Artificial Sequence: Synthetic oligonucleotide
ugaaaagcgccaggucacu

SEQ ID NO: 2159760 - RNA, 19 nt, Artificial Sequence
  Description of Artificial Sequence: Synthetic oligonucleotide
agagcccgcagaauggugu

SEQ ID NO: 2159761 - RNA, 19 nt, Artificial Sequence
  Description of Artificial Sequence: Synthetic oligonucleotide
uggcacguucaugaggccu

SEQ ID NO: 2159762 - RNA, 19 nt, Artificial Sequence
  Description of Artificial Sequence: Synthetic oligonucleotide
cucgaugucguggaugaca

SEQ ID NO: 2159763 - RNA, 19 nt, Artificial Sequence
  Description of Artificial Sequence: Synthetic oligonucleotide
uguugacgauggaggccag

SEQ ID NO: 2159764 - RNA, 19 nt, Artificial Sequence
  Description of Artificial Sequence: Synthetic oligonucleotide
ggaagcugcgcuccuagca

SEQ ID NO: 2159765 - RNA, 19 nt, Artificial Sequence
  Description of Artificial Sequence: Synthetic oligonucleotide
gcacccagcaagcuccagg

SEQ ID NO: 2159766 - RNA, 19 nt, Artificial Sequence
  Description of Artificial Sequence: Synthetic oligonucleotide
ucagggugguugacuugca

SEQ ID NO: 2159767 - RNA, 19 nt, Artificial Sequence
  Description of Artificial Sequence: Synthetic oligonucleotide
cgauagaagacgugcacac

SEQ ID NO: 2159768 - RNA, 19 nt, Artificial Sequence
  Description of Artificial Sequence: Synthetic oligonucleotide
guacgggcugucagggugg

SEQ ID NO: 2159769 - RNA, 19 nt, Artificial Sequence
  Description of Artificial Sequence: Synthetic oligonucleotide
cagcccgucuuuguugacg

SEQ ID NO: 2159770 - RNA, 19 nt, Artificial Sequence
  Description of Artificial Sequence: Synthetic oligonucleotide
ucgcucucugucuucuuua

SEQ ID NO: 2159771 - RNA, 19 nt, Artificial Sequence
  Description of Artificial Sequence: Synthetic oligonucleotide
aucugggcaugcucaguga

SEQ ID NO: 2159772 - RNA, 19 nt, Artificial Sequence
  Description of Artificial Sequence: Synthetic oligonucleotide
uggggaugcucuuggcgaa

SEQ ID NO: 2159773 - RNA, 19 nt, Artificial Sequence
  Description of Artificial Sequence: Synthetic oligonucleotide
cauugaauuugacggcaaa

SEQ ID NO: 2159774 - RNA, 19 nt, Artificial Sequence
  Description of Artificial Sequence: Synthetic oligonucleotide
ccaggcgaaaagagaaggc

SEQ ID NO: 2159775 - RNA, 19 nt, Artificial Sequence
  Description of Artificial Sequence: Synthetic oligonucleotide
cacagaaugauggcugcga

SEQ ID NO: 2159776 - RNA, 19 nt, Artificial Sequence
  Description of Artificial Sequence: Synthetic oligonucleotide
uccgccugccacagugucu

SEQ ID NO: 2159777 - RNA, 19 nt, Artificial Sequence
  Description of Artificial Sequence: Synthetic oligonucleotide
uguccuggauggccucuac

SEQ ID NO: 2159778 - RNA, 19 nt, Artificial Sequence
  Description of Artificial Sequence: Synthetic oligonucleotide
ugcaucaucugggcaugcu

SEQ ID NO: 2159779 - RNA, 19 nt, Artificial Sequence
  Description of Artificial Sequence: Synthetic oligonucleotide
gagucaccuggucguugag

SEQ ID NO: 2159780 - RNA, 19 nt, Artificial Sequence
  Description of Artificial Sequence: Synthetic oligonucleotide
agaauucaugggugacgaa

SEQ ID NO: 2159781 - RNA, 19 nt, Artificial Sequence
  Description of Artificial Sequence: Synthetic oligonucleotide
aggucacugucgucgaguu

SEQ ID NO: 2159782 - RNA, 19 nt, Artificial Sequence
  Description of Artificial Sequence: Synthetic oligonucleotide
cagcgauagaagacgugca

SEQ ID NO: 2159783 - RNA, 19 nt, Artificial Sequence
  Description of Artificial Sequence: Synthetic oligonucleotide
aggcccuucuccgccugcc

SEQ ID NO: 2159784 - RNA, 19 nt, Artificial Sequence
  Description of Artificial Sequence: Synthetic oligonucleotide
cucuaccuguggcacguuc

SEQ ID NO: 2159785 - RNA, 19 nt, Artificial Sequence
  Description of Artificial Sequence: Synthetic oligonucleotide
ucuccgccugccacagugu

SEQ ID NO: 2159786 - RNA, 19 nt, Artificial Sequence
  Description of Artificial Sequence: Synthetic oligonucleotide
uucaugaggccuggacggu

SEQ ID NO: 2159787 - RNA, 19 nt, Artificial Sequence
  Description of Artificial Sequence: Synthetic oligonucleotide
cacagugucucgaugucgu

SEQ ID NO: 2159788 - RNA, 19 nt, Artificial Sequence
  Description of Artificial Sequence: Synthetic oligonucleotide
agguuucgcucucugucuu

SEQ ID NO: 2159789 - RNA, 19 nt, Artificial Sequence
  Description of Artificial Sequence: Synthetic oligonucleotide
ggcugcgaugaaaagcgcc

SEQ ID NO: 2159790 - RNA, 19 nt, Artificial Sequence
  Description of Artificial Sequence: Synthetic oligonucleotide
uggugaccagccaggcgaa

SEQ ID NO: 2159791 - RNA, 19 nt, Artificial Sequence
  Description of Artificial Sequence: Synthetic oligonucleotide
gggcucaaugaugucacug

SEQ ID NO: 2159792 - RNA, 19 nt, Artificial Sequence
  Description of Artificial Sequence: Synthetic oligonucleotide
gauagaagacgugcacacu

SEQ ID NO: 2159793 - RNA, 19 nt, Artificial Sequence
  Description of Artificial Sequence: Synthetic oligonucleotide
ggccacuuguagcugcagc

SEQ ID NO: 2159794 - RNA, 19 nt, Artificial Sequence
  Description of Artificial Sequence: Synthetic oligonucleotide
acuuguagcugcagcugga

SEQ ID NO: 2159795 - RNA, 19 nt, Artificial Sequence
  Description of Artificial Sequence: Synthetic oligonucleotide
cacgccguacuugaggaga

SEQ ID NO: 2159796 - RNA, 19 nt, Artificial Sequence
  Description of Artificial Sequence: Synthetic oligonucleotide
gagcccgcagaaugguguc

SEQ ID NO: 2159797 - RNA, 19 nt, Artificial Sequence
  Description of Artificial Sequence: Synthetic oligonucleotide
ucgucgaguuccagugcau

SEQ ID NO: 2159798 - RNA, 19 nt, Artificial Sequence
  Description of Artificial Sequence: Synthetic oligonucleotide
cagagcccgcagaauggug

SEQ ID NO: 2159799 - RNA, 19 nt, Artificial Sequence
  Description of Artificial Sequence: Synthetic oligonucleotide
uggugcacuggcagcgaua

SEQ ID NO: 2159800 - RNA, 19 nt, Artificial Sequence
  Description of Artificial Sequence: Synthetic oligonucleotide
cguacuugaggagagucac

SEQ ID NO: 2159801 - RNA, 19 nt, Artificial Sequence
  Description of Artificial Sequence: Synthetic oligonucleotide
ugaggccuggacggucucc

SEQ ID NO: 2159802 - RNA, 19 nt, Artificial Sequence
  Description of Artificial Sequence: Synthetic oligonucleotide
ggcacguucaugaggccug

SEQ ID NO: 2159803 - RNA, 19 nt, Artificial Sequence
  Description of Artificial Sequence: Synthetic oligonucleotide
cuuggcgaacucggugagc

SEQ ID NO: 2159804 - RNA, 19 nt, Artificial Sequence
  Description of Artificial Sequence: Synthetic oligonucleotide
guagcugcagcuggaagcu

SEQ ID NO: 2159805 - RNA, 19 nt, Artificial Sequence
  Description of Artificial Sequence: Synthetic oligonucleotide
caggccaagcuucuuggaa

SEQ ID NO: 2159806 - RNA, 19 nt, Artificial Sequence
  Description of Artificial Sequence: Synthetic oligonucleotide
gcgaaaagagaaggccagg

SEQ ID NO: 2159807 - RNA, 19 nt, Artificial Sequence
  Description of Artificial Sequence: Synthetic oligonucleotide
cagguccgccaucuucugc

SEQ ID NO: 2159808 - RNA, 19 nt, Artificial Sequence
  Description of Artificial Sequence: Synthetic oligonucleotide
ugacgaagccacugccauu

SEQ ID NO: 2159809 - RNA, 19 nt, Artificial Sequence
  Description of Artificial Sequence: Synthetic oligonucleotide
ugcggagacugcgcaagaa

SEQ ID NO: 2159810 - RNA, 19 nt, Artificial Sequence
  Description of Artificial Sequence: Synthetic oligonucleotide
ggugcagcaagguuucgcu

SEQ ID NO: 2159811 - RNA, 19 nt, Artificial Sequence
  Description of Artificial Sequence: Synthetic oligonucleotide
ugggcucaaugaugucacu

SEQ ID NO: 2159812 - RNA, 19 nt, Artificial Sequence
  Description of Artificial Sequence: Synthetic oligonucleotide
gugacgaagccacugccau

SEQ ID NO: 2159813 - RNA, 19 nt, Artificial Sequence
  Description of Artificial Sequence: Synthetic oligonucleotide
gguggaccuccagagcccg

SEQ ID NO: 2159814 - RNA, 19 nt, Artificial Sequence
  Description of Artificial Sequence: Synthetic oligonucleotide
gccuggacggucuccacac

SEQ ID NO: 2159815 - RNA, 19 nt, Artificial Sequence
  Description of Artificial Sequence: Synthetic oligonucleotide
gggugguugacuugcaggu

SEQ ID NO: 2159816 - RNA, 19 nt, Artificial Sequence
  Description of Artificial Sequence: Synthetic oligonucleotide
cucgcgcaccgucuccacc

SEQ ID NO: 2159817 - RNA, 19 nt, Artificial Sequence
  Description of Artificial Sequence: Synthetic oligonucleotide
cagucuguauacacuauuu

SEQ ID NO: 2159818 - RNA, 19 nt, Artificial Sequence
  Description of Artificial Sequence: Synthetic oligonucleotide
gagcucgcgcaccgucucc

SEQ ID NO: 2159819 - RNA, 19 nt, Artificial Sequence
  Description of Artificial Sequence: Synthetic oligonucleotide
gaaugauggcugcgaugaa

SEQ ID NO: 2159820 - RNA, 19 nt, Artificial Sequence
  Description of Artificial Sequence: Synthetic oligonucleotide
acgccguacuugaggagag

SEQ ID NO: 2159821 - RNA, 19 nt, Artificial Sequence
  Description of Artificial Sequence: Synthetic oligonucleotide
agcccguucaccagcugcu

SEQ ID NO: 2159822 - RNA, 19 nt, Artificial Sequence
  Description of Artificial Sequence: Synthetic oligonucleotide
gcgauagaagacgugcaca

SEQ ID NO: 2159823 - RNA, 19 nt, Artificial Sequence
  Description of Artificial Sequence: Synthetic oligonucleotide
gcgcaagaauucaugggug

SEQ ID NO: 2159824 - RNA, 19 nt, Artificial Sequence
  Description of Artificial Sequence: Synthetic oligonucleotide
cucgugcacgccguacuug

SEQ ID NO: 2159825 - RNA, 19 nt, Artificial Sequence
  Description of Artificial Sequence: Synthetic oligonucleotide
caagcuccaggccacuugu

SEQ ID NO: 2159826 - RNA, 19 nt, Artificial Sequence
  Description of Artificial Sequence: Synthetic oligonucleotide
gggaugggagcacccagca

SEQ ID NO: 2159827 - RNA, 19 nt, Artificial Sequence
  Description of Artificial Sequence: Synthetic oligonucleotide
agauggccucgugcacgcc

SEQ ID NO: 2159828 - RNA, 19 nt, Artificial Sequence
  Description of Artificial Sequence: Synthetic oligonucleotide
gcagguggaccuccagagc

SEQ ID NO: 2159829 - RNA, 19 nt, Artificial Sequence
  Description of Artificial Sequence: Synthetic oligonucleotide
ggacggucuccacacagaa

SEQ ID NO: 2159830 - RNA, 19 nt, Artificial Sequence
  Description of Artificial Sequence: Synthetic oligonucleotide
guggcacguucaugaggcc

SEQ ID NO: 2159831 - RNA, 19 nt, Artificial Sequence
  Description of Artificial Sequence: Synthetic oligonucleotide
gccucaguacauguccuug

SEQ ID NO: 2159832 - RNA, 19 nt, Artificial Sequence
  Description of Artificial Sequence: Synthetic oligonucleotide
ggugguugacuugcaggug

SEQ ID NO: 2159833 - RNA, 19 nt, Artificial Sequence
  Description of Artificial Sequence: Synthetic oligonucleotide
agguacgggcugucagggu

SEQ ID NO: 2159834 - RNA, 19 nt, Artificial Sequence
  Description of Artificial Sequence: Synthetic oligonucleotide
ggccucuaccuguggcacg

SEQ ID NO: 2159835 - RNA, 19 nt, Artificial Sequence
  Description of Artificial Sequence: Synthetic oligonucleotide
ggugacgaagccacugcca

SEQ ID NO: 2159836 - RNA, 19 nt, Artificial Sequence
  Description of Artificial Sequence: Synthetic oligonucleotide
gucguggaugacaaagggu

SEQ ID NO: 2159837 - RNA, 19 nt, Artificial Sequence
  Description of Artificial Sequence: Synthetic oligonucleotide
accuggucguugaggaaga

SEQ ID NO: 2159838 - RNA, 19 nt, Artificial Sequence
  Description of Artificial Sequence: Synthetic oligonucleotide
ggauggccucuaccugugg

SEQ ID NO: 2159839 - RNA, 19 nt, Artificial Sequence
  Description of Artificial Sequence: Synthetic oligonucleotide
uuucgcucucugucuucuu

SEQ ID NO: 2159840 - RNA, 19 nt, Artificial Sequence
  Description of Artificial Sequence: Synthetic oligonucleotide
acgugcacacugaucuccu

SEQ ID NO: 2159841 - RNA, 19 nt, Artificial Sequence
  Description of Artificial Sequence: Synthetic oligonucleotide
cccgucuuuguugacgaug

SEQ ID NO: 2159842 - RNA, 19 nt, Artificial Sequence
  Description of Artificial Sequence: Synthetic oligonucleotide
agacugcgcaagaauucau

SEQ ID NO: 2159843 - RNA, 19 nt, Artificial Sequence
  Description of Artificial Sequence: Synthetic oligonucleotide
cccucagcaccagaccugg

SEQ ID NO: 2159844 - RNA, 19 nt, Artificial Sequence
  Description of Artificial Sequence: Synthetic oligonucleotide
gguuucgcucucugucuuc

SEQ ID NO: 2159845 - RNA, 19 nt, Artificial Sequence
  Description of Artificial Sequence: Synthetic oligonucleotide
ggggcagcccguucaccag

SEQ ID NO: 2159846 - RNA, 19 nt, Artificial Sequence
  Description of Artificial Sequence: Synthetic oligonucleotide
gccguacuugaggagaguc

SEQ ID NO: 2159847 - RNA, 19 nt, Artificial Sequence
  Description of Artificial Sequence: Synthetic oligonucleotide
ccguggugcacuggcagcg

SEQ ID NO: 2159848 - RNA, 19 nt, Artificial Sequence
  Description of Artificial Sequence: Synthetic oligonucleotide
uggcgaacucggugagcuc

SEQ ID NO: 2159849 - RNA, 19 nt, Artificial Sequence
  Description of Artificial Sequence: Synthetic oligonucleotide
ccgcagaaugguguccugg

SEQ ID NO: 2159850 - RNA, 19 nt, Artificial Sequence
  Description of Artificial Sequence: Synthetic oligonucleotide
ccguacuugaggagaguca

SEQ ID NO: 2159851 - RNA, 19 nt, Artificial Sequence
  Description of Artificial Sequence: Synthetic oligonucleotide
ggcagcgauagaagacgug

SEQ ID NO: 2159852 - RNA, 19 nt, Artificial Sequence
  Description of Artificial Sequence: Synthetic oligonucleotide
cgggcugucagggugguug

SEQ ID NO: 2159853 - RNA, 19 nt, Artificial Sequence
  Description of Artificial Sequence: Synthetic oligonucleotide
cgcaagaauucauggguga

SEQ ID NO: 2159854 - RNA, 19 nt, Artificial Sequence
  Description of Artificial Sequence: Synthetic oligonucleotide
cgaugaaaagcgccagguc

SEQ ID NO: 2159855 - RNA, 19 nt, Artificial Sequence
  Description of Artificial Sequence: Synthetic oligonucleotide
gcacguucaugaggccugg

SEQ ID NO: 2159856 - RNA, 19 nt, Artificial Sequence
  Description of Artificial Sequence: Synthetic oligonucleotide
gcacgccguacuugaggag

SEQ ID NO: 2159857 - RNA, 19 nt, Artificial Sequence
  Description of Artificial Sequence: Synthetic oligonucleotide
auuugacggcaaacucaaa

SEQ ID NO: 2159858 - RNA, 19 nt, Artificial Sequence
  Description of Artificial Sequence: Synthetic oligonucleotide
gcaccagaccugggcaggg

SEQ ID NO: 2159859 - RNA, 19 nt, Artificial Sequence
  Description of Artificial Sequence: Synthetic oligonucleotide
gguugacuugcagguggac

SEQ ID NO: 2159860 - RNA, 19 nt, Artificial Sequence
  Description of Artificial Sequence: Synthetic oligonucleotide
cacugucgucgaguuccag

SEQ ID NO: 2159861 - RNA, 19 nt, Artificial Sequence
  Description of Artificial Sequence: Synthetic oligonucleotide
agcugcgcuccuagcaaaa

SEQ ID NO: 2159862 - RNA, 19 nt, Artificial Sequence
  Description of Artificial Sequence: Synthetic oligonucleotide
cuaccuguggcacguucau

SEQ ID NO: 2159863 - RNA, 19 nt, Artificial Sequence
  Description of Artificial Sequence: Synthetic oligonucleotide
gccaagcuucuuggaaagc

SEQ ID NO: 2159864 - RNA, 19 nt, Artificial Sequence
  Description of Artificial Sequence: Synthetic oligonucleotide
caggucacugucgucgagu

SEQ ID NO: 2159865 - RNA, 19 nt, Artificial Sequence
  Description of Artificial Sequence: Synthetic oligonucleotide
gcauugaauuugacggcaa

SEQ ID NO: 2159866 - RNA, 19 nt, Artificial Sequence
  Description of Artificial Sequence: Synthetic oligonucleotide
gggcaugcucagugaccag

SEQ ID NO: 2159867 - RNA, 19 nt, Artificial Sequence
  Description of Artificial Sequence: Synthetic oligonucleotide
ccgccugccacagugucuc

SEQ ID NO: 2159868 - RNA, 19 nt, Artificial Sequence
  Description of Artificial Sequence: Synthetic oligonucleotide
gcgaacucggugagcucgc

SEQ ID NO: 2159869 - RNA, 19 nt, Artificial Sequence
  Description of Artificial Sequence: Synthetic oligonucleotide
gagcacccagcaagcucca

SEQ ID NO: 2159870 - RNA, 19 nt, Artificial Sequence
  Description of Artificial Sequence: Synthetic oligonucleotide
ccaggucacugucgucgag

SEQ ID NO: 2159871 - RNA, 19 nt, Artificial Sequence
  Description of Artificial Sequence: Synthetic oligonucleotide
caugggugacgaagccacu

SEQ ID NO: 2159872 - RNA, 19 nt, Artificial Sequence
  Description of Artificial Sequence: Synthetic oligonucleotide
gacggucuccacacagaau

SEQ ID NO: 2159873 - RNA, 19 nt, Artificial Sequence
  Description of Artificial Sequence: Synthetic oligonucleotide
ccucaguacauguccuugu

SEQ ID NO: 2159874 - RNA, 19 nt, Artificial Sequence
  Description of Artificial Sequence: Synthetic oligonucleotide
gcggagacugcgcaagaau

SEQ ID NO: 2159875 - RNA, 19 nt, Artificial Sequence
  Description of Artificial Sequence: Synthetic oligonucleotide
gugcacuggcagcgauaga

SEQ ID NO: 2159876 - RNA, 19 nt, Artificial Sequence
  Description of Artificial Sequence: Synthetic oligonucleotide
ggggugcagcaagguuucg

SEQ ID NO: 2159877 - RNA, 19 nt, Artificial Sequence
  Description of Artificial Sequence: Synthetic oligonucleotide
guggugcacuggcagcgau

SEQ ID NO: 2159878 - RNA, 19 nt, Artificial Sequence
  Description of Artificial Sequence: Synthetic oligonucleotide
gcacacugaucuccuugua

SEQ ID NO: 2159879 - RNA, 19 nt, Artificial Sequence
  Description of Artificial Sequence: Synthetic oligonucleotide
ccaggccaagcuucuugga

SEQ ID NO: 2159880 - RNA, 19 nt, Artificial Sequence
  Description of Artificial Sequence: Synthetic oligonucleotide
cgugcacgccguacuugag

SEQ ID NO: 2159881 - RNA, 19 nt, Artificial Sequence
  Description of Artificial Sequence: Synthetic oligonucleotide
cccgcagaaugguguccug

SEQ ID NO: 2159882 - RNA, 19 nt, Artificial Sequence
  Description of Artificial Sequence: Synthetic oligonucleotide
guguccuggauggccucua

SEQ ID NO: 2159883 - RNA, 19 nt, Artificial Sequence
  Description of Artificial Sequence: Synthetic oligonucleotide
caccagaccugggcaggga

SEQ ID NO: 2159884 - RNA, 19 nt, Artificial Sequence
  Description of Artificial Sequence: Synthetic oligonucleotide
gccucuaccuguggcacgu

SEQ ID NO: 2159885 - RNA, 19 nt, Artificial Sequence
  Description of Artificial Sequence: Synthetic oligonucleotide
gcagcccgucuuuguugac

SEQ ID NO: 2159886 - RNA, 19 nt, Artificial Sequence
  Description of Artificial Sequence: Synthetic oligonucleotide
cacguucaugaggccugga

SEQ ID NO: 2159887 - RNA, 19 nt, Artificial Sequence
  Description of Artificial Sequence: Synthetic oligonucleotide
gcucgcgcaccgucuccac

SEQ ID NO: 2159888 - RNA, 19 nt, Artificial Sequence
  Description of Artificial Sequence: Synthetic oligonucleotide
gccugccacagugucucga

SEQ ID NO: 2159889 - RNA, 19 nt, Artificial Sequence
  Description of Artificial Sequence: Synthetic oligonucleotide
ccaccguggugcacuggca

SEQ ID NO: 2159890 - RNA, 19 nt, Artificial Sequence
  Description of Artificial Sequence: Synthetic oligonucleotide
ggccucaguacauguccuu

SEQ ID NO: 2159891 - RNA, 19 nt, Artificial Sequence
  Description of Artificial Sequence: Synthetic oligonucleotide
gcccgcagaaugguguccu

SEQ ID NO: 2159892 - RNA, 19 nt, Artificial Sequence
  Description of Artificial Sequence: Synthetic oligonucleotide
ccuggacggucuccacaca

SEQ ID NO: 2159893 - RNA, 19 nt, Artificial Sequence
  Description of Artificial Sequence: Synthetic oligonucleotide
gcgccaggucacugucguc

SEQ ID NO: 2159894 - RNA, 19 nt, Artificial Sequence
  Description of Artificial Sequence: Synthetic oligonucleotide
ccgucuccaccguggugca

SEQ ID NO: 2159895 - RNA, 19 nt, Artificial Sequence
  Description of Artificial Sequence: Synthetic oligonucleotide
cagcaagguuucgcucucu

SEQ ID NO: 2159896 - RNA, 19 nt, Artificial Sequence
  Description of Artificial Sequence: Synthetic oligonucleotide
cgucuuuguugacgaugga

SEQ ID NO: 2159897 - RNA, 19 nt, Artificial Sequence
  Description of Artificial Sequence: Synthetic oligonucleotide
acgggcugucagggugguu

SEQ ID NO: 2159898 - RNA, 19 nt, Artificial Sequence
  Description of Artificial Sequence: Synthetic oligonucleotide
ggcugcggccucaguacau

SEQ ID NO: 2159899 - RNA, 19 nt, Artificial Sequence
  Description of Artificial Sequence: Synthetic oligonucleotide
cgaugucguggaugacaaa

SEQ ID NO: 2159900 - RNA, 19 nt, Artificial Sequence
  Description of Artificial Sequence: Synthetic oligonucleotide
cguggugcacuggcagcga

SEQ ID NO: 2159901 - RNA, 19 nt, Artificial Sequence
  Description of Artificial Sequence: Synthetic oligonucleotide
ccucgugcacgccguacuu

SEQ ID NO: 2159902 - RNA, 19 nt, Artificial Sequence
  Description of Artificial Sequence: Synthetic oligonucleotide
gcccgucuuuguugacgau

SEQ ID NO: 2159903 - RNA, 19 nt, Artificial Sequence
  Description of Artificial Sequence: Synthetic oligonucleotide
cgucgaguuccagugcauu

SEQ ID NO: 2159904 - RNA, 19 nt, Artificial Sequence
  Description of Artificial Sequence: Synthetic oligonucleotide
gcccguucaccagcugcuu

SEQ ID NO: 2159905 - RNA, 19 nt, Artificial Sequence
  Description of Artificial Sequence: Synthetic oligonucleotide
cgugcacacugaucuccuu

SEQ ID NO: 2159906 - RNA, 19 nt, Artificial Sequence
  Description of Artificial Sequence: Synthetic oligonucleotide
cgccguacuugaggagagu

SEQ ID NO: 2159907 - RNA, 19 nt, Artificial Sequence
  Description of Artificial Sequence: Synthetic oligonucleotide
ccucuaccuguggcacguu

SEQ ID NO: 2159908 - RNA, 19 nt, Artificial Sequence
  Description of Artificial Sequence: Synthetic oligonucleotide
cggugagcucgcgcaccgu

SEQ ID NO: 2159909 - RNA, 19 nt, Artificial Sequence
  Description of Artificial Sequence: Synthetic oligonucleotide
acuagauaaacucagcucu

SEQ ID NO: 2159910 - RNA, 19 nt, Artificial Sequence
  Description of Artificial Sequence: Synthetic oligonucleotide
gagauaaaguuccaggagc

SEQ ID NO: 2159911 - RNA, 19 nt, Artificial Sequence
  Description of Artificial Sequence: Synthetic oligonucleotide
uuuaugucccaguucaaag

SEQ ID NO: 2159912 - RNA, 19 nt, Artificial Sequence
  Description of Artificial Sequence: Synthetic oligonucleotide
uauuguaccguccucugcc

SEQ ID NO: 2159913 - RNA, 19 nt, Artificial Sequence
  Description of Artificial Sequence: Synthetic oligonucleotide
aaauccugacuagauaaac

SEQ ID NO: 2159914 - RNA, 19 nt, Artificial Sequence
  Description of Artificial Sequence: Synthetic oligonucleotide
gauaaacucagcucuggag

SEQ ID NO: 2159915 - RNA, 19 nt, Artificial Sequence
  Description of Artificial Sequence: Synthetic oligonucleotide
ucugccuucuuuauguccc

SEQ ID NO: 2159916 - RNA, 19 nt, Artificial Sequence
  Description of Artificial Sequence: Synthetic oligonucleotide
uucaaagcaacagccaggg

SEQ ID NO: 2159917 - RNA, 19 nt, Artificial Sequence
  Description of Artificial Sequence: Synthetic oligonucleotide
acucuugggaaacccaggc

SEQ ID NO: 2159918 - RNA, 19 nt, Artificial Sequence
  Description of Artificial Sequence: Synthetic oligonucleotide
gacuccaugguuuggcucg

SEQ ID NO: 2159919 - RNA, 19 nt, Artificial Sequence
  Description of Artificial Sequence: Synthetic oligonucleotide
uuggagggcagacagagga

SEQ ID NO: 2159920 - RNA, 19 nt, Artificial Sequence
  Description of Artificial Sequence: Synthetic oligonucleotide
ucugcauuugcuguaggcg

SEQ ID NO: 2159921 - RNA, 19 nt, Artificial Sequence
  Description of Artificial Sequence: Synthetic oligonucleotide
acaagcuuugcuccgcagc

SEQ ID NO: 2159922 - RNA, 19 nt, Artificial Sequence
  Description of Artificial Sequence: Synthetic oligonucleotide
gaugacgcuggacaggucc

SEQ ID NO: 2159923 - RNA, 19 nt, Artificial Sequence
  Description of Artificial Sequence: Synthetic oligonucleotide
uccgaauuguuguaugucc

SEQ ID NO: 2159924 - RNA, 19 nt, Artificial Sequence
  Description of Artificial Sequence: Synthetic oligonucleotide
uguuguauguccauuucuc

SEQ ID NO: 2159925 - RNA, 19 nt, Artificial Sequence
  Description of Artificial Sequence: Synthetic oligonucleotide
uaaggauucggcucgucag

SEQ ID NO: 2159926 - RNA, 19 nt, Artificial Sequence
  Description of Artificial Sequence: Synthetic oligonucleotide
aauuguuguauguccauuu

SEQ ID NO: 2159927 - RNA, 19 nt, Artificial Sequence
  Description of Artificial Sequence: Synthetic oligonucleotide
guccauuucucauugcagg

SEQ ID NO: 2159928 - RNA, 19 nt, Artificial Sequence
  Description of Artificial Sequence: Synthetic oligonucleotide
uuuggacucuuccugguug

SEQ ID NO: 2159929 - RNA, 19 nt, Artificial Sequence
  Description of Artificial Sequence: Synthetic oligonucleotide
gaaggcuucucccucagug

SEQ ID NO: 2159930 - RNA, 19 nt, Artificial Sequence
  Description of Artificial Sequence: Synthetic oligonucleotide
caugggaugucgaugagug

SEQ ID NO: 2159931 - RNA, 19 nt, Artificial Sequence
  Description of Artificial Sequence: Synthetic oligonucleotide
auuguuguauguccauuuc

SEQ ID NO: 2159932 - RNA, 19 nt, Artificial Sequence
  Description of Artificial Sequence: Synthetic oligonucleotide
cuccauuucaccccuaccc

SEQ ID NO: 2159933 - RNA, 19 nt, Artificial Sequence
  Description of Artificial Sequence: Synthetic oligonucleotide
agggccacaaacuuggugu

SEQ ID NO: 2159934 - RNA, 19 nt, Artificial Sequence
  Description of Artificial Sequence: Synthetic oligonucleotide
accaacuccaaauccugac

SEQ ID NO: 2159935 - RNA, 19 nt, Artificial Sequence
  Description of Artificial Sequence: Synthetic oligonucleotide
uguuggagggcagacagag

SEQ ID NO: 2159936 - RNA, 19 nt, Artificial Sequence
  Description of Artificial Sequence: Synthetic oligonucleotide
aacuccaaauccugacuag

SEQ ID NO: 2159937 - RNA, 19 nt, Artificial Sequence
  Description of Artificial Sequence: Synthetic oligonucleotide
gucgaugagugcuuggagg

SEQ ID NO: 2159938 - RNA, 19 nt, Artificial Sequence
  Description of Artificial Sequence: Synthetic oligonucleotide
agcagacacggcuugagag

SEQ ID NO: 2159939 - RNA, 19 nt, Artificial Sequence
  Description of Artificial Sequence: Synthetic oligonucleotide
ucgucguccacuauuguac

SEQ ID NO: 2159940 - RNA, 19 nt, Artificial Sequence
  Description of Artificial Sequence: Synthetic oligonucleotide
uuugggguccuccuuggag

SEQ ID NO: 2159941 - RNA, 19 nt, Artificial Sequence
  Description of Artificial Sequence: Synthetic oligonucleotide
gaggaaguagucgucgucg

SEQ ID NO: 2159942 - RNA, 19 nt, Artificial Sequence
  Description of Artificial Sequence: Synthetic oligonucleotide
ugugguaaggauucggcuc

SEQ ID NO: 2159943 - RNA, 19 nt, Artificial Sequence
  Description of Artificial Sequence: Synthetic oligonucleotide
gaaguagucgucgucgucc

SEQ ID NO: 2159944 - RNA, 19 nt, Artificial Sequence
  Description of Artificial Sequence: Synthetic oligonucleotide
uuugggacucugcuguucc

SEQ ID NO: 2159945 - RNA, 19 nt, Artificial Sequence
  Description of Artificial Sequence: Synthetic oligonucleotide
aauuaccugagugaacgca

SEQ ID NO: 2159946 - RNA, 19 nt, Artificial Sequence
  Description of Artificial Sequence: Synthetic oligonucleotide
gaacaugggaugucgauga

SEQ ID NO: 2159947 - RNA, 19 nt, Artificial Sequence
  Description of Artificial Sequence: Synthetic oligonucleotide
uccacuauuguaccguccu

SEQ ID NO: 2159948 - RNA, 19 nt, Artificial Sequence
  Description of Artificial Sequence: Synthetic oligonucleotide
uccauuucaccccuacccc

SEQ ID NO: 2159949 - RNA, 19 nt, Artificial Sequence
  Description of Artificial Sequence: Synthetic oligonucleotide
aauggccaggauuucacaa

SEQ ID NO: 2159950 - RNA, 19 nt, Artificial Sequence
  Description of Artificial Sequence: Synthetic oligonucleotide
agugugguaaggauucggc

SEQ ID NO: 2159951 - RNA, 19 nt, Artificial Sequence
  Description of Artificial Sequence: Synthetic oligonucleotide
agacagaggaaguagucgu

SEQ ID NO: 2159952 - RNA, 19 nt, Artificial Sequence
  Description of Artificial Sequence: Synthetic oligonucleotide
aaguucccgagccagcucu

SEQ ID NO: 2159953 - RNA, 19 nt, Artificial Sequence
  Description of Artificial Sequence: Synthetic oligonucleotide
uccauuucucauugcaggc

SEQ ID NO: 2159954 - RNA, 19 nt, Artificial Sequence
  Description of Artificial Sequence: Synthetic oligonucleotide
aguggcacagcuuuggcaa

SEQ ID NO: 2159955 - RNA, 19 nt, Artificial Sequence
  Description of Artificial Sequence: Synthetic oligonucleotide
uagauaaacucagcucugg

SEQ ID NO: 2159956 - RNA, 19 nt, Artificial Sequence
  Description of Artificial Sequence: Synthetic oligonucleotide
uuugcugaugcccguguca

SEQ ID NO: 2159957 - RNA, 19 nt, Artificial Sequence
  Description of Artificial Sequence: Synthetic oligonucleotide
cugcauuugcuguaggcgc

SEQ ID NO: 2159958 - RNA, 19 nt, Artificial Sequence
  Description of Artificial Sequence: Synthetic oligonucleotide
ugaacaugggaugucgaug

SEQ ID NO: 2159959 - RNA, 19 nt, Artificial Sequence
  Description of Artificial Sequence: Synthetic oligonucleotide
aauccugacuagauaaacu

SEQ ID NO: 2159960 - RNA, 19 nt, Artificial Sequence
  Description of Artificial Sequence: Synthetic oligonucleotide
gauucggcucgucagugcc

SEQ ID NO: 2159961 - RNA, 19 nt, Artificial Sequence
  Description of Artificial Sequence: Synthetic oligonucleotide
ucgaugagugcuuggaggu

SEQ ID NO: 2159962 - RNA, 19 nt, Artificial Sequence
  Description of Artificial Sequence: Synthetic oligonucleotide
agguccucuucugacagcc

SEQ ID NO: 2159963 - RNA, 19 nt, Artificial Sequence
  Description of Artificial Sequence: Synthetic oligonucleotide
aaaguucccgagccagcuc

SEQ ID NO: 2159964 - RNA, 19 nt, Artificial Sequence
  Description of Artificial Sequence: Synthetic oligonucleotide
guauguccauuucucauug

SEQ ID NO: 2159965 - RNA, 19 nt, Artificial Sequence
  Description of Artificial Sequence: Synthetic oligonucleotide
auuugcuguaggcgcaggg

SEQ ID NO: 2159966 - RNA, 19 nt, Artificial Sequence
  Description of Artificial Sequence: Synthetic oligonucleotide
ugucuggccacguuccucc

SEQ ID NO: 2159967 - RNA, 19 nt, Artificial Sequence
  Description of Artificial Sequence: Synthetic oligonucleotide
ggagauaaaguuccaggag

SEQ ID NO: 2159968 - RNA, 19 nt, Artificial Sequence
  Description of Artificial Sequence: Synthetic oligonucleotide
uuaccugagugaacgcaag

SEQ ID NO: 2159969 - RNA, 19 nt, Artificial Sequence
  Description of Artificial Sequence: Synthetic oligonucleotide
ugucgaugagugcuuggag

SEQ ID NO: 2159970 - RNA, 19 nt, Artificial Sequence
  Description of Artificial Sequence: Synthetic oligonucleotide
gaugagugcuuggaggucc

SEQ ID NO: 2159971 - RNA, 19 nt, Artificial Sequence
  Description of Artificial Sequence: Synthetic oligonucleotide
ugucccaguucaaagcaac

SEQ ID NO: 2159972 - RNA, 19 nt, Artificial Sequence
  Description of Artificial Sequence: Synthetic oligonucleotide
ugagugaacgcaagcucug

SEQ ID NO: 2159973 - RNA, 19 nt, Artificial Sequence
  Description of Artificial Sequence: Synthetic oligonucleotide
agaggaaguagucgucguc

SEQ ID NO: 2159974 - RNA, 19 nt, Artificial Sequence
  Description of Artificial Sequence: Synthetic oligonucleotide
uuggacaagaugucgcccu

SEQ ID NO: 2159975 - RNA, 19 nt, Artificial Sequence
  Description of Artificial Sequence: Synthetic oligonucleotide
uggccaggauuucacaagc

SEQ ID NO: 2159976 - RNA, 19 nt, Artificial Sequence
  Description of Artificial Sequence: Synthetic oligonucleotide
acagaggaaguagucgucg

SEQ ID NO: 2159977 - RNA, 19 nt, Artificial Sequence
  Description of Artificial Sequence: Synthetic oligonucleotide
aaggauucggcucgucagu

SEQ ID NO: 2159978 - RNA, 19 nt, Artificial Sequence
  Description of Artificial Sequence: Synthetic oligonucleotide
aagaugucgcccuccuucu

SEQ ID NO: 2159979 - RNA, 19 nt, Artificial Sequence
  Description of Artificial Sequence: Synthetic oligonucleotide
guucaaagcaacagccagg

SEQ ID NO: 2159980 - RNA, 19 nt, Artificial Sequence
  Description of Artificial Sequence: Synthetic oligonucleotide
ugguuuggcucguuuuggg

SEQ ID NO: 2159981 - RNA, 19 nt, Artificial Sequence
  Description of Artificial Sequence: Synthetic oligonucleotide
gaugucgaugagugcuugg

SEQ ID NO: 2159982 - RNA, 19 nt, Artificial Sequence
  Description of Artificial Sequence: Synthetic oligonucleotide
guuuggcucguuuugggac

SEQ ID NO: 2159983 - RNA, 19 nt, Artificial Sequence
  Description of Artificial Sequence: Synthetic oligonucleotide
acuauuguaccguccucug

SEQ ID NO: 2159984 - RNA, 19 nt, Artificial Sequence
  Description of Artificial Sequence: Synthetic oligonucleotide
cagacagaggaaguagucg

SEQ ID NO: 2159985 - RNA, 19 nt, Artificial Sequence
  Description of Artificial Sequence: Synthetic oligonucleotide
caugguuuggcucguuuug

SEQ ID NO: 2159986 - RNA, 19 nt, Artificial Sequence
  Description of Artificial Sequence: Synthetic oligonucleotide
ugcauuugcuguaggcgca

SEQ ID NO: 2159987 - RNA, 19 nt, Artificial Sequence
  Description of Artificial Sequence: Synthetic oligonucleotide
aaggcccggagauaaaguu

SEQ ID NO: 2159988 - RNA, 19 nt, Artificial Sequence
  Description of Artificial Sequence: Synthetic oligonucleotide
cuggcuccccgcaacagcg

SEQ ID NO: 2159989 - RNA, 19 nt, Artificial Sequence
  Description of Artificial Sequence: Synthetic oligonucleotide
agcuuuggcaaaguucccg

SEQ ID NO: 2159990 - RNA, 19 nt, Artificial Sequence
  Description of Artificial Sequence: Synthetic oligonucleotide
ucgucgucguccacuauug

SEQ ID NO: 2159991 - RNA, 19 nt, Artificial Sequence
  Description of Artificial Sequence: Synthetic oligonucleotide
agcugcuuggacuggcggg

SEQ ID NO: 2159992 - RNA, 19 nt, Artificial Sequence
  Description of Artificial Sequence: Synthetic oligonucleotide
ugacacugucuucuggacu

SEQ ID NO: 2159993 - RNA, 19 nt, Artificial Sequence
  Description of Artificial Sequence: Synthetic oligonucleotide
agauaaacucagcucugga

SEQ ID NO: 2159994 - RNA, 19 nt, Artificial Sequence
  Description of Artificial Sequence: Synthetic oligonucleotide
uggagaccaacuccaaauc

SEQ ID NO: 2159995 - RNA, 19 nt, Artificial Sequence
  Description of Artificial Sequence: Synthetic oligonucleotide
ccugacuagauaaacucag

SEQ ID NO: 2159996 - RNA, 19 nt, Artificial Sequence
  Description of Artificial Sequence: Synthetic oligonucleotide
uggucaagcaccugcugga

SEQ ID NO: 2159997 - RNA, 19 nt, Artificial Sequence
  Description of Artificial Sequence: Synthetic oligonucleotide
agauaaaguuccaggagcu

SEQ ID NO: 2159998 - RNA, 19 nt, Artificial Sequence
  Description of Artificial Sequence: Synthetic oligonucleotide
agccggaugacgcuggaca

SEQ ID NO: 2159999 - RNA, 19 nt, Artificial Sequence
  Description of Artificial Sequence: Synthetic oligonucleotide
aacaugggaugucgaugag

SEQ ID NO: 2160000 - RNA, 19 nt, Artificial Sequence
  Description of Artificial Sequence: Synthetic oligonucleotide
uguaccguccucugccagc

SEQ ID NO: 2160001 - RNA, 19 nt, Artificial Sequence
  Description of Artificial Sequence: Synthetic oligonucleotide
cucugaacaugggaugucg

SEQ ID NO: 2160002 - RNA, 19 nt, Artificial Sequence
  Description of Artificial Sequence: Synthetic oligonucleotide
ucguuuugggacucugcug

SEQ ID NO: 2160003 - RNA, 19 nt, Artificial Sequence
  Description of Artificial Sequence: Synthetic oligonucleotide
auccgaauuguuguauguc

SEQ ID NO: 2160004 - RNA, 19 nt, Artificial Sequence
  Description of Artificial Sequence: Synthetic oligonucleotide
gacacggcuugagaggccg

SEQ ID NO: 2160005 - RNA, 19 nt, Artificial Sequence
  Description of Artificial Sequence: Synthetic oligonucleotide
acgcaagcucugcauuugc

SEQ ID NO: 2160006 - RNA, 19 nt, Artificial Sequence
  Description of Artificial Sequence: Synthetic oligonucleotide
gauaaaguuccaggagcug

SEQ ID NO: 2160007 - RNA, 19 nt, Artificial Sequence
  Description of Artificial Sequence: Synthetic oligonucleotide
gacagguccucuuucagcu

SEQ ID NO: 2160008 - RNA, 19 nt, Artificial Sequence
  Description of Artificial Sequence: Synthetic oligonucleotide
guugcggcgcagcagacac

SEQ ID NO: 2160009 - RNA, 19 nt, Artificial Sequence
  Description of Artificial Sequence: Synthetic oligonucleotide
agaggccggacaucguccg

SEQ ID NO: 2160010 - RNA, 19 nt, Artificial Sequence
  Description of Artificial Sequence: Synthetic oligonucleotide
cugguuggacaagaugucg

SEQ ID NO: 2160011 - RNA, 19 nt, Artificial Sequence
  Description of Artificial Sequence: Synthetic oligonucleotide
ugaacgcaagcucugcauu

SEQ ID NO: 2160012 - RNA, 19 nt, Artificial Sequence
  Description of Artificial Sequence: Synthetic oligonucleotide
uucuggacuccaugguuug

SEQ ID NO: 2160013 - RNA, 19 nt, Artificial Sequence
  Description of Artificial Sequence: Synthetic oligonucleotide
ggagaccaacuccaaaucc

SEQ ID NO: 2160014 - RNA, 19 nt, Artificial Sequence
  Description of Artificial Sequence: Synthetic oligonucleotide
cuauuguaccguccucugc

SEQ ID NO: 2160015 - RNA, 19 nt, Artificial Sequence
  Description of Artificial Sequence: Synthetic oligonucleotide
ugagcuccguguugcaggc

SEQ ID NO: 2160016 - RNA, 19 nt, Artificial Sequence
  Description of Artificial Sequence: Synthetic oligonucleotide
aacgcaagcucugcauuug

SEQ ID NO: 2160017 - RNA, 19 nt, Artificial Sequence
  Description of Artificial Sequence: Synthetic oligonucleotide
agcugucuggccacguucc

SEQ ID NO: 2160018 - RNA, 19 nt, Artificial Sequence
  Description of Artificial Sequence: Synthetic oligonucleotide
ucgucggcaucgaaggacu

SEQ ID NO: 2160019 - RNA, 19 nt, Artificial Sequence
  Description of Artificial Sequence: Synthetic oligonucleotide
cuucuuuaugucccaguuc

SEQ ID NO: 2160020 - RNA, 19 nt, Artificial Sequence
  Description of Artificial Sequence: Synthetic oligonucleotide
agugaacgcaagcucugca

SEQ ID NO: 2160021 - RNA, 19 nt, Artificial Sequence
  Description of Artificial Sequence: Synthetic oligonucleotide
ucuuccugguuggacaaga

SEQ ID NO: 2160022 - RNA, 19 nt, Artificial Sequence
  Description of Artificial Sequence: Synthetic oligonucleotide
acaucguccggguccgggg

SEQ ID NO: 2160023 - RNA, 19 nt, Artificial Sequence
  Description of Artificial Sequence: Synthetic oligonucleotide
cauuucaccccuaccccac

SEQ ID NO: 2160024 - RNA, 19 nt, Artificial Sequence
  Description of Artificial Sequence: Synthetic oligonucleotide
guaaggauucggcucguca

SEQ ID NO: 2160025 - RNA, 19 nt, Artificial Sequence
  Description of Artificial Sequence: Synthetic oligonucleotide
ucucccucagugugguaag

SEQ ID NO: 2160026 - RNA, 19 nt, Artificial Sequence
  Description of Artificial Sequence: Synthetic oligonucleotide
uguaggcgcagggugagcu

SEQ ID NO: 2160027 - RNA, 19 nt, Artificial Sequence
  Description of Artificial Sequence: Synthetic oligonucleotide
agugccacgucugaagcca

SEQ ID NO: 2160028 - RNA, 19 nt, Artificial Sequence
  Description of Artificial Sequence: Synthetic oligonucleotide
uccucgaggcaggaggccg

SEQ ID NO: 2160029 - RNA, 19 nt, Artificial Sequence
  Description of Artificial Sequence: Synthetic oligonucleotide
gcagacacggcuugagagg

SEQ ID NO: 2160030 - RNA, 19 nt, Artificial Sequence
  Description of Artificial Sequence: Synthetic oligonucleotide
uuucaccccuaccccacug

SEQ ID NO: 2160031 - RNA, 19 nt, Artificial Sequence
  Description of Artificial Sequence: Synthetic oligonucleotide
ucgaaggacucuugggaaa

SEQ ID NO: 2160032 - RNA, 19 nt, Artificial Sequence
  Description of Artificial Sequence: Synthetic oligonucleotide
cugaucgcggcugugguug

SEQ ID NO: 2160033 - RNA, 19 nt, Artificial Sequence
  Description of Artificial Sequence: Synthetic oligonucleotide
ggcaguggguucuuccucg

SEQ ID NO: 2160034 - RNA, 19 nt, Artificial Sequence
  Description of Artificial Sequence: Synthetic oligonucleotide
uucacaagcuuugcuccgc

SEQ ID NO: 2160035 - RNA, 19 nt, Artificial Sequence
  Description of Artificial Sequence: Synthetic oligonucleotide
gucguccacuauuguaccg

SEQ ID NO: 2160036 - RNA, 19 nt, Artificial Sequence
  Description of Artificial Sequence: Synthetic oligonucleotide
aaccgcauccaagucuuca

SEQ ID NO: 2160037 - RNA, 19 nt, Artificial Sequence
  Description of Artificial Sequence: Synthetic oligonucleotide
uccuccauuucaccccuac

SEQ ID NO: 2160038 - RNA, 19 nt, Artificial Sequence
  Description of Artificial Sequence: Synthetic oligonucleotide
uuguaccguccucugccag

SEQ ID NO: 2160039 - RNA, 19 nt, Artificial Sequence
  Description of Artificial Sequence: Synthetic oligonucleotide
cagacacggcuugagaggc

SEQ ID NO: 2160040 - RNA, 19 nt, Artificial Sequence
  Description of Artificial Sequence: Synthetic oligonucleotide
agcuccguguugcaggccu

SEQ ID NO: 2160041 - RNA, 19 nt, Artificial Sequence
  Description of Artificial Sequence: Synthetic oligonucleotide
ucacaagcuuugcuccgca

SEQ ID NO: 2160042 - RNA, 19 nt, Artificial Sequence
  Description of Artificial Sequence: Synthetic oligonucleotide
aggcaguggguucuuccuc

SEQ ID NO: 2160043 - RNA, 19 nt, Artificial Sequence
  Description of Artificial Sequence: Synthetic oligonucleotide
ucguccacuauuguaccgu

SEQ ID NO: 2160044 - RNA, 19 nt, Artificial Sequence
  Description of Artificial Sequence: Synthetic oligonucleotide
ggagguccucuucugacag

SEQ ID NO: 2160045 - RNA, 19 nt, Artificial Sequence
  Description of Artificial Sequence: Synthetic oligonucleotide
cugacacugucuucuggac

SEQ ID NO: 2160046 - RNA, 19 nt, Artificial Sequence
  Description of Artificial Sequence: Synthetic oligonucleotide
cccacugucugucucgucg

SEQ ID NO: 2160047 - RNA, 19 nt, Artificial Sequence
  Description of Artificial Sequence: Synthetic oligonucleotide
auuaccugagugaacgcaa

SEQ ID NO: 2160048 - RNA, 19 nt, Artificial Sequence
  Description of Artificial Sequence: Synthetic oligonucleotide
aagcuuugcuccgcagcuc

SEQ ID NO: 2160049 - RNA, 19 nt, Artificial Sequence
  Description of Artificial Sequence: Synthetic oligonucleotide
uccucucucuggucaagca

SEQ ID NO: 2160050 - RNA, 19 nt, Artificial Sequence
  Description of Artificial Sequence: Synthetic oligonucleotide
gucugucucgucggcaucg

SEQ ID NO: 2160051 - RNA, 19 nt, Artificial Sequence
  Description of Artificial Sequence: Synthetic oligonucleotide
ugucaaccgcauccaaguc

SEQ ID NO: 2160052 - RNA, 19 nt, Artificial Sequence
  Description of Artificial Sequence: Synthetic oligonucleotide
gggaaacccaggcuguucc

SEQ ID NO: 2160053 - RNA, 19 nt, Artificial Sequence
  Description of Artificial Sequence: Synthetic oligonucleotide
cagcucugaacaugggaug

SEQ ID NO: 2160054 - RNA, 19 nt, Artificial Sequence
  Description of Artificial Sequence: Synthetic oligonucleotide
uucaccccuaccccacugu

SEQ ID NO: 2160055 - RNA, 19 nt, Artificial Sequence
  Description of Artificial Sequence: Synthetic oligonucleotide
acuccaaauccugacuaga

SEQ ID NO: 2160056 - RNA, 19 nt, Artificial Sequence
  Description of Artificial Sequence: Synthetic oligonucleotide
aggaaguagucgucgucgu

SEQ ID NO: 2160057 - RNA, 19 nt, Artificial Sequence
  Description of Artificial Sequence: Synthetic oligonucleotide
cucgucagugccacgucug

SEQ ID NO: 2160058 - RNA, 19 nt, Artificial Sequence
  Description of Artificial Sequence: Synthetic oligonucleotide
aagcucugcauuugcugua

SEQ ID NO: 2160059 - RNA, 19 nt, Artificial Sequence
  Description of Artificial Sequence: Synthetic oligonucleotide
caggcuguuccuccauccg

SEQ ID NO: 2160060 - RNA, 19 nt, Artificial Sequence
  Description of Artificial Sequence: Synthetic oligonucleotide
agcucugaacaugggaugu

SEQ ID NO: 2160061 - RNA, 19 nt, Artificial Sequence
  Description of Artificial Sequence: Synthetic oligonucleotide
ugggacucugcuguucccc

SEQ ID NO: 2160062 - RNA, 19 nt, Artificial Sequence
  Description of Artificial Sequence: Synthetic oligonucleotide
cacguuccuccauuucacc

SEQ ID NO: 2160063 - RNA, 19 nt, Artificial Sequence
  Description of Artificial Sequence: Synthetic oligonucleotide
gacaucguccggguccggg

SEQ ID NO: 2160064 - RNA, 19 nt, Artificial Sequence
  Description of Artificial Sequence: Synthetic oligonucleotide
cacgccgugcugaucgcgg

SEQ ID NO: 2160065 - RNA, 19 nt, Artificial Sequence
  Description of Artificial Sequence: Synthetic oligonucleotide
uggacuccaugguuuggcu

SEQ ID NO: 2160066 - RNA, 19 nt, Artificial Sequence
  Description of Artificial Sequence: Synthetic oligonucleotide
augucgaugagugcuugga

SEQ ID NO: 2160067 - RNA, 19 nt, Artificial Sequence
  Description of Artificial Sequence: Synthetic oligonucleotide
ucgucagugccacgucuga

SEQ ID NO: 2160068 - RNA, 19 nt, Artificial Sequence
  Description of Artificial Sequence: Synthetic oligonucleotide
ggcaaaguucccgagccag

SEQ ID NO: 2160069 - RNA, 19 nt, Artificial Sequence
  Description of Artificial Sequence: Synthetic oligonucleotide
gugucaaccgcauccaagu

SEQ ID NO: 2160070 - RNA, 19 nt, Artificial Sequence
  Description of Artificial Sequence: Synthetic oligonucleotide
gagaccaacuccaaauccu

SEQ ID NO: 2160071 - RNA, 19 nt, Artificial Sequence
  Description of Artificial Sequence: Synthetic oligonucleotide
aguagucgucgucguccac

SEQ ID NO: 2160072 - RNA, 19 nt, Artificial Sequence
  Description of Artificial Sequence: Synthetic oligonucleotide
uggacuguuucugccuucu

SEQ ID NO: 2160073 - RNA, 19 nt, Artificial Sequence
  Description of Artificial Sequence: Synthetic oligonucleotide
accugcuggaguguguucu

SEQ ID NO: 2160074 - RNA, 19 nt, Artificial Sequence
  Description of Artificial Sequence: Synthetic oligonucleotide
cugagugaacgcaagcucu

SEQ ID NO: 2160075 - RNA, 19 nt, Artificial Sequence
  Description of Artificial Sequence: Synthetic oligonucleotide
aggcccggagauaaaguuc

SEQ ID NO: 2160076 - RNA, 19 nt, Artificial Sequence
  Description of Artificial Sequence: Synthetic oligonucleotide
acgccgugcugaucgcggc

SEQ ID NO: 2160077 - RNA, 19 nt, Artificial Sequence
  Description of Artificial Sequence: Synthetic oligonucleotide
cguguugcaggccugcugg

SEQ ID NO: 2160078 - RNA, 19 nt, Artificial Sequence
  Description of Artificial Sequence: Synthetic oligonucleotide
caaauccugacuagauaaa

SEQ ID NO: 2160079 - RNA, 19 nt, Artificial Sequence
  Description of Artificial Sequence: Synthetic oligonucleotide
gcugaugcccgugucaacc

SEQ ID NO: 2160080 - RNA, 19 nt, Artificial Sequence
  Description of Artificial Sequence: Synthetic oligonucleotide
uuuugggacucugcuguuc

SEQ ID NO: 2160081 - RNA, 19 nt, Artificial Sequence
  Description of Artificial Sequence: Synthetic oligonucleotide
gaaggacucuugggaaacc

SEQ ID NO: 2160082 - RNA, 19 nt, Artificial Sequence
  Description of Artificial Sequence: Synthetic oligonucleotide
cagugccacgucugaagcc

SEQ ID NO: 2160083 - RNA, 19 nt, Artificial Sequence
  Description of Artificial Sequence: Synthetic oligonucleotide
uccauccgaauuguuguau

SEQ ID NO: 2160084 - RNA, 19 nt, Artificial Sequence
  Description of Artificial Sequence: Synthetic oligonucleotide
ugcuguuccccaggcagug

SEQ ID NO: 2160085 - RNA, 19 nt, Artificial Sequence
  Description of Artificial Sequence: Synthetic oligonucleotide
uccaugguuuggcucguuu

SEQ ID NO: 2160086 - RNA, 19 nt, Artificial Sequence
  Description of Artificial Sequence: Synthetic oligonucleotide
ggcccggagauaaaguucc

SEQ ID NO: 2160087 - RNA, 19 nt, Artificial Sequence
  Description of Artificial Sequence: Synthetic oligonucleotide
gagugaacgcaagcucugc

SEQ ID NO: 2160088 - RNA, 19 nt, Artificial Sequence
  Description of Artificial Sequence: Synthetic oligonucleotide
acaugggaugucgaugagu

SEQ ID NO: 2160089 - RNA, 19 nt, Artificial Sequence
  Description of Artificial Sequence: Synthetic oligonucleotide
ggacucuugggaaacccag

SEQ ID NO: 2160090 - RNA, 19 nt, Artificial Sequence
  Description of Artificial Sequence: Synthetic oligonucleotide
gcccgugucaaccgcaucc

SEQ ID NO: 2160091 - RNA, 19 nt, Artificial Sequence
  Description of Artificial Sequence: Synthetic oligonucleotide
agcgugaccggggccaggg

SEQ ID NO: 2160092 - RNA, 19 nt, Artificial Sequence
  Description of Artificial Sequence: Synthetic oligonucleotide
ggagggcagacagaggaag

SEQ ID NO: 2160093 - RNA, 19 nt, Artificial Sequence
  Description of Artificial Sequence: Synthetic oligonucleotide
aucguccggguccggggcg

SEQ ID NO: 2160094 - RNA, 19 nt, Artificial Sequence
  Description of Artificial Sequence: Synthetic oligonucleotide
uugggacucugcuguuccc

SEQ ID NO: 2160095 - RNA, 19 nt, Artificial Sequence
  Description of Artificial Sequence: Synthetic oligonucleotide
ucccucagugugguaagga

SEQ ID NO: 2160096 - RNA, 19 nt, Artificial Sequence
  Description of Artificial Sequence: Synthetic oligonucleotide
ggagcccuuggacaguggc

SEQ ID NO: 2160097 - RNA, 19 nt, Artificial Sequence
  Description of Artificial Sequence: Synthetic oligonucleotide
aggauucggcucgucagug

SEQ ID NO: 2160098 - RNA, 19 nt, Artificial Sequence
  Description of Artificial Sequence: Synthetic oligonucleotide
gugcugaucgcggcugugg

SEQ ID NO: 2160099 - RNA, 19 nt, Artificial Sequence
  Description of Artificial Sequence: Synthetic oligonucleotide
aggccggacaucguccggg

SEQ ID NO: 2160100 - RNA, 19 nt, Artificial Sequence
  Description of Artificial Sequence: Synthetic oligonucleotide
cacaagcuuugcuccgcag

SEQ ID NO: 2160101 - RNA, 19 nt, Artificial Sequence
  Description of Artificial Sequence: Synthetic oligonucleotide
uucggcucgucagugccac

SEQ ID NO: 2160102 - RNA, 19 nt, Artificial Sequence
  Description of Artificial Sequence: Synthetic oligonucleotide
uguugcaggccugcuggac

SEQ ID NO: 2160103 - RNA, 19 nt, Artificial Sequence
  Description of Artificial Sequence: Synthetic oligonucleotide
caucguccggguccggggc

SEQ ID NO: 2160104 - RNA, 19 nt, Artificial Sequence
  Description of Artificial Sequence: Synthetic oligonucleotide
uagucgucgucguccacua

SEQ ID NO: 2160105 - RNA, 19 nt, Artificial Sequence
  Description of Artificial Sequence: Synthetic oligonucleotide
gucgucguccacuauugua

SEQ ID NO: 2160106 - RNA, 19 nt, Artificial Sequence
  Description of Artificial Sequence: Synthetic oligonucleotide
uugcggcgcagcagacacg

SEQ ID NO: 2160107 - RNA, 19 nt, Artificial Sequence
  Description of Artificial Sequence: Synthetic oligonucleotide
gucgcccuccuucuccaag

SEQ ID NO: 2160108 - RNA, 19 nt, Artificial Sequence
  Description of Artificial Sequence: Synthetic oligonucleotide
ccugagugaacgcaagcuc

SEQ ID NO: 2160109 - RNA, 19 nt, Artificial Sequence
  Description of Artificial Sequence: Synthetic oligonucleotide
ugucugucucgucggcauc

SEQ ID NO: 2160110 - RNA, 19 nt, Artificial Sequence
  Description of Artificial Sequence: Synthetic oligonucleotide
cagcugucuggccacguuc

SEQ ID NO: 2160111 - RNA, 19 nt, Artificial Sequence
  Description of Artificial Sequence: Synthetic oligonucleotide
cucguuuugggacucugcu

SEQ ID NO: 2160112 - RNA, 19 nt, Artificial Sequence
  Description of Artificial Sequence: Synthetic oligonucleotide
gaggccggacaucguccgg

SEQ ID NO: 2160113 - RNA, 19 nt, Artificial Sequence
  Description of Artificial Sequence: Synthetic oligonucleotide
ucggcaucgaaggacucuu

SEQ ID NO: 2160114 - RNA, 19 nt, Artificial Sequence
  Description of Artificial Sequence: Synthetic oligonucleotide
gacaagaugucgcccuccu

SEQ ID NO: 2160115 - RNA, 19 nt, Artificial Sequence
  Description of Artificial Sequence: Synthetic oligonucleotide
ugguguuggagggcagaca

SEQ ID NO: 2160116 - RNA, 19 nt, Artificial Sequence
  Description of Artificial Sequence: Synthetic oligonucleotide
aaaguuccaggagcugcuu

SEQ ID NO: 2160117 - RNA, 19 nt, Artificial Sequence
  Description of Artificial Sequence: Synthetic oligonucleotide
cuuggagaccaacuccaaa

SEQ ID NO: 2160118 - RNA, 19 nt, Artificial Sequence
  Description of Artificial Sequence: Synthetic oligonucleotide
gcuuuggcaaaguucccga

SEQ ID NO: 2160119 - RNA, 19 nt, Artificial Sequence
  Description of Artificial Sequence: Synthetic oligonucleotide
uucccgagccagcucugaa

SEQ ID NO: 2160120 - RNA, 19 nt, Artificial Sequence
  Description of Artificial Sequence: Synthetic oligonucleotide
uugagaggccggacaucgu

SEQ ID NO: 2160121 - RNA, 19 nt, Artificial Sequence
  Description of Artificial Sequence: Synthetic oligonucleotide
acggcuugagaggccggac

SEQ ID NO: 2160122 - RNA, 19 nt, Artificial Sequence
  Description of Artificial Sequence: Synthetic oligonucleotide
ugaucgcggcugugguugc

SEQ ID NO: 2160123 - RNA, 19 nt, Artificial Sequence
  Description of Artificial Sequence: Synthetic oligonucleotide
gguuuggcucguuuuggga

SEQ ID NO: 2160124 - RNA, 19 nt, Artificial Sequence
  Description of Artificial Sequence: Synthetic oligonucleotide
gaccaacuccaaauccuga

SEQ ID NO: 2160125 - RNA, 19 nt, Artificial Sequence
  Description of Artificial Sequence: Synthetic oligonucleotide
cauuugcuguaggcgcagg

SEQ ID NO: 2160126 - RNA, 19 nt, Artificial Sequence
  Description of Artificial Sequence: Synthetic oligonucleotide
gugugguaaggauucggcu

SEQ ID NO: 2160127 - RNA, 19 nt, Artificial Sequence
  Description of Artificial Sequence: Synthetic oligonucleotide
ugcuuggacuggcgggccu

SEQ ID NO: 2160128 - RNA, 19 nt, Artificial Sequence
  Description of Artificial Sequence: Synthetic oligonucleotide
gaugcccgugucaaccgca

SEQ ID NO: 2160129 - RNA, 19 nt, Artificial Sequence
  Description of Artificial Sequence: Synthetic oligonucleotide
cacgucugaagccaucucu

SEQ ID NO: 2160130 - RNA, 19 nt, Artificial Sequence
  Description of Artificial Sequence: Synthetic oligonucleotide
cauccgaauuguuguaugu

SEQ ID NO: 2160131 - RNA, 19 nt, Artificial Sequence
  Description of Artificial Sequence: Synthetic oligonucleotide
gggcagacagaggaaguag

SEQ ID NO: 2160132 - RNA, 19 nt, Artificial Sequence
  Description of Artificial Sequence: Synthetic oligonucleotide
ccauccgaauuguuguaug

SEQ ID NO: 2160133 - RNA, 19 nt, Artificial Sequence
  Description of Artificial Sequence: Synthetic oligonucleotide
guccacuauuguaccgucc

SEQ ID NO: 2160134 - RNA, 19 nt, Artificial Sequence
  Description of Artificial Sequence: Synthetic oligonucleotide
gaacgcaagcucugcauuu

SEQ ID NO: 2160135 - RNA, 19 nt, Artificial Sequence
  Description of Artificial Sequence: Synthetic oligonucleotide
ggauucggcucgucagugc

SEQ ID NO: 2160136 - RNA, 19 nt, Artificial Sequence
  Description of Artificial Sequence: Synthetic oligonucleotide
cgugucaaccgcauccaag

SEQ ID NO: 2160137 - RNA, 19 nt, Artificial Sequence
  Description of Artificial Sequence: Synthetic oligonucleotide
ccacguuccuccauuucac

SEQ ID NO: 2160138 - RNA, 19 nt, Artificial Sequence
  Description of Artificial Sequence: Synthetic oligonucleotide
ugcugaugcccgugucaac

SEQ ID NO: 2160139 - RNA, 19 nt, Artificial Sequence
  Description of Artificial Sequence: Synthetic oligonucleotide
uggguucuuccucgcugaa

SEQ ID NO: 2160140 - RNA, 19 nt, Artificial Sequence
  Description of Artificial Sequence: Synthetic oligonucleotide
ucugucucgucggcaucga

SEQ ID NO: 2160141 - RNA, 19 nt, Artificial Sequence
  Description of Artificial Sequence: Synthetic oligonucleotide
cuggacuguuucugccuuc

SEQ ID NO: 2160142 - RNA, 19 nt, Artificial Sequence
  Description of Artificial Sequence: Synthetic oligonucleotide
gaucgcggcugugguugcg

SEQ ID NO: 2160143 - RNA, 19 nt, Artificial Sequence
  Description of Artificial Sequence: Synthetic oligonucleotide
uggcuccccgcaacagcgc

SEQ ID NO: 2160144 - RNA, 19 nt, Artificial Sequence
  Description of Artificial Sequence: Synthetic oligonucleotide
cggagauaaaguuccagga

SEQ ID NO: 2160145 - RNA, 19 nt, Artificial Sequence
  Description of Artificial Sequence: Synthetic oligonucleotide
cuuugcuccgcagcuccuc

SEQ ID NO: 2160146 - RNA, 19 nt, Artificial Sequence
  Description of Artificial Sequence: Synthetic oligonucleotide
ccgaauuguuguaugucca

SEQ ID NO: 2160147 - RNA, 19 nt, Artificial Sequence
  Description of Artificial Sequence: Synthetic oligonucleotide
agggcagacagaggaagua

SEQ ID NO: 2160148 - RNA, 19 nt, Artificial Sequence
  Description of Artificial Sequence: Synthetic oligonucleotide
guaccguccucugccagca

SEQ ID NO: 2160149 - RNA, 19 nt, Artificial Sequence
  Description of Artificial Sequence: Synthetic oligonucleotide
cuuggacuggcgggccucc

SEQ ID NO: 2160150 - RNA, 19 nt, Artificial Sequence
  Description of Artificial Sequence: Synthetic oligonucleotide
ggauuucacaagcuuugcu

SEQ ID NO: 2160151 - RNA, 19 nt, Artificial Sequence
  Description of Artificial Sequence: Synthetic oligonucleotide
cuugguguuggagggcaga

SEQ ID NO: 2160152 - RNA, 19 nt, Artificial Sequence
  Description of Artificial Sequence: Synthetic oligonucleotide
ccaagucuucacugagggc

SEQ ID NO: 2160153 - RNA, 19 nt, Artificial Sequence
  Description of Artificial Sequence: Synthetic oligonucleotide
acaagaugucgcccuccuu

SEQ ID NO: 2160154 - RNA, 19 nt, Artificial Sequence
  Description of Artificial Sequence: Synthetic oligonucleotide
ugccacgucugaagccauc

SEQ ID NO: 2160155 - RNA, 19 nt, Artificial Sequence
  Description of Artificial Sequence: Synthetic oligonucleotide
cuccaaauccugacuagau

SEQ ID NO: 2160156 - RNA, 19 nt, Artificial Sequence
  Description of Artificial Sequence: Synthetic oligonucleotide
guguguucuggagcccuug

SEQ ID NO: 2160157 - RNA, 19 nt, Artificial Sequence
  Description of Artificial Sequence: Synthetic oligonucleotide
augacgcuggacagguccu

SEQ ID NO: 2160158 - RNA, 19 nt, Artificial Sequence
  Description of Artificial Sequence: Synthetic oligonucleotide
guagucgucgucguccacu

SEQ ID NO: 2160159 - RNA, 19 nt, Artificial Sequence
  Description of Artificial Sequence: Synthetic oligonucleotide
ggacuccaugguuuggcuc

SEQ ID NO: 2160160 - RNA, 19 nt, Artificial Sequence
  Description of Artificial Sequence: Synthetic oligonucleotide
ccaaggcccggagauaaag

SEQ ID NO: 2160161 - RNA, 19 nt, Artificial Sequence
  Description of Artificial Sequence: Synthetic oligonucleotide
cgccacgccgugcugaucg

SEQ ID NO: 2160162 - RNA, 19 nt, Artificial Sequence
  Description of Artificial Sequence: Synthetic oligonucleotide
agcaacagccagggcuuug

SEQ ID NO: 2160163 - RNA, 19 nt, Artificial Sequence
  Description of Artificial Sequence: Synthetic oligonucleotide
ucggcucgucagugccacg

SEQ ID NO: 2160164 - RNA, 19 nt, Artificial Sequence
  Description of Artificial Sequence: Synthetic oligonucleotide
ggucaagcaccugcuggag

SEQ ID NO: 2160165 - RNA, 19 nt, Artificial Sequence
  Description of Artificial Sequence: Synthetic oligonucleotide
ggacucugcuguuccccag

SEQ ID NO: 2160166 - RNA, 19 nt, Artificial Sequence
  Description of Artificial Sequence: Synthetic oligonucleotide
agccaucucuuugcugaug

SEQ ID NO: 2160167 - RNA, 19 nt, Artificial Sequence
  Description of Artificial Sequence: Synthetic oligonucleotide
guaggcgcagggugagcuc

SEQ ID NO: 2160168 - RNA, 19 nt, Artificial Sequence
  Description of Artificial Sequence: Synthetic oligonucleotide
agguccucuuucagcuguc

SEQ ID NO: 2160169 - RNA, 19 nt, Artificial Sequence
  Description of Artificial Sequence: Synthetic oligonucleotide
acagccggaugacgcugga

SEQ ID NO: 2160170 - RNA, 19 nt, Artificial Sequence
  Description of Artificial Sequence: Synthetic oligonucleotide
gcuggacagguccucuuuc

SEQ ID NO: 2160171 - RNA, 19 nt, Artificial Sequence
  Description of Artificial Sequence: Synthetic oligonucleotide
ggaugucgaugagugcuug

SEQ ID NO: 2160172 - RNA, 19 nt, Artificial Sequence
  Description of Artificial Sequence: Synthetic oligonucleotide
ggacaagaugucgcccucc

SEQ ID NO: 2160173 - RNA, 19 nt, Artificial Sequence
  Description of Artificial Sequence: Synthetic oligonucleotide
ccuccauuucaccccuacc

SEQ ID NO: 2160174 - RNA, 19 nt, Artificial Sequence
  Description of Artificial Sequence: Synthetic oligonucleotide
gucgucgucguccacuauu

SEQ ID NO: 2160175 - RNA, 19 nt, Artificial Sequence
  Description of Artificial Sequence: Synthetic oligonucleotide
gcaaaguucccgagccagc

SEQ ID NO: 2160176 - RNA, 19 nt, Artificial Sequence
  Description of Artificial Sequence: Synthetic oligonucleotide
ccaucucuuugcugaugcc

SEQ ID NO: 2160177 - RNA, 19 nt, Artificial Sequence
  Description of Artificial Sequence: Synthetic oligonucleotide
ugguaaggauucggcucgu

SEQ ID NO: 2160178 - RNA, 19 nt, Artificial Sequence
  Description of Artificial Sequence: Synthetic oligonucleotide
uuccuccauccgaauuguu

SEQ ID NO: 2160179 - RNA, 19 nt, Artificial Sequence
  Description of Artificial Sequence: Synthetic oligonucleotide
gcuguaggcgcagggugag

SEQ ID NO: 2160180 - RNA, 19 nt, Artificial Sequence
  Description of Artificial Sequence: Synthetic oligonucleotide
ugacgcuggacagguccuc

SEQ ID NO: 2160181 - RNA, 19 nt, Artificial Sequence
  Description of Artificial Sequence: Synthetic oligonucleotide
gaggccgccacgccgugcu

SEQ ID NO: 2160182 - RNA, 19 nt, Artificial Sequence
  Description of Artificial Sequence: Synthetic oligonucleotide
augucccaguucaaagcaa

SEQ ID NO: 2160183 - RNA, 19 nt, Artificial Sequence
  Description of Artificial Sequence: Synthetic oligonucleotide
caaggcccggagauaaagu

SEQ ID NO: 2160184 - RNA, 19 nt, Artificial Sequence
  Description of Artificial Sequence: Synthetic oligonucleotide
ccauuucaccccuacccca

SEQ ID NO: 2160185 - RNA, 19 nt, Artificial Sequence
  Description of Artificial Sequence: Synthetic oligonucleotide
ggccagggacucaucaaug

SEQ ID NO: 2160186 - RNA, 19 nt, Artificial Sequence
  Description of Artificial Sequence: Synthetic oligonucleotide
cgucguccacuauuguacc

SEQ ID NO: 2160187 - RNA, 19 nt, Artificial Sequence
  Description of Artificial Sequence: Synthetic oligonucleotide
cugccuucuuuauguccca

SEQ ID NO: 2160188 - RNA, 19 nt, Artificial Sequence
  Description of Artificial Sequence: Synthetic oligonucleotide
uccguguugcaggccugcu

SEQ ID NO: 2160189 - RNA, 19 nt, Artificial Sequence
  Description of Artificial Sequence: Synthetic oligonucleotide
cucgaggcaggaggccgcc

SEQ ID NO: 2160190 - RNA, 19 nt, Artificial Sequence
  Description of Artificial Sequence: Synthetic oligonucleotide
cuccauccgaauuguugua

SEQ ID NO: 2160191 - RNA, 19 nt, Artificial Sequence
  Description of Artificial Sequence: Synthetic oligonucleotide
auucggcucgucagugcca

SEQ ID NO: 2160192 - RNA, 19 nt, Artificial Sequence
  Description of Artificial Sequence: Synthetic oligonucleotide
cuggcgggccuccucucuc

SEQ ID NO: 2160193 - RNA, 19 nt, Artificial Sequence
  Description of Artificial Sequence: Synthetic oligonucleotide
gcucguuuugggacucugc

SEQ ID NO: 2160194 - RNA, 19 nt, Artificial Sequence
  Description of Artificial Sequence: Synthetic oligonucleotide
gcaguggguucuuccucgc

SEQ ID NO: 2160195 - RNA, 19 nt, Artificial Sequence
  Description of Artificial Sequence: Synthetic oligonucleotide
uggccacguuccuccauuu

SEQ ID NO: 2160196 - RNA, 19 nt, Artificial Sequence
  Description of Artificial Sequence: Synthetic oligonucleotide
cuuugggguccuccuugga

SEQ ID NO: 2160197 - RNA, 19 nt, Artificial Sequence
  Description of Artificial Sequence: Synthetic oligonucleotide
cguuuugggacucugcugu

SEQ ID NO: 2160198 - RNA, 19 nt, Artificial Sequence
  Description of Artificial Sequence: Synthetic oligonucleotide
cagaggaaguagucgucgu

SEQ ID NO: 2160199 - RNA, 19 nt, Artificial Sequence
  Description of Artificial Sequence: Synthetic oligonucleotide
caccagcgugaccggggcc

SEQ ID NO: 2160200 - RNA, 19 nt, Artificial Sequence
  Description of Artificial Sequence: Synthetic oligonucleotide
guuccuccauccgaauugu

SEQ ID NO: 2160201 - RNA, 19 nt, Artificial Sequence
  Description of Artificial Sequence: Synthetic oligonucleotide
gacuggcgggccuccucuc

SEQ ID NO: 2160202 - RNA, 19 nt, Artificial Sequence
  Description of Artificial Sequence: Synthetic oligonucleotide
aguucccgagccagcucug

SEQ ID NO: 2160203 - RNA, 19 nt, Artificial Sequence
  Description of Artificial Sequence: Synthetic oligonucleotide
acacggcuugagaggccgg

SEQ ID NO: 2160204 - RNA, 19 nt, Artificial Sequence
  Description of Artificial Sequence: Synthetic oligonucleotide
gguccggggcgcuggcucc

SEQ ID NO: 2160205 - RNA, 19 nt, Artificial Sequence
  Description of Artificial Sequence: Synthetic oligonucleotide
ggccacaaacuugguguug

SEQ ID NO: 2160206 - RNA, 19 nt, Artificial Sequence
  Description of Artificial Sequence: Synthetic oligonucleotide
ggcgcuggcuccccgcaac

SEQ ID NO: 2160207 - RNA, 19 nt, Artificial Sequence
  Description of Artificial Sequence: Synthetic oligonucleotide
caaccgcauccaagucuuc

SEQ ID NO: 2160208 - RNA, 19 nt, Artificial Sequence
  Description of Artificial Sequence: Synthetic oligonucleotide
cuguaggcgcagggugagc

SEQ ID NO: 2160209 - RNA, 19 nt, Artificial Sequence
  Description of Artificial Sequence: Synthetic oligonucleotide
acgcuggacagguccucuu

SEQ ID NO: 2160210 - RNA, 19 nt, Artificial Sequence
  Description of Artificial Sequence: Synthetic oligonucleotide
uaccguccucugccagcac

SEQ ID NO: 2160211 - RNA, 19 nt, Artificial Sequence
  Description of Artificial Sequence: Synthetic oligonucleotide
cuguuucugccuucuuuau

SEQ ID NO: 2160212 - RNA, 19 nt, Artificial Sequence
  Description of Artificial Sequence: Synthetic oligonucleotide
accggggccagggacucau

SEQ ID NO: 2160213 - RNA, 19 nt, Artificial Sequence
  Description of Artificial Sequence: Synthetic oligonucleotide
ggcucguuuugggacucug

SEQ ID NO: 2160214 - RNA, 19 nt, Artificial Sequence
  Description of Artificial Sequence: Synthetic oligonucleotide
ugcaggccugcuggacugu

SEQ ID NO: 2160215 - RNA, 19 nt, Artificial Sequence
  Description of Artificial Sequence: Synthetic oligonucleotide
gcgggccuccucucucugg

SEQ ID NO: 2160216 - RNA, 19 nt, Artificial Sequence
  Description of Artificial Sequence: Synthetic oligonucleotide
aguguguucuggagcccuu

SEQ ID NO: 2160217 - RNA, 19 nt, Artificial Sequence
  Description of Artificial Sequence: Synthetic oligonucleotide
gucggcaucgaaggacucu

SEQ ID NO: 2160218 - RNA, 19 nt, Artificial Sequence
  Description of Artificial Sequence: Synthetic oligonucleotide
gacgcuggacagguccucu

SEQ ID NO: 2160219 - RNA, 19 nt, Artificial Sequence
  Description of Artificial Sequence: Synthetic oligonucleotide
gagcuccguguugcaggcc

SEQ ID NO: 2160220 - RNA, 19 nt, Artificial Sequence
  Description of Artificial Sequence: Synthetic oligonucleotide
cacggcuugagaggccgga

SEQ ID NO: 2160221 - RNA, 19 nt, Artificial Sequence
  Description of Artificial Sequence: Synthetic oligonucleotide
ggacaguggcacagcuuug

SEQ ID NO: 2160222 - RNA, 19 nt, Artificial Sequence
  Description of Artificial Sequence: Synthetic oligonucleotide
cgugaccggggccagggac

SEQ ID NO: 2160223 - RNA, 19 nt, Artificial Sequence
  Description of Artificial Sequence: Synthetic oligonucleotide
uuggacuggcgggccuccu

SEQ ID NO: 2160224 - RNA, 19 nt, Artificial Sequence
  Description of Artificial Sequence: Synthetic oligonucleotide
guucccgagccagcucuga

SEQ ID NO: 2160225 - RNA, 19 nt, Artificial Sequence
  Description of Artificial Sequence: Synthetic oligonucleotide
caggaggccgccacgccgu

SEQ ID NO: 2160226 - RNA, 19 nt, Artificial Sequence
  Description of Artificial Sequence: Synthetic oligonucleotide
ccguguugcaggccugcug

SEQ ID NO: 2160227 - RNA, 19 nt, Artificial Sequence
  Description of Artificial Sequence: Synthetic oligonucleotide
ggccacguuccuccauuuc

SEQ ID NO: 2160228 - RNA, 19 nt, Artificial Sequence
  Description of Artificial Sequence: Synthetic oligonucleotide
uggcucguuuugggacucu

SEQ ID NO: 2160229 - RNA, 19 nt, Artificial Sequence
  Description of Artificial Sequence: Synthetic oligonucleotide
cagccggaugacgcuggac

SEQ ID NO: 2160230 - RNA, 19 nt, Artificial Sequence
  Description of Artificial Sequence: Synthetic oligonucleotide
gugaccggggccagggacu

SEQ ID NO: 2160231 - RNA, 19 nt, Artificial Sequence
  Description of Artificial Sequence: Synthetic oligonucleotide
cuguuccuccauccgaauu

SEQ ID NO: 2160232 - RNA, 19 nt, Artificial Sequence
  Description of Artificial Sequence: Synthetic oligonucleotide
gguaaggauucggcucguc

SEQ ID NO: 2160233 - RNA, 19 nt, Artificial Sequence
  Description of Artificial Sequence: Synthetic oligonucleotide
gccuucuuuaugucccagu

SEQ ID NO: 2160234 - RNA, 19 nt, Artificial Sequence
  Description of Artificial Sequence: Synthetic oligonucleotide
ggcucgucagugccacguc

SEQ ID NO: 2160235 - RNA, 19 nt, Artificial Sequence
  Description of Artificial Sequence: Synthetic oligonucleotide
ggacuggcgggccuccucu

SEQ ID NO: 2160236 - RNA, 19 nt, Artificial Sequence
  Description of Artificial Sequence: Synthetic oligonucleotide
cggacaucguccggguccg

SEQ ID NO: 2160237 - RNA, 19 nt, Artificial Sequence
  Description of Artificial Sequence: Synthetic oligonucleotide
gguugcggcgcagcagaca

SEQ ID NO: 2160238 - RNA, 19 nt, Artificial Sequence
  Description of Artificial Sequence: Synthetic oligonucleotide
gcucgucagugccacgucu

SEQ ID NO: 2160239 - RNA, 19 nt, Artificial Sequence
  Description of Artificial Sequence: Synthetic oligonucleotide
ccacgucugaagccaucuc

SEQ ID NO: 2160240 - RNA, 19 nt, Artificial Sequence
  Description of Artificial Sequence: Synthetic oligonucleotide
cugucucgucggcaucgaa

SEQ ID NO: 2160241 - RNA, 19 nt, Artificial Sequence
  Description of Artificial Sequence: Synthetic oligonucleotide
cccuaccccacugucuguc

SEQ ID NO: 2160242 - RNA, 19 nt, Artificial Sequence
  Description of Artificial Sequence: Synthetic oligonucleotide
cagcgugaccggggccagg

SEQ ID NO: 2160243 - RNA, 19 nt, Artificial Sequence
  Description of Artificial Sequence: Synthetic oligonucleotide
ccucagugugguaaggauu

SEQ ID NO: 2160244 - RNA, 19 nt, Artificial Sequence
  Description of Artificial Sequence: Synthetic oligonucleotide
gcuuggacuggcgggccuc

SEQ ID NO: 2160245 - RNA, 19 nt, Artificial Sequence
  Description of Artificial Sequence: Synthetic oligonucleotide
gcuggacuguuucugccuu

SEQ ID NO: 2160246 - RNA, 19 nt, Artificial Sequence
  Description of Artificial Sequence: Synthetic oligonucleotide
aggccgccacgccgugcug

SEQ ID NO: 2160247 - RNA, 19 nt, Artificial Sequence
  Description of Artificial Sequence: Synthetic oligonucleotide
ccacgccgugcugaucgcg

SEQ ID NO: 2160248 - RNA, 19 nt, Artificial Sequence
  Description of Artificial Sequence: Synthetic oligonucleotide
guuccccaggcaguggguu

SEQ ID NO: 2160249 - RNA, 19 nt, Artificial Sequence
  Description of Artificial Sequence: Synthetic oligonucleotide
gggugagcuccguguugca

SEQ ID NO: 2160250 - RNA, 19 nt, Artificial Sequence
  Description of Artificial Sequence: Synthetic oligonucleotide
gccacgccgugcugaucgc

SEQ ID NO: 2160251 - RNA, 19 nt, Artificial Sequence
  Description of Artificial Sequence: Synthetic oligonucleotide
caagcaccugcuggagugu

SEQ ID NO: 2160252 - RNA, 19 nt, Artificial Sequence
  Description of Artificial Sequence: Synthetic oligonucleotide
gcccuuggacaguggcaca

SEQ ID NO: 2160253 - RNA, 19 nt, Artificial Sequence
  Description of Artificial Sequence: Synthetic oligonucleotide
ggggcgcuggcuccccgca

SEQ ID NO: 2160254 - RNA, 19 nt, Artificial Sequence
  Description of Artificial Sequence: Synthetic oligonucleotide
cgaauuguuguauguccau

SEQ ID NO: 2160255 - RNA, 19 nt, Artificial Sequence
  Description of Artificial Sequence: Synthetic oligonucleotide
cccgugucaaccgcaucca

SEQ ID NO: 2160256 - RNA, 19 nt, Artificial Sequence
  Description of Artificial Sequence: Synthetic oligonucleotide
gggccacaaacuugguguu

SEQ ID NO: 2160257 - RNA, 19 nt, Artificial Sequence
  Description of Artificial Sequence: Synthetic oligonucleotide
gcagggugagcuccguguu

SEQ ID NO: 2160258 - RNA, 19 nt, Artificial Sequence
  Description of Artificial Sequence: Synthetic oligonucleotide
ggacaucguccggguccgg

SEQ ID NO: 2160259 - RNA, 19 nt, Artificial Sequence
  Description of Artificial Sequence: Synthetic oligonucleotide
gccggacaucguccggguc

SEQ ID NO: 2160260 - RNA, 19 nt, Artificial Sequence
  Description of Artificial Sequence: Synthetic oligonucleotide
ggaggccgccacgccgugc

SEQ ID NO: 2160261 - RNA, 19 nt, Artificial Sequence
  Description of Artificial Sequence: Synthetic oligonucleotide
gcacagcuuuggcaaaguu

SEQ ID NO: 2160262 - RNA, 19 nt, Artificial Sequence
  Description of Artificial Sequence: Synthetic oligonucleotide
gguccucuuucagcugucu

SEQ ID NO: 2160263 - RNA, 19 nt, Artificial Sequence
  Description of Artificial Sequence: Synthetic oligonucleotide
gcgcuggcuccccgcaaca

SEQ ID NO: 2160264 - RNA, 19 nt, Artificial Sequence
  Description of Artificial Sequence: Synthetic oligonucleotide
ggccgccacgccgugcuga

SEQ ID NO: 2160265 - RNA, 19 nt, Artificial Sequence
  Description of Artificial Sequence: Synthetic oligonucleotide
cggcuugagaggccggaca

SEQ ID NO: 2160266 - RNA, 19 nt, Artificial Sequence
  Description of Artificial Sequence: Synthetic oligonucleotide
ccgcauccaagucuucacu

SEQ ID NO: 2160267 - RNA, 19 nt, Artificial Sequence
  Description of Artificial Sequence: Synthetic oligonucleotide
cuccccgcaacagcgccau

SEQ ID NO: 2160268 - RNA, 19 nt, Artificial Sequence
  Description of Artificial Sequence: Synthetic oligonucleotide
gggaugucgaugagugcuu

SEQ ID NO: 2160269 - RNA, 19 nt, Artificial Sequence
  Description of Artificial Sequence: Synthetic oligonucleotide
gcugaucgcggcugugguu

SEQ ID NO: 2160270 - RNA, 19 nt, Artificial Sequence
  Description of Artificial Sequence: Synthetic oligonucleotide
ggcgcagcagacacggcuu

SEQ ID NO: 2160271 - RNA, 19 nt, Artificial Sequence
  Description of Artificial Sequence: Synthetic oligonucleotide
gaccggggccagggacuca

SEQ ID NO: 2160272 - RNA, 19 nt, Artificial Sequence
  Description of Artificial Sequence: Synthetic oligonucleotide
ggccggacaucguccgggu

SEQ ID NO: 2160273 - RNA, 19 nt, Artificial Sequence
  Description of Artificial Sequence: Synthetic oligonucleotide
cgucggcaucgaaggacuc

SEQ ID NO: 2160274 - RNA, 19 nt, Artificial Sequence
  Description of Artificial Sequence: Synthetic oligonucleotide
caggccugcuggacuguuu

SEQ ID NO: 2160275 - RNA, 19 nt, Artificial Sequence
  Description of Artificial Sequence: Synthetic oligonucleotide
gcaccugcuggaguguguu

SEQ ID NO: 2160276 - RNA, 19 nt, Artificial Sequence
  Description of Artificial Sequence: Synthetic oligonucleotide
gcccggagauaaaguucca

SEQ ID NO: 2160277 - RNA, 19 nt, Artificial Sequence
  Description of Artificial Sequence: Synthetic oligonucleotide
ccuaccccacugucugucu

SEQ ID NO: 2160278 - RNA, 19 nt, Artificial Sequence
  Description of Artificial Sequence: Synthetic oligonucleotide
cgugcugaucgcggcugug

SEQ ID NO: 2160279 - RNA, 19 nt, Artificial Sequence
  Description of Artificial Sequence: Synthetic oligonucleotide
cccgcaacagcgccauccu

SEQ ID NO: 2160280 - RNA, 19 nt, Artificial Sequence
  Description of Artificial Sequence: Synthetic oligonucleotide
ccgugucaaccgcauccaa

SEQ ID NO: 2160281 - RNA, 19 nt, Artificial Sequence
  Description of Artificial Sequence: Synthetic oligonucleotide
ccccacugucugucucguc

SEQ ID NO: 2160282 - RNA, 19 nt, Artificial Sequence
  Description of Artificial Sequence: Synthetic oligonucleotide
cggggcgcuggcuccccgc

SEQ ID NO: 2160283 - RNA, 19 nt, Artificial Sequence
  Description of Artificial Sequence: Synthetic oligonucleotide
gcgugaccggggccaggga

SEQ ID NO: 2160284 - RNA, 19 nt, Artificial Sequence
  Description of Artificial Sequence: Synthetic oligonucleotide
cggcgcagcagacacggcu

SEQ ID NO: 2160285 - RNA, 19 nt, Artificial Sequence
  Description of Artificial Sequence: Synthetic oligonucleotide
gugccacgucugaagccau

SEQ ID NO: 2160286 - RNA, 19 nt, Artificial Sequence
  Description of Artificial Sequence: Synthetic oligonucleotide
cgucagugccacgucugaa

SEQ ID NO: 2160287 - RNA, 19 nt, Artificial Sequence
  Description of Artificial Sequence: Synthetic oligonucleotide
gccgccacgccgugcugau

SEQ ID NO: 2160288 - RNA, 19 nt, Artificial Sequence
  Description of Artificial Sequence: Synthetic oligonucleotide
ccagggccacaaacuuggu

SEQ ID NO: 2160289 - RNA, 19 nt, Artificial Sequence
  Description of Artificial Sequence: Synthetic oligonucleotide
cggcucgucagugccacgu

SEQ ID NO: 2160290 - RNA, 19 nt, Artificial Sequence
  Description of Artificial Sequence: Synthetic oligonucleotide
ggcgcagggugagcuccgu

SEQ ID NO: 2160291 - RNA, 19 nt, Artificial Sequence
  Description of Artificial Sequence: Synthetic oligonucleotide
cuccaugguuuggcucguu

SEQ ID NO: 2160292 - RNA, 19 nt, Artificial Sequence
  Description of Artificial Sequence: Synthetic oligonucleotide
cgucgucguccacuauugu

SEQ ID NO: 2160293 - RNA, 19 nt, Artificial Sequence
  Description of Artificial Sequence: Synthetic oligonucleotide
ccgccacgccgugcugauc

SEQ ID NO: 2160294 - RNA, 19 nt, Artificial Sequence
  Description of Artificial Sequence: Synthetic oligonucleotide
cguccggguccggggcgcu

SEQ ID NO: 2160295 - RNA, 19 nt, Artificial Sequence
  Description of Artificial Sequence: Synthetic oligonucleotide
acaaaaggaacagagaacc

SEQ ID NO: 2160296 - RNA, 19 nt, Artificial Sequence
  Description of Artificial Sequence: Synthetic oligonucleotide
aaccuuaugaagaaagugg

SEQ ID NO: 2160297 - RNA, 19 nt, Artificial Sequence
  Description of Artificial Sequence: Synthetic oligonucleotide
aacagagaaccuuaugaag

SEQ ID NO: 2160298 - RNA, 19 nt, Artificial Sequence
  Description of Artificial Sequence: Synthetic oligonucleotide
acuccagacagccaguacc

SEQ ID NO: 2160299 - RNA, 19 nt, Artificial Sequence
  Description of Artificial Sequence: Synthetic oligonucleotide
uguggcuaagauuuugugg

SEQ ID NO: 2160300 - RNA, 19 nt, Artificial Sequence
  Description of Artificial Sequence: Synthetic oligonucleotide
aauuugguguccucagagg

SEQ ID NO: 2160301 - RNA, 19 nt, Artificial Sequence
  Description of Artificial Sequence: Synthetic oligonucleotide
agugaccagaugcugauac

SEQ ID NO: 2160302 - RNA, 19 nt, Artificial Sequence
  Description of Artificial Sequence: Synthetic oligonucleotide
aaguggauuccacagaccu

SEQ ID NO: 2160303 - RNA, 19 nt, Artificial Sequence
  Description of Artificial Sequence: Synthetic oligonucleotide
auuccacagaccuuuggcc

SEQ ID NO: 2160304 - RNA, 19 nt, Artificial Sequence
  Description of Artificial Sequence: Synthetic oligonucleotide
uaccgauccauccucauag

SEQ ID NO: 2160305 - RNA, 19 nt, Artificial Sequence
  Description of Artificial Sequence: Synthetic oligonucleotide
agauuuuguggucuggccg

SEQ ID NO: 2160306 - RNA, 19 nt, Artificial Sequence
  Description of Artificial Sequence: Synthetic oligonucleotide
ucaucugaaugacagguca

SEQ ID NO: 2160307 - RNA, 19 nt, Artificial Sequence
  Description of Artificial Sequence: Synthetic oligonucleotide
uacagaagcacuguggaag

SEQ ID NO: 2160308 - RNA, 19 nt, Artificial Sequence
  Description of Artificial Sequence: Synthetic oligonucleotide
gaugcgaucggucccagcc

SEQ ID NO: 2160309 - RNA, 19 nt, Artificial Sequence
  Description of Artificial Sequence: Synthetic oligonucleotide
gauacgcuggucuuuagac

SEQ ID NO: 2160310 - RNA, 19 nt, Artificial Sequence
  Description of Artificial Sequence: Synthetic oligonucleotide
gaguuagucugccacagcc

SEQ ID NO: 2160311 - RNA, 19 nt, Artificial Sequence
  Description of Artificial Sequence: Synthetic oligonucleotide
augagucuuguacaccugc

SEQ ID NO: 2160312 - RNA, 19 nt, Artificial Sequence
  Description of Artificial Sequence: Synthetic oligonucleotide
uacgcuggucuuuagaccc

SEQ ID NO: 2160313 - RNA, 19 nt, Artificial Sequence
  Description of Artificial Sequence: Synthetic oligonucleotide
gauuccacagaccuuuggc

SEQ ID NO: 2160314 - RNA, 19 nt, Artificial Sequence
  Description of Artificial Sequence: Synthetic oligonucleotide
agagucgaagucaaggccc

SEQ ID NO: 2160315 - RNA, 19 nt, Artificial Sequence
  Description of Artificial Sequence: Synthetic oligonucleotide
agucuuguacaccugcagg

SEQ ID NO: 2160316 - RNA, 19 nt, Artificial Sequence
  Description of Artificial Sequence: Synthetic oligonucleotide
auuggugaguucaugaguc

SEQ ID NO: 2160317 - RNA, 19 nt, Artificial Sequence
  Description of Artificial Sequence: Synthetic oligonucleotide
caagcauccaacauagcug

SEQ ID NO: 2160318 - RNA, 19 nt, Artificial Sequence
  Description of Artificial Sequence: Synthetic oligonucleotide
ugagagucgaagucaaggc

SEQ ID NO: 2160319 - RNA, 19 nt, Artificial Sequence
  Description of Artificial Sequence: Synthetic oligonucleotide
aauccggcugcacaccuuc

SEQ ID NO: 2160320 - RNA, 19 nt, Artificial Sequence
  Description of Artificial Sequence: Synthetic oligonucleotide
aguucaugagucuuguaca

SEQ ID NO: 2160321 - RNA, 19 nt, Artificial Sequence
  Description of Artificial Sequence: Synthetic oligonucleotide
auacgcuggucuuuagacc

SEQ ID NO: 2160322 - RNA, 19 nt, Artificial Sequence
  Description of Artificial Sequence: Synthetic oligonucleotide
auuaagacagcagugucug

SEQ ID NO: 2160323 - RNA, 19 nt, Artificial Sequence
  Description of Artificial Sequence: Synthetic oligonucleotide
ugacagcuaagucaugagc

SEQ ID NO: 2160324 - RNA, 19 nt, Artificial Sequence
  Description of Artificial Sequence: Synthetic oligonucleotide
uuuggccauaauuuggugu

SEQ ID NO: 2160325 - RNA, 19 nt, Artificial Sequence
  Description of Artificial Sequence: Synthetic oligonucleotide
uccaugaugguguuccugc

SEQ ID NO: 2160326 - RNA, 19 nt, Artificial Sequence
  Description of Artificial Sequence: Synthetic oligonucleotide
ucuucagccagguuacacc

SEQ ID NO: 2160327 - RNA, 19 nt, Artificial Sequence
  Description of Artificial Sequence: Synthetic oligonucleotide
uaagucaugagcaggggua

SEQ ID NO: 2160328 - RNA, 19 nt, Artificial Sequence
  Description of Artificial Sequence: Synthetic oligonucleotide
gaaccuuaugaagaaagug

SEQ ID NO: 2160329 - RNA, 19 nt, Artificial Sequence
  Description of Artificial Sequence: Synthetic oligonucleotide
gucaagacuggauuaagac

SEQ ID NO: 2160330 - RNA, 19 nt, Artificial Sequence
  Description of Artificial Sequence: Synthetic oligonucleotide
aguauacagaagcacugug

SEQ ID NO: 2160331 - RNA, 19 nt, Artificial Sequence
  Description of Artificial Sequence: Synthetic oligonucleotide
uuguggucuggccggaugg

SEQ ID NO: 2160332 - RNA, 19 nt, Artificial Sequence
  Description of Artificial Sequence: Synthetic oligonucleotide
uggucuuuagacccugcag

SEQ ID NO: 2160333 - RNA, 19 nt, Artificial Sequence
  Description of Artificial Sequence: Synthetic oligonucleotide
ggaacagagaaccuuauga

SEQ ID NO: 2160334 - RNA, 19 nt, Artificial Sequence
  Description of Artificial Sequence: Synthetic oligonucleotide
gagagucgaagucaaggcc

SEQ ID NO: 2160335 - RNA, 19 nt, Artificial Sequence
  Description of Artificial Sequence: Synthetic oligonucleotide
cugagagucgaagucaagg

SEQ ID NO: 2160336 - RNA, 19 nt, Artificial Sequence
  Description of Artificial Sequence: Synthetic oligonucleotide
aaacacccggaugcgaucg

SEQ ID NO: 2160337 - RNA, 19 nt, Artificial Sequence
  Description of Artificial Sequence: Synthetic oligonucleotide
uuggccauaauuugguguc

SEQ ID NO: 2160338 - RNA, 19 nt, Artificial Sequence
  Description of Artificial Sequence: Synthetic oligonucleotide
gacagcuaagucaugagca

SEQ ID NO: 2160339 - RNA, 19 nt, Artificial Sequence
  Description of Artificial Sequence: Synthetic oligonucleotide
ucgaagucaaggcccauga

SEQ ID NO: 2160340 - RNA, 19 nt, Artificial Sequence
  Description of Artificial Sequence: Synthetic oligonucleotide
guuagucugccacagcccc

SEQ ID NO: 2160341 - RNA, 19 nt, Artificial Sequence
  Description of Artificial Sequence: Synthetic oligonucleotide
uuguccuccagugaaacac

SEQ ID NO: 2160342 - RNA, 19 nt, Artificial Sequence
  Description of Artificial Sequence: Synthetic oligonucleotide
uuggauggcaucuccagaa

SEQ ID NO: 2160343 - RNA, 19 nt, Artificial Sequence
  Description of Artificial Sequence: Synthetic oligonucleotide
gaguuggugcccuuggggc

SEQ ID NO: 2160344 - RNA, 19 nt, Artificial Sequence
  Description of Artificial Sequence: Synthetic oligonucleotide
guaccuucccggcagagcc

SEQ ID NO: 2160345 - RNA, 19 nt, Artificial Sequence
  Description of Artificial Sequence: Synthetic oligonucleotide
uggauuaagacagcagugu

SEQ ID NO: 2160346 - RNA, 19 nt, Artificial Sequence
  Description of Artificial Sequence: Synthetic oligonucleotide
acuguggaaggccaggaca

SEQ ID NO: 2160347 - RNA, 19 nt, Artificial Sequence
  Description of Artificial Sequence: Synthetic oligonucleotide
ugaccagaugcugauacgc

SEQ ID NO: 2160348 - RNA, 19 nt, Artificial Sequence
  Description of Artificial Sequence: Synthetic oligonucleotide
auagcuguccccuggccag

SEQ ID NO: 2160349 - RNA, 19 nt, Artificial Sequence
  Description of Artificial Sequence: Synthetic oligonucleotide
cuggauuaagacagcagug

SEQ ID NO: 2160350 - RNA, 19 nt, Artificial Sequence
  Description of Artificial Sequence: Synthetic oligonucleotide
acacccuggcccuuguggc

SEQ ID NO: 2160351 - RNA, 19 nt, Artificial Sequence
  Description of Artificial Sequence: Synthetic oligonucleotide
ggucuuuagacccugcagc

SEQ ID NO: 2160352 - RNA, 19 nt, Artificial Sequence
  Description of Artificial Sequence: Synthetic oligonucleotide
uaagacagcagugucugac

SEQ ID NO: 2160353 - RNA, 19 nt, Artificial Sequence
  Description of Artificial Sequence: Synthetic oligonucleotide
ugacagguucuucauggca

SEQ ID NO: 2160354 - RNA, 19 nt, Artificial Sequence
  Description of Artificial Sequence: Synthetic oligonucleotide
uuuagacccugcagcaagc

SEQ ID NO: 2160355 - RNA, 19 nt, Artificial Sequence
  Description of Artificial Sequence: Synthetic oligonucleotide
caugagcagggguagagug

SEQ ID NO: 2160356 - RNA, 19 nt, Artificial Sequence
  Description of Artificial Sequence: Synthetic oligonucleotide
ggguagagugaccagaugc

SEQ ID NO: 2160357 - RNA, 19 nt, Artificial Sequence
  Description of Artificial Sequence: Synthetic oligonucleotide
uuuagggcagcaacuguuc

SEQ ID NO: 2160358 - RNA, 19 nt, Artificial Sequence
  Description of Artificial Sequence: Synthetic oligonucleotide
ggucacaaaaggaacagag

SEQ ID NO: 2160359 - RNA, 19 nt, Artificial Sequence
  Description of Artificial Sequence: Synthetic oligonucleotide
ugccaagucccacaggcac

SEQ ID NO: 2160360 - RNA, 19 nt, Artificial Sequence
  Description of Artificial Sequence: Synthetic oligonucleotide
aagacuggauuaagacagc

SEQ ID NO: 2160361 - RNA, 19 nt, Artificial Sequence
  Description of Artificial Sequence: Synthetic oligonucleotide
ugauacgcuggucuuuaga

SEQ ID NO: 2160362 - RNA, 19 nt, Artificial Sequence
  Description of Artificial Sequence: Synthetic oligonucleotide
cauccaacauagcuguccc

SEQ ID NO: 2160363 - RNA, 19 nt, Artificial Sequence
  Description of Artificial Sequence: Synthetic oligonucleotide
uccaacauagcuguccccu

SEQ ID NO: 2160364 - RNA, 19 nt, Artificial Sequence
  Description of Artificial Sequence: Synthetic oligonucleotide
acccggaugcgaucggucc

SEQ ID NO: 2160365 - RNA, 19 nt, Artificial Sequence
  Description of Artificial Sequence: Synthetic oligonucleotide
aguuagucugccacagccc

SEQ ID NO: 2160366 - RNA, 19 nt, Artificial Sequence
  Description of Artificial Sequence: Synthetic oligonucleotide
gauggugacuucugcaauc

SEQ ID NO: 2160367 - RNA, 19 nt, Artificial Sequence
  Description of Artificial Sequence: Synthetic oligonucleotide
aagucaugagcagggguag

SEQ ID NO: 2160368 - RNA, 19 nt, Artificial Sequence
  Description of Artificial Sequence: Synthetic oligonucleotide
acauagcuguccccuggcc

SEQ ID NO: 2160369 - RNA, 19 nt, Artificial Sequence
  Description of Artificial Sequence: Synthetic oligonucleotide
agcagugucugacagcuaa

SEQ ID NO: 2160370 - RNA, 19 nt, Artificial Sequence
  Description of Artificial Sequence: Synthetic oligonucleotide
uuccgcuccaggauguccc

SEQ ID NO: 2160371 - RNA, 19 nt, Artificial Sequence
  Description of Artificial Sequence: Synthetic oligonucleotide
caggguuaccgauccaucc

SEQ ID NO: 2160372 - RNA, 19 nt, Artificial Sequence
  Description of Artificial Sequence: Synthetic oligonucleotide
agccagguuacacccuggc

SEQ ID NO: 2160373 - RNA, 19 nt, Artificial Sequence
  Description of Artificial Sequence: Synthetic oligonucleotide
cacagccccaggcacaugg

SEQ ID NO: 2160374 - RNA, 19 nt, Artificial Sequence
  Description of Artificial Sequence: Synthetic oligonucleotide
auaauuugguguccucaga

SEQ ID NO: 2160375 - RNA, 19 nt, Artificial Sequence
  Description of Artificial Sequence: Synthetic oligonucleotide
uggaguuagucugccacag

SEQ ID NO: 2160376 - RNA, 19 nt, Artificial Sequence
  Description of Artificial Sequence: Synthetic oligonucleotide
ugugcaccaggccacucug

SEQ ID NO: 2160377 - RNA, 19 nt, Artificial Sequence
  Description of Artificial Sequence: Synthetic oligonucleotide
ccagguuacacccuggccc

SEQ ID NO: 2160378 - RNA, 19 nt, Artificial Sequence
  Description of Artificial Sequence: Synthetic oligonucleotide
uucugagagucgaagucaa

SEQ ID NO: 2160379 - RNA, 19 nt, Artificial Sequence
  Description of Artificial Sequence: Synthetic oligonucleotide
uccagugaaacacccggau

SEQ ID NO: 2160380 - RNA, 19 nt, Artificial Sequence
  Description of Artificial Sequence: Synthetic oligonucleotide
uugguguccucagaggccc

SEQ ID NO: 2160381 - RNA, 19 nt, Artificial Sequence
  Description of Artificial Sequence: Synthetic oligonucleotide
caacauagcuguccccugg

SEQ ID NO: 2160382 - RNA, 19 nt, Artificial Sequence
  Description of Artificial Sequence: Synthetic oligonucleotide
agaccuuuggccauaauuu

SEQ ID NO: 2160383 - RNA, 19 nt, Artificial Sequence
  Description of Artificial Sequence: Synthetic oligonucleotide
uguuccugcccucugccaa

SEQ ID NO: 2160384 - RNA, 19 nt, Artificial Sequence
  Description of Artificial Sequence: Synthetic oligonucleotide
uccggcugcacaccuuccg

SEQ ID NO: 2160385 - RNA, 19 nt, Artificial Sequence
  Description of Artificial Sequence: Synthetic oligonucleotide
accuuaugaagaaagugga

SEQ ID NO: 2160386 - RNA, 19 nt, Artificial Sequence
  Description of Artificial Sequence: Synthetic oligonucleotide
agugaaacacccggaugcg

SEQ ID NO: 2160387 - RNA, 19 nt, Artificial Sequence
  Description of Artificial Sequence: Synthetic oligonucleotide
accuuuggccauaauuugg

SEQ ID NO: 2160388 - RNA, 19 nt, Artificial Sequence
  Description of Artificial Sequence: Synthetic oligonucleotide
uccagaugugcaccaggcc

SEQ ID NO: 2160389 - RNA, 19 nt, Artificial Sequence
  Description of Artificial Sequence: Synthetic oligonucleotide
accgauccauccucauagc

SEQ ID NO: 2160390 - RNA, 19 nt, Artificial Sequence
  Description of Artificial Sequence: Synthetic oligonucleotide
agacccugcagcaagcaag

SEQ ID NO: 2160391 - RNA, 19 nt, Artificial Sequence
  Description of Artificial Sequence: Synthetic oligonucleotide
uuagggcagcaacuguucu

SEQ ID NO: 2160392 - RNA, 19 nt, Artificial Sequence
  Description of Artificial Sequence: Synthetic oligonucleotide
gagccugagacgcccuugg

SEQ ID NO: 2160393 - RNA, 19 nt, Artificial Sequence
  Description of Artificial Sequence: Synthetic oligonucleotide
uucaugagucuuguacacc

SEQ ID NO: 2160394 - RNA, 19 nt, Artificial Sequence
  Description of Artificial Sequence: Synthetic oligonucleotide
aggaacagagaaccuuaug

SEQ ID NO: 2160395 - RNA, 19 nt, Artificial Sequence
  Description of Artificial Sequence: Synthetic oligonucleotide
ucaucgcugcccuucccag

SEQ ID NO: 2160396 - RNA, 19 nt, Artificial Sequence
  Description of Artificial Sequence: Synthetic oligonucleotide
ucuuguacaccugcaggga

SEQ ID NO: 2160397 - RNA, 19 nt, Artificial Sequence
  Description of Artificial Sequence: Synthetic oligonucleotide
aucggucccagccugcugu

SEQ ID NO: 2160398 - RNA, 19 nt, Artificial Sequence
  Description of Artificial Sequence: Synthetic oligonucleotide
aggguuaccgauccauccu

SEQ ID NO: 2160399 - RNA, 19 nt, Artificial Sequence
  Description of Artificial Sequence: Synthetic oligonucleotide
ggggacuggaguuagucug

SEQ ID NO: 2160400 - RNA, 19 nt, Artificial Sequence
  Description of Artificial Sequence: Synthetic oligonucleotide
gucuuuagacccugcagca

SEQ ID NO: 2160401 - RNA, 19 nt, Artificial Sequence
  Description of Artificial Sequence: Synthetic oligonucleotide
ugcgaucggucccagccug

SEQ ID NO: 2160402 - RNA, 19 nt, Artificial Sequence
  Description of Artificial Sequence: Synthetic oligonucleotide
gauuggugaguucaugagu

SEQ ID NO: 2160403 - RNA, 19 nt, Artificial Sequence
  Description of Artificial Sequence: Synthetic oligonucleotide
acgcccuuggccuucugag

SEQ ID NO: 2160404 - RNA, 19 nt, Artificial Sequence
  Description of Artificial Sequence: Synthetic oligonucleotide
caucugaaugacaggucac

SEQ ID NO: 2160405 - RNA, 19 nt, Artificial Sequence
  Description of Artificial Sequence: Synthetic oligonucleotide
gugaccagaugcugauacg

SEQ ID NO: 2160406 - RNA, 19 nt, Artificial Sequence
  Description of Artificial Sequence: Synthetic oligonucleotide
accucaucgcugcccuucc

SEQ ID NO: 2160407 - RNA, 19 nt, Artificial Sequence
  Description of Artificial Sequence: Synthetic oligonucleotide
cagaugugcaccaggccac

SEQ ID NO: 2160408 - RNA, 19 nt, Artificial Sequence
  Description of Artificial Sequence: Synthetic oligonucleotide
aacacccggaugcgaucgg

SEQ ID NO: 2160409 - RNA, 19 nt, Artificial Sequence
  Description of Artificial Sequence: Synthetic oligonucleotide
ggcuucaggguacacacug

SEQ ID NO: 2160410 - RNA, 19 nt, Artificial Sequence
  Description of Artificial Sequence: Synthetic oligonucleotide
aaggagagggcggggacug

SEQ ID NO: 2160411 - RNA, 19 nt, Artificial Sequence
  Description of Artificial Sequence: Synthetic oligonucleotide
uggcaggcaauccggcugc

SEQ ID NO: 2160412 - RNA, 19 nt, Artificial Sequence
  Description of Artificial Sequence: Synthetic oligonucleotide
agaaccuuaugaagaaagu

SEQ ID NO: 2160413 - RNA, 19 nt, Artificial Sequence
  Description of Artificial Sequence: Synthetic oligonucleotide
ucauuguccuccagugaaa

SEQ ID NO: 2160414 - RNA, 19 nt, Artificial Sequence
  Description of Artificial Sequence: Synthetic oligonucleotide
cuguggcuaagauuuugug

SEQ ID NO: 2160415 - RNA, 19 nt, Artificial Sequence
  Description of Artificial Sequence: Synthetic oligonucleotide
ucccggcagagccugagac

SEQ ID NO: 2160416 - RNA, 19 nt, Artificial Sequence
  Description of Artificial Sequence: Synthetic oligonucleotide
aggaguuggugcccuuggg

SEQ ID NO: 2160417 - RNA, 19 nt, Artificial Sequence
  Description of Artificial Sequence: Synthetic oligonucleotide
agcaagcaagccaucagug

SEQ ID NO: 2160418 - RNA, 19 nt, Artificial Sequence
  Description of Artificial Sequence: Synthetic oligonucleotide
cuuuggccauaauuuggug

SEQ ID NO: 2160419 - RNA, 19 nt, Artificial Sequence
  Description of Artificial Sequence: Synthetic oligonucleotide
ccuccagugaaacacccgg

SEQ ID NO: 2160420 - RNA, 19 nt, Artificial Sequence
  Description of Artificial Sequence: Synthetic oligonucleotide
aucugaaugacaggucaca

SEQ ID NO: 2160421 - RNA, 19 nt, Artificial Sequence
  Description of Artificial Sequence: Synthetic oligonucleotide
cagccagaaggagagggcg

SEQ ID NO: 2160422 - RNA, 19 nt, Artificial Sequence
  Description of Artificial Sequence: Synthetic oligonucleotide
ccagaugcugauacgcugg

SEQ ID NO: 2160423 - RNA, 19 nt, Artificial Sequence
  Description of Artificial Sequence: Synthetic oligonucleotide
uuaccgauccauccucaua

SEQ ID NO: 2160424 - RNA, 19 nt, Artificial Sequence
  Description of Artificial Sequence: Synthetic oligonucleotide
aguuggugcccuuggggca

SEQ ID NO: 2160425 - RNA, 19 nt, Artificial Sequence
  Description of Artificial Sequence: Synthetic oligonucleotide
uuagucugccacagcccca

SEQ ID NO: 2160426 - RNA, 19 nt, Artificial Sequence
  Description of Artificial Sequence: Synthetic oligonucleotide
aucgcugcccuucccaggu

SEQ ID NO: 2160427 - RNA, 19 nt, Artificial Sequence
  Description of Artificial Sequence: Synthetic oligonucleotide
auuguccuccagugaaaca

SEQ ID NO: 2160428 - RNA, 19 nt, Artificial Sequence
  Description of Artificial Sequence: Synthetic oligonucleotide
cagcuaagucaugagcagg

SEQ ID NO: 2160429 - RNA, 19 nt, Artificial Sequence
  Description of Artificial Sequence: Synthetic oligonucleotide
gucaugagcagggguagag

SEQ ID NO: 2160430 - RNA, 19 nt, Artificial Sequence
  Description of Artificial Sequence: Synthetic oligonucleotide
uggccguccagacuccaga

SEQ ID NO: 2160431 - RNA, 19 nt, Artificial Sequence
  Description of Artificial Sequence: Synthetic oligonucleotide
cauuguccuccagugaaac

SEQ ID NO: 2160432 - RNA, 19 nt, Artificial Sequence
  Description of Artificial Sequence: Synthetic oligonucleotide
agcagggguagagugacca

SEQ ID NO: 2160433 - RNA, 19 nt, Artificial Sequence
  Description of Artificial Sequence: Synthetic oligonucleotide
ggauuaagacagcaguguc

SEQ ID NO: 2160434 - RNA, 19 nt, Artificial Sequence
  Description of Artificial Sequence: Synthetic oligonucleotide
guagagugaccagaugcug

SEQ ID NO: 2160435 - RNA, 19 nt, Artificial Sequence
  Description of Artificial Sequence: Synthetic oligonucleotide
auacagaagcacuguggaa

SEQ ID NO: 2160436 - RNA, 19 nt, Artificial Sequence
  Description of Artificial Sequence: Synthetic oligonucleotide
guccagacuccagacagcc

SEQ ID NO: 2160437 - RNA, 19 nt, Artificial Sequence
  Description of Artificial Sequence: Synthetic oligonucleotide
agcacuguggaaggccagg

SEQ ID NO: 2160438 - RNA, 19 nt, Artificial Sequence
  Description of Artificial Sequence: Synthetic oligonucleotide
auuuagggcagcaacuguu

SEQ ID NO: 2160439 - RNA, 19 nt, Artificial Sequence
  Description of Artificial Sequence: Synthetic oligonucleotide
gaaacacccggaugcgauc

SEQ ID NO: 2160440 - RNA, 19 nt, Artificial Sequence
  Description of Artificial Sequence: Synthetic oligonucleotide
uuaagacagcagugucuga

SEQ ID NO: 2160441 - RNA, 19 nt, Artificial Sequence
  Description of Artificial Sequence: Synthetic oligonucleotide
ucugaaccucaucgcugcc

SEQ ID NO: 2160442 - RNA, 19 nt, Artificial Sequence
  Description of Artificial Sequence: Synthetic oligonucleotide
cuucugagagucgaaguca

SEQ ID NO: 2160443 - RNA, 19 nt, Artificial Sequence
  Description of Artificial Sequence: Synthetic oligonucleotide
cuuaugaagaaaguggauu

SEQ ID NO: 2160444 - RNA, 19 nt, Artificial Sequence
  Description of Artificial Sequence: Synthetic oligonucleotide
gcuaagauuuuguggucug

SEQ ID NO: 2160445 - RNA, 19 nt, Artificial Sequence
  Description of Artificial Sequence: Synthetic oligonucleotide
acugacgucuuggauggca

SEQ ID NO: 2160446 - RNA, 19 nt, Artificial Sequence
  Description of Artificial Sequence: Synthetic oligonucleotide
uucccagguacagcaagca

SEQ ID NO: 2160447 - RNA, 19 nt, Artificial Sequence
  Description of Artificial Sequence: Synthetic oligonucleotide
augugcaccaggccacucu

SEQ ID NO: 2160448 - RNA, 19 nt, Artificial Sequence
  Description of Artificial Sequence: Synthetic oligonucleotide
uguccucagaggcccuuga

SEQ ID NO: 2160449 - RNA, 19 nt, Artificial Sequence
  Description of Artificial Sequence: Synthetic oligonucleotide
ggcacaugggcaugccugg

SEQ ID NO: 2160450 - RNA, 19 nt, Artificial Sequence
  Description of Artificial Sequence: Synthetic oligonucleotide
agccugagacgcccuuggc

SEQ ID NO: 2160451 - RNA, 19 nt, Artificial Sequence
  Description of Artificial Sequence: Synthetic oligonucleotide
aggcacaugggcaugccug

SEQ ID NO: 2160452 - RNA, 19 nt, Artificial Sequence
  Description of Artificial Sequence: Synthetic oligonucleotide
ucaguggcgaaggccacac

SEQ ID NO: 2160453 - RNA, 19 nt, Artificial Sequence
  Description of Artificial Sequence: Synthetic oligonucleotide
uccacagaccuuuggccau

SEQ ID NO: 2160454 - RNA, 19 nt, Artificial Sequence
  Description of Artificial Sequence: Synthetic oligonucleotide
acaggguuaccgauccauc

SEQ ID NO: 2160455 - RNA, 19 nt, Artificial Sequence
  Description of Artificial Sequence: Synthetic oligonucleotide
cugaaccucaucgcugccc

SEQ ID NO: 2160456 - RNA, 19 nt, Artificial Sequence
  Description of Artificial Sequence: Synthetic oligonucleotide
ugggucaagacuggauuaa

SEQ ID NO: 2160457 - RNA, 19 nt, Artificial Sequence
  Description of Artificial Sequence: Synthetic oligonucleotide
ggccauuuagggcagcaac

SEQ ID NO: 2160458 - RNA, 19 nt, Artificial Sequence
  Description of Artificial Sequence: Synthetic oligonucleotide
cacacuguccagcugaacu

SEQ ID NO: 2160459 - RNA, 19 nt, Artificial Sequence
  Description of Artificial Sequence: Synthetic oligonucleotide
uccggcuucaggguacaca

SEQ ID NO: 2160460 - RNA, 19 nt, Artificial Sequence
  Description of Artificial Sequence: Synthetic oligonucleotide
gcauccaacauagcugucc

SEQ ID NO: 2160461 - RNA, 19 nt, Artificial Sequence
  Description of Artificial Sequence: Synthetic oligonucleotide
uucagccagguuacacccu

SEQ ID NO: 2160462 - RNA, 19 nt, Artificial Sequence
  Description of Artificial Sequence: Synthetic oligonucleotide
cccagguacagcaagcauc

SEQ ID NO: 2160463 - RNA, 19 nt, Artificial Sequence
  Description of Artificial Sequence: Synthetic oligonucleotide
ugcccuuggggcagugucu

SEQ ID NO: 2160464 - RNA, 19 nt, Artificial Sequence
  Description of Artificial Sequence: Synthetic oligonucleotide
uggcuaagauuuugugguc

SEQ ID NO: 2160465 - RNA, 19 nt, Artificial Sequence
  Description of Artificial Sequence: Synthetic oligonucleotide
cugaaugacaggucacaaa

SEQ ID NO: 2160466 - RNA, 19 nt, Artificial Sequence
  Description of Artificial Sequence: Synthetic oligonucleotide
caucgcugcccuucccagg

SEQ ID NO: 2160467 - RNA, 19 nt, Artificial Sequence
  Description of Artificial Sequence: Synthetic oligonucleotide
cucagaggcccuugaggac

SEQ ID NO: 2160468 - RNA, 19 nt, Artificial Sequence
  Description of Artificial Sequence: Synthetic oligonucleotide
gccaguaccuucccggcag

SEQ ID NO: 2160469 - RNA, 19 nt, Artificial Sequence
  Description of Artificial Sequence: Synthetic oligonucleotide
aaggaacagagaaccuuau

SEQ ID NO: 2160470 - RNA, 19 nt, Artificial Sequence
  Description of Artificial Sequence: Synthetic oligonucleotide
ggugaguucaugagucuug

SEQ ID NO: 2160471 - RNA, 19 nt, Artificial Sequence
  Description of Artificial Sequence: Synthetic oligonucleotide
ccguccagacuccagacag

SEQ ID NO: 2160472 - RNA, 19 nt, Artificial Sequence
  Description of Artificial Sequence: Synthetic oligonucleotide
cagccaguaccuucccggc

SEQ ID NO: 2160473 - RNA, 19 nt, Artificial Sequence
  Description of Artificial Sequence: Synthetic oligonucleotide
gcaacuguucuucuggucu

SEQ ID NO: 2160474 - RNA, 19 nt, Artificial Sequence
  Description of Artificial Sequence: Synthetic oligonucleotide
ucccagguacagcaagcau

SEQ ID NO: 2160475 - RNA, 19 nt, Artificial Sequence
  Description of Artificial Sequence: Synthetic oligonucleotide
uggccauaauuuggugucc

SEQ ID NO: 2160476 - RNA, 19 nt, Artificial Sequence
  Description of Artificial Sequence: Synthetic oligonucleotide
cuucauuguccuccaguga

SEQ ID NO: 2160477 - RNA, 19 nt, Artificial Sequence
  Description of Artificial Sequence: Synthetic oligonucleotide
cuggaguuagucugccaca

SEQ ID NO: 2160478 - RNA, 19 nt, Artificial Sequence
  Description of Artificial Sequence: Synthetic oligonucleotide
gcaaucccaggauugguga

SEQ ID NO: 2160479 - RNA, 19 nt, Artificial Sequence
  Description of Artificial Sequence: Synthetic oligonucleotide
cugcagggacugcuggccg

SEQ ID NO: 2160480 - RNA, 19 nt, Artificial Sequence
  Description of Artificial Sequence: Synthetic oligonucleotide
ccaucaguggcgaaggcca

SEQ ID NO: 2160481 - RNA, 19 nt, Artificial Sequence
  Description of Artificial Sequence: Synthetic oligonucleotide
gucgaagucaaggcccaug

SEQ ID NO: 2160482 - RNA, 19 nt, Artificial Sequence
  Description of Artificial Sequence: Synthetic oligonucleotide
caccuuccgcuccaggaug

SEQ ID NO: 2160483 - RNA, 19 nt, Artificial Sequence
  Description of Artificial Sequence: Synthetic oligonucleotide
aggaccuuccacagggcug

SEQ ID NO: 2160484 - RNA, 19 nt, Artificial Sequence
  Description of Artificial Sequence: Synthetic oligonucleotide
uggugaguucaugagucuu

SEQ ID NO: 2160485 - RNA, 19 nt, Artificial Sequence
  Description of Artificial Sequence: Synthetic oligonucleotide
acgucuuggauggcaucuc

SEQ ID NO: 2160486 - RNA, 19 nt, Artificial Sequence
  Description of Artificial Sequence: Synthetic oligonucleotide
augcgaucggucccagccu

SEQ ID NO: 2160487 - RNA, 19 nt, Artificial Sequence
  Description of Artificial Sequence: Synthetic oligonucleotide
ugcagggacugcuggccgu

SEQ ID NO: 2160488 - RNA, 19 nt, Artificial Sequence
  Description of Artificial Sequence: Synthetic oligonucleotide
ugacgucuuggauggcauc

SEQ ID NO: 2160489 - RNA, 19 nt, Artificial Sequence
  Description of Artificial Sequence: Synthetic oligonucleotide
cuaagucaugagcaggggu

SEQ ID NO: 2160490 - RNA, 19 nt, Artificial Sequence
  Description of Artificial Sequence: Synthetic oligonucleotide
gccugagacgcccuuggcc

SEQ ID NO: 2160491 - RNA, 19 nt, Artificial Sequence
  Description of Artificial Sequence: Synthetic oligonucleotide
ugaguucaugagucuugua

SEQ ID NO: 2160492 - RNA, 19 nt, Artificial Sequence
  Description of Artificial Sequence: Synthetic oligonucleotide
gacgucuuggauggcaucu

SEQ ID NO: 2160493 - RNA, 19 nt, Artificial Sequence
  Description of Artificial Sequence: Synthetic oligonucleotide
gugcccuuggggcaguguc

SEQ ID NO: 2160494 - RNA, 19 nt, Artificial Sequence
  Description of Artificial Sequence: Synthetic oligonucleotide
ggauggcaucuccagaauc

SEQ ID NO: 2160495 - RNA, 19 nt, Artificial Sequence
  Description of Artificial Sequence: Synthetic oligonucleotide
cugauacgcuggucuuuag

SEQ ID NO: 2160496 - RNA, 19 nt, Artificial Sequence
  Description of Artificial Sequence: Synthetic oligonucleotide
cuggucuuuagacccugca

SEQ ID NO: 2160497 - RNA, 19 nt, Artificial Sequence
  Description of Artificial Sequence: Synthetic oligonucleotide
cucaucgcugcccuuccca

SEQ ID NO: 2160498 - RNA, 19 nt, Artificial Sequence
  Description of Artificial Sequence: Synthetic oligonucleotide
gcuaagucaugagcagggg

SEQ ID NO: 2160499 - RNA, 19 nt, Artificial Sequence
  Description of Artificial Sequence: Synthetic oligonucleotide
aggucacaaaaggaacaga

SEQ ID NO: 2160500 - RNA, 19 nt, Artificial Sequence
  Description of Artificial Sequence: Synthetic oligonucleotide
cuuccacagggcuggguca

SEQ ID NO: 2160501 - RNA, 19 nt, Artificial Sequence
  Description of Artificial Sequence: Synthetic oligonucleotide
augagcagggguagaguga

SEQ ID NO: 2160502 - RNA, 19 nt, Artificial Sequence
  Description of Artificial Sequence: Synthetic oligonucleotide
caucaguggcgaaggccac

SEQ ID NO: 2160503 - RNA, 19 nt, Artificial Sequence
  Description of Artificial Sequence: Synthetic oligonucleotide
gacgcccuuggccuucuga

SEQ ID NO: 2160504 - RNA, 19 nt, Artificial Sequence
  Description of Artificial Sequence: Synthetic oligonucleotide
ucuggccggauggugacuu

SEQ ID NO: 2160505 - RNA, 19 nt, Artificial Sequence
  Description of Artificial Sequence: Synthetic oligonucleotide
agccaguaccuucccggca

SEQ ID NO: 2160506 - RNA, 19 nt, Artificial Sequence
  Description of Artificial Sequence: Synthetic oligonucleotide
cugggucaagacuggauua

SEQ ID NO: 2160507 - RNA, 19 nt, Artificial Sequence
  Description of Artificial Sequence: Synthetic oligonucleotide
cugcaggcuccagaugugc

SEQ ID NO: 2160508 - RNA, 19 nt, Artificial Sequence
  Description of Artificial Sequence: Synthetic oligonucleotide
uaccuucccggcagagccu

SEQ ID NO: 2160509 - RNA, 19 nt, Artificial Sequence
  Description of Artificial Sequence: Synthetic oligonucleotide
cagccagguuacacccugg

SEQ ID NO: 2160510 - RNA, 19 nt, Artificial Sequence
  Description of Artificial Sequence: Synthetic oligonucleotide
gcgaaggccacacaguaua

SEQ ID NO: 2160511 - RNA, 19 nt, Artificial Sequence
  Description of Artificial Sequence: Synthetic oligonucleotide
ccgauccauccucauagcc

SEQ ID NO: 2160512 - RNA, 19 nt, Artificial Sequence
  Description of Artificial Sequence: Synthetic oligonucleotide
agcaagccaucaguggcga

SEQ ID NO: 2160513 - RNA, 19 nt, Artificial Sequence
  Description of Artificial Sequence: Synthetic oligonucleotide
aaggcccaugacagguucu

SEQ ID NO: 2160514 - RNA, 19 nt, Artificial Sequence
  Description of Artificial Sequence: Synthetic oligonucleotide
cuccagugaaacacccgga

SEQ ID NO: 2160515 - RNA, 19 nt, Artificial Sequence
  Description of Artificial Sequence: Synthetic oligonucleotide
gagagggcggggacuggag

SEQ ID NO: 2160516 - RNA, 19 nt, Artificial Sequence
  Description of Artificial Sequence: Synthetic oligonucleotide
ggucaagacuggauuaaga

SEQ ID NO: 2160517 - RNA, 19 nt, Artificial Sequence
  Description of Artificial Sequence: Synthetic oligonucleotide
ggaguuagucugccacagc

SEQ ID NO: 2160518 - RNA, 19 nt, Artificial Sequence
  Description of Artificial Sequence: Synthetic oligonucleotide
gcccaugacagguucuuca

SEQ ID NO: 2160519 - RNA, 19 nt, Artificial Sequence
  Description of Artificial Sequence: Synthetic oligonucleotide
guggauuccacagaccuuu

SEQ ID NO: 2160520 - RNA, 19 nt, Artificial Sequence
  Description of Artificial Sequence: Synthetic oligonucleotide
ccagacagccaguaccuuc

SEQ ID NO: 2160521 - RNA, 19 nt, Artificial Sequence
  Description of Artificial Sequence: Synthetic oligonucleotide
uuccacagggcugggucaa

SEQ ID NO: 2160522 - RNA, 19 nt, Artificial Sequence
  Description of Artificial Sequence: Synthetic oligonucleotide
gggcagugucuucagccag

SEQ ID NO: 2160523 - RNA, 19 nt, Artificial Sequence
  Description of Artificial Sequence: Synthetic oligonucleotide
ccggcagagccugagacgc

SEQ ID NO: 2160524 - RNA, 19 nt, Artificial Sequence
  Description of Artificial Sequence: Synthetic oligonucleotide
ucccggcccuggcugagga

SEQ ID NO: 2160525 - RNA, 19 nt, Artificial Sequence
  Description of Artificial Sequence: Synthetic oligonucleotide
uggccggauggugacuucu

SEQ ID NO: 2160526 - RNA, 19 nt, Artificial Sequence
  Description of Artificial Sequence: Synthetic oligonucleotide
ggguuaccgauccauccuc

SEQ ID NO: 2160527 - RNA, 19 nt, Artificial Sequence
  Description of Artificial Sequence: Synthetic oligonucleotide
ugcuggccguccagacucc

SEQ ID NO: 2160528 - RNA, 19 nt, Artificial Sequence
  Description of Artificial Sequence: Synthetic oligonucleotide
ggacagagcucuugcagaa

SEQ ID NO: 2160529 - RNA, 19 nt, Artificial Sequence
  Description of Artificial Sequence: Synthetic oligonucleotide
cuccagacagccaguaccu

SEQ ID NO: 2160530 - RNA, 19 nt, Artificial Sequence
  Description of Artificial Sequence: Synthetic oligonucleotide
gguacacacugacgucuug

SEQ ID NO: 2160531 - RNA, 19 nt, Artificial Sequence
  Description of Artificial Sequence: Synthetic oligonucleotide
ucggucccagccugcugug

SEQ ID NO: 2160532 - RNA, 19 nt, Artificial Sequence
  Description of Artificial Sequence: Synthetic oligonucleotide
gccagguuacacccuggcc

SEQ ID NO: 2160533 - RNA, 19 nt, Artificial Sequence
  Description of Artificial Sequence: Synthetic oligonucleotide
caggaugucccacaggguu

SEQ ID NO: 2160534 - RNA, 19 nt, Artificial Sequence
  Description of Artificial Sequence: Synthetic oligonucleotide
ugcugauacgcuggucuuu

SEQ ID NO: 2160535 - RNA, 19 nt, Artificial Sequence
  Description of Artificial Sequence: Synthetic oligonucleotide
ggccuucugagagucgaag

SEQ ID NO: 2160536 - RNA, 19 nt, Artificial Sequence
  Description of Artificial Sequence: Synthetic oligonucleotide
cuucccggcagagccugag

SEQ ID NO: 2160537 - RNA, 19 nt, Artificial Sequence
  Description of Artificial Sequence: Synthetic oligonucleotide
aggccacacaguauacaga

SEQ ID NO: 2160538 - RNA, 19 nt, Artificial Sequence
  Description of Artificial Sequence: Synthetic oligonucleotide
cagcaagcaagccaucagu

SEQ ID NO: 2160539 - RNA, 19 nt, Artificial Sequence
  Description of Artificial Sequence: Synthetic oligonucleotide
cccuugaggaccuuccaca

SEQ ID NO: 2160540 - RNA, 19 nt, Artificial Sequence
  Description of Artificial Sequence: Synthetic oligonucleotide
gguagagugaccagaugcu

SEQ ID NO: 2160541 - RNA, 19 nt, Artificial Sequence
  Description of Artificial Sequence: Synthetic oligonucleotide
ccauaauuugguguccuca

SEQ ID NO: 2160542 - RNA, 19 nt, Artificial Sequence
  Description of Artificial Sequence: Synthetic oligonucleotide
uggccauuuagggcagcaa

SEQ ID NO: 2160543 - RNA, 19 nt, Artificial Sequence
  Description of Artificial Sequence: Synthetic oligonucleotide
agcauccaacauagcuguc

SEQ ID NO: 2160544 - RNA, 19 nt, Artificial Sequence
  Description of Artificial Sequence: Synthetic oligonucleotide
cacccggaugcgaucgguc

SEQ ID NO: 2160545 - RNA, 19 nt, Artificial Sequence
  Description of Artificial Sequence: Synthetic oligonucleotide
cagguuacacccuggcccu

SEQ ID NO: 2160546 - RNA, 19 nt, Artificial Sequence
  Description of Artificial Sequence: Synthetic oligonucleotide
agaugugcaccaggccacu

SEQ ID NO: 2160547 - RNA, 19 nt, Artificial Sequence
  Description of Artificial Sequence: Synthetic oligonucleotide
ugagacgcccuuggccuuc

SEQ ID NO: 2160548 - RNA, 19 nt, Artificial Sequence
  Description of Artificial Sequence: Synthetic oligonucleotide
ugucuucagccagguuaca

SEQ ID NO: 2160549 - RNA, 19 nt, Artificial Sequence
  Description of Artificial Sequence: Synthetic oligonucleotide
agggacugcuggccgucca

SEQ ID NO: 2160550 - RNA, 19 nt, Artificial Sequence
  Description of Artificial Sequence: Synthetic oligonucleotide
agccugcuguggcuaagau

SEQ ID NO: 2160551 - RNA, 19 nt, Artificial Sequence
  Description of Artificial Sequence: Synthetic oligonucleotide
guggucuggccggauggug

SEQ ID NO: 2160552 - RNA, 19 nt, Artificial Sequence
  Description of Artificial Sequence: Synthetic oligonucleotide
cccggcagagccugagacg

SEQ ID NO: 2160553 - RNA, 19 nt, Artificial Sequence
  Description of Artificial Sequence: Synthetic oligonucleotide
gaccagaugcugauacgcu

SEQ ID NO: 2160554 - RNA, 19 nt, Artificial Sequence
  Description of Artificial Sequence: Synthetic oligonucleotide
gccggauggugacuucugc

SEQ ID NO: 2160555 - RNA, 19 nt, Artificial Sequence
  Description of Artificial Sequence: Synthetic oligonucleotide
gugaguucaugagucuugu

SEQ ID NO: 2160556 - RNA, 19 nt, Artificial Sequence
  Description of Artificial Sequence: Synthetic oligonucleotide
aggaugucccacaggguua

SEQ ID NO: 2160557 - RNA, 19 nt, Artificial Sequence
  Description of Artificial Sequence: Synthetic oligonucleotide
gggacugcuggccguccag

SEQ ID NO: 2160558 - RNA, 19 nt, Artificial Sequence
  Description of Artificial Sequence: Synthetic oligonucleotide
gaugugcaccaggccacuc

SEQ ID NO: 2160559 - RNA, 19 nt, Artificial Sequence
  Description of Artificial Sequence: Synthetic oligonucleotide
agacuccagacagccagua

SEQ ID NO: 2160560 - RNA, 19 nt, Artificial Sequence
  Description of Artificial Sequence: Synthetic oligonucleotide
ggcacagccgcaggucccg

SEQ ID NO: 2160561 - RNA, 19 nt, Artificial Sequence
  Description of Artificial Sequence: Synthetic oligonucleotide
gcccuugaggaccuuccac

SEQ ID NO: 2160562 - RNA, 19 nt, Artificial Sequence
  Description of Artificial Sequence: Synthetic oligonucleotide
guggccauuuagggcagca

SEQ ID NO: 2160563 - RNA, 19 nt, Artificial Sequence
  Description of Artificial Sequence: Synthetic oligonucleotide
gccauaauuugguguccuc

SEQ ID NO: 2160564 - RNA, 19 nt, Artificial Sequence
  Description of Artificial Sequence: Synthetic oligonucleotide
ugguguccucagaggcccu

SEQ ID NO: 2160565 - RNA, 19 nt, Artificial Sequence
  Description of Artificial Sequence: Synthetic oligonucleotide
gaggcccuugaggaccuuc

SEQ ID NO: 2160566 - RNA, 19 nt, Artificial Sequence
  Description of Artificial Sequence: Synthetic oligonucleotide
gguuacacccuggcccuug

SEQ ID NO: 2160567 - RNA, 19 nt, Artificial Sequence
  Description of Artificial Sequence: Synthetic oligonucleotide
uggcccuuguggccauuua

SEQ ID NO: 2160568 - RNA, 19 nt, Artificial Sequence
  Description of Artificial Sequence: Synthetic oligonucleotide
acacccggaugcgaucggu

SEQ ID NO: 2160569 - RNA, 19 nt, Artificial Sequence
  Description of Artificial Sequence: Synthetic oligonucleotide
gcagugucugacagcuaag

SEQ ID NO: 2160570 - RNA, 19 nt, Artificial Sequence
  Description of Artificial Sequence: Synthetic oligonucleotide
guuaccgauccauccucau

SEQ ID NO: 2160571 - RNA, 19 nt, Artificial Sequence
  Description of Artificial Sequence: Synthetic oligonucleotide
ucccaggauuggugaguuc

SEQ ID NO: 2160572 - RNA, 19 nt, Artificial Sequence
  Description of Artificial Sequence: Synthetic oligonucleotide
ggccguccagacuccagac

SEQ ID NO: 2160573 - RNA, 19 nt, Artificial Sequence
  Description of Artificial Sequence: Synthetic oligonucleotide
ggcuaagauuuuguggucu

SEQ ID NO: 2160574 - RNA, 19 nt, Artificial Sequence
  Description of Artificial Sequence: Synthetic oligonucleotide
ggcaauccggcugcacacc

SEQ ID NO: 2160575 - RNA, 19 nt, Artificial Sequence
  Description of Artificial Sequence: Synthetic oligonucleotide
gcugggucaagacuggauu

SEQ ID NO: 2160576 - RNA, 19 nt, Artificial Sequence
  Description of Artificial Sequence: Synthetic oligonucleotide
gguuaccgauccauccuca

SEQ ID NO: 2160577 - RNA, 19 nt, Artificial Sequence
  Description of Artificial Sequence: Synthetic oligonucleotide
aggcccaugacagguucuu

SEQ ID NO: 2160578 - RNA, 19 nt, Artificial Sequence
  Description of Artificial Sequence: Synthetic oligonucleotide
aggagagggcggggacugg

SEQ ID NO: 2160579 - RNA, 19 nt, Artificial Sequence
  Description of Artificial Sequence: Synthetic oligonucleotide
ccggcugcacaccuuccgc

SEQ ID NO: 2160580 - RNA, 19 nt, Artificial Sequence
  Description of Artificial Sequence: Synthetic oligonucleotide
cccggaugcgaucgguccc

SEQ ID NO: 2160581 - RNA, 19 nt, Artificial Sequence
  Description of Artificial Sequence: Synthetic oligonucleotide
cugcagcaagcaagccauc

SEQ ID NO: 2160582 - RNA, 19 nt, Artificial Sequence
  Description of Artificial Sequence: Synthetic oligonucleotide
uccugcccucugccaaguc

SEQ ID NO: 2160583 - RNA, 19 nt, Artificial Sequence
  Description of Artificial Sequence: Synthetic oligonucleotide
cacaggguuaccgauccau

SEQ ID NO: 2160584 - RNA, 19 nt, Artificial Sequence
  Description of Artificial Sequence: Synthetic oligonucleotide
gaccuuccacagggcuggg

SEQ ID NO: 2160585 - RNA, 19 nt, Artificial Sequence
  Description of Artificial Sequence: Synthetic oligonucleotide
ccggauggugacuucugca

SEQ ID NO: 2160586 - RNA, 19 nt, Artificial Sequence
  Description of Artificial Sequence: Synthetic oligonucleotide
cuucugcaaucccaggauu

SEQ ID NO: 2160587 - RNA, 19 nt, Artificial Sequence
  Description of Artificial Sequence: Synthetic oligonucleotide
gcugauacgcuggucuuua

SEQ ID NO: 2160588 - RNA, 19 nt, Artificial Sequence
  Description of Artificial Sequence: Synthetic oligonucleotide
ggaugcgaucggucccagc

SEQ ID NO: 2160589 - RNA, 19 nt, Artificial Sequence
  Description of Artificial Sequence: Synthetic oligonucleotide
cuggccggauggugacuuc

SEQ ID NO: 2160590 - RNA, 19 nt, Artificial Sequence
  Description of Artificial Sequence: Synthetic oligonucleotide
guuacacccuggcccuugu

SEQ ID NO: 2160591 - RNA, 19 nt, Artificial Sequence
  Description of Artificial Sequence: Synthetic oligonucleotide
cgaaggccacacaguauac

SEQ ID NO: 2160592 - RNA, 19 nt, Artificial Sequence
  Description of Artificial Sequence: Synthetic oligonucleotide
gggcaugccuggcuuggca

SEQ ID NO: 2160593 - RNA, 19 nt, Artificial Sequence
  Description of Artificial Sequence: Synthetic oligonucleotide
gcggggacuggaguuaguc

SEQ ID NO: 2160594 - RNA, 19 nt, Artificial Sequence
  Description of Artificial Sequence: Synthetic oligonucleotide
agggcggggacuggaguua

SEQ ID NO: 2160595 - RNA, 19 nt, Artificial Sequence
  Description of Artificial Sequence: Synthetic oligonucleotide
ggcugaggaguuggugccc

SEQ ID NO: 2160596 - RNA, 19 nt, Artificial Sequence
  Description of Artificial Sequence: Synthetic oligonucleotide
ggcuccagaugugcaccag

SEQ ID NO: 2160597 - RNA, 19 nt, Artificial Sequence
  Description of Artificial Sequence: Synthetic oligonucleotide
cguccagacuccagacagc

SEQ ID NO: 2160598 - RNA, 19 nt, Artificial Sequence
  Description of Artificial Sequence: Synthetic oligonucleotide
acgcuggucuuuagacccu

SEQ ID NO: 2160599 - RNA, 19 nt, Artificial Sequence
  Description of Artificial Sequence: Synthetic oligonucleotide
guacaccugcagggacugc

SEQ ID NO: 2160600 - RNA, 19 nt, Artificial Sequence
  Description of Artificial Sequence: Synthetic oligonucleotide
gccguccagacuccagaca

SEQ ID NO: 2160601 - RNA, 19 nt, Artificial Sequence
  Description of Artificial Sequence: Synthetic oligonucleotide
agucgaagucaaggcccau

SEQ ID NO: 2160602 - RNA, 19 nt, Artificial Sequence
  Description of Artificial Sequence: Synthetic oligonucleotide
ccuuaugaagaaaguggau

SEQ ID NO: 2160603 - RNA, 19 nt, Artificial Sequence
  Description of Artificial Sequence: Synthetic oligonucleotide
ggcccuugaggaccuucca

SEQ ID NO: 2160604 - RNA, 19 nt, Artificial Sequence
  Description of Artificial Sequence: Synthetic oligonucleotide
cgaagucaaggcccaugac

SEQ ID NO: 2160605 - RNA, 19 nt, Artificial Sequence
  Description of Artificial Sequence: Synthetic oligonucleotide
augccuggcuuggcaucug

SEQ ID NO: 2160606 - RNA, 19 nt, Artificial Sequence
  Description of Artificial Sequence: Synthetic oligonucleotide
ucgcugcccuucccaggua

SEQ ID NO: 2160607 - RNA, 19 nt, Artificial Sequence
  Description of Artificial Sequence: Synthetic oligonucleotide
cagccugcuguggcuaaga

SEQ ID NO: 2160608 - RNA, 19 nt, Artificial Sequence
  Description of Artificial Sequence: Synthetic oligonucleotide
gcaauccggcugcacaccu

SEQ ID NO: 2160609 - RNA, 19 nt, Artificial Sequence
  Description of Artificial Sequence: Synthetic oligonucleotide
gccuggcuuggcaucugcc

SEQ ID NO: 2160610 - RNA, 19 nt, Artificial Sequence
  Description of Artificial Sequence: Synthetic oligonucleotide
ggccauaauuugguguccu

SEQ ID NO: 2160611 - RNA, 19 nt, Artificial Sequence
  Description of Artificial Sequence: Synthetic oligonucleotide
cacugacgucuuggauggc

SEQ ID NO: 2160612 - RNA, 19 nt, Artificial Sequence
  Description of Artificial Sequence: Synthetic oligonucleotide
gggcggggacuggaguuag

SEQ ID NO: 2160613 - RNA, 19 nt, Artificial Sequence
  Description of Artificial Sequence: Synthetic oligonucleotide
cugcaaucccaggauuggu

SEQ ID NO: 2160614 - RNA, 19 nt, Artificial Sequence
  Description of Artificial Sequence: Synthetic oligonucleotide
ggcaugccuggcuuggcau

SEQ ID NO: 2160615 - RNA, 19 nt, Artificial Sequence
  Description of Artificial Sequence: Synthetic oligonucleotide
cagaggcccuugaggaccu

SEQ ID NO: 2160616 - RNA, 19 nt, Artificial Sequence
  Description of Artificial Sequence: Synthetic oligonucleotide
caggcacaugggcaugccu

SEQ ID NO: 2160617 - RNA, 19 nt, Artificial Sequence
  Description of Artificial Sequence: Synthetic oligonucleotide
cacagaccuuuggccauaa

SEQ ID NO: 2160618 - RNA, 19 nt, Artificial Sequence
  Description of Artificial Sequence: Synthetic oligonucleotide
gccuccggcuucaggguac

SEQ ID NO: 2160619 - RNA, 19 nt, Artificial Sequence
  Description of Artificial Sequence: Synthetic oligonucleotide
cgcugcccuucccagguac

SEQ ID NO: 2160620 - RNA, 19 nt, Artificial Sequence
  Description of Artificial Sequence: Synthetic oligonucleotide
caucugccuccggcuucag

SEQ ID NO: 2160621 - RNA, 19 nt, Artificial Sequence
  Description of Artificial Sequence: Synthetic oligonucleotide
caguggcgaaggccacaca

SEQ ID NO: 2160622 - RNA, 19 nt, Artificial Sequence
  Description of Artificial Sequence: Synthetic oligonucleotide
ggcccaugacagguucuuc

SEQ ID NO: 2160623 - RNA, 19 nt, Artificial Sequence
  Description of Artificial Sequence: Synthetic oligonucleotide
cagguacagcaagcaucca

SEQ ID NO: 2160624 - RNA, 19 nt, Artificial Sequence
  Description of Artificial Sequence: Synthetic oligonucleotide
gcgaucggucccagccugc

SEQ ID NO: 2160625 - RNA, 19 nt, Artificial Sequence
  Description of Artificial Sequence: Synthetic oligonucleotide
gcugaacuguguccaugau

SEQ ID NO: 2160626 - RNA, 19 nt, Artificial Sequence
  Description of Artificial Sequence: Synthetic oligonucleotide
gaaccucaucgcugcccuu

SEQ ID NO: 2160627 - RNA, 19 nt, Artificial Sequence
  Description of Artificial Sequence: Synthetic oligonucleotide
cuccggcuucaggguacac

SEQ ID NO: 2160628 - RNA, 19 nt, Artificial Sequence
  Description of Artificial Sequence: Synthetic oligonucleotide
gcugcccuucccagguaca

SEQ ID NO: 2160629 - RNA, 19 nt, Artificial Sequence
  Description of Artificial Sequence: Synthetic oligonucleotide
agguuacacccuggcccuu

SEQ ID NO: 2160630 - RNA, 19 nt, Artificial Sequence
  Description of Artificial Sequence: Synthetic oligonucleotide
gcacagccgcaggucccgg

SEQ ID NO: 2160631 - RNA, 19 nt, Artificial Sequence
  Description of Artificial Sequence: Synthetic oligonucleotide
gcaagccaucaguggcgaa

SEQ ID NO: 2160632 - RNA, 19 nt, Artificial Sequence
  Description of Artificial Sequence: Synthetic oligonucleotide
ccggaugcgaucgguccca

SEQ ID NO: 2160633 - RNA, 19 nt, Artificial Sequence
  Description of Artificial Sequence: Synthetic oligonucleotide
cugagacgcccuuggccuu

SEQ ID NO: 2160634 - RNA, 19 nt, Artificial Sequence
  Description of Artificial Sequence: Synthetic oligonucleotide
ccaguaccuucccggcaga

SEQ ID NO: 2160635 - RNA, 19 nt, Artificial Sequence
  Description of Artificial Sequence: Synthetic oligonucleotide
cgcuggucuuuagacccug

SEQ ID NO: 2160636 - RNA, 19 nt, Artificial Sequence
  Description of Artificial Sequence: Synthetic oligonucleotide
cccggcccuggcugaggag

SEQ ID NO: 2160637 - RNA, 19 nt, Artificial Sequence
  Description of Artificial Sequence: Synthetic oligonucleotide
ggcgaaggccacacaguau

SEQ ID NO: 2160638 - RNA, 19 nt, Artificial Sequence
  Description of Artificial Sequence: Synthetic oligonucleotide
gucuggccggauggugacu

SEQ ID NO: 2160639 - RNA, 19 nt, Artificial Sequence
  Description of Artificial Sequence: Synthetic oligonucleotide
cugaggaguuggugcccuu

SEQ ID NO: 2160640 - RNA, 19 nt, Artificial Sequence
  Description of Artificial Sequence: Synthetic oligonucleotide
ggguacacacugacgucuu

SEQ ID NO: 2160641 - RNA, 19 nt, Artificial Sequence
  Description of Artificial Sequence: Synthetic oligonucleotide
ccgcuccaggaugucccac

SEQ ID NO: 2160642 - RNA, 19 nt, Artificial Sequence
  Description of Artificial Sequence: Synthetic oligonucleotide
ccacaggguuaccgaucca

SEQ ID NO: 2160643 - RNA, 19 nt, Artificial Sequence
  Description of Artificial Sequence: Synthetic oligonucleotide
ccggcccuggcugaggagu

SEQ ID NO: 2160644 - RNA, 19 nt, Artificial Sequence
  Description of Artificial Sequence: Synthetic oligonucleotide
cuggcccuuguggccauuu

SEQ ID NO: 2160645 - RNA, 19 nt, Artificial Sequence
  Description of Artificial Sequence: Synthetic oligonucleotide
gguguccucagaggcccuu

SEQ ID NO: 2160646 - RNA, 19 nt, Artificial Sequence
  Description of Artificial Sequence: Synthetic oligonucleotide
gcccuuggggcagugucuu

SEQ ID NO: 2160647 - RNA, 19 nt, Artificial Sequence
  Description of Artificial Sequence: Synthetic oligonucleotide
gcagagccugagacgcccu

SEQ ID NO: 2160648 - RNA, 19 nt, Artificial Sequence
  Description of Artificial Sequence: Synthetic oligonucleotide
ccuccggcuucaggguaca

SEQ ID NO: 2160649 - RNA, 19 nt, Artificial Sequence
  Description of Artificial Sequence: Synthetic oligonucleotide
cggaugcgaucggucccag

SEQ ID NO: 2160650 - RNA, 19 nt, Artificial Sequence
  Description of Artificial Sequence: Synthetic oligonucleotide
ggcggggacuggaguuagu

SEQ ID NO: 2160651 - RNA, 19 nt, Artificial Sequence
  Description of Artificial Sequence: Synthetic oligonucleotide
uauauuagcauacaaaagg

SEQ ID NO: 2160652 - RNA, 19 nt, Artificial Sequence
  Description of Artificial Sequence: Synthetic oligonucleotide
augaaauucacauuaaugc

SEQ ID NO: 2160653 - RNA, 19 nt, Artificial Sequence
  Description of Artificial Sequence: Synthetic oligonucleotide
aauagcugaauaaauagcc

SEQ ID NO: 2160654 - RNA, 19 nt, Artificial Sequence
  Description of Artificial Sequence: Synthetic oligonucleotide
ugaauguauaacuugaagg

SEQ ID NO: 2160655 - RNA, 19 nt, Artificial Sequence
  Description of Artificial Sequence: Synthetic oligonucleotide
uuaauaaagaauuuagagc

SEQ ID NO: 2160656 - RNA, 19 nt, Artificial Sequence
  Description of Artificial Sequence: Synthetic oligonucleotide
uuauaugucagaaugauaa

SEQ ID NO: 2160657 - RNA, 19 nt, Artificial Sequence
  Description of Artificial Sequence: Synthetic oligonucleotide
ucuguuauaugucagaaug

SEQ ID NO: 2160658 - RNA, 19 nt, Artificial Sequence
  Description of Artificial Sequence: Synthetic oligonucleotide
agaauaaucaaauaagaca

SEQ ID NO: 2160659 - RNA, 19 nt, Artificial Sequence
  Description of Artificial Sequence: Synthetic oligonucleotide
aaugucagcgauuaaguag

SEQ ID NO: 2160660 - RNA, 19 nt, Artificial Sequence
  Description of Artificial Sequence: Synthetic oligonucleotide
aaaauuacgucaucuuugg

SEQ ID NO: 2160661 - RNA, 19 nt, Artificial Sequence
  Description of Artificial Sequence: Synthetic oligonucleotide
agacacaagaacuaugggc

SEQ ID NO: 2160662 - RNA, 19 nt, Artificial Sequence
  Description of Artificial Sequence: Synthetic oligonucleotide
uaugaaauucacauuaaug

SEQ ID NO: 2160663 - RNA, 19 nt, Artificial Sequence
  Description of Artificial Sequence: Synthetic oligonucleotide
aagaaagcgaaaugacucc

SEQ ID NO: 2160664 - RNA, 19 nt, Artificial Sequence
  Description of Artificial Sequence: Synthetic oligonucleotide
aaaguuuccacuccaucac

SEQ ID NO: 2160665 - RNA, 19 nt, Artificial Sequence
  Description of Artificial Sequence: Synthetic oligonucleotide
acguuguaaauccugaggc

SEQ ID NO: 2160666 - RNA, 19 nt, Artificial Sequence
  Description of Artificial Sequence: Synthetic oligonucleotide
uuugccuacacacucagcc

SEQ ID NO: 2160667 - RNA, 19 nt, Artificial Sequence
  Description of Artificial Sequence: Synthetic oligonucleotide
uaaaccaucauauuauaca

SEQ ID NO: 2160668 - RNA, 19 nt, Artificial Sequence
  Description of Artificial Sequence: Synthetic oligonucleotide
acaaauucgucuaacaagc

SEQ ID NO: 2160669 - RNA, 19 nt, Artificial Sequence
  Description of Artificial Sequence: Synthetic oligonucleotide
uucagaacgaacucgaacc

SEQ ID NO: 2160670 - RNA, 19 nt, Artificial Sequence
  Description of Artificial Sequence: Synthetic oligonucleotide
gaaaaccuggauaagaagg

SEQ ID NO: 2160671 - RNA, 19 nt, Artificial Sequence
  Description of Artificial Sequence: Synthetic oligonucleotide
auagauuacaccauccucc

SEQ ID NO: 2160672 - RNA, 19 nt, Artificial Sequence
  Description of Artificial Sequence: Synthetic oligonucleotide
uuacuuaugaaauucacau

SEQ ID NO: 2160673 - RNA, 19 nt, Artificial Sequence
  Description of Artificial Sequence: Synthetic oligonucleotide
uacaaauucgucuaacaag

SEQ ID NO: 2160674 - RNA, 19 nt, Artificial Sequence
  Description of Artificial Sequence: Synthetic oligonucleotide
gauaagaaggcucaggcac

SEQ ID NO: 2160675 - RNA, 19 nt, Artificial Sequence
  Description of Artificial Sequence: Synthetic oligonucleotide
aaagguaacaauuuacuuu

SEQ ID NO: 2160676 - RNA, 19 nt, Artificial Sequence
  Description of Artificial Sequence: Synthetic oligonucleotide
ugaauaaauagccauuacu

SEQ ID NO: 2160677 - RNA, 19 nt, Artificial Sequence
  Description of Artificial Sequence: Synthetic oligonucleotide
agaacuaugggcuuaauaa

SEQ ID NO: 2160678 - RNA, 19 nt, Artificial Sequence
  Description of Artificial Sequence: Synthetic oligonucleotide
caaauugucauuaucucag

SEQ ID NO: 2160679 - RNA, 19 nt, Artificial Sequence
  Description of Artificial Sequence: Synthetic oligonucleotide
aaacagaaacuauagauua

SEQ ID NO: 2160680 - RNA, 19 nt, Artificial Sequence
  Description of Artificial Sequence: Synthetic oligonucleotide
aaaaccuggauaagaaggc

SEQ ID NO: 2160681 - RNA, 19 nt, Artificial Sequence
  Description of Artificial Sequence: Synthetic oligonucleotide
aaagcgaaaugacuccuac

SEQ ID NO: 2160682 - RNA, 19 nt, Artificial Sequence
  Description of Artificial Sequence: Synthetic oligonucleotide
aaguaugugaauguauaac

SEQ ID NO: 2160683 - RNA, 19 nt, Artificial Sequence
  Description of Artificial Sequence: Synthetic oligonucleotide
uuauacaaaacuuuguaua

SEQ ID NO: 2160684 - RNA, 19 nt, Artificial Sequence
  Description of Artificial Sequence: Synthetic oligonucleotide
aacucgaaccuauacaucu

SEQ ID NO: 2160685 - RNA, 19 nt, Artificial Sequence
  Description of Artificial Sequence: Synthetic oligonucleotide
aauacaaauucgucuaaca

SEQ ID NO: 2160686 - RNA, 19 nt, Artificial Sequence
  Description of Artificial Sequence: Synthetic oligonucleotide
uuugaagugaaauuuuggu

SEQ ID NO: 2160687 - RNA, 19 nt, Artificial Sequence
  Description of Artificial Sequence: Synthetic oligonucleotide
aaauccaugcuuugccuac

SEQ ID NO: 2160688 - RNA, 19 nt, Artificial Sequence
  Description of Artificial Sequence: Synthetic oligonucleotide
ucugaauuuaggacagugg

SEQ ID NO: 2160689 - RNA, 19 nt, Artificial Sequence
  Description of Artificial Sequence: Synthetic oligonucleotide
uauuauacaaaacuuugua

SEQ ID NO: 2160690 - RNA, 19 nt, Artificial Sequence
  Description of Artificial Sequence: Synthetic oligonucleotide
aagguaacaauuuacuuuu

SEQ ID NO: 2160691 - RNA, 19 nt, Artificial Sequence
  Description of Artificial Sequence: Synthetic oligonucleotide
aauucgucuaacaagccuc

SEQ ID NO: 2160692 - RNA, 19 nt, Artificial Sequence
  Description of Artificial Sequence: Synthetic oligonucleotide
acuuaugaaauucacauua

SEQ ID NO: 2160693 - RNA, 19 nt, Artificial Sequence
  Description of Artificial Sequence: Synthetic oligonucleotide
aauuacgucaucuuuggua

SEQ ID NO: 2160694 - RNA, 19 nt, Artificial Sequence
  Description of Artificial Sequence: Synthetic oligonucleotide
uacguuguaaauccugagg

SEQ ID NO: 2160695 - RNA, 19 nt, Artificial Sequence
  Description of Artificial Sequence: Synthetic oligonucleotide
aacgaacucgaaccuauac

SEQ ID NO: 2160696 - RNA, 19 nt, Artificial Sequence
  Description of Artificial Sequence: Synthetic oligonucleotide
cuaacaagccucuugguag

SEQ ID NO: 2160697 - RNA, 19 nt, Artificial Sequence
  Description of Artificial Sequence: Synthetic oligonucleotide
uuuaaaaguuuccacucca

SEQ ID NO: 2160698 - RNA, 19 nt, Artificial Sequence
  Description of Artificial Sequence: Synthetic oligonucleotide
aaaccaucauauuauacaa

SEQ ID NO: 2160699 - RNA, 19 nt, Artificial Sequence
  Description of Artificial Sequence: Synthetic oligonucleotide
auguuugucuaucaaauug

SEQ ID NO: 2160700 - RNA, 19 nt, Artificial Sequence
  Description of Artificial Sequence: Synthetic oligonucleotide
guaguggcauuucagaacg

SEQ ID NO: 2160701 - RNA, 19 nt, Artificial Sequence
  Description of Artificial Sequence: Synthetic oligonucleotide
uugucuaucaaauugucau

SEQ ID NO: 2160702 - RNA, 19 nt, Artificial Sequence
  Description of Artificial Sequence: Synthetic oligonucleotide
uaugugaauguauaacuug

SEQ ID NO: 2160703 - RNA, 19 nt, Artificial Sequence
  Description of Artificial Sequence: Synthetic oligonucleotide
uggauaagaaggcucaggc

SEQ ID NO: 2160704 - RNA, 19 nt, Artificial Sequence
  Description of Artificial Sequence: Synthetic oligonucleotide
ucagcgauuaaguagucug

SEQ ID NO: 2160705 - RNA, 19 nt, Artificial Sequence
  Description of Artificial Sequence: Synthetic oligonucleotide
uuaaugaauagcugaauaa

SEQ ID NO: 2160706 - RNA, 19 nt, Artificial Sequence
  Description of Artificial Sequence: Synthetic oligonucleotide
aaugguuuacuuguaucac

SEQ ID NO: 2160707 - RNA, 19 nt, Artificial Sequence
  Description of Artificial Sequence: Synthetic oligonucleotide
auaaaugggugcuuguauc

SEQ ID NO: 2160708 - RNA, 19 nt, Artificial Sequence
  Description of Artificial Sequence: Synthetic oligonucleotide
auagccauuacuuaugaaa

SEQ ID NO: 2160709 - RNA, 19 nt, Artificial Sequence
  Description of Artificial Sequence: Synthetic oligonucleotide
uaaauagccauuacuuaug

SEQ ID NO: 2160710 - RNA, 19 nt, Artificial Sequence
  Description of Artificial Sequence: Synthetic oligonucleotide
auaaagaauuuagagcugg

SEQ ID NO: 2160711 - RNA, 19 nt, Artificial Sequence
  Description of Artificial Sequence: Synthetic oligonucleotide
auaaauagccauuacuuau

SEQ ID NO: 2160712 - RNA, 19 nt, Artificial Sequence
  Description of Artificial Sequence: Synthetic oligonucleotide
ucaucuuugguaauaggcu

SEQ ID NO: 2160713 - RNA, 19 nt, Artificial Sequence
  Description of Artificial Sequence: Synthetic oligonucleotide
ucauauuauacaaaacuuu

SEQ ID NO: 2160714 - RNA, 19 nt, Artificial Sequence
  Description of Artificial Sequence: Synthetic oligonucleotide
agaaugauaagcaauguca

SEQ ID NO: 2160715 - RNA, 19 nt, Artificial Sequence
  Description of Artificial Sequence: Synthetic oligonucleotide
uuuccgaacagauuuguga

SEQ ID NO: 2160716 - RNA, 19 nt, Artificial Sequence
  Description of Artificial Sequence: Synthetic oligonucleotide
aaauucgucuaacaagccu

SEQ ID NO: 2160717 - RNA, 19 nt, Artificial Sequence
  Description of Artificial Sequence: Synthetic oligonucleotide
uaauaggcugccaacaaac

SEQ ID NO: 2160718 - RNA, 19 nt, Artificial Sequence
  Description of Artificial Sequence: Synthetic oligonucleotide
uuacuuguaucacgaauag

SEQ ID NO: 2160719 - RNA, 19 nt, Artificial Sequence
  Description of Artificial Sequence: Synthetic oligonucleotide
ugagaguagccuuugauuc

SEQ ID NO: 2160720 - RNA, 19 nt, Artificial Sequence
  Description of Artificial Sequence: Synthetic oligonucleotide
aaguuuccacuccaucacc

SEQ ID NO: 2160721 - RNA, 19 nt, Artificial Sequence
  Description of Artificial Sequence: Synthetic oligonucleotide
uuugcaguguacauagaug

SEQ ID NO: 2160722 - RNA, 19 nt, Artificial Sequence
  Description of Artificial Sequence: Synthetic oligonucleotide
gaaccuauacaucuccucc

SEQ ID NO: 2160723 - RNA, 19 nt, Artificial Sequence
  Description of Artificial Sequence: Synthetic oligonucleotide
aaaagguaacaauuuacuu

SEQ ID NO: 2160724 - RNA, 19 nt, Artificial Sequence
  Description of Artificial Sequence: Synthetic oligonucleotide
cagaauaaucaaauaagac

SEQ ID NO: 2160725 - RNA, 19 nt, Artificial Sequence
  Description of Artificial Sequence: Synthetic oligonucleotide
cuggaaugcuuucauaugg

SEQ ID NO: 2160726 - RNA, 19 nt, Artificial Sequence
  Description of Artificial Sequence: Synthetic oligonucleotide
gaauguauaacuugaaggu

SEQ ID NO: 2160727 - RNA, 19 nt, Artificial Sequence
  Description of Artificial Sequence: Synthetic oligonucleotide
aagacacaagaacuauggg

SEQ ID NO: 2160728 - RNA, 19 nt, Artificial Sequence
  Description of Artificial Sequence: Synthetic oligonucleotide
agcgaaaugacuccuaccu

SEQ ID NO: 2160729 - RNA, 19 nt, Artificial Sequence
  Description of Artificial Sequence: Synthetic oligonucleotide
agcagaauaaucaaauaag

SEQ ID NO: 2160730 - RNA, 19 nt, Artificial Sequence
  Description of Artificial Sequence: Synthetic oligonucleotide
uuagcauacaaaagguaac

SEQ ID NO: 2160731 - RNA, 19 nt, Artificial Sequence
  Description of Artificial Sequence: Synthetic oligonucleotide
aagcgaaaugacuccuacc

SEQ ID NO: 2160732 - RNA, 19 nt, Artificial Sequence
  Description of Artificial Sequence: Synthetic oligonucleotide
ucaccuacgguuuaagugu

SEQ ID NO: 2160733 - RNA, 19 nt, Artificial Sequence
  Description of Artificial Sequence: Synthetic oligonucleotide
uggccuuucuauaaauggg

SEQ ID NO: 2160734 - RNA, 19 nt, Artificial Sequence
  Description of Artificial Sequence: Synthetic oligonucleotide
aucaccuacgguuuaagug

SEQ ID NO: 2160735 - RNA, 19 nt, Artificial Sequence
  Description of Artificial Sequence: Synthetic oligonucleotide
uauagauuacaccauccuc

SEQ ID NO: 2160736 - RNA, 19 nt, Artificial Sequence
  Description of Artificial Sequence: Synthetic oligonucleotide
aauugucauuaucucagcu

SEQ ID NO: 2160737 - RNA, 19 nt, Artificial Sequence
  Description of Artificial Sequence: Synthetic oligonucleotide
aaugacuccuaccuucucu

SEQ ID NO: 2160738 - RNA, 19 nt, Artificial Sequence
  Description of Artificial Sequence: Synthetic oligonucleotide
ugauucucugaauuuagga

SEQ ID NO: 2160739 - RNA, 19 nt, Artificial Sequence
  Description of Artificial Sequence: Synthetic oligonucleotide
uuuaggacagugguagugg

SEQ ID NO: 2160740 - RNA, 19 nt, Artificial Sequence
  Description of Artificial Sequence: Synthetic oligonucleotide
uuuagagcuggaaaacaca

SEQ ID NO: 2160741 - RNA, 19 nt, Artificial Sequence
  Description of Artificial Sequence: Synthetic oligonucleotide
acgguuuaaguguagagcu

SEQ ID NO: 2160742 - RNA, 19 nt, Artificial Sequence
  Description of Artificial Sequence: Synthetic oligonucleotide
uguaucacgaauaguuaac

SEQ ID NO: 2160743 - RNA, 19 nt, Artificial Sequence
  Description of Artificial Sequence: Synthetic oligonucleotide
aacaaacagaaacuauaga

SEQ ID NO: 2160744 - RNA, 19 nt, Artificial Sequence
  Description of Artificial Sequence: Synthetic oligonucleotide
auuacgucaucuuugguaa

SEQ ID NO: 2160745 - RNA, 19 nt, Artificial Sequence
  Description of Artificial Sequence: Synthetic oligonucleotide
uauaacuugaagguugaga

SEQ ID NO: 2160746 - RNA, 19 nt, Artificial Sequence
  Description of Artificial Sequence: Synthetic oligonucleotide
uugauucucugaauuuagg

SEQ ID NO: 2160747 - RNA, 19 nt, Artificial Sequence
  Description of Artificial Sequence: Synthetic oligonucleotide
aaauagccauuacuuauga

SEQ ID NO: 2160748 - RNA, 19 nt, Artificial Sequence
  Description of Artificial Sequence: Synthetic oligonucleotide
aaaugggugcuuguauccc

SEQ ID NO: 2160749 - RNA, 19 nt, Artificial Sequence
  Description of Artificial Sequence: Synthetic oligonucleotide
uuugucuaucaaauuguca

SEQ ID NO: 2160750 - RNA, 19 nt, Artificial Sequence
  Description of Artificial Sequence: Synthetic oligonucleotide
uuggguaugucacaccuga

SEQ ID NO: 2160751 - RNA, 19 nt, Artificial Sequence
  Description of Artificial Sequence: Synthetic oligonucleotide
augguuuacuuguaucacg

SEQ ID NO: 2160752 - RNA, 19 nt, Artificial Sequence
  Description of Artificial Sequence: Synthetic oligonucleotide
aucccaauagcucuuacgu

SEQ ID NO: 2160753 - RNA, 19 nt, Artificial Sequence
  Description of Artificial Sequence: Synthetic oligonucleotide
ugguuuacuuguaucacga

SEQ ID NO: 2160754 - RNA, 19 nt, Artificial Sequence
  Description of Artificial Sequence: Synthetic oligonucleotide
gauuacaccauccucccca

SEQ ID NO: 2160755 - RNA, 19 nt, Artificial Sequence
  Description of Artificial Sequence: Synthetic oligonucleotide
uauaugucagaaugauaag

SEQ ID NO: 2160756 - RNA, 19 nt, Artificial Sequence
  Description of Artificial Sequence: Synthetic oligonucleotide
aacagaaacuauagauuac

SEQ ID NO: 2160757 - RNA, 19 nt, Artificial Sequence
  Description of Artificial Sequence: Synthetic oligonucleotide
uauaaaugggugcuuguau

SEQ ID NO: 2160758 - RNA, 19 nt, Artificial Sequence
  Description of Artificial Sequence: Synthetic oligonucleotide
auuuagagcuggaaaacac

SEQ ID NO: 2160759 - RNA, 19 nt, Artificial Sequence
  Description of Artificial Sequence: Synthetic oligonucleotide
uguauaacuugaagguuga

SEQ ID NO: 2160760 - RNA, 19 nt, Artificial Sequence
  Description of Artificial Sequence: Synthetic oligonucleotide
agaaaaccuggauaagaag

SEQ ID NO: 2160761 - RNA, 19 nt, Artificial Sequence
  Description of Artificial Sequence: Synthetic oligonucleotide
uucagaauacaaauucguc

SEQ ID NO: 2160762 - RNA, 19 nt, Artificial Sequence
  Description of Artificial Sequence: Synthetic oligonucleotide
gaggagaaaaccuggauaa

SEQ ID NO: 2160763 - RNA, 19 nt, Artificial Sequence
  Description of Artificial Sequence: Synthetic oligonucleotide
ugaagauuugauguuucag

SEQ ID NO: 2160764 - RNA, 19 nt, Artificial Sequence
  Description of Artificial Sequence: Synthetic oligonucleotide
aauaagacacaagaacuau

SEQ ID NO: 2160765 - RNA, 19 nt, Artificial Sequence
  Description of Artificial Sequence: Synthetic oligonucleotide
aauuuagagcuggaaaaca

SEQ ID NO: 2160766 - RNA, 19 nt, Artificial Sequence
  Description of Artificial Sequence: Synthetic oligonucleotide
acaauuuacuuuuguauaa

SEQ ID NO: 2160767 - RNA, 19 nt, Artificial Sequence
  Description of Artificial Sequence: Synthetic oligonucleotide
uacacacucagcccugagg

SEQ ID NO: 2160768 - RNA, 19 nt, Artificial Sequence
  Description of Artificial Sequence: Synthetic oligonucleotide
gaagagggcuuuaacagag

SEQ ID NO: 2160769 - RNA, 19 nt, Artificial Sequence
  Description of Artificial Sequence: Synthetic oligonucleotide
uuaugaaauucacauuaau

SEQ ID NO: 2160770 - RNA, 19 nt, Artificial Sequence
  Description of Artificial Sequence: Synthetic oligonucleotide
uacgguuuaaguguagagc

SEQ ID NO: 2160771 - RNA, 19 nt, Artificial Sequence
  Description of Artificial Sequence: Synthetic oligonucleotide
ucuaacaagccucuuggua

SEQ ID NO: 2160772 - RNA, 19 nt, Artificial Sequence
  Description of Artificial Sequence: Synthetic oligonucleotide
gucaucuuugguaauaggc

SEQ ID NO: 2160773 - RNA, 19 nt, Artificial Sequence
  Description of Artificial Sequence: Synthetic oligonucleotide
ucacgaauaguuaacuuuu

SEQ ID NO: 2160774 - RNA, 19 nt, Artificial Sequence
  Description of Artificial Sequence: Synthetic oligonucleotide
uugucauuaucucagcuuu

SEQ ID NO: 2160775 - RNA, 19 nt, Artificial Sequence
  Description of Artificial Sequence: Synthetic oligonucleotide
cauuacuuaugaaauucac

SEQ ID NO: 2160776 - RNA, 19 nt, Artificial Sequence
  Description of Artificial Sequence: Synthetic oligonucleotide
uagccauuacuuaugaaau

SEQ ID NO: 2160777 - RNA, 19 nt, Artificial Sequence
  Description of Artificial Sequence: Synthetic oligonucleotide
acuuguaucacgaauaguu

SEQ ID NO: 2160778 - RNA, 19 nt, Artificial Sequence
  Description of Artificial Sequence: Synthetic oligonucleotide
cacaccaacaacagggaag

SEQ ID NO: 2160779 - RNA, 19 nt, Artificial Sequence
  Description of Artificial Sequence: Synthetic oligonucleotide
auuagcauacaaaagguaa

SEQ ID NO: 2160780 - RNA, 19 nt, Artificial Sequence
  Description of Artificial Sequence: Synthetic oligonucleotide
aauaaagaauuuagagcug

SEQ ID NO: 2160781 - RNA, 19 nt, Artificial Sequence
  Description of Artificial Sequence: Synthetic oligonucleotide
agcucuuacguuguaaauc

SEQ ID NO: 2160782 - RNA, 19 nt, Artificial Sequence
  Description of Artificial Sequence: Synthetic oligonucleotide
aucacgaauaguuaacuuu

SEQ ID NO: 2160783 - RNA, 19 nt, Artificial Sequence
  Description of Artificial Sequence: Synthetic oligonucleotide
ugcuuguaucccaauagcu

SEQ ID NO: 2160784 - RNA, 19 nt, Artificial Sequence
  Description of Artificial Sequence: Synthetic oligonucleotide
uuguaucacgaauaguuaa

SEQ ID NO: 2160785 - RNA, 19 nt, Artificial Sequence
  Description of Artificial Sequence: Synthetic oligonucleotide
aaccuauacaucuccucca

SEQ ID NO: 2160786 - RNA, 19 nt, Artificial Sequence
  Description of Artificial Sequence: Synthetic oligonucleotide
gguaugucacaccugacag

SEQ ID NO: 2160787 - RNA, 19 nt, Artificial Sequence
  Description of Artificial Sequence: Synthetic oligonucleotide
caucuuugguaauaggcug

SEQ ID NO: 2160788 - RNA, 19 nt, Artificial Sequence
  Description of Artificial Sequence: Synthetic oligonucleotide
auguauaacuugaagguug

SEQ ID NO: 2160789 - RNA, 19 nt, Artificial Sequence
  Description of Artificial Sequence: Synthetic oligonucleotide
uugaagguugagaguagcc

SEQ ID NO: 2160790 - RNA, 19 nt, Artificial Sequence
  Description of Artificial Sequence: Synthetic oligonucleotide
auaaucaaauaagacacaa

SEQ ID NO: 2160791 - RNA, 19 nt, Artificial Sequence
  Description of Artificial Sequence: Synthetic oligonucleotide
agcgauuaaguagucuggc

SEQ ID NO: 2160792 - RNA, 19 nt, Artificial Sequence
  Description of Artificial Sequence: Synthetic oligonucleotide
uauuagcauacaaaaggua

SEQ ID NO: 2160793 - RNA, 19 nt, Artificial Sequence
  Description of Artificial Sequence: Synthetic oligonucleotide
acagugaaguaugugaaug

SEQ ID NO: 2160794 - RNA, 19 nt, Artificial Sequence
  Description of Artificial Sequence: Synthetic oligonucleotide
uaccuucucuguuauaugu

SEQ ID NO: 2160795 - RNA, 19 nt, Artificial Sequence
  Description of Artificial Sequence: Synthetic oligonucleotide
uuugauguuucagugacuu

SEQ ID NO: 2160796 - RNA, 19 nt, Artificial Sequence
  Description of Artificial Sequence: Synthetic oligonucleotide
aauaaucaaauaagacaca

SEQ ID NO: 2160797 - RNA, 19 nt, Artificial Sequence
  Description of Artificial Sequence: Synthetic oligonucleotide
acuuggguaugucacaccu

SEQ ID NO: 2160798 - RNA, 19 nt, Artificial Sequence
  Description of Artificial Sequence: Synthetic oligonucleotide
uaugggcuuaauaaagaau

SEQ ID NO: 2160799 - RNA, 19 nt, Artificial Sequence
  Description of Artificial Sequence: Synthetic oligonucleotide
aaaauccaugcuuugccua

SEQ ID NO: 2160800 - RNA, 19 nt, Artificial Sequence
  Description of Artificial Sequence: Synthetic oligonucleotide
uuacguuguaaauccugag

SEQ ID NO: 2160801 - RNA, 19 nt, Artificial Sequence
  Description of Artificial Sequence: Synthetic oligonucleotide
gaauuuagagcuggaaaac

SEQ ID NO: 2160802 - RNA, 19 nt, Artificial Sequence
  Description of Artificial Sequence: Synthetic oligonucleotide
ucacauuaaugcacagcag

SEQ ID NO: 2160803 - RNA, 19 nt, Artificial Sequence
  Description of Artificial Sequence: Synthetic oligonucleotide
uguuucagugacuugggua

SEQ ID NO: 2160804 - RNA, 19 nt, Artificial Sequence
  Description of Artificial Sequence: Synthetic oligonucleotide
aacuuguuccuuuuccgaa

SEQ ID NO: 2160805 - RNA, 19 nt, Artificial Sequence
  Description of Artificial Sequence: Synthetic oligonucleotide
ucgucuaacaagccucuug

SEQ ID NO: 2160806 - RNA, 19 nt, Artificial Sequence
  Description of Artificial Sequence: Synthetic oligonucleotide
acagaaacuauagauuaca

SEQ ID NO: 2160807 - RNA, 19 nt, Artificial Sequence
  Description of Artificial Sequence: Synthetic oligonucleotide
ugauaagcaaugucagcga

SEQ ID NO: 2160808 - RNA, 19 nt, Artificial Sequence
  Description of Artificial Sequence: Synthetic oligonucleotide
accuauacaucuccuccac

SEQ ID NO: 2160809 - RNA, 19 nt, Artificial Sequence
  Description of Artificial Sequence: Synthetic oligonucleotide
auaagaaggcucaggcacc

SEQ ID NO: 2160810 - RNA, 19 nt, Artificial Sequence
  Description of Artificial Sequence: Synthetic oligonucleotide
uaagcaaugucagcgauua

SEQ ID NO: 2160811 - RNA, 19 nt, Artificial Sequence
  Description of Artificial Sequence: Synthetic oligonucleotide
auguaaagaccagaagagg

SEQ ID NO: 2160812 - RNA, 19 nt, Artificial Sequence
  Description of Artificial Sequence: Synthetic oligonucleotide
caaugguuuacuuguauca

SEQ ID NO: 2160813 - RNA, 19 nt, Artificial Sequence
  Description of Artificial Sequence: Synthetic oligonucleotide
cuuacuauguuugucuauc

SEQ ID NO: 2160814 - RNA, 19 nt, Artificial Sequence
  Description of Artificial Sequence: Synthetic oligonucleotide
aagaacuaugggcuuaaua

SEQ ID NO: 2160815 - RNA, 19 nt, Artificial Sequence
  Description of Artificial Sequence: Synthetic oligonucleotide
aucuuugguaauaggcugc

SEQ ID NO: 2160816 - RNA, 19 nt, Artificial Sequence
  Description of Artificial Sequence: Synthetic oligonucleotide
ugaauuuaggacaguggua

SEQ ID NO: 2160817 - RNA, 19 nt, Artificial Sequence
  Description of Artificial Sequence: Synthetic oligonucleotide
aauguauaacuugaagguu

SEQ ID NO: 2160818 - RNA, 19 nt, Artificial Sequence
  Description of Artificial Sequence: Synthetic oligonucleotide
uuccgaacagauuugugaa

SEQ ID NO: 2160819 - RNA, 19 nt, Artificial Sequence
  Description of Artificial Sequence: Synthetic oligonucleotide
ugugaagauuugauguuuc

SEQ ID NO: 2160820 - RNA, 19 nt, Artificial Sequence
  Description of Artificial Sequence: Synthetic oligonucleotide
uucuauaaaugggugcuug

SEQ ID NO: 2160821 - RNA, 19 nt, Artificial Sequence
  Description of Artificial Sequence: Synthetic oligonucleotide
ggcuuaauaaagaauuuag

SEQ ID NO: 2160822 - RNA, 19 nt, Artificial Sequence
  Description of Artificial Sequence: Synthetic oligonucleotide
uagcugaauaaauagccau

SEQ ID NO: 2160823 - RNA, 19 nt, Artificial Sequence
  Description of Artificial Sequence: Synthetic oligonucleotide
gauguuucagugacuuggg

SEQ ID NO: 2160824 - RNA, 19 nt, Artificial Sequence
  Description of Artificial Sequence: Synthetic oligonucleotide
aaugggugcuuguauccca

SEQ ID NO: 2160825 - RNA, 19 nt, Artificial Sequence
  Description of Artificial Sequence: Synthetic oligonucleotide
agauuugauguuucaguga

SEQ ID NO: 2160826 - RNA, 19 nt, Artificial Sequence
  Description of Artificial Sequence: Synthetic oligonucleotide
auuacuuaugaaauucaca

SEQ ID NO: 2160827 - RNA, 19 nt, Artificial Sequence
  Description of Artificial Sequence: Synthetic oligonucleotide
ugugaauguauaacuugaa

SEQ ID NO: 2160828 - RNA, 19 nt, Artificial Sequence
  Description of Artificial Sequence: Synthetic oligonucleotide
gaggcucuuacuauguuug

SEQ ID NO: 2160829 - RNA, 19 nt, Artificial Sequence
  Description of Artificial Sequence: Synthetic oligonucleotide
aaaugacuccuaccuucuc

SEQ ID NO: 2160830 - RNA, 19 nt, Artificial Sequence
  Description of Artificial Sequence: Synthetic oligonucleotide
gcucuuacguuguaaaucc

SEQ ID NO: 2160831 - RNA, 19 nt, Artificial Sequence
  Description of Artificial Sequence: Synthetic oligonucleotide
gacacaagaacuaugggcu

SEQ ID NO: 2160832 - RNA, 19 nt, Artificial Sequence
  Description of Artificial Sequence: Synthetic oligonucleotide
uuugugaagauuugauguu

SEQ ID NO: 2160833 - RNA, 19 nt, Artificial Sequence
  Description of Artificial Sequence: Synthetic oligonucleotide
uuaaaaguuuccacuccau

SEQ ID NO: 2160834 - RNA, 19 nt, Artificial Sequence
  Description of Artificial Sequence: Synthetic oligonucleotide
cacauuaaugcacagcaga

SEQ ID NO: 2160835 - RNA, 19 nt, Artificial Sequence
  Description of Artificial Sequence: Synthetic oligonucleotide
uggaaugcuuucauaugga

SEQ ID NO: 2160836 - RNA, 19 nt, Artificial Sequence
  Description of Artificial Sequence: Synthetic oligonucleotide
ucuauaaaugggugcuugu

SEQ ID NO: 2160837 - RNA, 19 nt, Artificial Sequence
  Description of Artificial Sequence: Synthetic oligonucleotide
acgaacucgaaccuauaca

SEQ ID NO: 2160838 - RNA, 19 nt, Artificial Sequence
  Description of Artificial Sequence: Synthetic oligonucleotide
uugagaguagccuuugauu

SEQ ID NO: 2160839 - RNA, 19 nt, Artificial Sequence
  Description of Artificial Sequence: Synthetic oligonucleotide
auagcucuuacguuguaaa

SEQ ID NO: 2160840 - RNA, 19 nt, Artificial Sequence
  Description of Artificial Sequence: Synthetic oligonucleotide
guaaagaccagaagagggc

SEQ ID NO: 2160841 - RNA, 19 nt, Artificial Sequence
  Description of Artificial Sequence: Synthetic oligonucleotide
aguagucuggccuuucuau

SEQ ID NO: 2160842 - RNA, 19 nt, Artificial Sequence
  Description of Artificial Sequence: Synthetic oligonucleotide
cauauggagguucagaaua

SEQ ID NO: 2160843 - RNA, 19 nt, Artificial Sequence
  Description of Artificial Sequence: Synthetic oligonucleotide
aucauauuauacaaaacuu

SEQ ID NO: 2160844 - RNA, 19 nt, Artificial Sequence
  Description of Artificial Sequence: Synthetic oligonucleotide
cuacgguuuaaguguagag

SEQ ID NO: 2160845 - RNA, 19 nt, Artificial Sequence
  Description of Artificial Sequence: Synthetic oligonucleotide
auuuuaaugaauagcugaa

SEQ ID NO: 2160846 - RNA, 19 nt, Artificial Sequence
  Description of Artificial Sequence: Synthetic oligonucleotide
uuacuauguuugucuauca

SEQ ID NO: 2160847 - RNA, 19 nt, Artificial Sequence
  Description of Artificial Sequence: Synthetic oligonucleotide
gguucagaauacaaauucg

SEQ ID NO: 2160848 - RNA, 19 nt, Artificial Sequence
  Description of Artificial Sequence: Synthetic oligonucleotide
gaacuaugggcuuaauaaa

SEQ ID NO: 2160849 - RNA, 19 nt, Artificial Sequence
  Description of Artificial Sequence: Synthetic oligonucleotide
cauuucagaacgaacucga

SEQ ID NO: 2160850 - RNA, 19 nt, Artificial Sequence
  Description of Artificial Sequence: Synthetic oligonucleotide
uacuauguuugucuaucaa

SEQ ID NO: 2160851 - RNA, 19 nt, Artificial Sequence
  Description of Artificial Sequence: Synthetic oligonucleotide
uugguaauaggcugccaac

SEQ ID NO: 2160852 - RNA, 19 nt, Artificial Sequence
  Description of Artificial Sequence: Synthetic oligonucleotide
agagggcuuuaacagagcu

SEQ ID NO: 2160853 - RNA, 19 nt, Artificial Sequence
  Description of Artificial Sequence: Synthetic oligonucleotide
gaauacaaauucgucuaac

SEQ ID NO: 2160854 - RNA, 19 nt, Artificial Sequence
  Description of Artificial Sequence: Synthetic oligonucleotide
ugccuacacacucagcccu

SEQ ID NO: 2160855 - RNA, 19 nt, Artificial Sequence
  Description of Artificial Sequence: Synthetic oligonucleotide
cagcgauuaaguagucugg

SEQ ID NO: 2160856 - RNA, 19 nt, Artificial Sequence
  Description of Artificial Sequence: Synthetic oligonucleotide
aaauuacgucaucuuuggu

SEQ ID NO: 2160857 - RNA, 19 nt, Artificial Sequence
  Description of Artificial Sequence: Synthetic oligonucleotide
aauagccauuacuuaugaa

SEQ ID NO: 2160858 - RNA, 19 nt, Artificial Sequence
  Description of Artificial Sequence: Synthetic oligonucleotide
caaauucgucuaacaagcc

SEQ ID NO: 2160859 - RNA, 19 nt, Artificial Sequence
  Description of Artificial Sequence: Synthetic oligonucleotide
uccgaacagauuugugaag

SEQ ID NO: 2160860 - RNA, 19 nt, Artificial Sequence
  Description of Artificial Sequence: Synthetic oligonucleotide
agugaaauuuugguugucu

SEQ ID NO: 2160861 - RNA, 19 nt, Artificial Sequence
  Description of Artificial Sequence: Synthetic oligonucleotide
cagaauacaaauucgucua

SEQ ID NO: 2160862 - RNA, 19 nt, Artificial Sequence
  Description of Artificial Sequence: Synthetic oligonucleotide
augucagcgauuaaguagu

SEQ ID NO: 2160863 - RNA, 19 nt, Artificial Sequence
  Description of Artificial Sequence: Synthetic oligonucleotide
aauagcucuuacguuguaa

SEQ ID NO: 2160864 - RNA, 19 nt, Artificial Sequence
  Description of Artificial Sequence: Synthetic oligonucleotide
cugaauaaauagccauuac

SEQ ID NO: 2160865 - RNA, 19 nt, Artificial Sequence
  Description of Artificial Sequence: Synthetic oligonucleotide
aaacuauagauuacaccau

SEQ ID NO: 2160866 - RNA, 19 nt, Artificial Sequence
  Description of Artificial Sequence: Synthetic oligonucleotide
auaagacacaagaacuaug

SEQ ID NO: 2160867 - RNA, 19 nt, Artificial Sequence
  Description of Artificial Sequence: Synthetic oligonucleotide
agggcuuuaacagagcuuu

SEQ ID NO: 2160868 - RNA, 19 nt, Artificial Sequence
  Description of Artificial Sequence: Synthetic oligonucleotide
uugccuacacacucagccc

SEQ ID NO: 2160869 - RNA, 19 nt, Artificial Sequence
  Description of Artificial Sequence: Synthetic oligonucleotide
gaaggcucaggcaccacag

SEQ ID NO: 2160870 - RNA, 19 nt, Artificial Sequence
  Description of Artificial Sequence: Synthetic oligonucleotide
gagaaaaccuggauaagaa

SEQ ID NO: 2160871 - RNA, 19 nt, Artificial Sequence
  Description of Artificial Sequence: Synthetic oligonucleotide
guguacauagaugugggca

SEQ ID NO: 2160872 - RNA, 19 nt, Artificial Sequence
  Description of Artificial Sequence: Synthetic oligonucleotide
aagagggcuuuaacagagc

SEQ ID NO: 2160873 - RNA, 19 nt, Artificial Sequence
  Description of Artificial Sequence: Synthetic oligonucleotide
cccaauagcucuuacguug

SEQ ID NO: 2160874 - RNA, 19 nt, Artificial Sequence
  Description of Artificial Sequence: Synthetic oligonucleotide
cuuguaucccaauagcucu

SEQ ID NO: 2160875 - RNA, 19 nt, Artificial Sequence
  Description of Artificial Sequence: Synthetic oligonucleotide
agaauacaaauucgucuaa

SEQ ID NO: 2160876 - RNA, 19 nt, Artificial Sequence
  Description of Artificial Sequence: Synthetic oligonucleotide
aagugaaauuuugguuguc

SEQ ID NO: 2160877 - RNA, 19 nt, Artificial Sequence
  Description of Artificial Sequence: Synthetic oligonucleotide
ucuuacuauguuugucuau

SEQ ID NO: 2160878 - RNA, 19 nt, Artificial Sequence
  Description of Artificial Sequence: Synthetic oligonucleotide
cuugaagguugagaguagc

SEQ ID NO: 2160879 - RNA, 19 nt, Artificial Sequence
  Description of Artificial Sequence: Synthetic oligonucleotide
uaucacgaauaguuaacuu

SEQ ID NO: 2160880 - RNA, 19 nt, Artificial Sequence
  Description of Artificial Sequence: Synthetic oligonucleotide
cuauguuugucuaucaaau

SEQ ID NO: 2160881 - RNA, 19 nt, Artificial Sequence
  Description of Artificial Sequence: Synthetic oligonucleotide
agugguaguggcauuucag

SEQ ID NO: 2160882 - RNA, 19 nt, Artificial Sequence
  Description of Artificial Sequence: Synthetic oligonucleotide
agauuugugaagauuugau

SEQ ID NO: 2160883 - RNA, 19 nt, Artificial Sequence
  Description of Artificial Sequence: Synthetic oligonucleotide
ugcuuugccuacacacuca

SEQ ID NO: 2160884 - RNA, 19 nt, Artificial Sequence
  Description of Artificial Sequence: Synthetic oligonucleotide
auccaugcuuugccuacac

SEQ ID NO: 2160885 - RNA, 19 nt, Artificial Sequence
  Description of Artificial Sequence: Synthetic oligonucleotide
ccuuucuauaaaugggugc

SEQ ID NO: 2160886 - RNA, 19 nt, Artificial Sequence
  Description of Artificial Sequence: Synthetic oligonucleotide
cuuaugaaauucacauuaa

SEQ ID NO: 2160887 - RNA, 19 nt, Artificial Sequence
  Description of Artificial Sequence: Synthetic oligonucleotide
ucgaaccuauacaucuccu

SEQ ID NO: 2160888 - RNA, 19 nt, Artificial Sequence
  Description of Artificial Sequence: Synthetic oligonucleotide
acuaugggcuuaauaaaga

SEQ ID NO: 2160889 - RNA, 19 nt, Artificial Sequence
  Description of Artificial Sequence: Synthetic oligonucleotide
aacacaccaacaacaggga

SEQ ID NO: 2160890 - RNA, 19 nt, Artificial Sequence
  Description of Artificial Sequence: Synthetic oligonucleotide
gugguaguggcauuucaga

SEQ ID NO: 2160891 - RNA, 19 nt, Artificial Sequence
  Description of Artificial Sequence: Synthetic oligonucleotide
cauccuccccaaagaaucc

SEQ ID NO: 2160892 - RNA, 19 nt, Artificial Sequence
  Description of Artificial Sequence: Synthetic oligonucleotide
agaaagcgaaaugacuccu

SEQ ID NO: 2160893 - RNA, 19 nt, Artificial Sequence
  Description of Artificial Sequence: Synthetic oligonucleotide
aguagccuuugauucucug

SEQ ID NO: 2160894 - RNA, 19 nt, Artificial Sequence
  Description of Artificial Sequence: Synthetic oligonucleotide
cuaugggcuuaauaaagaa

SEQ ID NO: 2160895 - RNA, 19 nt, Artificial Sequence
  Description of Artificial Sequence: Synthetic oligonucleotide
cuuucuauaaaugggugcu

SEQ ID NO: 2160896 - RNA, 19 nt, Artificial Sequence
  Description of Artificial Sequence: Synthetic oligonucleotide
acgucaucuuugguaauag

SEQ ID NO: 2160897 - RNA, 19 nt, Artificial Sequence
  Description of Artificial Sequence: Synthetic oligonucleotide
cgucuaacaagccucuugg

SEQ ID NO: 2160898 - RNA, 19 nt, Artificial Sequence
  Description of Artificial Sequence: Synthetic oligonucleotide
ugccaacaaacagaaacua

SEQ ID NO: 2160899 - RNA, 19 nt, Artificial Sequence
  Description of Artificial Sequence: Synthetic oligonucleotide
guuugucuaucaaauuguc

SEQ ID NO: 2160900 - RNA, 19 nt, Artificial Sequence
  Description of Artificial Sequence: Synthetic oligonucleotide
agugaaguaugugaaugua

SEQ ID NO: 2160901 - RNA, 19 nt, Artificial Sequence
  Description of Artificial Sequence: Synthetic oligonucleotide
gccauuacuuaugaaauuc

SEQ ID NO: 2160902 - RNA, 19 nt, Artificial Sequence
  Description of Artificial Sequence: Synthetic oligonucleotide
gauuaaguagucuggccuu

SEQ ID NO: 2160903 - RNA, 19 nt, Artificial Sequence
  Description of Artificial Sequence: Synthetic oligonucleotide
cacagcagaauaaucaaau

SEQ ID NO: 2160904 - RNA, 19 nt, Artificial Sequence
  Description of Artificial Sequence: Synthetic oligonucleotide
gucuaucaaauugucauua

SEQ ID NO: 2160905 - RNA, 19 nt, Artificial Sequence
  Description of Artificial Sequence: Synthetic oligonucleotide
guucagaauacaaauucgu

SEQ ID NO: 2160906 - RNA, 19 nt, Artificial Sequence
  Description of Artificial Sequence: Synthetic oligonucleotide
uagcucuuacguuguaaau

SEQ ID NO: 2160907 - RNA, 19 nt, Artificial Sequence
  Description of Artificial Sequence: Synthetic oligonucleotide
ggagaaaaccuggauaaga

SEQ ID NO: 2160908 - RNA, 19 nt, Artificial Sequence
  Description of Artificial Sequence: Synthetic oligonucleotide
gauaagcaaugucagcgau

SEQ ID NO: 2160909 - RNA, 19 nt, Artificial Sequence
  Description of Artificial Sequence: Synthetic oligonucleotide
aauccaugcuuugccuaca

SEQ ID NO: 2160910 - RNA, 19 nt, Artificial Sequence
  Description of Artificial Sequence: Synthetic oligonucleotide
auguuucagugacuugggu

SEQ ID NO: 2160911 - RNA, 19 nt, Artificial Sequence
  Description of Artificial Sequence: Synthetic oligonucleotide
ggagguucagaauacaaau

SEQ ID NO: 2160912 - RNA, 19 nt, Artificial Sequence
  Description of Artificial Sequence: Synthetic oligonucleotide
gaagguugagaguagccuu

SEQ ID NO: 2160913 - RNA, 19 nt, Artificial Sequence
  Description of Artificial Sequence: Synthetic oligonucleotide
aaccuggaaugcuuucaua

SEQ ID NO: 2160914 - RNA, 19 nt, Artificial Sequence
  Description of Artificial Sequence: Synthetic oligonucleotide
uacgucaucuuugguaaua

SEQ ID NO: 2160915 - RNA, 19 nt, Artificial Sequence
  Description of Artificial Sequence: Synthetic oligonucleotide
agccauuacuuaugaaauu

SEQ ID NO: 2160916 - RNA, 19 nt, Artificial Sequence
  Description of Artificial Sequence: Synthetic oligonucleotide
uuguaucccaauagcucuu

SEQ ID NO: 2160917 - RNA, 19 nt, Artificial Sequence
  Description of Artificial Sequence: Synthetic oligonucleotide
uacuuguaucacgaauagu

SEQ ID NO: 2160918 - RNA, 19 nt, Artificial Sequence
  Description of Artificial Sequence: Synthetic oligonucleotide
acucgaaccuauacaucuc

SEQ ID NO: 2160919 - RNA, 19 nt, Artificial Sequence
  Description of Artificial Sequence: Synthetic oligonucleotide
aguggcauuucagaacgaa

SEQ ID NO: 2160920 - RNA, 19 nt, Artificial Sequence
  Description of Artificial Sequence: Synthetic oligonucleotide
aagguugagaguagccuuu

SEQ ID NO: 2160921 - RNA, 19 nt, Artificial Sequence
  Description of Artificial Sequence: Synthetic oligonucleotide
auuacaccauccuccccaa

SEQ ID NO: 2160922 - RNA, 19 nt, Artificial Sequence
  Description of Artificial Sequence: Synthetic oligonucleotide
cacuccaucaccuacgguu

SEQ ID NO: 2160923 - RNA, 19 nt, Artificial Sequence
  Description of Artificial Sequence: Synthetic oligonucleotide
ggguaugucacaccugaca

SEQ ID NO: 2160924 - RNA, 19 nt, Artificial Sequence
  Description of Artificial Sequence: Synthetic oligonucleotide
cuuucauauggagguucag

SEQ ID NO: 2160925 - RNA, 19 nt, Artificial Sequence
  Description of Artificial Sequence: Synthetic oligonucleotide
gcgauuaaguagucuggcc

SEQ ID NO: 2160926 - RNA, 19 nt, Artificial Sequence
  Description of Artificial Sequence: Synthetic oligonucleotide
acagugguaguggcauuuc

SEQ ID NO: 2160927 - RNA, 19 nt, Artificial Sequence
  Description of Artificial Sequence: Synthetic oligonucleotide
ggauaagaaggcucaggca

SEQ ID NO: 2160928 - RNA, 19 nt, Artificial Sequence
  Description of Artificial Sequence: Synthetic oligonucleotide
aagaaggcucaggcaccac

SEQ ID NO: 2160929 - RNA, 19 nt, Artificial Sequence
  Description of Artificial Sequence: Synthetic oligonucleotide
gagaguagccuuugauucu

SEQ ID NO: 2160930 - RNA, 19 nt, Artificial Sequence
  Description of Artificial Sequence: Synthetic oligonucleotide
gaacucgaaccuauacauc

SEQ ID NO: 2160931 - RNA, 19 nt, Artificial Sequence
  Description of Artificial Sequence: Synthetic oligonucleotide
cagauuugugaagauuuga

SEQ ID NO: 2160932 - RNA, 19 nt, Artificial Sequence
  Description of Artificial Sequence: Synthetic oligonucleotide
acacaccaacaacagggaa

SEQ ID NO: 2160933 - RNA, 19 nt, Artificial Sequence
  Description of Artificial Sequence: Synthetic oligonucleotide
ucccaauagcucuuacguu

SEQ ID NO: 2160934 - RNA, 19 nt, Artificial Sequence
  Description of Artificial Sequence: Synthetic oligonucleotide
gugacuuggguaugucaca

SEQ ID NO: 2160935 - RNA, 19 nt, Artificial Sequence
  Description of Artificial Sequence: Synthetic oligonucleotide
uuaaguagucuggccuuuc

SEQ ID NO: 2160936 - RNA, 19 nt, Artificial Sequence
  Description of Artificial Sequence: Synthetic oligonucleotide
guugagaguagccuuugau

SEQ ID NO: 2160937 - RNA, 19 nt, Artificial Sequence
  Description of Artificial Sequence: Synthetic oligonucleotide
gcuuguaucccaauagcuc

SEQ ID NO: 2160938 - RNA, 19 nt, Artificial Sequence
  Description of Artificial Sequence: Synthetic oligonucleotide
gguuuaaguguagagcuaa

SEQ ID NO: 2160939 - RNA, 19 nt, Artificial Sequence
  Description of Artificial Sequence: Synthetic oligonucleotide
cacacucagcccugaggag

SEQ ID NO: 2160940 - RNA, 19 nt, Artificial Sequence
  Description of Artificial Sequence: Synthetic oligonucleotide
auucgucuaacaagccucu

SEQ ID NO: 2160941 - RNA, 19 nt, Artificial Sequence
  Description of Artificial Sequence: Synthetic oligonucleotide
uuucuauaaaugggugcuu

SEQ ID NO: 2160942 - RNA, 19 nt, Artificial Sequence
  Description of Artificial Sequence: Synthetic oligonucleotide
gguaacaauuuacuuuugu

SEQ ID NO: 2160943 - RNA, 19 nt, Artificial Sequence
  Description of Artificial Sequence: Synthetic oligonucleotide
gguaauaggcugccaacaa

SEQ ID NO: 2160944 - RNA, 19 nt, Artificial Sequence
  Description of Artificial Sequence: Synthetic oligonucleotide
guauaacuugaagguugag

SEQ ID NO: 2160945 - RNA, 19 nt, Artificial Sequence
  Description of Artificial Sequence: Synthetic oligonucleotide
ugacuccuaccuucucugu

SEQ ID NO: 2160946 - RNA, 19 nt, Artificial Sequence
  Description of Artificial Sequence: Synthetic oligonucleotide
cccugaggagaaaaccugg

SEQ ID NO: 2160947 - RNA, 19 nt, Artificial Sequence
  Description of Artificial Sequence: Synthetic oligonucleotide
uggguaugucacaccugac

SEQ ID NO: 2160948 - RNA, 19 nt, Artificial Sequence
  Description of Artificial Sequence: Synthetic oligonucleotide
ggaaaauuacgucaucuuu

SEQ ID NO: 2160949 - RNA, 19 nt, Artificial Sequence
  Description of Artificial Sequence: Synthetic oligonucleotide
guuauaugucagaaugaua

SEQ ID NO: 2160950 - RNA, 19 nt, Artificial Sequence
  Description of Artificial Sequence: Synthetic oligonucleotide
acaagaacuaugggcuuaa

SEQ ID NO: 2160951 - RNA, 19 nt, Artificial Sequence
  Description of Artificial Sequence: Synthetic oligonucleotide
agcugaauaaauagccauu

SEQ ID NO: 2160952 - RNA, 19 nt, Artificial Sequence
  Description of Artificial Sequence: Synthetic oligonucleotide
guaucacgaauaguuaacu

SEQ ID NO: 2160953 - RNA, 19 nt, Artificial Sequence
  Description of Artificial Sequence: Synthetic oligonucleotide
caaugucagcgauuaagua

SEQ ID NO: 2160954 - RNA, 19 nt, Artificial Sequence
  Description of Artificial Sequence: Synthetic oligonucleotide
ugucagcgauuaaguaguc

SEQ ID NO: 2160955 - RNA, 19 nt, Artificial Sequence
  Description of Artificial Sequence: Synthetic oligonucleotide
cuauaaaugggugcuugua

SEQ ID NO: 2160956 - RNA, 19 nt, Artificial Sequence
  Description of Artificial Sequence: Synthetic oligonucleotide
guaucccaauagcucuuac

SEQ ID NO: 2160957 - RNA, 19 nt, Artificial Sequence
  Description of Artificial Sequence: Synthetic oligonucleotide
uaguggcauuucagaacga

SEQ ID NO: 2160958 - RNA, 19 nt, Artificial Sequence
  Description of Artificial Sequence: Synthetic oligonucleotide
auuaaguagucuggccuuu

SEQ ID NO: 2160959 - RNA, 19 nt, Artificial Sequence
  Description of Artificial Sequence: Synthetic oligonucleotide
aggcucuuacuauguuugu

SEQ ID NO: 2160960 - RNA, 19 nt, Artificial Sequence
  Description of Artificial Sequence: Synthetic oligonucleotide
auuugauguuucagugacu

SEQ ID NO: 2160961 - RNA, 19 nt, Artificial Sequence
  Description of Artificial Sequence: Synthetic oligonucleotide
gacagugaaguaugugaau

SEQ ID NO: 2160962 - RNA, 19 nt, Artificial Sequence
  Description of Artificial Sequence: Synthetic oligonucleotide
cuacacacucagcccugag

SEQ ID NO: 2160963 - RNA, 19 nt, Artificial Sequence
  Description of Artificial Sequence: Synthetic oligonucleotide
auaagcaaugucagcgauu

SEQ ID NO: 2160964 - RNA, 19 nt, Artificial Sequence
  Description of Artificial Sequence: Synthetic oligonucleotide
uuacgucaucuuugguaau

SEQ ID NO: 2160965 - RNA, 19 nt, Artificial Sequence
  Description of Artificial Sequence: Synthetic oligonucleotide
uguaaauccugaggcucuu

SEQ ID NO: 2160966 - RNA, 19 nt, Artificial Sequence
  Description of Artificial Sequence: Synthetic oligonucleotide
gaaagcgaaaugacuccua

SEQ ID NO: 2160967 - RNA, 19 nt, Artificial Sequence
  Description of Artificial Sequence: Synthetic oligonucleotide
ccuuuuccgaacagauuug

SEQ ID NO: 2160968 - RNA, 19 nt, Artificial Sequence
  Description of Artificial Sequence: Synthetic oligonucleotide
aggcugccaacaaacagaa

SEQ ID NO: 2160969 - RNA, 19 nt, Artificial Sequence
  Description of Artificial Sequence: Synthetic oligonucleotide
gccuuucuauaaaugggug

SEQ ID NO: 2160970 - RNA, 19 nt, Artificial Sequence
  Description of Artificial Sequence: Synthetic oligonucleotide
agguaacaauuuacuuuug

SEQ ID NO: 2160971 - RNA, 19 nt, Artificial Sequence
  Description of Artificial Sequence: Synthetic oligonucleotide
ucucugaauuuaggacagu

SEQ ID NO: 2160972 - RNA, 19 nt, Artificial Sequence
  Description of Artificial Sequence: Synthetic oligonucleotide
guuuccacuccaucaccua

SEQ ID NO: 2160973 - RNA, 19 nt, Artificial Sequence
  Description of Artificial Sequence: Synthetic oligonucleotide
gugaaguaugugaauguau

SEQ ID NO: 2160974 - RNA, 19 nt, Artificial Sequence
  Description of Artificial Sequence: Synthetic oligonucleotide
cagugguaguggcauuuca

SEQ ID NO: 2160975 - RNA, 19 nt, Artificial Sequence
  Description of Artificial Sequence: Synthetic oligonucleotide
ggcuuuaacagagcuuuaa

SEQ ID NO: 2160976 - RNA, 19 nt, Artificial Sequence
  Description of Artificial Sequence: Synthetic oligonucleotide
cuuuuccgaacagauuugu

SEQ ID NO: 2160977 - RNA, 19 nt, Artificial Sequence
  Description of Artificial Sequence: Synthetic oligonucleotide
cgucaucuuugguaauagg

SEQ ID NO: 2160978 - RNA, 19 nt, Artificial Sequence
  Description of Artificial Sequence: Synthetic oligonucleotide
ggcucuuacuauguuuguc

SEQ ID NO: 2160979 - RNA, 19 nt, Artificial Sequence
  Description of Artificial Sequence: Synthetic oligonucleotide
ggcaccacaggccaauggu

SEQ ID NO: 2160980 - RNA, 19 nt, Artificial Sequence
  Description of Artificial Sequence: Synthetic oligonucleotide
caucaccuacgguuuaagu

SEQ ID NO: 2160981 - RNA, 19 nt, Artificial Sequence
  Description of Artificial Sequence: Synthetic oligonucleotide
gguuuacuuguaucacgaa

SEQ ID NO: 2160982 - RNA, 19 nt, Artificial Sequence
  Description of Artificial Sequence: Synthetic oligonucleotide
ugggugcuuguaucccaau

SEQ ID NO: 2160983 - RNA, 19 nt, Artificial Sequence
  Description of Artificial Sequence: Synthetic oligonucleotide
gcccugaggagaaaaccug

SEQ ID NO: 2160984 - RNA, 19 nt, Artificial Sequence
  Description of Artificial Sequence: Synthetic oligonucleotide
cacaagaacuaugggcuua

SEQ ID NO: 2160985 - RNA, 19 nt, Artificial Sequence
  Description of Artificial Sequence: Synthetic oligonucleotide
gucuaacaagccucuuggu

SEQ ID NO: 2160986 - RNA, 19 nt, Artificial Sequence
  Description of Artificial Sequence: Synthetic oligonucleotide
gacagugguaguggcauuu

SEQ ID NO: 2160987 - RNA, 19 nt, Artificial Sequence
  Description of Artificial Sequence: Synthetic oligonucleotide
ggccuuucuauaaaugggu

SEQ ID NO: 2160988 - RNA, 19 nt, Artificial Sequence
  Description of Artificial Sequence: Synthetic oligonucleotide
augggugcuuguaucccaa

SEQ ID NO: 2160989 - RNA, 19 nt, Artificial Sequence
  Description of Artificial Sequence: Synthetic oligonucleotide
uccuaccuucucuguuaua

SEQ ID NO: 2160990 - RNA, 19 nt, Artificial Sequence
  Description of Artificial Sequence: Synthetic oligonucleotide
cgauuaaguagucuggccu

SEQ ID NO: 2160991 - RNA, 19 nt, Artificial Sequence
  Description of Artificial Sequence: Synthetic oligonucleotide
uucgucuaacaagccucuu

SEQ ID NO: 2160992 - RNA, 19 nt, Artificial Sequence
  Description of Artificial Sequence: Synthetic oligonucleotide
cgaacucgaaccuauacau

SEQ ID NO: 2160993 - RNA, 19 nt, Artificial Sequence
  Description of Artificial Sequence: Synthetic oligonucleotide
gucuggccuuucuauaaau

SEQ ID NO: 2160994 - RNA, 19 nt, Artificial Sequence
  Description of Artificial Sequence: Synthetic oligonucleotide
gaacgaacucgaaccuaua

SEQ ID NO: 2160995 - RNA, 19 nt, Artificial Sequence
  Description of Artificial Sequence: Synthetic oligonucleotide
caccuacgguuuaagugua

SEQ ID NO: 2160996 - RNA, 19 nt, Artificial Sequence
  Description of Artificial Sequence: Synthetic oligonucleotide
augcuuucauauggagguu

SEQ ID NO: 2160997 - RNA, 19 nt, Artificial Sequence
  Description of Artificial Sequence: Synthetic oligonucleotide
cucuuacguuguaaauccu

SEQ ID NO: 2160998 - RNA, 19 nt, Artificial Sequence
  Description of Artificial Sequence: Synthetic oligonucleotide
gggugcuuguaucccaaua

SEQ ID NO: 2160999 - RNA, 19 nt, Artificial Sequence
  Description of Artificial Sequence: Synthetic oligonucleotide
ccuaccuucucuguuauau

SEQ ID NO: 2161000 - RNA, 19 nt, Artificial Sequence
  Description of Artificial Sequence: Synthetic oligonucleotide
ccaucaccuacgguuuaag

SEQ ID NO: 2161001 - RNA, 19 nt, Artificial Sequence
  Description of Artificial Sequence: Synthetic oligonucleotide
ccuacgguuuaaguguaga

SEQ ID NO: 2161002 - RNA, 19 nt, Artificial Sequence
  Description of Artificial Sequence: Synthetic oligonucleotide
gagggcuuuaacagagcuu

SEQ ID NO: 2161003 - RNA, 19 nt, Artificial Sequence
  Description of Artificial Sequence: Synthetic oligonucleotide
caauagcucuuacguugua

SEQ ID NO: 2161004 - RNA, 19 nt, Artificial Sequence
  Description of Artificial Sequence: Synthetic oligonucleotide
ccaauagcucuuacguugu

SEQ ID NO: 2161005 - RNA, 19 nt, Artificial Sequence
  Description of Artificial Sequence: Synthetic oligonucleotide
gccaacaaacagaaacuau

SEQ ID NO: 2161006 - RNA, 19 nt, Artificial Sequence
  Description of Artificial Sequence: Synthetic oligonucleotide
gccuacacacucagcccug

SEQ ID NO: 2161007 - RNA, 19 nt, Artificial Sequence
  Description of Artificial Sequence: Synthetic oligonucleotide
gaguagccuuugauucucu

SEQ ID NO: 2161008 - RNA, 19 nt, Artificial Sequence
  Description of Artificial Sequence: Synthetic oligonucleotide
cuccaucaccuacgguuua

SEQ ID NO: 2161009 - RNA, 19 nt, Artificial Sequence
  Description of Artificial Sequence: Synthetic oligonucleotide
cuccuaccuucucuguuau

SEQ ID NO: 2161010 - RNA, 19 nt, Artificial Sequence
  Description of Artificial Sequence: Synthetic oligonucleotide
cccaaagaauccuguauuu

SEQ ID NO: 2161011 - RNA, 19 nt, Artificial Sequence
  Description of Artificial Sequence: Synthetic oligonucleotide
ccacuuugcaguguacaua

SEQ ID NO: 2161012 - RNA, 19 nt, Artificial Sequence
  Description of Artificial Sequence: Synthetic oligonucleotide
gcgaaaugacuccuaccuu

SEQ ID NO: 2161013 - RNA, 19 nt, Artificial Sequence
  Description of Artificial Sequence: Synthetic oligonucleotide
acucagcccugaggagaaa

SEQ ID NO: 2161014 - RNA, 19 nt, Artificial Sequence
  Description of Artificial Sequence: Synthetic oligonucleotide
ccuauacaucuccuccacu

SEQ ID NO: 2161015 - RNA, 19 nt, Artificial Sequence
  Description of Artificial Sequence: Synthetic oligonucleotide
cgguuuaaguguagagcua

SEQ ID NO: 2161016 - RNA, 19 nt, Artificial Sequence
  Description of Artificial Sequence: Synthetic oligonucleotide
caagaacuaugggcuuaau

SEQ ID NO: 2161017 - RNA, 19 nt, Artificial Sequence
  Description of Artificial Sequence: Synthetic oligonucleotide
gggcuuuaacagagcuuua

SEQ ID NO: 2161018 - RNA, 19 nt, Artificial Sequence
  Description of Artificial Sequence: Synthetic oligonucleotide
ggcugccaacaaacagaaa

SEQ ID NO: 2161019 - RNA, 19 nt, Artificial Sequence
  Description of Artificial Sequence: Synthetic oligonucleotide
ccacuccaucaccuacggu

SEQ ID NO: 2161020 - RNA, 19 nt, Artificial Sequence
  Description of Artificial Sequence: Synthetic oligonucleotide
aaaaggaguaucuuaagcc

SEQ ID NO: 2161021 - RNA, 19 nt, Artificial Sequence
  Description of Artificial Sequence: Synthetic oligonucleotide
aguaucuuaagccaccugc

SEQ ID NO: 2161022 - RNA, 19 nt, Artificial Sequence
  Description of Artificial Sequence: Synthetic oligonucleotide
uuaucuuggacacauacag

SEQ ID NO: 2161023 - RNA, 19 nt, Artificial Sequence
  Description of Artificial Sequence: Synthetic oligonucleotide
aagacguucuuccaguggc

SEQ ID NO: 2161024 - RNA, 19 nt, Artificial Sequence
  Description of Artificial Sequence: Synthetic oligonucleotide
uaugaaagccccaagcacg

SEQ ID NO: 2161025 - RNA, 19 nt, Artificial Sequence
  Description of Artificial Sequence: Synthetic oligonucleotide
ggauaagccacuuauaugg

SEQ ID NO: 2161026 - RNA, 19 nt, Artificial Sequence
  Description of Artificial Sequence: Synthetic oligonucleotide
aacccuauaaaguuuaaga

SEQ ID NO: 2161027 - RNA, 19 nt, Artificial Sequence
  Description of Artificial Sequence: Synthetic oligonucleotide
agaaaauguagucuccacc

SEQ ID NO: 2161028 - RNA, 19 nt, Artificial Sequence
  Description of Artificial Sequence: Synthetic oligonucleotide
uauaugguugccaacguag

SEQ ID NO: 2161029 - RNA, 19 nt, Artificial Sequence
  Description of Artificial Sequence: Synthetic oligonucleotide
auuaucaugaaacaggcau

SEQ ID NO: 2161030 - RNA, 19 nt, Artificial Sequence
  Description of Artificial Sequence: Synthetic oligonucleotide
agucuagcucuucagaucc

SEQ ID NO: 2161031 - RNA, 19 nt, Artificial Sequence
  Description of Artificial Sequence: Synthetic oligonucleotide
aagcuuaauuuacuugugc

SEQ ID NO: 2161032 - RNA, 19 nt, Artificial Sequence
  Description of Artificial Sequence: Synthetic oligonucleotide
gauagcuccaaccacugcg

SEQ ID NO: 2161033 - RNA, 19 nt, Artificial Sequence
  Description of Artificial Sequence: Synthetic oligonucleotide
guuguuuagguuuuaauug

SEQ ID NO: 2161034 - RNA, 19 nt, Artificial Sequence
  Description of Artificial Sequence: Synthetic oligonucleotide
auucuugauagcuccaacc

SEQ ID NO: 2161035 - RNA, 19 nt, Artificial Sequence
  Description of Artificial Sequence: Synthetic oligonucleotide
uguaaauuuccugagcacg

SEQ ID NO: 2161036 - RNA, 19 nt, Artificial Sequence
  Description of Artificial Sequence: Synthetic oligonucleotide
uuguuuagguuuuaauugg

SEQ ID NO: 2161037 - RNA, 19 nt, Artificial Sequence
  Description of Artificial Sequence: Synthetic oligonucleotide
aaugaugacaguuggaauu

SEQ ID NO: 2161038 - RNA, 19 nt, Artificial Sequence
  Description of Artificial Sequence: Synthetic oligonucleotide
aaaggaguaucuuaagcca

SEQ ID NO: 2161039 - RNA, 19 nt, Artificial Sequence
  Description of Artificial Sequence: Synthetic oligonucleotide
agaacuguggaguacauca

SEQ ID NO: 2161040 - RNA, 19 nt, Artificial Sequence
  Description of Artificial Sequence: Synthetic oligonucleotide
uuugguauaaacuccauuu

SEQ ID NO: 2161041 - RNA, 19 nt, Artificial Sequence
  Description of Artificial Sequence: Synthetic oligonucleotide
auuguaaauuuccugagca

SEQ ID NO: 2161042 - RNA, 19 nt, Artificial Sequence
  Description of Artificial Sequence: Synthetic oligonucleotide
ccuauaaaguuuaagaggg

SEQ ID NO: 2161043 - RNA, 19 nt, Artificial Sequence
  Description of Artificial Sequence: Synthetic oligonucleotide
uauaaacuccauuugcugc

SEQ ID NO: 2161044 - RNA, 19 nt, Artificial Sequence
  Description of Artificial Sequence: Synthetic oligonucleotide
aacuguggaguacaucagc

SEQ ID NO: 2161045 - RNA, 19 nt, Artificial Sequence
  Description of Artificial Sequence: Synthetic oligonucleotide
aauguagccuuccaaguug

SEQ ID NO: 2161046 - RNA, 19 nt, Artificial Sequence
  Description of Artificial Sequence: Synthetic oligonucleotide
uuuaauuggcuguucagug

SEQ ID NO: 2161047 - RNA, 19 nt, Artificial Sequence
  Description of Artificial Sequence: Synthetic oligonucleotide
aaaacacugaagaugaugu

SEQ ID NO: 2161048 - RNA, 19 nt, Artificial Sequence
  Description of Artificial Sequence: Synthetic oligonucleotide
ugaaugcaaggucagagcc

SEQ ID NO: 2161049 - RNA, 19 nt, Artificial Sequence
  Description of Artificial Sequence: Synthetic oligonucleotide
uauaaaguuuaagagggag

SEQ ID NO: 2161050 - RNA, 19 nt, Artificial Sequence
  Description of Artificial Sequence: Synthetic oligonucleotide
gaaagaagaaaacugaaua

SEQ ID NO: 2161051 - RNA, 19 nt, Artificial Sequence
  Description of Artificial Sequence: Synthetic oligonucleotide
gaaaauguagucuccacca

SEQ ID NO: 2161052 - RNA, 19 nt, Artificial Sequence
  Description of Artificial Sequence: Synthetic oligonucleotide
aaguaugauggcuuccagg

SEQ ID NO: 2161053 - RNA, 19 nt, Artificial Sequence
  Description of Artificial Sequence: Synthetic oligonucleotide
caugaaacaggcauuguag

SEQ ID NO: 2161054 - RNA, 19 nt, Artificial Sequence
  Description of Artificial Sequence: Synthetic oligonucleotide
uuuagguuuuaauuggcug

SEQ ID NO: 2161055 - RNA, 19 nt, Artificial Sequence
  Description of Artificial Sequence: Synthetic oligonucleotide
acuuauaugguugccaacg

SEQ ID NO: 2161056 - RNA, 19 nt, Artificial Sequence
  Description of Artificial Sequence: Synthetic oligonucleotide
agagcugaguuguaguagc

SEQ ID NO: 2161057 - RNA, 19 nt, Artificial Sequence
  Description of Artificial Sequence: Synthetic oligonucleotide
aaacaagacguucuuccag

SEQ ID NO: 2161058 - RNA, 19 nt, Artificial Sequence
  Description of Artificial Sequence: Synthetic oligonucleotide
aagcacuccguauuucccc

SEQ ID NO: 2161059 - RNA, 19 nt, Artificial Sequence
  Description of Artificial Sequence: Synthetic oligonucleotide
uaagccacuuauaugguug

SEQ ID NO: 2161060 - RNA, 19 nt, Artificial Sequence
  Description of Artificial Sequence: Synthetic oligonucleotide
uauuuaacccuauaaaguu

SEQ ID NO: 2161061 - RNA, 19 nt, Artificial Sequence
  Description of Artificial Sequence: Synthetic oligonucleotide
acccuauaaaguuuaagag

SEQ ID NO: 2161062 - RNA, 19 nt, Artificial Sequence
  Description of Artificial Sequence: Synthetic oligonucleotide
guaggcaacagauacauuc

SEQ ID NO: 2161063 - RNA, 19 nt, Artificial Sequence
  Description of Artificial Sequence: Synthetic oligonucleotide
ggaauuaucaugaaacagg

SEQ ID NO: 2161064 - RNA, 19 nt, Artificial Sequence
  Description of Artificial Sequence: Synthetic oligonucleotide
gaauuaucaugaaacaggc

SEQ ID NO: 2161065 - RNA, 19 nt, Artificial Sequence
  Description of Artificial Sequence: Synthetic oligonucleotide
uguaguagcugcaaagaac

SEQ ID NO: 2161066 - RNA, 19 nt, Artificial Sequence
  Description of Artificial Sequence: Synthetic oligonucleotide
agcacgauggccaaaacac

SEQ ID NO: 2161067 - RNA, 19 nt, Artificial Sequence
  Description of Artificial Sequence: Synthetic oligonucleotide
agugggauuguaaauuucc

SEQ ID NO: 2161068 - RNA, 19 nt, Artificial Sequence
  Description of Artificial Sequence: Synthetic oligonucleotide
aguaaagugagugggauug

SEQ ID NO: 2161069 - RNA, 19 nt, Artificial Sequence
  Description of Artificial Sequence: Synthetic oligonucleotide
caugcuuucuucauccacg

SEQ ID NO: 2161070 - RNA, 19 nt, Artificial Sequence
  Description of Artificial Sequence: Synthetic oligonucleotide
aacagauacauucuugaua

SEQ ID NO: 2161071 - RNA, 19 nt, Artificial Sequence
  Description of Artificial Sequence: Synthetic oligonucleotide
ugugagguagcuuucuuug

SEQ ID NO: 2161072 - RNA, 19 nt, Artificial Sequence
  Description of Artificial Sequence: Synthetic oligonucleotide
uucuugauagcuccaacca

SEQ ID NO: 2161073 - RNA, 19 nt, Artificial Sequence
  Description of Artificial Sequence: Synthetic oligonucleotide
aguuguaguagcugcaaag

SEQ ID NO: 2161074 - RNA, 19 nt, Artificial Sequence
  Description of Artificial Sequence: Synthetic oligonucleotide
ucuugucaaaaucaggaaa

SEQ ID NO: 2161075 - RNA, 19 nt, Artificial Sequence
  Description of Artificial Sequence: Synthetic oligonucleotide
aagccacuuauaugguugc

SEQ ID NO: 2161076 - RNA, 19 nt, Artificial Sequence
  Description of Artificial Sequence: Synthetic oligonucleotide
aggcaugcuuucuucaucc

SEQ ID NO: 2161077 - RNA, 19 nt, Artificial Sequence
  Description of Artificial Sequence: Synthetic oligonucleotide
uggaauuuauuuuauuuau

SEQ ID NO: 2161078 - RNA, 19 nt, Artificial Sequence
  Description of Artificial Sequence: Synthetic oligonucleotide
ucaaggaauaguguuuccg

SEQ ID NO: 2161079 - RNA, 19 nt, Artificial Sequence
  Description of Artificial Sequence: Synthetic oligonucleotide
agcagaaaccccaaaagac

SEQ ID NO: 2161080 - RNA, 19 nt, Artificial Sequence
  Description of Artificial Sequence: Synthetic oligonucleotide
aagaagaaaacugaauaau

SEQ ID NO: 2161081 - RNA, 19 nt, Artificial Sequence
  Description of Artificial Sequence: Synthetic oligonucleotide
uuuaacccuauaaaguuua

SEQ ID NO: 2161082 - RNA, 19 nt, Artificial Sequence
  Description of Artificial Sequence: Synthetic oligonucleotide
ugcuaugaaagccccaagc

SEQ ID NO: 2161083 - RNA, 19 nt, Artificial Sequence
  Description of Artificial Sequence: Synthetic oligonucleotide
aauucaguggcccucugaa

SEQ ID NO: 2161084 - RNA, 19 nt, Artificial Sequence
  Description of Artificial Sequence: Synthetic oligonucleotide
uccguauuuccccagcucc

SEQ ID NO: 2161085 - RNA, 19 nt, Artificial Sequence
  Description of Artificial Sequence: Synthetic oligonucleotide
auauuuaacccuauaaagu

SEQ ID NO: 2161086 - RNA, 19 nt, Artificial Sequence
  Description of Artificial Sequence: Synthetic oligonucleotide
gauuguaaauuuccugagc

SEQ ID NO: 2161087 - RNA, 19 nt, Artificial Sequence
  Description of Artificial Sequence: Synthetic oligonucleotide
aauaauaaaacaagacguu

SEQ ID NO: 2161088 - RNA, 19 nt, Artificial Sequence
  Description of Artificial Sequence: Synthetic oligonucleotide
aaagccccaagcacgaugg

SEQ ID NO: 2161089 - RNA, 19 nt, Artificial Sequence
  Description of Artificial Sequence: Synthetic oligonucleotide
aaaucaggaaaguggaauu

SEQ ID NO: 2161090 - RNA, 19 nt, Artificial Sequence
  Description of Artificial Sequence: Synthetic oligonucleotide
uguuuagguuuuaauuggc

SEQ ID NO: 2161091 - RNA, 19 nt, Artificial Sequence
  Description of Artificial Sequence: Synthetic oligonucleotide
uuggaauuaucaugaaaca

SEQ ID NO: 2161092 - RNA, 19 nt, Artificial Sequence
  Description of Artificial Sequence: Synthetic oligonucleotide
uuuuaauuggcuguucagu

SEQ ID NO: 2161093 - RNA, 19 nt, Artificial Sequence
  Description of Artificial Sequence: Synthetic oligonucleotide
acaggaaagaagaaaacug

SEQ ID NO: 2161094 - RNA, 19 nt, Artificial Sequence
  Description of Artificial Sequence: Synthetic oligonucleotide
aauaguguuuccgaaguau

SEQ ID NO: 2161095 - RNA, 19 nt, Artificial Sequence
  Description of Artificial Sequence: Synthetic oligonucleotide
gaguacaucagcagaaacc

SEQ ID NO: 2161096 - RNA, 19 nt, Artificial Sequence
  Description of Artificial Sequence: Synthetic oligonucleotide
agcuuaauuuacuugugcu

SEQ ID NO: 2161097 - RNA, 19 nt, Artificial Sequence
  Description of Artificial Sequence: Synthetic oligonucleotide
aaggaguaucuuaagccac

SEQ ID NO: 2161098 - RNA, 19 nt, Artificial Sequence
  Description of Artificial Sequence: Synthetic oligonucleotide
aagaugauguucaaggaau

SEQ ID NO: 2161099 - RNA, 19 nt, Artificial Sequence
  Description of Artificial Sequence: Synthetic oligonucleotide
auuuacuugugcuggauaa

SEQ ID NO: 2161100 - RNA, 19 nt, Artificial Sequence
  Description of Artificial Sequence: Synthetic oligonucleotide
uaucaugaaacaggcauug

SEQ ID NO: 2161101 - RNA, 19 nt, Artificial Sequence
  Description of Artificial Sequence: Synthetic oligonucleotide
guugaaugcaaggucagag

SEQ ID NO: 2161102 - RNA, 19 nt, Artificial Sequence
  Description of Artificial Sequence: Synthetic oligonucleotide
guaaauuuccugagcacgg

SEQ ID NO: 2161103 - RNA, 19 nt, Artificial Sequence
  Description of Artificial Sequence: Synthetic oligonucleotide
cagaaaccccaaaagacag

SEQ ID NO: 2161104 - RNA, 19 nt, Artificial Sequence
  Description of Artificial Sequence: Synthetic oligonucleotide
uugaaugcaaggucagagc

SEQ ID NO: 2161105 - RNA, 19 nt, Artificial Sequence
  Description of Artificial Sequence: Synthetic oligonucleotide
uuccagguaauuuucuugu

SEQ ID NO: 2161106 - RNA, 19 nt, Artificial Sequence
  Description of Artificial Sequence: Synthetic oligonucleotide
aaauguagccuuccaaguu

SEQ ID NO: 2161107 - RNA, 19 nt, Artificial Sequence
  Description of Artificial Sequence: Synthetic oligonucleotide
agauacauucuugauagcu

SEQ ID NO: 2161108 - RNA, 19 nt, Artificial Sequence
  Description of Artificial Sequence: Synthetic oligonucleotide
acaguuggaauuaucauga

SEQ ID NO: 2161109 - RNA, 19 nt, Artificial Sequence
  Description of Artificial Sequence: Synthetic oligonucleotide
aggaauaguguuuccgaag

SEQ ID NO: 2161110 - RNA, 19 nt, Artificial Sequence
  Description of Artificial Sequence: Synthetic oligonucleotide
ugggauuguaaauuuccug

SEQ ID NO: 2161111 - RNA, 19 nt, Artificial Sequence
  Description of Artificial Sequence: Synthetic oligonucleotide
ugcuggauaagccacuuau

SEQ ID NO: 2161112 - RNA, 19 nt, Artificial Sequence
  Description of Artificial Sequence: Synthetic oligonucleotide
aucuuggacacauacagua

SEQ ID NO: 2161113 - RNA, 19 nt, Artificial Sequence
  Description of Artificial Sequence: Synthetic oligonucleotide
cccuauaaaguuuaagagg

SEQ ID NO: 2161114 - RNA, 19 nt, Artificial Sequence
  Description of Artificial Sequence: Synthetic oligonucleotide
acugaauaauaaaacaaga

SEQ ID NO: 2161115 - RNA, 19 nt, Artificial Sequence
  Description of Artificial Sequence: Synthetic oligonucleotide
uggauaagccacuuauaug

SEQ ID NO: 2161116 - RNA, 19 nt, Artificial Sequence
  Description of Artificial Sequence: Synthetic oligonucleotide
ucuuaagccaccugccaug

SEQ ID NO: 2161117 - RNA, 19 nt, Artificial Sequence
  Description of Artificial Sequence: Synthetic oligonucleotide
accaacaucccaauguagg

SEQ ID NO: 2161118 - RNA, 19 nt, Artificial Sequence
  Description of Artificial Sequence: Synthetic oligonucleotide
gugacacuaaugaugacag

SEQ ID NO: 2161119 - RNA, 19 nt, Artificial Sequence
  Description of Artificial Sequence: Synthetic oligonucleotide
agugacacuaaugaugaca

SEQ ID NO: 2161120 - RNA, 19 nt, Artificial Sequence
  Description of Artificial Sequence: Synthetic oligonucleotide
uuaauuggcuguucagugu

SEQ ID NO: 2161121 - RNA, 19 nt, Artificial Sequence
  Description of Artificial Sequence: Synthetic oligonucleotide
agacauuccuguuugugcu

SEQ ID NO: 2161122 - RNA, 19 nt, Artificial Sequence
  Description of Artificial Sequence: Synthetic oligonucleotide
cuaugaaagccccaagcac

SEQ ID NO: 2161123 - RNA, 19 nt, Artificial Sequence
  Description of Artificial Sequence: Synthetic oligonucleotide
caaguugaaugcaagguca

SEQ ID NO: 2161124 - RNA, 19 nt, Artificial Sequence
  Description of Artificial Sequence: Synthetic oligonucleotide
aggugauugucccaggugu

SEQ ID NO: 2161125 - RNA, 19 nt, Artificial Sequence
  Description of Artificial Sequence: Synthetic oligonucleotide
ucuugauagcuccaaccac

SEQ ID NO: 2161126 - RNA, 19 nt, Artificial Sequence
  Description of Artificial Sequence: Synthetic oligonucleotide
uaguguuuccgaaguauga

SEQ ID NO: 2161127 - RNA, 19 nt, Artificial Sequence
  Description of Artificial Sequence: Synthetic oligonucleotide
aaggaauaguguuuccgaa

SEQ ID NO: 2161128 - RNA, 19 nt, Artificial Sequence
  Description of Artificial Sequence: Synthetic oligonucleotide
caggaguaaagugaguggg

SEQ ID NO: 2161129 - RNA, 19 nt, Artificial Sequence
  Description of Artificial Sequence: Synthetic oligonucleotide
acggugaacauuggcaagc

SEQ ID NO: 2161130 - RNA, 19 nt, Artificial Sequence
  Description of Artificial Sequence: Synthetic oligonucleotide
ucauccacggguuguuuag

SEQ ID NO: 2161131 - RNA, 19 nt, Artificial Sequence
  Description of Artificial Sequence: Synthetic oligonucleotide
guugccaacguagagaaga

SEQ ID NO: 2161132 - RNA, 19 nt, Artificial Sequence
  Description of Artificial Sequence: Synthetic oligonucleotide
aauuuacuugugcuggaua

SEQ ID NO: 2161133 - RNA, 19 nt, Artificial Sequence
  Description of Artificial Sequence: Synthetic oligonucleotide
uuaucaugaaacaggcauu

SEQ ID NO: 2161134 - RNA, 19 nt, Artificial Sequence
  Description of Artificial Sequence: Synthetic oligonucleotide
guagugacacuaaugauga

SEQ ID NO: 2161135 - RNA, 19 nt, Artificial Sequence
  Description of Artificial Sequence: Synthetic oligonucleotide
uugauagcuccaaccacug

SEQ ID NO: 2161136 - RNA, 19 nt, Artificial Sequence
  Description of Artificial Sequence: Synthetic oligonucleotide
augaaacaggcauuguaga

SEQ ID NO: 2161137 - RNA, 19 nt, Artificial Sequence
  Description of Artificial Sequence: Synthetic oligonucleotide
gauacauucuugauagcuc

SEQ ID NO: 2161138 - RNA, 19 nt, Artificial Sequence
  Description of Artificial Sequence: Synthetic oligonucleotide
uuguaguagcugcaaagaa

SEQ ID NO: 2161139 - RNA, 19 nt, Artificial Sequence
  Description of Artificial Sequence: Synthetic oligonucleotide
uuguaaauuuccugagcac

SEQ ID NO: 2161140 - RNA, 19 nt, Artificial Sequence
  Description of Artificial Sequence: Synthetic oligonucleotide
augcuuucuucauccacgg

SEQ ID NO: 2161141 - RNA, 19 nt, Artificial Sequence
  Description of Artificial Sequence: Synthetic oligonucleotide
augacaguuggaauuauca

SEQ ID NO: 2161142 - RNA, 19 nt, Artificial Sequence
  Description of Artificial Sequence: Synthetic oligonucleotide
ugacgugugagguagcuuu

SEQ ID NO: 2161143 - RNA, 19 nt, Artificial Sequence
  Description of Artificial Sequence: Synthetic oligonucleotide
gagaaaauguagucuccac

SEQ ID NO: 2161144 - RNA, 19 nt, Artificial Sequence
  Description of Artificial Sequence: Synthetic oligonucleotide
aacucugccuuccagucua

SEQ ID NO: 2161145 - RNA, 19 nt, Artificial Sequence
  Description of Artificial Sequence: Synthetic oligonucleotide
uuuacuugugcuggauaag

SEQ ID NO: 2161146 - RNA, 19 nt, Artificial Sequence
  Description of Artificial Sequence: Synthetic oligonucleotide
ugguugccaacguagagaa

SEQ ID NO: 2161147 - RNA, 19 nt, Artificial Sequence
  Description of Artificial Sequence: Synthetic oligonucleotide
gaaagccccaagcacgaug

SEQ ID NO: 2161148 - RNA, 19 nt, Artificial Sequence
  Description of Artificial Sequence: Synthetic oligonucleotide
gggauuguaaauuuccuga

SEQ ID NO: 2161149 - RNA, 19 nt, Artificial Sequence
  Description of Artificial Sequence: Synthetic oligonucleotide
uaacccuauaaaguuuaag

SEQ ID NO: 2161150 - RNA, 19 nt, Artificial Sequence
  Description of Artificial Sequence: Synthetic oligonucleotide
uuccugagcacggugaaca

SEQ ID NO: 2161151 - RNA, 19 nt, Artificial Sequence
  Description of Artificial Sequence: Synthetic oligonucleotide
gaaaccccaaaagacagga

SEQ ID NO: 2161152 - RNA, 19 nt, Artificial Sequence
  Description of Artificial Sequence: Synthetic oligonucleotide
uguagucuccaccaaccaa

SEQ ID NO: 2161153 - RNA, 19 nt, Artificial Sequence
  Description of Artificial Sequence: Synthetic oligonucleotide
ccaaaagacaggaaagaag

SEQ ID NO: 2161154 - RNA, 19 nt, Artificial Sequence
  Description of Artificial Sequence: Synthetic oligonucleotide
aagcaggugauugucccag

SEQ ID NO: 2161155 - RNA, 19 nt, Artificial Sequence
  Description of Artificial Sequence: Synthetic oligonucleotide
gaaguaugauggcuuccag

SEQ ID NO: 2161156 - RNA, 19 nt, Artificial Sequence
  Description of Artificial Sequence: Synthetic oligonucleotide
aggaguaucuuaagccacc

SEQ ID NO: 2161157 - RNA, 19 nt, Artificial Sequence
  Description of Artificial Sequence: Synthetic oligonucleotide
aagaacuguggaguacauc

SEQ ID NO: 2161158 - RNA, 19 nt, Artificial Sequence
  Description of Artificial Sequence: Synthetic oligonucleotide
aacuccauuugcugcugug

SEQ ID NO: 2161159 - RNA, 19 nt, Artificial Sequence
  Description of Artificial Sequence: Synthetic oligonucleotide
caacguagagaagaggcag

SEQ ID NO: 2161160 - RNA, 19 nt, Artificial Sequence
  Description of Artificial Sequence: Synthetic oligonucleotide
uaaugaugacaguuggaau

SEQ ID NO: 2161161 - RNA, 19 nt, Artificial Sequence
  Description of Artificial Sequence: Synthetic oligonucleotide
guagcugcaaagaacugug

SEQ ID NO: 2161162 - RNA, 19 nt, Artificial Sequence
  Description of Artificial Sequence: Synthetic oligonucleotide
aauguaggcaacagauaca

SEQ ID NO: 2161163 - RNA, 19 nt, Artificial Sequence
  Description of Artificial Sequence: Synthetic oligonucleotide
auaaaguuuaagagggaga

SEQ ID NO: 2161164 - RNA, 19 nt, Artificial Sequence
  Description of Artificial Sequence: Synthetic oligonucleotide
gcuuaauuuacuugugcug

SEQ ID NO: 2161165 - RNA, 19 nt, Artificial Sequence
  Description of Artificial Sequence: Synthetic oligonucleotide
ggauuguaaauuuccugag

SEQ ID NO: 2161166 - RNA, 19 nt, Artificial Sequence
  Description of Artificial Sequence: Synthetic oligonucleotide
guagucuccaccaaccaac

SEQ ID NO: 2161167 - RNA, 19 nt, Artificial Sequence
  Description of Artificial Sequence: Synthetic oligonucleotide
aguagcugcaaagaacugu

SEQ ID NO: 2161168 - RNA, 19 nt, Artificial Sequence
  Description of Artificial Sequence: Synthetic oligonucleotide
ugacaguuggaauuaucau

SEQ ID NO: 2161169 - RNA, 19 nt, Artificial Sequence
  Description of Artificial Sequence: Synthetic oligonucleotide
uugccaacguagagaagag

SEQ ID NO: 2161170 - RNA, 19 nt, Artificial Sequence
  Description of Artificial Sequence: Synthetic oligonucleotide
aucucuggguugcccacgc

SEQ ID NO: 2161171 - RNA, 19 nt, Artificial Sequence
  Description of Artificial Sequence: Synthetic oligonucleotide
uccagccuaagccugcaac

SEQ ID NO: 2161172 - RNA, 19 nt, Artificial Sequence
  Description of Artificial Sequence: Synthetic oligonucleotide
ugcaacucugccuuccagu

SEQ ID NO: 2161173 - RNA, 19 nt, Artificial Sequence
  Description of Artificial Sequence: Synthetic oligonucleotide
aaguugaaugcaaggucag

SEQ ID NO: 2161174 - RNA, 19 nt, Artificial Sequence
  Description of Artificial Sequence: Synthetic oligonucleotide
ugauugucccagguguggg

SEQ ID NO: 2161175 - RNA, 19 nt, Artificial Sequence
  Description of Artificial Sequence: Synthetic oligonucleotide
ugcugggucugccuugucc

SEQ ID NO: 2161176 - RNA, 19 nt, Artificial Sequence
  Description of Artificial Sequence: Synthetic oligonucleotide
guguuuccgaaguaugaug

SEQ ID NO: 2161177 - RNA, 19 nt, Artificial Sequence
  Description of Artificial Sequence: Synthetic oligonucleotide
augauguucaaggaauagu

SEQ ID NO: 2161178 - RNA, 19 nt, Artificial Sequence
  Description of Artificial Sequence: Synthetic oligonucleotide
caagacguucuuccagugg

SEQ ID NO: 2161179 - RNA, 19 nt, Artificial Sequence
  Description of Artificial Sequence: Synthetic oligonucleotide
caaggaauaguguuuccga

SEQ ID NO: 2161180 - RNA, 19 nt, Artificial Sequence
  Description of Artificial Sequence: Synthetic oligonucleotide
ugucguucaagaacacaaa

SEQ ID NO: 2161181 - RNA, 19 nt, Artificial Sequence
  Description of Artificial Sequence: Synthetic oligonucleotide
cucugaaagucuccaguag

SEQ ID NO: 2161182 - RNA, 19 nt, Artificial Sequence
  Description of Artificial Sequence: Synthetic oligonucleotide
agugagugggauuguaaau

SEQ ID NO: 2161183 - RNA, 19 nt, Artificial Sequence
  Description of Artificial Sequence: Synthetic oligonucleotide
aauuaucaugaaacaggca

SEQ ID NO: 2161184 - RNA, 19 nt, Artificial Sequence
  Description of Artificial Sequence: Synthetic oligonucleotide
ucuggguugcccacgccug

SEQ ID NO: 2161185 - RNA, 19 nt, Artificial Sequence
  Description of Artificial Sequence: Synthetic oligonucleotide
guaucuuaagccaccugcc

SEQ ID NO: 2161186 - RNA, 19 nt, Artificial Sequence
  Description of Artificial Sequence: Synthetic oligonucleotide
ucuuggacacauacaguau

SEQ ID NO: 2161187 - RNA, 19 nt, Artificial Sequence
  Description of Artificial Sequence: Synthetic oligonucleotide
ugagugggauuguaaauuu

SEQ ID NO: 2161188 - RNA, 19 nt, Artificial Sequence
  Description of Artificial Sequence: Synthetic oligonucleotide
guauuuugcagacauuccu

SEQ ID NO: 2161189 - RNA, 19 nt, Artificial Sequence
  Description of Artificial Sequence: Synthetic oligonucleotide
augucguucaagaacacaa

SEQ ID NO: 2161190 - RNA, 19 nt, Artificial Sequence
  Description of Artificial Sequence: Synthetic oligonucleotide
auagcuccaaccacugcgg

SEQ ID NO: 2161191 - RNA, 19 nt, Artificial Sequence
  Description of Artificial Sequence: Synthetic oligonucleotide
gccaugcaaauauuuaacc

SEQ ID NO: 2161192 - RNA, 19 nt, Artificial Sequence
  Description of Artificial Sequence: Synthetic oligonucleotide
auaguguuuccgaaguaug

SEQ ID NO: 2161193 - RNA, 19 nt, Artificial Sequence
  Description of Artificial Sequence: Synthetic oligonucleotide
aucuuaagccaccugccau

SEQ ID NO: 2161194 - RNA, 19 nt, Artificial Sequence
  Description of Artificial Sequence: Synthetic oligonucleotide
aaccaacaucccaauguag

SEQ ID NO: 2161195 - RNA, 19 nt, Artificial Sequence
  Description of Artificial Sequence: Synthetic oligonucleotide
guaguagcugcaaagaacu

SEQ ID NO: 2161196 - RNA, 19 nt, Artificial Sequence
  Description of Artificial Sequence: Synthetic oligonucleotide
ugcaaauauuuaacccuau

SEQ ID NO: 2161197 - RNA, 19 nt, Artificial Sequence
  Description of Artificial Sequence: Synthetic oligonucleotide
agcacggugaacauuggca

SEQ ID NO: 2161198 - RNA, 19 nt, Artificial Sequence
  Description of Artificial Sequence: Synthetic oligonucleotide
uuugugcucuggccaagca

SEQ ID NO: 2161199 - RNA, 19 nt, Artificial Sequence
  Description of Artificial Sequence: Synthetic oligonucleotide
ugccuuguggcuccuugug

SEQ ID NO: 2161200 - RNA, 19 nt, Artificial Sequence
  Description of Artificial Sequence: Synthetic oligonucleotide
ugccuuguccagccuaagc

SEQ ID NO: 2161201 - RNA, 19 nt, Artificial Sequence
  Description of Artificial Sequence: Synthetic oligonucleotide
cuugauagcuccaaccacu

SEQ ID NO: 2161202 - RNA, 19 nt, Artificial Sequence
  Description of Artificial Sequence: Synthetic oligonucleotide
uuaacccuauaaaguuuaa

SEQ ID NO: 2161203 - RNA, 19 nt, Artificial Sequence
  Description of Artificial Sequence: Synthetic oligonucleotide
gauggccaaaacacugaag

SEQ ID NO: 2161204 - RNA, 19 nt, Artificial Sequence
  Description of Artificial Sequence: Synthetic oligonucleotide
ugauagcuccaaccacugc

SEQ ID NO: 2161205 - RNA, 19 nt, Artificial Sequence
  Description of Artificial Sequence: Synthetic oligonucleotide
acaagacguucuuccagug

SEQ ID NO: 2161206 - RNA, 19 nt, Artificial Sequence
  Description of Artificial Sequence: Synthetic oligonucleotide
augguugccaacguagaga

SEQ ID NO: 2161207 - RNA, 19 nt, Artificial Sequence
  Description of Artificial Sequence: Synthetic oligonucleotide
ccaguagugacacuaauga

SEQ ID NO: 2161208 - RNA, 19 nt, Artificial Sequence
  Description of Artificial Sequence: Synthetic oligonucleotide
ggccaaaacacugaagaug

SEQ ID NO: 2161209 - RNA, 19 nt, Artificial Sequence
  Description of Artificial Sequence: Synthetic oligonucleotide
uaaauuuccugagcacggu

SEQ ID NO: 2161210 - RNA, 19 nt, Artificial Sequence
  Description of Artificial Sequence: Synthetic oligonucleotide
cuaagccugcaacucugcc

SEQ ID NO: 2161211 - RNA, 19 nt, Artificial Sequence
  Description of Artificial Sequence: Synthetic oligonucleotide
accacugcgguggucagag

SEQ ID NO: 2161212 - RNA, 19 nt, Artificial Sequence
  Description of Artificial Sequence: Synthetic oligonucleotide
uaguagcugcaaagaacug

SEQ ID NO: 2161213 - RNA, 19 nt, Artificial Sequence
  Description of Artificial Sequence: Synthetic oligonucleotide
gguuuuaauuggcuguuca

SEQ ID NO: 2161214 - RNA, 19 nt, Artificial Sequence
  Description of Artificial Sequence: Synthetic oligonucleotide
aaacuccauuugcugcugu

SEQ ID NO: 2161215 - RNA, 19 nt, Artificial Sequence
  Description of Artificial Sequence: Synthetic oligonucleotide
ucugccuuguccagccuaa

SEQ ID NO: 2161216 - RNA, 19 nt, Artificial Sequence
  Description of Artificial Sequence: Synthetic oligonucleotide
gcuccaaccacugcggugg

SEQ ID NO: 2161217 - RNA, 19 nt, Artificial Sequence
  Description of Artificial Sequence: Synthetic oligonucleotide
cuucagauccagaggcaug

SEQ ID NO: 2161218 - RNA, 19 nt, Artificial Sequence
  Description of Artificial Sequence: Synthetic oligonucleotide
gugauugucccaggugugg

SEQ ID NO: 2161219 - RNA, 19 nt, Artificial Sequence
  Description of Artificial Sequence: Synthetic oligonucleotide
acuguggaguacaucagca

SEQ ID NO: 2161220 - RNA, 19 nt, Artificial Sequence
  Description of Artificial Sequence: Synthetic oligonucleotide
aacguagagaagaggcaga

SEQ ID NO: 2161221 - RNA, 19 nt, Artificial Sequence
  Description of Artificial Sequence: Synthetic oligonucleotide
uccgaaguaugauggcuuc

SEQ ID NO: 2161222 - RNA, 19 nt, Artificial Sequence
  Description of Artificial Sequence: Synthetic oligonucleotide
auaagccacuuauaugguu

SEQ ID NO: 2161223 - RNA, 19 nt, Artificial Sequence
  Description of Artificial Sequence: Synthetic oligonucleotide
cuuaagccaccugccaugc

SEQ ID NO: 2161224 - RNA, 19 nt, Artificial Sequence
  Description of Artificial Sequence: Synthetic oligonucleotide
ucuugggugccuuguggcu

SEQ ID NO: 2161225 - RNA, 19 nt, Artificial Sequence
  Description of Artificial Sequence: Synthetic oligonucleotide
agaaaccccaaaagacagg

SEQ ID NO: 2161226 - RNA, 19 nt, Artificial Sequence
  Description of Artificial Sequence: Synthetic oligonucleotide
gucguucaagaacacaaaa

SEQ ID NO: 2161227 - RNA, 19 nt, Artificial Sequence
  Description of Artificial Sequence: Synthetic oligonucleotide
uaauuuacuugugcuggau

SEQ ID NO: 2161228 - RNA, 19 nt, Artificial Sequence
  Description of Artificial Sequence: Synthetic oligonucleotide
ugcugugaagaugucguuc

SEQ ID NO: 2161229 - RNA, 19 nt, Artificial Sequence
  Description of Artificial Sequence: Synthetic oligonucleotide
gaauucaguggcccucuga

SEQ ID NO: 2161230 - RNA, 19 nt, Artificial Sequence
  Description of Artificial Sequence: Synthetic oligonucleotide
ugccaacguagagaagagg

SEQ ID NO: 2161231 - RNA, 19 nt, Artificial Sequence
  Description of Artificial Sequence: Synthetic oligonucleotide
cagucuagcucuucagauc

SEQ ID NO: 2161232 - RNA, 19 nt, Artificial Sequence
  Description of Artificial Sequence: Synthetic oligonucleotide
auguagucuccaccaacca

SEQ ID NO: 2161233 - RNA, 19 nt, Artificial Sequence
  Description of Artificial Sequence: Synthetic oligonucleotide
cagcagaaaccccaaaaga

SEQ ID NO: 2161234 - RNA, 19 nt, Artificial Sequence
  Description of Artificial Sequence: Synthetic oligonucleotide
cugccaugcaaauauuuaa

SEQ ID NO: 2161235 - RNA, 19 nt, Artificial Sequence
  Description of Artificial Sequence: Synthetic oligonucleotide
cuggccaagcaggugauug

SEQ ID NO: 2161236 - RNA, 19 nt, Artificial Sequence
  Description of Artificial Sequence: Synthetic oligonucleotide
aggugugggaucucugggu

SEQ ID NO: 2161237 - RNA, 19 nt, Artificial Sequence
  Description of Artificial Sequence: Synthetic oligonucleotide
gaugacaguuggaauuauc

SEQ ID NO: 2161238 - RNA, 19 nt, Artificial Sequence
  Description of Artificial Sequence: Synthetic oligonucleotide
uugugcuggauaagccacu

SEQ ID NO: 2161239 - RNA, 19 nt, Artificial Sequence
  Description of Artificial Sequence: Synthetic oligonucleotide
agaggcaugcuuucuucau

SEQ ID NO: 2161240 - RNA, 19 nt, Artificial Sequence
  Description of Artificial Sequence: Synthetic oligonucleotide
gaugucguucaagaacaca

SEQ ID NO: 2161241 - RNA, 19 nt, Artificial Sequence
  Description of Artificial Sequence: Synthetic oligonucleotide
ucuuuguauuuugcagaca

SEQ ID NO: 2161242 - RNA, 19 nt, Artificial Sequence
  Description of Artificial Sequence: Synthetic oligonucleotide
auuuaacccuauaaaguuu

SEQ ID NO: 2161243 - RNA, 19 nt, Artificial Sequence
  Description of Artificial Sequence: Synthetic oligonucleotide
uuuugcagacauuccuguu

SEQ ID NO: 2161244 - RNA, 19 nt, Artificial Sequence
  Description of Artificial Sequence: Synthetic oligonucleotide
gguuguuuagguuuuaauu

SEQ ID NO: 2161245 - RNA, 19 nt, Artificial Sequence
  Description of Artificial Sequence: Synthetic oligonucleotide
acuaaugaugacaguugga

SEQ ID NO: 2161246 - RNA, 19 nt, Artificial Sequence
  Description of Artificial Sequence: Synthetic oligonucleotide
uccagguaauuuucuuguc

SEQ ID NO: 2161247 - RNA, 19 nt, Artificial Sequence
  Description of Artificial Sequence: Synthetic oligonucleotide
agccacuuauaugguugcc

SEQ ID NO: 2161248 - RNA, 19 nt, Artificial Sequence
  Description of Artificial Sequence: Synthetic oligonucleotide
aucccaauguaggcaacag

SEQ ID NO: 2161249 - RNA, 19 nt, Artificial Sequence
  Description of Artificial Sequence: Synthetic oligonucleotide
uaaagugagugggauugua

SEQ ID NO: 2161250 - RNA, 19 nt, Artificial Sequence
  Description of Artificial Sequence: Synthetic oligonucleotide
uccagaggcaugcuuucuu

SEQ ID NO: 2161251 - RNA, 19 nt, Artificial Sequence
  Description of Artificial Sequence: Synthetic oligonucleotide
acuccguauuuccccagcu

SEQ ID NO: 2161252 - RNA, 19 nt, Artificial Sequence
  Description of Artificial Sequence: Synthetic oligonucleotide
augaugacaguuggaauua

SEQ ID NO: 2161253 - RNA, 19 nt, Artificial Sequence
  Description of Artificial Sequence: Synthetic oligonucleotide
gauugucccagguguggga

SEQ ID NO: 2161254 - RNA, 19 nt, Artificial Sequence
  Description of Artificial Sequence: Synthetic oligonucleotide
auccacggguuguuuaggu

SEQ ID NO: 2161255 - RNA, 19 nt, Artificial Sequence
  Description of Artificial Sequence: Synthetic oligonucleotide
cuggauaagccacuuauau

SEQ ID NO: 2161256 - RNA, 19 nt, Artificial Sequence
  Description of Artificial Sequence: Synthetic oligonucleotide
agguuuuaauuggcuguuc

SEQ ID NO: 2161257 - RNA, 19 nt, Artificial Sequence
  Description of Artificial Sequence: Synthetic oligonucleotide
gacguucuuccaguggcug

SEQ ID NO: 2161258 - RNA, 19 nt, Artificial Sequence
  Description of Artificial Sequence: Synthetic oligonucleotide
ggaguacaucagcagaaac

SEQ ID NO: 2161259 - RNA, 19 nt, Artificial Sequence
  Description of Artificial Sequence: Synthetic oligonucleotide
agcaggugauugucccagg

SEQ ID NO: 2161260 - RNA, 19 nt, Artificial Sequence
  Description of Artificial Sequence: Synthetic oligonucleotide
aguuuaagagggagaaaau

SEQ ID NO: 2161261 - RNA, 19 nt, Artificial Sequence
  Description of Artificial Sequence: Synthetic oligonucleotide
cagauacauucuugauagc

SEQ ID NO: 2161262 - RNA, 19 nt, Artificial Sequence
  Description of Artificial Sequence: Synthetic oligonucleotide
agauccagaggcaugcuuu

SEQ ID NO: 2161263 - RNA, 19 nt, Artificial Sequence
  Description of Artificial Sequence: Synthetic oligonucleotide
uguuugugcucuggccaag

SEQ ID NO: 2161264 - RNA, 19 nt, Artificial Sequence
  Description of Artificial Sequence: Synthetic oligonucleotide
gaauaguguuuccgaagua

SEQ ID NO: 2161265 - RNA, 19 nt, Artificial Sequence
  Description of Artificial Sequence: Synthetic oligonucleotide
uggccaagcaggugauugu

SEQ ID NO: 2161266 - RNA, 19 nt, Artificial Sequence
  Description of Artificial Sequence: Synthetic oligonucleotide
aaggucagagccagcugcu

SEQ ID NO: 2161267 - RNA, 19 nt, Artificial Sequence
  Description of Artificial Sequence: Synthetic oligonucleotide
gcagaaaccccaaaagaca

SEQ ID NO: 2161268 - RNA, 19 nt, Artificial Sequence
  Description of Artificial Sequence: Synthetic oligonucleotide
gaguuguaguagcugcaaa

SEQ ID NO: 2161269 - RNA, 19 nt, Artificial Sequence
  Description of Artificial Sequence: Synthetic oligonucleotide
augaaagccccaagcacga

SEQ ID NO: 2161270 - RNA, 19 nt, Artificial Sequence
  Description of Artificial Sequence: Synthetic oligonucleotide
aguugaaugcaaggucaga

SEQ ID NO: 2161271 - RNA, 19 nt, Artificial Sequence
  Description of Artificial Sequence: Synthetic oligonucleotide
uuaagccaccugccaugca

SEQ ID NO: 2161272 - RNA, 19 nt, Artificial Sequence
  Description of Artificial Sequence: Synthetic oligonucleotide
gguauaaacuccauuugcu

SEQ ID NO: 2161273 - RNA, 19 nt, Artificial Sequence
  Description of Artificial Sequence: Synthetic oligonucleotide
cauuggcaagcuuaauuua

SEQ ID NO: 2161274 - RNA, 19 nt, Artificial Sequence
  Description of Artificial Sequence: Synthetic oligonucleotide
uuccaggaguaaagugagu

SEQ ID NO: 2161275 - RNA, 19 nt, Artificial Sequence
  Description of Artificial Sequence: Synthetic oligonucleotide
cugcuaugaaagccccaag

SEQ ID NO: 2161276 - RNA, 19 nt, Artificial Sequence
  Description of Artificial Sequence: Synthetic oligonucleotide
caaccaacaucccaaugua

SEQ ID NO: 2161277 - RNA, 19 nt, Artificial Sequence
  Description of Artificial Sequence: Synthetic oligonucleotide
cacuccguauuuccccagc

SEQ ID NO: 2161278 - RNA, 19 nt, Artificial Sequence
  Description of Artificial Sequence: Synthetic oligonucleotide
ugcagugacgugugaggua

SEQ ID NO: 2161279 - RNA, 19 nt, Artificial Sequence
  Description of Artificial Sequence: Synthetic oligonucleotide
caacaucccaauguaggca

SEQ ID NO: 2161280 - RNA, 19 nt, Artificial Sequence
  Description of Artificial Sequence: Synthetic oligonucleotide
gucuccaguagugacacua

SEQ ID NO: 2161281 - RNA, 19 nt, Artificial Sequence
  Description of Artificial Sequence: Synthetic oligonucleotide
uggcuccuugugcagugac

SEQ ID NO: 2161282 - RNA, 19 nt, Artificial Sequence
  Description of Artificial Sequence: Synthetic oligonucleotide
gagugggauuguaaauuuc

SEQ ID NO: 2161283 - RNA, 19 nt, Artificial Sequence
  Description of Artificial Sequence: Synthetic oligonucleotide
auuggcuguucaguguuaa

SEQ ID NO: 2161284 - RNA, 19 nt, Artificial Sequence
  Description of Artificial Sequence: Synthetic oligonucleotide
aggaguaaagugaguggga

SEQ ID NO: 2161285 - RNA, 19 nt, Artificial Sequence
  Description of Artificial Sequence: Synthetic oligonucleotide
ggagaaaauguagucucca

SEQ ID NO: 2161286 - RNA, 19 nt, Artificial Sequence
  Description of Artificial Sequence: Synthetic oligonucleotide
cuugggugccuuguggcuc

SEQ ID NO: 2161287 - RNA, 19 nt, Artificial Sequence
  Description of Artificial Sequence: Synthetic oligonucleotide
cauccacggguuguuuagg

SEQ ID NO: 2161288 - RNA, 19 nt, Artificial Sequence
  Description of Artificial Sequence: Synthetic oligonucleotide
uuuccugagcacggugaac

SEQ ID NO: 2161289 - RNA, 19 nt, Artificial Sequence
  Description of Artificial Sequence: Synthetic oligonucleotide
cuccguauuuccccagcuc

SEQ ID NO: 2161290 - RNA, 19 nt, Artificial Sequence
  Description of Artificial Sequence: Synthetic oligonucleotide
uggcuuccaggaguaaagu

SEQ ID NO: 2161291 - RNA, 19 nt, Artificial Sequence
  Description of Artificial Sequence: Synthetic oligonucleotide
guuugugcucuggccaagc

SEQ ID NO: 2161292 - RNA, 19 nt, Artificial Sequence
  Description of Artificial Sequence: Synthetic oligonucleotide
cugcaacucugccuuccag

SEQ ID NO: 2161293 - RNA, 19 nt, Artificial Sequence
  Description of Artificial Sequence: Synthetic oligonucleotide
acgauggccaaaacacuga

SEQ ID NO: 2161294 - RNA, 19 nt, Artificial Sequence
  Description of Artificial Sequence: Synthetic oligonucleotide
uccacggguuguuuagguu

SEQ ID NO: 2161295 - RNA, 19 nt, Artificial Sequence
  Description of Artificial Sequence: Synthetic oligonucleotide
uuggcuguucaguguuaaa

SEQ ID NO: 2161296 - RNA, 19 nt, Artificial Sequence
  Description of Artificial Sequence: Synthetic oligonucleotide
cugcaaagaacuguggagu

SEQ ID NO: 2161297 - RNA, 19 nt, Artificial Sequence
  Description of Artificial Sequence: Synthetic oligonucleotide
ugugcuggauaagccacuu

SEQ ID NO: 2161298 - RNA, 19 nt, Artificial Sequence
  Description of Artificial Sequence: Synthetic oligonucleotide
gcagacauuccuguuugug

SEQ ID NO: 2161299 - RNA, 19 nt, Artificial Sequence
  Description of Artificial Sequence: Synthetic oligonucleotide
guggcugaauucaguggcc

SEQ ID NO: 2161300 - RNA, 19 nt, Artificial Sequence
  Description of Artificial Sequence: Synthetic oligonucleotide
gugucuugggugccuugug

SEQ ID NO: 2161301 - RNA, 19 nt, Artificial Sequence
  Description of Artificial Sequence: Synthetic oligonucleotide
gggagaaaauguagucucc

SEQ ID NO: 2161302 - RNA, 19 nt, Artificial Sequence
  Description of Artificial Sequence: Synthetic oligonucleotide
acaucccaauguaggcaac

SEQ ID NO: 2161303 - RNA, 19 nt, Artificial Sequence
  Description of Artificial Sequence: Synthetic oligonucleotide
cuuauaugguugccaacgu

SEQ ID NO: 2161304 - RNA, 19 nt, Artificial Sequence
  Description of Artificial Sequence: Synthetic oligonucleotide
ccagguaauuuucuuguca

SEQ ID NO: 2161305 - RNA, 19 nt, Artificial Sequence
  Description of Artificial Sequence: Synthetic oligonucleotide
gauaagccacuuauauggu

SEQ ID NO: 2161306 - RNA, 19 nt, Artificial Sequence
  Description of Artificial Sequence: Synthetic oligonucleotide
ucucuggguugcccacgcc

SEQ ID NO: 2161307 - RNA, 19 nt, Artificial Sequence
  Description of Artificial Sequence: Synthetic oligonucleotide
gucagagcugaguuguagu

SEQ ID NO: 2161308 - RNA, 19 nt, Artificial Sequence
  Description of Artificial Sequence: Synthetic oligonucleotide
gggucugccuuguccagcc

SEQ ID NO: 2161309 - RNA, 19 nt, Artificial Sequence
  Description of Artificial Sequence: Synthetic oligonucleotide
acugcgguggucagagcug

SEQ ID NO: 2161310 - RNA, 19 nt, Artificial Sequence
  Description of Artificial Sequence: Synthetic oligonucleotide
cagaggcaugcuuucuuca

SEQ ID NO: 2161311 - RNA, 19 nt, Artificial Sequence
  Description of Artificial Sequence: Synthetic oligonucleotide
guggucagagcugaguugu

SEQ ID NO: 2161312 - RNA, 19 nt, Artificial Sequence
  Description of Artificial Sequence: Synthetic oligonucleotide
cagaggaaacagcuuucca

SEQ ID NO: 2161313 - RNA, 19 nt, Artificial Sequence
  Description of Artificial Sequence: Synthetic oligonucleotide
cuggguugcccacgccugc

SEQ ID NO: 2161314 - RNA, 19 nt, Artificial Sequence
  Description of Artificial Sequence: Synthetic oligonucleotide
uuguggcuccuugugcagu

SEQ ID NO: 2161315 - RNA, 19 nt, Artificial Sequence
  Description of Artificial Sequence: Synthetic oligonucleotide
aaaccccaaaagacaggaa

SEQ ID NO: 2161316 - RNA, 19 nt, Artificial Sequence
  Description of Artificial Sequence: Synthetic oligonucleotide
cagccuaagccugcaacuc

SEQ ID NO: 2161317 - RNA, 19 nt, Artificial Sequence
  Description of Artificial Sequence: Synthetic oligonucleotide
cuguuugugcucuggccaa

SEQ ID NO: 2161318 - RNA, 19 nt, Artificial Sequence
  Description of Artificial Sequence: Synthetic oligonucleotide
caagcacgauggccaaaac

SEQ ID NO: 2161319 - RNA, 19 nt, Artificial Sequence
  Description of Artificial Sequence: Synthetic oligonucleotide
uguccagccuaagccugca

SEQ ID NO: 2161320 - RNA, 19 nt, Artificial Sequence
  Description of Artificial Sequence: Synthetic oligonucleotide
uccugagcacggugaacau

SEQ ID NO: 2161321 - RNA, 19 nt, Artificial Sequence
  Description of Artificial Sequence: Synthetic oligonucleotide
ggugauugucccaggugug

SEQ ID NO: 2161322 - RNA, 19 nt, Artificial Sequence
  Description of Artificial Sequence: Synthetic oligonucleotide
ugcgguggucagagcugag

SEQ ID NO: 2161323 - RNA, 19 nt, Artificial Sequence
  Description of Artificial Sequence: Synthetic oligonucleotide
aagccaccugccaugcaaa

SEQ ID NO: 2161324 - RNA, 19 nt, Artificial Sequence
  Description of Artificial Sequence: Synthetic oligonucleotide
gugagugggauuguaaauu

SEQ ID NO: 2161325 - RNA, 19 nt, Artificial Sequence
  Description of Artificial Sequence: Synthetic oligonucleotide
cuucggguccauuuucugu

SEQ ID NO: 2161326 - RNA, 19 nt, Artificial Sequence
  Description of Artificial Sequence: Synthetic oligonucleotide
ggaaagaagaaaacugaau

SEQ ID NO: 2161327 - RNA, 19 nt, Artificial Sequence
  Description of Artificial Sequence: Synthetic oligonucleotide
caucccaauguaggcaaca

SEQ ID NO: 2161328 - RNA, 19 nt, Artificial Sequence
  Description of Artificial Sequence: Synthetic oligonucleotide
gacgugugagguagcuuuc

SEQ ID NO: 2161329 - RNA, 19 nt, Artificial Sequence
  Description of Artificial Sequence: Synthetic oligonucleotide
gaguaaagugagugggauu

SEQ ID NO: 2161330 - RNA, 19 nt, Artificial Sequence
  Description of Artificial Sequence: Synthetic oligonucleotide
gggaucucuggguugccca

SEQ ID NO: 2161331 - RNA, 19 nt, Artificial Sequence
  Description of Artificial Sequence: Synthetic oligonucleotide
uugucccaggugugggauc

SEQ ID NO: 2161332 - RNA, 19 nt, Artificial Sequence
  Description of Artificial Sequence: Synthetic oligonucleotide
acgugugagguagcuuucu

SEQ ID NO: 2161333 - RNA, 19 nt, Artificial Sequence
  Description of Artificial Sequence: Synthetic oligonucleotide
ccaacguagagaagaggca

SEQ ID NO: 2161334 - RNA, 19 nt, Artificial Sequence
  Description of Artificial Sequence: Synthetic oligonucleotide
ggaucucuggguugcccac

SEQ ID NO: 2161335 - RNA, 19 nt, Artificial Sequence
  Description of Artificial Sequence: Synthetic oligonucleotide
cacugcgguggucagagcu

SEQ ID NO: 2161336 - RNA, 19 nt, Artificial Sequence
  Description of Artificial Sequence: Synthetic oligonucleotide
ccuaagccugcaacucugc

SEQ ID NO: 2161337 - RNA, 19 nt, Artificial Sequence
  Description of Artificial Sequence: Synthetic oligonucleotide
ucggguccauuuucuguuu

SEQ ID NO: 2161338 - RNA, 19 nt, Artificial Sequence
  Description of Artificial Sequence: Synthetic oligonucleotide
gccacuuauaugguugcca

SEQ ID NO: 2161339 - RNA, 19 nt, Artificial Sequence
  Description of Artificial Sequence: Synthetic oligonucleotide
ggcuccuugugcagugacg

SEQ ID NO: 2161340 - RNA, 19 nt, Artificial Sequence
  Description of Artificial Sequence: Synthetic oligonucleotide
agacguucuuccaguggcu

SEQ ID NO: 2161341 - RNA, 19 nt, Artificial Sequence
  Description of Artificial Sequence: Synthetic oligonucleotide
gcugcuaugaaagccccaa

SEQ ID NO: 2161342 - RNA, 19 nt, Artificial Sequence
  Description of Artificial Sequence: Synthetic oligonucleotide
ccacuuauaugguugccaa

SEQ ID NO: 2161343 - RNA, 19 nt, Artificial Sequence
  Description of Artificial Sequence: Synthetic oligonucleotide
cagcuuuccagguaauuuu

SEQ ID NO: 2161344 - RNA, 19 nt, Artificial Sequence
  Description of Artificial Sequence: Synthetic oligonucleotide
gugggauuguaaauuuccu

SEQ ID NO: 2161345 - RNA, 19 nt, Artificial Sequence
  Description of Artificial Sequence: Synthetic oligonucleotide
agccaccugccaugcaaau

SEQ ID NO: 2161346 - RNA, 19 nt, Artificial Sequence
  Description of Artificial Sequence: Synthetic oligonucleotide
uggucagagcugaguugua

SEQ ID NO: 2161347 - RNA, 19 nt, Artificial Sequence
  Description of Artificial Sequence: Synthetic oligonucleotide
gucugccuuguccagccua

SEQ ID NO: 2161348 - RNA, 19 nt, Artificial Sequence
  Description of Artificial Sequence: Synthetic oligonucleotide
cucuggguugcccacgccu

SEQ ID NO: 2161349 - RNA, 19 nt, Artificial Sequence
  Description of Artificial Sequence: Synthetic oligonucleotide
ugcccacgccugcuggguc

SEQ ID NO: 2161350 - RNA, 19 nt, Artificial Sequence
  Description of Artificial Sequence: Synthetic oligonucleotide
guagccuuccaaguugaau

SEQ ID NO: 2161351 - RNA, 19 nt, Artificial Sequence
  Description of Artificial Sequence: Synthetic oligonucleotide
acgccugcugggucugccu

SEQ ID NO: 2161352 - RNA, 19 nt, Artificial Sequence
  Description of Artificial Sequence: Synthetic oligonucleotide
caguuggaauuaucaugaa

SEQ ID NO: 2161353 - RNA, 19 nt, Artificial Sequence
  Description of Artificial Sequence: Synthetic oligonucleotide
ggaguaaagugagugggau

SEQ ID NO: 2161354 - RNA, 19 nt, Artificial Sequence
  Description of Artificial Sequence: Synthetic oligonucleotide
ugaaagccccaagcacgau

SEQ ID NO: 2161355 - RNA, 19 nt, Artificial Sequence
  Description of Artificial Sequence: Synthetic oligonucleotide
caggaaaguggaauuuauu

SEQ ID NO: 2161356 - RNA, 19 nt, Artificial Sequence
  Description of Artificial Sequence: Synthetic oligonucleotide
cuugugcagugacguguga

SEQ ID NO: 2161357 - RNA, 19 nt, Artificial Sequence
  Description of Artificial Sequence: Synthetic oligonucleotide
ccucugaaagucuccagua

SEQ ID NO: 2161358 - RNA, 19 nt, Artificial Sequence
  Description of Artificial Sequence: Synthetic oligonucleotide
ggguuguuuagguuuuaau

SEQ ID NO: 2161359 - RNA, 19 nt, Artificial Sequence
  Description of Artificial Sequence: Synthetic oligonucleotide
guaaagugagugggauugu

SEQ ID NO: 2161360 - RNA, 19 nt, Artificial Sequence
  Description of Artificial Sequence: Synthetic oligonucleotide
ggccaagcaggugauuguc

SEQ ID NO: 2161361 - RNA, 19 nt, Artificial Sequence
  Description of Artificial Sequence: Synthetic oligonucleotide
ccgaaguaugauggcuucc

SEQ ID NO: 2161362 - RNA, 19 nt, Artificial Sequence
  Description of Artificial Sequence: Synthetic oligonucleotide
cguagagaagaggcagagg

SEQ ID NO: 2161363 - RNA, 19 nt, Artificial Sequence
  Description of Artificial Sequence: Synthetic oligonucleotide
gcacuccguauuuccccag

SEQ ID NO: 2161364 - RNA, 19 nt, Artificial Sequence
  Description of Artificial Sequence: Synthetic oligonucleotide
gagcugaguuguaguagcu

SEQ ID NO: 2161365 - RNA, 19 nt, Artificial Sequence
  Description of Artificial Sequence: Synthetic oligonucleotide
gcuccuugugcagugacgu

SEQ ID NO: 2161366 - RNA, 19 nt, Artificial Sequence
  Description of Artificial Sequence: Synthetic oligonucleotide
ccaccugccaugcaaauau

SEQ ID NO: 2161367 - RNA, 19 nt, Artificial Sequence
  Description of Artificial Sequence: Synthetic oligonucleotide
cugccuuguccagccuaag

SEQ ID NO: 2161368 - RNA, 19 nt, Artificial Sequence
  Description of Artificial Sequence: Synthetic oligonucleotide
cugcgguggucagagcuga

SEQ ID NO: 2161369 - RNA, 19 nt, Artificial Sequence
  Description of Artificial Sequence: Synthetic oligonucleotide
cgaaguaugauggcuucca

SEQ ID NO: 2161370 - RNA, 19 nt, Artificial Sequence
  Description of Artificial Sequence: Synthetic oligonucleotide
gguugccaacguagagaag

SEQ ID NO: 2161371 - RNA, 19 nt, Artificial Sequence
  Description of Artificial Sequence: Synthetic oligonucleotide
ccagucuagcucuucagau

SEQ ID NO: 2161372 - RNA, 19 nt, Artificial Sequence
  Description of Artificial Sequence: Synthetic oligonucleotide
gucuagcucuucagaucca

SEQ ID NO: 2161373 - RNA, 19 nt, Artificial Sequence
  Description of Artificial Sequence: Synthetic oligonucleotide
ggaguaucuuaagccaccu

SEQ ID NO: 2161374 - RNA, 19 nt, Artificial Sequence
  Description of Artificial Sequence: Synthetic oligonucleotide
cauuugcugcugugaagau

SEQ ID NO: 2161375 - RNA, 19 nt, Artificial Sequence
  Description of Artificial Sequence: Synthetic oligonucleotide
gcugugugucuugggugcc

SEQ ID NO: 2161376 - RNA, 19 nt, Artificial Sequence
  Description of Artificial Sequence: Synthetic oligonucleotide
ccagccuaagccugcaacu

SEQ ID NO: 2161377 - RNA, 19 nt, Artificial Sequence
  Description of Artificial Sequence: Synthetic oligonucleotide
gcuggauaagccacuuaua

SEQ ID NO: 2161378 - RNA, 19 nt, Artificial Sequence
  Description of Artificial Sequence: Synthetic oligonucleotide
gcaggugauugucccaggu

SEQ ID NO: 2161379 - RNA, 19 nt, Artificial Sequence
  Description of Artificial Sequence: Synthetic oligonucleotide
cuccaguagugacacuaau

SEQ ID NO: 2161380 - RNA, 19 nt, Artificial Sequence
  Description of Artificial Sequence: Synthetic oligonucleotide
cacggguuguuuagguuuu

SEQ ID NO: 2161381 - RNA, 19 nt, Artificial Sequence
  Description of Artificial Sequence: Synthetic oligonucleotide
gguucugggcugugugucu

SEQ ID NO: 2161382 - RNA, 19 nt, Artificial Sequence
  Description of Artificial Sequence: Synthetic oligonucleotide
ggcugaauucaguggcccu

SEQ ID NO: 2161383 - RNA, 19 nt, Artificial Sequence
  Description of Artificial Sequence: Synthetic oligonucleotide
cagauccagaggcaugcuu

SEQ ID NO: 2161384 - RNA, 19 nt, Artificial Sequence
  Description of Artificial Sequence: Synthetic oligonucleotide
ccacggguuguuuagguuu

SEQ ID NO: 2161385 - RNA, 19 nt, Artificial Sequence
  Description of Artificial Sequence: Synthetic oligonucleotide
ggugaacauuggcaagcuu

SEQ ID NO: 2161386 - RNA, 19 nt, Artificial Sequence
  Description of Artificial Sequence: Synthetic oligonucleotide
gcacgauggccaaaacacu

SEQ ID NO: 2161387 - RNA, 19 nt, Artificial Sequence
  Description of Artificial Sequence: Synthetic oligonucleotide
cugcugugaagaugucguu

SEQ ID NO: 2161388 - RNA, 19 nt, Artificial Sequence
  Description of Artificial Sequence: Synthetic oligonucleotide
ugggugccuuguggcuccu

SEQ ID NO: 2161389 - RNA, 19 nt, Artificial Sequence
  Description of Artificial Sequence: Synthetic oligonucleotide
gugacgugugagguagcuu

SEQ ID NO: 2161390 - RNA, 19 nt, Artificial Sequence
  Description of Artificial Sequence: Synthetic oligonucleotide
cuucauccacggguuguuu

SEQ ID NO: 2161391 - RNA, 19 nt, Artificial Sequence
  Description of Artificial Sequence: Synthetic oligonucleotide
ccacugcgguggucagagc

SEQ ID NO: 2161392 - RNA, 19 nt, Artificial Sequence
  Description of Artificial Sequence: Synthetic oligonucleotide
gcgguggucagagcugagu

SEQ ID NO: 2161393 - RNA, 19 nt, Artificial Sequence
  Description of Artificial Sequence: Synthetic oligonucleotide
cggguuguuuagguuuuaa

SEQ ID NO: 2161394 - RNA, 19 nt, Artificial Sequence
  Description of Artificial Sequence: Synthetic oligonucleotide
cggugaacauuggcaagcu

SEQ ID NO: 2161395 - RNA, 19 nt, Artificial Sequence
  Description of Artificial Sequence: Synthetic oligonucleotide
cgugugagguagcuuucuu

SEQ ID NO: 2161396 - RNA, 19 nt, Artificial Sequence
  Description of Artificial Sequence: Synthetic oligonucleotide
cagcuccuucggguccauu

SEQ ID NO: 2161397 - RNA, 19 nt, Artificial Sequence
  Description of Artificial Sequence: Synthetic oligonucleotide
aacuugucaaaccagaucu

SEQ ID NO: 2161398 - RNA, 19 nt, Artificial Sequence
  Description of Artificial Sequence: Synthetic oligonucleotide
aaaaucuggaacugcgagc

SEQ ID NO: 2161399 - RNA, 19 nt, Artificial Sequence
  Description of Artificial Sequence: Synthetic oligonucleotide
aaagcugcgaugucaacac

SEQ ID NO: 2161400 - RNA, 19 nt, Artificial Sequence
  Description of Artificial Sequence: Synthetic oligonucleotide
gauaccauagccaacaggc

SEQ ID NO: 2161401 - RNA, 19 nt, Artificial Sequence
  Description of Artificial Sequence: Synthetic oligonucleotide
aagacugcaaaggaaaggg

SEQ ID NO: 2161402 - RNA, 19 nt, Artificial Sequence
  Description of Artificial Sequence: Synthetic oligonucleotide
auagccaacaggcacgagc

SEQ ID NO: 2161403 - RNA, 19 nt, Artificial Sequence
  Description of Artificial Sequence: Synthetic oligonucleotide
aaugagcucacuaugaucu

SEQ ID NO: 2161404 - RNA, 19 nt, Artificial Sequence
  Description of Artificial Sequence: Synthetic oligonucleotide
acaugaaccacacucuugg

SEQ ID NO: 2161405 - RNA, 19 nt, Artificial Sequence
  Description of Artificial Sequence: Synthetic oligonucleotide
ugcacuagaaaguuuguag

SEQ ID NO: 2161406 - RNA, 19 nt, Artificial Sequence
  Description of Artificial Sequence: Synthetic oligonucleotide
aauccuuacaaugagcuca

SEQ ID NO: 2161407 - RNA, 19 nt, Artificial Sequence
  Description of Artificial Sequence: Synthetic oligonucleotide
ucaugcacuagaaaguuug

SEQ ID NO: 2161408 - RNA, 19 nt, Artificial Sequence
  Description of Artificial Sequence: Synthetic oligonucleotide
acugcugcagaucauguac

SEQ ID NO: 2161409 - RNA, 19 nt, Artificial Sequence
  Description of Artificial Sequence: Synthetic oligonucleotide
agaauuuccuuucugcguc

SEQ ID NO: 2161410 - RNA, 19 nt, Artificial Sequence
  Description of Artificial Sequence: Synthetic oligonucleotide
ugaacucuucuccagagug

SEQ ID NO: 2161411 - RNA, 19 nt, Artificial Sequence
  Description of Artificial Sequence: Synthetic oligonucleotide
agguuugacauccaagagg

SEQ ID NO: 2161412 - RNA, 19 nt, Artificial Sequence
  Description of Artificial Sequence: Synthetic oligonucleotide
ucuucuagcaagucggugc

SEQ ID NO: 2161413 - RNA, 19 nt, Artificial Sequence
  Description of Artificial Sequence: Synthetic oligonucleotide
guagaauuuccuuucugcg

SEQ ID NO: 2161414 - RNA, 19 nt, Artificial Sequence
  Description of Artificial Sequence: Synthetic oligonucleotide
uuuaaucucagcagguccu

SEQ ID NO: 2161415 - RNA, 19 nt, Artificial Sequence
  Description of Artificial Sequence: Synthetic oligonucleotide
ucuugcaaugucacggagg

SEQ ID NO: 2161416 - RNA, 19 nt, Artificial Sequence
  Description of Artificial Sequence: Synthetic oligonucleotide
auauuugaacuugucaaac

SEQ ID NO: 2161417 - RNA, 19 nt, Artificial Sequence
  Description of Artificial Sequence: Synthetic oligonucleotide
ugcgucaucauauuugaac

SEQ ID NO: 2161418 - RNA, 19 nt, Artificial Sequence
  Description of Artificial Sequence: Synthetic oligonucleotide
uauuugaacuugucaaacc

SEQ ID NO: 2161419 - RNA, 19 nt, Artificial Sequence
  Description of Artificial Sequence: Synthetic oligonucleotide
aagguuugacauccaagag

SEQ ID NO: 2161420 - RNA, 19 nt, Artificial Sequence
  Description of Artificial Sequence: Synthetic oligonucleotide
augaaccacacucuuggac

SEQ ID NO: 2161421 - RNA, 19 nt, Artificial Sequence
  Description of Artificial Sequence: Synthetic oligonucleotide
uucugcgucaucauauuug

SEQ ID NO: 2161422 - RNA, 19 nt, Artificial Sequence
  Description of Artificial Sequence: Synthetic oligonucleotide
auaggagacacauguugcg

SEQ ID NO: 2161423 - RNA, 19 nt, Artificial Sequence
  Description of Artificial Sequence: Synthetic oligonucleotide
cauaggagacacauguugc

SEQ ID NO: 2161424 - RNA, 19 nt, Artificial Sequence
  Description of Artificial Sequence: Synthetic oligonucleotide
cucacuaugaucuccacca

SEQ ID NO: 2161425 - RNA, 19 nt, Artificial Sequence
  Description of Artificial Sequence: Synthetic oligonucleotide
uacaaugagcucacuauga

SEQ ID NO: 2161426 - RNA, 19 nt, Artificial Sequence
  Description of Artificial Sequence: Synthetic oligonucleotide
cuuggaaauggacugcugc

SEQ ID NO: 2161427 - RNA, 19 nt, Artificial Sequence
  Description of Artificial Sequence: Synthetic oligonucleotide
cugcagaucauguaccacg

SEQ ID NO: 2161428 - RNA, 19 nt, Artificial Sequence
  Description of Artificial Sequence: Synthetic oligonucleotide
ucugacgcaagccaaggac

SEQ ID NO: 2161429 - RNA, 19 nt, Artificial Sequence
  Description of Artificial Sequence: Synthetic oligonucleotide
uccacuuccagacuggcaa

SEQ ID NO: 2161430 - RNA, 19 nt, Artificial Sequence
  Description of Artificial Sequence: Synthetic oligonucleotide
auacugacgaagccucucc

SEQ ID NO: 2161431 - RNA, 19 nt, Artificial Sequence
  Description of Artificial Sequence: Synthetic oligonucleotide
caaaaucuggaacugcgag

SEQ ID NO: 2161432 - RNA, 19 nt, Artificial Sequence
  Description of Artificial Sequence: Synthetic oligonucleotide
accagugaggguuucuugg

SEQ ID NO: 2161433 - RNA, 19 nt, Artificial Sequence
  Description of Artificial Sequence: Synthetic oligonucleotide
ucaagacugcaaaggaaag

SEQ ID NO: 2161434 - RNA, 19 nt, Artificial Sequence
  Description of Artificial Sequence: Synthetic oligonucleotide
cacuagaaaguuuguagcc

SEQ ID NO: 2161435 - RNA, 19 nt, Artificial Sequence
  Description of Artificial Sequence: Synthetic oligonucleotide
aaccaaaaucuggaacugc

SEQ ID NO: 2161436 - RNA, 19 nt, Artificial Sequence
  Description of Artificial Sequence: Synthetic oligonucleotide
acgcauaggagacacaugu

SEQ ID NO: 2161437 - RNA, 19 nt, Artificial Sequence
  Description of Artificial Sequence: Synthetic oligonucleotide
uuuucugacgcaagccaag

SEQ ID NO: 2161438 - RNA, 19 nt, Artificial Sequence
  Description of Artificial Sequence: Synthetic oligonucleotide
agggcgaccgcgcagcucc

SEQ ID NO: 2161439 - RNA, 19 nt, Artificial Sequence
  Description of Artificial Sequence: Synthetic oligonucleotide
ucuucucugcauacugacg

SEQ ID NO: 2161440 - RNA, 19 nt, Artificial Sequence
  Description of Artificial Sequence: Synthetic oligonucleotide
ucugcgucaucauauuuga

SEQ ID NO: 2161441 - RNA, 19 nt, Artificial Sequence
  Description of Artificial Sequence: Synthetic oligonucleotide
acauccaagaggauggagg

SEQ ID NO: 2161442 - RNA, 19 nt, Artificial Sequence
  Description of Artificial Sequence: Synthetic oligonucleotide
uccacuugacgcauaggag

SEQ ID NO: 2161443 - RNA, 19 nt, Artificial Sequence
  Description of Artificial Sequence: Synthetic oligonucleotide
agcccguccaguuggaugg

SEQ ID NO: 2161444 - RNA, 19 nt, Artificial Sequence
  Description of Artificial Sequence: Synthetic oligonucleotide
caagguuugacauccaaga

SEQ ID NO: 2161445 - RNA, 19 nt, Artificial Sequence
  Description of Artificial Sequence: Synthetic oligonucleotide
uaccauagccaacaggcac

SEQ ID NO: 2161446 - RNA, 19 nt, Artificial Sequence
  Description of Artificial Sequence: Synthetic oligonucleotide
gaucauguaccacgccucg

SEQ ID NO: 2161447 - RNA, 19 nt, Artificial Sequence
  Description of Artificial Sequence: Synthetic oligonucleotide
cugacgcaagccaaggacg

SEQ ID NO: 2161448 - RNA, 19 nt, Artificial Sequence
  Description of Artificial Sequence: Synthetic oligonucleotide
gaucuccucuucuagcaag

SEQ ID NO: 2161449 - RNA, 19 nt, Artificial Sequence
  Description of Artificial Sequence: Synthetic oligonucleotide
accaaaaucuggaacugcg

SEQ ID NO: 2161450 - RNA, 19 nt, Artificial Sequence
  Description of Artificial Sequence: Synthetic oligonucleotide
aacuuccggauaccauagc

SEQ ID NO: 2161451 - RNA, 19 nt, Artificial Sequence
  Description of Artificial Sequence: Synthetic oligonucleotide
ugcagaucauguaccacgc

SEQ ID NO: 2161452 - RNA, 19 nt, Artificial Sequence
  Description of Artificial Sequence: Synthetic oligonucleotide
ugcauacugacgaagccuc

SEQ ID NO: 2161453 - RNA, 19 nt, Artificial Sequence
  Description of Artificial Sequence: Synthetic oligonucleotide
uucagaucuuguugaaagc

SEQ ID NO: 2161454 - RNA, 19 nt, Artificial Sequence
  Description of Artificial Sequence: Synthetic oligonucleotide
cacuggaucugcaacuucc

SEQ ID NO: 2161455 - RNA, 19 nt, Artificial Sequence
  Description of Artificial Sequence: Synthetic oligonucleotide
uggaacguacacaagucuc

SEQ ID NO: 2161456 - RNA, 19 nt, Artificial Sequence
  Description of Artificial Sequence: Synthetic oligonucleotide
gauuuggccaccagugagg

SEQ ID NO: 2161457 - RNA, 19 nt, Artificial Sequence
  Description of Artificial Sequence: Synthetic oligonucleotide
gagcucaagacugcaaagg

SEQ ID NO: 2161458 - RNA, 19 nt, Artificial Sequence
  Description of Artificial Sequence: Synthetic oligonucleotide
uuguugaaagcugcgaugu

SEQ ID NO: 2161459 - RNA, 19 nt, Artificial Sequence
  Description of Artificial Sequence: Synthetic oligonucleotide
cacgcuggcaccauucucc

SEQ ID NO: 2161460 - RNA, 19 nt, Artificial Sequence
  Description of Artificial Sequence: Synthetic oligonucleotide
uggaacugcgagcucaaga

SEQ ID NO: 2161461 - RNA, 19 nt, Artificial Sequence
  Description of Artificial Sequence: Synthetic oligonucleotide
aggagacacauguugcguc

SEQ ID NO: 2161462 - RNA, 19 nt, Artificial Sequence
  Description of Artificial Sequence: Synthetic oligonucleotide
aacugcgagcucaagacug

SEQ ID NO: 2161463 - RNA, 19 nt, Artificial Sequence
  Description of Artificial Sequence: Synthetic oligonucleotide
uggcaauccuuacaaugag

SEQ ID NO: 2161464 - RNA, 19 nt, Artificial Sequence
  Description of Artificial Sequence: Synthetic oligonucleotide
aggcccauucaucugcucg

SEQ ID NO: 2161465 - RNA, 19 nt, Artificial Sequence
  Description of Artificial Sequence: Synthetic oligonucleotide
gaacuugucaaaccagauc

SEQ ID NO: 2161466 - RNA, 19 nt, Artificial Sequence
  Description of Artificial Sequence: Synthetic oligonucleotide
cauguugcgucugaggggc

SEQ ID NO: 2161467 - RNA, 19 nt, Artificial Sequence
  Description of Artificial Sequence: Synthetic oligonucleotide
cucugcauacugacgaagc

SEQ ID NO: 2161468 - RNA, 19 nt, Artificial Sequence
  Description of Artificial Sequence: Synthetic oligonucleotide
ugacgcaagccaaggacgc

SEQ ID NO: 2161469 - RNA, 19 nt, Artificial Sequence
  Description of Artificial Sequence: Synthetic oligonucleotide
aacguacacaagucuccag

SEQ ID NO: 2161470 - RNA, 19 nt, Artificial Sequence
  Description of Artificial Sequence: Synthetic oligonucleotide
uguaccacgccucgaagau

SEQ ID NO: 2161471 - RNA, 19 nt, Artificial Sequence
  Description of Artificial Sequence: Synthetic oligonucleotide
ugaacuugucaaaccagau

SEQ ID NO: 2161472 - RNA, 19 nt, Artificial Sequence
  Description of Artificial Sequence: Synthetic oligonucleotide
uuucugacgcaagccaagg

SEQ ID NO: 2161473 - RNA, 19 nt, Artificial Sequence
  Description of Artificial Sequence: Synthetic oligonucleotide
uggugaucuccucuucuag

SEQ ID NO: 2161474 - RNA, 19 nt, Artificial Sequence
  Description of Artificial Sequence: Synthetic oligonucleotide
gacgaagccucuccucucg

SEQ ID NO: 2161475 - RNA, 19 nt, Artificial Sequence
  Description of Artificial Sequence: Synthetic oligonucleotide
cacgccucgaagauucugg

SEQ ID NO: 2161476 - RNA, 19 nt, Artificial Sequence
  Description of Artificial Sequence: Synthetic oligonucleotide
cuucuagcaagucggugcc

SEQ ID NO: 2161477 - RNA, 19 nt, Artificial Sequence
  Description of Artificial Sequence: Synthetic oligonucleotide
ucauguaccacgccucgaa

SEQ ID NO: 2161478 - RNA, 19 nt, Artificial Sequence
  Description of Artificial Sequence: Synthetic oligonucleotide
uaccacgccucgaagauuc

SEQ ID NO: 2161479 - RNA, 19 nt, Artificial Sequence
  Description of Artificial Sequence: Synthetic oligonucleotide
ucguagaauuuccuuucug

SEQ ID NO: 2161480 - RNA, 19 nt, Artificial Sequence
  Description of Artificial Sequence: Synthetic oligonucleotide
gaaagcugcgaugucaaca

SEQ ID NO: 2161481 - RNA, 19 nt, Artificial Sequence
  Description of Artificial Sequence: Synthetic oligonucleotide
ggaacugcgagcucaagac

SEQ ID NO: 2161482 - RNA, 19 nt, Artificial Sequence
  Description of Artificial Sequence: Synthetic oligonucleotide
agacuggcaauccuuacaa

SEQ ID NO: 2161483 - RNA, 19 nt, Artificial Sequence
  Description of Artificial Sequence: Synthetic oligonucleotide
acuagaaaguuuguagcca

SEQ ID NO: 2161484 - RNA, 19 nt, Artificial Sequence
  Description of Artificial Sequence: Synthetic oligonucleotide
uguucucucuggcucuugc

SEQ ID NO: 2161485 - RNA, 19 nt, Artificial Sequence
  Description of Artificial Sequence: Synthetic oligonucleotide
aaagggagggcgaccgcgc

SEQ ID NO: 2161486 - RNA, 19 nt, Artificial Sequence
  Description of Artificial Sequence: Synthetic oligonucleotide
gacgcagcaaccaaaaucu

SEQ ID NO: 2161487 - RNA, 19 nt, Artificial Sequence
  Description of Artificial Sequence: Synthetic oligonucleotide
acuuccagacuggcaaucc

SEQ ID NO: 2161488 - RNA, 19 nt, Artificial Sequence
  Description of Artificial Sequence: Synthetic oligonucleotide
ugaccuccaacuuggaaau

SEQ ID NO: 2161489 - RNA, 19 nt, Artificial Sequence
  Description of Artificial Sequence: Synthetic oligonucleotide
cacuaugaucuccaccagg

SEQ ID NO: 2161490 - RNA, 19 nt, Artificial Sequence
  Description of Artificial Sequence: Synthetic oligonucleotide
auggaacguacacaagucu

SEQ ID NO: 2161491 - RNA, 19 nt, Artificial Sequence
  Description of Artificial Sequence: Synthetic oligonucleotide
uggacuuucagaucuuguu

SEQ ID NO: 2161492 - RNA, 19 nt, Artificial Sequence
  Description of Artificial Sequence: Synthetic oligonucleotide
acacucuuggacuuucaga

SEQ ID NO: 2161493 - RNA, 19 nt, Artificial Sequence
  Description of Artificial Sequence: Synthetic oligonucleotide
gcacuagaaaguuuguagc

SEQ ID NO: 2161494 - RNA, 19 nt, Artificial Sequence
  Description of Artificial Sequence: Synthetic oligonucleotide
aacuuggaaauggacugcu

SEQ ID NO: 2161495 - RNA, 19 nt, Artificial Sequence
  Description of Artificial Sequence: Synthetic oligonucleotide
ccaacuuggaaauggacug

SEQ ID NO: 2161496 - RNA, 19 nt, Artificial Sequence
  Description of Artificial Sequence: Synthetic oligonucleotide
caacuuccggauaccauag

SEQ ID NO: 2161497 - RNA, 19 nt, Artificial Sequence
  Description of Artificial Sequence: Synthetic oligonucleotide
gauggaacguacacaaguc

SEQ ID NO: 2161498 - RNA, 19 nt, Artificial Sequence
  Description of Artificial Sequence: Synthetic oligonucleotide
ggcucuugcaaugucacgg

SEQ ID NO: 2161499 - RNA, 19 nt, Artificial Sequence
  Description of Artificial Sequence: Synthetic oligonucleotide
cauauuugaacuugucaaa

SEQ ID NO: 2161500 - RNA, 19 nt, Artificial Sequence
  Description of Artificial Sequence: Synthetic oligonucleotide
cuggcaauccuuacaauga

SEQ ID NO: 2161501 - RNA, 19 nt, Artificial Sequence
  Description of Artificial Sequence: Synthetic oligonucleotide
ucuucucaugcacuagaaa

SEQ ID NO: 2161502 - RNA, 19 nt, Artificial Sequence
  Description of Artificial Sequence: Synthetic oligonucleotide
ugcucguagaauuuccuuu

SEQ ID NO: 2161503 - RNA, 19 nt, Artificial Sequence
  Description of Artificial Sequence: Synthetic oligonucleotide
cacuugacgcauaggagac

SEQ ID NO: 2161504 - RNA, 19 nt, Artificial Sequence
  Description of Artificial Sequence: Synthetic oligonucleotide
gguuugacauccaagagga

SEQ ID NO: 2161505 - RNA, 19 nt, Artificial Sequence
  Description of Artificial Sequence: Synthetic oligonucleotide
cugcacaugcuccucaaac

SEQ ID NO: 2161506 - RNA, 19 nt, Artificial Sequence
  Description of Artificial Sequence: Synthetic oligonucleotide
caagucggugccuacuuug

SEQ ID NO: 2161507 - RNA, 19 nt, Artificial Sequence
  Description of Artificial Sequence: Synthetic oligonucleotide
guccucacacacaugaacc

SEQ ID NO: 2161508 - RNA, 19 nt, Artificial Sequence
  Description of Artificial Sequence: Synthetic oligonucleotide
cuugacgcauaggagacac

SEQ ID NO: 2161509 - RNA, 19 nt, Artificial Sequence
  Description of Artificial Sequence: Synthetic oligonucleotide
ggcaccauucuccuggcgg

SEQ ID NO: 2161510 - RNA, 19 nt, Artificial Sequence
  Description of Artificial Sequence: Synthetic oligonucleotide
aucugcucguagaauuucc

SEQ ID NO: 2161511 - RNA, 19 nt, Artificial Sequence
  Description of Artificial Sequence: Synthetic oligonucleotide
ugagcucacuaugaucucc

SEQ ID NO: 2161512 - RNA, 19 nt, Artificial Sequence
  Description of Artificial Sequence: Synthetic oligonucleotide
ugugaguaggugaacucuu

SEQ ID NO: 2161513 - RNA, 19 nt, Artificial Sequence
  Description of Artificial Sequence: Synthetic oligonucleotide
gguguggccgccuucuugg

SEQ ID NO: 2161514 - RNA, 19 nt, Artificial Sequence
  Description of Artificial Sequence: Synthetic oligonucleotide
acucuuggacuuucagauc

SEQ ID NO: 2161515 - RNA, 19 nt, Artificial Sequence
  Description of Artificial Sequence: Synthetic oligonucleotide
gucacggaggaucacgcug

SEQ ID NO: 2161516 - RNA, 19 nt, Artificial Sequence
  Description of Artificial Sequence: Synthetic oligonucleotide
ugacgcauaggagacacau

SEQ ID NO: 2161517 - RNA, 19 nt, Artificial Sequence
  Description of Artificial Sequence: Synthetic oligonucleotide
caaugagcucacuaugauc

SEQ ID NO: 2161518 - RNA, 19 nt, Artificial Sequence
  Description of Artificial Sequence: Synthetic oligonucleotide
gaguaggugaacucuucuc

SEQ ID NO: 2161519 - RNA, 19 nt, Artificial Sequence
  Description of Artificial Sequence: Synthetic oligonucleotide
cuuacaaugagcucacuau

SEQ ID NO: 2161520 - RNA, 19 nt, Artificial Sequence
  Description of Artificial Sequence: Synthetic oligonucleotide
cacacacuggaucugcaac

SEQ ID NO: 2161521 - RNA, 19 nt, Artificial Sequence
  Description of Artificial Sequence: Synthetic oligonucleotide
ugccgaacaggucaauguc

SEQ ID NO: 2161522 - RNA, 19 nt, Artificial Sequence
  Description of Artificial Sequence: Synthetic oligonucleotide
augucacggaggaucacgc

SEQ ID NO: 2161523 - RNA, 19 nt, Artificial Sequence
  Description of Artificial Sequence: Synthetic oligonucleotide
agcucccggaaaucgcagc

SEQ ID NO: 2161524 - RNA, 19 nt, Artificial Sequence
  Description of Artificial Sequence: Synthetic oligonucleotide
ucgaagauucugguucucc

SEQ ID NO: 2161525 - RNA, 19 nt, Artificial Sequence
  Description of Artificial Sequence: Synthetic oligonucleotide
ucaacacucugcacaugcu

SEQ ID NO: 2161526 - RNA, 19 nt, Artificial Sequence
  Description of Artificial Sequence: Synthetic oligonucleotide
cauccaagaggauggagga

SEQ ID NO: 2161527 - RNA, 19 nt, Artificial Sequence
  Description of Artificial Sequence: Synthetic oligonucleotide
ggauaccauagccaacagg

SEQ ID NO: 2161528 - RNA, 19 nt, Artificial Sequence
  Description of Artificial Sequence: Synthetic oligonucleotide
cacaugaaccacacucuug

SEQ ID NO: 2161529 - RNA, 19 nt, Artificial Sequence
  Description of Artificial Sequence: Synthetic oligonucleotide
uggauggaacguacacaag

SEQ ID NO: 2161530 - RNA, 19 nt, Artificial Sequence
  Description of Artificial Sequence: Synthetic oligonucleotide
ugcugcagaucauguacca

SEQ ID NO: 2161531 - RNA, 19 nt, Artificial Sequence
  Description of Artificial Sequence: Synthetic oligonucleotide
augucaacacucugcacau

SEQ ID NO: 2161532 - RNA, 19 nt, Artificial Sequence
  Description of Artificial Sequence: Synthetic oligonucleotide
agcugcgaugucaacacuc

SEQ ID NO: 2161533 - RNA, 19 nt, Artificial Sequence
  Description of Artificial Sequence: Synthetic oligonucleotide
ggacgcagcaaccaaaauc

SEQ ID NO: 2161534 - RNA, 19 nt, Artificial Sequence
  Description of Artificial Sequence: Synthetic oligonucleotide
cagguccucacacacauga

SEQ ID NO: 2161535 - RNA, 19 nt, Artificial Sequence
  Description of Artificial Sequence: Synthetic oligonucleotide
uucugacgcaagccaagga

SEQ ID NO: 2161536 - RNA, 19 nt, Artificial Sequence
  Description of Artificial Sequence: Synthetic oligonucleotide
agaaaguuuguagccauuu

SEQ ID NO: 2161537 - RNA, 19 nt, Artificial Sequence
  Description of Artificial Sequence: Synthetic oligonucleotide
guacacaagucuccagcug

SEQ ID NO: 2161538 - RNA, 19 nt, Artificial Sequence
  Description of Artificial Sequence: Synthetic oligonucleotide
agccugaccuccaacuugg

SEQ ID NO: 2161539 - RNA, 19 nt, Artificial Sequence
  Description of Artificial Sequence: Synthetic oligonucleotide
gucaaaccagaucuucuca

SEQ ID NO: 2161540 - RNA, 19 nt, Artificial Sequence
  Description of Artificial Sequence: Synthetic oligonucleotide
augagcucacuaugaucuc

SEQ ID NO: 2161541 - RNA, 19 nt, Artificial Sequence
  Description of Artificial Sequence: Synthetic oligonucleotide
acugcgagcucaagacugc

SEQ ID NO: 2161542 - RNA, 19 nt, Artificial Sequence
  Description of Artificial Sequence: Synthetic oligonucleotide
ugcaacuuccggauaccau

SEQ ID NO: 2161543 - RNA, 19 nt, Artificial Sequence
  Description of Artificial Sequence: Synthetic oligonucleotide
ggugaucuccucuucuagc

SEQ ID NO: 2161544 - RNA, 19 nt, Artificial Sequence
  Description of Artificial Sequence: Synthetic oligonucleotide
agucggugccuacuuuguc

SEQ ID NO: 2161545 - RNA, 19 nt, Artificial Sequence
  Description of Artificial Sequence: Synthetic oligonucleotide
cuacuuugucaucuuccac

SEQ ID NO: 2161546 - RNA, 19 nt, Artificial Sequence
  Description of Artificial Sequence: Synthetic oligonucleotide
uggcucuugcaaugucacg

SEQ ID NO: 2161547 - RNA, 19 nt, Artificial Sequence
  Description of Artificial Sequence: Synthetic oligonucleotide
gauucugguucuccacuuc

SEQ ID NO: 2161548 - RNA, 19 nt, Artificial Sequence
  Description of Artificial Sequence: Synthetic oligonucleotide
uuucugcgucaucauauuu

SEQ ID NO: 2161549 - RNA, 19 nt, Artificial Sequence
  Description of Artificial Sequence: Synthetic oligonucleotide
aucuggaacugcgagcuca

SEQ ID NO: 2161550 - RNA, 19 nt, Artificial Sequence
  Description of Artificial Sequence: Synthetic oligonucleotide
caauccuuacaaugagcuc

SEQ ID NO: 2161551 - RNA, 19 nt, Artificial Sequence
  Description of Artificial Sequence: Synthetic oligonucleotide
cacucuuggacuuucagau

SEQ ID NO: 2161552 - RNA, 19 nt, Artificial Sequence
  Description of Artificial Sequence: Synthetic oligonucleotide
gucggugccuacuuuguca

SEQ ID NO: 2161553 - RNA, 19 nt, Artificial Sequence
  Description of Artificial Sequence: Synthetic oligonucleotide
caaccaaaaucuggaacug

SEQ ID NO: 2161554 - RNA, 19 nt, Artificial Sequence
  Description of Artificial Sequence: Synthetic oligonucleotide
uuccagacuggcaauccuu

SEQ ID NO: 2161555 - RNA, 19 nt, Artificial Sequence
  Description of Artificial Sequence: Synthetic oligonucleotide
agucacaggcccauucauc

SEQ ID NO: 2161556 - RNA, 19 nt, Artificial Sequence
  Description of Artificial Sequence: Synthetic oligonucleotide
gacacauguugcgucugag

SEQ ID NO: 2161557 - RNA, 19 nt, Artificial Sequence
  Description of Artificial Sequence: Synthetic oligonucleotide
ggaacguacacaagucucc

SEQ ID NO: 2161558 - RNA, 19 nt, Artificial Sequence
  Description of Artificial Sequence: Synthetic oligonucleotide
uuggugaucuccucuucua

SEQ ID NO: 2161559 - RNA, 19 nt, Artificial Sequence
  Description of Artificial Sequence: Synthetic oligonucleotide
uggcuuucuucucugcaua

SEQ ID NO: 2161560 - RNA, 19 nt, Artificial Sequence
  Description of Artificial Sequence: Synthetic oligonucleotide
agugaggguuucuuggcuu

SEQ ID NO: 2161561 - RNA, 19 nt, Artificial Sequence
  Description of Artificial Sequence: Synthetic oligonucleotide
agaucuucucaugcacuag

SEQ ID NO: 2161562 - RNA, 19 nt, Artificial Sequence
  Description of Artificial Sequence: Synthetic oligonucleotide
gguccucacacacaugaac

SEQ ID NO: 2161563 - RNA, 19 nt, Artificial Sequence
  Description of Artificial Sequence: Synthetic oligonucleotide
caacuuggaaauggacugc

SEQ ID NO: 2161564 - RNA, 19 nt, Artificial Sequence
  Description of Artificial Sequence: Synthetic oligonucleotide
ccaagguuugacauccaag

SEQ ID NO: 2161565 - RNA, 19 nt, Artificial Sequence
  Description of Artificial Sequence: Synthetic oligonucleotide
ucuggaacugcgagcucaa

SEQ ID NO: 2161566 - RNA, 19 nt, Artificial Sequence
  Description of Artificial Sequence: Synthetic oligonucleotide
aaggacgcagcaaccaaaa

SEQ ID NO: 2161567 - RNA, 19 nt, Artificial Sequence
  Description of Artificial Sequence: Synthetic oligonucleotide
cagagucugucuuuaaucu

SEQ ID NO: 2161568 - RNA, 19 nt, Artificial Sequence
  Description of Artificial Sequence: Synthetic oligonucleotide
ucggugccuacuuugucau

SEQ ID NO: 2161569 - RNA, 19 nt, Artificial Sequence
  Description of Artificial Sequence: Synthetic oligonucleotide
cucuugcaaugucacggag

SEQ ID NO: 2161570 - RNA, 19 nt, Artificial Sequence
  Description of Artificial Sequence: Synthetic oligonucleotide
uuaaucucagcagguccuc

SEQ ID NO: 2161571 - RNA, 19 nt, Artificial Sequence
  Description of Artificial Sequence: Synthetic oligonucleotide
ucuagcaagucggugccua

SEQ ID NO: 2161572 - RNA, 19 nt, Artificial Sequence
  Description of Artificial Sequence: Synthetic oligonucleotide
gaacguacacaagucucca

SEQ ID NO: 2161573 - RNA, 19 nt, Artificial Sequence
  Description of Artificial Sequence: Synthetic oligonucleotide
ggauggaacguacacaagu

SEQ ID NO: 2161574 - RNA, 19 nt, Artificial Sequence
  Description of Artificial Sequence: Synthetic oligonucleotide
uccaguuggauggaacgua

SEQ ID NO: 2161575 - RNA, 19 nt, Artificial Sequence
  Description of Artificial Sequence: Synthetic oligonucleotide
gcaccauucuccuggcggg

SEQ ID NO: 2161576 - RNA, 19 nt, Artificial Sequence
  Description of Artificial Sequence: Synthetic oligonucleotide
ugaaagcugcgaugucaac

SEQ ID NO: 2161577 - RNA, 19 nt, Artificial Sequence
  Description of Artificial Sequence: Synthetic oligonucleotide
agacacauguugcgucuga

SEQ ID NO: 2161578 - RNA, 19 nt, Artificial Sequence
  Description of Artificial Sequence: Synthetic oligonucleotide
uccggauaccauagccaac

SEQ ID NO: 2161579 - RNA, 19 nt, Artificial Sequence
  Description of Artificial Sequence: Synthetic oligonucleotide
acgcaagccaaggacgcag

SEQ ID NO: 2161580 - RNA, 19 nt, Artificial Sequence
  Description of Artificial Sequence: Synthetic oligonucleotide
aucacgcuggcaccauucu

SEQ ID NO: 2161581 - RNA, 19 nt, Artificial Sequence
  Description of Artificial Sequence: Synthetic oligonucleotide
ugccuacuuugucaucuuc

SEQ ID NO: 2161582 - RNA, 19 nt, Artificial Sequence
  Description of Artificial Sequence: Synthetic oligonucleotide
acugccgaacaggucaaug

SEQ ID NO: 2161583 - RNA, 19 nt, Artificial Sequence
  Description of Artificial Sequence: Synthetic oligonucleotide
aagucggugccuacuuugu

SEQ ID NO: 2161584 - RNA, 19 nt, Artificial Sequence
  Description of Artificial Sequence: Synthetic oligonucleotide
cagaguguucagccugacc

SEQ ID NO: 2161585 - RNA, 19 nt, Artificial Sequence
  Description of Artificial Sequence: Synthetic oligonucleotide
cagccugaccuccaacuug

SEQ ID NO: 2161586 - RNA, 19 nt, Artificial Sequence
  Description of Artificial Sequence: Synthetic oligonucleotide
cauacugacgaagccucuc

SEQ ID NO: 2161587 - RNA, 19 nt, Artificial Sequence
  Description of Artificial Sequence: Synthetic oligonucleotide
aagcugcgaugucaacacu

SEQ ID NO: 2161588 - RNA, 19 nt, Artificial Sequence
  Description of Artificial Sequence: Synthetic oligonucleotide
agccaaggacgcagcaacc

SEQ ID NO: 2161589 - RNA, 19 nt, Artificial Sequence
  Description of Artificial Sequence: Synthetic oligonucleotide
ugucacggaggaucacgcu

SEQ ID NO: 2161590 - RNA, 19 nt, Artificial Sequence
  Description of Artificial Sequence: Synthetic oligonucleotide
ccaacaggcacgagcuugg

SEQ ID NO: 2161591 - RNA, 19 nt, Artificial Sequence
  Description of Artificial Sequence: Synthetic oligonucleotide
ugcgagcucaagacugcaa

SEQ ID NO: 2161592 - RNA, 19 nt, Artificial Sequence
  Description of Artificial Sequence: Synthetic oligonucleotide
gcucacuaugaucuccacc

SEQ ID NO: 2161593 - RNA, 19 nt, Artificial Sequence
  Description of Artificial Sequence: Synthetic oligonucleotide
cuguggcucugugaguagg

SEQ ID NO: 2161594 - RNA, 19 nt, Artificial Sequence
  Description of Artificial Sequence: Synthetic oligonucleotide
cagaucauguaccacgccu

SEQ ID NO: 2161595 - RNA, 19 nt, Artificial Sequence
  Description of Artificial Sequence: Synthetic oligonucleotide
agcaagucggugccuacuu

SEQ ID NO: 2161596 - RNA, 19 nt, Artificial Sequence
  Description of Artificial Sequence: Synthetic oligonucleotide
uguugcgucugaggggcug

SEQ ID NO: 2161597 - RNA, 19 nt, Artificial Sequence
  Description of Artificial Sequence: Synthetic oligonucleotide
cuagcaagucggugccuac

SEQ ID NO: 2161598 - RNA, 19 nt, Artificial Sequence
  Description of Artificial Sequence: Synthetic oligonucleotide
gacgcauaggagacacaug

SEQ ID NO: 2161599 - RNA, 19 nt, Artificial Sequence
  Description of Artificial Sequence: Synthetic oligonucleotide
ugggccauaucugucucau

SEQ ID NO: 2161600 - RNA, 19 nt, Artificial Sequence
  Description of Artificial Sequence: Synthetic oligonucleotide
cuagaaaguuuguagccau

SEQ ID NO: 2161601 - RNA, 19 nt, Artificial Sequence
  Description of Artificial Sequence: Synthetic oligonucleotide
uggcaccauucuccuggcg

SEQ ID NO: 2161602 - RNA, 19 nt, Artificial Sequence
  Description of Artificial Sequence: Synthetic oligonucleotide
cguccaguuggauggaacg

SEQ ID NO: 2161603 - RNA, 19 nt, Artificial Sequence
  Description of Artificial Sequence: Synthetic oligonucleotide
gcaacuuccggauaccaua

SEQ ID NO: 2161604 - RNA, 19 nt, Artificial Sequence
  Description of Artificial Sequence: Synthetic oligonucleotide
ccacuugacgcauaggaga

SEQ ID NO: 2161605 - RNA, 19 nt, Artificial Sequence
  Description of Artificial Sequence: Synthetic oligonucleotide
uugacgcauaggagacaca

SEQ ID NO: 2161606 - RNA, 19 nt, Artificial Sequence
  Description of Artificial Sequence: Synthetic oligonucleotide
ugacgaagccucuccucuc

SEQ ID NO: 2161607 - RNA, 19 nt, Artificial Sequence
  Description of Artificial Sequence: Synthetic oligonucleotide
cagcccguccaguuggaug

SEQ ID NO: 2161608 - RNA, 19 nt, Artificial Sequence
  Description of Artificial Sequence: Synthetic oligonucleotide
gagcucacuaugaucucca

SEQ ID NO: 2161609 - RNA, 19 nt, Artificial Sequence
  Description of Artificial Sequence: Synthetic oligonucleotide
gcgucaucauauuugaacu

SEQ ID NO: 2161610 - RNA, 19 nt, Artificial Sequence
  Description of Artificial Sequence: Synthetic oligonucleotide
gaaaguuuguagccauuuu

SEQ ID NO: 2161611 - RNA, 19 nt, Artificial Sequence
  Description of Artificial Sequence: Synthetic oligonucleotide
auaccauagccaacaggca

SEQ ID NO: 2161612 - RNA, 19 nt, Artificial Sequence
  Description of Artificial Sequence: Synthetic oligonucleotide
ggaggaucacgcuggcacc

SEQ ID NO: 2161613 - RNA, 19 nt, Artificial Sequence
  Description of Artificial Sequence: Synthetic oligonucleotide
gagacacauguugcgucug

SEQ ID NO: 2161614 - RNA, 19 nt, Artificial Sequence
  Description of Artificial Sequence: Synthetic oligonucleotide
ugcgucugaggggcugugg

SEQ ID NO: 2161615 - RNA, 19 nt, Artificial Sequence
  Description of Artificial Sequence: Synthetic oligonucleotide
ucucuggcucuugcaaugu

SEQ ID NO: 2161616 - RNA, 19 nt, Artificial Sequence
  Description of Artificial Sequence: Synthetic oligonucleotide
acgccucgaagauucuggu

SEQ ID NO: 2161617 - RNA, 19 nt, Artificial Sequence
  Description of Artificial Sequence: Synthetic oligonucleotide
gcaauccuuacaaugagcu

SEQ ID NO: 2161618 - RNA, 19 nt, Artificial Sequence
  Description of Artificial Sequence: Synthetic oligonucleotide
caccacacacuggaucugc

SEQ ID NO: 2161619 - RNA, 19 nt, Artificial Sequence
  Description of Artificial Sequence: Synthetic oligonucleotide
ggcaauccuuacaaugagc

SEQ ID NO: 2161620 - RNA, 19 nt, Artificial Sequence
  Description of Artificial Sequence: Synthetic oligonucleotide
caaggacgcagcaaccaaa

SEQ ID NO: 2161621 - RNA, 19 nt, Artificial Sequence
  Description of Artificial Sequence: Synthetic oligonucleotide
caucugcucguagaauuuc

SEQ ID NO: 2161622 - RNA, 19 nt, Artificial Sequence
  Description of Artificial Sequence: Synthetic oligonucleotide
uagcaagucggugccuacu

SEQ ID NO: 2161623 - RNA, 19 nt, Artificial Sequence
  Description of Artificial Sequence: Synthetic oligonucleotide
ccaguuggauggaacguac

SEQ ID NO: 2161624 - RNA, 19 nt, Artificial Sequence
  Description of Artificial Sequence: Synthetic oligonucleotide
agacugcaaaggaaaggga

SEQ ID NO: 2161625 - RNA, 19 nt, Artificial Sequence
  Description of Artificial Sequence: Synthetic oligonucleotide
cauccucugccgguguggc

SEQ ID NO: 2161626 - RNA, 19 nt, Artificial Sequence
  Description of Artificial Sequence: Synthetic oligonucleotide
gaggaucacgcuggcacca

SEQ ID NO: 2161627 - RNA, 19 nt, Artificial Sequence
  Description of Artificial Sequence: Synthetic oligonucleotide
gaacugcgagcucaagacu

SEQ ID NO: 2161628 - RNA, 19 nt, Artificial Sequence
  Description of Artificial Sequence: Synthetic oligonucleotide
ugucaacacucugcacaug

SEQ ID NO: 2161629 - RNA, 19 nt, Artificial Sequence
  Description of Artificial Sequence: Synthetic oligonucleotide
gacugcugcagaucaugua

SEQ ID NO: 2161630 - RNA, 19 nt, Artificial Sequence
  Description of Artificial Sequence: Synthetic oligonucleotide
augcacuagaaaguuugua

SEQ ID NO: 2161631 - RNA, 19 nt, Artificial Sequence
  Description of Artificial Sequence: Synthetic oligonucleotide
cuggcgggagccagcaguc

SEQ ID NO: 2161632 - RNA, 19 nt, Artificial Sequence
  Description of Artificial Sequence: Synthetic oligonucleotide
uagucgggcugccuccuua

SEQ ID NO: 2161633 - RNA, 19 nt, Artificial Sequence
  Description of Artificial Sequence: Synthetic oligonucleotide
cacaagucuccagcugggc

SEQ ID NO: 2161634 - RNA, 19 nt, Artificial Sequence
  Description of Artificial Sequence: Synthetic oligonucleotide
gccaacaggcacgagcuug

SEQ ID NO: 2161635 - RNA, 19 nt, Artificial Sequence
  Description of Artificial Sequence: Synthetic oligonucleotide
cggaggaucacgcuggcac

SEQ ID NO: 2161636 - RNA, 19 nt, Artificial Sequence
  Description of Artificial Sequence: Synthetic oligonucleotide
caugaaccacacucuugga

SEQ ID NO: 2161637 - RNA, 19 nt, Artificial Sequence
  Description of Artificial Sequence: Synthetic oligonucleotide
cugcgaugucaacacucug

SEQ ID NO: 2161638 - RNA, 19 nt, Artificial Sequence
  Description of Artificial Sequence: Synthetic oligonucleotide
cagcucccggaaaucgcag

SEQ ID NO: 2161639 - RNA, 19 nt, Artificial Sequence
  Description of Artificial Sequence: Synthetic oligonucleotide
ccucuccucucguagucgg

SEQ ID NO: 2161640 - RNA, 19 nt, Artificial Sequence
  Description of Artificial Sequence: Synthetic oligonucleotide
cugccgaacaggucaaugu

SEQ ID NO: 2161641 - RNA, 19 nt, Artificial Sequence
  Description of Artificial Sequence: Synthetic oligonucleotide
uguggccgccuucuugguu

SEQ ID NO: 2161642 - RNA, 19 nt, Artificial Sequence
  Description of Artificial Sequence: Synthetic oligonucleotide
ggaucugcaacuuccggau

SEQ ID NO: 2161643 - RNA, 19 nt, Artificial Sequence
  Description of Artificial Sequence: Synthetic oligonucleotide
agucgggcugccuccuuau

SEQ ID NO: 2161644 - RNA, 19 nt, Artificial Sequence
  Description of Artificial Sequence: Synthetic oligonucleotide
caguuggauggaacguaca

SEQ ID NO: 2161645 - RNA, 19 nt, Artificial Sequence
  Description of Artificial Sequence: Synthetic oligonucleotide
aucauguaccacgccucga

SEQ ID NO: 2161646 - RNA, 19 nt, Artificial Sequence
  Description of Artificial Sequence: Synthetic oligonucleotide
caagaggauggaggauuug

SEQ ID NO: 2161647 - RNA, 19 nt, Artificial Sequence
  Description of Artificial Sequence: Synthetic oligonucleotide
aggacgcagcaaccaaaau

SEQ ID NO: 2161648 - RNA, 19 nt, Artificial Sequence
  Description of Artificial Sequence: Synthetic oligonucleotide
ucccaagguuugacaucca

SEQ ID NO: 2161649 - RNA, 19 nt, Artificial Sequence
  Description of Artificial Sequence: Synthetic oligonucleotide
acuugacgcauaggagaca

SEQ ID NO: 2161650 - RNA, 19 nt, Artificial Sequence
  Description of Artificial Sequence: Synthetic oligonucleotide
ccauucaucugcucguaga

SEQ ID NO: 2161651 - RNA, 19 nt, Artificial Sequence
  Description of Artificial Sequence: Synthetic oligonucleotide
gcgagcucaagacugcaaa

SEQ ID NO: 2161652 - RNA, 19 nt, Artificial Sequence
  Description of Artificial Sequence: Synthetic oligonucleotide
acgaagccucuccucucgu

SEQ ID NO: 2161653 - RNA, 19 nt, Artificial Sequence
  Description of Artificial Sequence: Synthetic oligonucleotide
ccaaaaucuggaacugcga

SEQ ID NO: 2161654 - RNA, 19 nt, Artificial Sequence
  Description of Artificial Sequence: Synthetic oligonucleotide
gcagaucauguaccacgcc

SEQ ID NO: 2161655 - RNA, 19 nt, Artificial Sequence
  Description of Artificial Sequence: Synthetic oligonucleotide
uucuagcaagucggugccu

SEQ ID NO: 2161656 - RNA, 19 nt, Artificial Sequence
  Description of Artificial Sequence: Synthetic oligonucleotide
cgagcucaagacugcaaag

SEQ ID NO: 2161657 - RNA, 19 nt, Artificial Sequence
  Description of Artificial Sequence: Synthetic oligonucleotide
cucuggcucuugcaauguc

SEQ ID NO: 2161658 - RNA, 19 nt, Artificial Sequence
  Description of Artificial Sequence: Synthetic oligonucleotide
cacggaggaucacgcuggc

SEQ ID NO: 2161659 - RNA, 19 nt, Artificial Sequence
  Description of Artificial Sequence: Synthetic oligonucleotide
caugcacuagaaaguuugu

SEQ ID NO: 2161660 - RNA, 19 nt, Artificial Sequence
  Description of Artificial Sequence: Synthetic oligonucleotide
gaucugcaacuuccggaua

SEQ ID NO: 2161661 - RNA, 19 nt, Artificial Sequence
  Description of Artificial Sequence: Synthetic oligonucleotide
cugugaguaggugaacucu

SEQ ID NO: 2161662 - RNA, 19 nt, Artificial Sequence
  Description of Artificial Sequence: Synthetic oligonucleotide
gcucuugcaaugucacgga

SEQ ID NO: 2161663 - RNA, 19 nt, Artificial Sequence
  Description of Artificial Sequence: Synthetic oligonucleotide
ggagacacauguugcgucu

SEQ ID NO: 2161664 - RNA, 19 nt, Artificial Sequence
  Description of Artificial Sequence: Synthetic oligonucleotide
cugcauacugacgaagccu

SEQ ID NO: 2161665 - RNA, 19 nt, Artificial Sequence
  Description of Artificial Sequence: Synthetic oligonucleotide
cagcaaccaaaaucuggaa

SEQ ID NO: 2161666 - RNA, 19 nt, Artificial Sequence
  Description of Artificial Sequence: Synthetic oligonucleotide
ccggauaccauagccaaca

SEQ ID NO: 2161667 - RNA, 19 nt, Artificial Sequence
  Description of Artificial Sequence: Synthetic oligonucleotide
ccuuacaaugagcucacua

SEQ ID NO: 2161668 - RNA, 19 nt, Artificial Sequence
  Description of Artificial Sequence: Synthetic oligonucleotide
gaccuccaacuuggaaaug

SEQ ID NO: 2161669 - RNA, 19 nt, Artificial Sequence
  Description of Artificial Sequence: Synthetic oligonucleotide
gacgcaagccaaggacgca

SEQ ID NO: 2161670 - RNA, 19 nt, Artificial Sequence
  Description of Artificial Sequence: Synthetic oligonucleotide
uccuggcgggagccagcag

SEQ ID NO: 2161671 - RNA, 19 nt, Artificial Sequence
  Description of Artificial Sequence: Synthetic oligonucleotide
caaugucacggaggaucac

SEQ ID NO: 2161672 - RNA, 19 nt, Artificial Sequence
  Description of Artificial Sequence: Synthetic oligonucleotide
ccagacuggcaauccuuac

SEQ ID NO: 2161673 - RNA, 19 nt, Artificial Sequence
  Description of Artificial Sequence: Synthetic oligonucleotide
ucucguagucgggcugccu

SEQ ID NO: 2161674 - RNA, 19 nt, Artificial Sequence
  Description of Artificial Sequence: Synthetic oligonucleotide
gccgaacaggucaauguca

SEQ ID NO: 2161675 - RNA, 19 nt, Artificial Sequence
  Description of Artificial Sequence: Synthetic oligonucleotide
gccgccuucuugguugggg

SEQ ID NO: 2161676 - RNA, 19 nt, Artificial Sequence
  Description of Artificial Sequence: Synthetic oligonucleotide
cucgaagauucugguucuc

SEQ ID NO: 2161677 - RNA, 19 nt, Artificial Sequence
  Description of Artificial Sequence: Synthetic oligonucleotide
ggauuucuggauguucucu

SEQ ID NO: 2161678 - RNA, 19 nt, Artificial Sequence
  Description of Artificial Sequence: Synthetic oligonucleotide
uccuuacaaugagcucacu

SEQ ID NO: 2161679 - RNA, 19 nt, Artificial Sequence
  Description of Artificial Sequence: Synthetic oligonucleotide
gcgcagcucccggaaaucg

SEQ ID NO: 2161680 - RNA, 19 nt, Artificial Sequence
  Description of Artificial Sequence: Synthetic oligonucleotide
gcucaagacugcaaaggaa

SEQ ID NO: 2161681 - RNA, 19 nt, Artificial Sequence
  Description of Artificial Sequence: Synthetic oligonucleotide
cugcaacuuccggauacca

SEQ ID NO: 2161682 - RNA, 19 nt, Artificial Sequence
  Description of Artificial Sequence: Synthetic oligonucleotide
cgaagauucugguucucca

SEQ ID NO: 2161683 - RNA, 19 nt, Artificial Sequence
  Description of Artificial Sequence: Synthetic oligonucleotide
cuuucugcgucaucauauu

SEQ ID NO: 2161684 - RNA, 19 nt, Artificial Sequence
  Description of Artificial Sequence: Synthetic oligonucleotide
cuggaacugcgagcucaag

SEQ ID NO: 2161685 - RNA, 19 nt, Artificial Sequence
  Description of Artificial Sequence: Synthetic oligonucleotide
acgcagcaaccaaaaucug

SEQ ID NO: 2161686 - RNA, 19 nt, Artificial Sequence
  Description of Artificial Sequence: Synthetic oligonucleotide
cugagcuuccggccaggga

SEQ ID NO: 2161687 - RNA, 19 nt, Artificial Sequence
  Description of Artificial Sequence: Synthetic oligonucleotide
cucucguagucgggcugcc

SEQ ID NO: 2161688 - RNA, 19 nt, Artificial Sequence
  Description of Artificial Sequence: Synthetic oligonucleotide
cccauucaucugcucguag

SEQ ID NO: 2161689 - RNA, 19 nt, Artificial Sequence
  Description of Artificial Sequence: Synthetic oligonucleotide
cacucugcacaugcuccuc

SEQ ID NO: 2161690 - RNA, 19 nt, Artificial Sequence
  Description of Artificial Sequence: Synthetic oligonucleotide
gcugcagaucauguaccac

SEQ ID NO: 2161691 - RNA, 19 nt, Artificial Sequence
  Description of Artificial Sequence: Synthetic oligonucleotide
gaccgcgcagcucccggaa

SEQ ID NO: 2161692 - RNA, 19 nt, Artificial Sequence
  Description of Artificial Sequence: Synthetic oligonucleotide
ccguccaguuggauggaac

SEQ ID NO: 2161693 - RNA, 19 nt, Artificial Sequence
  Description of Artificial Sequence: Synthetic oligonucleotide
ccauucuccuggcgggagc

SEQ ID NO: 2161694 - RNA, 19 nt, Artificial Sequence
  Description of Artificial Sequence: Synthetic oligonucleotide
ccuccaacuuggaaaugga

SEQ ID NO: 2161695 - RNA, 19 nt, Artificial Sequence
  Description of Artificial Sequence: Synthetic oligonucleotide
ggcuguggcucugugagua

SEQ ID NO: 2161696 - RNA, 19 nt, Artificial Sequence
  Description of Artificial Sequence: Synthetic oligonucleotide
ggccugagcuuccggccag

SEQ ID NO: 2161697 - RNA, 19 nt, Artificial Sequence
  Description of Artificial Sequence: Synthetic oligonucleotide
guccaguuggauggaacgu

SEQ ID NO: 2161698 - RNA, 19 nt, Artificial Sequence
  Description of Artificial Sequence: Synthetic oligonucleotide
cuuccggccagggauuucu

SEQ ID NO: 2161699 - RNA, 19 nt, Artificial Sequence
  Description of Artificial Sequence: Synthetic oligonucleotide
cagugaggguuucuuggcu

SEQ ID NO: 2161700 - RNA, 19 nt, Artificial Sequence
  Description of Artificial Sequence: Synthetic oligonucleotide
gcugggccauaucugucuc

SEQ ID NO: 2161701 - RNA, 19 nt, Artificial Sequence
  Description of Artificial Sequence: Synthetic oligonucleotide
caggcccauucaucugcuc

SEQ ID NO: 2161702 - RNA, 19 nt, Artificial Sequence
  Description of Artificial Sequence: Synthetic oligonucleotide
gugaggguuucuuggcuuu

SEQ ID NO: 2161703 - RNA, 19 nt, Artificial Sequence
  Description of Artificial Sequence: Synthetic oligonucleotide
ccucucguagucgggcugc

SEQ ID NO: 2161704 - RNA, 19 nt, Artificial Sequence
  Description of Artificial Sequence: Synthetic oligonucleotide
cugcgucaucauauuugaa

SEQ ID NO: 2161705 - RNA, 19 nt, Artificial Sequence
  Description of Artificial Sequence: Synthetic oligonucleotide
ggcccauucaucugcucgu

SEQ ID NO: 2161706 - RNA, 19 nt, Artificial Sequence
  Description of Artificial Sequence: Synthetic oligonucleotide
cucaugcacuagaaaguuu

SEQ ID NO: 2161707 - RNA, 19 nt, Artificial Sequence
  Description of Artificial Sequence: Synthetic oligonucleotide
agccaacaggcacgagcuu

SEQ ID NO: 2161708 - RNA, 19 nt, Artificial Sequence
  Description of Artificial Sequence: Synthetic oligonucleotide
agguccucacacacaugaa

SEQ ID NO: 2161709 - RNA, 19 nt, Artificial Sequence
  Description of Artificial Sequence: Synthetic oligonucleotide
acggaggaucacgcuggca

SEQ ID NO: 2161710 - RNA, 19 nt, Artificial Sequence
  Description of Artificial Sequence: Synthetic oligonucleotide
accgcgcagcucccggaaa

SEQ ID NO: 2161711 - RNA, 19 nt, Artificial Sequence
  Description of Artificial Sequence: Synthetic oligonucleotide
cugcucguagaauuuccuu

SEQ ID NO: 2161712 - RNA, 19 nt, Artificial Sequence
  Description of Artificial Sequence: Synthetic oligonucleotide
gcugcgaugucaacacucu

SEQ ID NO: 2161713 - RNA, 19 nt, Artificial Sequence
  Description of Artificial Sequence: Synthetic oligonucleotide
caugcuccucaaacuuggu

SEQ ID NO: 2161714 - RNA, 19 nt, Artificial Sequence
  Description of Artificial Sequence: Synthetic oligonucleotide
cugcgagcucaagacugca

SEQ ID NO: 2161715 - RNA, 19 nt, Artificial Sequence
  Description of Artificial Sequence: Synthetic oligonucleotide
ccaaggacgcagcaaccaa

SEQ ID NO: 2161716 - RNA, 19 nt, Artificial Sequence
  Description of Artificial Sequence: Synthetic oligonucleotide
cagaccagcccguccaguu

SEQ ID NO: 2161717 - RNA, 19 nt, Artificial Sequence
  Description of Artificial Sequence: Synthetic oligonucleotide
caccauucuccuggcggga

SEQ ID NO: 2161718 - RNA, 19 nt, Artificial Sequence
  Description of Artificial Sequence: Synthetic oligonucleotide
guugcgucugaggggcugu

SEQ ID NO: 2161719 - RNA, 19 nt, Artificial Sequence
  Description of Artificial Sequence: Synthetic oligonucleotide
ccugagcuuccggccaggg

SEQ ID NO: 2161720 - RNA, 19 nt, Artificial Sequence
  Description of Artificial Sequence: Synthetic oligonucleotide
cccaagguuugacauccaa

SEQ ID NO: 2161721 - RNA, 19 nt, Artificial Sequence
  Description of Artificial Sequence: Synthetic oligonucleotide
cacacacaugaaccacacu

SEQ ID NO: 2161722 - RNA, 19 nt, Artificial Sequence
  Description of Artificial Sequence: Synthetic oligonucleotide
gccauaucugucucaucau

SEQ ID NO: 2161723 - RNA, 19 nt, Artificial Sequence
  Description of Artificial Sequence: Synthetic oligonucleotide
cguacacaagucuccagcu

SEQ ID NO: 2161724 - RNA, 19 nt, Artificial Sequence
  Description of Artificial Sequence: Synthetic oligonucleotide
agcuuccggccagggauuu

SEQ ID NO: 2161725 - RNA, 19 nt, Artificial Sequence
  Description of Artificial Sequence: Synthetic oligonucleotide
gagggcgaccgcgcagcuc

SEQ ID NO: 2161726 - RNA, 19 nt, Artificial Sequence
  Description of Artificial Sequence: Synthetic oligonucleotide
caucauccucugccggugu

SEQ ID NO: 2161727 - RNA, 19 nt, Artificial Sequence
  Description of Artificial Sequence: Synthetic oligonucleotide
cgaacaggucaaugucauc

SEQ ID NO: 2161728 - RNA, 19 nt, Artificial Sequence
  Description of Artificial Sequence: Synthetic oligonucleotide
caacaggcacgagcuugga

SEQ ID NO: 2161729 - RNA, 19 nt, Artificial Sequence
  Description of Artificial Sequence: Synthetic oligonucleotide
cuuccaccacacacuggau

SEQ ID NO: 2161730 - RNA, 19 nt, Artificial Sequence
  Description of Artificial Sequence: Synthetic oligonucleotide
ccacgccucgaagauucug

SEQ ID NO: 2161731 - RNA, 19 nt, Artificial Sequence
  Description of Artificial Sequence: Synthetic oligonucleotide
ggacugcugcagaucaugu

SEQ ID NO: 2161732 - RNA, 19 nt, Artificial Sequence
  Description of Artificial Sequence: Synthetic oligonucleotide
accacgccucgaagauucu

SEQ ID NO: 2161733 - RNA, 19 nt, Artificial Sequence
  Description of Artificial Sequence: Synthetic oligonucleotide
accagcccguccaguugga

SEQ ID NO: 2161734 - RNA, 19 nt, Artificial Sequence
  Description of Artificial Sequence: Synthetic oligonucleotide
auguugcgucugaggggcu

SEQ ID NO: 2161735 - RNA, 19 nt, Artificial Sequence
  Description of Artificial Sequence: Synthetic oligonucleotide
gcagguccucacacacaug

SEQ ID NO: 2161736 - RNA, 19 nt, Artificial Sequence
  Description of Artificial Sequence: Synthetic oligonucleotide
gccugagcuuccggccagg

SEQ ID NO: 2161737 - RNA, 19 nt, Artificial Sequence
  Description of Artificial Sequence: Synthetic oligonucleotide
ccagaguguucagccugac

SEQ ID NO: 2161738 - RNA, 19 nt, Artificial Sequence
  Description of Artificial Sequence: Synthetic oligonucleotide
cgguguggccgccuucuug

SEQ ID NO: 2161739 - RNA, 19 nt, Artificial Sequence
  Description of Artificial Sequence: Synthetic oligonucleotide
guguggccgccuucuuggu

SEQ ID NO: 2161740 - RNA, 19 nt, Artificial Sequence
  Description of Artificial Sequence: Synthetic oligonucleotide
gcaagucggugccuacuuu

SEQ ID NO: 2161741 - RNA, 19 nt, Artificial Sequence
  Description of Artificial Sequence: Synthetic oligonucleotide
guaccacgccucgaagauu

SEQ ID NO: 2161742 - RNA, 19 nt, Artificial Sequence
  Description of Artificial Sequence: Synthetic oligonucleotide
gcauacugacgaagccucu

SEQ ID NO: 2161743 - RNA, 19 nt, Artificial Sequence
  Description of Artificial Sequence: Synthetic oligonucleotide
gccgguguggccgccuucu

SEQ ID NO: 2161744 - RNA, 19 nt, Artificial Sequence
  Description of Artificial Sequence: Synthetic oligonucleotide
gcccauucaucugcucgua

SEQ ID NO: 2161745 - RNA, 19 nt, Artificial Sequence
  Description of Artificial Sequence: Synthetic oligonucleotide
ggaucacgcuggcaccauu

SEQ ID NO: 2161746 - RNA, 19 nt, Artificial Sequence
  Description of Artificial Sequence: Synthetic oligonucleotide
ggggcuccacuugacgcau

SEQ ID NO: 2161747 - RNA, 19 nt, Artificial Sequence
  Description of Artificial Sequence: Synthetic oligonucleotide
cgcgcagcucccggaaauc

SEQ ID NO: 2161748 - RNA, 19 nt, Artificial Sequence
  Description of Artificial Sequence: Synthetic oligonucleotide
ggagggcgaccgcgcagcu

SEQ ID NO: 2161749 - RNA, 19 nt, Artificial Sequence
  Description of Artificial Sequence: Synthetic oligonucleotide
gccugaccuccaacuugga

SEQ ID NO: 2161750 - RNA, 19 nt, Artificial Sequence
  Description of Artificial Sequence: Synthetic oligonucleotide
gggcgaccgcgcagcuccc

SEQ ID NO: 2161751 - RNA, 19 nt, Artificial Sequence
  Description of Artificial Sequence: Synthetic oligonucleotide
cgcauaggagacacauguu

SEQ ID NO: 2161752 - RNA, 19 nt, Artificial Sequence
  Description of Artificial Sequence: Synthetic oligonucleotide
gcccguccaguuggaugga

SEQ ID NO: 2161753 - RNA, 19 nt, Artificial Sequence
  Description of Artificial Sequence: Synthetic oligonucleotide
cacugccgaacaggucaau

SEQ ID NO: 2161754 - RNA, 19 nt, Artificial Sequence
  Description of Artificial Sequence: Synthetic oligonucleotide
cugccgguguggccgccuu

SEQ ID NO: 2161755 - RNA, 19 nt, Artificial Sequence
  Description of Artificial Sequence: Synthetic oligonucleotide
ccgcgcagcucccggaaau

SEQ ID NO: 2161756 - RNA, 19 nt, Artificial Sequence
  Description of Artificial Sequence: Synthetic oligonucleotide
cccguccaguuggauggaa

SEQ ID NO: 2161757 - RNA, 19 nt, Artificial Sequence
  Description of Artificial Sequence: Synthetic oligonucleotide
ccagggauuucuggauguu

SEQ ID NO: 2161758 - RNA, 19 nt, Artificial Sequence
  Description of Artificial Sequence: Synthetic oligonucleotide
ccagaccagcccguccagu

SEQ ID NO: 2161759 - RNA, 19 nt, Artificial Sequence
  Description of Artificial Sequence: Synthetic oligonucleotide
gggcuccacuugacgcaua

SEQ ID NO: 2161760 - RNA, 19 nt, Artificial Sequence
  Description of Artificial Sequence: Synthetic oligonucleotide
ccgguguggccgccuucuu

SEQ ID NO: 2161761 - RNA, 19 nt, Artificial Sequence
  Description of Artificial Sequence: Synthetic oligonucleotide
aaaagugguaaauagaagg

SEQ ID NO: 2161762 - RNA, 19 nt, Artificial Sequence
  Description of Artificial Sequence: Synthetic oligonucleotide
gaaaacacagcuuaugugg

SEQ ID NO: 2161763 - RNA, 19 nt, Artificial Sequence
  Description of Artificial Sequence: Synthetic oligonucleotide
uguaguaucuuuagaaagg

SEQ ID NO: 2161764 - RNA, 19 nt, Artificial Sequence
  Description of Artificial Sequence: Synthetic oligonucleotide
gacaauauagaaaacacag

SEQ ID NO: 2161765 - RNA, 19 nt, Artificial Sequence
  Description of Artificial Sequence: Synthetic oligonucleotide
aguaucuuuagaaaggugc

SEQ ID NO: 2161766 - RNA, 19 nt, Artificial Sequence
  Description of Artificial Sequence: Synthetic oligonucleotide
uuuauuauagaaauccccu

SEQ ID NO: 2161767 - RNA, 19 nt, Artificial Sequence
  Description of Artificial Sequence: Synthetic oligonucleotide
aaaauuuaacaccagguaa

SEQ ID NO: 2161768 - RNA, 19 nt, Artificial Sequence
  Description of Artificial Sequence: Synthetic oligonucleotide
uaaacgagcgcucagcucc

SEQ ID NO: 2161769 - RNA, 19 nt, Artificial Sequence
  Description of Artificial Sequence: Synthetic oligonucleotide
ugugagaucaagcagcugu

SEQ ID NO: 2161770 - RNA, 19 nt, Artificial Sequence
  Description of Artificial Sequence: Synthetic oligonucleotide
uuaacaccagguaaagggg

SEQ ID NO: 2161771 - RNA, 19 nt, Artificial Sequence
  Description of Artificial Sequence: Synthetic oligonucleotide
aaauagaaggaaaccaagg

SEQ ID NO: 2161772 - RNA, 19 nt, Artificial Sequence
  Description of Artificial Sequence: Synthetic oligonucleotide
ugaaucaauacccuaccca

SEQ ID NO: 2161773 - RNA, 19 nt, Artificial Sequence
  Description of Artificial Sequence: Synthetic oligonucleotide
auauagaaaacacagcuua

SEQ ID NO: 2161774 - RNA, 19 nt, Artificial Sequence
  Description of Artificial Sequence: Synthetic oligonucleotide
aucuuuagaaaggugcucc

SEQ ID NO: 2161775 - RNA, 19 nt, Artificial Sequence
  Description of Artificial Sequence: Synthetic oligonucleotide
ugcaacauacucaaauggc

SEQ ID NO: 2161776 - RNA, 19 nt, Artificial Sequence
  Description of Artificial Sequence: Synthetic oligonucleotide
uauuauagaaauccccuuc

SEQ ID NO: 2161777 - RNA, 19 nt, Artificial Sequence
  Description of Artificial Sequence: Synthetic oligonucleotide
cugauugggucuuugaagc

SEQ ID NO: 2161778 - RNA, 19 nt, Artificial Sequence
  Description of Artificial Sequence: Synthetic oligonucleotide
uccugugagaucaagcagc

SEQ ID NO: 2161779 - RNA, 19 nt, Artificial Sequence
  Description of Artificial Sequence: Synthetic oligonucleotide
gugaauagugucuugggcc

SEQ ID NO: 2161780 - RNA, 19 nt, Artificial Sequence
  Description of Artificial Sequence: Synthetic oligonucleotide
uuuagaaaggugcucccug

SEQ ID NO: 2161781 - RNA, 19 nt, Artificial Sequence
  Description of Artificial Sequence: Synthetic oligonucleotide
cagacaauauagaaaacac

SEQ ID NO: 2161782 - RNA, 19 nt, Artificial Sequence
  Description of Artificial Sequence: Synthetic oligonucleotide
agagcaaccacaucccagg

SEQ ID NO: 2161783 - RNA, 19 nt, Artificial Sequence
  Description of Artificial Sequence: Synthetic oligonucleotide
uugacauccucuuguauag

SEQ ID NO: 2161784 - RNA, 19 nt, Artificial Sequence
  Description of Artificial Sequence: Synthetic oligonucleotide
ugugaauagugucuugggc

SEQ ID NO: 2161785 - RNA, 19 nt, Artificial Sequence
  Description of Artificial Sequence: Synthetic oligonucleotide
aauuuaacaccagguaaag

SEQ ID NO: 2161786 - RNA, 19 nt, Artificial Sequence
  Description of Artificial Sequence: Synthetic oligonucleotide
aaggaggacaugauguggc

SEQ ID NO: 2161787 - RNA, 19 nt, Artificial Sequence
  Description of Artificial Sequence: Synthetic oligonucleotide
gugucuugggcccagaucc

SEQ ID NO: 2161788 - RNA, 19 nt, Artificial Sequence
  Description of Artificial Sequence: Synthetic oligonucleotide
auagaaauccccuuccagu

SEQ ID NO: 2161789 - RNA, 19 nt, Artificial Sequence
  Description of Artificial Sequence: Synthetic oligonucleotide
ugaauagugucuugggccc

SEQ ID NO: 2161790 - RNA, 19 nt, Artificial Sequence
  Description of Artificial Sequence: Synthetic oligonucleotide
uuugaagcuagcuggggcc

SEQ ID NO: 2161791 - RNA, 19 nt, Artificial Sequence
  Description of Artificial Sequence: Synthetic oligonucleotide
acaauauagaaaacacagc

SEQ ID NO: 2161792 - RNA, 19 nt, Artificial Sequence
  Description of Artificial Sequence: Synthetic oligonucleotide
ggucuuugaagcuagcugg

SEQ ID NO: 2161793 - RNA, 19 nt, Artificial Sequence
  Description of Artificial Sequence: Synthetic oligonucleotide
uuagaaaggugcucccugg

SEQ ID NO: 2161794 - RNA, 19 nt, Artificial Sequence
  Description of Artificial Sequence: Synthetic oligonucleotide
aaauuuaacaccagguaaa

SEQ ID NO: 2161795 - RNA, 19 nt, Artificial Sequence
  Description of Artificial Sequence: Synthetic oligonucleotide
uucuaguuuauacauuuau

SEQ ID NO: 2161796 - RNA, 19 nt, Artificial Sequence
  Description of Artificial Sequence: Synthetic oligonucleotide
uguauagccuccugauugg

SEQ ID NO: 2161797 - RNA, 19 nt, Artificial Sequence
  Description of Artificial Sequence: Synthetic oligonucleotide
ccaauugccaguuuuaacc

SEQ ID NO: 2161798 - RNA, 19 nt, Artificial Sequence
  Description of Artificial Sequence: Synthetic oligonucleotide
aaagugguaaauagaagga

SEQ ID NO: 2161799 - RNA, 19 nt, Artificial Sequence
  Description of Artificial Sequence: Synthetic oligonucleotide
accuucacugaaucaauac

SEQ ID NO: 2161800 - RNA, 19 nt, Artificial Sequence
  Description of Artificial Sequence: Synthetic oligonucleotide
accguauagugccuggccc

SEQ ID NO: 2161801 - RNA, 19 nt, Artificial Sequence
  Description of Artificial Sequence: Synthetic oligonucleotide
auagccuccugauuggguc

SEQ ID NO: 2161802 - RNA, 19 nt, Artificial Sequence
  Description of Artificial Sequence: Synthetic oligonucleotide
aucaauacccuacccauca

SEQ ID NO: 2161803 - RNA, 19 nt, Artificial Sequence
  Description of Artificial Sequence: Synthetic oligonucleotide
guaucggacauccuccugg

SEQ ID NO: 2161804 - RNA, 19 nt, Artificial Sequence
  Description of Artificial Sequence: Synthetic oligonucleotide
ggugcugugaaacuccucg

SEQ ID NO: 2161805 - RNA, 19 nt, Artificial Sequence
  Description of Artificial Sequence: Synthetic oligonucleotide
cuggcaucuaccaauugcc

SEQ ID NO: 2161806 - RNA, 19 nt, Artificial Sequence
  Description of Artificial Sequence: Synthetic oligonucleotide
cagggcaagguucuuaugg

SEQ ID NO: 2161807 - RNA, 19 nt, Artificial Sequence
  Description of Artificial Sequence: Synthetic oligonucleotide
caacauggggcuuaucagg

SEQ ID NO: 2161808 - RNA, 19 nt, Artificial Sequence
  Description of Artificial Sequence: Synthetic oligonucleotide
ucuaguuuauacauuuauu

SEQ ID NO: 2161809 - RNA, 19 nt, Artificial Sequence
  Description of Artificial Sequence: Synthetic oligonucleotide
gacauccucuuguauagcc

SEQ ID NO: 2161810 - RNA, 19 nt, Artificial Sequence
  Description of Artificial Sequence: Synthetic oligonucleotide
ugugaaacuccucgagugc

SEQ ID NO: 2161811 - RNA, 19 nt, Artificial Sequence
  Description of Artificial Sequence: Synthetic oligonucleotide
auguguugggcccacaugu

SEQ ID NO: 2161812 - RNA, 19 nt, Artificial Sequence
  Description of Artificial Sequence: Synthetic oligonucleotide
ucuaccaauugccaguuuu

SEQ ID NO: 2161813 - RNA, 19 nt, Artificial Sequence
  Description of Artificial Sequence: Synthetic oligonucleotide
accaauugccaguuuuaac

SEQ ID NO: 2161814 - RNA, 19 nt, Artificial Sequence
  Description of Artificial Sequence: Synthetic oligonucleotide
uucacugaaucaauacccu

SEQ ID NO: 2161815 - RNA, 19 nt, Artificial Sequence
  Description of Artificial Sequence: Synthetic oligonucleotide
uuccggauguaccaguccc

SEQ ID NO: 2161816 - RNA, 19 nt, Artificial Sequence
  Description of Artificial Sequence: Synthetic oligonucleotide
cacugaaucaauacccuac

SEQ ID NO: 2161817 - RNA, 19 nt, Artificial Sequence
  Description of Artificial Sequence: Synthetic oligonucleotide
agaccaaugucccuggggu

SEQ ID NO: 2161818 - RNA, 19 nt, Artificial Sequence
  Description of Artificial Sequence: Synthetic oligonucleotide
gauaccuucacugaaucaa

SEQ ID NO: 2161819 - RNA, 19 nt, Artificial Sequence
  Description of Artificial Sequence: Synthetic oligonucleotide
aaaggugcucccuggucag

SEQ ID NO: 2161820 - RNA, 19 nt, Artificial Sequence
  Description of Artificial Sequence: Synthetic oligonucleotide
aggauaccuucacugaauc

SEQ ID NO: 2161821 - RNA, 19 nt, Artificial Sequence
  Description of Artificial Sequence: Synthetic oligonucleotide
cugugaaacuccucgagug

SEQ ID NO: 2161822 - RNA, 19 nt, Artificial Sequence
  Description of Artificial Sequence: Synthetic oligonucleotide
gguucuuauggccaccucg

SEQ ID NO: 2161823 - RNA, 19 nt, Artificial Sequence
  Description of Artificial Sequence: Synthetic oligonucleotide
ugaaacuccucgagugcgg

SEQ ID NO: 2161824 - RNA, 19 nt, Artificial Sequence
  Description of Artificial Sequence: Synthetic oligonucleotide
auaccugccggagacaggg

SEQ ID NO: 2161825 - RNA, 19 nt, Artificial Sequence
  Description of Artificial Sequence: Synthetic oligonucleotide
gacaugauguggccugugg

SEQ ID NO: 2161826 - RNA, 19 nt, Artificial Sequence
  Description of Artificial Sequence: Synthetic oligonucleotide
caggucacuuaaacgagcg

SEQ ID NO: 2161827 - RNA, 19 nt, Artificial Sequence
  Description of Artificial Sequence: Synthetic oligonucleotide
auuccggauguaccagucc

SEQ ID NO: 2161828 - RNA, 19 nt, Artificial Sequence
  Description of Artificial Sequence: Synthetic oligonucleotide
ucaggucacuuaaacgagc

SEQ ID NO: 2161829 - RNA, 19 nt, Artificial Sequence
  Description of Artificial Sequence: Synthetic oligonucleotide
uacccaucaguaaaagcac

SEQ ID NO: 2161830 - RNA, 19 nt, Artificial Sequence
  Description of Artificial Sequence: Synthetic oligonucleotide
ucaccugaggguuuugcug

SEQ ID NO: 2161831 - RNA, 19 nt, Artificial Sequence
  Description of Artificial Sequence: Synthetic oligonucleotide
auagcagcgggcauggagg

SEQ ID NO: 2161832 - RNA, 19 nt, Artificial Sequence
  Description of Artificial Sequence: Synthetic oligonucleotide
gaaauccccuuccagugug

SEQ ID NO: 2161833 - RNA, 19 nt, Artificial Sequence
  Description of Artificial Sequence: Synthetic oligonucleotide
uacccuacccaucaguaaa

SEQ ID NO: 2161834 - RNA, 19 nt, Artificial Sequence
  Description of Artificial Sequence: Synthetic oligonucleotide
uuauuauagaaauccccuu

SEQ ID NO: 2161835 - RNA, 19 nt, Artificial Sequence
  Description of Artificial Sequence: Synthetic oligonucleotide
uggccuguggcccauggcc

SEQ ID NO: 2161836 - RNA, 19 nt, Artificial Sequence
  Description of Artificial Sequence: Synthetic oligonucleotide
aaucaauacccuacccauc

SEQ ID NO: 2161837 - RNA, 19 nt, Artificial Sequence
  Description of Artificial Sequence: Synthetic oligonucleotide
agaagcagggguaucggac

SEQ ID NO: 2161838 - RNA, 19 nt, Artificial Sequence
  Description of Artificial Sequence: Synthetic oligonucleotide
uuaucaggaagggucagac

SEQ ID NO: 2161839 - RNA, 19 nt, Artificial Sequence
  Description of Artificial Sequence: Synthetic oligonucleotide
agugucuugggcccagauc

SEQ ID NO: 2161840 - RNA, 19 nt, Artificial Sequence
  Description of Artificial Sequence: Synthetic oligonucleotide
ucaggauaccuucacugaa

SEQ ID NO: 2161841 - RNA, 19 nt, Artificial Sequence
  Description of Artificial Sequence: Synthetic oligonucleotide
aauuccggauguaccaguc

SEQ ID NO: 2161842 - RNA, 19 nt, Artificial Sequence
  Description of Artificial Sequence: Synthetic oligonucleotide
uaguaucuuuagaaaggug

SEQ ID NO: 2161843 - RNA, 19 nt, Artificial Sequence
  Description of Artificial Sequence: Synthetic oligonucleotide
auguaccagucccggagcc

SEQ ID NO: 2161844 - RNA, 19 nt, Artificial Sequence
  Description of Artificial Sequence: Synthetic oligonucleotide
agcgaggucgaccgugugc

SEQ ID NO: 2161845 - RNA, 19 nt, Artificial Sequence
  Description of Artificial Sequence: Synthetic oligonucleotide
gugugaauagugucuuggg

SEQ ID NO: 2161846 - RNA, 19 nt, Artificial Sequence
  Description of Artificial Sequence: Synthetic oligonucleotide
cuuauggccaccucgcuca

SEQ ID NO: 2161847 - RNA, 19 nt, Artificial Sequence
  Description of Artificial Sequence: Synthetic oligonucleotide
uaucggacauccuccuggg

SEQ ID NO: 2161848 - RNA, 19 nt, Artificial Sequence
  Description of Artificial Sequence: Synthetic oligonucleotide
gaagggugcauguguuggg

SEQ ID NO: 2161849 - RNA, 19 nt, Artificial Sequence
  Description of Artificial Sequence: Synthetic oligonucleotide
aacuccucgagugcgggag

SEQ ID NO: 2161850 - RNA, 19 nt, Artificial Sequence
  Description of Artificial Sequence: Synthetic oligonucleotide
uauagugccuggcccaccu

SEQ ID NO: 2161851 - RNA, 19 nt, Artificial Sequence
  Description of Artificial Sequence: Synthetic oligonucleotide
agaucaagcagcugucccu

SEQ ID NO: 2161852 - RNA, 19 nt, Artificial Sequence
  Description of Artificial Sequence: Synthetic oligonucleotide
accacugcagcaucccagg

SEQ ID NO: 2161853 - RNA, 19 nt, Artificial Sequence
  Description of Artificial Sequence: Synthetic oligonucleotide
accaaggaggacaugaugu

SEQ ID NO: 2161854 - RNA, 19 nt, Artificial Sequence
  Description of Artificial Sequence: Synthetic oligonucleotide
uguugggcccacaugugga

SEQ ID NO: 2161855 - RNA, 19 nt, Artificial Sequence
  Description of Artificial Sequence: Synthetic oligonucleotide
uggccaguccugaauuccg

SEQ ID NO: 2161856 - RNA, 19 nt, Artificial Sequence
  Description of Artificial Sequence: Synthetic oligonucleotide
gauguaccagucccggagc

SEQ ID NO: 2161857 - RNA, 19 nt, Artificial Sequence
  Description of Artificial Sequence: Synthetic oligonucleotide
ugaauuccggauguaccag

SEQ ID NO: 2161858 - RNA, 19 nt, Artificial Sequence
  Description of Artificial Sequence: Synthetic oligonucleotide
aggucacuuaaacgagcgc

SEQ ID NO: 2161859 - RNA, 19 nt, Artificial Sequence
  Description of Artificial Sequence: Synthetic oligonucleotide
gugguaaauagaaggaaac

SEQ ID NO: 2161860 - RNA, 19 nt, Artificial Sequence
  Description of Artificial Sequence: Synthetic oligonucleotide
uccggauguaccagucccg

SEQ ID NO: 2161861 - RNA, 19 nt, Artificial Sequence
  Description of Artificial Sequence: Synthetic oligonucleotide
ugggaggaccguauagugc

SEQ ID NO: 2161862 - RNA, 19 nt, Artificial Sequence
  Description of Artificial Sequence: Synthetic oligonucleotide
ucuuauggccaccucgcuc

SEQ ID NO: 2161863 - RNA, 19 nt, Artificial Sequence
  Description of Artificial Sequence: Synthetic oligonucleotide
cuggagguagccgaguggg

SEQ ID NO: 2161864 - RNA, 19 nt, Artificial Sequence
  Description of Artificial Sequence: Synthetic oligonucleotide
gugaaacuccucgagugcg

SEQ ID NO: 2161865 - RNA, 19 nt, Artificial Sequence
  Description of Artificial Sequence: Synthetic oligonucleotide
cugaaucaauacccuaccc

SEQ ID NO: 2161866 - RNA, 19 nt, Artificial Sequence
  Description of Artificial Sequence: Synthetic oligonucleotide
uacgcgucaggucacuuaa

SEQ ID NO: 2161867 - RNA, 19 nt, Artificial Sequence
  Description of Artificial Sequence: Synthetic oligonucleotide
gggaggaccguauagugcc

SEQ ID NO: 2161868 - RNA, 19 nt, Artificial Sequence
  Description of Artificial Sequence: Synthetic oligonucleotide
ggauguaccagucccggag

SEQ ID NO: 2161869 - RNA, 19 nt, Artificial Sequence
  Description of Artificial Sequence: Synthetic oligonucleotide
cuugacauccucuuguaua

SEQ ID NO: 2161870 - RNA, 19 nt, Artificial Sequence
  Description of Artificial Sequence: Synthetic oligonucleotide
aauacccuacccaucagua

SEQ ID NO: 2161871 - RNA, 19 nt, Artificial Sequence
  Description of Artificial Sequence: Synthetic oligonucleotide
uuaaccacugcagcauccc

SEQ ID NO: 2161872 - RNA, 19 nt, Artificial Sequence
  Description of Artificial Sequence: Synthetic oligonucleotide
aucccaggaugcaacauac

SEQ ID NO: 2161873 - RNA, 19 nt, Artificial Sequence
  Description of Artificial Sequence: Synthetic oligonucleotide
cauaggccggcgcugaggc

SEQ ID NO: 2161874 - RNA, 19 nt, Artificial Sequence
  Description of Artificial Sequence: Synthetic oligonucleotide
gauacaggaaguccgugua

SEQ ID NO: 2161875 - RNA, 19 nt, Artificial Sequence
  Description of Artificial Sequence: Synthetic oligonucleotide
ucaauacccuacccaucag

SEQ ID NO: 2161876 - RNA, 19 nt, Artificial Sequence
  Description of Artificial Sequence: Synthetic oligonucleotide
aauagugucuugggcccag

SEQ ID NO: 2161877 - RNA, 19 nt, Artificial Sequence
  Description of Artificial Sequence: Synthetic oligonucleotide
agugguaaauagaaggaaa

SEQ ID NO: 2161878 - RNA, 19 nt, Artificial Sequence
  Description of Artificial Sequence: Synthetic oligonucleotide
ggggaaucagaacuggaag

SEQ ID NO: 2161879 - RNA, 19 nt, Artificial Sequence
  Description of Artificial Sequence: Synthetic oligonucleotide
uugccaguuuuaaccacug

SEQ ID NO: 2161880 - RNA, 19 nt, Artificial Sequence
  Description of Artificial Sequence: Synthetic oligonucleotide
uccguguaguaucuuuaga

SEQ ID NO: 2161881 - RNA, 19 nt, Artificial Sequence
  Description of Artificial Sequence: Synthetic oligonucleotide
gaagcagggguaucggaca

SEQ ID NO: 2161882 - RNA, 19 nt, Artificial Sequence
  Description of Artificial Sequence: Synthetic oligonucleotide
agauccacugguaacaaaa

SEQ ID NO: 2161883 - RNA, 19 nt, Artificial Sequence
  Description of Artificial Sequence: Synthetic oligonucleotide
uauagccuccugauugggu

SEQ ID NO: 2161884 - RNA, 19 nt, Artificial Sequence
  Description of Artificial Sequence: Synthetic oligonucleotide
gaccguauagugccuggcc

SEQ ID NO: 2161885 - RNA, 19 nt, Artificial Sequence
  Description of Artificial Sequence: Synthetic oligonucleotide
uuccagugugaauaguguc

SEQ ID NO: 2161886 - RNA, 19 nt, Artificial Sequence
  Description of Artificial Sequence: Synthetic oligonucleotide
aaccacugcagcaucccag

SEQ ID NO: 2161887 - RNA, 19 nt, Artificial Sequence
  Description of Artificial Sequence: Synthetic oligonucleotide
uccccuuccagugugaaua

SEQ ID NO: 2161888 - RNA, 19 nt, Artificial Sequence
  Description of Artificial Sequence: Synthetic oligonucleotide
uguguugggcccacaugug

SEQ ID NO: 2161889 - RNA, 19 nt, Artificial Sequence
  Description of Artificial Sequence: Synthetic oligonucleotide
agaaggaaaccaaggagga

SEQ ID NO: 2161890 - RNA, 19 nt, Artificial Sequence
  Description of Artificial Sequence: Synthetic oligonucleotide
cagaaagucacagacaaua

SEQ ID NO: 2161891 - RNA, 19 nt, Artificial Sequence
  Description of Artificial Sequence: Synthetic oligonucleotide
guguugggcccacaugugg

SEQ ID NO: 2161892 - RNA, 19 nt, Artificial Sequence
  Description of Artificial Sequence: Synthetic oligonucleotide
aggaccaagagcaaccaca

SEQ ID NO: 2161893 - RNA, 19 nt, Artificial Sequence
  Description of Artificial Sequence: Synthetic oligonucleotide
cagaccaaugucccugggg

SEQ ID NO: 2161894 - RNA, 19 nt, Artificial Sequence
  Description of Artificial Sequence: Synthetic oligonucleotide
ugcucccuggucaggauac

SEQ ID NO: 2161895 - RNA, 19 nt, Artificial Sequence
  Description of Artificial Sequence: Synthetic oligonucleotide
gcuggcaucuaccaauugc

SEQ ID NO: 2161896 - RNA, 19 nt, Artificial Sequence
  Description of Artificial Sequence: Synthetic oligonucleotide
auugggucuuugaagcuag

SEQ ID NO: 2161897 - RNA, 19 nt, Artificial Sequence
  Description of Artificial Sequence: Synthetic oligonucleotide
aggucgaccgugugcuccc

SEQ ID NO: 2161898 - RNA, 19 nt, Artificial Sequence
  Description of Artificial Sequence: Synthetic oligonucleotide
ggcucagcgaggucgaccg

SEQ ID NO: 2161899 - RNA, 19 nt, Artificial Sequence
  Description of Artificial Sequence: Synthetic oligonucleotide
ccugauugggucuuugaag

SEQ ID NO: 2161900 - RNA, 19 nt, Artificial Sequence
  Description of Artificial Sequence: Synthetic oligonucleotide
ugagaucaagcagcugucc

SEQ ID NO: 2161901 - RNA, 19 nt, Artificial Sequence
  Description of Artificial Sequence: Synthetic oligonucleotide
agaaauccccuuccagugu

SEQ ID NO: 2161902 - RNA, 19 nt, Artificial Sequence
  Description of Artificial Sequence: Synthetic oligonucleotide
gcuuauguggauuuguuua

SEQ ID NO: 2161903 - RNA, 19 nt, Artificial Sequence
  Description of Artificial Sequence: Synthetic oligonucleotide
uggcaucuaccaauugcca

SEQ ID NO: 2161904 - RNA, 19 nt, Artificial Sequence
  Description of Artificial Sequence: Synthetic oligonucleotide
guccguguaguaucuuuag

SEQ ID NO: 2161905 - RNA, 19 nt, Artificial Sequence
  Description of Artificial Sequence: Synthetic oligonucleotide
uaucuuuagaaaggugcuc

SEQ ID NO: 2161906 - RNA, 19 nt, Artificial Sequence
  Description of Artificial Sequence: Synthetic oligonucleotide
ggcaucuaccaauugccag

SEQ ID NO: 2161907 - RNA, 19 nt, Artificial Sequence
  Description of Artificial Sequence: Synthetic oligonucleotide
cugggaggaccguauagug

SEQ ID NO: 2161908 - RNA, 19 nt, Artificial Sequence
  Description of Artificial Sequence: Synthetic oligonucleotide
gucagaccaaugucccugg

SEQ ID NO: 2161909 - RNA, 19 nt, Artificial Sequence
  Description of Artificial Sequence: Synthetic oligonucleotide
ucacuuaaacgagcgcuca

SEQ ID NO: 2161910 - RNA, 19 nt, Artificial Sequence
  Description of Artificial Sequence: Synthetic oligonucleotide
ugauugggucuuugaagcu

SEQ ID NO: 2161911 - RNA, 19 nt, Artificial Sequence
  Description of Artificial Sequence: Synthetic oligonucleotide
accgugugcuccccagacc

SEQ ID NO: 2161912 - RNA, 19 nt, Artificial Sequence
  Description of Artificial Sequence: Synthetic oligonucleotide
cucauagcagcgggcaugg

SEQ ID NO: 2161913 - RNA, 19 nt, Artificial Sequence
  Description of Artificial Sequence: Synthetic oligonucleotide
uccugaauuccggauguac

SEQ ID NO: 2161914 - RNA, 19 nt, Artificial Sequence
  Description of Artificial Sequence: Synthetic oligonucleotide
ccugaauuccggauguacc

SEQ ID NO: 2161915 - RNA, 19 nt, Artificial Sequence
  Description of Artificial Sequence: Synthetic oligonucleotide
ucuugacauccucuuguau

SEQ ID NO: 2161916 - RNA, 19 nt, Artificial Sequence
  Description of Artificial Sequence: Synthetic oligonucleotide
ggaagggugcauguguugg

SEQ ID NO: 2161917 - RNA, 19 nt, Artificial Sequence
  Description of Artificial Sequence: Synthetic oligonucleotide
gucaggucacuuaaacgag

SEQ ID NO: 2161918 - RNA, 19 nt, Artificial Sequence
  Description of Artificial Sequence: Synthetic oligonucleotide
aagguucuuauggccaccu

SEQ ID NO: 2161919 - RNA, 19 nt, Artificial Sequence
  Description of Artificial Sequence: Synthetic oligonucleotide
aggaccguauagugccugg

SEQ ID NO: 2161920 - RNA, 19 nt, Artificial Sequence
  Description of Artificial Sequence: Synthetic oligonucleotide
ucacugaaucaauacccua

SEQ ID NO: 2161921 - RNA, 19 nt, Artificial Sequence
  Description of Artificial Sequence: Synthetic oligonucleotide
ucccggagccccuccaggg

SEQ ID NO: 2161922 - RNA, 19 nt, Artificial Sequence
  Description of Artificial Sequence: Synthetic oligonucleotide
uaaccacugcagcauccca

SEQ ID NO: 2161923 - RNA, 19 nt, Artificial Sequence
  Description of Artificial Sequence: Synthetic oligonucleotide
auugccaguuuuaaccacu

SEQ ID NO: 2161924 - RNA, 19 nt, Artificial Sequence
  Description of Artificial Sequence: Synthetic oligonucleotide
acagcuuauguggauuugu

SEQ ID NO: 2161925 - RNA, 19 nt, Artificial Sequence
  Description of Artificial Sequence: Synthetic oligonucleotide
uggucaggauaccuucacu

SEQ ID NO: 2161926 - RNA, 19 nt, Artificial Sequence
  Description of Artificial Sequence: Synthetic oligonucleotide
uccagggcaagguucuuau

SEQ ID NO: 2161927 - RNA, 19 nt, Artificial Sequence
  Description of Artificial Sequence: Synthetic oligonucleotide
auggcucugcuucuugaca

SEQ ID NO: 2161928 - RNA, 19 nt, Artificial Sequence
  Description of Artificial Sequence: Synthetic oligonucleotide
uugaagcuagcuggggccc

SEQ ID NO: 2161929 - RNA, 19 nt, Artificial Sequence
  Description of Artificial Sequence: Synthetic oligonucleotide
uaggccggcgcugaggccc

SEQ ID NO: 2161930 - RNA, 19 nt, Artificial Sequence
  Description of Artificial Sequence: Synthetic oligonucleotide
gcuccccagaccaacaugg

SEQ ID NO: 2161931 - RNA, 19 nt, Artificial Sequence
  Description of Artificial Sequence: Synthetic oligonucleotide
ccccagaccaacauggggc

SEQ ID NO: 2161932 - RNA, 19 nt, Artificial Sequence
  Description of Artificial Sequence: Synthetic oligonucleotide
cauguguugggcccacaug

SEQ ID NO: 2161933 - RNA, 19 nt, Artificial Sequence
  Description of Artificial Sequence: Synthetic oligonucleotide
aaugucccuggggucuggg

SEQ ID NO: 2161934 - RNA, 19 nt, Artificial Sequence
  Description of Artificial Sequence: Synthetic oligonucleotide
agcggugccuggcugggag

SEQ ID NO: 2161935 - RNA, 19 nt, Artificial Sequence
  Description of Artificial Sequence: Synthetic oligonucleotide
acuccucgagugcgggagc

SEQ ID NO: 2161936 - RNA, 19 nt, Artificial Sequence
  Description of Artificial Sequence: Synthetic oligonucleotide
uggaagcauaggccggcgc

SEQ ID NO: 2161937 - RNA, 19 nt, Artificial Sequence
  Description of Artificial Sequence: Synthetic oligonucleotide
uaccaauugccaguuuuaa

SEQ ID NO: 2161938 - RNA, 19 nt, Artificial Sequence
  Description of Artificial Sequence: Synthetic oligonucleotide
ccaagagcaaccacauccc

SEQ ID NO: 2161939 - RNA, 19 nt, Artificial Sequence
  Description of Artificial Sequence: Synthetic oligonucleotide
gcgucaggucacuuaaacg

SEQ ID NO: 2161940 - RNA, 19 nt, Artificial Sequence
  Description of Artificial Sequence: Synthetic oligonucleotide
aaacuccucgagugcggga

SEQ ID NO: 2161941 - RNA, 19 nt, Artificial Sequence
  Description of Artificial Sequence: Synthetic oligonucleotide
gaucaagcagcugucccuc

SEQ ID NO: 2161942 - RNA, 19 nt, Artificial Sequence
  Description of Artificial Sequence: Synthetic oligonucleotide
ucagcgaggucgaccgugu

SEQ ID NO: 2161943 - RNA, 19 nt, Artificial Sequence
  Description of Artificial Sequence: Synthetic oligonucleotide
uggggucuggggaaucaga

SEQ ID NO: 2161944 - RNA, 19 nt, Artificial Sequence
  Description of Artificial Sequence: Synthetic oligonucleotide
agcuccagaaagucacaga

SEQ ID NO: 2161945 - RNA, 19 nt, Artificial Sequence
  Description of Artificial Sequence: Synthetic oligonucleotide
ccaacauggggcuuaucag

SEQ ID NO: 2161946 - RNA, 19 nt, Artificial Sequence
  Description of Artificial Sequence: Synthetic oligonucleotide
ucgaccgugugcuccccag

SEQ ID NO: 2161947 - RNA, 19 nt, Artificial Sequence
  Description of Artificial Sequence: Synthetic oligonucleotide
aaacgagcgcucagcuccg

SEQ ID NO: 2161948 - RNA, 19 nt, Artificial Sequence
  Description of Artificial Sequence: Synthetic oligonucleotide
cuucuugacauccucuugu

SEQ ID NO: 2161949 - RNA, 19 nt, Artificial Sequence
  Description of Artificial Sequence: Synthetic oligonucleotide
caaauggcucugcuucuug

SEQ ID NO: 2161950 - RNA, 19 nt, Artificial Sequence
  Description of Artificial Sequence: Synthetic oligonucleotide
ucgagugcgggagcggugc

SEQ ID NO: 2161951 - RNA, 19 nt, Artificial Sequence
  Description of Artificial Sequence: Synthetic oligonucleotide
gaccgugugcuccccagac

SEQ ID NO: 2161952 - RNA, 19 nt, Artificial Sequence
  Description of Artificial Sequence: Synthetic oligonucleotide
gaggucgaccgugugcucc

SEQ ID NO: 2161953 - RNA, 19 nt, Artificial Sequence
  Description of Artificial Sequence: Synthetic oligonucleotide
gggcuuaucaggaaggguc

SEQ ID NO: 2161954 - RNA, 19 nt, Artificial Sequence
  Description of Artificial Sequence: Synthetic oligonucleotide
auacccuacccaucaguaa

SEQ ID NO: 2161955 - RNA, 19 nt, Artificial Sequence
  Description of Artificial Sequence: Synthetic oligonucleotide
cauaccugccggagacagg

SEQ ID NO: 2161956 - RNA, 19 nt, Artificial Sequence
  Description of Artificial Sequence: Synthetic oligonucleotide
ugucuugggcccagaucca

SEQ ID NO: 2161957 - RNA, 19 nt, Artificial Sequence
  Description of Artificial Sequence: Synthetic oligonucleotide
ggucuggggaaucagaacu

SEQ ID NO: 2161958 - RNA, 19 nt, Artificial Sequence
  Description of Artificial Sequence: Synthetic oligonucleotide
ggaugcaacauacucaaau

SEQ ID NO: 2161959 - RNA, 19 nt, Artificial Sequence
  Description of Artificial Sequence: Synthetic oligonucleotide
cgucaggucacuuaaacga

SEQ ID NO: 2161960 - RNA, 19 nt, Artificial Sequence
  Description of Artificial Sequence: Synthetic oligonucleotide
uguaccagucccggagccc

SEQ ID NO: 2161961 - RNA, 19 nt, Artificial Sequence
  Description of Artificial Sequence: Synthetic oligonucleotide
auaggccggcgcugaggcc

SEQ ID NO: 2161962 - RNA, 19 nt, Artificial Sequence
  Description of Artificial Sequence: Synthetic oligonucleotide
guaucuuuagaaaggugcu

SEQ ID NO: 2161963 - RNA, 19 nt, Artificial Sequence
  Description of Artificial Sequence: Synthetic oligonucleotide
agcaucccaggaugcaaca

SEQ ID NO: 2161964 - RNA, 19 nt, Artificial Sequence
  Description of Artificial Sequence: Synthetic oligonucleotide
agguucuuauggccaccuc

SEQ ID NO: 2161965 - RNA, 19 nt, Artificial Sequence
  Description of Artificial Sequence: Synthetic oligonucleotide
gucacuuaaacgagcgcuc

SEQ ID NO: 2161966 - RNA, 19 nt, Artificial Sequence
  Description of Artificial Sequence: Synthetic oligonucleotide
uagcuggggcccuucaguc

SEQ ID NO: 2161967 - RNA, 19 nt, Artificial Sequence
  Description of Artificial Sequence: Synthetic oligonucleotide
gauugggucuuugaagcua

SEQ ID NO: 2161968 - RNA, 19 nt, Artificial Sequence
  Description of Artificial Sequence: Synthetic oligonucleotide
caggcguccugugagauca

SEQ ID NO: 2161969 - RNA, 19 nt, Artificial Sequence
  Description of Artificial Sequence: Synthetic oligonucleotide
uagccuccugauugggucu

SEQ ID NO: 2161970 - RNA, 19 nt, Artificial Sequence
  Description of Artificial Sequence: Synthetic oligonucleotide
cuccccagaccaacauggg

SEQ ID NO: 2161971 - RNA, 19 nt, Artificial Sequence
  Description of Artificial Sequence: Synthetic oligonucleotide
cuccagaaagucacagaca

SEQ ID NO: 2161972 - RNA, 19 nt, Artificial Sequence
  Description of Artificial Sequence: Synthetic oligonucleotide
ccuacccaucaguaaaagc

SEQ ID NO: 2161973 - RNA, 19 nt, Artificial Sequence
  Description of Artificial Sequence: Synthetic oligonucleotide
cuaccaauugccaguuuua

SEQ ID NO: 2161974 - RNA, 19 nt, Artificial Sequence
  Description of Artificial Sequence: Synthetic oligonucleotide
gggcaagguucuuauggcc

SEQ ID NO: 2161975 - RNA, 19 nt, Artificial Sequence
  Description of Artificial Sequence: Synthetic oligonucleotide
gaauuccggauguaccagu

SEQ ID NO: 2161976 - RNA, 19 nt, Artificial Sequence
  Description of Artificial Sequence: Synthetic oligonucleotide
uagcagcgggcauggagga

SEQ ID NO: 2161977 - RNA, 19 nt, Artificial Sequence
  Description of Artificial Sequence: Synthetic oligonucleotide
uggcccauggccagauguc

SEQ ID NO: 2161978 - RNA, 19 nt, Artificial Sequence
  Description of Artificial Sequence: Synthetic oligonucleotide
aagcauaggccggcgcuga

SEQ ID NO: 2161979 - RNA, 19 nt, Artificial Sequence
  Description of Artificial Sequence: Synthetic oligonucleotide
uugcuggcaucuaccaauu

SEQ ID NO: 2161980 - RNA, 19 nt, Artificial Sequence
  Description of Artificial Sequence: Synthetic oligonucleotide
ggaagggucagaccaaugu

SEQ ID NO: 2161981 - RNA, 19 nt, Artificial Sequence
  Description of Artificial Sequence: Synthetic oligonucleotide
uccucuuguauagccuccu

SEQ ID NO: 2161982 - RNA, 19 nt, Artificial Sequence
  Description of Artificial Sequence: Synthetic oligonucleotide
gaccaaugucccugggguc

SEQ ID NO: 2161983 - RNA, 19 nt, Artificial Sequence
  Description of Artificial Sequence: Synthetic oligonucleotide
cuuccagugugaauagugu

SEQ ID NO: 2161984 - RNA, 19 nt, Artificial Sequence
  Description of Artificial Sequence: Synthetic oligonucleotide
gggguaucggacauccucc

SEQ ID NO: 2161985 - RNA, 19 nt, Artificial Sequence
  Description of Artificial Sequence: Synthetic oligonucleotide
gggugcauguguugggccc

SEQ ID NO: 2161986 - RNA, 19 nt, Artificial Sequence
  Description of Artificial Sequence: Synthetic oligonucleotide
cagcuccagaaagucacag

SEQ ID NO: 2161987 - RNA, 19 nt, Artificial Sequence
  Description of Artificial Sequence: Synthetic oligonucleotide
cucagcgaggucgaccgug

SEQ ID NO: 2161988 - RNA, 19 nt, Artificial Sequence
  Description of Artificial Sequence: Synthetic oligonucleotide
uagugucuugggcccagau

SEQ ID NO: 2161989 - RNA, 19 nt, Artificial Sequence
  Description of Artificial Sequence: Synthetic oligonucleotide
acgagcgcucagcuccggg

SEQ ID NO: 2161990 - RNA, 19 nt, Artificial Sequence
  Description of Artificial Sequence: Synthetic oligonucleotide
uaccugccggagacagggg

SEQ ID NO: 2161991 - RNA, 19 nt, Artificial Sequence
  Description of Artificial Sequence: Synthetic oligonucleotide
auaccuucacugaaucaau

SEQ ID NO: 2161992 - RNA, 19 nt, Artificial Sequence
  Description of Artificial Sequence: Synthetic oligonucleotide
gaggaccguauagugccug

SEQ ID NO: 2161993 - RNA, 19 nt, Artificial Sequence
  Description of Artificial Sequence: Synthetic oligonucleotide
gcagggguaucggacaucc

SEQ ID NO: 2161994 - RNA, 19 nt, Artificial Sequence
  Description of Artificial Sequence: Synthetic oligonucleotide
ggagguagccgagugggug

SEQ ID NO: 2161995 - RNA, 19 nt, Artificial Sequence
  Description of Artificial Sequence: Synthetic oligonucleotide
ccguguaguaucuuuagaa

SEQ ID NO: 2161996 - RNA, 19 nt, Artificial Sequence
  Description of Artificial Sequence: Synthetic oligonucleotide
ggucacuuaaacgagcgcu

SEQ ID NO: 2161997 - RNA, 19 nt, Artificial Sequence
  Description of Artificial Sequence: Synthetic oligonucleotide
gugagaucaagcagcuguc

SEQ ID NO: 2161998 - RNA, 19 nt, Artificial Sequence
  Description of Artificial Sequence: Synthetic oligonucleotide
uggagguagccgagugggu

SEQ ID NO: 2161999 - RNA, 19 nt, Artificial Sequence
  Description of Artificial Sequence: Synthetic oligonucleotide
cccacauguggaagcauag

SEQ ID NO: 2162000 - RNA, 19 nt, Artificial Sequence
  Description of Artificial Sequence: Synthetic oligonucleotide
aaauccccuuccaguguga

SEQ ID NO: 2162001 - RNA, 19 nt, Artificial Sequence
  Description of Artificial Sequence: Synthetic oligonucleotide
cuuaucaggaagggucaga

SEQ ID NO: 2162002 - RNA, 19 nt, Artificial Sequence
  Description of Artificial Sequence: Synthetic oligonucleotide
aggaaaccaaggaggacau

SEQ ID NO: 2162003 - RNA, 19 nt, Artificial Sequence
  Description of Artificial Sequence: Synthetic oligonucleotide
cagcgggcauggaggaagg

SEQ ID NO: 2162004 - RNA, 19 nt, Artificial Sequence
  Description of Artificial Sequence: Synthetic oligonucleotide
aagcuagcuggggcccuuc

SEQ ID NO: 2162005 - RNA, 19 nt, Artificial Sequence
  Description of Artificial Sequence: Synthetic oligonucleotide
ccaucaguaaaagcacccc

SEQ ID NO: 2162006 - RNA, 19 nt, Artificial Sequence
  Description of Artificial Sequence: Synthetic oligonucleotide
agugcgggagcggugccug

SEQ ID NO: 2162007 - RNA, 19 nt, Artificial Sequence
  Description of Artificial Sequence: Synthetic oligonucleotide
ggauaccuucacugaauca

SEQ ID NO: 2162008 - RNA, 19 nt, Artificial Sequence
  Description of Artificial Sequence: Synthetic oligonucleotide
cuccucgagugcgggagcg

SEQ ID NO: 2162009 - RNA, 19 nt, Artificial Sequence
  Description of Artificial Sequence: Synthetic oligonucleotide
ggcaagguucuuauggcca

SEQ ID NO: 2162010 - RNA, 19 nt, Artificial Sequence
  Description of Artificial Sequence: Synthetic oligonucleotide
gcagcgggcauggaggaag

SEQ ID NO: 2162011 - RNA, 19 nt, Artificial Sequence
  Description of Artificial Sequence: Synthetic oligonucleotide
gcaucuaccaauugccagu

SEQ ID NO: 2162012 - RNA, 19 nt, Artificial Sequence
  Description of Artificial Sequence: Synthetic oligonucleotide
aucaagcagcugucccuca

SEQ ID NO: 2162013 - RNA, 19 nt, Artificial Sequence
  Description of Artificial Sequence: Synthetic oligonucleotide
ggguuuugcuggcaucuac

SEQ ID NO: 2162014 - RNA, 19 nt, Artificial Sequence
  Description of Artificial Sequence: Synthetic oligonucleotide
cuggggaaucagaacugga

SEQ ID NO: 2162015 - RNA, 19 nt, Artificial Sequence
  Description of Artificial Sequence: Synthetic oligonucleotide
cacagcuuauguggauuug

SEQ ID NO: 2162016 - RNA, 19 nt, Artificial Sequence
  Description of Artificial Sequence: Synthetic oligonucleotide
gaauagugucuugggccca

SEQ ID NO: 2162017 - RNA, 19 nt, Artificial Sequence
  Description of Artificial Sequence: Synthetic oligonucleotide
aguccguguaguaucuuua

SEQ ID NO: 2162018 - RNA, 19 nt, Artificial Sequence
  Description of Artificial Sequence: Synthetic oligonucleotide
aacgagcgcucagcuccgg

SEQ ID NO: 2162019 - RNA, 19 nt, Artificial Sequence
  Description of Artificial Sequence: Synthetic oligonucleotide
uccucgagugcgggagcgg

SEQ ID NO: 2162020 - RNA, 19 nt, Artificial Sequence
  Description of Artificial Sequence: Synthetic oligonucleotide
gggagcggugccuggcugg

SEQ ID NO: 2162021 - RNA, 19 nt, Artificial Sequence
  Description of Artificial Sequence: Synthetic oligonucleotide
cccucuacgcgucagguca

SEQ ID NO: 2162022 - RNA, 19 nt, Artificial Sequence
  Description of Artificial Sequence: Synthetic oligonucleotide
agcauaggccggcgcugag

SEQ ID NO: 2162023 - RNA, 19 nt, Artificial Sequence
  Description of Artificial Sequence: Synthetic oligonucleotide
ugaagcuagcuggggcccu

SEQ ID NO: 2162024 - RNA, 19 nt, Artificial Sequence
  Description of Artificial Sequence: Synthetic oligonucleotide
gguaucggacauccuccug

SEQ ID NO: 2162025 - RNA, 19 nt, Artificial Sequence
  Description of Artificial Sequence: Synthetic oligonucleotide
guggcccauggccagaugu

SEQ ID NO: 2162026 - RNA, 19 nt, Artificial Sequence
  Description of Artificial Sequence: Synthetic oligonucleotide
caauacccuacccaucagu

SEQ ID NO: 2162027 - RNA, 19 nt, Artificial Sequence
  Description of Artificial Sequence: Synthetic oligonucleotide
cagcugucccucaggacca

SEQ ID NO: 2162028 - RNA, 19 nt, Artificial Sequence
  Description of Artificial Sequence: Synthetic oligonucleotide
cucgagugcgggagcggug

SEQ ID NO: 2162029 - RNA, 19 nt, Artificial Sequence
  Description of Artificial Sequence: Synthetic oligonucleotide
ccauaccugccggagacag

SEQ ID NO: 2162030 - RNA, 19 nt, Artificial Sequence
  Description of Artificial Sequence: Synthetic oligonucleotide
aggccccauggccaguccu

SEQ ID NO: 2162031 - RNA, 19 nt, Artificial Sequence
  Description of Artificial Sequence: Synthetic oligonucleotide
gugccuggcugggaggacc

SEQ ID NO: 2162032 - RNA, 19 nt, Artificial Sequence
  Description of Artificial Sequence: Synthetic oligonucleotide
ggaagcauaggccggcgcu

SEQ ID NO: 2162033 - RNA, 19 nt, Artificial Sequence
  Description of Artificial Sequence: Synthetic oligonucleotide
ucccagggcucagcgaggu

SEQ ID NO: 2162034 - RNA, 19 nt, Artificial Sequence
  Description of Artificial Sequence: Synthetic oligonucleotide
ggcuuaucaggaaggguca

SEQ ID NO: 2162035 - RNA, 19 nt, Artificial Sequence
  Description of Artificial Sequence: Synthetic oligonucleotide
ggcgcugaggccccauggc

SEQ ID NO: 2162036 - RNA, 19 nt, Artificial Sequence
  Description of Artificial Sequence: Synthetic oligonucleotide
ugcgggagcggugccuggc

SEQ ID NO: 2162037 - RNA, 19 nt, Artificial Sequence
  Description of Artificial Sequence: Synthetic oligonucleotide
ccacauguggaagcauagg

SEQ ID NO: 2162038 - RNA, 19 nt, Artificial Sequence
  Description of Artificial Sequence: Synthetic oligonucleotide
ccccauaccugccggagac

SEQ ID NO: 2162039 - RNA, 19 nt, Artificial Sequence
  Description of Artificial Sequence: Synthetic oligonucleotide
cguguaguaucuuuagaaa

SEQ ID NO: 2162040 - RNA, 19 nt, Artificial Sequence
  Description of Artificial Sequence: Synthetic oligonucleotide
gugugcuccccagaccaac

SEQ ID NO: 2162041 - RNA, 19 nt, Artificial Sequence
  Description of Artificial Sequence: Synthetic oligonucleotide
guauagugccuggcccacc

SEQ ID NO: 2162042 - RNA, 19 nt, Artificial Sequence
  Description of Artificial Sequence: Synthetic oligonucleotide
aggaagggucagaccaaug

SEQ ID NO: 2162043 - RNA, 19 nt, Artificial Sequence
  Description of Artificial Sequence: Synthetic oligonucleotide
guggccuguggcccauggc

SEQ ID NO: 2162044 - RNA, 19 nt, Artificial Sequence
  Description of Artificial Sequence: Synthetic oligonucleotide
gcuuaucaggaagggucag

SEQ ID NO: 2162045 - RNA, 19 nt, Artificial Sequence
  Description of Artificial Sequence: Synthetic oligonucleotide
caggauaccuucacugaau

SEQ ID NO: 2162046 - RNA, 19 nt, Artificial Sequence
  Description of Artificial Sequence: Synthetic oligonucleotide
ggccaguccugaauuccgg

SEQ ID NO: 2162047 - RNA, 19 nt, Artificial Sequence
  Description of Artificial Sequence: Synthetic oligonucleotide
cuacgcgucaggucacuua

SEQ ID NO: 2162048 - RNA, 19 nt, Artificial Sequence
  Description of Artificial Sequence: Synthetic oligonucleotide
gcccagauccacugguaac

SEQ ID NO: 2162049 - RNA, 19 nt, Artificial Sequence
  Description of Artificial Sequence: Synthetic oligonucleotide
gcugugaaacuccucgagu

SEQ ID NO: 2162050 - RNA, 19 nt, Artificial Sequence
  Description of Artificial Sequence: Synthetic oligonucleotide
gcgcugaggccccauggcc

SEQ ID NO: 2162051 - RNA, 19 nt, Artificial Sequence
  Description of Artificial Sequence: Synthetic oligonucleotide
gaggccccauggccagucc

SEQ ID NO: 2162052 - RNA, 19 nt, Artificial Sequence
  Description of Artificial Sequence: Synthetic oligonucleotide
ccucauagcagcgggcaug

SEQ ID NO: 2162053 - RNA, 19 nt, Artificial Sequence
  Description of Artificial Sequence: Synthetic oligonucleotide
gcauaggccggcgcugagg

SEQ ID NO: 2162054 - RNA, 19 nt, Artificial Sequence
  Description of Artificial Sequence: Synthetic oligonucleotide
agccccuccagggcaaggu

SEQ ID NO: 2162055 - RNA, 19 nt, Artificial Sequence
  Description of Artificial Sequence: Synthetic oligonucleotide
ccggauguaccagucccgg

SEQ ID NO: 2162056 - RNA, 19 nt, Artificial Sequence
  Description of Artificial Sequence: Synthetic oligonucleotide
aucccagggcucagcgagg

SEQ ID NO: 2162057 - RNA, 19 nt, Artificial Sequence
  Description of Artificial Sequence: Synthetic oligonucleotide
uggcugggaggaccguaua

SEQ ID NO: 2162058 - RNA, 19 nt, Artificial Sequence
  Description of Artificial Sequence: Synthetic oligonucleotide
cgcgucaggucacuuaaac

SEQ ID NO: 2162059 - RNA, 19 nt, Artificial Sequence
  Description of Artificial Sequence: Synthetic oligonucleotide
agcgggcauggaggaaggg

SEQ ID NO: 2162060 - RNA, 19 nt, Artificial Sequence
  Description of Artificial Sequence: Synthetic oligonucleotide
gggauacaggaaguccgug

SEQ ID NO: 2162061 - RNA, 19 nt, Artificial Sequence
  Description of Artificial Sequence: Synthetic oligonucleotide
caaugucccuggggucugg

SEQ ID NO: 2162062 - RNA, 19 nt, Artificial Sequence
  Description of Artificial Sequence: Synthetic oligonucleotide
ucuacgcgucaggucacuu

SEQ ID NO: 2162063 - RNA, 19 nt, Artificial Sequence
  Description of Artificial Sequence: Synthetic oligonucleotide
cgagcgcucagcuccgggg

SEQ ID NO: 2162064 - RNA, 19 nt, Artificial Sequence
  Description of Artificial Sequence: Synthetic oligonucleotide
aucuaccaauugccaguuu

SEQ ID NO: 2162065 - RNA, 19 nt, Artificial Sequence
  Description of Artificial Sequence: Synthetic oligonucleotide
cagaccaacauggggcuua

SEQ ID NO: 2162066 - RNA, 19 nt, Artificial Sequence
  Description of Artificial Sequence: Synthetic oligonucleotide
ccgugugcuccccagacca

SEQ ID NO: 2162067 - RNA, 19 nt, Artificial Sequence
  Description of Artificial Sequence: Synthetic oligonucleotide
ggaccguauagugccuggc

SEQ ID NO: 2162068 - RNA, 19 nt, Artificial Sequence
  Description of Artificial Sequence: Synthetic oligonucleotide
cagauccacugguaacaaa

SEQ ID NO: 2162069 - RNA, 19 nt, Artificial Sequence
  Description of Artificial Sequence: Synthetic oligonucleotide
ggagcggugccuggcuggg

SEQ ID NO: 2162070 - RNA, 19 nt, Artificial Sequence
  Description of Artificial Sequence: Synthetic oligonucleotide
ccaccucauagcagcgggc

SEQ ID NO: 2162071 - RNA, 19 nt, Artificial Sequence
  Description of Artificial Sequence: Synthetic oligonucleotide
auagugucuugggcccaga

SEQ ID NO: 2162072 - RNA, 19 nt, Artificial Sequence
  Description of Artificial Sequence: Synthetic oligonucleotide
ggcccagauccacugguaa

SEQ ID NO: 2162073 - RNA, 19 nt, Artificial Sequence
  Description of Artificial Sequence: Synthetic oligonucleotide
ugcauguguugggcccaca

SEQ ID NO: 2162074 - RNA, 19 nt, Artificial Sequence
  Description of Artificial Sequence: Synthetic oligonucleotide
ccguauagugccuggccca

SEQ ID NO: 2162075 - RNA, 19 nt, Artificial Sequence
  Description of Artificial Sequence: Synthetic oligonucleotide
gaggaagggugcauguguu

SEQ ID NO: 2162076 - RNA, 19 nt, Artificial Sequence
  Description of Artificial Sequence: Synthetic oligonucleotide
ggggucuggggaaucagaa

SEQ ID NO: 2162077 - RNA, 19 nt, Artificial Sequence
  Description of Artificial Sequence: Synthetic oligonucleotide
gugcgggagcggugccugg

SEQ ID NO: 2162078 - RNA, 19 nt, Artificial Sequence
  Description of Artificial Sequence: Synthetic oligonucleotide
cagaugucaccugaggguu

SEQ ID NO: 2162079 - RNA, 19 nt, Artificial Sequence
  Description of Artificial Sequence: Synthetic oligonucleotide
cagcuuauguggauuuguu

SEQ ID NO: 2162080 - RNA, 19 nt, Artificial Sequence
  Description of Artificial Sequence: Synthetic oligonucleotide
ggcguccugugagaucaag

SEQ ID NO: 2162081 - RNA, 19 nt, Artificial Sequence
  Description of Artificial Sequence: Synthetic oligonucleotide
agaugucaccugaggguuu

SEQ ID NO: 2162082 - RNA, 19 nt, Artificial Sequence
  Description of Artificial Sequence: Synthetic oligonucleotide
ggaaaccaaggaggacaug

SEQ ID NO: 2162083 - RNA, 19 nt, Artificial Sequence
  Description of Artificial Sequence: Synthetic oligonucleotide
cccuacccaucaguaaaag

SEQ ID NO: 2162084 - RNA, 19 nt, Artificial Sequence
  Description of Artificial Sequence: Synthetic oligonucleotide
ggacaugauguggccugug

SEQ ID NO: 2162085 - RNA, 19 nt, Artificial Sequence
  Description of Artificial Sequence: Synthetic oligonucleotide
cugaggguuuugcuggcau

SEQ ID NO: 2162086 - RNA, 19 nt, Artificial Sequence
  Description of Artificial Sequence: Synthetic oligonucleotide
cagcgaggucgaccgugug

SEQ ID NO: 2162087 - RNA, 19 nt, Artificial Sequence
  Description of Artificial Sequence: Synthetic oligonucleotide
aggaugcaacauacucaaa

SEQ ID NO: 2162088 - RNA, 19 nt, Artificial Sequence
  Description of Artificial Sequence: Synthetic oligonucleotide
ggcauggaggaagggugca

SEQ ID NO: 2162089 - RNA, 19 nt, Artificial Sequence
  Description of Artificial Sequence: Synthetic oligonucleotide
gucgaccgugugcucccca

SEQ ID NO: 2162090 - RNA, 19 nt, Artificial Sequence
  Description of Artificial Sequence: Synthetic oligonucleotide
ccucuacgcgucaggucac

SEQ ID NO: 2162091 - RNA, 19 nt, Artificial Sequence
  Description of Artificial Sequence: Synthetic oligonucleotide
gugcauguguugggcccac

SEQ ID NO: 2162092 - RNA, 19 nt, Artificial Sequence
  Description of Artificial Sequence: Synthetic oligonucleotide
caucuaccaauugccaguu

SEQ ID NO: 2162093 - RNA, 19 nt, Artificial Sequence
  Description of Artificial Sequence: Synthetic oligonucleotide
ggguaucggacauccuccu

SEQ ID NO: 2162094 - RNA, 19 nt, Artificial Sequence
  Description of Artificial Sequence: Synthetic oligonucleotide
acauccuccugggcccaaa

SEQ ID NO: 2162095 - RNA, 19 nt, Artificial Sequence
  Description of Artificial Sequence: Synthetic oligonucleotide
cguauagugccuggcccac

SEQ ID NO: 2162096 - RNA, 19 nt, Artificial Sequence
  Description of Artificial Sequence: Synthetic oligonucleotide
cccggagccccuccagggc

SEQ ID NO: 2162097 - RNA, 19 nt, Artificial Sequence
  Description of Artificial Sequence: Synthetic oligonucleotide
gcauguguugggcccacau

SEQ ID NO: 2162098 - RNA, 19 nt, Artificial Sequence
  Description of Artificial Sequence: Synthetic oligonucleotide
agcagcgggcauggaggaa

SEQ ID NO: 2162099 - RNA, 19 nt, Artificial Sequence
  Description of Artificial Sequence: Synthetic oligonucleotide
ccaggcguccugugagauc

SEQ ID NO: 2162100 - RNA, 19 nt, Artificial Sequence
  Description of Artificial Sequence: Synthetic oligonucleotide
ccuccugauugggucuuug

SEQ ID NO: 2162101 - RNA, 19 nt, Artificial Sequence
  Description of Artificial Sequence: Synthetic oligonucleotide
gggcccacauguggaagca

SEQ ID NO: 2162102 - RNA, 19 nt, Artificial Sequence
  Description of Artificial Sequence: Synthetic oligonucleotide
ccccucuacgcgucagguc

SEQ ID NO: 2162103 - RNA, 19 nt, Artificial Sequence
  Description of Artificial Sequence: Synthetic oligonucleotide
gagugcgggagcggugccu

SEQ ID NO: 2162104 - RNA, 19 nt, Artificial Sequence
  Description of Artificial Sequence: Synthetic oligonucleotide
cccagaccaacauggggcu

SEQ ID NO: 2162105 - RNA, 19 nt, Artificial Sequence
  Description of Artificial Sequence: Synthetic oligonucleotide
ccacaucccagggcucagc

SEQ ID NO: 2162106 - RNA, 19 nt, Artificial Sequence
  Description of Artificial Sequence: Synthetic oligonucleotide
acgcgucaggucacuuaaa

SEQ ID NO: 2162107 - RNA, 19 nt, Artificial Sequence
  Description of Artificial Sequence: Synthetic oligonucleotide
ggggcuuaucaggaagggu

SEQ ID NO: 2162108 - RNA, 19 nt, Artificial Sequence
  Description of Artificial Sequence: Synthetic oligonucleotide
gcucccuggucaggauacc

SEQ ID NO: 2162109 - RNA, 19 nt, Artificial Sequence
  Description of Artificial Sequence: Synthetic oligonucleotide
agcugucccucaggaccaa

SEQ ID NO: 2162110 - RNA, 19 nt, Artificial Sequence
  Description of Artificial Sequence: Synthetic oligonucleotide
ccggagccccuccagggca

SEQ ID NO: 2162111 - RNA, 19 nt, Artificial Sequence
  Description of Artificial Sequence: Synthetic oligonucleotide
ggugccuggcugggaggac

SEQ ID NO: 2162112 - RNA, 19 nt, Artificial Sequence
  Description of Artificial Sequence: Synthetic oligonucleotide
ggucgaccgugugcucccc

SEQ ID NO: 2162113 - RNA, 19 nt, Artificial Sequence
  Description of Artificial Sequence: Synthetic oligonucleotide
ggacauccuccugggccca

SEQ ID NO: 2162114 - RNA, 19 nt, Artificial Sequence
  Description of Artificial Sequence: Synthetic oligonucleotide
cagggguaucggacauccu

SEQ ID NO: 2162115 - RNA, 19 nt, Artificial Sequence
  Description of Artificial Sequence: Synthetic oligonucleotide
cucuacgcgucaggucacu

SEQ ID NO: 2162116 - RNA, 19 nt, Artificial Sequence
  Description of Artificial Sequence: Synthetic oligonucleotide
cgagugcgggagcggugcc

SEQ ID NO: 2162117 - RNA, 19 nt, Artificial Sequence
  Description of Artificial Sequence: Synthetic oligonucleotide
ggaggaccguauagugccu

SEQ ID NO: 2162118 - RNA, 19 nt, Artificial Sequence
  Description of Artificial Sequence: Synthetic oligonucleotide
cggauguaccagucccgga

SEQ ID NO: 2162119 - RNA, 19 nt, Artificial Sequence
  Description of Artificial Sequence: Synthetic oligonucleotide
ccggcgcugaggccccaug

SEQ ID NO: 2162120 - RNA, 19 nt, Artificial Sequence
  Description of Artificial Sequence: Synthetic oligonucleotide
cagcuggagguagccgagu

SEQ ID NO: 2162121 - RNA, 19 nt, Artificial Sequence
  Description of Artificial Sequence: Synthetic oligonucleotide
aggcguccugugagaucaa

SEQ ID NO: 2162122 - RNA, 19 nt, Artificial Sequence
  Description of Artificial Sequence: Synthetic oligonucleotide
cgaggucgaccgugugcuc

SEQ ID NO: 2162123 - RNA, 19 nt, Artificial Sequence
  Description of Artificial Sequence: Synthetic oligonucleotide
gcgggagcggugccuggcu

SEQ ID NO: 2162124 - RNA, 19 nt, Artificial Sequence
  Description of Artificial Sequence: Synthetic oligonucleotide
cccauaccugccggagaca

SEQ ID NO: 2162125 - RNA, 19 nt, Artificial Sequence
  Description of Artificial Sequence: Synthetic oligonucleotide
cccagggcucagcgagguc

SEQ ID NO: 2162126 - RNA, 19 nt, Artificial Sequence
  Description of Artificial Sequence: Synthetic oligonucleotide
gccaggcguccugugagau

SEQ ID NO: 2162127 - RNA, 19 nt, Artificial Sequence
  Description of Artificial Sequence: Synthetic oligonucleotide
ccucgagugcgggagcggu

SEQ ID NO: 2162128 - RNA, 19 nt, Artificial Sequence
  Description of Artificial Sequence: Synthetic oligonucleotide
cgaccgugugcuccccaga

SEQ ID NO: 2162129 - RNA, 19 nt, Artificial Sequence
  Description of Artificial Sequence: Synthetic oligonucleotide
cgugugcuccccagaccaa

SEQ ID NO: 2162130 - RNA, 19 nt, Artificial Sequence
  Description of Artificial Sequence: Synthetic oligonucleotide
gcucagcgaggucgaccgu

SEQ ID NO: 2162131 - RNA, 19 nt, Artificial Sequence
  Description of Artificial Sequence: Synthetic oligonucleotide
gccccuccagggcaagguu

SEQ ID NO: 2162132 - RNA, 19 nt, Artificial Sequence
  Description of Artificial Sequence: Synthetic oligonucleotide
ggcccacauguggaagcau

SEQ ID NO: 2162133 - RNA, 19 nt, Artificial Sequence
  Description of Artificial Sequence: Synthetic oligonucleotide
gccuccugauugggucuuu

SEQ ID NO: 2162134 - RNA, 19 nt, Artificial Sequence
  Description of Artificial Sequence: Synthetic oligonucleotide
gccggcgcugaggccccau

SEQ ID NO: 2162135 - RNA, 19 nt, Artificial Sequence
  Description of Artificial Sequence: Synthetic oligonucleotide
aauagaaauauucacacuc

SEQ ID NO: 2162136 - RNA, 19 nt, Artificial Sequence
  Description of Artificial Sequence: Synthetic oligonucleotide
aauauucacacucugcuuc

SEQ ID NO: 2162137 - RNA, 19 nt, Artificial Sequence
  Description of Artificial Sequence: Synthetic oligonucleotide
aaagcauaaaaccaucuuc

SEQ ID NO: 2162138 - RNA, 19 nt, Artificial Sequence
  Description of Artificial Sequence: Synthetic oligonucleotide
gaugaaacacuucacaugg

SEQ ID NO: 2162139 - RNA, 19 nt, Artificial Sequence
  Description of Artificial Sequence: Synthetic oligonucleotide
accaauauugucuauauuc

SEQ ID NO: 2162140 - RNA, 19 nt, Artificial Sequence
  Description of Artificial Sequence: Synthetic oligonucleotide
auuuguacauaaucaaucc

SEQ ID NO: 2162141 - RNA, 19 nt, Artificial Sequence
  Description of Artificial Sequence: Synthetic oligonucleotide
agaacuauuuuccaucccc

SEQ ID NO: 2162142 - RNA, 19 nt, Artificial Sequence
  Description of Artificial Sequence: Synthetic oligonucleotide
ucugcuaacaauacuaagc

SEQ ID NO: 2162143 - RNA, 19 nt, Artificial Sequence
  Description of Artificial Sequence: Synthetic oligonucleotide
aaacuguaccacuuguugc

SEQ ID NO: 2162144 - RNA, 19 nt, Artificial Sequence
  Description of Artificial Sequence: Synthetic oligonucleotide
agcauauaaccuuucaccc

SEQ ID NO: 2162145 - RNA, 19 nt, Artificial Sequence
  Description of Artificial Sequence: Synthetic oligonucleotide
uaaccuuucacccagacaa

SEQ ID NO: 2162146 - RNA, 19 nt, Artificial Sequence
  Description of Artificial Sequence: Synthetic oligonucleotide
aucaagauggcucaucagc

SEQ ID NO: 2162147 - RNA, 19 nt, Artificial Sequence
  Description of Artificial Sequence: Synthetic oligonucleotide
aaccaauuuguacauaauc

SEQ ID NO: 2162148 - RNA, 19 nt, Artificial Sequence
  Description of Artificial Sequence: Synthetic oligonucleotide
cuucaaauugccauuaugc

SEQ ID NO: 2162149 - RNA, 19 nt, Artificial Sequence
  Description of Artificial Sequence: Synthetic oligonucleotide
aacaauacuaagcaaggga

SEQ ID NO: 2162150 - RNA, 19 nt, Artificial Sequence
  Description of Artificial Sequence: Synthetic oligonucleotide
auuucagacacucaaacca

SEQ ID NO: 2162151 - RNA, 19 nt, Artificial Sequence
  Description of Artificial Sequence: Synthetic oligonucleotide
ugaguuacagauuaagaug

SEQ ID NO: 2162152 - RNA, 19 nt, Artificial Sequence
  Description of Artificial Sequence: Synthetic oligonucleotide
gagaauaaccuucaggggc

SEQ ID NO: 2162153 - RNA, 19 nt, Artificial Sequence
  Description of Artificial Sequence: Synthetic oligonucleotide
uuuuccuuagcuauuucag

SEQ ID NO: 2162154 - RNA, 19 nt, Artificial Sequence
  Description of Artificial Sequence: Synthetic oligonucleotide
aggaaaaccaauuuguaca

SEQ ID NO: 2162155 - RNA, 19 nt, Artificial Sequence
  Description of Artificial Sequence: Synthetic oligonucleotide
acagauuaagaugaaacac

SEQ ID NO: 2162156 - RNA, 19 nt, Artificial Sequence
  Description of Artificial Sequence: Synthetic oligonucleotide
aggacuuucauuuguagag

SEQ ID NO: 2162157 - RNA, 19 nt, Artificial Sequence
  Description of Artificial Sequence: Synthetic oligonucleotide
aagacaagccaacaaagca

SEQ ID NO: 2162158 - RNA, 19 nt, Artificial Sequence
  Description of Artificial Sequence: Synthetic oligonucleotide
gaucagcagauucaaagcg

SEQ ID NO: 2162159 - RNA, 19 nt, Artificial Sequence
  Description of Artificial Sequence: Synthetic oligonucleotide
aucaacuugaguuacagau

SEQ ID NO: 2162160 - RNA, 19 nt, Artificial Sequence
  Description of Artificial Sequence: Synthetic oligonucleotide
uagugaaugagcuucaggu

SEQ ID NO: 2162161 - RNA, 19 nt, Artificial Sequence
  Description of Artificial Sequence: Synthetic oligonucleotide
aauaccugcuaacuaagca

SEQ ID NO: 2162162 - RNA, 19 nt, Artificial Sequence
  Description of Artificial Sequence: Synthetic oligonucleotide
aaucccaggacuuucauuu

SEQ ID NO: 2162163 - RNA, 19 nt, Artificial Sequence
  Description of Artificial Sequence: Synthetic oligonucleotide
ucgaauuagugaaugagcu

SEQ ID NO: 2162164 - RNA, 19 nt, Artificial Sequence
  Description of Artificial Sequence: Synthetic oligonucleotide
uguacauaaucaaucccag

SEQ ID NO: 2162165 - RNA, 19 nt, Artificial Sequence
  Description of Artificial Sequence: Synthetic oligonucleotide
agcuaaaucacgcugguca

SEQ ID NO: 2162166 - RNA, 19 nt, Artificial Sequence
  Description of Artificial Sequence: Synthetic oligonucleotide
uugaguuacagauuaagau

SEQ ID NO: 2162167 - RNA, 19 nt, Artificial Sequence
  Description of Artificial Sequence: Synthetic oligonucleotide
uuuguacauaaucaauccc

SEQ ID NO: 2162168 - RNA, 19 nt, Artificial Sequence
  Description of Artificial Sequence: Synthetic oligonucleotide
acauaaucaaucccaggac

SEQ ID NO: 2162169 - RNA, 19 nt, Artificial Sequence
  Description of Artificial Sequence: Synthetic oligonucleotide
cagcauauaaccuuucacc

SEQ ID NO: 2162170 - RNA, 19 nt, Artificial Sequence
  Description of Artificial Sequence: Synthetic oligonucleotide
uacagauuaagaugaaaca

SEQ ID NO: 2162171 - RNA, 19 nt, Artificial Sequence
  Description of Artificial Sequence: Synthetic oligonucleotide
aacuaagcagaucagcaga

SEQ ID NO: 2162172 - RNA, 19 nt, Artificial Sequence
  Description of Artificial Sequence: Synthetic oligonucleotide
ucagcagauucaaagcggg

SEQ ID NO: 2162173 - RNA, 19 nt, Artificial Sequence
  Description of Artificial Sequence: Synthetic oligonucleotide
auuacucagauauuccaag

SEQ ID NO: 2162174 - RNA, 19 nt, Artificial Sequence
  Description of Artificial Sequence: Synthetic oligonucleotide
ugaaacacuucacauggug

SEQ ID NO: 2162175 - RNA, 19 nt, Artificial Sequence
  Description of Artificial Sequence: Synthetic oligonucleotide
aagaacuauuuuccauccc

SEQ ID NO: 2162176 - RNA, 19 nt, Artificial Sequence
  Description of Artificial Sequence: Synthetic oligonucleotide
gacacucaaaccaauauug

SEQ ID NO: 2162177 - RNA, 19 nt, Artificial Sequence
  Description of Artificial Sequence: Synthetic oligonucleotide
aucaauuugggcuaccaca

SEQ ID NO: 2162178 - RNA, 19 nt, Artificial Sequence
  Description of Artificial Sequence: Synthetic oligonucleotide
uuagugaaugagcuucagg

SEQ ID NO: 2162179 - RNA, 19 nt, Artificial Sequence
  Description of Artificial Sequence: Synthetic oligonucleotide
agacacuaguaacuguugc

SEQ ID NO: 2162180 - RNA, 19 nt, Artificial Sequence
  Description of Artificial Sequence: Synthetic oligonucleotide
auaccugcuaacuaagcag

SEQ ID NO: 2162181 - RNA, 19 nt, Artificial Sequence
  Description of Artificial Sequence: Synthetic oligonucleotide
aauacuaagcaagggagga

SEQ ID NO: 2162182 - RNA, 19 nt, Artificial Sequence
  Description of Artificial Sequence: Synthetic oligonucleotide
agcauaaaaccaucuuccc

SEQ ID NO: 2162183 - RNA, 19 nt, Artificial Sequence
  Description of Artificial Sequence: Synthetic oligonucleotide
gaaguguuggagaauaacc

SEQ ID NO: 2162184 - RNA, 19 nt, Artificial Sequence
  Description of Artificial Sequence: Synthetic oligonucleotide
agaaauauucacacucugc

SEQ ID NO: 2162185 - RNA, 19 nt, Artificial Sequence
  Description of Artificial Sequence: Synthetic oligonucleotide
accaauuacucagauauuc

SEQ ID NO: 2162186 - RNA, 19 nt, Artificial Sequence
  Description of Artificial Sequence: Synthetic oligonucleotide
gaauuagugaaugagcuuc

SEQ ID NO: 2162187 - RNA, 19 nt, Artificial Sequence
  Description of Artificial Sequence: Synthetic oligonucleotide
agagcaucuucuugcaagc

SEQ ID NO: 2162188 - RNA, 19 nt, Artificial Sequence
  Description of Artificial Sequence: Synthetic oligonucleotide
cauauaaccuuucacccag

SEQ ID NO: 2162189 - RNA, 19 nt, Artificial Sequence
  Description of Artificial Sequence: Synthetic oligonucleotide
gacuuucauuuguagaggg

SEQ ID NO: 2162190 - RNA, 19 nt, Artificial Sequence
  Description of Artificial Sequence: Synthetic oligonucleotide
acuucuucggaucaauuug

SEQ ID NO: 2162191 - RNA, 19 nt, Artificial Sequence
  Description of Artificial Sequence: Synthetic oligonucleotide
uauuucagacacucaaacc

SEQ ID NO: 2162192 - RNA, 19 nt, Artificial Sequence
  Description of Artificial Sequence: Synthetic oligonucleotide
acuauuuuccauccccagg

SEQ ID NO: 2162193 - RNA, 19 nt, Artificial Sequence
  Description of Artificial Sequence: Synthetic oligonucleotide
cagauuuuggcauugucac

SEQ ID NO: 2162194 - RNA, 19 nt, Artificial Sequence
  Description of Artificial Sequence: Synthetic oligonucleotide
ucuucaaauugccauuaug

SEQ ID NO: 2162195 - RNA, 19 nt, Artificial Sequence
  Description of Artificial Sequence: Synthetic oligonucleotide
acaauacuaagcaagggag

SEQ ID NO: 2162196 - RNA, 19 nt, Artificial Sequence
  Description of Artificial Sequence: Synthetic oligonucleotide
gaguaaaaucucuuucucc

SEQ ID NO: 2162197 - RNA, 19 nt, Artificial Sequence
  Description of Artificial Sequence: Synthetic oligonucleotide
uuaagaugaaacacuucac

SEQ ID NO: 2162198 - RNA, 19 nt, Artificial Sequence
  Description of Artificial Sequence: Synthetic oligonucleotide
acaaccguggcaucaacuc

SEQ ID NO: 2162199 - RNA, 19 nt, Artificial Sequence
  Description of Artificial Sequence: Synthetic oligonucleotide
ucuauauucugaauaucaa

SEQ ID NO: 2162200 - RNA, 19 nt, Artificial Sequence
  Description of Artificial Sequence: Synthetic oligonucleotide
ugucgaauuagugaaugag

SEQ ID NO: 2162201 - RNA, 19 nt, Artificial Sequence
  Description of Artificial Sequence: Synthetic oligonucleotide
ucaagauggcucaucagcu

SEQ ID NO: 2162202 - RNA, 19 nt, Artificial Sequence
  Description of Artificial Sequence: Synthetic oligonucleotide
uuagcuauuucagacacuc

SEQ ID NO: 2162203 - RNA, 19 nt, Artificial Sequence
  Description of Artificial Sequence: Synthetic oligonucleotide
aacuauuuuccauccccag

SEQ ID NO: 2162204 - RNA, 19 nt, Artificial Sequence
  Description of Artificial Sequence: Synthetic oligonucleotide
uaacuaagcagaucagcag

SEQ ID NO: 2162205 - RNA, 19 nt, Artificial Sequence
  Description of Artificial Sequence: Synthetic oligonucleotide
ucaauuugggcuaccacaa

SEQ ID NO: 2162206 - RNA, 19 nt, Artificial Sequence
  Description of Artificial Sequence: Synthetic oligonucleotide
aagcugucgaauuagugaa

SEQ ID NO: 2162207 - RNA, 19 nt, Artificial Sequence
  Description of Artificial Sequence: Synthetic oligonucleotide
cuauuucagacacucaaac

SEQ ID NO: 2162208 - RNA, 19 nt, Artificial Sequence
  Description of Artificial Sequence: Synthetic oligonucleotide
uuuggcauugucacauugc

SEQ ID NO: 2162209 - RNA, 19 nt, Artificial Sequence
  Description of Artificial Sequence: Synthetic oligonucleotide
aaauaccugcuaacuaagc

SEQ ID NO: 2162210 - RNA, 19 nt, Artificial Sequence
  Description of Artificial Sequence: Synthetic oligonucleotide
cugaauaucaacuugaguu

SEQ ID NO: 2162211 - RNA, 19 nt, Artificial Sequence
  Description of Artificial Sequence: Synthetic oligonucleotide
cucaucagcuaaaucacgc

SEQ ID NO: 2162212 - RNA, 19 nt, Artificial Sequence
  Description of Artificial Sequence: Synthetic oligonucleotide
aaaauaccugcuaacuaag

SEQ ID NO: 2162213 - RNA, 19 nt, Artificial Sequence
  Description of Artificial Sequence: Synthetic oligonucleotide
ugauuucuaugcuuguuca

SEQ ID NO: 2162214 - RNA, 19 nt, Artificial Sequence
  Description of Artificial Sequence: Synthetic oligonucleotide
uuccuuagcuauuucagac

SEQ ID NO: 2162215 - RNA, 19 nt, Artificial Sequence
  Description of Artificial Sequence: Synthetic oligonucleotide
gacacuaguaacuguugcc

SEQ ID NO: 2162216 - RNA, 19 nt, Artificial Sequence
  Description of Artificial Sequence: Synthetic oligonucleotide
caauacuaagcaagggagg

SEQ ID NO: 2162217 - RNA, 19 nt, Artificial Sequence
  Description of Artificial Sequence: Synthetic oligonucleotide
uucugaauaucaacuugag

SEQ ID NO: 2162218 - RNA, 19 nt, Artificial Sequence
  Description of Artificial Sequence: Synthetic oligonucleotide
caagaacuauuuuccaucc

SEQ ID NO: 2162219 - RNA, 19 nt, Artificial Sequence
  Description of Artificial Sequence: Synthetic oligonucleotide
ucuaugcuuguucacacuc

SEQ ID NO: 2162220 - RNA, 19 nt, Artificial Sequence
  Description of Artificial Sequence: Synthetic oligonucleotide
gcuaacaauacuaagcaag

SEQ ID NO: 2162221 - RNA, 19 nt, Artificial Sequence
  Description of Artificial Sequence: Synthetic oligonucleotide
ucaaaauaccugcuaacua

SEQ ID NO: 2162222 - RNA, 19 nt, Artificial Sequence
  Description of Artificial Sequence: Synthetic oligonucleotide
cuaacuaagcagaucagca

SEQ ID NO: 2162223 - RNA, 19 nt, Artificial Sequence
  Description of Artificial Sequence: Synthetic oligonucleotide
ugucgaacagcugaaaacu

SEQ ID NO: 2162224 - RNA, 19 nt, Artificial Sequence
  Description of Artificial Sequence: Synthetic oligonucleotide
uugucuauauucugaauau

SEQ ID NO: 2162225 - RNA, 19 nt, Artificial Sequence
  Description of Artificial Sequence: Synthetic oligonucleotide
uacucagauauuccaagac

SEQ ID NO: 2162226 - RNA, 19 nt, Artificial Sequence
  Description of Artificial Sequence: Synthetic oligonucleotide
caagacaagccaacaaagc

SEQ ID NO: 2162227 - RNA, 19 nt, Artificial Sequence
  Description of Artificial Sequence: Synthetic oligonucleotide
ucuccaaaccaauuacuca

SEQ ID NO: 2162228 - RNA, 19 nt, Artificial Sequence
  Description of Artificial Sequence: Synthetic oligonucleotide
uaacaauacuaagcaaggg

SEQ ID NO: 2162229 - RNA, 19 nt, Artificial Sequence
  Description of Artificial Sequence: Synthetic oligonucleotide
uuuuggcauugucacauug

SEQ ID NO: 2162230 - RNA, 19 nt, Artificial Sequence
  Description of Artificial Sequence: Synthetic oligonucleotide
acucaaaccaauauugucu

SEQ ID NO: 2162231 - RNA, 19 nt, Artificial Sequence
  Description of Artificial Sequence: Synthetic oligonucleotide
aucacgcuggucaaaauac

SEQ ID NO: 2162232 - RNA, 19 nt, Artificial Sequence
  Description of Artificial Sequence: Synthetic oligonucleotide
aggagccuaacuucagagc

SEQ ID NO: 2162233 - RNA, 19 nt, Artificial Sequence
  Description of Artificial Sequence: Synthetic oligonucleotide
aacuucuucggaucaauuu

SEQ ID NO: 2162234 - RNA, 19 nt, Artificial Sequence
  Description of Artificial Sequence: Synthetic oligonucleotide
ucugaauaucaacuugagu

SEQ ID NO: 2162235 - RNA, 19 nt, Artificial Sequence
  Description of Artificial Sequence: Synthetic oligonucleotide
aaucaaucccaggacuuuc

SEQ ID NO: 2162236 - RNA, 19 nt, Artificial Sequence
  Description of Artificial Sequence: Synthetic oligonucleotide
aaucacgcuggucaaaaua

SEQ ID NO: 2162237 - RNA, 19 nt, Artificial Sequence
  Description of Artificial Sequence: Synthetic oligonucleotide
caaaauaccugcuaacuaa

SEQ ID NO: 2162238 - RNA, 19 nt, Artificial Sequence
  Description of Artificial Sequence: Synthetic oligonucleotide
auaucaacuugaguuacag

SEQ ID NO: 2162239 - RNA, 19 nt, Artificial Sequence
  Description of Artificial Sequence: Synthetic oligonucleotide
agcgggaacucuuucauca

SEQ ID NO: 2162240 - RNA, 19 nt, Artificial Sequence
  Description of Artificial Sequence: Synthetic oligonucleotide
uccgucaagucacagggcu

SEQ ID NO: 2162241 - RNA, 19 nt, Artificial Sequence
  Description of Artificial Sequence: Synthetic oligonucleotide
uggucaaaauaccugcuaa

SEQ ID NO: 2162242 - RNA, 19 nt, Artificial Sequence
  Description of Artificial Sequence: Synthetic oligonucleotide
auuaugcuuucucagacuu

SEQ ID NO: 2162243 - RNA, 19 nt, Artificial Sequence
  Description of Artificial Sequence: Synthetic oligonucleotide
uucugcuaacaauacuaag

SEQ ID NO: 2162244 - RNA, 19 nt, Artificial Sequence
  Description of Artificial Sequence: Synthetic oligonucleotide
uaccugcuaacuaagcaga

SEQ ID NO: 2162245 - RNA, 19 nt, Artificial Sequence
  Description of Artificial Sequence: Synthetic oligonucleotide
ucagguauuccugaggcgu

SEQ ID NO: 2162246 - RNA, 19 nt, Artificial Sequence
  Description of Artificial Sequence: Synthetic oligonucleotide
uucuucggaucaauuuggg

SEQ ID NO: 2162247 - RNA, 19 nt, Artificial Sequence
  Description of Artificial Sequence: Synthetic oligonucleotide
augagcuucagguaguaaa

SEQ ID NO: 2162248 - RNA, 19 nt, Artificial Sequence
  Description of Artificial Sequence: Synthetic oligonucleotide
uuuccuuagcuauuucaga

SEQ ID NO: 2162249 - RNA, 19 nt, Artificial Sequence
  Description of Artificial Sequence: Synthetic oligonucleotide
acaacgucuggacauugag

SEQ ID NO: 2162250 - RNA, 19 nt, Artificial Sequence
  Description of Artificial Sequence: Synthetic oligonucleotide
acauugagccgcuucgauc

SEQ ID NO: 2162251 - RNA, 19 nt, Artificial Sequence
  Description of Artificial Sequence: Synthetic oligonucleotide
acagguaacaaccguggca

SEQ ID NO: 2162252 - RNA, 19 nt, Artificial Sequence
  Description of Artificial Sequence: Synthetic oligonucleotide
ggagauaggcuuuaucaag

SEQ ID NO: 2162253 - RNA, 19 nt, Artificial Sequence
  Description of Artificial Sequence: Synthetic oligonucleotide
cugcuaacuaagcagauca

SEQ ID NO: 2162254 - RNA, 19 nt, Artificial Sequence
  Description of Artificial Sequence: Synthetic oligonucleotide
aucagcuaaaucacgcugg

SEQ ID NO: 2162255 - RNA, 19 nt, Artificial Sequence
  Description of Artificial Sequence: Synthetic oligonucleotide
ucgaacagcugaaaacugu

SEQ ID NO: 2162256 - RNA, 19 nt, Artificial Sequence
  Description of Artificial Sequence: Synthetic oligonucleotide
ucggcuggaacccacgcca

SEQ ID NO: 2162257 - RNA, 19 nt, Artificial Sequence
  Description of Artificial Sequence: Synthetic oligonucleotide
uauaaccuuucacccagac

SEQ ID NO: 2162258 - RNA, 19 nt, Artificial Sequence
  Description of Artificial Sequence: Synthetic oligonucleotide
caagcugucgaauuaguga

SEQ ID NO: 2162259 - RNA, 19 nt, Artificial Sequence
  Description of Artificial Sequence: Synthetic oligonucleotide
ucugucgaacagcugaaaa

SEQ ID NO: 2162260 - RNA, 19 nt, Artificial Sequence
  Description of Artificial Sequence: Synthetic oligonucleotide
guacauaaucaaucccagg

SEQ ID NO: 2162261 - RNA, 19 nt, Artificial Sequence
  Description of Artificial Sequence: Synthetic oligonucleotide
gucuauauucugaauauca

SEQ ID NO: 2162262 - RNA, 19 nt, Artificial Sequence
  Description of Artificial Sequence: Synthetic oligonucleotide
uucacacucugucgaacag

SEQ ID NO: 2162263 - RNA, 19 nt, Artificial Sequence
  Description of Artificial Sequence: Synthetic oligonucleotide
auauucugaauaucaacuu

SEQ ID NO: 2162264 - RNA, 19 nt, Artificial Sequence
  Description of Artificial Sequence: Synthetic oligonucleotide
agugaugcacucugucuuc

SEQ ID NO: 2162265 - RNA, 19 nt, Artificial Sequence
  Description of Artificial Sequence: Synthetic oligonucleotide
uccaagacacuaguaacug

SEQ ID NO: 2162266 - RNA, 19 nt, Artificial Sequence
  Description of Artificial Sequence: Synthetic oligonucleotide
aaauugccauuaugcuuuc

SEQ ID NO: 2162267 - RNA, 19 nt, Artificial Sequence
  Description of Artificial Sequence: Synthetic oligonucleotide
acuaguaacuguugccuga

SEQ ID NO: 2162268 - RNA, 19 nt, Artificial Sequence
  Description of Artificial Sequence: Synthetic oligonucleotide
gaauaucaacuugaguuac

SEQ ID NO: 2162269 - RNA, 19 nt, Artificial Sequence
  Description of Artificial Sequence: Synthetic oligonucleotide
cuugaguuacagauuaaga

SEQ ID NO: 2162270 - RNA, 19 nt, Artificial Sequence
  Description of Artificial Sequence: Synthetic oligonucleotide
uuuucaagacaagccaaca

SEQ ID NO: 2162271 - RNA, 19 nt, Artificial Sequence
  Description of Artificial Sequence: Synthetic oligonucleotide
uugccauuaugcuuucuca

SEQ ID NO: 2162272 - RNA, 19 nt, Artificial Sequence
  Description of Artificial Sequence: Synthetic oligonucleotide
gucgaauuagugaaugagc

SEQ ID NO: 2162273 - RNA, 19 nt, Artificial Sequence
  Description of Artificial Sequence: Synthetic oligonucleotide
aagggaggaaaaccaauuu

SEQ ID NO: 2162274 - RNA, 19 nt, Artificial Sequence
  Description of Artificial Sequence: Synthetic oligonucleotide
ugaaguguuggagaauaac

SEQ ID NO: 2162275 - RNA, 19 nt, Artificial Sequence
  Description of Artificial Sequence: Synthetic oligonucleotide
uugcuauccaacugcugag

SEQ ID NO: 2162276 - RNA, 19 nt, Artificial Sequence
  Description of Artificial Sequence: Synthetic oligonucleotide
agauauuccaagacacuag

SEQ ID NO: 2162277 - RNA, 19 nt, Artificial Sequence
  Description of Artificial Sequence: Synthetic oligonucleotide
uccuuagcuauuucagaca

SEQ ID NO: 2162278 - RNA, 19 nt, Artificial Sequence
  Description of Artificial Sequence: Synthetic oligonucleotide
uugggcuaccacaacgucu

SEQ ID NO: 2162279 - RNA, 19 nt, Artificial Sequence
  Description of Artificial Sequence: Synthetic oligonucleotide
uaucaagauggcucaucag

SEQ ID NO: 2162280 - RNA, 19 nt, Artificial Sequence
  Description of Artificial Sequence: Synthetic oligonucleotide
uaccacuuguugcugcugc

SEQ ID NO: 2162281 - RNA, 19 nt, Artificial Sequence
  Description of Artificial Sequence: Synthetic oligonucleotide
ugcuaacuaagcagaucag

SEQ ID NO: 2162282 - RNA, 19 nt, Artificial Sequence
  Description of Artificial Sequence: Synthetic oligonucleotide
aucagcagauucaaagcgg

SEQ ID NO: 2162283 - RNA, 19 nt, Artificial Sequence
  Description of Artificial Sequence: Synthetic oligonucleotide
ggagaauaaccuucagggg

SEQ ID NO: 2162284 - RNA, 19 nt, Artificial Sequence
  Description of Artificial Sequence: Synthetic oligonucleotide
ucaucagcuaaaucacgcu

SEQ ID NO: 2162285 - RNA, 19 nt, Artificial Sequence
  Description of Artificial Sequence: Synthetic oligonucleotide
cuucggaucaauuugggcu

SEQ ID NO: 2162286 - RNA, 19 nt, Artificial Sequence
  Description of Artificial Sequence: Synthetic oligonucleotide
caucagcuaaaucacgcug

SEQ ID NO: 2162287 - RNA, 19 nt, Artificial Sequence
  Description of Artificial Sequence: Synthetic oligonucleotide
auagaaauauucacacucu

SEQ ID NO: 2162288 - RNA, 19 nt, Artificial Sequence
  Description of Artificial Sequence: Synthetic oligonucleotide
agccaacaaagcauaaaac

SEQ ID NO: 2162289 - RNA, 19 nt, Artificial Sequence
  Description of Artificial Sequence: Synthetic oligonucleotide
uuucucagacuuagacugc

SEQ ID NO: 2162290 - RNA, 19 nt, Artificial Sequence
  Description of Artificial Sequence: Synthetic oligonucleotide
gaucaauuugggcuaccac

SEQ ID NO: 2162291 - RNA, 19 nt, Artificial Sequence
  Description of Artificial Sequence: Synthetic oligonucleotide
uucagauuuuggcauuguc

SEQ ID NO: 2162292 - RNA, 19 nt, Artificial Sequence
  Description of Artificial Sequence: Synthetic oligonucleotide
ucagcuaaaucacgcuggu

SEQ ID NO: 2162293 - RNA, 19 nt, Artificial Sequence
  Description of Artificial Sequence: Synthetic oligonucleotide
uucacccagacaaaauuuu

SEQ ID NO: 2162294 - RNA, 19 nt, Artificial Sequence
  Description of Artificial Sequence: Synthetic oligonucleotide
caggagccuaacuucagag

SEQ ID NO: 2162295 - RNA, 19 nt, Artificial Sequence
  Description of Artificial Sequence: Synthetic oligonucleotide
cagacuuagacugccuucc

SEQ ID NO: 2162296 - RNA, 19 nt, Artificial Sequence
  Description of Artificial Sequence: Synthetic oligonucleotide
caucuucccaauucuggag

SEQ ID NO: 2162297 - RNA, 19 nt, Artificial Sequence
  Description of Artificial Sequence: Synthetic oligonucleotide
agguaguaaaggcuuuuca

SEQ ID NO: 2162298 - RNA, 19 nt, Artificial Sequence
  Description of Artificial Sequence: Synthetic oligonucleotide
uucggaucaauuugggcua

SEQ ID NO: 2162299 - RNA, 19 nt, Artificial Sequence
  Description of Artificial Sequence: Synthetic oligonucleotide
ucacgcuggucaaaauacc

SEQ ID NO: 2162300 - RNA, 19 nt, Artificial Sequence
  Description of Artificial Sequence: Synthetic oligonucleotide
uacuaagcaagggaggaaa

SEQ ID NO: 2162301 - RNA, 19 nt, Artificial Sequence
  Description of Artificial Sequence: Synthetic oligonucleotide
ucagacuuagacugccuuc

SEQ ID NO: 2162302 - RNA, 19 nt, Artificial Sequence
  Description of Artificial Sequence: Synthetic oligonucleotide
aggagauaggcuuuaucaa

SEQ ID NO: 2162303 - RNA, 19 nt, Artificial Sequence
  Description of Artificial Sequence: Synthetic oligonucleotide
auaaccuuucacccagaca

SEQ ID NO: 2162304 - RNA, 19 nt, Artificial Sequence
  Description of Artificial Sequence: Synthetic oligonucleotide
caacgucuggacauugagc

SEQ ID NO: 2162305 - RNA, 19 nt, Artificial Sequence
  Description of Artificial Sequence: Synthetic oligonucleotide
uaccacaacgucuggacau

SEQ ID NO: 2162306 - RNA, 19 nt, Artificial Sequence
  Description of Artificial Sequence: Synthetic oligonucleotide
gagggaucgaagccuuccg

SEQ ID NO: 2162307 - RNA, 19 nt, Artificial Sequence
  Description of Artificial Sequence: Synthetic oligonucleotide
ccuuccaagaacuauuuuc

SEQ ID NO: 2162308 - RNA, 19 nt, Artificial Sequence
  Description of Artificial Sequence: Synthetic oligonucleotide
aauaucaacuugaguuaca

SEQ ID NO: 2162309 - RNA, 19 nt, Artificial Sequence
  Description of Artificial Sequence: Synthetic oligonucleotide
agacacucaaaccaauauu

SEQ ID NO: 2162310 - RNA, 19 nt, Artificial Sequence
  Description of Artificial Sequence: Synthetic oligonucleotide
ccaacaaagcauaaaacca

SEQ ID NO: 2162311 - RNA, 19 nt, Artificial Sequence
  Description of Artificial Sequence: Synthetic oligonucleotide
cugaaaacuguaccacuug

SEQ ID NO: 2162312 - RNA, 19 nt, Artificial Sequence
  Description of Artificial Sequence: Synthetic oligonucleotide
aagacacuaguaacuguug

SEQ ID NO: 2162313 - RNA, 19 nt, Artificial Sequence
  Description of Artificial Sequence: Synthetic oligonucleotide
agauucaaagcgggaacuc

SEQ ID NO: 2162314 - RNA, 19 nt, Artificial Sequence
  Description of Artificial Sequence: Synthetic oligonucleotide
uaucaacuugaguuacaga

SEQ ID NO: 2162315 - RNA, 19 nt, Artificial Sequence
  Description of Artificial Sequence: Synthetic oligonucleotide
auuuuccauccccaggaga

SEQ ID NO: 2162316 - RNA, 19 nt, Artificial Sequence
  Description of Artificial Sequence: Synthetic oligonucleotide
agaauaaccuucaggggca

SEQ ID NO: 2162317 - RNA, 19 nt, Artificial Sequence
  Description of Artificial Sequence: Synthetic oligonucleotide
agcugaaaacuguaccacu

SEQ ID NO: 2162318 - RNA, 19 nt, Artificial Sequence
  Description of Artificial Sequence: Synthetic oligonucleotide
ggagccuaacuucagagca

SEQ ID NO: 2162319 - RNA, 19 nt, Artificial Sequence
  Description of Artificial Sequence: Synthetic oligonucleotide
cacucugucgaacagcuga

SEQ ID NO: 2162320 - RNA, 19 nt, Artificial Sequence
  Description of Artificial Sequence: Synthetic oligonucleotide
caaauugccauuaugcuuu

SEQ ID NO: 2162321 - RNA, 19 nt, Artificial Sequence
  Description of Artificial Sequence: Synthetic oligonucleotide
uuccauccccaggagauag

SEQ ID NO: 2162322 - RNA, 19 nt, Artificial Sequence
  Description of Artificial Sequence: Synthetic oligonucleotide
ucaacucuuccaccgcaga

SEQ ID NO: 2162323 - RNA, 19 nt, Artificial Sequence
  Description of Artificial Sequence: Synthetic oligonucleotide
gccccuucagcauauaacc

SEQ ID NO: 2162324 - RNA, 19 nt, Artificial Sequence
  Description of Artificial Sequence: Synthetic oligonucleotide
agugaaugagcuucaggua

SEQ ID NO: 2162325 - RNA, 19 nt, Artificial Sequence
  Description of Artificial Sequence: Synthetic oligonucleotide
uguaccacuuguugcugcu

SEQ ID NO: 2162326 - RNA, 19 nt, Artificial Sequence
  Description of Artificial Sequence: Synthetic oligonucleotide
acucggcuggaacccacgc

SEQ ID NO: 2162327 - RNA, 19 nt, Artificial Sequence
  Description of Artificial Sequence: Synthetic oligonucleotide
uugcaagcugucgaauuag

SEQ ID NO: 2162328 - RNA, 19 nt, Artificial Sequence
  Description of Artificial Sequence: Synthetic oligonucleotide
agauuaagaugaaacacuu

SEQ ID NO: 2162329 - RNA, 19 nt, Artificial Sequence
  Description of Artificial Sequence: Synthetic oligonucleotide
agccccuucagcauauaac

SEQ ID NO: 2162330 - RNA, 19 nt, Artificial Sequence
  Description of Artificial Sequence: Synthetic oligonucleotide
uauugucuauauucugaau

SEQ ID NO: 2162331 - RNA, 19 nt, Artificial Sequence
  Description of Artificial Sequence: Synthetic oligonucleotide
gguaguaaaggcuuuucaa

SEQ ID NO: 2162332 - RNA, 19 nt, Artificial Sequence
  Description of Artificial Sequence: Synthetic oligonucleotide
acugaaguguuggagaaua

SEQ ID NO: 2162333 - RNA, 19 nt, Artificial Sequence
  Description of Artificial Sequence: Synthetic oligonucleotide
ccaagaacuauuuuccauc

SEQ ID NO: 2162334 - RNA, 19 nt, Artificial Sequence
  Description of Artificial Sequence: Synthetic oligonucleotide
ucuugcaagcugucgaauu

SEQ ID NO: 2162335 - RNA, 19 nt, Artificial Sequence
  Description of Artificial Sequence: Synthetic oligonucleotide
cucagguauuccugaggcg

SEQ ID NO: 2162336 - RNA, 19 nt, Artificial Sequence
  Description of Artificial Sequence: Synthetic oligonucleotide
gauuaagaugaaacacuuc

SEQ ID NO: 2162337 - RNA, 19 nt, Artificial Sequence
  Description of Artificial Sequence: Synthetic oligonucleotide
ggcuuuaucaagauggcuc

SEQ ID NO: 2162338 - RNA, 19 nt, Artificial Sequence
  Description of Artificial Sequence: Synthetic oligonucleotide
aaccaauauugucuauauu

SEQ ID NO: 2162339 - RNA, 19 nt, Artificial Sequence
  Description of Artificial Sequence: Synthetic oligonucleotide
ugcugagauuuccagugau

SEQ ID NO: 2162340 - RNA, 19 nt, Artificial Sequence
  Description of Artificial Sequence: Synthetic oligonucleotide
ugccacugaaguguuggag

SEQ ID NO: 2162341 - RNA, 19 nt, Artificial Sequence
  Description of Artificial Sequence: Synthetic oligonucleotide
acaaagcauaaaaccaucu

SEQ ID NO: 2162342 - RNA, 19 nt, Artificial Sequence
  Description of Artificial Sequence: Synthetic oligonucleotide
uuugggcuaccacaacguc

SEQ ID NO: 2162343 - RNA, 19 nt, Artificial Sequence
  Description of Artificial Sequence: Synthetic oligonucleotide
agguauuccugaggcgucc

SEQ ID NO: 2162344 - RNA, 19 nt, Artificial Sequence
  Description of Artificial Sequence: Synthetic oligonucleotide
agacaagccaacaaagcau

SEQ ID NO: 2162345 - RNA, 19 nt, Artificial Sequence
  Description of Artificial Sequence: Synthetic oligonucleotide
agccuaacuucagagcauc

SEQ ID NO: 2162346 - RNA, 19 nt, Artificial Sequence
  Description of Artificial Sequence: Synthetic oligonucleotide
cauugagccgcuucgaucu

SEQ ID NO: 2162347 - RNA, 19 nt, Artificial Sequence
  Description of Artificial Sequence: Synthetic oligonucleotide
aucuucuugcaagcugucg

SEQ ID NO: 2162348 - RNA, 19 nt, Artificial Sequence
  Description of Artificial Sequence: Synthetic oligonucleotide
aacaaccguggcaucaacu

SEQ ID NO: 2162349 - RNA, 19 nt, Artificial Sequence
  Description of Artificial Sequence: Synthetic oligonucleotide
gaacuauuuuccaucccca

SEQ ID NO: 2162350 - RNA, 19 nt, Artificial Sequence
  Description of Artificial Sequence: Synthetic oligonucleotide
cacuaguaacuguugccug

SEQ ID NO: 2162351 - RNA, 19 nt, Artificial Sequence
  Description of Artificial Sequence: Synthetic oligonucleotide
augguguugaagaagugau

SEQ ID NO: 2162352 - RNA, 19 nt, Artificial Sequence
  Description of Artificial Sequence: Synthetic oligonucleotide
aaaucacgcuggucaaaau

SEQ ID NO: 2162353 - RNA, 19 nt, Artificial Sequence
  Description of Artificial Sequence: Synthetic oligonucleotide
ucacacucugucgaacagc

SEQ ID NO: 2162354 - RNA, 19 nt, Artificial Sequence
  Description of Artificial Sequence: Synthetic oligonucleotide
uucuaugcuuguucacacu

SEQ ID NO: 2162355 - RNA, 19 nt, Artificial Sequence
  Description of Artificial Sequence: Synthetic oligonucleotide
auuagugaaugagcuucag

SEQ ID NO: 2162356 - RNA, 19 nt, Artificial Sequence
  Description of Artificial Sequence: Synthetic oligonucleotide
cauaaucaaucccaggacu

SEQ ID NO: 2162357 - RNA, 19 nt, Artificial Sequence
  Description of Artificial Sequence: Synthetic oligonucleotide
guucacacucugucgaaca

SEQ ID NO: 2162358 - RNA, 19 nt, Artificial Sequence
  Description of Artificial Sequence: Synthetic oligonucleotide
cuggcauccugaaauagaa

SEQ ID NO: 2162359 - RNA, 19 nt, Artificial Sequence
  Description of Artificial Sequence: Synthetic oligonucleotide
gguccaauagccccuucag

SEQ ID NO: 2162360 - RNA, 19 nt, Artificial Sequence
  Description of Artificial Sequence: Synthetic oligonucleotide
guguuggagaauaaccuuc

SEQ ID NO: 2162361 - RNA, 19 nt, Artificial Sequence
  Description of Artificial Sequence: Synthetic oligonucleotide
auuugggcuaccacaacgu

SEQ ID NO: 2162362 - RNA, 19 nt, Artificial Sequence
  Description of Artificial Sequence: Synthetic oligonucleotide
aaaccaauuuguacauaau

SEQ ID NO: 2162363 - RNA, 19 nt, Artificial Sequence
  Description of Artificial Sequence: Synthetic oligonucleotide
ccuuagcuauuucagacac

SEQ ID NO: 2162364 - RNA, 19 nt, Artificial Sequence
  Description of Artificial Sequence: Synthetic oligonucleotide
ugucuucaaauugccauua

SEQ ID NO: 2162365 - RNA, 19 nt, Artificial Sequence
  Description of Artificial Sequence: Synthetic oligonucleotide
gaacagcugaaaacuguac

SEQ ID NO: 2162366 - RNA, 19 nt, Artificial Sequence
  Description of Artificial Sequence: Synthetic oligonucleotide
uccauccccaggagauagg

SEQ ID NO: 2162367 - RNA, 19 nt, Artificial Sequence
  Description of Artificial Sequence: Synthetic oligonucleotide
gcuaacuaagcagaucagc

SEQ ID NO: 2162368 - RNA, 19 nt, Artificial Sequence
  Description of Artificial Sequence: Synthetic oligonucleotide
cuguaccacuuguugcugc

SEQ ID NO: 2162369 - RNA, 19 nt, Artificial Sequence
  Description of Artificial Sequence: Synthetic oligonucleotide
ggcauugucacauugcuau

SEQ ID NO: 2162370 - RNA, 19 nt, Artificial Sequence
  Description of Artificial Sequence: Synthetic oligonucleotide
guccaauagccccuucagc

SEQ ID NO: 2162371 - RNA, 19 nt, Artificial Sequence
  Description of Artificial Sequence: Synthetic oligonucleotide
ggacuuucauuuguagagg

SEQ ID NO: 2162372 - RNA, 19 nt, Artificial Sequence
  Description of Artificial Sequence: Synthetic oligonucleotide
ucaaucccaggacuuucau

SEQ ID NO: 2162373 - RNA, 19 nt, Artificial Sequence
  Description of Artificial Sequence: Synthetic oligonucleotide
uuaugcuuucucagacuua

SEQ ID NO: 2162374 - RNA, 19 nt, Artificial Sequence
  Description of Artificial Sequence: Synthetic oligonucleotide
ucccaauucuggaguaaaa

SEQ ID NO: 2162375 - RNA, 19 nt, Artificial Sequence
  Description of Artificial Sequence: Synthetic oligonucleotide
ugagccgcuucgaucugca

SEQ ID NO: 2162376 - RNA, 19 nt, Artificial Sequence
  Description of Artificial Sequence: Synthetic oligonucleotide
gcuaccacaacgucuggac

SEQ ID NO: 2162377 - RNA, 19 nt, Artificial Sequence
  Description of Artificial Sequence: Synthetic oligonucleotide
ucuucccaauucuggagua

SEQ ID NO: 2162378 - RNA, 19 nt, Artificial Sequence
  Description of Artificial Sequence: Synthetic oligonucleotide
ccauuaugcuuucucagac

SEQ ID NO: 2162379 - RNA, 19 nt, Artificial Sequence
  Description of Artificial Sequence: Synthetic oligonucleotide
uucagguaguaaaggcuuu

SEQ ID NO: 2162380 - RNA, 19 nt, Artificial Sequence
  Description of Artificial Sequence: Synthetic oligonucleotide
uguucacacucugucgaac

SEQ ID NO: 2162381 - RNA, 19 nt, Artificial Sequence
  Description of Artificial Sequence: Synthetic oligonucleotide
aucgaagccuuccgucaag

SEQ ID NO: 2162382 - RNA, 19 nt, Artificial Sequence
  Description of Artificial Sequence: Synthetic oligonucleotide
gccgcuucgaucugcaccc

SEQ ID NO: 2162383 - RNA, 19 nt, Artificial Sequence
  Description of Artificial Sequence: Synthetic oligonucleotide
gcauaaaaccaucuuccca

SEQ ID NO: 2162384 - RNA, 19 nt, Artificial Sequence
  Description of Artificial Sequence: Synthetic oligonucleotide
acuucacaugguguugaag

SEQ ID NO: 2162385 - RNA, 19 nt, Artificial Sequence
  Description of Artificial Sequence: Synthetic oligonucleotide
ugccuuccaagaacuauuu

SEQ ID NO: 2162386 - RNA, 19 nt, Artificial Sequence
  Description of Artificial Sequence: Synthetic oligonucleotide
uaacaaccguggcaucaac

SEQ ID NO: 2162387 - RNA, 19 nt, Artificial Sequence
  Description of Artificial Sequence: Synthetic oligonucleotide
ucaaaccaauauugucuau

SEQ ID NO: 2162388 - RNA, 19 nt, Artificial Sequence
  Description of Artificial Sequence: Synthetic oligonucleotide
caauuuguacauaaucaau

SEQ ID NO: 2162389 - RNA, 19 nt, Artificial Sequence
  Description of Artificial Sequence: Synthetic oligonucleotide
uucccaauucuggaguaaa

SEQ ID NO: 2162390 - RNA, 19 nt, Artificial Sequence
  Description of Artificial Sequence: Synthetic oligonucleotide
gcagauucaaagcgggaac

SEQ ID NO: 2162391 - RNA, 19 nt, Artificial Sequence
  Description of Artificial Sequence: Synthetic oligonucleotide
acacucaaaccaauauugu

SEQ ID NO: 2162392 - RNA, 19 nt, Artificial Sequence
  Description of Artificial Sequence: Synthetic oligonucleotide
cuucaacuucuucggauca

SEQ ID NO: 2162393 - RNA, 19 nt, Artificial Sequence
  Description of Artificial Sequence: Synthetic oligonucleotide
aauagccccuucagcauau

SEQ ID NO: 2162394 - RNA, 19 nt, Artificial Sequence
  Description of Artificial Sequence: Synthetic oligonucleotide
ccaauuuguacauaaucaa

SEQ ID NO: 2162395 - RNA, 19 nt, Artificial Sequence
  Description of Artificial Sequence: Synthetic oligonucleotide
uuguucacacucugucgaa

SEQ ID NO: 2162396 - RNA, 19 nt, Artificial Sequence
  Description of Artificial Sequence: Synthetic oligonucleotide
agggaucgaagccuuccgu

SEQ ID NO: 2162397 - RNA, 19 nt, Artificial Sequence
  Description of Artificial Sequence: Synthetic oligonucleotide
uuccaccgcagacucggcu

SEQ ID NO: 2162398 - RNA, 19 nt, Artificial Sequence
  Description of Artificial Sequence: Synthetic oligonucleotide
caaaccaauauugucuaua

SEQ ID NO: 2162399 - RNA, 19 nt, Artificial Sequence
  Description of Artificial Sequence: Synthetic oligonucleotide
gaauaaccuucaggggcag

SEQ ID NO: 2162400 - RNA, 19 nt, Artificial Sequence
  Description of Artificial Sequence: Synthetic oligonucleotide
agcagaucagcagauucaa

SEQ ID NO: 2162401 - RNA, 19 nt, Artificial Sequence
  Description of Artificial Sequence: Synthetic oligonucleotide
aaugagcuucagguaguaa

SEQ ID NO: 2162402 - RNA, 19 nt, Artificial Sequence
  Description of Artificial Sequence: Synthetic oligonucleotide
guagaggguccaauagccc

SEQ ID NO: 2162403 - RNA, 19 nt, Artificial Sequence
  Description of Artificial Sequence: Synthetic oligonucleotide
acuaagcagaucagcagau

SEQ ID NO: 2162404 - RNA, 19 nt, Artificial Sequence
  Description of Artificial Sequence: Synthetic oligonucleotide
caagacacuaguaacuguu

SEQ ID NO: 2162405 - RNA, 19 nt, Artificial Sequence
  Description of Artificial Sequence: Synthetic oligonucleotide
gcauauaaccuuucaccca

SEQ ID NO: 2162406 - RNA, 19 nt, Artificial Sequence
  Description of Artificial Sequence: Synthetic oligonucleotide
gauucaaagcgggaacucu

SEQ ID NO: 2162407 - RNA, 19 nt, Artificial Sequence
  Description of Artificial Sequence: Synthetic oligonucleotide
gcuggaacccacgccaugg

SEQ ID NO: 2162408 - RNA, 19 nt, Artificial Sequence
  Description of Artificial Sequence: Synthetic oligonucleotide
cuugcaagcugucgaauua

SEQ ID NO: 2162409 - RNA, 19 nt, Artificial Sequence
  Description of Artificial Sequence: Synthetic oligonucleotide
acuuucauuuguagagggu

SEQ ID NO: 2162410 - RNA, 19 nt, Artificial Sequence
  Description of Artificial Sequence: Synthetic oligonucleotide
gcugucgaauuagugaaug

SEQ ID NO: 2162411 - RNA, 19 nt, Artificial Sequence
  Description of Artificial Sequence: Synthetic oligonucleotide
gaucgaagccuuccgucaa

SEQ ID NO: 2162412 - RNA, 19 nt, Artificial Sequence
  Description of Artificial Sequence: Synthetic oligonucleotide
aucccaggacuuucauuug

SEQ ID NO: 2162413 - RNA, 19 nt, Artificial Sequence
  Description of Artificial Sequence: Synthetic oligonucleotide
agacugccuuccaagaacu

SEQ ID NO: 2162414 - RNA, 19 nt, Artificial Sequence
  Description of Artificial Sequence: Synthetic oligonucleotide
acauugcuauccaacugcu

SEQ ID NO: 2162415 - RNA, 19 nt, Artificial Sequence
  Description of Artificial Sequence: Synthetic oligonucleotide
agacuuagacugccuucca

SEQ ID NO: 2162416 - RNA, 19 nt, Artificial Sequence
  Description of Artificial Sequence: Synthetic oligonucleotide
caaaccaauuacucagaua

SEQ ID NO: 2162417 - RNA, 19 nt, Artificial Sequence
  Description of Artificial Sequence: Synthetic oligonucleotide
ggaucgaagccuuccguca

SEQ ID NO: 2162418 - RNA, 19 nt, Artificial Sequence
  Description of Artificial Sequence: Synthetic oligonucleotide
acgcuggucaaaauaccug

SEQ ID NO: 2162419 - RNA, 19 nt, Artificial Sequence
  Description of Artificial Sequence: Synthetic oligonucleotide
cugucgaauuagugaauga

SEQ ID NO: 2162420 - RNA, 19 nt, Artificial Sequence
  Description of Artificial Sequence: Synthetic oligonucleotide
gguaacaaccguggcauca

SEQ ID NO: 2162421 - RNA, 19 nt, Artificial Sequence
  Description of Artificial Sequence: Synthetic oligonucleotide
ucauuuguagaggguccaa

SEQ ID NO: 2162422 - RNA, 19 nt, Artificial Sequence
  Description of Artificial Sequence: Synthetic oligonucleotide
aauugccauuaugcuuucu

SEQ ID NO: 2162423 - RNA, 19 nt, Artificial Sequence
  Description of Artificial Sequence: Synthetic oligonucleotide
gccauuaugcuuucucaga

SEQ ID NO: 2162424 - RNA, 19 nt, Artificial Sequence
  Description of Artificial Sequence: Synthetic oligonucleotide
aucaaucccaggacuuuca

SEQ ID NO: 2162425 - RNA, 19 nt, Artificial Sequence
  Description of Artificial Sequence: Synthetic oligonucleotide
cacacucugucgaacagcu

SEQ ID NO: 2162426 - RNA, 19 nt, Artificial Sequence
  Description of Artificial Sequence: Synthetic oligonucleotide
aggcuuuaucaagauggcu

SEQ ID NO: 2162427 - RNA, 19 nt, Artificial Sequence
  Description of Artificial Sequence: Synthetic oligonucleotide
cagguauuccugaggcguc

SEQ ID NO: 2162428 - RNA, 19 nt, Artificial Sequence
  Description of Artificial Sequence: Synthetic oligonucleotide
caggcuggcauccugaaau

SEQ ID NO: 2162429 - RNA, 19 nt, Artificial Sequence
  Description of Artificial Sequence: Synthetic oligonucleotide
ugccugauucauucugcua

SEQ ID NO: 2162430 - RNA, 19 nt, Artificial Sequence
  Description of Artificial Sequence: Synthetic oligonucleotide
gacucggcuggaacccacg

SEQ ID NO: 2162431 - RNA, 19 nt, Artificial Sequence
  Description of Artificial Sequence: Synthetic oligonucleotide
uugagccgcuucgaucugc

SEQ ID NO: 2162432 - RNA, 19 nt, Artificial Sequence
  Description of Artificial Sequence: Synthetic oligonucleotide
ucgaagccuuccgucaagu

SEQ ID NO: 2162433 - RNA, 19 nt, Artificial Sequence
  Description of Artificial Sequence: Synthetic oligonucleotide
auacuaagcaagggaggaa

SEQ ID NO: 2162434 - RNA, 19 nt, Artificial Sequence
  Description of Artificial Sequence: Synthetic oligonucleotide
ccaauauugucuauauucu

SEQ ID NO: 2162435 - RNA, 19 nt, Artificial Sequence
  Description of Artificial Sequence: Synthetic oligonucleotide
aacuugaguuacagauuaa

SEQ ID NO: 2162436 - RNA, 19 nt, Artificial Sequence
  Description of Artificial Sequence: Synthetic oligonucleotide
agaggguccaauagccccu

SEQ ID NO: 2162437 - RNA, 19 nt, Artificial Sequence
  Description of Artificial Sequence: Synthetic oligonucleotide
cagguaguaaaggcuuuuc

SEQ ID NO: 2162438 - RNA, 19 nt, Artificial Sequence
  Description of Artificial Sequence: Synthetic oligonucleotide
auugagccgcuucgaucug

SEQ ID NO: 2162439 - RNA, 19 nt, Artificial Sequence
  Description of Artificial Sequence: Synthetic oligonucleotide
gggaggaaaaccaauuugu

SEQ ID NO: 2162440 - RNA, 19 nt, Artificial Sequence
  Description of Artificial Sequence: Synthetic oligonucleotide
ggaaaaccaauuuguacau

SEQ ID NO: 2162441 - RNA, 19 nt, Artificial Sequence
  Description of Artificial Sequence: Synthetic oligonucleotide
gcucaucagcuaaaucacg

SEQ ID NO: 2162442 - RNA, 19 nt, Artificial Sequence
  Description of Artificial Sequence: Synthetic oligonucleotide
aaccaauuacucagauauu

SEQ ID NO: 2162443 - RNA, 19 nt, Artificial Sequence
  Description of Artificial Sequence: Synthetic oligonucleotide
gggaucgaagccuuccguc

SEQ ID NO: 2162444 - RNA, 19 nt, Artificial Sequence
  Description of Artificial Sequence: Synthetic oligonucleotide
uucuugcaagcugucgaau

SEQ ID NO: 2162445 - RNA, 19 nt, Artificial Sequence
  Description of Artificial Sequence: Synthetic oligonucleotide
cucuuccaccgcagacucg

SEQ ID NO: 2162446 - RNA, 19 nt, Artificial Sequence
  Description of Artificial Sequence: Synthetic oligonucleotide
cacacucugcuuccucuuc

SEQ ID NO: 2162447 - RNA, 19 nt, Artificial Sequence
  Description of Artificial Sequence: Synthetic oligonucleotide
caaagcauaaaaccaucuu

SEQ ID NO: 2162448 - RNA, 19 nt, Artificial Sequence
  Description of Artificial Sequence: Synthetic oligonucleotide
cuggucaaaauaccugcua

SEQ ID NO: 2162449 - RNA, 19 nt, Artificial Sequence
  Description of Artificial Sequence: Synthetic oligonucleotide
gcaccgagggaucgaagcc

SEQ ID NO: 2162450 - RNA, 19 nt, Artificial Sequence
  Description of Artificial Sequence: Synthetic oligonucleotide
aacuguugccugauucauu

SEQ ID NO: 2162451 - RNA, 19 nt, Artificial Sequence
  Description of Artificial Sequence: Synthetic oligonucleotide
gcaagcugucgaauuagug

SEQ ID NO: 2162452 - RNA, 19 nt, Artificial Sequence
  Description of Artificial Sequence: Synthetic oligonucleotide
cacgcuggucaaaauaccu

SEQ ID NO: 2162453 - RNA, 19 nt, Artificial Sequence
  Description of Artificial Sequence: Synthetic oligonucleotide
agacucggcuggaacccac

SEQ ID NO: 2162454 - RNA, 19 nt, Artificial Sequence
  Description of Artificial Sequence: Synthetic oligonucleotide
gaaaacuguaccacuuguu

SEQ ID NO: 2162455 - RNA, 19 nt, Artificial Sequence
  Description of Artificial Sequence: Synthetic oligonucleotide
cacagggcuccacagguaa

SEQ ID NO: 2162456 - RNA, 19 nt, Artificial Sequence
  Description of Artificial Sequence: Synthetic oligonucleotide
aguuacagauuaagaugaa

SEQ ID NO: 2162457 - RNA, 19 nt, Artificial Sequence
  Description of Artificial Sequence: Synthetic oligonucleotide
cagacacucaaaccaauau

SEQ ID NO: 2162458 - RNA, 19 nt, Artificial Sequence
  Description of Artificial Sequence: Synthetic oligonucleotide
cucuucaacuucuucggau

SEQ ID NO: 2162459 - RNA, 19 nt, Artificial Sequence
  Description of Artificial Sequence: Synthetic oligonucleotide
aaccuuucacccagacaaa

SEQ ID NO: 2162460 - RNA, 19 nt, Artificial Sequence
  Description of Artificial Sequence: Synthetic oligonucleotide
ucggaucaauuugggcuac

SEQ ID NO: 2162461 - RNA, 19 nt, Artificial Sequence
  Description of Artificial Sequence: Synthetic oligonucleotide
gcuucgaucugcacccucc

SEQ ID NO: 2162462 - RNA, 19 nt, Artificial Sequence
  Description of Artificial Sequence: Synthetic oligonucleotide
cacaacgucuggacauuga

SEQ ID NO: 2162463 - RNA, 19 nt, Artificial Sequence
  Description of Artificial Sequence: Synthetic oligonucleotide
gcuaaaucacgcuggucaa

SEQ ID NO: 2162464 - RNA, 19 nt, Artificial Sequence
  Description of Artificial Sequence: Synthetic oligonucleotide
caagauggcucaucagcua

SEQ ID NO: 2162465 - RNA, 19 nt, Artificial Sequence
  Description of Artificial Sequence: Synthetic oligonucleotide
gacauugagccgcuucgau

SEQ ID NO: 2162466 - RNA, 19 nt, Artificial Sequence
  Description of Artificial Sequence: Synthetic oligonucleotide
gcagacucggcuggaaccc

SEQ ID NO: 2162467 - RNA, 19 nt, Artificial Sequence
  Description of Artificial Sequence: Synthetic oligonucleotide
gcuccacagguaacaaccg

SEQ ID NO: 2162468 - RNA, 19 nt, Artificial Sequence
  Description of Artificial Sequence: Synthetic oligonucleotide
accguggcaucaacucuuc

SEQ ID NO: 2162469 - RNA, 19 nt, Artificial Sequence
  Description of Artificial Sequence: Synthetic oligonucleotide
gaaugagcuucagguagua

SEQ ID NO: 2162470 - RNA, 19 nt, Artificial Sequence
  Description of Artificial Sequence: Synthetic oligonucleotide
ggaucaauuugggcuacca

SEQ ID NO: 2162471 - RNA, 19 nt, Artificial Sequence
  Description of Artificial Sequence: Synthetic oligonucleotide
cugaaguguuggagaauaa

SEQ ID NO: 2162472 - RNA, 19 nt, Artificial Sequence
  Description of Artificial Sequence: Synthetic oligonucleotide
cuuccaccgcagacucggc

SEQ ID NO: 2162473 - RNA, 19 nt, Artificial Sequence
  Description of Artificial Sequence: Synthetic oligonucleotide
cgcagacucggcuggaacc

SEQ ID NO: 2162474 - RNA, 19 nt, Artificial Sequence
  Description of Artificial Sequence: Synthetic oligonucleotide
auauaaccuuucacccaga

SEQ ID NO: 2162475 - RNA, 19 nt, Artificial Sequence
  Description of Artificial Sequence: Synthetic oligonucleotide
cgucuggacauugagccgc

SEQ ID NO: 2162476 - RNA, 19 nt, Artificial Sequence
  Description of Artificial Sequence: Synthetic oligonucleotide
guaccacuuguugcugcug

SEQ ID NO: 2162477 - RNA, 19 nt, Artificial Sequence
  Description of Artificial Sequence: Synthetic oligonucleotide
acucugucgaacagcugaa

SEQ ID NO: 2162478 - RNA, 19 nt, Artificial Sequence
  Description of Artificial Sequence: Synthetic oligonucleotide
cgucaagucacagggcucc

SEQ ID NO: 2162479 - RNA, 19 nt, Artificial Sequence
  Description of Artificial Sequence: Synthetic oligonucleotide
augcuuguucacacucugu

SEQ ID NO: 2162480 - RNA, 19 nt, Artificial Sequence
  Description of Artificial Sequence: Synthetic oligonucleotide
ccaacugcugagauuucca

SEQ ID NO: 2162481 - RNA, 19 nt, Artificial Sequence
  Description of Artificial Sequence: Synthetic oligonucleotide
cagauucaaagcgggaacu

SEQ ID NO: 2162482 - RNA, 19 nt, Artificial Sequence
  Description of Artificial Sequence: Synthetic oligonucleotide
aggcuggcauccugaaaua

SEQ ID NO: 2162483 - RNA, 19 nt, Artificial Sequence
  Description of Artificial Sequence: Synthetic oligonucleotide
cagcagauucaaagcggga

SEQ ID NO: 2162484 - RNA, 19 nt, Artificial Sequence
  Description of Artificial Sequence: Synthetic oligonucleotide
gauggcucaucagcuaaau

SEQ ID NO: 2162485 - RNA, 19 nt, Artificial Sequence
  Description of Artificial Sequence: Synthetic oligonucleotide
gcuggcauccugaaauaga

SEQ ID NO: 2162486 - RNA, 19 nt, Artificial Sequence
  Description of Artificial Sequence: Synthetic oligonucleotide
cugccuuccaagaacuauu

SEQ ID NO: 2162487 - RNA, 19 nt, Artificial Sequence
  Description of Artificial Sequence: Synthetic oligonucleotide
gcauugucacauugcuauc

SEQ ID NO: 2162488 - RNA, 19 nt, Artificial Sequence
  Description of Artificial Sequence: Synthetic oligonucleotide
accacaacgucuggacauu

SEQ ID NO: 2162489 - RNA, 19 nt, Artificial Sequence
  Description of Artificial Sequence: Synthetic oligonucleotide
accugcuaacuaagcagau

SEQ ID NO: 2162490 - RNA, 19 nt, Artificial Sequence
  Description of Artificial Sequence: Synthetic oligonucleotide
cagcuaaaucacgcugguc

SEQ ID NO: 2162491 - RNA, 19 nt, Artificial Sequence
  Description of Artificial Sequence: Synthetic oligonucleotide
ccaccgcagacucggcugg

SEQ ID NO: 2162492 - RNA, 19 nt, Artificial Sequence
  Description of Artificial Sequence: Synthetic oligonucleotide
cucagacuuagacugccuu

SEQ ID NO: 2162493 - RNA, 19 nt, Artificial Sequence
  Description of Artificial Sequence: Synthetic oligonucleotide
agcugucgaauuagugaau

SEQ ID NO: 2162494 - RNA, 19 nt, Artificial Sequence
  Description of Artificial Sequence: Synthetic oligonucleotide
cuucccaauucuggaguaa

SEQ ID NO: 2162495 - RNA, 19 nt, Artificial Sequence
  Description of Artificial Sequence: Synthetic oligonucleotide
cacuucacaugguguugaa

SEQ ID NO: 2162496 - RNA, 19 nt, Artificial Sequence
  Description of Artificial Sequence: Synthetic oligonucleotide
cagugauuucuaugcuugu

SEQ ID NO: 2162497 - RNA, 19 nt, Artificial Sequence
  Description of Artificial Sequence: Synthetic oligonucleotide
ggcuggaacccacgccaug

SEQ ID NO: 2162498 - RNA, 19 nt, Artificial Sequence
  Description of Artificial Sequence: Synthetic oligonucleotide
cgagggaucgaagccuucc

SEQ ID NO: 2162499 - RNA, 19 nt, Artificial Sequence
  Description of Artificial Sequence: Synthetic oligonucleotide
accgagggaucgaagccuu

SEQ ID NO: 2162500 - RNA, 19 nt, Artificial Sequence
  Description of Artificial Sequence: Synthetic oligonucleotide
ggacauugagccgcuucga

SEQ ID NO: 2162501 - RNA, 19 nt, Artificial Sequence
  Description of Artificial Sequence: Synthetic oligonucleotide
gagccuaacuucagagcau

SEQ ID NO: 2162502 - RNA, 19 nt, Artificial Sequence
  Description of Artificial Sequence: Synthetic oligonucleotide
cuucgaucugcacccuccu

SEQ ID NO: 2162503 - RNA, 19 nt, Artificial Sequence
  Description of Artificial Sequence: Synthetic oligonucleotide
ggcuaccacaacgucugga

SEQ ID NO: 2162504 - RNA, 19 nt, Artificial Sequence
  Description of Artificial Sequence: Synthetic oligonucleotide
caacuucuucggaucaauu

SEQ ID NO: 2162505 - RNA, 19 nt, Artificial Sequence
  Description of Artificial Sequence: Synthetic oligonucleotide
ccgucaagucacagggcuc

SEQ ID NO: 2162506 - RNA, 19 nt, Artificial Sequence
  Description of Artificial Sequence: Synthetic oligonucleotide
cauccccaggagauaggcu

SEQ ID NO: 2162507 - RNA, 19 nt, Artificial Sequence
  Description of Artificial Sequence: Synthetic oligonucleotide
gucaagucacagggcucca

SEQ ID NO: 2162508 - RNA, 19 nt, Artificial Sequence
  Description of Artificial Sequence: Synthetic oligonucleotide
accgcagacucggcuggaa

SEQ ID NO: 2162509 - RNA, 19 nt, Artificial Sequence
  Description of Artificial Sequence: Synthetic oligonucleotide
cccuucagcauauaaccuu

SEQ ID NO: 2162510 - RNA, 19 nt, Artificial Sequence
  Description of Artificial Sequence: Synthetic oligonucleotide
gcuggucaaaauaccugcu

SEQ ID NO: 2162511 - RNA, 19 nt, Artificial Sequence
  Description of Artificial Sequence: Synthetic oligonucleotide
ccacaacgucuggacauug

SEQ ID NO: 2162512 - RNA, 19 nt, Artificial Sequence
  Description of Artificial Sequence: Synthetic oligonucleotide
cagacucggcuggaaccca

SEQ ID NO: 2162513 - RNA, 19 nt, Artificial Sequence
  Description of Artificial Sequence: Synthetic oligonucleotide
cccaccaggagccuaacuu

SEQ ID NO: 2162514 - RNA, 19 nt, Artificial Sequence
  Description of Artificial Sequence: Synthetic oligonucleotide
cuggaacccacgccauggu

SEQ ID NO: 2162515 - RNA, 19 nt, Artificial Sequence
  Description of Artificial Sequence: Synthetic oligonucleotide
agccuuccgucaagucaca

SEQ ID NO: 2162516 - RNA, 19 nt, Artificial Sequence
  Description of Artificial Sequence: Synthetic oligonucleotide
cccaauucuggaguaaaau

SEQ ID NO: 2162517 - RNA, 19 nt, Artificial Sequence
  Description of Artificial Sequence: Synthetic oligonucleotide
ccguggcaucaacucuucc

SEQ ID NO: 2162518 - RNA, 19 nt, Artificial Sequence
  Description of Artificial Sequence: Synthetic oligonucleotide
gcagaucagcagauucaaa

SEQ ID NO: 2162519 - RNA, 19 nt, Artificial Sequence
  Description of Artificial Sequence: Synthetic oligonucleotide
ccaauagccccuucagcau

SEQ ID NO: 2162520 - RNA, 19 nt, Artificial Sequence
  Description of Artificial Sequence: Synthetic oligonucleotide
auagccccuucagcauaua

SEQ ID NO: 2162521 - RNA, 19 nt, Artificial Sequence
  Description of Artificial Sequence: Synthetic oligonucleotide
gguauuccugaggcguccu

SEQ ID NO: 2162522 - RNA, 19 nt, Artificial Sequence
  Description of Artificial Sequence: Synthetic oligonucleotide
ccccuucagcauauaaccu

SEQ ID NO: 2162523 - RNA, 19 nt, Artificial Sequence
  Description of Artificial Sequence: Synthetic oligonucleotide
gucuggacauugagccgcu

SEQ ID NO: 2162524 - RNA, 19 nt, Artificial Sequence
  Description of Artificial Sequence: Synthetic oligonucleotide
cacugaaguguuggagaau

SEQ ID NO: 2162525 - RNA, 19 nt, Artificial Sequence
  Description of Artificial Sequence: Synthetic oligonucleotide
cgaauuagugaaugagcuu

SEQ ID NO: 2162526 - RNA, 19 nt, Artificial Sequence
  Description of Artificial Sequence: Synthetic oligonucleotide
ccgagggaucgaagccuuc

SEQ ID NO: 2162527 - RNA, 19 nt, Artificial Sequence
  Description of Artificial Sequence: Synthetic oligonucleotide
gccuaacuucagagcaucu

SEQ ID NO: 2162528 - RNA, 19 nt, Artificial Sequence
  Description of Artificial Sequence: Synthetic oligonucleotide
cgcuucgaucugcacccuc

SEQ ID NO: 2162529 - RNA, 19 nt, Artificial Sequence
  Description of Artificial Sequence: Synthetic oligonucleotide
gcccaccaggagccuaacu

SEQ ID NO: 2162530 - RNA, 19 nt, Artificial Sequence
  Description of Artificial Sequence: Synthetic oligonucleotide
cggcuggaacccacgccau

SEQ ID NO: 2162531 - RNA, 19 nt, Artificial Sequence
  Description of Artificial Sequence: Synthetic oligonucleotide
ccgcuucgaucugcacccu

SEQ ID NO: 2162532 - RNA, 19 nt, Artificial Sequence
  Description of Artificial Sequence: Synthetic oligonucleotide
aacaauuccaccgaaaugc

SEQ ID NO: 2162533 - RNA, 19 nt, Artificial Sequence
  Description of Artificial Sequence: Synthetic oligonucleotide
aacaaauuuauccucugcc

SEQ ID NO: 2162534 - RNA, 19 nt, Artificial Sequence
  Description of Artificial Sequence: Synthetic oligonucleotide
uuucuaauguuuauaaggg

SEQ ID NO: 2162535 - RNA, 19 nt, Artificial Sequence
  Description of Artificial Sequence: Synthetic oligonucleotide
aaaagagaggguucugugc

SEQ ID NO: 2162536 - RNA, 19 nt, Artificial Sequence
  Description of Artificial Sequence: Synthetic oligonucleotide
aauuauguuuuccaaaaga

SEQ ID NO: 2162537 - RNA, 19 nt, Artificial Sequence
  Description of Artificial Sequence: Synthetic oligonucleotide
uaacaaaucauuuuauuca

SEQ ID NO: 2162538 - RNA, 19 nt, Artificial Sequence
  Description of Artificial Sequence: Synthetic oligonucleotide
uauucauggcuccaaaugg

SEQ ID NO: 2162539 - RNA, 19 nt, Artificial Sequence
  Description of Artificial Sequence: Synthetic oligonucleotide
aaaguagacagauccuccc

SEQ ID NO: 2162540 - RNA, 19 nt, Artificial Sequence
  Description of Artificial Sequence: Synthetic oligonucleotide
ucaaauacaacuacuguga

SEQ ID NO: 2162541 - RNA, 19 nt, Artificial Sequence
  Description of Artificial Sequence: Synthetic oligonucleotide
gaaaggguaauuaauauug

SEQ ID NO: 2162542 - RNA, 19 nt, Artificial Sequence
  Description of Artificial Sequence: Synthetic oligonucleotide
ugaugaagcaaaauuguag

SEQ ID NO: 2162543 - RNA, 19 nt, Artificial Sequence
  Description of Artificial Sequence: Synthetic oligonucleotide
uuuauaaggguuuauguaa

SEQ ID NO: 2162544 - RNA, 19 nt, Artificial Sequence
  Description of Artificial Sequence: Synthetic oligonucleotide
aauacaacuacugugagua

SEQ ID NO: 2162545 - RNA, 19 nt, Artificial Sequence
  Description of Artificial Sequence: Synthetic oligonucleotide
ucuuugaaaguuuucauac

SEQ ID NO: 2162546 - RNA, 19 nt, Artificial Sequence
  Description of Artificial Sequence: Synthetic oligonucleotide
uuauguaaguuucauaguc

SEQ ID NO: 2162547 - RNA, 19 nt, Artificial Sequence
  Description of Artificial Sequence: Synthetic oligonucleotide
guucgcacaauauucaugg

SEQ ID NO: 2162548 - RNA, 19 nt, Artificial Sequence
  Description of Artificial Sequence: Synthetic oligonucleotide
auauugaacauuuuccuug

SEQ ID NO: 2162549 - RNA, 19 nt, Artificial Sequence
  Description of Artificial Sequence: Synthetic oligonucleotide
uuuaagaccugauauuuug

SEQ ID NO: 2162550 - RNA, 19 nt, Artificial Sequence
  Description of Artificial Sequence: Synthetic oligonucleotide
aaaauguuugccuccaaga

SEQ ID NO: 2162551 - RNA, 19 nt, Artificial Sequence
  Description of Artificial Sequence: Synthetic oligonucleotide
aaauuguagaaguugucca

SEQ ID NO: 2162552 - RNA, 19 nt, Artificial Sequence
  Description of Artificial Sequence: Synthetic oligonucleotide
uauuucacacauauaagga

SEQ ID NO: 2162553 - RNA, 19 nt, Artificial Sequence
  Description of Artificial Sequence: Synthetic oligonucleotide
ugaaagguaggcuucauga

SEQ ID NO: 2162554 - RNA, 19 nt, Artificial Sequence
  Description of Artificial Sequence: Synthetic oligonucleotide
uagaaguuguccaacaucu

SEQ ID NO: 2162555 - RNA, 19 nt, Artificial Sequence
  Description of Artificial Sequence: Synthetic oligonucleotide
uacauagcaacacaggaac

SEQ ID NO: 2162556 - RNA, 19 nt, Artificial Sequence
  Description of Artificial Sequence: Synthetic oligonucleotide
gaauuugcaggaccgaacg

SEQ ID NO: 2162557 - RNA, 19 nt, Artificial Sequence
  Description of Artificial Sequence: Synthetic oligonucleotide
aaaaguagacagauccucc

SEQ ID NO: 2162558 - RNA, 19 nt, Artificial Sequence
  Description of Artificial Sequence: Synthetic oligonucleotide
ggaugaacauuucagaugg

SEQ ID NO: 2162559 - RNA, 19 nt, Artificial Sequence
  Description of Artificial Sequence: Synthetic oligonucleotide
uaauuaauauugaacauuu

SEQ ID NO: 2162560 - RNA, 19 nt, Artificial Sequence
  Description of Artificial Sequence: Synthetic oligonucleotide
aaugagucaaccgaggaca

SEQ ID NO: 2162561 - RNA, 19 nt, Artificial Sequence
  Description of Artificial Sequence: Synthetic oligonucleotide
uucauaccauuucagaacc

SEQ ID NO: 2162562 - RNA, 19 nt, Artificial Sequence
  Description of Artificial Sequence: Synthetic oligonucleotide
aaguuucauagucacuacg

SEQ ID NO: 2162563 - RNA, 19 nt, Artificial Sequence
  Description of Artificial Sequence: Synthetic oligonucleotide
uuugaaucaggauaggaaa

SEQ ID NO: 2162564 - RNA, 19 nt, Artificial Sequence
  Description of Artificial Sequence: Synthetic oligonucleotide
auguaaguuucauagucac

SEQ ID NO: 2162565 - RNA, 19 nt, Artificial Sequence
  Description of Artificial Sequence: Synthetic oligonucleotide
aacucaagaaccuuccaga

SEQ ID NO: 2162566 - RNA, 19 nt, Artificial Sequence
  Description of Artificial Sequence: Synthetic oligonucleotide
uuuugaagauggcacuugg

SEQ ID NO: 2162567 - RNA, 19 nt, Artificial Sequence
  Description of Artificial Sequence: Synthetic oligonucleotide
aguaggauuuauuuuaaga

SEQ ID NO: 2162568 - RNA, 19 nt, Artificial Sequence
  Description of Artificial Sequence: Synthetic oligonucleotide
gaugaagcaaaauuguaga

SEQ ID NO: 2162569 - RNA, 19 nt, Artificial Sequence
  Description of Artificial Sequence: Synthetic oligonucleotide
aagguaggcuucaugaccc

SEQ ID NO: 2162570 - RNA, 19 nt, Artificial Sequence
  Description of Artificial Sequence: Synthetic oligonucleotide
uuucauaccauuucagaac

SEQ ID NO: 2162571 - RNA, 19 nt, Artificial Sequence
  Description of Artificial Sequence: Synthetic oligonucleotide
agaccugauauuuugaaga

SEQ ID NO: 2162572 - RNA, 19 nt, Artificial Sequence
  Description of Artificial Sequence: Synthetic oligonucleotide
uuuucauaccauuucagaa

SEQ ID NO: 2162573 - RNA, 19 nt, Artificial Sequence
  Description of Artificial Sequence: Synthetic oligonucleotide
auuauguuuuccaaaagag

SEQ ID NO: 2162574 - RNA, 19 nt, Artificial Sequence
  Description of Artificial Sequence: Synthetic oligonucleotide
cacuacguaguuuugaaag

SEQ ID NO: 2162575 - RNA, 19 nt, Artificial Sequence
  Description of Artificial Sequence: Synthetic oligonucleotide
aaggguuuauguaaguuuc

SEQ ID NO: 2162576 - RNA, 19 nt, Artificial Sequence
  Description of Artificial Sequence: Synthetic oligonucleotide
ugaagcaaaauuguagaag

SEQ ID NO: 2162577 - RNA, 19 nt, Artificial Sequence
  Description of Artificial Sequence: Synthetic oligonucleotide
ugcuagucgucuuugaaag

SEQ ID NO: 2162578 - RNA, 19 nt, Artificial Sequence
  Description of Artificial Sequence: Synthetic oligonucleotide
uucauagucacuacguagu

SEQ ID NO: 2162579 - RNA, 19 nt, Artificial Sequence
  Description of Artificial Sequence: Synthetic oligonucleotide
auauucauggcuccaaaug

SEQ ID NO: 2162580 - RNA, 19 nt, Artificial Sequence
  Description of Artificial Sequence: Synthetic oligonucleotide
aagaccugauauuuugaag

SEQ ID NO: 2162581 - RNA, 19 nt, Artificial Sequence
  Description of Artificial Sequence: Synthetic oligonucleotide
uuugacuucaugcuuuuaa

SEQ ID NO: 2162582 - RNA, 19 nt, Artificial Sequence
  Description of Artificial Sequence: Synthetic oligonucleotide
auucaaauuauguuuucca

SEQ ID NO: 2162583 - RNA, 19 nt, Artificial Sequence
  Description of Artificial Sequence: Synthetic oligonucleotide
auuuggugucaucugggcc

SEQ ID NO: 2162584 - RNA, 19 nt, Artificial Sequence
  Description of Artificial Sequence: Synthetic oligonucleotide
aauauugaacauuuuccuu

SEQ ID NO: 2162585 - RNA, 19 nt, Artificial Sequence
  Description of Artificial Sequence: Synthetic oligonucleotide
ugaacugcgugaaugaguc

SEQ ID NO: 2162586 - RNA, 19 nt, Artificial Sequence
  Description of Artificial Sequence: Synthetic oligonucleotide
ggauaggaaaaguagacag

SEQ ID NO: 2162587 - RNA, 19 nt, Artificial Sequence
  Description of Artificial Sequence: Synthetic oligonucleotide
uucacacauauaaggaaag

SEQ ID NO: 2162588 - RNA, 19 nt, Artificial Sequence
  Description of Artificial Sequence: Synthetic oligonucleotide
ugacagcugauacaaaaug

SEQ ID NO: 2162589 - RNA, 19 nt, Artificial Sequence
  Description of Artificial Sequence: Synthetic oligonucleotide
aggguaauuaauauugaac

SEQ ID NO: 2162590 - RNA, 19 nt, Artificial Sequence
  Description of Artificial Sequence: Synthetic oligonucleotide
acuacguaguuuugaaagg

SEQ ID NO: 2162591 - RNA, 19 nt, Artificial Sequence
  Description of Artificial Sequence: Synthetic oligonucleotide
uucgugacaaaucccagga

SEQ ID NO: 2162592 - RNA, 19 nt, Artificial Sequence
  Description of Artificial Sequence: Synthetic oligonucleotide
uuguccaacaucuucugug

SEQ ID NO: 2162593 - RNA, 19 nt, Artificial Sequence
  Description of Artificial Sequence: Synthetic oligonucleotide
ugauauuuugaagauggca

SEQ ID NO: 2162594 - RNA, 19 nt, Artificial Sequence
  Description of Artificial Sequence: Synthetic oligonucleotide
ucccauucgugacaaaucc

SEQ ID NO: 2162595 - RNA, 19 nt, Artificial Sequence
  Description of Artificial Sequence: Synthetic oligonucleotide
aauuguagaaguuguccaa

SEQ ID NO: 2162596 - RNA, 19 nt, Artificial Sequence
  Description of Artificial Sequence: Synthetic oligonucleotide
ggguaauuaauauugaaca

SEQ ID NO: 2162597 - RNA, 19 nt, Artificial Sequence
  Description of Artificial Sequence: Synthetic oligonucleotide
uggaguucgcacaauauuc

SEQ ID NO: 2162598 - RNA, 19 nt, Artificial Sequence
  Description of Artificial Sequence: Synthetic oligonucleotide
acaaauuuauccucugcca

SEQ ID NO: 2162599 - RNA, 19 nt, Artificial Sequence
  Description of Artificial Sequence: Synthetic oligonucleotide
uacaacuacugugaguagg

SEQ ID NO: 2162600 - RNA, 19 nt, Artificial Sequence
  Description of Artificial Sequence: Synthetic oligonucleotide
uauucaaauuauguuuucc

SEQ ID NO: 2162601 - RNA, 19 nt, Artificial Sequence
  Description of Artificial Sequence: Synthetic oligonucleotide
aauauucauggcuccaaau

SEQ ID NO: 2162602 - RNA, 19 nt, Artificial Sequence
  Description of Artificial Sequence: Synthetic oligonucleotide
uucaaauuauguuuuccaa

SEQ ID NO: 2162603 - RNA, 19 nt, Artificial Sequence
  Description of Artificial Sequence: Synthetic oligonucleotide
agaaccuuccagaauuugc

SEQ ID NO: 2162604 - RNA, 19 nt, Artificial Sequence
  Description of Artificial Sequence: Synthetic oligonucleotide
uuuauguaaguuucauagu

SEQ ID NO: 2162605 - RNA, 19 nt, Artificial Sequence
  Description of Artificial Sequence: Synthetic oligonucleotide
uucaugcuuuuaaauaaca

SEQ ID NO: 2162606 - RNA, 19 nt, Artificial Sequence
  Description of Artificial Sequence: Synthetic oligonucleotide
agcaaaauuguagaaguug

SEQ ID NO: 2162607 - RNA, 19 nt, Artificial Sequence
  Description of Artificial Sequence: Synthetic oligonucleotide
gaccccuuugacuucaugc

SEQ ID NO: 2162608 - RNA, 19 nt, Artificial Sequence
  Description of Artificial Sequence: Synthetic oligonucleotide
auucgugacaaaucccagg

SEQ ID NO: 2162609 - RNA, 19 nt, Artificial Sequence
  Description of Artificial Sequence: Synthetic oligonucleotide
cauggcagcgcccucagcg

SEQ ID NO: 2162610 - RNA, 19 nt, Artificial Sequence
  Description of Artificial Sequence: Synthetic oligonucleotide
ugaaugagucaaccgagga

SEQ ID NO: 2162611 - RNA, 19 nt, Artificial Sequence
  Description of Artificial Sequence: Synthetic oligonucleotide
aaggguaauuaauauugaa

SEQ ID NO: 2162612 - RNA, 19 nt, Artificial Sequence
  Description of Artificial Sequence: Synthetic oligonucleotide
agccaaacauggcagcgcc

SEQ ID NO: 2162613 - RNA, 19 nt, Artificial Sequence
  Description of Artificial Sequence: Synthetic oligonucleotide
cuuugaaaguuuucauacc

SEQ ID NO: 2162614 - RNA, 19 nt, Artificial Sequence
  Description of Artificial Sequence: Synthetic oligonucleotide
auuucacacauauaaggaa

SEQ ID NO: 2162615 - RNA, 19 nt, Artificial Sequence
  Description of Artificial Sequence: Synthetic oligonucleotide
aucaggauaggaaaaguag

SEQ ID NO: 2162616 - RNA, 19 nt, Artificial Sequence
  Description of Artificial Sequence: Synthetic oligonucleotide
caaauuuauccucugccac

SEQ ID NO: 2162617 - RNA, 19 nt, Artificial Sequence
  Description of Artificial Sequence: Synthetic oligonucleotide
guaguuuugaaagguaggc

SEQ ID NO: 2162618 - RNA, 19 nt, Artificial Sequence
  Description of Artificial Sequence: Synthetic oligonucleotide
agcuguuugcaccagccuc

SEQ ID NO: 2162619 - RNA, 19 nt, Artificial Sequence
  Description of Artificial Sequence: Synthetic oligonucleotide
aauuccgcauccgcugucc

SEQ ID NO: 2162620 - RNA, 19 nt, Artificial Sequence
  Description of Artificial Sequence: Synthetic oligonucleotide
uaacauaacaaaucauuuu

SEQ ID NO: 2162621 - RNA, 19 nt, Artificial Sequence
  Description of Artificial Sequence: Synthetic oligonucleotide
uuaagaccugauauuuuga

SEQ ID NO: 2162622 - RNA, 19 nt, Artificial Sequence
  Description of Artificial Sequence: Synthetic oligonucleotide
ucgcacaauauucauggcu

SEQ ID NO: 2162623 - RNA, 19 nt, Artificial Sequence
  Description of Artificial Sequence: Synthetic oligonucleotide
caaauuauguuuuccaaaa

SEQ ID NO: 2162624 - RNA, 19 nt, Artificial Sequence
  Description of Artificial Sequence: Synthetic oligonucleotide
uccacuacauagcaacaca

SEQ ID NO: 2162625 - RNA, 19 nt, Artificial Sequence
  Description of Artificial Sequence: Synthetic oligonucleotide
uaccauuucagaaccacau

SEQ ID NO: 2162626 - RNA, 19 nt, Artificial Sequence
  Description of Artificial Sequence: Synthetic oligonucleotide
caggauaggaaaaguagac

SEQ ID NO: 2162627 - RNA, 19 nt, Artificial Sequence
  Description of Artificial Sequence: Synthetic oligonucleotide
aaacuguccaacaauucca

SEQ ID NO: 2162628 - RNA, 19 nt, Artificial Sequence
  Description of Artificial Sequence: Synthetic oligonucleotide
accacaacaugguugauau

SEQ ID NO: 2162629 - RNA, 19 nt, Artificial Sequence
  Description of Artificial Sequence: Synthetic oligonucleotide
uauaaggaaaggguaauua

SEQ ID NO: 2162630 - RNA, 19 nt, Artificial Sequence
  Description of Artificial Sequence: Synthetic oligonucleotide
uuugaagauggcacuuggc

SEQ ID NO: 2162631 - RNA, 19 nt, Artificial Sequence
  Description of Artificial Sequence: Synthetic oligonucleotide
ugcgugaaugagucaaccg

SEQ ID NO: 2162632 - RNA, 19 nt, Artificial Sequence
  Description of Artificial Sequence: Synthetic oligonucleotide
accuuccagaauuugcagg

SEQ ID NO: 2162633 - RNA, 19 nt, Artificial Sequence
  Description of Artificial Sequence: Synthetic oligonucleotide
uaaggguuuauguaaguuu

SEQ ID NO: 2162634 - RNA, 19 nt, Artificial Sequence
  Description of Artificial Sequence: Synthetic oligonucleotide
uguccaacaauuccaccga

SEQ ID NO: 2162635 - RNA, 19 nt, Artificial Sequence
  Description of Artificial Sequence: Synthetic oligonucleotide
agacagauccucccauccc

SEQ ID NO: 2162636 - RNA, 19 nt, Artificial Sequence
  Description of Artificial Sequence: Synthetic oligonucleotide
cauagcaacacaggaacgc

SEQ ID NO: 2162637 - RNA, 19 nt, Artificial Sequence
  Description of Artificial Sequence: Synthetic oligonucleotide
aguauuucacacauauaag

SEQ ID NO: 2162638 - RNA, 19 nt, Artificial Sequence
  Description of Artificial Sequence: Synthetic oligonucleotide
ucgucuuugaaaguuuuca

SEQ ID NO: 2162639 - RNA, 19 nt, Artificial Sequence
  Description of Artificial Sequence: Synthetic oligonucleotide
ucaugcuuuuaaauaacau

SEQ ID NO: 2162640 - RNA, 19 nt, Artificial Sequence
  Description of Artificial Sequence: Synthetic oligonucleotide
gacagauccucccaucccc

SEQ ID NO: 2162641 - RNA, 19 nt, Artificial Sequence
  Description of Artificial Sequence: Synthetic oligonucleotide
gaaugagucaaccgaggac

SEQ ID NO: 2162642 - RNA, 19 nt, Artificial Sequence
  Description of Artificial Sequence: Synthetic oligonucleotide
gaggguucugugcuagucg

SEQ ID NO: 2162643 - RNA, 19 nt, Artificial Sequence
  Description of Artificial Sequence: Synthetic oligonucleotide
aacaugguugauauuuuca

SEQ ID NO: 2162644 - RNA, 19 nt, Artificial Sequence
  Description of Artificial Sequence: Synthetic oligonucleotide
gagucaaccgaggacacag

SEQ ID NO: 2162645 - RNA, 19 nt, Artificial Sequence
  Description of Artificial Sequence: Synthetic oligonucleotide
uuugcaggaccgaacguac

SEQ ID NO: 2162646 - RNA, 19 nt, Artificial Sequence
  Description of Artificial Sequence: Synthetic oligonucleotide
gauuuggugucaucugggc

SEQ ID NO: 2162647 - RNA, 19 nt, Artificial Sequence
  Description of Artificial Sequence: Synthetic oligonucleotide
aauuccaccgaaaugccaa

SEQ ID NO: 2162648 - RNA, 19 nt, Artificial Sequence
  Description of Artificial Sequence: Synthetic oligonucleotide
ucaaccgaggacacagcag

SEQ ID NO: 2162649 - RNA, 19 nt, Artificial Sequence
  Description of Artificial Sequence: Synthetic oligonucleotide
guuuauaaggguuuaugua

SEQ ID NO: 2162650 - RNA, 19 nt, Artificial Sequence
  Description of Artificial Sequence: Synthetic oligonucleotide
ugauggaacucaagaaccu

SEQ ID NO: 2162651 - RNA, 19 nt, Artificial Sequence
  Description of Artificial Sequence: Synthetic oligonucleotide
uugaaagguaggcuucaug

SEQ ID NO: 2162652 - RNA, 19 nt, Artificial Sequence
  Description of Artificial Sequence: Synthetic oligonucleotide
acuguccaacaauuccacc

SEQ ID NO: 2162653 - RNA, 19 nt, Artificial Sequence
  Description of Artificial Sequence: Synthetic oligonucleotide
guuuucauaccauuucaga

SEQ ID NO: 2162654 - RNA, 19 nt, Artificial Sequence
  Description of Artificial Sequence: Synthetic oligonucleotide
ugggaugaacauuucagau

SEQ ID NO: 2162655 - RNA, 19 nt, Artificial Sequence
  Description of Artificial Sequence: Synthetic oligonucleotide
agauuuaagaccugauauu

SEQ ID NO: 2162656 - RNA, 19 nt, Artificial Sequence
  Description of Artificial Sequence: Synthetic oligonucleotide
gacuucaugcuuuuaaaua

SEQ ID NO: 2162657 - RNA, 19 nt, Artificial Sequence
  Description of Artificial Sequence: Synthetic oligonucleotide
uccaaauggauguuggcuu

SEQ ID NO: 2162658 - RNA, 19 nt, Artificial Sequence
  Description of Artificial Sequence: Synthetic oligonucleotide
uccaccgaaaugccaaucu

SEQ ID NO: 2162659 - RNA, 19 nt, Artificial Sequence
  Description of Artificial Sequence: Synthetic oligonucleotide
aggaaaggguaauuaauau

SEQ ID NO: 2162660 - RNA, 19 nt, Artificial Sequence
  Description of Artificial Sequence: Synthetic oligonucleotide
acuacugugaguaggauuu

SEQ ID NO: 2162661 - RNA, 19 nt, Artificial Sequence
  Description of Artificial Sequence: Synthetic oligonucleotide
agcugauacaaaauguuug

SEQ ID NO: 2162662 - RNA, 19 nt, Artificial Sequence
  Description of Artificial Sequence: Synthetic oligonucleotide
agaauuugcaggaccgaac

SEQ ID NO: 2162663 - RNA, 19 nt, Artificial Sequence
  Description of Artificial Sequence: Synthetic oligonucleotide
caaaagagaggguucugug

SEQ ID NO: 2162664 - RNA, 19 nt, Artificial Sequence
  Description of Artificial Sequence: Synthetic oligonucleotide
uucagauggauuugguguc

SEQ ID NO: 2162665 - RNA, 19 nt, Artificial Sequence
  Description of Artificial Sequence: Synthetic oligonucleotide
acauuucagauggauuugg

SEQ ID NO: 2162666 - RNA, 19 nt, Artificial Sequence
  Description of Artificial Sequence: Synthetic oligonucleotide
aaggaaaggguaauuaaua

SEQ ID NO: 2162667 - RNA, 19 nt, Artificial Sequence
  Description of Artificial Sequence: Synthetic oligonucleotide
cauacuggcaccccauuug

SEQ ID NO: 2162668 - RNA, 19 nt, Artificial Sequence
  Description of Artificial Sequence: Synthetic oligonucleotide
uguagaaguuguccaacau

SEQ ID NO: 2162669 - RNA, 19 nt, Artificial Sequence
  Description of Artificial Sequence: Synthetic oligonucleotide
aacugcgugaaugagucaa

SEQ ID NO: 2162670 - RNA, 19 nt, Artificial Sequence
  Description of Artificial Sequence: Synthetic oligonucleotide
gacaaaucccaggagcugc

SEQ ID NO: 2162671 - RNA, 19 nt, Artificial Sequence
  Description of Artificial Sequence: Synthetic oligonucleotide
agaccaggaauuccgcauc

SEQ ID NO: 2162672 - RNA, 19 nt, Artificial Sequence
  Description of Artificial Sequence: Synthetic oligonucleotide
uauaaggguuuauguaagu

SEQ ID NO: 2162673 - RNA, 19 nt, Artificial Sequence
  Description of Artificial Sequence: Synthetic oligonucleotide
aguuucauagucacuacgu

SEQ ID NO: 2162674 - RNA, 19 nt, Artificial Sequence
  Description of Artificial Sequence: Synthetic oligonucleotide
uaaguuucauagucacuac

SEQ ID NO: 2162675 - RNA, 19 nt, Artificial Sequence
  Description of Artificial Sequence: Synthetic oligonucleotide
cccauuugaaucaggauag

SEQ ID NO: 2162676 - RNA, 19 nt, Artificial Sequence
  Description of Artificial Sequence: Synthetic oligonucleotide
aaaggguaauuaauauuga

SEQ ID NO: 2162677 - RNA, 19 nt, Artificial Sequence
  Description of Artificial Sequence: Synthetic oligonucleotide
gaguaggauuuauuuuaag

SEQ ID NO: 2162678 - RNA, 19 nt, Artificial Sequence
  Description of Artificial Sequence: Synthetic oligonucleotide
ugugcuagucgucuuugaa

SEQ ID NO: 2162679 - RNA, 19 nt, Artificial Sequence
  Description of Artificial Sequence: Synthetic oligonucleotide
ugaagauggcacuuggcuu

SEQ ID NO: 2162680 - RNA, 19 nt, Artificial Sequence
  Description of Artificial Sequence: Synthetic oligonucleotide
aguuuucauaccauuucag

SEQ ID NO: 2162681 - RNA, 19 nt, Artificial Sequence
  Description of Artificial Sequence: Synthetic oligonucleotide
gagcaacagauggaguucg

SEQ ID NO: 2162682 - RNA, 19 nt, Artificial Sequence
  Description of Artificial Sequence: Synthetic oligonucleotide
uccgcuguccugauggaac

SEQ ID NO: 2162683 - RNA, 19 nt, Artificial Sequence
  Description of Artificial Sequence: Synthetic oligonucleotide
acguaguuuugaaagguag

SEQ ID NO: 2162684 - RNA, 19 nt, Artificial Sequence
  Description of Artificial Sequence: Synthetic oligonucleotide
caggaacgcauucuggccc

SEQ ID NO: 2162685 - RNA, 19 nt, Artificial Sequence
  Description of Artificial Sequence: Synthetic oligonucleotide
cauccccucaggaaauggg

SEQ ID NO: 2162686 - RNA, 19 nt, Artificial Sequence
  Description of Artificial Sequence: Synthetic oligonucleotide
augaagcaaaauuguagaa

SEQ ID NO: 2162687 - RNA, 19 nt, Artificial Sequence
  Description of Artificial Sequence: Synthetic oligonucleotide
cacauauaaggaaagggua

SEQ ID NO: 2162688 - RNA, 19 nt, Artificial Sequence
  Description of Artificial Sequence: Synthetic oligonucleotide
ugcugggaugaacauuuca

SEQ ID NO: 2162689 - RNA, 19 nt, Artificial Sequence
  Description of Artificial Sequence: Synthetic oligonucleotide
gguugauauuuucauaauc

SEQ ID NO: 2162690 - RNA, 19 nt, Artificial Sequence
  Description of Artificial Sequence: Synthetic oligonucleotide
cacaggagucugcugagcc

SEQ ID NO: 2162691 - RNA, 19 nt, Artificial Sequence
  Description of Artificial Sequence: Synthetic oligonucleotide
uucccauucgugacaaauc

SEQ ID NO: 2162692 - RNA, 19 nt, Artificial Sequence
  Description of Artificial Sequence: Synthetic oligonucleotide
cugauauuuugaagauggc

SEQ ID NO: 2162693 - RNA, 19 nt, Artificial Sequence
  Description of Artificial Sequence: Synthetic oligonucleotide
acauauaaggaaaggguaa

SEQ ID NO: 2162694 - RNA, 19 nt, Artificial Sequence
  Description of Artificial Sequence: Synthetic oligonucleotide
uucauggcuccaaauggau

SEQ ID NO: 2162695 - RNA, 19 nt, Artificial Sequence
  Description of Artificial Sequence: Synthetic oligonucleotide
cauucgugacaaaucccag

SEQ ID NO: 2162696 - RNA, 19 nt, Artificial Sequence
  Description of Artificial Sequence: Synthetic oligonucleotide
acuccuccacuacauagca

SEQ ID NO: 2162697 - RNA, 19 nt, Artificial Sequence
  Description of Artificial Sequence: Synthetic oligonucleotide
aguagacagauccucccau

SEQ ID NO: 2162698 - RNA, 19 nt, Artificial Sequence
  Description of Artificial Sequence: Synthetic oligonucleotide
ugcaggaccgaacguacuc

SEQ ID NO: 2162699 - RNA, 19 nt, Artificial Sequence
  Description of Artificial Sequence: Synthetic oligonucleotide
uacguaguuuugaaaggua

SEQ ID NO: 2162700 - RNA, 19 nt, Artificial Sequence
  Description of Artificial Sequence: Synthetic oligonucleotide
auggaguucgcacaauauu

SEQ ID NO: 2162701 - RNA, 19 nt, Artificial Sequence
  Description of Artificial Sequence: Synthetic oligonucleotide
gugaaugagucaaccgagg

SEQ ID NO: 2162702 - RNA, 19 nt, Artificial Sequence
  Description of Artificial Sequence: Synthetic oligonucleotide
gauuuaagaccugauauuu

SEQ ID NO: 2162703 - RNA, 19 nt, Artificial Sequence
  Description of Artificial Sequence: Synthetic oligonucleotide
acaaaucccaggagcugcc

SEQ ID NO: 2162704 - RNA, 19 nt, Artificial Sequence
  Description of Artificial Sequence: Synthetic oligonucleotide
cgaaaugccaaucugagca

SEQ ID NO: 2162705 - RNA, 19 nt, Artificial Sequence
  Description of Artificial Sequence: Synthetic oligonucleotide
ggauuuauuuuaagaaaug

SEQ ID NO: 2162706 - RNA, 19 nt, Artificial Sequence
  Description of Artificial Sequence: Synthetic oligonucleotide
uauuuugaagauggcacuu

SEQ ID NO: 2162707 - RNA, 19 nt, Artificial Sequence
  Description of Artificial Sequence: Synthetic oligonucleotide
auacuggcaccccauuuga

SEQ ID NO: 2162708 - RNA, 19 nt, Artificial Sequence
  Description of Artificial Sequence: Synthetic oligonucleotide
acuggcaccccauuugaau

SEQ ID NO: 2162709 - RNA, 19 nt, Artificial Sequence
  Description of Artificial Sequence: Synthetic oligonucleotide
aaugccaaucugagcaaca

SEQ ID NO: 2162710 - RNA, 19 nt, Artificial Sequence
  Description of Artificial Sequence: Synthetic oligonucleotide
aggauaggaaaaguagaca

SEQ ID NO: 2162711 - RNA, 19 nt, Artificial Sequence
  Description of Artificial Sequence: Synthetic oligonucleotide
caacaugguugauauuuuc

SEQ ID NO: 2162712 - RNA, 19 nt, Artificial Sequence
  Description of Artificial Sequence: Synthetic oligonucleotide
ugccaaucugagcaacaga

SEQ ID NO: 2162713 - RNA, 19 nt, Artificial Sequence
  Description of Artificial Sequence: Synthetic oligonucleotide
aaaucccaggagcugccau

SEQ ID NO: 2162714 - RNA, 19 nt, Artificial Sequence
  Description of Artificial Sequence: Synthetic oligonucleotide
uuugcaccagccuccccgc

SEQ ID NO: 2162715 - RNA, 19 nt, Artificial Sequence
  Description of Artificial Sequence: Synthetic oligonucleotide
ucauaccauuucagaacca

SEQ ID NO: 2162716 - RNA, 19 nt, Artificial Sequence
  Description of Artificial Sequence: Synthetic oligonucleotide
gauccucccauccccucag

SEQ ID NO: 2162717 - RNA, 19 nt, Artificial Sequence
  Description of Artificial Sequence: Synthetic oligonucleotide
aaucccaggagcugccaua

SEQ ID NO: 2162718 - RNA, 19 nt, Artificial Sequence
  Description of Artificial Sequence: Synthetic oligonucleotide
acaacuacugugaguagga

SEQ ID NO: 2162719 - RNA, 19 nt, Artificial Sequence
  Description of Artificial Sequence: Synthetic oligonucleotide
agauggauuuggugucauc

SEQ ID NO: 2162720 - RNA, 19 nt, Artificial Sequence
  Description of Artificial Sequence: Synthetic oligonucleotide
gaacguacuccuccacuac

SEQ ID NO: 2162721 - RNA, 19 nt, Artificial Sequence
  Description of Artificial Sequence: Synthetic oligonucleotide
gaccaggaauuccgcaucc

SEQ ID NO: 2162722 - RNA, 19 nt, Artificial Sequence
  Description of Artificial Sequence: Synthetic oligonucleotide
ucauagucacuacguaguu

SEQ ID NO: 2162723 - RNA, 19 nt, Artificial Sequence
  Description of Artificial Sequence: Synthetic oligonucleotide
acauagcaacacaggaacg

SEQ ID NO: 2162724 - RNA, 19 nt, Artificial Sequence
  Description of Artificial Sequence: Synthetic oligonucleotide
auacaacuacugugaguag

SEQ ID NO: 2162725 - RNA, 19 nt, Artificial Sequence
  Description of Artificial Sequence: Synthetic oligonucleotide
ucacuacguaguuuugaaa

SEQ ID NO: 2162726 - RNA, 19 nt, Artificial Sequence
  Description of Artificial Sequence: Synthetic oligonucleotide
auagcaacacaggaacgca

SEQ ID NO: 2162727 - RNA, 19 nt, Artificial Sequence
  Description of Artificial Sequence: Synthetic oligonucleotide
ucugugcuagucgucuuug

SEQ ID NO: 2162728 - RNA, 19 nt, Artificial Sequence
  Description of Artificial Sequence: Synthetic oligonucleotide
ugacaaaucccaggagcug

SEQ ID NO: 2162729 - RNA, 19 nt, Artificial Sequence
  Description of Artificial Sequence: Synthetic oligonucleotide
agguaggcuucaugacccc

SEQ ID NO: 2162730 - RNA, 19 nt, Artificial Sequence
  Description of Artificial Sequence: Synthetic oligonucleotide
auaaggguuuauguaaguu

SEQ ID NO: 2162731 - RNA, 19 nt, Artificial Sequence
  Description of Artificial Sequence: Synthetic oligonucleotide
aguucgcacaauauucaug

SEQ ID NO: 2162732 - RNA, 19 nt, Artificial Sequence
  Description of Artificial Sequence: Synthetic oligonucleotide
aaccacaacaugguugaua

SEQ ID NO: 2162733 - RNA, 19 nt, Artificial Sequence
  Description of Artificial Sequence: Synthetic oligonucleotide
auuugcaggaccgaacgua

SEQ ID NO: 2162734 - RNA, 19 nt, Artificial Sequence
  Description of Artificial Sequence: Synthetic oligonucleotide
uccgccagcgggcaccuca

SEQ ID NO: 2162735 - RNA, 19 nt, Artificial Sequence
  Description of Artificial Sequence: Synthetic oligonucleotide
agagaggguucugugcuag

SEQ ID NO: 2162736 - RNA, 19 nt, Artificial Sequence
  Description of Artificial Sequence: Synthetic oligonucleotide
gaaaugccaaucugagcaa

SEQ ID NO: 2162737 - RNA, 19 nt, Artificial Sequence
  Description of Artificial Sequence: Synthetic oligonucleotide
uucgcacaauauucauggc

SEQ ID NO: 2162738 - RNA, 19 nt, Artificial Sequence
  Description of Artificial Sequence: Synthetic oligonucleotide
gucacuacguaguuuugaa

SEQ ID NO: 2162739 - RNA, 19 nt, Artificial Sequence
  Description of Artificial Sequence: Synthetic oligonucleotide
augccaaucugagcaacag

SEQ ID NO: 2162740 - RNA, 19 nt, Artificial Sequence
  Description of Artificial Sequence: Synthetic oligonucleotide
caucuucugugugaacugc

SEQ ID NO: 2162741 - RNA, 19 nt, Artificial Sequence
  Description of Artificial Sequence: Synthetic oligonucleotide
gaacauuuuccuugcucaa

SEQ ID NO: 2162742 - RNA, 19 nt, Artificial Sequence
  Description of Artificial Sequence: Synthetic oligonucleotide
uccgcauccgcuguccuga

SEQ ID NO: 2162743 - RNA, 19 nt, Artificial Sequence
  Description of Artificial Sequence: Synthetic oligonucleotide
ggauuuggugucaucuggg

SEQ ID NO: 2162744 - RNA, 19 nt, Artificial Sequence
  Description of Artificial Sequence: Synthetic oligonucleotide
accgaacguacuccuccac

SEQ ID NO: 2162745 - RNA, 19 nt, Artificial Sequence
  Description of Artificial Sequence: Synthetic oligonucleotide
gacagcugauacaaaaugu

SEQ ID NO: 2162746 - RNA, 19 nt, Artificial Sequence
  Description of Artificial Sequence: Synthetic oligonucleotide
caccgaaaugccaaucuga

SEQ ID NO: 2162747 - RNA, 19 nt, Artificial Sequence
  Description of Artificial Sequence: Synthetic oligonucleotide
uagucacuacguaguuuug

SEQ ID NO: 2162748 - RNA, 19 nt, Artificial Sequence
  Description of Artificial Sequence: Synthetic oligonucleotide
uagcaacacaggaacgcau

SEQ ID NO: 2162749 - RNA, 19 nt, Artificial Sequence
  Description of Artificial Sequence: Synthetic oligonucleotide
ggaccgaacguacuccucc

SEQ ID NO: 2162750 - RNA, 19 nt, Artificial Sequence
  Description of Artificial Sequence: Synthetic oligonucleotide
gucaaccgaggacacagca

SEQ ID NO: 2162751 - RNA, 19 nt, Artificial Sequence
  Description of Artificial Sequence: Synthetic oligonucleotide
cuaauguuuauaaggguuu

SEQ ID NO: 2162752 - RNA, 19 nt, Artificial Sequence
  Description of Artificial Sequence: Synthetic oligonucleotide
guuucauagucacuacgua

SEQ ID NO: 2162753 - RNA, 19 nt, Artificial Sequence
  Description of Artificial Sequence: Synthetic oligonucleotide
caaauggauguuggcuucc

SEQ ID NO: 2162754 - RNA, 19 nt, Artificial Sequence
  Description of Artificial Sequence: Synthetic oligonucleotide
augagucaaccgaggacac

SEQ ID NO: 2162755 - RNA, 19 nt, Artificial Sequence
  Description of Artificial Sequence: Synthetic oligonucleotide
ccggagaccaggaauuccg

SEQ ID NO: 2162756 - RNA, 19 nt, Artificial Sequence
  Description of Artificial Sequence: Synthetic oligonucleotide
uagucgucuuugaaaguuu

SEQ ID NO: 2162757 - RNA, 19 nt, Artificial Sequence
  Description of Artificial Sequence: Synthetic oligonucleotide
agauccucccauccccuca

SEQ ID NO: 2162758 - RNA, 19 nt, Artificial Sequence
  Description of Artificial Sequence: Synthetic oligonucleotide
agaaccacauuugcuggga

SEQ ID NO: 2162759 - RNA, 19 nt, Artificial Sequence
  Description of Artificial Sequence: Synthetic oligonucleotide
cuccacuacauagcaacac

SEQ ID NO: 2162760 - RNA, 19 nt, Artificial Sequence
  Description of Artificial Sequence: Synthetic oligonucleotide
guagacagauccucccauc

SEQ ID NO: 2162761 - RNA, 19 nt, Artificial Sequence
  Description of Artificial Sequence: Synthetic oligonucleotide
uccccucaggaaaugggau

SEQ ID NO: 2162762 - RNA, 19 nt, Artificial Sequence
  Description of Artificial Sequence: Synthetic oligonucleotide
gcgugaaugagucaaccga

SEQ ID NO: 2162763 - RNA, 19 nt, Artificial Sequence
  Description of Artificial Sequence: Synthetic oligonucleotide
ggaaaugggauuguuccca

SEQ ID NO: 2162764 - RNA, 19 nt, Artificial Sequence
  Description of Artificial Sequence: Synthetic oligonucleotide
cagcgggcaccucaggccg

SEQ ID NO: 2162765 - RNA, 19 nt, Artificial Sequence
  Description of Artificial Sequence: Synthetic oligonucleotide
acugcgugaaugagucaac

SEQ ID NO: 2162766 - RNA, 19 nt, Artificial Sequence
  Description of Artificial Sequence: Synthetic oligonucleotide
cugcgugaaugagucaacc

SEQ ID NO: 2162767 - RNA, 19 nt, Artificial Sequence
  Description of Artificial Sequence: Synthetic oligonucleotide
caccccauuugaaucagga

SEQ ID NO: 2162768 - RNA, 19 nt, Artificial Sequence
  Description of Artificial Sequence: Synthetic oligonucleotide
gugcuagucgucuuugaaa

SEQ ID NO: 2162769 - RNA, 19 nt, Artificial Sequence
  Description of Artificial Sequence: Synthetic oligonucleotide
aagcaaaauuguagaaguu

SEQ ID NO: 2162770 - RNA, 19 nt, Artificial Sequence
  Description of Artificial Sequence: Synthetic oligonucleotide
auaccauuucagaaccaca

SEQ ID NO: 2162771 - RNA, 19 nt, Artificial Sequence
  Description of Artificial Sequence: Synthetic oligonucleotide
cgugaaugagucaaccgag

SEQ ID NO: 2162772 - RNA, 19 nt, Artificial Sequence
  Description of Artificial Sequence: Synthetic oligonucleotide
auauaaggaaaggguaauu

SEQ ID NO: 2162773 - RNA, 19 nt, Artificial Sequence
  Description of Artificial Sequence: Synthetic oligonucleotide
agcgccucugcuccgccag

SEQ ID NO: 2162774 - RNA, 19 nt, Artificial Sequence
  Description of Artificial Sequence: Synthetic oligonucleotide
aagagaggguucugugcua

SEQ ID NO: 2162775 - RNA, 19 nt, Artificial Sequence
  Description of Artificial Sequence: Synthetic oligonucleotide
gauggcacuuggcuuccca

SEQ ID NO: 2162776 - RNA, 19 nt, Artificial Sequence
  Description of Artificial Sequence: Synthetic oligonucleotide
ggcuccaaauggauguugg

SEQ ID NO: 2162777 - RNA, 19 nt, Artificial Sequence
  Description of Artificial Sequence: Synthetic oligonucleotide
caugguugauauuuucaua

SEQ ID NO: 2162778 - RNA, 19 nt, Artificial Sequence
  Description of Artificial Sequence: Synthetic oligonucleotide
augaugaagcaaaauugua

SEQ ID NO: 2162779 - RNA, 19 nt, Artificial Sequence
  Description of Artificial Sequence: Synthetic oligonucleotide
agucaaccgaggacacagc

SEQ ID NO: 2162780 - RNA, 19 nt, Artificial Sequence
  Description of Artificial Sequence: Synthetic oligonucleotide
cuucaugaccccuuugacu

SEQ ID NO: 2162781 - RNA, 19 nt, Artificial Sequence
  Description of Artificial Sequence: Synthetic oligonucleotide
cgcacaauauucauggcuc

SEQ ID NO: 2162782 - RNA, 19 nt, Artificial Sequence
  Description of Artificial Sequence: Synthetic oligonucleotide
augacagcugauacaaaau

SEQ ID NO: 2162783 - RNA, 19 nt, Artificial Sequence
  Description of Artificial Sequence: Synthetic oligonucleotide
cucugcuccgccagcgggc

SEQ ID NO: 2162784 - RNA, 19 nt, Artificial Sequence
  Description of Artificial Sequence: Synthetic oligonucleotide
ggcuucaugaccccuuuga

SEQ ID NO: 2162785 - RNA, 19 nt, Artificial Sequence
  Description of Artificial Sequence: Synthetic oligonucleotide
ccauucgugacaaauccca

SEQ ID NO: 2162786 - RNA, 19 nt, Artificial Sequence
  Description of Artificial Sequence: Synthetic oligonucleotide
gagaccaggaauuccgcau

SEQ ID NO: 2162787 - RNA, 19 nt, Artificial Sequence
  Description of Artificial Sequence: Synthetic oligonucleotide
ugaccccuuugacuucaug

SEQ ID NO: 2162788 - RNA, 19 nt, Artificial Sequence
  Description of Artificial Sequence: Synthetic oligonucleotide
uuccuugcucaauguuucu

SEQ ID NO: 2162789 - RNA, 19 nt, Artificial Sequence
  Description of Artificial Sequence: Synthetic oligonucleotide
ccugagagagagcaaauga

SEQ ID NO: 2162790 - RNA, 19 nt, Artificial Sequence
  Description of Artificial Sequence: Synthetic oligonucleotide
uuccgcauccgcuguccug

SEQ ID NO: 2162791 - RNA, 19 nt, Artificial Sequence
  Description of Artificial Sequence: Synthetic oligonucleotide
accccauuugaaucaggau

SEQ ID NO: 2162792 - RNA, 19 nt, Artificial Sequence
  Description of Artificial Sequence: Synthetic oligonucleotide
gcuguuugcaccagccucc

SEQ ID NO: 2162793 - RNA, 19 nt, Artificial Sequence
  Description of Artificial Sequence: Synthetic oligonucleotide
accaggaauuccgcauccg

SEQ ID NO: 2162794 - RNA, 19 nt, Artificial Sequence
  Description of Artificial Sequence: Synthetic oligonucleotide
uacugugaguaggauuuau

SEQ ID NO: 2162795 - RNA, 19 nt, Artificial Sequence
  Description of Artificial Sequence: Synthetic oligonucleotide
cugagagagagcaaaugau

SEQ ID NO: 2162796 - RNA, 19 nt, Artificial Sequence
  Description of Artificial Sequence: Synthetic oligonucleotide
caauuccaccgaaaugcca

SEQ ID NO: 2162797 - RNA, 19 nt, Artificial Sequence
  Description of Artificial Sequence: Synthetic oligonucleotide
cugugaguaggauuuauuu

SEQ ID NO: 2162798 - RNA, 19 nt, Artificial Sequence
  Description of Artificial Sequence: Synthetic oligonucleotide
ccuuccagaauuugcagga

SEQ ID NO: 2162799 - RNA, 19 nt, Artificial Sequence
  Description of Artificial Sequence: Synthetic oligonucleotide
uggcuccaaauggauguug

SEQ ID NO: 2162800 - RNA, 19 nt, Artificial Sequence
  Description of Artificial Sequence: Synthetic oligonucleotide
acaaaauguuugccuccaa

SEQ ID NO: 2162801 - RNA, 19 nt, Artificial Sequence
  Description of Artificial Sequence: Synthetic oligonucleotide
gcagccaaacauggcagcg

SEQ ID NO: 2162802 - RNA, 19 nt, Artificial Sequence
  Description of Artificial Sequence: Synthetic oligonucleotide
gcaaaauuguagaaguugu

SEQ ID NO: 2162803 - RNA, 19 nt, Artificial Sequence
  Description of Artificial Sequence: Synthetic oligonucleotide
gaccgaacguacuccucca

SEQ ID NO: 2162804 - RNA, 19 nt, Artificial Sequence
  Description of Artificial Sequence: Synthetic oligonucleotide
gguuuauguaaguuucaua

SEQ ID NO: 2162805 - RNA, 19 nt, Artificial Sequence
  Description of Artificial Sequence: Synthetic oligonucleotide
auuccaccgaaaugccaau

SEQ ID NO: 2162806 - RNA, 19 nt, Artificial Sequence
  Description of Artificial Sequence: Synthetic oligonucleotide
uguuugccuccaagaagua

SEQ ID NO: 2162807 - RNA, 19 nt, Artificial Sequence
  Description of Artificial Sequence: Synthetic oligonucleotide
cugagccaaacuguccaac

SEQ ID NO: 2162808 - RNA, 19 nt, Artificial Sequence
  Description of Artificial Sequence: Synthetic oligonucleotide
gaauuccgcauccgcuguc

SEQ ID NO: 2162809 - RNA, 19 nt, Artificial Sequence
  Description of Artificial Sequence: Synthetic oligonucleotide
uuggugucaucugggccug

SEQ ID NO: 2162810 - RNA, 19 nt, Artificial Sequence
  Description of Artificial Sequence: Synthetic oligonucleotide
uacuggcaccccauuugaa

SEQ ID NO: 2162811 - RNA, 19 nt, Artificial Sequence
  Description of Artificial Sequence: Synthetic oligonucleotide
cagccaaacauggcagcgc

SEQ ID NO: 2162812 - RNA, 19 nt, Artificial Sequence
  Description of Artificial Sequence: Synthetic oligonucleotide
cucccauccccucaggaaa

SEQ ID NO: 2162813 - RNA, 19 nt, Artificial Sequence
  Description of Artificial Sequence: Synthetic oligonucleotide
ccaggaauuccgcauccgc

SEQ ID NO: 2162814 - RNA, 19 nt, Artificial Sequence
  Description of Artificial Sequence: Synthetic oligonucleotide
auggcacuuggcuucccau

SEQ ID NO: 2162815 - RNA, 19 nt, Artificial Sequence
  Description of Artificial Sequence: Synthetic oligonucleotide
gcuucaugaccccuuugac

SEQ ID NO: 2162816 - RNA, 19 nt, Artificial Sequence
  Description of Artificial Sequence: Synthetic oligonucleotide
ccaaacuguccaacaauuc

SEQ ID NO: 2162817 - RNA, 19 nt, Artificial Sequence
  Description of Artificial Sequence: Synthetic oligonucleotide
ggaguucgcacaauauuca

SEQ ID NO: 2162818 - RNA, 19 nt, Artificial Sequence
  Description of Artificial Sequence: Synthetic oligonucleotide
aggguuuauguaaguuuca

SEQ ID NO: 2162819 - RNA, 19 nt, Artificial Sequence
  Description of Artificial Sequence: Synthetic oligonucleotide
ccaaauggauguuggcuuc

SEQ ID NO: 2162820 - RNA, 19 nt, Artificial Sequence
  Description of Artificial Sequence: Synthetic oligonucleotide
ugcuccgccagcgggcacc

SEQ ID NO: 2162821 - RNA, 19 nt, Artificial Sequence
  Description of Artificial Sequence: Synthetic oligonucleotide
aaccgaggacacagcagca

SEQ ID NO: 2162822 - RNA, 19 nt, Artificial Sequence
  Description of Artificial Sequence: Synthetic oligonucleotide
cacaauauucauggcucca

SEQ ID NO: 2162823 - RNA, 19 nt, Artificial Sequence
  Description of Artificial Sequence: Synthetic oligonucleotide
gcuccaaauggauguuggc

SEQ ID NO: 2162824 - RNA, 19 nt, Artificial Sequence
  Description of Artificial Sequence: Synthetic oligonucleotide
cuacguaguuuugaaaggu

SEQ ID NO: 2162825 - RNA, 19 nt, Artificial Sequence
  Description of Artificial Sequence: Synthetic oligonucleotide
cccauucgugacaaauccc

SEQ ID NO: 2162826 - RNA, 19 nt, Artificial Sequence
  Description of Artificial Sequence: Synthetic oligonucleotide
ggaaaggguaauuaauauu

SEQ ID NO: 2162827 - RNA, 19 nt, Artificial Sequence
  Description of Artificial Sequence: Synthetic oligonucleotide
ucugcuccgccagcgggca

SEQ ID NO: 2162828 - RNA, 19 nt, Artificial Sequence
  Description of Artificial Sequence: Synthetic oligonucleotide
gcacuuggcuucccauucg

SEQ ID NO: 2162829 - RNA, 19 nt, Artificial Sequence
  Description of Artificial Sequence: Synthetic oligonucleotide
gagucugcugagccaaacu

SEQ ID NO: 2162830 - RNA, 19 nt, Artificial Sequence
  Description of Artificial Sequence: Synthetic oligonucleotide
agcaacacaggaacgcauu

SEQ ID NO: 2162831 - RNA, 19 nt, Artificial Sequence
  Description of Artificial Sequence: Synthetic oligonucleotide
ccgaaaugccaaucugagc

SEQ ID NO: 2162832 - RNA, 19 nt, Artificial Sequence
  Description of Artificial Sequence: Synthetic oligonucleotide
cagaauuugcaggaccgaa

SEQ ID NO: 2162833 - RNA, 19 nt, Artificial Sequence
  Description of Artificial Sequence: Synthetic oligonucleotide
gaguucgcacaauauucau

SEQ ID NO: 2162834 - RNA, 19 nt, Artificial Sequence
  Description of Artificial Sequence: Synthetic oligonucleotide
uuccaccgaaaugccaauc

SEQ ID NO: 2162835 - RNA, 19 nt, Artificial Sequence
  Description of Artificial Sequence: Synthetic oligonucleotide
gcccacaggagucugcuga

SEQ ID NO: 2162836 - RNA, 19 nt, Artificial Sequence
  Description of Artificial Sequence: Synthetic oligonucleotide
ccagcgggcaccucaggcc

SEQ ID NO: 2162837 - RNA, 19 nt, Artificial Sequence
  Description of Artificial Sequence: Synthetic oligonucleotide
agucgucuuugaaaguuuu

SEQ ID NO: 2162838 - RNA, 19 nt, Artificial Sequence
  Description of Artificial Sequence: Synthetic oligonucleotide
aggcuucaugaccccuuug

SEQ ID NO: 2162839 - RNA, 19 nt, Artificial Sequence
  Description of Artificial Sequence: Synthetic oligonucleotide
cccucagcgccucugcucc

SEQ ID NO: 2162840 - RNA, 19 nt, Artificial Sequence
  Description of Artificial Sequence: Synthetic oligonucleotide
aggaccgaacguacuccuc

SEQ ID NO: 2162841 - RNA, 19 nt, Artificial Sequence
  Description of Artificial Sequence: Synthetic oligonucleotide
uugcugggaugaacauuuc

SEQ ID NO: 2162842 - RNA, 19 nt, Artificial Sequence
  Description of Artificial Sequence: Synthetic oligonucleotide
cuagucgucuuugaaaguu

SEQ ID NO: 2162843 - RNA, 19 nt, Artificial Sequence
  Description of Artificial Sequence: Synthetic oligonucleotide
agauggcacuuggcuuccc

SEQ ID NO: 2162844 - RNA, 19 nt, Artificial Sequence
  Description of Artificial Sequence: Synthetic oligonucleotide
caaacauggcagcgcccuc

SEQ ID NO: 2162845 - RNA, 19 nt, Artificial Sequence
  Description of Artificial Sequence: Synthetic oligonucleotide
ugggccugagagagagcaa

SEQ ID NO: 2162846 - RNA, 19 nt, Artificial Sequence
  Description of Artificial Sequence: Synthetic oligonucleotide
acguacuccuccacuacau

SEQ ID NO: 2162847 - RNA, 19 nt, Artificial Sequence
  Description of Artificial Sequence: Synthetic oligonucleotide
cccucaggaaaugggauug

SEQ ID NO: 2162848 - RNA, 19 nt, Artificial Sequence
  Description of Artificial Sequence: Synthetic oligonucleotide
gugaacugcgugaaugagu

SEQ ID NO: 2162849 - RNA, 19 nt, Artificial Sequence
  Description of Artificial Sequence: Synthetic oligonucleotide
gcaggaccgaacguacucc

SEQ ID NO: 2162850 - RNA, 19 nt, Artificial Sequence
  Description of Artificial Sequence: Synthetic oligonucleotide
gauggaacucaagaaccuu

SEQ ID NO: 2162851 - RNA, 19 nt, Artificial Sequence
  Description of Artificial Sequence: Synthetic oligonucleotide
cagcugauacaaaauguuu

SEQ ID NO: 2162852 - RNA, 19 nt, Artificial Sequence
  Description of Artificial Sequence: Synthetic oligonucleotide
ccaccgaaaugccaaucug

SEQ ID NO: 2162853 - RNA, 19 nt, Artificial Sequence
  Description of Artificial Sequence: Synthetic oligonucleotide
gccagcgggcaccucaggc

SEQ ID NO: 2162854 - RNA, 19 nt, Artificial Sequence
  Description of Artificial Sequence: Synthetic oligonucleotide
aaaccacaacaugguugau

SEQ ID NO: 2162855 - RNA, 19 nt, Artificial Sequence
  Description of Artificial Sequence: Synthetic oligonucleotide
cuugcucaauguuucuaau

SEQ ID NO: 2162856 - RNA, 19 nt, Artificial Sequence
  Description of Artificial Sequence: Synthetic oligonucleotide
ccuugcucaauguuucuaa

SEQ ID NO: 2162857 - RNA, 19 nt, Artificial Sequence
  Description of Artificial Sequence: Synthetic oligonucleotide
ggaaaaguagacagauccu

SEQ ID NO: 2162858 - RNA, 19 nt, Artificial Sequence
  Description of Artificial Sequence: Synthetic oligonucleotide
guccaacaauuccaccgaa

SEQ ID NO: 2162859 - RNA, 19 nt, Artificial Sequence
  Description of Artificial Sequence: Synthetic oligonucleotide
cugugcuagucgucuuuga

SEQ ID NO: 2162860 - RNA, 19 nt, Artificial Sequence
  Description of Artificial Sequence: Synthetic oligonucleotide
ccauuugaaucaggauagg

SEQ ID NO: 2162861 - RNA, 19 nt, Artificial Sequence
  Description of Artificial Sequence: Synthetic oligonucleotide
gggauuguucccagcauaa

SEQ ID NO: 2162862 - RNA, 19 nt, Artificial Sequence
  Description of Artificial Sequence: Synthetic oligonucleotide
cucagcgccucugcuccgc

SEQ ID NO: 2162863 - RNA, 19 nt, Artificial Sequence
  Description of Artificial Sequence: Synthetic oligonucleotide
aggccggagaccaggaauu

SEQ ID NO: 2162864 - RNA, 19 nt, Artificial Sequence
  Description of Artificial Sequence: Synthetic oligonucleotide
ucccaggagcugccauacu

SEQ ID NO: 2162865 - RNA, 19 nt, Artificial Sequence
  Description of Artificial Sequence: Synthetic oligonucleotide
gcaacagauggaguucgca

SEQ ID NO: 2162866 - RNA, 19 nt, Artificial Sequence
  Description of Artificial Sequence: Synthetic oligonucleotide
cuguccugauggaacucaa

SEQ ID NO: 2162867 - RNA, 19 nt, Artificial Sequence
  Description of Artificial Sequence: Synthetic oligonucleotide
ggcaccccauuugaaucag

SEQ ID NO: 2162868 - RNA, 19 nt, Artificial Sequence
  Description of Artificial Sequence: Synthetic oligonucleotide
caacacaggaacgcauucu

SEQ ID NO: 2162869 - RNA, 19 nt, Artificial Sequence
  Description of Artificial Sequence: Synthetic oligonucleotide
ggagucugcugagccaaac

SEQ ID NO: 2162870 - RNA, 19 nt, Artificial Sequence
  Description of Artificial Sequence: Synthetic oligonucleotide
ccauccccucaggaaaugg

SEQ ID NO: 2162871 - RNA, 19 nt, Artificial Sequence
  Description of Artificial Sequence: Synthetic oligonucleotide
ggaauuccgcauccgcugu

SEQ ID NO: 2162872 - RNA, 19 nt, Artificial Sequence
  Description of Artificial Sequence: Synthetic oligonucleotide
caggaccgaacguacuccu

SEQ ID NO: 2162873 - RNA, 19 nt, Artificial Sequence
  Description of Artificial Sequence: Synthetic oligonucleotide
cagcacugcccacaggagu

SEQ ID NO: 2162874 - RNA, 19 nt, Artificial Sequence
  Description of Artificial Sequence: Synthetic oligonucleotide
caaaucccaggagcugcca

SEQ ID NO: 2162875 - RNA, 19 nt, Artificial Sequence
  Description of Artificial Sequence: Synthetic oligonucleotide
guuugccuccaagaaguau

SEQ ID NO: 2162876 - RNA, 19 nt, Artificial Sequence
  Description of Artificial Sequence: Synthetic oligonucleotide
cuccuccacuacauagcaa

SEQ ID NO: 2162877 - RNA, 19 nt, Artificial Sequence
  Description of Artificial Sequence: Synthetic oligonucleotide
gcugccauacuggcacccc

SEQ ID NO: 2162878 - RNA, 19 nt, Artificial Sequence
  Description of Artificial Sequence: Synthetic oligonucleotide
gccggagaccaggaauucc

SEQ ID NO: 2162879 - RNA, 19 nt, Artificial Sequence
  Description of Artificial Sequence: Synthetic oligonucleotide
caggccggagaccaggaau

SEQ ID NO: 2162880 - RNA, 19 nt, Artificial Sequence
  Description of Artificial Sequence: Synthetic oligonucleotide
gagaggguucugugcuagu

SEQ ID NO: 2162881 - RNA, 19 nt, Artificial Sequence
  Description of Artificial Sequence: Synthetic oligonucleotide
cauagucacuacguaguuu

SEQ ID NO: 2162882 - RNA, 19 nt, Artificial Sequence
  Description of Artificial Sequence: Synthetic oligonucleotide
ggguuuauguaaguuucau

SEQ ID NO: 2162883 - RNA, 19 nt, Artificial Sequence
  Description of Artificial Sequence: Synthetic oligonucleotide
ccuccacuacauagcaaca

SEQ ID NO: 2162884 - RNA, 19 nt, Artificial Sequence
  Description of Artificial Sequence: Synthetic oligonucleotide
ggauuguucccagcauaaa

SEQ ID NO: 2162885 - RNA, 19 nt, Artificial Sequence
  Description of Artificial Sequence: Synthetic oligonucleotide
gugcagcuguuugcaccag

SEQ ID NO: 2162886 - RNA, 19 nt, Artificial Sequence
  Description of Artificial Sequence: Synthetic oligonucleotide
uccccgccaccaggcagcc

SEQ ID NO: 2162887 - RNA, 19 nt, Artificial Sequence
  Description of Artificial Sequence: Synthetic oligonucleotide
gcaccccauuugaaucagg

SEQ ID NO: 2162888 - RNA, 19 nt, Artificial Sequence
  Description of Artificial Sequence: Synthetic oligonucleotide
guaggcuucaugaccccuu

SEQ ID NO: 2162889 - RNA, 19 nt, Artificial Sequence
  Description of Artificial Sequence: Synthetic oligonucleotide
ccuccccgccaccaggcag

SEQ ID NO: 2162890 - RNA, 19 nt, Artificial Sequence
  Description of Artificial Sequence: Synthetic oligonucleotide
gcuagucgucuuugaaagu

SEQ ID NO: 2162891 - RNA, 19 nt, Artificial Sequence
  Description of Artificial Sequence: Synthetic oligonucleotide
cgaacguacuccuccacua

SEQ ID NO: 2162892 - RNA, 19 nt, Artificial Sequence
  Description of Artificial Sequence: Synthetic oligonucleotide
gccaaacauggcagcgccc

SEQ ID NO: 2162893 - RNA, 19 nt, Artificial Sequence
  Description of Artificial Sequence: Synthetic oligonucleotide
gcccucagcgccucugcuc

SEQ ID NO: 2162894 - RNA, 19 nt, Artificial Sequence
  Description of Artificial Sequence: Synthetic oligonucleotide
cccgccaccaggcagccaa

SEQ ID NO: 2162895 - RNA, 19 nt, Artificial Sequence
  Description of Artificial Sequence: Synthetic oligonucleotide
cagcuguuugcaccagccu

SEQ ID NO: 2162896 - RNA, 19 nt, Artificial Sequence
  Description of Artificial Sequence: Synthetic oligonucleotide
cuacugugaguaggauuua

SEQ ID NO: 2162897 - RNA, 19 nt, Artificial Sequence
  Description of Artificial Sequence: Synthetic oligonucleotide
gggcaccucaggccggaga

SEQ ID NO: 2162898 - RNA, 19 nt, Artificial Sequence
  Description of Artificial Sequence: Synthetic oligonucleotide
uggugucaucugggccuga

SEQ ID NO: 2162899 - RNA, 19 nt, Artificial Sequence
  Description of Artificial Sequence: Synthetic oligonucleotide
gcaccucaggccggagacc

SEQ ID NO: 2162900 - RNA, 19 nt, Artificial Sequence
  Description of Artificial Sequence: Synthetic oligonucleotide
gcgcccucagcgccucugc

SEQ ID NO: 2162901 - RNA, 19 nt, Artificial Sequence
  Description of Artificial Sequence: Synthetic oligonucleotide
aggagucugcugagccaaa

SEQ ID NO: 2162902 - RNA, 19 nt, Artificial Sequence
  Description of Artificial Sequence: Synthetic oligonucleotide
gguaggcuucaugaccccu

SEQ ID NO: 2162903 - RNA, 19 nt, Artificial Sequence
  Description of Artificial Sequence: Synthetic oligonucleotide
ggccggagaccaggaauuc

SEQ ID NO: 2162904 - RNA, 19 nt, Artificial Sequence
  Description of Artificial Sequence: Synthetic oligonucleotide
ccgaacguacuccuccacu

SEQ ID NO: 2162905 - RNA, 19 nt, Artificial Sequence
  Description of Artificial Sequence: Synthetic oligonucleotide
cagauggauuuggugucau

SEQ ID NO: 2162906 - RNA, 19 nt, Artificial Sequence
  Description of Artificial Sequence: Synthetic oligonucleotide
cugcuccgccagcgggcac

SEQ ID NO: 2162907 - RNA, 19 nt, Artificial Sequence
  Description of Artificial Sequence: Synthetic oligonucleotide
cccauccccucaggaaaug

SEQ ID NO: 2162908 - RNA, 19 nt, Artificial Sequence
  Description of Artificial Sequence: Synthetic oligonucleotide
ccauacuggcaccccauuu

SEQ ID NO: 2162909 - RNA, 19 nt, Artificial Sequence
  Description of Artificial Sequence: Synthetic oligonucleotide
cagauggaguucgcacaau

SEQ ID NO: 2162910 - RNA, 19 nt, Artificial Sequence
  Description of Artificial Sequence: Synthetic oligonucleotide
cgcauccgcuguccugaug

SEQ ID NO: 2162911 - RNA, 19 nt, Artificial Sequence
  Description of Artificial Sequence: Synthetic oligonucleotide
cacuugcugugcagcuguu

SEQ ID NO: 2162912 - RNA, 19 nt, Artificial Sequence
  Description of Artificial Sequence: Synthetic oligonucleotide
cgccaccaggcagccaaac

SEQ ID NO: 2162913 - RNA, 19 nt, Artificial Sequence
  Description of Artificial Sequence: Synthetic oligonucleotide
cuccgccagcgggcaccuc

SEQ ID NO: 2162914 - RNA, 19 nt, Artificial Sequence
  Description of Artificial Sequence: Synthetic oligonucleotide
ccgccaccaggcagccaaa

SEQ ID NO: 2162915 - RNA, 19 nt, Artificial Sequence
  Description of Artificial Sequence: Synthetic oligonucleotide
gcuccgccagcgggcaccu

SEQ ID NO: 2162916 - RNA, 19 nt, Artificial Sequence
  Description of Artificial Sequence: Synthetic oligonucleotide
cgggcaccucaggccggag

SEQ ID NO: 2162917 - RNA, 19 nt, Artificial Sequence
  Description of Artificial Sequence: Synthetic oligonucleotide
ccgcauccgcuguccugau

SEQ ID NO: 2162918 - RNA, 19 nt, Artificial Sequence
  Description of Artificial Sequence: Synthetic oligonucleotide
aacaccauaggcccgagcc

SEQ ID NO: 2162919 - RNA, 19 nt, Artificial Sequence
  Description of Artificial Sequence: Synthetic oligonucleotide
aguaguuccaagcagcagc

SEQ ID NO: 2162920 - RNA, 19 nt, Artificial Sequence
  Description of Artificial Sequence: Synthetic oligonucleotide
aaaucggcugucuuuacac

SEQ ID NO: 2162921 - RNA, 19 nt, Artificial Sequence
  Description of Artificial Sequence: Synthetic oligonucleotide
acuggaacaccauaggccc

SEQ ID NO: 2162922 - RNA, 19 nt, Artificial Sequence
  Description of Artificial Sequence: Synthetic oligonucleotide
aauugagcagacgaagucc

SEQ ID NO: 2162923 - RNA, 19 nt, Artificial Sequence
  Description of Artificial Sequence: Synthetic oligonucleotide
aaaguaaugugaucucacg

SEQ ID NO: 2162924 - RNA, 19 nt, Artificial Sequence
  Description of Artificial Sequence: Synthetic oligonucleotide
aaauugagcagacgaaguc

SEQ ID NO: 2162925 - RNA, 19 nt, Artificial Sequence
  Description of Artificial Sequence: Synthetic oligonucleotide
uucacaguaacccaucacc

SEQ ID NO: 2162926 - RNA, 19 nt, Artificial Sequence
  Description of Artificial Sequence: Synthetic oligonucleotide
aucuuguucacaguaaccc

SEQ ID NO: 2162927 - RNA, 19 nt, Artificial Sequence
  Description of Artificial Sequence: Synthetic oligonucleotide
aggguaacaaccuugggag

SEQ ID NO: 2162928 - RNA, 19 nt, Artificial Sequence
  Description of Artificial Sequence: Synthetic oligonucleotide
ugugaucucacgaaggcug

SEQ ID NO: 2162929 - RNA, 19 nt, Artificial Sequence
  Description of Artificial Sequence: Synthetic oligonucleotide
uucucaaacuccuuaacgc

SEQ ID NO: 2162930 - RNA, 19 nt, Artificial Sequence
  Description of Artificial Sequence: Synthetic oligonucleotide
uuuaaccugggccucagag

SEQ ID NO: 2162931 - RNA, 19 nt, Artificial Sequence
  Description of Artificial Sequence: Synthetic oligonucleotide
uaaugugaucucacgaagg

SEQ ID NO: 2162932 - RNA, 19 nt, Artificial Sequence
  Description of Artificial Sequence: Synthetic oligonucleotide
aaaucgaucugguggaucu

SEQ ID NO: 2162933 - RNA, 19 nt, Artificial Sequence
  Description of Artificial Sequence: Synthetic oligonucleotide
auuguuguagggcuguuuc

SEQ ID NO: 2162934 - RNA, 19 nt, Artificial Sequence
  Description of Artificial Sequence: Synthetic oligonucleotide
uguagcaugaugcauuuaa

SEQ ID NO: 2162935 - RNA, 19 nt, Artificial Sequence
  Description of Artificial Sequence: Synthetic oligonucleotide
gaagaugcucuccaagugg

SEQ ID NO: 2162936 - RNA, 19 nt, Artificial Sequence
  Description of Artificial Sequence: Synthetic oligonucleotide
aauuucaucugucugggua

SEQ ID NO: 2162937 - RNA, 19 nt, Artificial Sequence
  Description of Artificial Sequence: Synthetic oligonucleotide
uacaugaagaggaaauuga

SEQ ID NO: 2162938 - RNA, 19 nt, Artificial Sequence
  Description of Artificial Sequence: Synthetic oligonucleotide
agauauucucacucggucg

SEQ ID NO: 2162939 - RNA, 19 nt, Artificial Sequence
  Description of Artificial Sequence: Synthetic oligonucleotide
cagcuguacaaucaaaucg

SEQ ID NO: 2162940 - RNA, 19 nt, Artificial Sequence
  Description of Artificial Sequence: Synthetic oligonucleotide
cuuuacuggaacaccauag

SEQ ID NO: 2162941 - RNA, 19 nt, Artificial Sequence
  Description of Artificial Sequence: Synthetic oligonucleotide
uggcauauuuuccaauagg

SEQ ID NO: 2162942 - RNA, 19 nt, Artificial Sequence
  Description of Artificial Sequence: Synthetic oligonucleotide
aaguaaugugaucucacga

SEQ ID NO: 2162943 - RNA, 19 nt, Artificial Sequence
  Description of Artificial Sequence: Synthetic oligonucleotide
uacaaucaaaucgaucugg

SEQ ID NO: 2162944 - RNA, 19 nt, Artificial Sequence
  Description of Artificial Sequence: Synthetic oligonucleotide
ucauacaugaagaggaaau

SEQ ID NO: 2162945 - RNA, 19 nt, Artificial Sequence
  Description of Artificial Sequence: Synthetic oligonucleotide
agcaccuguagcaugaugc

SEQ ID NO: 2162946 - RNA, 19 nt, Artificial Sequence
  Description of Artificial Sequence: Synthetic oligonucleotide
ucacgaaggcugcugaugg

SEQ ID NO: 2162947 - RNA, 19 nt, Artificial Sequence
  Description of Artificial Sequence: Synthetic oligonucleotide
aaguaggagcucucuagac

SEQ ID NO: 2162948 - RNA, 19 nt, Artificial Sequence
  Description of Artificial Sequence: Synthetic oligonucleotide
uuuguucugccccucagug

SEQ ID NO: 2162949 - RNA, 19 nt, Artificial Sequence
  Description of Artificial Sequence: Synthetic oligonucleotide
agcaugaugcauuuaaccu

SEQ ID NO: 2162950 - RNA, 19 nt, Artificial Sequence
  Description of Artificial Sequence: Synthetic oligonucleotide
cuucucaaacuccuuaacg

SEQ ID NO: 2162951 - RNA, 19 nt, Artificial Sequence
  Description of Artificial Sequence: Synthetic oligonucleotide
uuuccaauaggcuggccag

SEQ ID NO: 2162952 - RNA, 19 nt, Artificial Sequence
  Description of Artificial Sequence: Synthetic oligonucleotide
aguuggacaccuuuagguc

SEQ ID NO: 2162953 - RNA, 19 nt, Artificial Sequence
  Description of Artificial Sequence: Synthetic oligonucleotide
aacccggccagauauucuc

SEQ ID NO: 2162954 - RNA, 19 nt, Artificial Sequence
  Description of Artificial Sequence: Synthetic oligonucleotide
ucuccgaagugccagggag

SEQ ID NO: 2162955 - RNA, 19 nt, Artificial Sequence
  Description of Artificial Sequence: Synthetic oligonucleotide
aguaaugugaucucacgaa

SEQ ID NO: 2162956 - RNA, 19 nt, Artificial Sequence
  Description of Artificial Sequence: Synthetic oligonucleotide
guauuggccggccaguugg

SEQ ID NO: 2162957 - RNA, 19 nt, Artificial Sequence
  Description of Artificial Sequence: Synthetic oligonucleotide
uuggcauauuuuccaauag

SEQ ID NO: 2162958 - RNA, 19 nt, Artificial Sequence
  Description of Artificial Sequence: Synthetic oligonucleotide
guuuccucaagcuguauug

SEQ ID NO: 2162959 - RNA, 19 nt, Artificial Sequence
  Description of Artificial Sequence: Synthetic oligonucleotide
guaaugugaucucacgaag

SEQ ID NO: 2162960 - RNA, 19 nt, Artificial Sequence
  Description of Artificial Sequence: Synthetic oligonucleotide
auuggcuuuacuggaacac

SEQ ID NO: 2162961 - RNA, 19 nt, Artificial Sequence
  Description of Artificial Sequence: Synthetic oligonucleotide
uaaccugggccucagagaa

SEQ ID NO: 2162962 - RNA, 19 nt, Artificial Sequence
  Description of Artificial Sequence: Synthetic oligonucleotide
cacaauguuuggauggcgg

SEQ ID NO: 2162963 - RNA, 19 nt, Artificial Sequence
  Description of Artificial Sequence: Synthetic oligonucleotide
ucuuuguccauccgcaccu

SEQ ID NO: 2162964 - RNA, 19 nt, Artificial Sequence
  Description of Artificial Sequence: Synthetic oligonucleotide
ucucaaacuccuuaacgcu

SEQ ID NO: 2162965 - RNA, 19 nt, Artificial Sequence
  Description of Artificial Sequence: Synthetic oligonucleotide
guuuggauggcggagacgc

SEQ ID NO: 2162966 - RNA, 19 nt, Artificial Sequence
  Description of Artificial Sequence: Synthetic oligonucleotide
agcacgcuuauuucggugg

SEQ ID NO: 2162967 - RNA, 19 nt, Artificial Sequence
  Description of Artificial Sequence: Synthetic oligonucleotide
augcauuuaaccugggccu

SEQ ID NO: 2162968 - RNA, 19 nt, Artificial Sequence
  Description of Artificial Sequence: Synthetic oligonucleotide
gaggguaacaaccuuggga

SEQ ID NO: 2162969 - RNA, 19 nt, Artificial Sequence
  Description of Artificial Sequence: Synthetic oligonucleotide
guuggacaccuuuaggucc

SEQ ID NO: 2162970 - RNA, 19 nt, Artificial Sequence
  Description of Artificial Sequence: Synthetic oligonucleotide
cuugagauuguuguagggc

SEQ ID NO: 2162971 - RNA, 19 nt, Artificial Sequence
  Description of Artificial Sequence: Synthetic oligonucleotide
cuggguaguaguuccaagc

SEQ ID NO: 2162972 - RNA, 19 nt, Artificial Sequence
  Description of Artificial Sequence: Synthetic oligonucleotide
uucuuuguccauccgcacc

SEQ ID NO: 2162973 - RNA, 19 nt, Artificial Sequence
  Description of Artificial Sequence: Synthetic oligonucleotide
uccucaagcuguauuggcc

SEQ ID NO: 2162974 - RNA, 19 nt, Artificial Sequence
  Description of Artificial Sequence: Synthetic oligonucleotide
ugugcagguacugaaggcc

SEQ ID NO: 2162975 - RNA, 19 nt, Artificial Sequence
  Description of Artificial Sequence: Synthetic oligonucleotide
acaaccuugggagucauug

SEQ ID NO: 2162976 - RNA, 19 nt, Artificial Sequence
  Description of Artificial Sequence: Synthetic oligonucleotide
agcuuggagaaacccggcc

SEQ ID NO: 2162977 - RNA, 19 nt, Artificial Sequence
  Description of Artificial Sequence: Synthetic oligonucleotide
ucuuguucacaguaaccca

SEQ ID NO: 2162978 - RNA, 19 nt, Artificial Sequence
  Description of Artificial Sequence: Synthetic oligonucleotide
uuacacagcccuuaucagu

SEQ ID NO: 2162979 - RNA, 19 nt, Artificial Sequence
  Description of Artificial Sequence: Synthetic oligonucleotide
auugagcagacgaaguccg

SEQ ID NO: 2162980 - RNA, 19 nt, Artificial Sequence
  Description of Artificial Sequence: Synthetic oligonucleotide
aguaggagcucucuagaca

SEQ ID NO: 2162981 - RNA, 19 nt, Artificial Sequence
  Description of Artificial Sequence: Synthetic oligonucleotide
gguacugaaggccacgaag

SEQ ID NO: 2162982 - RNA, 19 nt, Artificial Sequence
  Description of Artificial Sequence: Synthetic oligonucleotide
ugucaaugcugguagucug

SEQ ID NO: 2162983 - RNA, 19 nt, Artificial Sequence
  Description of Artificial Sequence: Synthetic oligonucleotide
ugggcuagacccaccauca

SEQ ID NO: 2162984 - RNA, 19 nt, Artificial Sequence
  Description of Artificial Sequence: Synthetic oligonucleotide
ugaugcauuuaaccugggc

SEQ ID NO: 2162985 - RNA, 19 nt, Artificial Sequence
  Description of Artificial Sequence: Synthetic oligonucleotide
uaacgcuccggcaucuucc

SEQ ID NO: 2162986 - RNA, 19 nt, Artificial Sequence
  Description of Artificial Sequence: Synthetic oligonucleotide
ugagauuguuguagggcug

SEQ ID NO: 2162987 - RNA, 19 nt, Artificial Sequence
  Description of Artificial Sequence: Synthetic oligonucleotide
aucggcugucuuuacacag

SEQ ID NO: 2162988 - RNA, 19 nt, Artificial Sequence
  Description of Artificial Sequence: Synthetic oligonucleotide
gagcucucuagacaguccc

SEQ ID NO: 2162989 - RNA, 19 nt, Artificial Sequence
  Description of Artificial Sequence: Synthetic oligonucleotide
caugaguuccggcucacag

SEQ ID NO: 2162990 - RNA, 19 nt, Artificial Sequence
  Description of Artificial Sequence: Synthetic oligonucleotide
agucauuggcuuuacugga

SEQ ID NO: 2162991 - RNA, 19 nt, Artificial Sequence
  Description of Artificial Sequence: Synthetic oligonucleotide
auuucaucugucuggguau

SEQ ID NO: 2162992 - RNA, 19 nt, Artificial Sequence
  Description of Artificial Sequence: Synthetic oligonucleotide
aaguccggccucugagagc

SEQ ID NO: 2162993 - RNA, 19 nt, Artificial Sequence
  Description of Artificial Sequence: Synthetic oligonucleotide
ggcauauuuuccaauaggc

SEQ ID NO: 2162994 - RNA, 19 nt, Artificial Sequence
  Description of Artificial Sequence: Synthetic oligonucleotide
aucgaucugguggaucucc

SEQ ID NO: 2162995 - RNA, 19 nt, Artificial Sequence
  Description of Artificial Sequence: Synthetic oligonucleotide
uucagggcaacaauuucau

SEQ ID NO: 2162996 - RNA, 19 nt, Artificial Sequence
  Description of Artificial Sequence: Synthetic oligonucleotide
gagacgcaaaaguaaugug

SEQ ID NO: 2162997 - RNA, 19 nt, Artificial Sequence
  Description of Artificial Sequence: Synthetic oligonucleotide
ucauuggcuuuacuggaac

SEQ ID NO: 2162998 - RNA, 19 nt, Artificial Sequence
  Description of Artificial Sequence: Synthetic oligonucleotide
caaguuggacaccuuuagg

SEQ ID NO: 2162999 - RNA, 19 nt, Artificial Sequence
  Description of Artificial Sequence: Synthetic oligonucleotide
agacgcaaaaguaauguga

SEQ ID NO: 2163000 - RNA, 19 nt, Artificial Sequence
  Description of Artificial Sequence: Synthetic oligonucleotide
uuguucugccccucagugg

SEQ ID NO: 2163001 - RNA, 19 nt, Artificial Sequence
  Description of Artificial Sequence: Synthetic oligonucleotide
guacugaaggccacgaagc

SEQ ID NO: 2163002 - RNA, 19 nt, Artificial Sequence
  Description of Artificial Sequence: Synthetic oligonucleotide
uguuguagggcuguuuccu

SEQ ID NO: 2163003 - RNA, 19 nt, Artificial Sequence
  Description of Artificial Sequence: Synthetic oligonucleotide
ggaaauugagcagacgaag

SEQ ID NO: 2163004 - RNA, 19 nt, Artificial Sequence
  Description of Artificial Sequence: Synthetic oligonucleotide
uugcccuuuucuuaggguc

SEQ ID NO: 2163005 - RNA, 19 nt, Artificial Sequence
  Description of Artificial Sequence: Synthetic oligonucleotide
agcuguacaaucaaaucga

SEQ ID NO: 2163006 - RNA, 19 nt, Artificial Sequence
  Description of Artificial Sequence: Synthetic oligonucleotide
gcccuuaucagucaugagc

SEQ ID NO: 2163007 - RNA, 19 nt, Artificial Sequence
  Description of Artificial Sequence: Synthetic oligonucleotide
gaaguaggagcucucuaga

SEQ ID NO: 2163008 - RNA, 19 nt, Artificial Sequence
  Description of Artificial Sequence: Synthetic oligonucleotide
aaucggcugucuuuacaca

SEQ ID NO: 2163009 - RNA, 19 nt, Artificial Sequence
  Description of Artificial Sequence: Synthetic oligonucleotide
guacaaucaaaucgaucug

SEQ ID NO: 2163010 - RNA, 19 nt, Artificial Sequence
  Description of Artificial Sequence: Synthetic oligonucleotide
guaacccaucaccaggaag

SEQ ID NO: 2163011 - RNA, 19 nt, Artificial Sequence
  Description of Artificial Sequence: Synthetic oligonucleotide
ugguggaucuccgaagugc

SEQ ID NO: 2163012 - RNA, 19 nt, Artificial Sequence
  Description of Artificial Sequence: Synthetic oligonucleotide
acaauguuuggauggcgga

SEQ ID NO: 2163013 - RNA, 19 nt, Artificial Sequence
  Description of Artificial Sequence: Synthetic oligonucleotide
cuucagggcaacaauuuca

SEQ ID NO: 2163014 - RNA, 19 nt, Artificial Sequence
  Description of Artificial Sequence: Synthetic oligonucleotide
cucaaacuccuuaacgcuc

SEQ ID NO: 2163015 - RNA, 19 nt, Artificial Sequence
  Description of Artificial Sequence: Synthetic oligonucleotide
uggcccgauacacaaugcc

SEQ ID NO: 2163016 - RNA, 19 nt, Artificial Sequence
  Description of Artificial Sequence: Synthetic oligonucleotide
cuugcaucguuuguucugc

SEQ ID NO: 2163017 - RNA, 19 nt, Artificial Sequence
  Description of Artificial Sequence: Synthetic oligonucleotide
uuccucaagcuguauuggc

SEQ ID NO: 2163018 - RNA, 19 nt, Artificial Sequence
  Description of Artificial Sequence: Synthetic oligonucleotide
ucuggguaucccuggcccg

SEQ ID NO: 2163019 - RNA, 19 nt, Artificial Sequence
  Description of Artificial Sequence: Synthetic oligonucleotide
uccauccgcaccuucuuca

SEQ ID NO: 2163020 - RNA, 19 nt, Artificial Sequence
  Description of Artificial Sequence: Synthetic oligonucleotide
gauauucucacucggucgu

SEQ ID NO: 2163021 - RNA, 19 nt, Artificial Sequence
  Description of Artificial Sequence: Synthetic oligonucleotide
ucgaucugguggaucuccg

SEQ ID NO: 2163022 - RNA, 19 nt, Artificial Sequence
  Description of Artificial Sequence: Synthetic oligonucleotide
cacaguaacccaucaccag

SEQ ID NO: 2163023 - RNA, 19 nt, Artificial Sequence
  Description of Artificial Sequence: Synthetic oligonucleotide
gguaguaguuccaagcagc

SEQ ID NO: 2163024 - RNA, 19 nt, Artificial Sequence
  Description of Artificial Sequence: Synthetic oligonucleotide
acgaaguccggccucugag

SEQ ID NO: 2163025 - RNA, 19 nt, Artificial Sequence
  Description of Artificial Sequence: Synthetic oligonucleotide
gcuagacccaccaucaggg

SEQ ID NO: 2163026 - RNA, 19 nt, Artificial Sequence
  Description of Artificial Sequence: Synthetic oligonucleotide
uguauuggccggccaguug

SEQ ID NO: 2163027 - RNA, 19 nt, Artificial Sequence
  Description of Artificial Sequence: Synthetic oligonucleotide
aucagucaugagcaaguug

SEQ ID NO: 2163028 - RNA, 19 nt, Artificial Sequence
  Description of Artificial Sequence: Synthetic oligonucleotide
uuaugggccagcagcucug

SEQ ID NO: 2163029 - RNA, 19 nt, Artificial Sequence
  Description of Artificial Sequence: Synthetic oligonucleotide
uguuuccucaagcuguauu

SEQ ID NO: 2163030 - RNA, 19 nt, Artificial Sequence
  Description of Artificial Sequence: Synthetic oligonucleotide
aucugguggaucuccgaag

SEQ ID NO: 2163031 - RNA, 19 nt, Artificial Sequence
  Description of Artificial Sequence: Synthetic oligonucleotide
agcuguauuggccggccag

SEQ ID NO: 2163032 - RNA, 19 nt, Artificial Sequence
  Description of Artificial Sequence: Synthetic oligonucleotide
auaggcccgagccaggcca

SEQ ID NO: 2163033 - RNA, 19 nt, Artificial Sequence
  Description of Artificial Sequence: Synthetic oligonucleotide
acgcuuauuucgguggugg

SEQ ID NO: 2163034 - RNA, 19 nt, Artificial Sequence
  Description of Artificial Sequence: Synthetic oligonucleotide
gagaaggggcuuaugggcc

SEQ ID NO: 2163035 - RNA, 19 nt, Artificial Sequence
  Description of Artificial Sequence: Synthetic oligonucleotide
agccacgggaauuugugcu

SEQ ID NO: 2163036 - RNA, 19 nt, Artificial Sequence
  Description of Artificial Sequence: Synthetic oligonucleotide
ucgccaauucgguucagcu

SEQ ID NO: 2163037 - RNA, 19 nt, Artificial Sequence
  Description of Artificial Sequence: Synthetic oligonucleotide
acgcaaaaguaaugugauc

SEQ ID NO: 2163038 - RNA, 19 nt, Artificial Sequence
  Description of Artificial Sequence: Synthetic oligonucleotide
uugagcagacgaaguccgg

SEQ ID NO: 2163039 - RNA, 19 nt, Artificial Sequence
  Description of Artificial Sequence: Synthetic oligonucleotide
gagcagacgaaguccggcc

SEQ ID NO: 2163040 - RNA, 19 nt, Artificial Sequence
  Description of Artificial Sequence: Synthetic oligonucleotide
gggagaaggggcuuauggg

SEQ ID NO: 2163041 - RNA, 19 nt, Artificial Sequence
  Description of Artificial Sequence: Synthetic oligonucleotide
ugcaucguuuguucugccc

SEQ ID NO: 2163042 - RNA, 19 nt, Artificial Sequence
  Description of Artificial Sequence: Synthetic oligonucleotide
ugguagucuggguaguagu

SEQ ID NO: 2163043 - RNA, 19 nt, Artificial Sequence
  Description of Artificial Sequence: Synthetic oligonucleotide
agaggguaacaaccuuggg

SEQ ID NO: 2163044 - RNA, 19 nt, Artificial Sequence
  Description of Artificial Sequence: Synthetic oligonucleotide
caaccuugggagucauugg

SEQ ID NO: 2163045 - RNA, 19 nt, Artificial Sequence
  Description of Artificial Sequence: Synthetic oligonucleotide
guuggcauauuuuccaaua

SEQ ID NO: 2163046 - RNA, 19 nt, Artificial Sequence
  Description of Artificial Sequence: Synthetic oligonucleotide
uauucucacucggucgucc

SEQ ID NO: 2163047 - RNA, 19 nt, Artificial Sequence
  Description of Artificial Sequence: Synthetic oligonucleotide
gcaaguuggacaccuuuag

SEQ ID NO: 2163048 - RNA, 19 nt, Artificial Sequence
  Description of Artificial Sequence: Synthetic oligonucleotide
cucaagcuguauuggccgg

SEQ ID NO: 2163049 - RNA, 19 nt, Artificial Sequence
  Description of Artificial Sequence: Synthetic oligonucleotide
gagaaacccggccagauau

SEQ ID NO: 2163050 - RNA, 19 nt, Artificial Sequence
  Description of Artificial Sequence: Synthetic oligonucleotide
uugaaguaggagcucucua

SEQ ID NO: 2163051 - RNA, 19 nt, Artificial Sequence
  Description of Artificial Sequence: Synthetic oligonucleotide
gccaauucgguucagcuuc

SEQ ID NO: 2163052 - RNA, 19 nt, Artificial Sequence
  Description of Artificial Sequence: Synthetic oligonucleotide
caggaagaugcucuccaag

SEQ ID NO: 2163053 - RNA, 19 nt, Artificial Sequence
  Description of Artificial Sequence: Synthetic oligonucleotide
gggcuuaugggccagcagc

SEQ ID NO: 2163054 - RNA, 19 nt, Artificial Sequence
  Description of Artificial Sequence: Synthetic oligonucleotide
uuaacgcuccggcaucuuc

SEQ ID NO: 2163055 - RNA, 19 nt, Artificial Sequence
  Description of Artificial Sequence: Synthetic oligonucleotide
ugugcuugagauuguugua

SEQ ID NO: 2163056 - RNA, 19 nt, Artificial Sequence
  Description of Artificial Sequence: Synthetic oligonucleotide
caauguuuggauggcggag

SEQ ID NO: 2163057 - RNA, 19 nt, Artificial Sequence
  Description of Artificial Sequence: Synthetic oligonucleotide
cacaaugccauaggugccc

SEQ ID NO: 2163058 - RNA, 19 nt, Artificial Sequence
  Description of Artificial Sequence: Synthetic oligonucleotide
agaggaaauugagcagacg

SEQ ID NO: 2163059 - RNA, 19 nt, Artificial Sequence
  Description of Artificial Sequence: Synthetic oligonucleotide
ucagggcuugcaucguuug

SEQ ID NO: 2163060 - RNA, 19 nt, Artificial Sequence
  Description of Artificial Sequence: Synthetic oligonucleotide
aaucgaucugguggaucuc

SEQ ID NO: 2163061 - RNA, 19 nt, Artificial Sequence
  Description of Artificial Sequence: Synthetic oligonucleotide
ggcuagacccaccaucagg

SEQ ID NO: 2163062 - RNA, 19 nt, Artificial Sequence
  Description of Artificial Sequence: Synthetic oligonucleotide
ccucaagcuguauuggccg

SEQ ID NO: 2163063 - RNA, 19 nt, Artificial Sequence
  Description of Artificial Sequence: Synthetic oligonucleotide
augagcaaguuggacaccu

SEQ ID NO: 2163064 - RNA, 19 nt, Artificial Sequence
  Description of Artificial Sequence: Synthetic oligonucleotide
ggccagaucuuguucacag

SEQ ID NO: 2163065 - RNA, 19 nt, Artificial Sequence
  Description of Artificial Sequence: Synthetic oligonucleotide
gauggcggagacgcaaaag

SEQ ID NO: 2163066 - RNA, 19 nt, Artificial Sequence
  Description of Artificial Sequence: Synthetic oligonucleotide
uaucccuggcccgauacac

SEQ ID NO: 2163067 - RNA, 19 nt, Artificial Sequence
  Description of Artificial Sequence: Synthetic oligonucleotide
gcaucguuuguucugcccc

SEQ ID NO: 2163068 - RNA, 19 nt, Artificial Sequence
  Description of Artificial Sequence: Synthetic oligonucleotide
caauaggcuggccagaucu

SEQ ID NO: 2163069 - RNA, 19 nt, Artificial Sequence
  Description of Artificial Sequence: Synthetic oligonucleotide
uguuuggauggcggagacg

SEQ ID NO: 2163070 - RNA, 19 nt, Artificial Sequence
  Description of Artificial Sequence: Synthetic oligonucleotide
acaaucaaaucgaucuggu

SEQ ID NO: 2163071 - RNA, 19 nt, Artificial Sequence
  Description of Artificial Sequence: Synthetic oligonucleotide
uuggccggccaguuggcag

SEQ ID NO: 2163072 - RNA, 19 nt, Artificial Sequence
  Description of Artificial Sequence: Synthetic oligonucleotide
gcuugagauuguuguaggg

SEQ ID NO: 2163073 - RNA, 19 nt, Artificial Sequence
  Description of Artificial Sequence: Synthetic oligonucleotide
uuccugugcagguacugaa

SEQ ID NO: 2163074 - RNA, 19 nt, Artificial Sequence
  Description of Artificial Sequence: Synthetic oligonucleotide
gaucugguggaucuccgaa

SEQ ID NO: 2163075 - RNA, 19 nt, Artificial Sequence
  Description of Artificial Sequence: Synthetic oligonucleotide
augucaaugcugguagucu

SEQ ID NO: 2163076 - RNA, 19 nt, Artificial Sequence
  Description of Artificial Sequence: Synthetic oligonucleotide
caugucaaugcugguaguc

SEQ ID NO: 2163077 - RNA, 19 nt, Artificial Sequence
  Description of Artificial Sequence: Synthetic oligonucleotide
agagccacgggaauuugug

SEQ ID NO: 2163078 - RNA, 19 nt, Artificial Sequence
  Description of Artificial Sequence: Synthetic oligonucleotide
gaaauugagcagacgaagu

SEQ ID NO: 2163079 - RNA, 19 nt, Artificial Sequence
  Description of Artificial Sequence: Synthetic oligonucleotide
aguuccggcucacagggua

SEQ ID NO: 2163080 - RNA, 19 nt, Artificial Sequence
  Description of Artificial Sequence: Synthetic oligonucleotide
gagccacgggaauuugugc

SEQ ID NO: 2163081 - RNA, 19 nt, Artificial Sequence
  Description of Artificial Sequence: Synthetic oligonucleotide
aucucacgaaggcugcuga

SEQ ID NO: 2163082 - RNA, 19 nt, Artificial Sequence
  Description of Artificial Sequence: Synthetic oligonucleotide
uaguaguuccaagcagcag

SEQ ID NO: 2163083 - RNA, 19 nt, Artificial Sequence
  Description of Artificial Sequence: Synthetic oligonucleotide
ggccagauauucucacucg

SEQ ID NO: 2163084 - RNA, 19 nt, Artificial Sequence
  Description of Artificial Sequence: Synthetic oligonucleotide
uucucacucggucgucccc

SEQ ID NO: 2163085 - RNA, 19 nt, Artificial Sequence
  Description of Artificial Sequence: Synthetic oligonucleotide
ugucuuuacacagcccuua

SEQ ID NO: 2163086 - RNA, 19 nt, Artificial Sequence
  Description of Artificial Sequence: Synthetic oligonucleotide
gaaacccggccagauauuc

SEQ ID NO: 2163087 - RNA, 19 nt, Artificial Sequence
  Description of Artificial Sequence: Synthetic oligonucleotide
ucggucguccccagcagcu

SEQ ID NO: 2163088 - RNA, 19 nt, Artificial Sequence
  Description of Artificial Sequence: Synthetic oligonucleotide
gcuuauuucgguggugggg

SEQ ID NO: 2163089 - RNA, 19 nt, Artificial Sequence
  Description of Artificial Sequence: Synthetic oligonucleotide
uccuuaacgcuccggcauc

SEQ ID NO: 2163090 - RNA, 19 nt, Artificial Sequence
  Description of Artificial Sequence: Synthetic oligonucleotide
gaucucacgaaggcugcug

SEQ ID NO: 2163091 - RNA, 19 nt, Artificial Sequence
  Description of Artificial Sequence: Synthetic oligonucleotide
acgaagcaccuguagcaug

SEQ ID NO: 2163092 - RNA, 19 nt, Artificial Sequence
  Description of Artificial Sequence: Synthetic oligonucleotide
agcagcuguacaaucaaau

SEQ ID NO: 2163093 - RNA, 19 nt, Artificial Sequence
  Description of Artificial Sequence: Synthetic oligonucleotide
ugccauaggugcccucgcc

SEQ ID NO: 2163094 - RNA, 19 nt, Artificial Sequence
  Description of Artificial Sequence: Synthetic oligonucleotide
ucaagcuguauuggccggc

SEQ ID NO: 2163095 - RNA, 19 nt, Artificial Sequence
  Description of Artificial Sequence: Synthetic oligonucleotide
ggguaguaguuccaagcag

SEQ ID NO: 2163096 - RNA, 19 nt, Artificial Sequence
  Description of Artificial Sequence: Synthetic oligonucleotide
cuggaacaccauaggcccg

SEQ ID NO: 2163097 - RNA, 19 nt, Artificial Sequence
  Description of Artificial Sequence: Synthetic oligonucleotide
uggcggagacgcaaaagua

SEQ ID NO: 2163098 - RNA, 19 nt, Artificial Sequence
  Description of Artificial Sequence: Synthetic oligonucleotide
guagcaugaugcauuuaac

SEQ ID NO: 2163099 - RNA, 19 nt, Artificial Sequence
  Description of Artificial Sequence: Synthetic oligonucleotide
gaagugccagggagaaggg

SEQ ID NO: 2163100 - RNA, 19 nt, Artificial Sequence
  Description of Artificial Sequence: Synthetic oligonucleotide
uauuggccggccaguuggc

SEQ ID NO: 2163101 - RNA, 19 nt, Artificial Sequence
  Description of Artificial Sequence: Synthetic oligonucleotide
ucuccaagugguugcccac

SEQ ID NO: 2163102 - RNA, 19 nt, Artificial Sequence
  Description of Artificial Sequence: Synthetic oligonucleotide
cccuuaucagucaugagca

SEQ ID NO: 2163103 - RNA, 19 nt, Artificial Sequence
  Description of Artificial Sequence: Synthetic oligonucleotide
agcucucuagacagucccc

SEQ ID NO: 2163104 - RNA, 19 nt, Artificial Sequence
  Description of Artificial Sequence: Synthetic oligonucleotide
cuagacccaccaucagggc

SEQ ID NO: 2163105 - RNA, 19 nt, Artificial Sequence
  Description of Artificial Sequence: Synthetic oligonucleotide
gcaaaaguaaugugaucuc

SEQ ID NO: 2163106 - RNA, 19 nt, Artificial Sequence
  Description of Artificial Sequence: Synthetic oligonucleotide
ggcagcuuggagaaacccg

SEQ ID NO: 2163107 - RNA, 19 nt, Artificial Sequence
  Description of Artificial Sequence: Synthetic oligonucleotide
gguaacaaccuugggaguc

SEQ ID NO: 2163108 - RNA, 19 nt, Artificial Sequence
  Description of Artificial Sequence: Synthetic oligonucleotide
uuggauggcggagacgcaa

SEQ ID NO: 2163109 - RNA, 19 nt, Artificial Sequence
  Description of Artificial Sequence: Synthetic oligonucleotide
ucuuagggucauacaugaa

SEQ ID NO: 2163110 - RNA, 19 nt, Artificial Sequence
  Description of Artificial Sequence: Synthetic oligonucleotide
ucguuuguucugccccuca

SEQ ID NO: 2163111 - RNA, 19 nt, Artificial Sequence
  Description of Artificial Sequence: Synthetic oligonucleotide
gacgcaaaaguaaugugau

SEQ ID NO: 2163112 - RNA, 19 nt, Artificial Sequence
  Description of Artificial Sequence: Synthetic oligonucleotide
acaccauaggcccgagcca

SEQ ID NO: 2163113 - RNA, 19 nt, Artificial Sequence
  Description of Artificial Sequence: Synthetic oligonucleotide
aauuugugcuugagauugu

SEQ ID NO: 2163114 - RNA, 19 nt, Artificial Sequence
  Description of Artificial Sequence: Synthetic oligonucleotide
guaguaguuccaagcagca

SEQ ID NO: 2163115 - RNA, 19 nt, Artificial Sequence
  Description of Artificial Sequence: Synthetic oligonucleotide
uccgaagugccagggagaa

SEQ ID NO: 2163116 - RNA, 19 nt, Artificial Sequence
  Description of Artificial Sequence: Synthetic oligonucleotide
cucacgaaggcugcugaug

SEQ ID NO: 2163117 - RNA, 19 nt, Artificial Sequence
  Description of Artificial Sequence: Synthetic oligonucleotide
gcccacaugucaaugcugg

SEQ ID NO: 2163118 - RNA, 19 nt, Artificial Sequence
  Description of Artificial Sequence: Synthetic oligonucleotide
ugcauuuaaccugggccuc

SEQ ID NO: 2163119 - RNA, 19 nt, Artificial Sequence
  Description of Artificial Sequence: Synthetic oligonucleotide
cacgaaggcugcugauggg

SEQ ID NO: 2163120 - RNA, 19 nt, Artificial Sequence
  Description of Artificial Sequence: Synthetic oligonucleotide
gcagcuguacaaucaaauc

SEQ ID NO: 2163121 - RNA, 19 nt, Artificial Sequence
  Description of Artificial Sequence: Synthetic oligonucleotide
auauucucacucggucguc

SEQ ID NO: 2163122 - RNA, 19 nt, Artificial Sequence
  Description of Artificial Sequence: Synthetic oligonucleotide
cugguagucuggguaguag

SEQ ID NO: 2163123 - RNA, 19 nt, Artificial Sequence
  Description of Artificial Sequence: Synthetic oligonucleotide
ggugcccucgccaauucgg

SEQ ID NO: 2163124 - RNA, 19 nt, Artificial Sequence
  Description of Artificial Sequence: Synthetic oligonucleotide
uggccggccaguuggcagc

SEQ ID NO: 2163125 - RNA, 19 nt, Artificial Sequence
  Description of Artificial Sequence: Synthetic oligonucleotide
acaugucaaugcugguagu

SEQ ID NO: 2163126 - RNA, 19 nt, Artificial Sequence
  Description of Artificial Sequence: Synthetic oligonucleotide
cauuggcuuuacuggaaca

SEQ ID NO: 2163127 - RNA, 19 nt, Artificial Sequence
  Description of Artificial Sequence: Synthetic oligonucleotide
ugaaguuccugugcaggua

SEQ ID NO: 2163128 - RNA, 19 nt, Artificial Sequence
  Description of Artificial Sequence: Synthetic oligonucleotide
aagcuguauuggccggcca

SEQ ID NO: 2163129 - RNA, 19 nt, Artificial Sequence
  Description of Artificial Sequence: Synthetic oligonucleotide
ggcagcacgcuuauuucgg

SEQ ID NO: 2163130 - RNA, 19 nt, Artificial Sequence
  Description of Artificial Sequence: Synthetic oligonucleotide
uccaauaggcuggccagau

SEQ ID NO: 2163131 - RNA, 19 nt, Artificial Sequence
  Description of Artificial Sequence: Synthetic oligonucleotide
cauccgcaccuucuucagg

SEQ ID NO: 2163132 - RNA, 19 nt, Artificial Sequence
  Description of Artificial Sequence: Synthetic oligonucleotide
aguuccugugcagguacug

SEQ ID NO: 2163133 - RNA, 19 nt, Artificial Sequence
  Description of Artificial Sequence: Synthetic oligonucleotide
gcgguugcccuuuucuuag

SEQ ID NO: 2163134 - RNA, 19 nt, Artificial Sequence
  Description of Artificial Sequence: Synthetic oligonucleotide
aggugcccucgccaauucg

SEQ ID NO: 2163135 - RNA, 19 nt, Artificial Sequence
  Description of Artificial Sequence: Synthetic oligonucleotide
ccaguuggcagcuuggaga

SEQ ID NO: 2163136 - RNA, 19 nt, Artificial Sequence
  Description of Artificial Sequence: Synthetic oligonucleotide
cuggcccgauacacaaugc

SEQ ID NO: 2163137 - RNA, 19 nt, Artificial Sequence
  Description of Artificial Sequence: Synthetic oligonucleotide
gacaccuuuaggucccugu

SEQ ID NO: 2163138 - RNA, 19 nt, Artificial Sequence
  Description of Artificial Sequence: Synthetic oligonucleotide
gguggaucuccgaagugcc

SEQ ID NO: 2163139 - RNA, 19 nt, Artificial Sequence
  Description of Artificial Sequence: Synthetic oligonucleotide
uuccggcucacaggguagg

SEQ ID NO: 2163140 - RNA, 19 nt, Artificial Sequence
  Description of Artificial Sequence: Synthetic oligonucleotide
uugggagucauuggcuuua

SEQ ID NO: 2163141 - RNA, 19 nt, Artificial Sequence
  Description of Artificial Sequence: Synthetic oligonucleotide
gaacaccauaggcccgagc

SEQ ID NO: 2163142 - RNA, 19 nt, Artificial Sequence
  Description of Artificial Sequence: Synthetic oligonucleotide
gguaucccuggcccgauac

SEQ ID NO: 2163143 - RNA, 19 nt, Artificial Sequence
  Description of Artificial Sequence: Synthetic oligonucleotide
cagcacgcuuauuucggug

SEQ ID NO: 2163144 - RNA, 19 nt, Artificial Sequence
  Description of Artificial Sequence: Synthetic oligonucleotide
caguuggcagcuuggagaa

SEQ ID NO: 2163145 - RNA, 19 nt, Artificial Sequence
  Description of Artificial Sequence: Synthetic oligonucleotide
guaacaaccuugggaguca

SEQ ID NO: 2163146 - RNA, 19 nt, Artificial Sequence
  Description of Artificial Sequence: Synthetic oligonucleotide
acucggucguccccagcag

SEQ ID NO: 2163147 - RNA, 19 nt, Artificial Sequence
  Description of Artificial Sequence: Synthetic oligonucleotide
ggaucuccgaagugccagg

SEQ ID NO: 2163148 - RNA, 19 nt, Artificial Sequence
  Description of Artificial Sequence: Synthetic oligonucleotide
aguaacccaucaccaggaa

SEQ ID NO: 2163149 - RNA, 19 nt, Artificial Sequence
  Description of Artificial Sequence: Synthetic oligonucleotide
aaacccggccagauauucu

SEQ ID NO: 2163150 - RNA, 19 nt, Artificial Sequence
  Description of Artificial Sequence: Synthetic oligonucleotide
uucugccccucaguggcag

SEQ ID NO: 2163151 - RNA, 19 nt, Artificial Sequence
  Description of Artificial Sequence: Synthetic oligonucleotide
uuccaauaggcuggccaga

SEQ ID NO: 2163152 - RNA, 19 nt, Artificial Sequence
  Description of Artificial Sequence: Synthetic oligonucleotide
aacccaucaccaggaagau

SEQ ID NO: 2163153 - RNA, 19 nt, Artificial Sequence
  Description of Artificial Sequence: Synthetic oligonucleotide
gcaacaauuucaucugucu

SEQ ID NO: 2163154 - RNA, 19 nt, Artificial Sequence
  Description of Artificial Sequence: Synthetic oligonucleotide
gugaucucacgaaggcugc

SEQ ID NO: 2163155 - RNA, 19 nt, Artificial Sequence
  Description of Artificial Sequence: Synthetic oligonucleotide
cucggucguccccagcagc

SEQ ID NO: 2163156 - RNA, 19 nt, Artificial Sequence
  Description of Artificial Sequence: Synthetic oligonucleotide
gugggcaugaguuccggcu

SEQ ID NO: 2163157 - RNA, 19 nt, Artificial Sequence
  Description of Artificial Sequence: Synthetic oligonucleotide
guagggcuguuuccucaag

SEQ ID NO: 2163158 - RNA, 19 nt, Artificial Sequence
  Description of Artificial Sequence: Synthetic oligonucleotide
aucguuuguucugccccuc

SEQ ID NO: 2163159 - RNA, 19 nt, Artificial Sequence
  Description of Artificial Sequence: Synthetic oligonucleotide
auuuaaccugggccucaga

SEQ ID NO: 2163160 - RNA, 19 nt, Artificial Sequence
  Description of Artificial Sequence: Synthetic oligonucleotide
acgggaauuugugcuugag

SEQ ID NO: 2163161 - RNA, 19 nt, Artificial Sequence
  Description of Artificial Sequence: Synthetic oligonucleotide
cauaggcccgagccaggcc

SEQ ID NO: 2163162 - RNA, 19 nt, Artificial Sequence
  Description of Artificial Sequence: Synthetic oligonucleotide
ggagacgcaaaaguaaugu

SEQ ID NO: 2163163 - RNA, 19 nt, Artificial Sequence
  Description of Artificial Sequence: Synthetic oligonucleotide
gacgaaguccggccucuga

SEQ ID NO: 2163164 - RNA, 19 nt, Artificial Sequence
  Description of Artificial Sequence: Synthetic oligonucleotide
uccggcucacaggguaggg

SEQ ID NO: 2163165 - RNA, 19 nt, Artificial Sequence
  Description of Artificial Sequence: Synthetic oligonucleotide
cgauacacaaugccauagg

SEQ ID NO: 2163166 - RNA, 19 nt, Artificial Sequence
  Description of Artificial Sequence: Synthetic oligonucleotide
cccacaaccaccuccuuca

SEQ ID NO: 2163167 - RNA, 19 nt, Artificial Sequence
  Description of Artificial Sequence: Synthetic oligonucleotide
ggguguuggcauauuuucc

SEQ ID NO: 2163168 - RNA, 19 nt, Artificial Sequence
  Description of Artificial Sequence: Synthetic oligonucleotide
agggcuugcaucguuuguu

SEQ ID NO: 2163169 - RNA, 19 nt, Artificial Sequence
  Description of Artificial Sequence: Synthetic oligonucleotide
cucgccaauucgguucagc

SEQ ID NO: 2163170 - RNA, 19 nt, Artificial Sequence
  Description of Artificial Sequence: Synthetic oligonucleotide
cuuaugggccagcagcucu

SEQ ID NO: 2163171 - RNA, 19 nt, Artificial Sequence
  Description of Artificial Sequence: Synthetic oligonucleotide
agcaaguuggacaccuuua

SEQ ID NO: 2163172 - RNA, 19 nt, Artificial Sequence
  Description of Artificial Sequence: Synthetic oligonucleotide
ucaaaucgaucugguggau

SEQ ID NO: 2163173 - RNA, 19 nt, Artificial Sequence
  Description of Artificial Sequence: Synthetic oligonucleotide
cugguggaucuccgaagug

SEQ ID NO: 2163174 - RNA, 19 nt, Artificial Sequence
  Description of Artificial Sequence: Synthetic oligonucleotide
gagauuguuguagggcugu

SEQ ID NO: 2163175 - RNA, 19 nt, Artificial Sequence
  Description of Artificial Sequence: Synthetic oligonucleotide
ugaucucacgaaggcugcu

SEQ ID NO: 2163176 - RNA, 19 nt, Artificial Sequence
  Description of Artificial Sequence: Synthetic oligonucleotide
accuugggagucauuggcu

SEQ ID NO: 2163177 - RNA, 19 nt, Artificial Sequence
  Description of Artificial Sequence: Synthetic oligonucleotide
guuccggcucacaggguag

SEQ ID NO: 2163178 - RNA, 19 nt, Artificial Sequence
  Description of Artificial Sequence: Synthetic oligonucleotide
gaaggguguuggcauauuu

SEQ ID NO: 2163179 - RNA, 19 nt, Artificial Sequence
  Description of Artificial Sequence: Synthetic oligonucleotide
agacccaccaucagggcuu

SEQ ID NO: 2163180 - RNA, 19 nt, Artificial Sequence
  Description of Artificial Sequence: Synthetic oligonucleotide
guaguuccaagcagcagcu

SEQ ID NO: 2163181 - RNA, 19 nt, Artificial Sequence
  Description of Artificial Sequence: Synthetic oligonucleotide
ccgauacacaaugccauag

SEQ ID NO: 2163182 - RNA, 19 nt, Artificial Sequence
  Description of Artificial Sequence: Synthetic oligonucleotide
ggcaacaauuucaucuguc

SEQ ID NO: 2163183 - RNA, 19 nt, Artificial Sequence
  Description of Artificial Sequence: Synthetic oligonucleotide
agguacugaaggccacgaa

SEQ ID NO: 2163184 - RNA, 19 nt, Artificial Sequence
  Description of Artificial Sequence: Synthetic oligonucleotide
auaggugcccucgccaauu

SEQ ID NO: 2163185 - RNA, 19 nt, Artificial Sequence
  Description of Artificial Sequence: Synthetic oligonucleotide
cuccgaagugccagggaga

SEQ ID NO: 2163186 - RNA, 19 nt, Artificial Sequence
  Description of Artificial Sequence: Synthetic oligonucleotide
uggccagaucuuguucaca

SEQ ID NO: 2163187 - RNA, 19 nt, Artificial Sequence
  Description of Artificial Sequence: Synthetic oligonucleotide
ggguagggguuucucuuug

SEQ ID NO: 2163188 - RNA, 19 nt, Artificial Sequence
  Description of Artificial Sequence: Synthetic oligonucleotide
ggccacgaagcaccuguag

SEQ ID NO: 2163189 - RNA, 19 nt, Artificial Sequence
  Description of Artificial Sequence: Synthetic oligonucleotide
acagcccuuaucagucaug

SEQ ID NO: 2163190 - RNA, 19 nt, Artificial Sequence
  Description of Artificial Sequence: Synthetic oligonucleotide
agcccacaugucaaugcug

SEQ ID NO: 2163191 - RNA, 19 nt, Artificial Sequence
  Description of Artificial Sequence: Synthetic oligonucleotide
gucauuggcuuuacuggaa

SEQ ID NO: 2163192 - RNA, 19 nt, Artificial Sequence
  Description of Artificial Sequence: Synthetic oligonucleotide
gcaccuguagcaugaugca

SEQ ID NO: 2163193 - RNA, 19 nt, Artificial Sequence
  Description of Artificial Sequence: Synthetic oligonucleotide
cacgcuuauuucgguggug

SEQ ID NO: 2163194 - RNA, 19 nt, Artificial Sequence
  Description of Artificial Sequence: Synthetic oligonucleotide
cauacaugaagaggaaauu

SEQ ID NO: 2163195 - RNA, 19 nt, Artificial Sequence
  Description of Artificial Sequence: Synthetic oligonucleotide
ugggagucauuggcuuuac

SEQ ID NO: 2163196 - RNA, 19 nt, Artificial Sequence
  Description of Artificial Sequence: Synthetic oligonucleotide
cuccuuaacgcuccggcau

SEQ ID NO: 2163197 - RNA, 19 nt, Artificial Sequence
  Description of Artificial Sequence: Synthetic oligonucleotide
gcuuuacuggaacaccaua

SEQ ID NO: 2163198 - RNA, 19 nt, Artificial Sequence
  Description of Artificial Sequence: Synthetic oligonucleotide
gcccucgccaauucgguuc

SEQ ID NO: 2163199 - RNA, 19 nt, Artificial Sequence
  Description of Artificial Sequence: Synthetic oligonucleotide
gaaggccacgaagcaccug

SEQ ID NO: 2163200 - RNA, 19 nt, Artificial Sequence
  Description of Artificial Sequence: Synthetic oligonucleotide
ggcggagacgcaaaaguaa

SEQ ID NO: 2163201 - RNA, 19 nt, Artificial Sequence
  Description of Artificial Sequence: Synthetic oligonucleotide
ggcccgauacacaaugcca

SEQ ID NO: 2163202 - RNA, 19 nt, Artificial Sequence
  Description of Artificial Sequence: Synthetic oligonucleotide
accauaggcccgagccagg

SEQ ID NO: 2163203 - RNA, 19 nt, Artificial Sequence
  Description of Artificial Sequence: Synthetic oligonucleotide
gguagggguuucucuuuga

SEQ ID NO: 2163204 - RNA, 19 nt, Artificial Sequence
  Description of Artificial Sequence: Synthetic oligonucleotide
caucguuuguucugccccu

SEQ ID NO: 2163205 - RNA, 19 nt, Artificial Sequence
  Description of Artificial Sequence: Synthetic oligonucleotide
auuggccggccaguuggca

SEQ ID NO: 2163206 - RNA, 19 nt, Artificial Sequence
  Description of Artificial Sequence: Synthetic oligonucleotide
aucagggcuugcaucguuu

SEQ ID NO: 2163207 - RNA, 19 nt, Artificial Sequence
  Description of Artificial Sequence: Synthetic oligonucleotide
ugcccucgccaauucgguu

SEQ ID NO: 2163208 - RNA, 19 nt, Artificial Sequence
  Description of Artificial Sequence: Synthetic oligonucleotide
cagguacugaaggccacga

SEQ ID NO: 2163209 - RNA, 19 nt, Artificial Sequence
  Description of Artificial Sequence: Synthetic oligonucleotide
gauuguuguagggcuguuu

SEQ ID NO: 2163210 - RNA, 19 nt, Artificial Sequence
  Description of Artificial Sequence: Synthetic oligonucleotide
cgaagcaccuguagcauga

SEQ ID NO: 2163211 - RNA, 19 nt, Artificial Sequence
  Description of Artificial Sequence: Synthetic oligonucleotide
gucuuuacacagcccuuau

SEQ ID NO: 2163212 - RNA, 19 nt, Artificial Sequence
  Description of Artificial Sequence: Synthetic oligonucleotide
gcagacgaaguccggccuc

SEQ ID NO: 2163213 - RNA, 19 nt, Artificial Sequence
  Description of Artificial Sequence: Synthetic oligonucleotide
cacgggaauuugugcuuga

SEQ ID NO: 2163214 - RNA, 19 nt, Artificial Sequence
  Description of Artificial Sequence: Synthetic oligonucleotide
ucguccccagcagcuguac

SEQ ID NO: 2163215 - RNA, 19 nt, Artificial Sequence
  Description of Artificial Sequence: Synthetic oligonucleotide
gagaaggguguuggcauau

SEQ ID NO: 2163216 - RNA, 19 nt, Artificial Sequence
  Description of Artificial Sequence: Synthetic oligonucleotide
ggcagcuggggcagcacgc

SEQ ID NO: 2163217 - RNA, 19 nt, Artificial Sequence
  Description of Artificial Sequence: Synthetic oligonucleotide
gacccaccaucagggcuug

SEQ ID NO: 2163218 - RNA, 19 nt, Artificial Sequence
  Description of Artificial Sequence: Synthetic oligonucleotide
aacaaccuugggagucauu

SEQ ID NO: 2163219 - RNA, 19 nt, Artificial Sequence
  Description of Artificial Sequence: Synthetic oligonucleotide
cuggguaucccuggcccga

SEQ ID NO: 2163220 - RNA, 19 nt, Artificial Sequence
  Description of Artificial Sequence: Synthetic oligonucleotide
cgcuuauuucggugguggg

SEQ ID NO: 2163221 - RNA, 19 nt, Artificial Sequence
  Description of Artificial Sequence: Synthetic oligonucleotide
gggcuagacccaccaucag

SEQ ID NO: 2163222 - RNA, 19 nt, Artificial Sequence
  Description of Artificial Sequence: Synthetic oligonucleotide
caggguagggguuucucuu

SEQ ID NO: 2163223 - RNA, 19 nt, Artificial Sequence
  Description of Artificial Sequence: Synthetic oligonucleotide
gagagccacgggaauuugu

SEQ ID NO: 2163224 - RNA, 19 nt, Artificial Sequence
  Description of Artificial Sequence: Synthetic oligonucleotide
caauucgguucagcuucuc

SEQ ID NO: 2163225 - RNA, 19 nt, Artificial Sequence
  Description of Artificial Sequence: Synthetic oligonucleotide
cguuuguucugccccucag

SEQ ID NO: 2163226 - RNA, 19 nt, Artificial Sequence
  Description of Artificial Sequence: Synthetic oligonucleotide
cggagacgcaaaaguaaug

SEQ ID NO: 2163227 - RNA, 19 nt, Artificial Sequence
  Description of Artificial Sequence: Synthetic oligonucleotide
ggagaaacccggccagaua

SEQ ID NO: 2163228 - RNA, 19 nt, Artificial Sequence
  Description of Artificial Sequence: Synthetic oligonucleotide
guggaucuccgaagugcca

SEQ ID NO: 2163229 - RNA, 19 nt, Artificial Sequence
  Description of Artificial Sequence: Synthetic oligonucleotide
agaaggguguuggcauauu

SEQ ID NO: 2163230 - RNA, 19 nt, Artificial Sequence
  Description of Artificial Sequence: Synthetic oligonucleotide
cccggccagauauucucac

SEQ ID NO: 2163231 - RNA, 19 nt, Artificial Sequence
  Description of Artificial Sequence: Synthetic oligonucleotide
agcuggggcagcacgcuua

SEQ ID NO: 2163232 - RNA, 19 nt, Artificial Sequence
  Description of Artificial Sequence: Synthetic oligonucleotide
agacgaaguccggccucug

SEQ ID NO: 2163233 - RNA, 19 nt, Artificial Sequence
  Description of Artificial Sequence: Synthetic oligonucleotide
acccggccagauauucuca

SEQ ID NO: 2163234 - RNA, 19 nt, Artificial Sequence
  Description of Artificial Sequence: Synthetic oligonucleotide
ggcugucuuuacacagccc

SEQ ID NO: 2163235 - RNA, 19 nt, Artificial Sequence
  Description of Artificial Sequence: Synthetic oligonucleotide
cagggagaaggggcuuaug

SEQ ID NO: 2163236 - RNA, 19 nt, Artificial Sequence
  Description of Artificial Sequence: Synthetic oligonucleotide
ccagauauucucacucggu

SEQ ID NO: 2163237 - RNA, 19 nt, Artificial Sequence
  Description of Artificial Sequence: Synthetic oligonucleotide
gcauuuaaccugggccuca

SEQ ID NO: 2163238 - RNA, 19 nt, Artificial Sequence
  Description of Artificial Sequence: Synthetic oligonucleotide
caauuucaucugucugggu

SEQ ID NO: 2163239 - RNA, 19 nt, Artificial Sequence
  Description of Artificial Sequence: Synthetic oligonucleotide
ccacgggaauuugugcuug

SEQ ID NO: 2163240 - RNA, 19 nt, Artificial Sequence
  Description of Artificial Sequence: Synthetic oligonucleotide
uggguaucccuggcccgau

SEQ ID NO: 2163241 - RNA, 19 nt, Artificial Sequence
  Description of Artificial Sequence: Synthetic oligonucleotide
ccggcucacaggguagggg

SEQ ID NO: 2163242 - RNA, 19 nt, Artificial Sequence
  Description of Artificial Sequence: Synthetic oligonucleotide
ccggccaguuggcagcuug

SEQ ID NO: 2163243 - RNA, 19 nt, Artificial Sequence
  Description of Artificial Sequence: Synthetic oligonucleotide
ccauaggugcccucgccaa

SEQ ID NO: 2163244 - RNA, 19 nt, Artificial Sequence
  Description of Artificial Sequence: Synthetic oligonucleotide
ccaauaggcuggccagauc

SEQ ID NO: 2163245 - RNA, 19 nt, Artificial Sequence
  Description of Artificial Sequence: Synthetic oligonucleotide
gguagucuggguaguaguu

SEQ ID NO: 2163246 - RNA, 19 nt, Artificial Sequence
  Description of Artificial Sequence: Synthetic oligonucleotide
ggcuugcaucguuuguucu

SEQ ID NO: 2163247 - RNA, 19 nt, Artificial Sequence
  Description of Artificial Sequence: Synthetic oligonucleotide
cugagagccacgggaauuu

SEQ ID NO: 2163248 - RNA, 19 nt, Artificial Sequence
  Description of Artificial Sequence: Synthetic oligonucleotide
ggguaacaaccuugggagu

SEQ ID NO: 2163249 - RNA, 19 nt, Artificial Sequence
  Description of Artificial Sequence: Synthetic oligonucleotide
cgggaauuugugcuugaga

SEQ ID NO: 2163250 - RNA, 19 nt, Artificial Sequence
  Description of Artificial Sequence: Synthetic oligonucleotide
acccaccaucagggcuugc

SEQ ID NO: 2163251 - RNA, 19 nt, Artificial Sequence
  Description of Artificial Sequence: Synthetic oligonucleotide
gcuuaugggccagcagcuc

SEQ ID NO: 2163252 - RNA, 19 nt, Artificial Sequence
  Description of Artificial Sequence: Synthetic oligonucleotide
ccacaaccaccuccuucag

SEQ ID NO: 2163253 - RNA, 19 nt, Artificial Sequence
  Description of Artificial Sequence: Synthetic oligonucleotide
cacgaagcaccuguagcau

SEQ ID NO: 2163254 - RNA, 19 nt, Artificial Sequence
  Description of Artificial Sequence: Synthetic oligonucleotide
cggccaguuggcagcuugg

SEQ ID NO: 2163255 - RNA, 19 nt, Artificial Sequence
  Description of Artificial Sequence: Synthetic oligonucleotide
cacagcccuuaucagucau

SEQ ID NO: 2163256 - RNA, 19 nt, Artificial Sequence
  Description of Artificial Sequence: Synthetic oligonucleotide
guucugccccucaguggca

SEQ ID NO: 2163257 - RNA, 19 nt, Artificial Sequence
  Description of Artificial Sequence: Synthetic oligonucleotide
ccggccucugagagccacg

SEQ ID NO: 2163258 - RNA, 19 nt, Artificial Sequence
  Description of Artificial Sequence: Synthetic oligonucleotide
gcccgauacacaaugccau

SEQ ID NO: 2163259 - RNA, 19 nt, Artificial Sequence
  Description of Artificial Sequence: Synthetic oligonucleotide
cauaggugcccucgccaau

SEQ ID NO: 2163260 - RNA, 19 nt, Artificial Sequence
  Description of Artificial Sequence: Synthetic oligonucleotide
ggcaugaguuccggcucac

SEQ ID NO: 2163261 - RNA, 19 nt, Artificial Sequence
  Description of Artificial Sequence: Synthetic oligonucleotide
gcggagacgcaaaaguaau

SEQ ID NO: 2163262 - RNA, 19 nt, Artificial Sequence
  Description of Artificial Sequence: Synthetic oligonucleotide
gaagcaccuguagcaugau

SEQ ID NO: 2163263 - RNA, 19 nt, Artificial Sequence
  Description of Artificial Sequence: Synthetic oligonucleotide
ggccaguuggcagcuugga

SEQ ID NO: 2163264 - RNA, 19 nt, Artificial Sequence
  Description of Artificial Sequence: Synthetic oligonucleotide
cagacgaaguccggccucu

SEQ ID NO: 2163265 - RNA, 19 nt, Artificial Sequence
  Description of Artificial Sequence: Synthetic oligonucleotide
gcacgcuuauuucgguggu

SEQ ID NO: 2163266 - RNA, 19 nt, Artificial Sequence
  Description of Artificial Sequence: Synthetic oligonucleotide
gcuguacaaucaaaucgau

SEQ ID NO: 2163267 - RNA, 19 nt, Artificial Sequence
  Description of Artificial Sequence: Synthetic oligonucleotide
gcagcacgcuuauuucggu

SEQ ID NO: 2163268 - RNA, 19 nt, Artificial Sequence
  Description of Artificial Sequence: Synthetic oligonucleotide
cgguugcccuuuucuuagg

SEQ ID NO: 2163269 - RNA, 19 nt, Artificial Sequence
  Description of Artificial Sequence: Synthetic oligonucleotide
gugcccucgccaauucggu

SEQ ID NO: 2163270 - RNA, 19 nt, Artificial Sequence
  Description of Artificial Sequence: Synthetic oligonucleotide
caccuguagcaugaugcau

SEQ ID NO: 2163271 - RNA, 19 nt, Artificial Sequence
  Description of Artificial Sequence: Synthetic oligonucleotide
ccuguagcaugaugcauuu

SEQ ID NO: 2163272 - RNA, 19 nt, Artificial Sequence
  Description of Artificial Sequence: Synthetic oligonucleotide
ccgcaccuucuucagggca

SEQ ID NO: 2163273 - RNA, 19 nt, Artificial Sequence
  Description of Artificial Sequence: Synthetic oligonucleotide
ggcuuuacuggaacaccau

SEQ ID NO: 2163274 - RNA, 19 nt, Artificial Sequence
  Description of Artificial Sequence: Synthetic oligonucleotide
cuguagcaugaugcauuua

SEQ ID NO: 2163275 - RNA, 19 nt, Artificial Sequence
  Description of Artificial Sequence: Synthetic oligonucleotide
gccacgggaauuugugcuu

SEQ ID NO: 2163276 - RNA, 19 nt, Artificial Sequence
  Description of Artificial Sequence: Synthetic oligonucleotide
cgaucugguggaucuccga

SEQ ID NO: 2163277 - RNA, 19 nt, Artificial Sequence
  Description of Artificial Sequence: Synthetic oligonucleotide
gcaugaguuccggcucaca

SEQ ID NO: 2163278 - RNA, 19 nt, Artificial Sequence
  Description of Artificial Sequence: Synthetic oligonucleotide
gcugguagucuggguagua

SEQ ID NO: 2163279 - RNA, 19 nt, Artificial Sequence
  Description of Artificial Sequence: Synthetic oligonucleotide
aggccacgaagcaccugua

SEQ ID NO: 2163280 - RNA, 19 nt, Artificial Sequence
  Description of Artificial Sequence: Synthetic oligonucleotide
gggagucauuggcuuuacu

SEQ ID NO: 2163281 - RNA, 19 nt, Artificial Sequence
  Description of Artificial Sequence: Synthetic oligonucleotide
gaguuccggcucacagggu

SEQ ID NO: 2163282 - RNA, 19 nt, Artificial Sequence
  Description of Artificial Sequence: Synthetic oligonucleotide
ccgaagugccagggagaag

SEQ ID NO: 2163283 - RNA, 19 nt, Artificial Sequence
  Description of Artificial Sequence: Synthetic oligonucleotide
cccgcgguugcccuuuucu

SEQ ID NO: 2163284 - RNA, 19 nt, Artificial Sequence
  Description of Artificial Sequence: Synthetic oligonucleotide
ccaauucgguucagcuucu

SEQ ID NO: 2163285 - RNA, 19 nt, Artificial Sequence
  Description of Artificial Sequence: Synthetic oligonucleotide
cggcucacaggguaggggu

SEQ ID NO: 2163286 - RNA, 19 nt, Artificial Sequence
  Description of Artificial Sequence: Synthetic oligonucleotide
gcccgagccaggccaaaau

SEQ ID NO: 2163287 - RNA, 19 nt, Artificial Sequence
  Description of Artificial Sequence: Synthetic oligonucleotide
cuuaacgcuccggcaucuu

SEQ ID NO: 2163288 - RNA, 19 nt, Artificial Sequence
  Description of Artificial Sequence: Synthetic oligonucleotide
gcucacaggguagggguuu

SEQ ID NO: 2163289 - RNA, 19 nt, Artificial Sequence
  Description of Artificial Sequence: Synthetic oligonucleotide
ccggccagauauucucacu

SEQ ID NO: 2163290 - RNA, 19 nt, Artificial Sequence
  Description of Artificial Sequence: Synthetic oligonucleotide
cuguuuccucaagcuguau

SEQ ID NO: 2163291 - RNA, 19 nt, Artificial Sequence
  Description of Artificial Sequence: Synthetic oligonucleotide
ccuuaacgcuccggcaucu

SEQ ID NO: 2163292 - RNA, 19 nt, Artificial Sequence
  Description of Artificial Sequence: Synthetic oligonucleotide
ggcccgagccaggccaaaa

SEQ ID NO: 2163293 - RNA, 19 nt, Artificial Sequence
  Description of Artificial Sequence: Synthetic oligonucleotide
ccucgccaauucgguucag

SEQ ID NO: 2163294 - RNA, 19 nt, Artificial Sequence
  Description of Artificial Sequence: Synthetic oligonucleotide
cccuguggaugaugaaguu

SEQ ID NO: 2163295 - RNA, 19 nt, Artificial Sequence
  Description of Artificial Sequence: Synthetic oligonucleotide
ggcucacaggguagggguu

SEQ ID NO: 2163296 - RNA, 19 nt, Artificial Sequence
  Description of Artificial Sequence: Synthetic oligonucleotide
cgccaauucgguucagcuu

SEQ ID NO: 2163297 - RNA, 19 nt, Artificial Sequence
  Description of Artificial Sequence: Synthetic oligonucleotide
cggucguccccagcagcug

SEQ ID NO: 2163298 - RNA, 19 nt, Artificial Sequence
  Description of Artificial Sequence: Synthetic oligonucleotide
ccgcgguugcccuuuucuu

SEQ ID NO: 2163299 - RNA, 19 nt, Artificial Sequence
  Description of Artificial Sequence: Synthetic oligonucleotide
ccccgcgguugcccuuuuc

SEQ ID NO: 2163300 - RNA, 19 nt, Artificial Sequence
  Description of Artificial Sequence: Synthetic oligonucleotide
ccaucagggcuugcaucgu

SEQ ID NO: 2163301 - RNA, 19 nt, Artificial Sequence
  Description of Artificial Sequence: Synthetic oligonucleotide
ccagggagaaggggcuuau

SEQ ID NO: 2163302 - RNA, 19 nt, Artificial Sequence
  Description of Artificial Sequence: Synthetic oligonucleotide
cccuggcccgauacacaau

SEQ ID NO: 2163303 - RNA, 19 nt, Artificial Sequence
  Description of Artificial Sequence: Synthetic oligonucleotide
uucauuaccacacaaaugu

SEQ ID NO: 2163304 - RNA, 19 nt, Artificial Sequence
  Description of Artificial Sequence: Synthetic oligonucleotide
uuuagugugggucuuaggg

SEQ ID NO: 2163305 - RNA, 19 nt, Artificial Sequence
  Description of Artificial Sequence: Synthetic oligonucleotide
aaaacuaugucacccgggc

SEQ ID NO: 2163306 - RNA, 19 nt, Artificial Sequence
  Description of Artificial Sequence: Synthetic oligonucleotide
uuuguaagaacucaggcug

SEQ ID NO: 2163307 - RNA, 19 nt, Artificial Sequence
  Description of Artificial Sequence: Synthetic oligonucleotide
uaauguuucaaauagagua

SEQ ID NO: 2163308 - RNA, 19 nt, Artificial Sequence
  Description of Artificial Sequence: Synthetic oligonucleotide
aauaauguuucaaauagag

SEQ ID NO: 2163309 - RNA, 19 nt, Artificial Sequence
  Description of Artificial Sequence: Synthetic oligonucleotide
aauagaaaaucaguuuccc

SEQ ID NO: 2163310 - RNA, 19 nt, Artificial Sequence
  Description of Artificial Sequence: Synthetic oligonucleotide
uauucuuggaacuaguuga

SEQ ID NO: 2163311 - RNA, 19 nt, Artificial Sequence
  Description of Artificial Sequence: Synthetic oligonucleotide
gaaggcauaagcuauuucc

SEQ ID NO: 2163312 - RNA, 19 nt, Artificial Sequence
  Description of Artificial Sequence: Synthetic oligonucleotide
aacucuuguaaauuucaac

SEQ ID NO: 2163313 - RNA, 19 nt, Artificial Sequence
  Description of Artificial Sequence: Synthetic oligonucleotide
aacuaugucacccgggcgg

SEQ ID NO: 2163314 - RNA, 19 nt, Artificial Sequence
  Description of Artificial Sequence: Synthetic oligonucleotide
aauguuucaaauagaguac

SEQ ID NO: 2163315 - RNA, 19 nt, Artificial Sequence
  Description of Artificial Sequence: Synthetic oligonucleotide
gaugcuagagaccuuacag

SEQ ID NO: 2163316 - RNA, 19 nt, Artificial Sequence
  Description of Artificial Sequence: Synthetic oligonucleotide
gauaguuccucgaaaagcg

SEQ ID NO: 2163317 - RNA, 19 nt, Artificial Sequence
  Description of Artificial Sequence: Synthetic oligonucleotide
aaagauguagccgugccgg

SEQ ID NO: 2163318 - RNA, 19 nt, Artificial Sequence
  Description of Artificial Sequence: Synthetic oligonucleotide
augccuuuaaaugagauuc

SEQ ID NO: 2163319 - RNA, 19 nt, Artificial Sequence
  Description of Artificial Sequence: Synthetic oligonucleotide
auacuuguauucuuggaac

SEQ ID NO: 2163320 - RNA, 19 nt, Artificial Sequence
  Description of Artificial Sequence: Synthetic oligonucleotide
aagagucuuacaauggagc

SEQ ID NO: 2163321 - RNA, 19 nt, Artificial Sequence
  Description of Artificial Sequence: Synthetic oligonucleotide
agagucuuacaauggagcc

SEQ ID NO: 2163322 - RNA, 19 nt, Artificial Sequence
  Description of Artificial Sequence: Synthetic oligonucleotide
uuuaaaugagauucgccag

SEQ ID NO: 2163323 - RNA, 19 nt, Artificial Sequence
  Description of Artificial Sequence: Synthetic oligonucleotide
acacaaauguacuucuggc

SEQ ID NO: 2163324 - RNA, 19 nt, Artificial Sequence
  Description of Artificial Sequence: Synthetic oligonucleotide
ugcgaaaugccuuuaaaug

SEQ ID NO: 2163325 - RNA, 19 nt, Artificial Sequence
  Description of Artificial Sequence: Synthetic oligonucleotide
uuucaaauagaguacauuu

SEQ ID NO: 2163326 - RNA, 19 nt, Artificial Sequence
  Description of Artificial Sequence: Synthetic oligonucleotide
aaaagauguagccgugccg

SEQ ID NO: 2163327 - RNA, 19 nt, Artificial Sequence
  Description of Artificial Sequence: Synthetic oligonucleotide
uccaauauuacaugguucu

SEQ ID NO: 2163328 - RNA, 19 nt, Artificial Sequence
  Description of Artificial Sequence: Synthetic oligonucleotide
ucacagauaccacaggaag

SEQ ID NO: 2163329 - RNA, 19 nt, Artificial Sequence
  Description of Artificial Sequence: Synthetic oligonucleotide
uuucucucaucacagauac

SEQ ID NO: 2163330 - RNA, 19 nt, Artificial Sequence
  Description of Artificial Sequence: Synthetic oligonucleotide
ucggauaucuuccuugcgg

SEQ ID NO: 2163331 - RNA, 19 nt, Artificial Sequence
  Description of Artificial Sequence: Synthetic oligonucleotide
uagagguaccuuaauaaag

SEQ ID NO: 2163332 - RNA, 19 nt, Artificial Sequence
  Description of Artificial Sequence: Synthetic oligonucleotide
uggacuuuagcaaaacgug

SEQ ID NO: 2163333 - RNA, 19 nt, Artificial Sequence
  Description of Artificial Sequence: Synthetic oligonucleotide
agggagauaacuuuggcca

SEQ ID NO: 2163334 - RNA, 19 nt, Artificial Sequence
  Description of Artificial Sequence: Synthetic oligonucleotide
cuuuaaaugagauucgcca

SEQ ID NO: 2163335 - RNA, 19 nt, Artificial Sequence
  Description of Artificial Sequence: Synthetic oligonucleotide
aagaacucaggcugcacuc

SEQ ID NO: 2163336 - RNA, 19 nt, Artificial Sequence
  Description of Artificial Sequence: Synthetic oligonucleotide
uaaagaaggcauaagcuau

SEQ ID NO: 2163337 - RNA, 19 nt, Artificial Sequence
  Description of Artificial Sequence: Synthetic oligonucleotide
uuggccaaaacuaugucac

SEQ ID NO: 2163338 - RNA, 19 nt, Artificial Sequence
  Description of Artificial Sequence: Synthetic oligonucleotide
auauuuauaaagaaggcau

SEQ ID NO: 2163339 - RNA, 19 nt, Artificial Sequence
  Description of Artificial Sequence: Synthetic oligonucleotide
uuucccaagaauaauguuu

SEQ ID NO: 2163340 - RNA, 19 nt, Artificial Sequence
  Description of Artificial Sequence: Synthetic oligonucleotide
acagauaccacaggaagcg

SEQ ID NO: 2163341 - RNA, 19 nt, Artificial Sequence
  Description of Artificial Sequence: Synthetic oligonucleotide
aaugagauucgccagccaa

SEQ ID NO: 2163342 - RNA, 19 nt, Artificial Sequence
  Description of Artificial Sequence: Synthetic oligonucleotide
uuacaauggagcccaggcg

SEQ ID NO: 2163343 - RNA, 19 nt, Artificial Sequence
  Description of Artificial Sequence: Synthetic oligonucleotide
cuuccuugcggauaguucc

SEQ ID NO: 2163344 - RNA, 19 nt, Artificial Sequence
  Description of Artificial Sequence: Synthetic oligonucleotide
aauauuacaugguucuguu

SEQ ID NO: 2163345 - RNA, 19 nt, Artificial Sequence
  Description of Artificial Sequence: Synthetic oligonucleotide
uguggacuuuagcaaaacg

SEQ ID NO: 2163346 - RNA, 19 nt, Artificial Sequence
  Description of Artificial Sequence: Synthetic oligonucleotide
acuagagguaccuuaauaa

SEQ ID NO: 2163347 - RNA, 19 nt, Artificial Sequence
  Description of Artificial Sequence: Synthetic oligonucleotide
auaaagaaggcauaagcua

SEQ ID NO: 2163348 - RNA, 19 nt, Artificial Sequence
  Description of Artificial Sequence: Synthetic oligonucleotide
agagguaacugcuagcuga

SEQ ID NO: 2163349 - RNA, 19 nt, Artificial Sequence
  Description of Artificial Sequence: Synthetic oligonucleotide
ugggcuaaagcguacuuag

SEQ ID NO: 2163350 - RNA, 19 nt, Artificial Sequence
  Description of Artificial Sequence: Synthetic oligonucleotide
uuuggccaaaacuauguca

SEQ ID NO: 2163351 - RNA, 19 nt, Artificial Sequence
  Description of Artificial Sequence: Synthetic oligonucleotide
agaaaaucaguuucccaag

SEQ ID NO: 2163352 - RNA, 19 nt, Artificial Sequence
  Description of Artificial Sequence: Synthetic oligonucleotide
uucgauacuuguauucuug

SEQ ID NO: 2163353 - RNA, 19 nt, Artificial Sequence
  Description of Artificial Sequence: Synthetic oligonucleotide
accuuaauaaagaccaugg

SEQ ID NO: 2163354 - RNA, 19 nt, Artificial Sequence
  Description of Artificial Sequence: Synthetic oligonucleotide
gauacuuguauucuuggaa

SEQ ID NO: 2163355 - RNA, 19 nt, Artificial Sequence
  Description of Artificial Sequence: Synthetic oligonucleotide
aaacuaugucacccgggcg

SEQ ID NO: 2163356 - RNA, 19 nt, Artificial Sequence
  Description of Artificial Sequence: Synthetic oligonucleotide
ucagcagguaauuggacug

SEQ ID NO: 2163357 - RNA, 19 nt, Artificial Sequence
  Description of Artificial Sequence: Synthetic oligonucleotide
cauuaccacacaaauguac

SEQ ID NO: 2163358 - RNA, 19 nt, Artificial Sequence
  Description of Artificial Sequence: Synthetic oligonucleotide
gguaccuuaauaaagacca

SEQ ID NO: 2163359 - RNA, 19 nt, Artificial Sequence
  Description of Artificial Sequence: Synthetic oligonucleotide
ucgauacuuguauucuugg

SEQ ID NO: 2163360 - RNA, 19 nt, Artificial Sequence
  Description of Artificial Sequence: Synthetic oligonucleotide
uuagugugggucuuagggc

SEQ ID NO: 2163361 - RNA, 19 nt, Artificial Sequence
  Description of Artificial Sequence: Synthetic oligonucleotide
guauucuuggaacuaguug

SEQ ID NO: 2163362 - RNA, 19 nt, Artificial Sequence
  Description of Artificial Sequence: Synthetic oligonucleotide
ugcuagagaccuuacaggu

SEQ ID NO: 2163363 - RNA, 19 nt, Artificial Sequence
  Description of Artificial Sequence: Synthetic oligonucleotide
gacuuuagcaaaacgugag

SEQ ID NO: 2163364 - RNA, 19 nt, Artificial Sequence
  Description of Artificial Sequence: Synthetic oligonucleotide
ucuuucgauacuuguauuc

SEQ ID NO: 2163365 - RNA, 19 nt, Artificial Sequence
  Description of Artificial Sequence: Synthetic oligonucleotide
uuagguuuguaagaacuca

SEQ ID NO: 2163366 - RNA, 19 nt, Artificial Sequence
  Description of Artificial Sequence: Synthetic oligonucleotide
ugccuuuaaaugagauucg

SEQ ID NO: 2163367 - RNA, 19 nt, Artificial Sequence
  Description of Artificial Sequence: Synthetic oligonucleotide
uguaggugccgcuaccggg

SEQ ID NO: 2163368 - RNA, 19 nt, Artificial Sequence
  Description of Artificial Sequence: Synthetic oligonucleotide
aguugcucggauaucuucc

SEQ ID NO: 2163369 - RNA, 19 nt, Artificial Sequence
  Description of Artificial Sequence: Synthetic oligonucleotide
uguuucucucaucacagau

SEQ ID NO: 2163370 - RNA, 19 nt, Artificial Sequence
  Description of Artificial Sequence: Synthetic oligonucleotide
gacucuguuucucucauca

SEQ ID NO: 2163371 - RNA, 19 nt, Artificial Sequence
  Description of Artificial Sequence: Synthetic oligonucleotide
aaugccuuuaaaugagauu

SEQ ID NO: 2163372 - RNA, 19 nt, Artificial Sequence
  Description of Artificial Sequence: Synthetic oligonucleotide
uucaaauagaguacauuuu

SEQ ID NO: 2163373 - RNA, 19 nt, Artificial Sequence
  Description of Artificial Sequence: Synthetic oligonucleotide
cuauuuccaauauuacaug

SEQ ID NO: 2163374 - RNA, 19 nt, Artificial Sequence
  Description of Artificial Sequence: Synthetic oligonucleotide
aagcuauuuccaauauuac

SEQ ID NO: 2163375 - RNA, 19 nt, Artificial Sequence
  Description of Artificial Sequence: Synthetic oligonucleotide
auuggacugugcaucaccc

SEQ ID NO: 2163376 - RNA, 19 nt, Artificial Sequence
  Description of Artificial Sequence: Synthetic oligonucleotide
guugcacagacguucgccg

SEQ ID NO: 2163377 - RNA, 19 nt, Artificial Sequence
  Description of Artificial Sequence: Synthetic oligonucleotide
agguaccuuaauaaagacc

SEQ ID NO: 2163378 - RNA, 19 nt, Artificial Sequence
  Description of Artificial Sequence: Synthetic oligonucleotide
guaacugcuagcugacuag

SEQ ID NO: 2163379 - RNA, 19 nt, Artificial Sequence
  Description of Artificial Sequence: Synthetic oligonucleotide
gucuucgucaggcagcccg

SEQ ID NO: 2163380 - RNA, 19 nt, Artificial Sequence
  Description of Artificial Sequence: Synthetic oligonucleotide
gaugcaguaucucacaggu

SEQ ID NO: 2163381 - RNA, 19 nt, Artificial Sequence
  Description of Artificial Sequence: Synthetic oligonucleotide
aucucacaccagcugaugg

SEQ ID NO: 2163382 - RNA, 19 nt, Artificial Sequence
  Description of Artificial Sequence: Synthetic oligonucleotide
aguaucucacagguggcgc

SEQ ID NO: 2163383 - RNA, 19 nt, Artificial Sequence
  Description of Artificial Sequence: Synthetic oligonucleotide
uuccaauauuacaugguuc

SEQ ID NO: 2163384 - RNA, 19 nt, Artificial Sequence
  Description of Artificial Sequence: Synthetic oligonucleotide
uaaaugagauucgccagcc

SEQ ID NO: 2163385 - RNA, 19 nt, Artificial Sequence
  Description of Artificial Sequence: Synthetic oligonucleotide
aacucauuuuccgcagugg

SEQ ID NO: 2163386 - RNA, 19 nt, Artificial Sequence
  Description of Artificial Sequence: Synthetic oligonucleotide
cacagauaccacaggaagc

SEQ ID NO: 2163387 - RNA, 19 nt, Artificial Sequence
  Description of Artificial Sequence: Synthetic oligonucleotide
agauucgccagccaagaga

SEQ ID NO: 2163388 - RNA, 19 nt, Artificial Sequence
  Description of Artificial Sequence: Synthetic oligonucleotide
acuuagguuuguaagaacu

SEQ ID NO: 2163389 - RNA, 19 nt, Artificial Sequence
  Description of Artificial Sequence: Synthetic oligonucleotide
uuugcgaaaugccuuuaaa

SEQ ID NO: 2163390 - RNA, 19 nt, Artificial Sequence
  Description of Artificial Sequence: Synthetic oligonucleotide
uaccuuaauaaagaccaug

SEQ ID NO: 2163391 - RNA, 19 nt, Artificial Sequence
  Description of Artificial Sequence: Synthetic oligonucleotide
cagggagauaacuuuggcc

SEQ ID NO: 2163392 - RNA, 19 nt, Artificial Sequence
  Description of Artificial Sequence: Synthetic oligonucleotide
agcuccuacaucuggaagu

SEQ ID NO: 2163393 - RNA, 19 nt, Artificial Sequence
  Description of Artificial Sequence: Synthetic oligonucleotide
gacgaaaagauguagccgu

SEQ ID NO: 2163394 - RNA, 19 nt, Artificial Sequence
  Description of Artificial Sequence: Synthetic oligonucleotide
gaccauggcaucuugaugu

SEQ ID NO: 2163395 - RNA, 19 nt, Artificial Sequence
  Description of Artificial Sequence: Synthetic oligonucleotide
gguuuguaagaacucaggc

SEQ ID NO: 2163396 - RNA, 19 nt, Artificial Sequence
  Description of Artificial Sequence: Synthetic oligonucleotide
agagaauagaaaaucaguu

SEQ ID NO: 2163397 - RNA, 19 nt, Artificial Sequence
  Description of Artificial Sequence: Synthetic oligonucleotide
agcgacgaaaagauguagc

SEQ ID NO: 2163398 - RNA, 19 nt, Artificial Sequence
  Description of Artificial Sequence: Synthetic oligonucleotide
aguugacucugucuuuggg

SEQ ID NO: 2163399 - RNA, 19 nt, Artificial Sequence
  Description of Artificial Sequence: Synthetic oligonucleotide
uugggcauucauuaccaca

SEQ ID NO: 2163400 - RNA, 19 nt, Artificial Sequence
  Description of Artificial Sequence: Synthetic oligonucleotide
ugguguggaccccacauac

SEQ ID NO: 2163401 - RNA, 19 nt, Artificial Sequence
  Description of Artificial Sequence: Synthetic oligonucleotide
agucuuacaauggagccca

SEQ ID NO: 2163402 - RNA, 19 nt, Artificial Sequence
  Description of Artificial Sequence: Synthetic oligonucleotide
uaacuuuggccaaaacuau

SEQ ID NO: 2163403 - RNA, 19 nt, Artificial Sequence
  Description of Artificial Sequence: Synthetic oligonucleotide
cuuguauucuuggaacuag

SEQ ID NO: 2163404 - RNA, 19 nt, Artificial Sequence
  Description of Artificial Sequence: Synthetic oligonucleotide
aaacgugaguugaugcuag

SEQ ID NO: 2163405 - RNA, 19 nt, Artificial Sequence
  Description of Artificial Sequence: Synthetic oligonucleotide
gaaaaucaguuucccaaga

SEQ ID NO: 2163406 - RNA, 19 nt, Artificial Sequence
  Description of Artificial Sequence: Synthetic oligonucleotide
agagguaccuuaauaaaga

SEQ ID NO: 2163407 - RNA, 19 nt, Artificial Sequence
  Description of Artificial Sequence: Synthetic oligonucleotide
aagauguagccgugccggg

SEQ ID NO: 2163408 - RNA, 19 nt, Artificial Sequence
  Description of Artificial Sequence: Synthetic oligonucleotide
acucauuuuccgcaguggu

SEQ ID NO: 2163409 - RNA, 19 nt, Artificial Sequence
  Description of Artificial Sequence: Synthetic oligonucleotide
agaaggcauaagcuauuuc

SEQ ID NO: 2163410 - RNA, 19 nt, Artificial Sequence
  Description of Artificial Sequence: Synthetic oligonucleotide
ugcacagacguucgccggg

SEQ ID NO: 2163411 - RNA, 19 nt, Artificial Sequence
  Description of Artificial Sequence: Synthetic oligonucleotide
ugaugcuagagaccuuaca

SEQ ID NO: 2163412 - RNA, 19 nt, Artificial Sequence
  Description of Artificial Sequence: Synthetic oligonucleotide
gaccuuacaggugacaaca

SEQ ID NO: 2163413 - RNA, 19 nt, Artificial Sequence
  Description of Artificial Sequence: Synthetic oligonucleotide
ggaccuaacaaucuuccug

SEQ ID NO: 2163414 - RNA, 19 nt, Artificial Sequence
  Description of Artificial Sequence: Synthetic oligonucleotide
aagcgcgccauucucgcug

SEQ ID NO: 2163415 - RNA, 19 nt, Artificial Sequence
  Description of Artificial Sequence: Synthetic oligonucleotide
uguuucaaauagaguacau

SEQ ID NO: 2163416 - RNA, 19 nt, Artificial Sequence
  Description of Artificial Sequence: Synthetic oligonucleotide
gagguaccuuaauaaagac

SEQ ID NO: 2163417 - RNA, 19 nt, Artificial Sequence
  Description of Artificial Sequence: Synthetic oligonucleotide
agauaccacaggaagcgcg

SEQ ID NO: 2163418 - RNA, 19 nt, Artificial Sequence
  Description of Artificial Sequence: Synthetic oligonucleotide
ucuuccuugcggauaguuc

SEQ ID NO: 2163419 - RNA, 19 nt, Artificial Sequence
  Description of Artificial Sequence: Synthetic oligonucleotide
gauguagccgugccgggug

SEQ ID NO: 2163420 - RNA, 19 nt, Artificial Sequence
  Description of Artificial Sequence: Synthetic oligonucleotide
aaauguacuucuggcacau

SEQ ID NO: 2163421 - RNA, 19 nt, Artificial Sequence
  Description of Artificial Sequence: Synthetic oligonucleotide
uuugguugaaagagucuua

SEQ ID NO: 2163422 - RNA, 19 nt, Artificial Sequence
  Description of Artificial Sequence: Synthetic oligonucleotide
acaugguucuguuugcgaa

SEQ ID NO: 2163423 - RNA, 19 nt, Artificial Sequence
  Description of Artificial Sequence: Synthetic oligonucleotide
ucuuacaauggagcccagg

SEQ ID NO: 2163424 - RNA, 19 nt, Artificial Sequence
  Description of Artificial Sequence: Synthetic oligonucleotide
cacugcaucucacaccagc

SEQ ID NO: 2163425 - RNA, 19 nt, Artificial Sequence
  Description of Artificial Sequence: Synthetic oligonucleotide
gauaccacaggaagcgcgc

SEQ ID NO: 2163426 - RNA, 19 nt, Artificial Sequence
  Description of Artificial Sequence: Synthetic oligonucleotide
gagucuuacaauggagccc

SEQ ID NO: 2163427 - RNA, 19 nt, Artificial Sequence
  Description of Artificial Sequence: Synthetic oligonucleotide
uucucgcuggucuucguca

SEQ ID NO: 2163428 - RNA, 19 nt, Artificial Sequence
  Description of Artificial Sequence: Synthetic oligonucleotide
auaauguuucaaauagagu

SEQ ID NO: 2163429 - RNA, 19 nt, Artificial Sequence
  Description of Artificial Sequence: Synthetic oligonucleotide
accccugacucacuguggg

SEQ ID NO: 2163430 - RNA, 19 nt, Artificial Sequence
  Description of Artificial Sequence: Synthetic oligonucleotide
auucucgcuggucuucguc

SEQ ID NO: 2163431 - RNA, 19 nt, Artificial Sequence
  Description of Artificial Sequence: Synthetic oligonucleotide
agguuuguaagaacucagg

SEQ ID NO: 2163432 - RNA, 19 nt, Artificial Sequence
  Description of Artificial Sequence: Synthetic oligonucleotide
gaccuaacaaucuuccugu

SEQ ID NO: 2163433 - RNA, 19 nt, Artificial Sequence
  Description of Artificial Sequence: Synthetic oligonucleotide
uguggaccccacauacaag

SEQ ID NO: 2163434 - RNA, 19 nt, Artificial Sequence
  Description of Artificial Sequence: Synthetic oligonucleotide
ugggucuuagggcacugca

SEQ ID NO: 2163435 - RNA, 19 nt, Artificial Sequence
  Description of Artificial Sequence: Synthetic oligonucleotide
uaacaaucuuccugucuca

SEQ ID NO: 2163436 - RNA, 19 nt, Artificial Sequence
  Description of Artificial Sequence: Synthetic oligonucleotide
auguuucaaauagaguaca

SEQ ID NO: 2163437 - RNA, 19 nt, Artificial Sequence
  Description of Artificial Sequence: Synthetic oligonucleotide
ggauaguuccucgaaaagc

SEQ ID NO: 2163438 - RNA, 19 nt, Artificial Sequence
  Description of Artificial Sequence: Synthetic oligonucleotide
gguaauuggacugugcauc

SEQ ID NO: 2163439 - RNA, 19 nt, Artificial Sequence
  Description of Artificial Sequence: Synthetic oligonucleotide
cuaccccuaacucauuuuc

SEQ ID NO: 2163440 - RNA, 19 nt, Artificial Sequence
  Description of Artificial Sequence: Synthetic oligonucleotide
uugcacagacguucgccgg

SEQ ID NO: 2163441 - RNA, 19 nt, Artificial Sequence
  Description of Artificial Sequence: Synthetic oligonucleotide
uccgcaguggucagcaggu

SEQ ID NO: 2163442 - RNA, 19 nt, Artificial Sequence
  Description of Artificial Sequence: Synthetic oligonucleotide
uacaugguucuguuugcga

SEQ ID NO: 2163443 - RNA, 19 nt, Artificial Sequence
  Description of Artificial Sequence: Synthetic oligonucleotide
ugagauucgccagccaaga

SEQ ID NO: 2163444 - RNA, 19 nt, Artificial Sequence
  Description of Artificial Sequence: Synthetic oligonucleotide
gauucgccagccaagagaa

SEQ ID NO: 2163445 - RNA, 19 nt, Artificial Sequence
  Description of Artificial Sequence: Synthetic oligonucleotide
gcguacuuagguuuguaag

SEQ ID NO: 2163446 - RNA, 19 nt, Artificial Sequence
  Description of Artificial Sequence: Synthetic oligonucleotide
guaauuggacugugcauca

SEQ ID NO: 2163447 - RNA, 19 nt, Artificial Sequence
  Description of Artificial Sequence: Synthetic oligonucleotide
cuuuagugugggucuuagg

SEQ ID NO: 2163448 - RNA, 19 nt, Artificial Sequence
  Description of Artificial Sequence: Synthetic oligonucleotide
auaagcuauuuccaauauu

SEQ ID NO: 2163449 - RNA, 19 nt, Artificial Sequence
  Description of Artificial Sequence: Synthetic oligonucleotide
gcgacgaaaagauguagcc

SEQ ID NO: 2163450 - RNA, 19 nt, Artificial Sequence
  Description of Artificial Sequence: Synthetic oligonucleotide
ucgucaggcagcccgccag

SEQ ID NO: 2163451 - RNA, 19 nt, Artificial Sequence
  Description of Artificial Sequence: Synthetic oligonucleotide
uacuuagguuuguaagaac

SEQ ID NO: 2163452 - RNA, 19 nt, Artificial Sequence
  Description of Artificial Sequence: Synthetic oligonucleotide
cuagagguaccuuaauaaa

SEQ ID NO: 2163453 - RNA, 19 nt, Artificial Sequence
  Description of Artificial Sequence: Synthetic oligonucleotide
cacuugggaccuaacaauc

SEQ ID NO: 2163454 - RNA, 19 nt, Artificial Sequence
  Description of Artificial Sequence: Synthetic oligonucleotide
gcgaaaugccuuuaaauga

SEQ ID NO: 2163455 - RNA, 19 nt, Artificial Sequence
  Description of Artificial Sequence: Synthetic oligonucleotide
agacguucgccggggaugc

SEQ ID NO: 2163456 - RNA, 19 nt, Artificial Sequence
  Description of Artificial Sequence: Synthetic oligonucleotide
uguaagaacucaggcugca

SEQ ID NO: 2163457 - RNA, 19 nt, Artificial Sequence
  Description of Artificial Sequence: Synthetic oligonucleotide
cacucuggccacuuuccgg

SEQ ID NO: 2163458 - RNA, 19 nt, Artificial Sequence
  Description of Artificial Sequence: Synthetic oligonucleotide
gccaaaacuaugucacccg

SEQ ID NO: 2163459 - RNA, 19 nt, Artificial Sequence
  Description of Artificial Sequence: Synthetic oligonucleotide
aucuggaccccugacucac

SEQ ID NO: 2163460 - RNA, 19 nt, Artificial Sequence
  Description of Artificial Sequence: Synthetic oligonucleotide
cucuguuucucucaucaca

SEQ ID NO: 2163461 - RNA, 19 nt, Artificial Sequence
  Description of Artificial Sequence: Synthetic oligonucleotide
ggaugcaguaucucacagg

SEQ ID NO: 2163462 - RNA, 19 nt, Artificial Sequence
  Description of Artificial Sequence: Synthetic oligonucleotide
gacuagagguaccuuaaua

SEQ ID NO: 2163463 - RNA, 19 nt, Artificial Sequence
  Description of Artificial Sequence: Synthetic oligonucleotide
ccuuuaaaugagauucgcc

SEQ ID NO: 2163464 - RNA, 19 nt, Artificial Sequence
  Description of Artificial Sequence: Synthetic oligonucleotide
cagguaauuggacugugca

SEQ ID NO: 2163465 - RNA, 19 nt, Artificial Sequence
  Description of Artificial Sequence: Synthetic oligonucleotide
guaucucacagguggcgcc

SEQ ID NO: 2163466 - RNA, 19 nt, Artificial Sequence
  Description of Artificial Sequence: Synthetic oligonucleotide
guaggugccgcuaccgggg

SEQ ID NO: 2163467 - RNA, 19 nt, Artificial Sequence
  Description of Artificial Sequence: Synthetic oligonucleotide
uuucgauacuuguauucuu

SEQ ID NO: 2163468 - RNA, 19 nt, Artificial Sequence
  Description of Artificial Sequence: Synthetic oligonucleotide
ugcggauaguuccucgaaa

SEQ ID NO: 2163469 - RNA, 19 nt, Artificial Sequence
  Description of Artificial Sequence: Synthetic oligonucleotide
uucgccagccaagagaaua

SEQ ID NO: 2163470 - RNA, 19 nt, Artificial Sequence
  Description of Artificial Sequence: Synthetic oligonucleotide
ucacccagggagauaacuu

SEQ ID NO: 2163471 - RNA, 19 nt, Artificial Sequence
  Description of Artificial Sequence: Synthetic oligonucleotide
agguaauuggacugugcau

SEQ ID NO: 2163472 - RNA, 19 nt, Artificial Sequence
  Description of Artificial Sequence: Synthetic oligonucleotide
ucucgcuggucuucgucag

SEQ ID NO: 2163473 - RNA, 19 nt, Artificial Sequence
  Description of Artificial Sequence: Synthetic oligonucleotide
guucuuucgauacuuguau

SEQ ID NO: 2163474 - RNA, 19 nt, Artificial Sequence
  Description of Artificial Sequence: Synthetic oligonucleotide
ucuuugggcuaaagcguac

SEQ ID NO: 2163475 - RNA, 19 nt, Artificial Sequence
  Description of Artificial Sequence: Synthetic oligonucleotide
cacacuugggaccuaacaa

SEQ ID NO: 2163476 - RNA, 19 nt, Artificial Sequence
  Description of Artificial Sequence: Synthetic oligonucleotide
auguggacuuuagcaaaac

SEQ ID NO: 2163477 - RNA, 19 nt, Artificial Sequence
  Description of Artificial Sequence: Synthetic oligonucleotide
aucaguuucccaagaauaa

SEQ ID NO: 2163478 - RNA, 19 nt, Artificial Sequence
  Description of Artificial Sequence: Synthetic oligonucleotide
accuaacaaucuuccuguc

SEQ ID NO: 2163479 - RNA, 19 nt, Artificial Sequence
  Description of Artificial Sequence: Synthetic oligonucleotide
aggcauaagcuauuuccaa

SEQ ID NO: 2163480 - RNA, 19 nt, Artificial Sequence
  Description of Artificial Sequence: Synthetic oligonucleotide
agguugcacagacguucgc

SEQ ID NO: 2163481 - RNA, 19 nt, Artificial Sequence
  Description of Artificial Sequence: Synthetic oligonucleotide
gaccccacauacaagaugu

SEQ ID NO: 2163482 - RNA, 19 nt, Artificial Sequence
  Description of Artificial Sequence: Synthetic oligonucleotide
caguaucucacagguggcg

SEQ ID NO: 2163483 - RNA, 19 nt, Artificial Sequence
  Description of Artificial Sequence: Synthetic oligonucleotide
gagauucgccagccaagag

SEQ ID NO: 2163484 - RNA, 19 nt, Artificial Sequence
  Description of Artificial Sequence: Synthetic oligonucleotide
uuugggcuaaagcguacuu

SEQ ID NO: 2163485 - RNA, 19 nt, Artificial Sequence
  Description of Artificial Sequence: Synthetic oligonucleotide
agcguacuuagguuuguaa

SEQ ID NO: 2163486 - RNA, 19 nt, Artificial Sequence
  Description of Artificial Sequence: Synthetic oligonucleotide
uggaacuaguugacucugu

SEQ ID NO: 2163487 - RNA, 19 nt, Artificial Sequence
  Description of Artificial Sequence: Synthetic oligonucleotide
ugaugggaaccaucuggac

SEQ ID NO: 2163488 - RNA, 19 nt, Artificial Sequence
  Description of Artificial Sequence: Synthetic oligonucleotide
uaacugcuagcugacuaga

SEQ ID NO: 2163489 - RNA, 19 nt, Artificial Sequence
  Description of Artificial Sequence: Synthetic oligonucleotide
aacgugaguugaugcuaga

SEQ ID NO: 2163490 - RNA, 19 nt, Artificial Sequence
  Description of Artificial Sequence: Synthetic oligonucleotide
guggacuuuagcaaaacgu

SEQ ID NO: 2163491 - RNA, 19 nt, Artificial Sequence
  Description of Artificial Sequence: Synthetic oligonucleotide
aaagcguacuuagguuugu

SEQ ID NO: 2163492 - RNA, 19 nt, Artificial Sequence
  Description of Artificial Sequence: Synthetic oligonucleotide
uuccuugcggauaguuccu

SEQ ID NO: 2163493 - RNA, 19 nt, Artificial Sequence
  Description of Artificial Sequence: Synthetic oligonucleotide
ccaaaacuaugucacccgg

SEQ ID NO: 2163494 - RNA, 19 nt, Artificial Sequence
  Description of Artificial Sequence: Synthetic oligonucleotide
cucggauaucuuccuugcg

SEQ ID NO: 2163495 - RNA, 19 nt, Artificial Sequence
  Description of Artificial Sequence: Synthetic oligonucleotide
guguaggugccgcuaccgg

SEQ ID NO: 2163496 - RNA, 19 nt, Artificial Sequence
  Description of Artificial Sequence: Synthetic oligonucleotide
guacuuagguuuguaagaa

SEQ ID NO: 2163497 - RNA, 19 nt, Artificial Sequence
  Description of Artificial Sequence: Synthetic oligonucleotide
acgugaguugaugcuagag

SEQ ID NO: 2163498 - RNA, 19 nt, Artificial Sequence
  Description of Artificial Sequence: Synthetic oligonucleotide
gcuauuuccaauauuacau

SEQ ID NO: 2163499 - RNA, 19 nt, Artificial Sequence
  Description of Artificial Sequence: Synthetic oligonucleotide
uugcggauaguuccucgaa

SEQ ID NO: 2163500 - RNA, 19 nt, Artificial Sequence
  Description of Artificial Sequence: Synthetic oligonucleotide
uucuuucgauacuuguauu

SEQ ID NO: 2163501 - RNA, 19 nt, Artificial Sequence
  Description of Artificial Sequence: Synthetic oligonucleotide
gaaaugccuuuaaaugaga

SEQ ID NO: 2163502 - RNA, 19 nt, Artificial Sequence
  Description of Artificial Sequence: Synthetic oligonucleotide
ggucuuagggcacugcauc

SEQ ID NO: 2163503 - RNA, 19 nt, Artificial Sequence
  Description of Artificial Sequence: Synthetic oligonucleotide
ccaagagaauagaaaauca

SEQ ID NO: 2163504 - RNA, 19 nt, Artificial Sequence
  Description of Artificial Sequence: Synthetic oligonucleotide
ucacugugggccaccacua

SEQ ID NO: 2163505 - RNA, 19 nt, Artificial Sequence
  Description of Artificial Sequence: Synthetic oligonucleotide
auauuacaugguucuguuu

SEQ ID NO: 2163506 - RNA, 19 nt, Artificial Sequence
  Description of Artificial Sequence: Synthetic oligonucleotide
uggaaguaacugugacucu

SEQ ID NO: 2163507 - RNA, 19 nt, Artificial Sequence
  Description of Artificial Sequence: Synthetic oligonucleotide
ugacuagagguaccuuaau

SEQ ID NO: 2163508 - RNA, 19 nt, Artificial Sequence
  Description of Artificial Sequence: Synthetic oligonucleotide
cuaaagcguacuuagguuu

SEQ ID NO: 2163509 - RNA, 19 nt, Artificial Sequence
  Description of Artificial Sequence: Synthetic oligonucleotide
aucacccagggagauaacu

SEQ ID NO: 2163510 - RNA, 19 nt, Artificial Sequence
  Description of Artificial Sequence: Synthetic oligonucleotide
ucgcuggucuucgucaggc

SEQ ID NO: 2163511 - RNA, 19 nt, Artificial Sequence
  Description of Artificial Sequence: Synthetic oligonucleotide
uucucucaucacagauacc

SEQ ID NO: 2163512 - RNA, 19 nt, Artificial Sequence
  Description of Artificial Sequence: Synthetic oligonucleotide
guugaugcuagagaccuua

SEQ ID NO: 2163513 - RNA, 19 nt, Artificial Sequence
  Description of Artificial Sequence: Synthetic oligonucleotide
caaaacgugaguugaugcu

SEQ ID NO: 2163514 - RNA, 19 nt, Artificial Sequence
  Description of Artificial Sequence: Synthetic oligonucleotide
ugcuagcugacuagaggua

SEQ ID NO: 2163515 - RNA, 19 nt, Artificial Sequence
  Description of Artificial Sequence: Synthetic oligonucleotide
uagcaaaacgugaguugau

SEQ ID NO: 2163516 - RNA, 19 nt, Artificial Sequence
  Description of Artificial Sequence: Synthetic oligonucleotide
cugacuagagguaccuuaa

SEQ ID NO: 2163517 - RNA, 19 nt, Artificial Sequence
  Description of Artificial Sequence: Synthetic oligonucleotide
aguggucagcagguaauug

SEQ ID NO: 2163518 - RNA, 19 nt, Artificial Sequence
  Description of Artificial Sequence: Synthetic oligonucleotide
aggaagcgcgccauucucg

SEQ ID NO: 2163519 - RNA, 19 nt, Artificial Sequence
  Description of Artificial Sequence: Synthetic oligonucleotide
uaucucacagguggcgcca

SEQ ID NO: 2163520 - RNA, 19 nt, Artificial Sequence
  Description of Artificial Sequence: Synthetic oligonucleotide
ccuaacucauuuuccgcag

SEQ ID NO: 2163521 - RNA, 19 nt, Artificial Sequence
  Description of Artificial Sequence: Synthetic oligonucleotide
auaaagaccauggcaucuu

SEQ ID NO: 2163522 - RNA, 19 nt, Artificial Sequence
  Description of Artificial Sequence: Synthetic oligonucleotide
cauuuuccgcaguggucag

SEQ ID NO: 2163523 - RNA, 19 nt, Artificial Sequence
  Description of Artificial Sequence: Synthetic oligonucleotide
uucagugguguggacccca

SEQ ID NO: 2163524 - RNA, 19 nt, Artificial Sequence
  Description of Artificial Sequence: Synthetic oligonucleotide
acuuguauucuuggaacua

SEQ ID NO: 2163525 - RNA, 19 nt, Artificial Sequence
  Description of Artificial Sequence: Synthetic oligonucleotide
aucacagauaccacaggaa

SEQ ID NO: 2163526 - RNA, 19 nt, Artificial Sequence
  Description of Artificial Sequence: Synthetic oligonucleotide
ggaaacucuuguaaauuuc

SEQ ID NO: 2163527 - RNA, 19 nt, Artificial Sequence
  Description of Artificial Sequence: Synthetic oligonucleotide
caccacuaccccuaacuca

SEQ ID NO: 2163528 - RNA, 19 nt, Artificial Sequence
  Description of Artificial Sequence: Synthetic oligonucleotide
cuugcggauaguuccucga

SEQ ID NO: 2163529 - RNA, 19 nt, Artificial Sequence
  Description of Artificial Sequence: Synthetic oligonucleotide
agcgcgccauucucgcugg

SEQ ID NO: 2163530 - RNA, 19 nt, Artificial Sequence
  Description of Artificial Sequence: Synthetic oligonucleotide
cuugggcauucauuaccac

SEQ ID NO: 2163531 - RNA, 19 nt, Artificial Sequence
  Description of Artificial Sequence: Synthetic oligonucleotide
caauauuacaugguucugu

SEQ ID NO: 2163532 - RNA, 19 nt, Artificial Sequence
  Description of Artificial Sequence: Synthetic oligonucleotide
acuugggaccuaacaaucu

SEQ ID NO: 2163533 - RNA, 19 nt, Artificial Sequence
  Description of Artificial Sequence: Synthetic oligonucleotide
gguguaggugccgcuaccg

SEQ ID NO: 2163534 - RNA, 19 nt, Artificial Sequence
  Description of Artificial Sequence: Synthetic oligonucleotide
gguaacugcuagcugacua

SEQ ID NO: 2163535 - RNA, 19 nt, Artificial Sequence
  Description of Artificial Sequence: Synthetic oligonucleotide
ucaguugcucggauaucuu

SEQ ID NO: 2163536 - RNA, 19 nt, Artificial Sequence
  Description of Artificial Sequence: Synthetic oligonucleotide
uagagaccuuacaggugac

SEQ ID NO: 2163537 - RNA, 19 nt, Artificial Sequence
  Description of Artificial Sequence: Synthetic oligonucleotide
ucgccggggaugcaguauc

SEQ ID NO: 2163538 - RNA, 19 nt, Artificial Sequence
  Description of Artificial Sequence: Synthetic oligonucleotide
gguugcacagacguucgcc

SEQ ID NO: 2163539 - RNA, 19 nt, Artificial Sequence
  Description of Artificial Sequence: Synthetic oligonucleotide
agugugggucuuagggcac

SEQ ID NO: 2163540 - RNA, 19 nt, Artificial Sequence
  Description of Artificial Sequence: Synthetic oligonucleotide
gcucggauaucuuccuugc

SEQ ID NO: 2163541 - RNA, 19 nt, Artificial Sequence
  Description of Artificial Sequence: Synthetic oligonucleotide
ggcuaaagcguacuuaggu

SEQ ID NO: 2163542 - RNA, 19 nt, Artificial Sequence
  Description of Artificial Sequence: Synthetic oligonucleotide
cugucucagcugcacgggc

SEQ ID NO: 2163543 - RNA, 19 nt, Artificial Sequence
  Description of Artificial Sequence: Synthetic oligonucleotide
ggaagcgcgccauucucgc

SEQ ID NO: 2163544 - RNA, 19 nt, Artificial Sequence
  Description of Artificial Sequence: Synthetic oligonucleotide
caagagguaacugcuagcu

SEQ ID NO: 2163545 - RNA, 19 nt, Artificial Sequence
  Description of Artificial Sequence: Synthetic oligonucleotide
uggaccccacauacaagau

SEQ ID NO: 2163546 - RNA, 19 nt, Artificial Sequence
  Description of Artificial Sequence: Synthetic oligonucleotide
acucacugugggccaccac

SEQ ID NO: 2163547 - RNA, 19 nt, Artificial Sequence
  Description of Artificial Sequence: Synthetic oligonucleotide
uucgucaggcagcccgcca

SEQ ID NO: 2163548 - RNA, 19 nt, Artificial Sequence
  Description of Artificial Sequence: Synthetic oligonucleotide
ucacccgggcggaaacucu

SEQ ID NO: 2163549 - RNA, 19 nt, Artificial Sequence
  Description of Artificial Sequence: Synthetic oligonucleotide
auaguuccucgaaaagcgu

SEQ ID NO: 2163550 - RNA, 19 nt, Artificial Sequence
  Description of Artificial Sequence: Synthetic oligonucleotide
ggacuuuagcaaaacguga

SEQ ID NO: 2163551 - RNA, 19 nt, Artificial Sequence
  Description of Artificial Sequence: Synthetic oligonucleotide
gaccccugacucacugugg

SEQ ID NO: 2163552 - RNA, 19 nt, Artificial Sequence
  Description of Artificial Sequence: Synthetic oligonucleotide
cagacguucgccggggaug

SEQ ID NO: 2163553 - RNA, 19 nt, Artificial Sequence
  Description of Artificial Sequence: Synthetic oligonucleotide
cuuuccggaauucuuuagu

SEQ ID NO: 2163554 - RNA, 19 nt, Artificial Sequence
  Description of Artificial Sequence: Synthetic oligonucleotide
guuugcgaaaugccuuuaa

SEQ ID NO: 2163555 - RNA, 19 nt, Artificial Sequence
  Description of Artificial Sequence: Synthetic oligonucleotide
cuuucgauacuuguauucu

SEQ ID NO: 2163556 - RNA, 19 nt, Artificial Sequence
  Description of Artificial Sequence: Synthetic oligonucleotide
uaugucacccgggcggaaa

SEQ ID NO: 2163557 - RNA, 19 nt, Artificial Sequence
  Description of Artificial Sequence: Synthetic oligonucleotide
gagauaacuuuggccaaaa

SEQ ID NO: 2163558 - RNA, 19 nt, Artificial Sequence
  Description of Artificial Sequence: Synthetic oligonucleotide
gccuuuaaaugagauucgc

SEQ ID NO: 2163559 - RNA, 19 nt, Artificial Sequence
  Description of Artificial Sequence: Synthetic oligonucleotide
cucacugugggccaccacu

SEQ ID NO: 2163560 - RNA, 19 nt, Artificial Sequence
  Description of Artificial Sequence: Synthetic oligonucleotide
acgaaaagauguagccgug

SEQ ID NO: 2163561 - RNA, 19 nt, Artificial Sequence
  Description of Artificial Sequence: Synthetic oligonucleotide
cagcgacgaaaagauguag

SEQ ID NO: 2163562 - RNA, 19 nt, Artificial Sequence
  Description of Artificial Sequence: Synthetic oligonucleotide
cguacuuagguuuguaaga

SEQ ID NO: 2163563 - RNA, 19 nt, Artificial Sequence
  Description of Artificial Sequence: Synthetic oligonucleotide
aguuccucgaaaagcguuu

SEQ ID NO: 2163564 - RNA, 19 nt, Artificial Sequence
  Description of Artificial Sequence: Synthetic oligonucleotide
acccagggagauaacuuug

SEQ ID NO: 2163565 - RNA, 19 nt, Artificial Sequence
  Description of Artificial Sequence: Synthetic oligonucleotide
cuggaccccugacucacug

SEQ ID NO: 2163566 - RNA, 19 nt, Artificial Sequence
  Description of Artificial Sequence: Synthetic oligonucleotide
ucucacagguggcgccaug

SEQ ID NO: 2163567 - RNA, 19 nt, Artificial Sequence
  Description of Artificial Sequence: Synthetic oligonucleotide
gcugacuagagguaccuua

SEQ ID NO: 2163568 - RNA, 19 nt, Artificial Sequence
  Description of Artificial Sequence: Synthetic oligonucleotide
acuaugucacccgggcgga

SEQ ID NO: 2163569 - RNA, 19 nt, Artificial Sequence
  Description of Artificial Sequence: Synthetic oligonucleotide
gcuagcugacuagagguac

SEQ ID NO: 2163570 - RNA, 19 nt, Artificial Sequence
  Description of Artificial Sequence: Synthetic oligonucleotide
uaggugccgcuaccggggc

SEQ ID NO: 2163571 - RNA, 19 nt, Artificial Sequence
  Description of Artificial Sequence: Synthetic oligonucleotide
acagacguucgccggggau

SEQ ID NO: 2163572 - RNA, 19 nt, Artificial Sequence
  Description of Artificial Sequence: Synthetic oligonucleotide
auacaagauguggacuuua

SEQ ID NO: 2163573 - RNA, 19 nt, Artificial Sequence
  Description of Artificial Sequence: Synthetic oligonucleotide
agagaccuuacaggugaca

SEQ ID NO: 2163574 - RNA, 19 nt, Artificial Sequence
  Description of Artificial Sequence: Synthetic oligonucleotide
agauguagccgugccgggu

SEQ ID NO: 2163575 - RNA, 19 nt, Artificial Sequence
  Description of Artificial Sequence: Synthetic oligonucleotide
gacucugucuuugggcuaa

SEQ ID NO: 2163576 - RNA, 19 nt, Artificial Sequence
  Description of Artificial Sequence: Synthetic oligonucleotide
gcggacucacacuugggac

SEQ ID NO: 2163577 - RNA, 19 nt, Artificial Sequence
  Description of Artificial Sequence: Synthetic oligonucleotide
cucacacuugggaccuaac

SEQ ID NO: 2163578 - RNA, 19 nt, Artificial Sequence
  Description of Artificial Sequence: Synthetic oligonucleotide
cagauaccacaggaagcgc

SEQ ID NO: 2163579 - RNA, 19 nt, Artificial Sequence
  Description of Artificial Sequence: Synthetic oligonucleotide
cucgcuggucuucgucagg

SEQ ID NO: 2163580 - RNA, 19 nt, Artificial Sequence
  Description of Artificial Sequence: Synthetic oligonucleotide
ccccacauacaagaugugg

SEQ ID NO: 2163581 - RNA, 19 nt, Artificial Sequence
  Description of Artificial Sequence: Synthetic oligonucleotide
cuuuagcaaaacgugaguu

SEQ ID NO: 2163582 - RNA, 19 nt, Artificial Sequence
  Description of Artificial Sequence: Synthetic oligonucleotide
ugacucugucuuugggcua

SEQ ID NO: 2163583 - RNA, 19 nt, Artificial Sequence
  Description of Artificial Sequence: Synthetic oligonucleotide
ugacucuguuucucucauc

SEQ ID NO: 2163584 - RNA, 19 nt, Artificial Sequence
  Description of Artificial Sequence: Synthetic oligonucleotide
ugugggucuuagggcacug

SEQ ID NO: 2163585 - RNA, 19 nt, Artificial Sequence
  Description of Artificial Sequence: Synthetic oligonucleotide
cucacaccagcugauggga

SEQ ID NO: 2163586 - RNA, 19 nt, Artificial Sequence
  Description of Artificial Sequence: Synthetic oligonucleotide
accuuacaggugacaacag

SEQ ID NO: 2163587 - RNA, 19 nt, Artificial Sequence
  Description of Artificial Sequence: Synthetic oligonucleotide
caucucacaccagcugaug

SEQ ID NO: 2163588 - RNA, 19 nt, Artificial Sequence
  Description of Artificial Sequence: Synthetic oligonucleotide
uggaccccugacucacugu

SEQ ID NO: 2163589 - RNA, 19 nt, Artificial Sequence
  Description of Artificial Sequence: Synthetic oligonucleotide
agccgugccggguguaggu

SEQ ID NO: 2163590 - RNA, 19 nt, Artificial Sequence
  Description of Artificial Sequence: Synthetic oligonucleotide
cgacgaaaagauguagccg

SEQ ID NO: 2163591 - RNA, 19 nt, Artificial Sequence
  Description of Artificial Sequence: Synthetic oligonucleotide
ccuugcggauaguuccucg

SEQ ID NO: 2163592 - RNA, 19 nt, Artificial Sequence
  Description of Artificial Sequence: Synthetic oligonucleotide
uguuugcgaaaugccuuua

SEQ ID NO: 2163593 - RNA, 19 nt, Artificial Sequence
  Description of Artificial Sequence: Synthetic oligonucleotide
ggcggacucacacuuggga

SEQ ID NO: 2163594 - RNA, 19 nt, Artificial Sequence
  Description of Artificial Sequence: Synthetic oligonucleotide
acguucgccggggaugcag

SEQ ID NO: 2163595 - RNA, 19 nt, Artificial Sequence
  Description of Artificial Sequence: Synthetic oligonucleotide
cuguuucucucaucacaga

SEQ ID NO: 2163596 - RNA, 19 nt, Artificial Sequence
  Description of Artificial Sequence: Synthetic oligonucleotide
ccccuaacucauuuuccgc

SEQ ID NO: 2163597 - RNA, 19 nt, Artificial Sequence
  Description of Artificial Sequence: Synthetic oligonucleotide
aagcguacuuagguuugua

SEQ ID NO: 2163598 - RNA, 19 nt, Artificial Sequence
  Description of Artificial Sequence: Synthetic oligonucleotide
gggccuugggcauucauua

SEQ ID NO: 2163599 - RNA, 19 nt, Artificial Sequence
  Description of Artificial Sequence: Synthetic oligonucleotide
cccuaacucauuuuccgca

SEQ ID NO: 2163600 - RNA, 19 nt, Artificial Sequence
  Description of Artificial Sequence: Synthetic oligonucleotide
accauggcaucuugauguu

SEQ ID NO: 2163601 - RNA, 19 nt, Artificial Sequence
  Description of Artificial Sequence: Synthetic oligonucleotide
aucuuccuugcggauaguu

SEQ ID NO: 2163602 - RNA, 19 nt, Artificial Sequence
  Description of Artificial Sequence: Synthetic oligonucleotide
gcugcacgggccuugggca

SEQ ID NO: 2163603 - RNA, 19 nt, Artificial Sequence
  Description of Artificial Sequence: Synthetic oligonucleotide
gucuuugggcuaaagcgua

SEQ ID NO: 2163604 - RNA, 19 nt, Artificial Sequence
  Description of Artificial Sequence: Synthetic oligonucleotide
ccuugggcauucauuacca

SEQ ID NO: 2163605 - RNA, 19 nt, Artificial Sequence
  Description of Artificial Sequence: Synthetic oligonucleotide
guagccgugccggguguag

SEQ ID NO: 2163606 - RNA, 19 nt, Artificial Sequence
  Description of Artificial Sequence: Synthetic oligonucleotide
gggcuaaagcguacuuagg

SEQ ID NO: 2163607 - RNA, 19 nt, Artificial Sequence
  Description of Artificial Sequence: Synthetic oligonucleotide
gcauucauuaccacacaaa

SEQ ID NO: 2163608 - RNA, 19 nt, Artificial Sequence
  Description of Artificial Sequence: Synthetic oligonucleotide
gccagcgacgaaaagaugu

SEQ ID NO: 2163609 - RNA, 19 nt, Artificial Sequence
  Description of Artificial Sequence: Synthetic oligonucleotide
ugucacccgggcggaaacu

SEQ ID NO: 2163610 - RNA, 19 nt, Artificial Sequence
  Description of Artificial Sequence: Synthetic oligonucleotide
gcagguaauuggacugugc

SEQ ID NO: 2163611 - RNA, 19 nt, Artificial Sequence
  Description of Artificial Sequence: Synthetic oligonucleotide
cuucgucaggcagcccgcc

SEQ ID NO: 2163612 - RNA, 19 nt, Artificial Sequence
  Description of Artificial Sequence: Synthetic oligonucleotide
aauguacuucuggcacauu

SEQ ID NO: 2163613 - RNA, 19 nt, Artificial Sequence
  Description of Artificial Sequence: Synthetic oligonucleotide
gcaguaucucacagguggc

SEQ ID NO: 2163614 - RNA, 19 nt, Artificial Sequence
  Description of Artificial Sequence: Synthetic oligonucleotide
uccuugcggauaguuccuc

SEQ ID NO: 2163615 - RNA, 19 nt, Artificial Sequence
  Description of Artificial Sequence: Synthetic oligonucleotide
caauggagcccaggcggac

SEQ ID NO: 2163616 - RNA, 19 nt, Artificial Sequence
  Description of Artificial Sequence: Synthetic oligonucleotide
gcuaaagcguacuuagguu

SEQ ID NO: 2163617 - RNA, 19 nt, Artificial Sequence
  Description of Artificial Sequence: Synthetic oligonucleotide
augcaguaucucacaggug

SEQ ID NO: 2163618 - RNA, 19 nt, Artificial Sequence
  Description of Artificial Sequence: Synthetic oligonucleotide
uucgccggggaugcaguau

SEQ ID NO: 2163619 - RNA, 19 nt, Artificial Sequence
  Description of Artificial Sequence: Synthetic oligonucleotide
cuaacucauuuuccgcagu

SEQ ID NO: 2163620 - RNA, 19 nt, Artificial Sequence
  Description of Artificial Sequence: Synthetic oligonucleotide
caucacccagggagauaac

SEQ ID NO: 2163621 - RNA, 19 nt, Artificial Sequence
  Description of Artificial Sequence: Synthetic oligonucleotide
agguaacugcuagcugacu

SEQ ID NO: 2163622 - RNA, 19 nt, Artificial Sequence
  Description of Artificial Sequence: Synthetic oligonucleotide
gucacccgggcggaaacuc

SEQ ID NO: 2163623 - RNA, 19 nt, Artificial Sequence
  Description of Artificial Sequence: Synthetic oligonucleotide
ccaccacuaccccuaacuc

SEQ ID NO: 2163624 - RNA, 19 nt, Artificial Sequence
  Description of Artificial Sequence: Synthetic oligonucleotide
ggugccgcuaccggggcug

SEQ ID NO: 2163625 - RNA, 19 nt, Artificial Sequence
  Description of Artificial Sequence: Synthetic oligonucleotide
gugguguggaccccacaua

SEQ ID NO: 2163626 - RNA, 19 nt, Artificial Sequence
  Description of Artificial Sequence: Synthetic oligonucleotide
gugggucuuagggcacugc

SEQ ID NO: 2163627 - RNA, 19 nt, Artificial Sequence
  Description of Artificial Sequence: Synthetic oligonucleotide
ggcggaaacucuuguaaau

SEQ ID NO: 2163628 - RNA, 19 nt, Artificial Sequence
  Description of Artificial Sequence: Synthetic oligonucleotide
ggagauaacuuuggccaaa

SEQ ID NO: 2163629 - RNA, 19 nt, Artificial Sequence
  Description of Artificial Sequence: Synthetic oligonucleotide
cuguuugcgaaaugccuuu

SEQ ID NO: 2163630 - RNA, 19 nt, Artificial Sequence
  Description of Artificial Sequence: Synthetic oligonucleotide
gcacagacguucgccgggg

SEQ ID NO: 2163631 - RNA, 19 nt, Artificial Sequence
  Description of Artificial Sequence: Synthetic oligonucleotide
gacucacugugggccacca

SEQ ID NO: 2163632 - RNA, 19 nt, Artificial Sequence
  Description of Artificial Sequence: Synthetic oligonucleotide
gcuaccggggcugccuucc

SEQ ID NO: 2163633 - RNA, 19 nt, Artificial Sequence
  Description of Artificial Sequence: Synthetic oligonucleotide
agguggcgccaugcuugcc

SEQ ID NO: 2163634 - RNA, 19 nt, Artificial Sequence
  Description of Artificial Sequence: Synthetic oligonucleotide
gggcauucauuaccacaca

SEQ ID NO: 2163635 - RNA, 19 nt, Artificial Sequence
  Description of Artificial Sequence: Synthetic oligonucleotide
cgauacuuguauucuugga

SEQ ID NO: 2163636 - RNA, 19 nt, Artificial Sequence
  Description of Artificial Sequence: Synthetic oligonucleotide
acgggccuugggcauucau

SEQ ID NO: 2163637 - RNA, 19 nt, Artificial Sequence
  Description of Artificial Sequence: Synthetic oligonucleotide
accccacauacaagaugug

SEQ ID NO: 2163638 - RNA, 19 nt, Artificial Sequence
  Description of Artificial Sequence: Synthetic oligonucleotide
ccggggaugcaguaucuca

SEQ ID NO: 2163639 - RNA, 19 nt, Artificial Sequence
  Description of Artificial Sequence: Synthetic oligonucleotide
gaagcgcgccauucucgcu

SEQ ID NO: 2163640 - RNA, 19 nt, Artificial Sequence
  Description of Artificial Sequence: Synthetic oligonucleotide
ccuaacaaucuuccugucu

SEQ ID NO: 2163641 - RNA, 19 nt, Artificial Sequence
  Description of Artificial Sequence: Synthetic oligonucleotide
aggugccgcuaccggggcu

SEQ ID NO: 2163642 - RNA, 19 nt, Artificial Sequence
  Description of Artificial Sequence: Synthetic oligonucleotide
cccgccagcgacgaaaaga

SEQ ID NO: 2163643 - RNA, 19 nt, Artificial Sequence
  Description of Artificial Sequence: Synthetic oligonucleotide
agcugacuagagguaccuu

SEQ ID NO: 2163644 - RNA, 19 nt, Artificial Sequence
  Description of Artificial Sequence: Synthetic oligonucleotide
gcgccauucucgcuggucu

SEQ ID NO: 2163645 - RNA, 19 nt, Artificial Sequence
  Description of Artificial Sequence: Synthetic oligonucleotide
ccagcgacgaaaagaugua

SEQ ID NO: 2163646 - RNA, 19 nt, Artificial Sequence
  Description of Artificial Sequence: Synthetic oligonucleotide
cagcccgccagcgacgaaa

SEQ ID NO: 2163647 - RNA, 19 nt, Artificial Sequence
  Description of Artificial Sequence: Synthetic oligonucleotide
gggaccuaacaaucuuccu

SEQ ID NO: 2163648 - RNA, 19 nt, Artificial Sequence
  Description of Artificial Sequence: Synthetic oligonucleotide
ugcacgggccuugggcauu

SEQ ID NO: 2163649 - RNA, 19 nt, Artificial Sequence
  Description of Artificial Sequence: Synthetic oligonucleotide
guaccuuaauaaagaccau

SEQ ID NO: 2163650 - RNA, 19 nt, Artificial Sequence
  Description of Artificial Sequence: Synthetic oligonucleotide
aucucacagguggcgccau

SEQ ID NO: 2163651 - RNA, 19 nt, Artificial Sequence
  Description of Artificial Sequence: Synthetic oligonucleotide
caccagcugaugggaacca

SEQ ID NO: 2163652 - RNA, 19 nt, Artificial Sequence
  Description of Artificial Sequence: Synthetic oligonucleotide
guucgccggggaugcagua

SEQ ID NO: 2163653 - RNA, 19 nt, Artificial Sequence
  Description of Artificial Sequence: Synthetic oligonucleotide
cacagacguucgccgggga

SEQ ID NO: 2163654 - RNA, 19 nt, Artificial Sequence
  Description of Artificial Sequence: Synthetic oligonucleotide
agcccgccagcgacgaaaa

SEQ ID NO: 2163655 - RNA, 19 nt, Artificial Sequence
  Description of Artificial Sequence: Synthetic oligonucleotide
auucgccagccaagagaau

SEQ ID NO: 2163656 - RNA, 19 nt, Artificial Sequence
  Description of Artificial Sequence: Synthetic oligonucleotide
gcggaaacucuuguaaauu

SEQ ID NO: 2163657 - RNA, 19 nt, Artificial Sequence
  Description of Artificial Sequence: Synthetic oligonucleotide
ccgccagcgacgaaaagau

SEQ ID NO: 2163658 - RNA, 19 nt, Artificial Sequence
  Description of Artificial Sequence: Synthetic oligonucleotide
cauucucgcuggucuucgu

SEQ ID NO: 2163659 - RNA, 19 nt, Artificial Sequence
  Description of Artificial Sequence: Synthetic oligonucleotide
cggguguaggugccgcuac

SEQ ID NO: 2163660 - RNA, 19 nt, Artificial Sequence
  Description of Artificial Sequence: Synthetic oligonucleotide
cggaaacucuuguaaauuu

SEQ ID NO: 2163661 - RNA, 19 nt, Artificial Sequence
  Description of Artificial Sequence: Synthetic oligonucleotide
gccgugccggguguaggug

SEQ ID NO: 2163662 - RNA, 19 nt, Artificial Sequence
  Description of Artificial Sequence: Synthetic oligonucleotide
gugcaucacccagggagau

SEQ ID NO: 2163663 - RNA, 19 nt, Artificial Sequence
  Description of Artificial Sequence: Synthetic oligonucleotide
ggccaccacuaccccuaac

SEQ ID NO: 2163664 - RNA, 19 nt, Artificial Sequence
  Description of Artificial Sequence: Synthetic oligonucleotide
cuaugucacccgggcggaa

SEQ ID NO: 2163665 - RNA, 19 nt, Artificial Sequence
  Description of Artificial Sequence: Synthetic oligonucleotide
gacguucgccggggaugca

SEQ ID NO: 2163666 - RNA, 19 nt, Artificial Sequence
  Description of Artificial Sequence: Synthetic oligonucleotide
gggucuuagggcacugcau

SEQ ID NO: 2163667 - RNA, 19 nt, Artificial Sequence
  Description of Artificial Sequence: Synthetic oligonucleotide
gccggggaugcaguaucuc

SEQ ID NO: 2163668 - RNA, 19 nt, Artificial Sequence
  Description of Artificial Sequence: Synthetic oligonucleotide
gcccgccagcgacgaaaag

SEQ ID NO: 2163669 - RNA, 19 nt, Artificial Sequence
  Description of Artificial Sequence: Synthetic oligonucleotide
cugcacgggccuugggcau

SEQ ID NO: 2163670 - RNA, 19 nt, Artificial Sequence
  Description of Artificial Sequence: Synthetic oligonucleotide
gcaucucacaccagcugau

SEQ ID NO: 2163671 - RNA, 19 nt, Artificial Sequence
  Description of Artificial Sequence: Synthetic oligonucleotide
ggucuucgucaggcagccc

SEQ ID NO: 2163672 - RNA, 19 nt, Artificial Sequence
  Description of Artificial Sequence: Synthetic oligonucleotide
cacccgggcggaaacucuu

SEQ ID NO: 2163673 - RNA, 19 nt, Artificial Sequence
  Description of Artificial Sequence: Synthetic oligonucleotide
caguggucagcagguaauu

SEQ ID NO: 2163674 - RNA, 19 nt, Artificial Sequence
  Description of Artificial Sequence: Synthetic oligonucleotide
gacucacacuugggaccua

SEQ ID NO: 2163675 - RNA, 19 nt, Artificial Sequence
  Description of Artificial Sequence: Synthetic oligonucleotide
cgccagcgacgaaaagaug

SEQ ID NO: 2163676 - RNA, 19 nt, Artificial Sequence
  Description of Artificial Sequence: Synthetic oligonucleotide
gcccaggcggacucacacu

SEQ ID NO: 2163677 - RNA, 19 nt, Artificial Sequence
  Description of Artificial Sequence: Synthetic oligonucleotide
gcacgggccuugggcauuc

SEQ ID NO: 2163678 - RNA, 19 nt, Artificial Sequence
  Description of Artificial Sequence: Synthetic oligonucleotide
cuaccggggcugccuuccu

SEQ ID NO: 2163679 - RNA, 19 nt, Artificial Sequence
  Description of Artificial Sequence: Synthetic oligonucleotide
cgcgccauucucgcugguc

SEQ ID NO: 2163680 - RNA, 19 nt, Artificial Sequence
  Description of Artificial Sequence: Synthetic oligonucleotide
gggccaccacuaccccuaa

SEQ ID NO: 2163681 - RNA, 19 nt, Artificial Sequence
  Description of Artificial Sequence: Synthetic oligonucleotide
gccgcuaccggggcugccu

SEQ ID NO: 2163682 - RNA, 19 nt, Artificial Sequence
  Description of Artificial Sequence: Synthetic oligonucleotide
cgcuaccggggcugccuuc

SEQ ID NO: 2163683 - RNA, 19 nt, Artificial Sequence
  Description of Artificial Sequence: Synthetic oligonucleotide
cccgggcggaaacucuugu

SEQ ID NO: 2163684 - RNA, 19 nt, Artificial Sequence
  Description of Artificial Sequence: Synthetic oligonucleotide
ccggguguaggugccgcua

SEQ ID NO: 2163685 - RNA, 19 nt, Artificial Sequence
  Description of Artificial Sequence: Synthetic oligonucleotide
cguucgccggggaugcagu

SEQ ID NO: 2163686 - RNA, 19 nt, Artificial Sequence
  Description of Artificial Sequence: Synthetic oligonucleotide
cacgggccuugggcauuca

SEQ ID NO: 2163687 - RNA, 19 nt, Artificial Sequence
  Description of Artificial Sequence: Synthetic oligonucleotide
cgggccuugggcauucauu

SEQ ID NO: 2163688 - RNA, 19 nt, Artificial Sequence
  Description of Artificial Sequence: Synthetic oligonucleotide
ccacuaccccuaacucauu

SEQ ID NO: 2163689 - RNA, 19 nt, Artificial Sequence
  Description of Artificial Sequence: Synthetic oligonucleotide
ccgcaguggucagcaggua

SEQ ID NO: 2163690 - RNA, 19 nt, Artificial Sequence
  Description of Artificial Sequence: Synthetic oligonucleotide
gcgcgccauucucgcuggu

SEQ ID NO: 2163691 - RNA, 19 nt, Artificial Sequence
  Description of Artificial Sequence: Synthetic oligonucleotide
ccgcuaccggggcugccuu

SEQ ID NO: 2163692 - RNA, 19 nt, Artificial Sequence
  Description of Artificial Sequence: Synthetic oligonucleotide
ugugacaucgcucacaucc

SEQ ID NO: 2163693 - RNA, 19 nt, Artificial Sequence
  Description of Artificial Sequence: Synthetic oligonucleotide
aaaagauacagugccagcc

SEQ ID NO: 2163694 - RNA, 19 nt, Artificial Sequence
  Description of Artificial Sequence: Synthetic oligonucleotide
ucuaagaaaaccccuaugc

SEQ ID NO: 2163695 - RNA, 19 nt, Artificial Sequence
  Description of Artificial Sequence: Synthetic oligonucleotide
uaagaaaaccccuaugcgg

SEQ ID NO: 2163696 - RNA, 19 nt, Artificial Sequence
  Description of Artificial Sequence: Synthetic oligonucleotide
acaagauuuaaauuagccg

SEQ ID NO: 2163697 - RNA, 19 nt, Artificial Sequence
  Description of Artificial Sequence: Synthetic oligonucleotide
acagucauaauguuccucc

SEQ ID NO: 2163698 - RNA, 19 nt, Artificial Sequence
  Description of Artificial Sequence: Synthetic oligonucleotide
auaauguuccuccagacag

SEQ ID NO: 2163699 - RNA, 19 nt, Artificial Sequence
  Description of Artificial Sequence: Synthetic oligonucleotide
uuuagauaggacaagauuu

SEQ ID NO: 2163700 - RNA, 19 nt, Artificial Sequence
  Description of Artificial Sequence: Synthetic oligonucleotide
acuacagucauaauguucc

SEQ ID NO: 2163701 - RNA, 19 nt, Artificial Sequence
  Description of Artificial Sequence: Synthetic oligonucleotide
aagaaaaccccuaugcggc

SEQ ID NO: 2163702 - RNA, 19 nt, Artificial Sequence
  Description of Artificial Sequence: Synthetic oligonucleotide
uccgcuuucucuaugaugc

SEQ ID NO: 2163703 - RNA, 19 nt, Artificial Sequence
  Description of Artificial Sequence: Synthetic oligonucleotide
aaacaaacuuuucagcuug

SEQ ID NO: 2163704 - RNA, 19 nt, Artificial Sequence
  Description of Artificial Sequence: Synthetic oligonucleotide
uggauaagagcuuuuagcc

SEQ ID NO: 2163705 - RNA, 19 nt, Artificial Sequence
  Description of Artificial Sequence: Synthetic oligonucleotide
aguaguauuuuccugagga

SEQ ID NO: 2163706 - RNA, 19 nt, Artificial Sequence
  Description of Artificial Sequence: Synthetic oligonucleotide
uuaaacuccguccggaucc

SEQ ID NO: 2163707 - RNA, 19 nt, Artificial Sequence
  Description of Artificial Sequence: Synthetic oligonucleotide
acucugguggaucaggucc

SEQ ID NO: 2163708 - RNA, 19 nt, Artificial Sequence
  Description of Artificial Sequence: Synthetic oligonucleotide
uuggauaagagcuuuuagc

SEQ ID NO: 2163709 - RNA, 19 nt, Artificial Sequence
  Description of Artificial Sequence: Synthetic oligonucleotide
agaucuuucaaugacugac

SEQ ID NO: 2163710 - RNA, 19 nt, Artificial Sequence
  Description of Artificial Sequence: Synthetic oligonucleotide
uaggacaagauuuaaauua

SEQ ID NO: 2163711 - RNA, 19 nt, Artificial Sequence
  Description of Artificial Sequence: Synthetic oligonucleotide
agcccaaucacccaguauc

SEQ ID NO: 2163712 - RNA, 19 nt, Artificial Sequence
  Description of Artificial Sequence: Synthetic oligonucleotide
auagagaggagcaaggagg

SEQ ID NO: 2163713 - RNA, 19 nt, Artificial Sequence
  Description of Artificial Sequence: Synthetic oligonucleotide
gaaugugugaugaccaugg

SEQ ID NO: 2163714 - RNA, 19 nt, Artificial Sequence
  Description of Artificial Sequence: Synthetic oligonucleotide
caagccaugguugugaacg

SEQ ID NO: 2163715 - RNA, 19 nt, Artificial Sequence
  Description of Artificial Sequence: Synthetic oligonucleotide
uacagugccagccucguag

SEQ ID NO: 2163716 - RNA, 19 nt, Artificial Sequence
  Description of Artificial Sequence: Synthetic oligonucleotide
cucgaaacaaacuuuucag

SEQ ID NO: 2163717 - RNA, 19 nt, Artificial Sequence
  Description of Artificial Sequence: Synthetic oligonucleotide
caaugacugacucuggugg

SEQ ID NO: 2163718 - RNA, 19 nt, Artificial Sequence
  Description of Artificial Sequence: Synthetic oligonucleotide
gaugagaucuuucaaugac

SEQ ID NO: 2163719 - RNA, 19 nt, Artificial Sequence
  Description of Artificial Sequence: Synthetic oligonucleotide
cuaagaaaaccccuaugcg

SEQ ID NO: 2163720 - RNA, 19 nt, Artificial Sequence
  Description of Artificial Sequence: Synthetic oligonucleotide
caugguguucuugagaucg

SEQ ID NO: 2163721 - RNA, 19 nt, Artificial Sequence
  Description of Artificial Sequence: Synthetic oligonucleotide
aggugcuuaaacuccgucc

SEQ ID NO: 2163722 - RNA, 19 nt, Artificial Sequence
  Description of Artificial Sequence: Synthetic oligonucleotide
uuuuagauaggacaagauu

SEQ ID NO: 2163723 - RNA, 19 nt, Artificial Sequence
  Description of Artificial Sequence: Synthetic oligonucleotide
uggauucagagucacgucc

SEQ ID NO: 2163724 - RNA, 19 nt, Artificial Sequence
  Description of Artificial Sequence: Synthetic oligonucleotide
aagauuuaaauuagccguc

SEQ ID NO: 2163725 - RNA, 19 nt, Artificial Sequence
  Description of Artificial Sequence: Synthetic oligonucleotide
cugguuacugcacacaccc

SEQ ID NO: 2163726 - RNA, 19 nt, Artificial Sequence
  Description of Artificial Sequence: Synthetic oligonucleotide
aaagauacagugccagccu

SEQ ID NO: 2163727 - RNA, 19 nt, Artificial Sequence
  Description of Artificial Sequence: Synthetic oligonucleotide
ucaacucucgaaagacucg

SEQ ID NO: 2163728 - RNA, 19 nt, Artificial Sequence
  Description of Artificial Sequence: Synthetic oligonucleotide
ucgaaacaaacuuuucagc

SEQ ID NO: 2163729 - RNA, 19 nt, Artificial Sequence
  Description of Artificial Sequence: Synthetic oligonucleotide
cucucgaaagacucgaagc

SEQ ID NO: 2163730 - RNA, 19 nt, Artificial Sequence
  Description of Artificial Sequence: Synthetic oligonucleotide
aaagacucgaagcaucuuu

SEQ ID NO: 2163731 - RNA, 19 nt, Artificial Sequence
  Description of Artificial Sequence: Synthetic oligonucleotide
caagauuuaaauuagccgu

SEQ ID NO: 2163732 - RNA, 19 nt, Artificial Sequence
  Description of Artificial Sequence: Synthetic oligonucleotide
uuggacaucugucaacucu

SEQ ID NO: 2163733 - RNA, 19 nt, Artificial Sequence
  Description of Artificial Sequence: Synthetic oligonucleotide
ugagaugagaucuuucaau

SEQ ID NO: 2163734 - RNA, 19 nt, Artificial Sequence
  Description of Artificial Sequence: Synthetic oligonucleotide
uguggauucagagucacgu

SEQ ID NO: 2163735 - RNA, 19 nt, Artificial Sequence
  Description of Artificial Sequence: Synthetic oligonucleotide
uuagauaggacaagauuua

SEQ ID NO: 2163736 - RNA, 19 nt, Artificial Sequence
  Description of Artificial Sequence: Synthetic oligonucleotide
agugcugagagcccaggac

SEQ ID NO: 2163737 - RNA, 19 nt, Artificial Sequence
  Description of Artificial Sequence: Synthetic oligonucleotide
gauaggacaagauuuaaau

SEQ ID NO: 2163738 - RNA, 19 nt, Artificial Sequence
  Description of Artificial Sequence: Synthetic oligonucleotide
uaauguuccuccagacagg

SEQ ID NO: 2163739 - RNA, 19 nt, Artificial Sequence
  Description of Artificial Sequence: Synthetic oligonucleotide
aagagcuuuuagccgcucg

SEQ ID NO: 2163740 - RNA, 19 nt, Artificial Sequence
  Description of Artificial Sequence: Synthetic oligonucleotide
ugaggaaugugugaugacc

SEQ ID NO: 2163741 - RNA, 19 nt, Artificial Sequence
  Description of Artificial Sequence: Synthetic oligonucleotide
ggugcuuaaacuccguccg

SEQ ID NO: 2163742 - RNA, 19 nt, Artificial Sequence
  Description of Artificial Sequence: Synthetic oligonucleotide
agagcuuuuagccgcucgg

SEQ ID NO: 2163743 - RNA, 19 nt, Artificial Sequence
  Description of Artificial Sequence: Synthetic oligonucleotide
uucagagacuccuggaaca

SEQ ID NO: 2163744 - RNA, 19 nt, Artificial Sequence
  Description of Artificial Sequence: Synthetic oligonucleotide
uaguauuuuccugaggaga

SEQ ID NO: 2163745 - RNA, 19 nt, Artificial Sequence
  Description of Artificial Sequence: Synthetic oligonucleotide
gauccggugucucucaggc

SEQ ID NO: 2163746 - RNA, 19 nt, Artificial Sequence
  Description of Artificial Sequence: Synthetic oligonucleotide
uuuuggacaucugucaacu

SEQ ID NO: 2163747 - RNA, 19 nt, Artificial Sequence
  Description of Artificial Sequence: Synthetic oligonucleotide
gauacuggcugaaagagaa

SEQ ID NO: 2163748 - RNA, 19 nt, Artificial Sequence
  Description of Artificial Sequence: Synthetic oligonucleotide
cauagagaggagcaaggag

SEQ ID NO: 2163749 - RNA, 19 nt, Artificial Sequence
  Description of Artificial Sequence: Synthetic oligonucleotide
ucaugcuuaugcugcagcc

SEQ ID NO: 2163750 - RNA, 19 nt, Artificial Sequence
  Description of Artificial Sequence: Synthetic oligonucleotide
aaauuagccgucuguggau

SEQ ID NO: 2163751 - RNA, 19 nt, Artificial Sequence
  Description of Artificial Sequence: Synthetic oligonucleotide
ggauaagagcuuuuagccg

SEQ ID NO: 2163752 - RNA, 19 nt, Artificial Sequence
  Description of Artificial Sequence: Synthetic oligonucleotide
ucauaauguuccuccagac

SEQ ID NO: 2163753 - RNA, 19 nt, Artificial Sequence
  Description of Artificial Sequence: Synthetic oligonucleotide
aaugacugacucuggugga

SEQ ID NO: 2163754 - RNA, 19 nt, Artificial Sequence
  Description of Artificial Sequence: Synthetic oligonucleotide
augaccaugguguucuuga

SEQ ID NO: 2163755 - RNA, 19 nt, Artificial Sequence
  Description of Artificial Sequence: Synthetic oligonucleotide
acucugcuugccuggauac

SEQ ID NO: 2163756 - RNA, 19 nt, Artificial Sequence
  Description of Artificial Sequence: Synthetic oligonucleotide
cucguagucuaagaaaacc

SEQ ID NO: 2163757 - RNA, 19 nt, Artificial Sequence
  Description of Artificial Sequence: Synthetic oligonucleotide
accaugguguucuugagau

SEQ ID NO: 2163758 - RNA, 19 nt, Artificial Sequence
  Description of Artificial Sequence: Synthetic oligonucleotide
agagcuugaggcuuccuca

SEQ ID NO: 2163759 - RNA, 19 nt, Artificial Sequence
  Description of Artificial Sequence: Synthetic oligonucleotide
ugauaccuggaguaggcac

SEQ ID NO: 2163760 - RNA, 19 nt, Artificial Sequence
  Description of Artificial Sequence: Synthetic oligonucleotide
acucucgaaagacucgaag

SEQ ID NO: 2163761 - RNA, 19 nt, Artificial Sequence
  Description of Artificial Sequence: Synthetic oligonucleotide
augguugugaacguuauaa

SEQ ID NO: 2163762 - RNA, 19 nt, Artificial Sequence
  Description of Artificial Sequence: Synthetic oligonucleotide
guaguauuuuccugaggag

SEQ ID NO: 2163763 - RNA, 19 nt, Artificial Sequence
  Description of Artificial Sequence: Synthetic oligonucleotide
ucuaugaugcucagacccu

SEQ ID NO: 2163764 - RNA, 19 nt, Artificial Sequence
  Description of Artificial Sequence: Synthetic oligonucleotide
acuguggaccccuggcacc

SEQ ID NO: 2163765 - RNA, 19 nt, Artificial Sequence
  Description of Artificial Sequence: Synthetic oligonucleotide
aggacaagauuuaaauuag

SEQ ID NO: 2163766 - RNA, 19 nt, Artificial Sequence
  Description of Artificial Sequence: Synthetic oligonucleotide
ucgaaagacucgaagcauc

SEQ ID NO: 2163767 - RNA, 19 nt, Artificial Sequence
  Description of Artificial Sequence: Synthetic oligonucleotide
augugugaugaccauggug

SEQ ID NO: 2163768 - RNA, 19 nt, Artificial Sequence
  Description of Artificial Sequence: Synthetic oligonucleotide
acacacccaggauccaugc

SEQ ID NO: 2163769 - RNA, 19 nt, Artificial Sequence
  Description of Artificial Sequence: Synthetic oligonucleotide
agaugagaucuuucaauga

SEQ ID NO: 2163770 - RNA, 19 nt, Artificial Sequence
  Description of Artificial Sequence: Synthetic oligonucleotide
auaggacaagauuuaaauu

SEQ ID NO: 2163771 - RNA, 19 nt, Artificial Sequence
  Description of Artificial Sequence: Synthetic oligonucleotide
cugcacacacccaggaucc

SEQ ID NO: 2163772 - RNA, 19 nt, Artificial Sequence
  Description of Artificial Sequence: Synthetic oligonucleotide
uagucuaagaaaaccccua

SEQ ID NO: 2163773 - RNA, 19 nt, Artificial Sequence
  Description of Artificial Sequence: Synthetic oligonucleotide
uccgcucuggggcugauac

SEQ ID NO: 2163774 - RNA, 19 nt, Artificial Sequence
  Description of Artificial Sequence: Synthetic oligonucleotide
agaaaaccccuaugcggcg

SEQ ID NO: 2163775 - RNA, 19 nt, Artificial Sequence
  Description of Artificial Sequence: Synthetic oligonucleotide
uuacugcacacacccagga

SEQ ID NO: 2163776 - RNA, 19 nt, Artificial Sequence
  Description of Artificial Sequence: Synthetic oligonucleotide
uccaggucugagaugagau

SEQ ID NO: 2163777 - RNA, 19 nt, Artificial Sequence
  Description of Artificial Sequence: Synthetic oligonucleotide
ucugcuugccuggauacug

SEQ ID NO: 2163778 - RNA, 19 nt, Artificial Sequence
  Description of Artificial Sequence: Synthetic oligonucleotide
gucauagagaggagcaagg

SEQ ID NO: 2163779 - RNA, 19 nt, Artificial Sequence
  Description of Artificial Sequence: Synthetic oligonucleotide
aaagagaacauggguucca

SEQ ID NO: 2163780 - RNA, 19 nt, Artificial Sequence
  Description of Artificial Sequence: Synthetic oligonucleotide
ggcacugucauagagagga

SEQ ID NO: 2163781 - RNA, 19 nt, Artificial Sequence
  Description of Artificial Sequence: Synthetic oligonucleotide
augcuuaugcugcagccca

SEQ ID NO: 2163782 - RNA, 19 nt, Artificial Sequence
  Description of Artificial Sequence: Synthetic oligonucleotide
gaaagagaacauggguucc

SEQ ID NO: 2163783 - RNA, 19 nt, Artificial Sequence
  Description of Artificial Sequence: Synthetic oligonucleotide
uccucauaggcucuguauu

SEQ ID NO: 2163784 - RNA, 19 nt, Artificial Sequence
  Description of Artificial Sequence: Synthetic oligonucleotide
guaguuuuggacaucuguc

SEQ ID NO: 2163785 - RNA, 19 nt, Artificial Sequence
  Description of Artificial Sequence: Synthetic oligonucleotide
aguuuuggacaucugucaa

SEQ ID NO: 2163786 - RNA, 19 nt, Artificial Sequence
  Description of Artificial Sequence: Synthetic oligonucleotide
augaggaaugugugaugac

SEQ ID NO: 2163787 - RNA, 19 nt, Artificial Sequence
  Description of Artificial Sequence: Synthetic oligonucleotide
uauucaugcuuaugcugca

SEQ ID NO: 2163788 - RNA, 19 nt, Artificial Sequence
  Description of Artificial Sequence: Synthetic oligonucleotide
cacuacagucauaauguuc

SEQ ID NO: 2163789 - RNA, 19 nt, Artificial Sequence
  Description of Artificial Sequence: Synthetic oligonucleotide
aaugugugaugaccauggu

SEQ ID NO: 2163790 - RNA, 19 nt, Artificial Sequence
  Description of Artificial Sequence: Synthetic oligonucleotide
ucauagagaggagcaagga

SEQ ID NO: 2163791 - RNA, 19 nt, Artificial Sequence
  Description of Artificial Sequence: Synthetic oligonucleotide
gucuaagaaaaccccuaug

SEQ ID NO: 2163792 - RNA, 19 nt, Artificial Sequence
  Description of Artificial Sequence: Synthetic oligonucleotide
aggagcaaggagguggagg

SEQ ID NO: 2163793 - RNA, 19 nt, Artificial Sequence
  Description of Artificial Sequence: Synthetic oligonucleotide
aguauuuuccugaggagaa

SEQ ID NO: 2163794 - RNA, 19 nt, Artificial Sequence
  Description of Artificial Sequence: Synthetic oligonucleotide
guuuuggacaucugucaac

SEQ ID NO: 2163795 - RNA, 19 nt, Artificial Sequence
  Description of Artificial Sequence: Synthetic oligonucleotide
guagaugggcaagccaugg

SEQ ID NO: 2163796 - RNA, 19 nt, Artificial Sequence
  Description of Artificial Sequence: Synthetic oligonucleotide
caaaccucaccugucuccg

SEQ ID NO: 2163797 - RNA, 19 nt, Artificial Sequence
  Description of Artificial Sequence: Synthetic oligonucleotide
aaccucaccugucuccggu

SEQ ID NO: 2163798 - RNA, 19 nt, Artificial Sequence
  Description of Artificial Sequence: Synthetic oligonucleotide
aaaccucaccugucuccgg

SEQ ID NO: 2163799 - RNA, 19 nt, Artificial Sequence
  Description of Artificial Sequence: Synthetic oligonucleotide
agauuuaaauuagccgucu

SEQ ID NO: 2163800 - RNA, 19 nt, Artificial Sequence
  Description of Artificial Sequence: Synthetic oligonucleotide
guuacugcacacacccagg

SEQ ID NO: 2163801 - RNA, 19 nt, Artificial Sequence
  Description of Artificial Sequence: Synthetic oligonucleotide
gaggaaugugugaugacca

SEQ ID NO: 2163802 - RNA, 19 nt, Artificial Sequence
  Description of Artificial Sequence: Synthetic oligonucleotide
auuagccgucuguggauuc

SEQ ID NO: 2163803 - RNA, 19 nt, Artificial Sequence
  Description of Artificial Sequence: Synthetic oligonucleotide
agucacguccacccaguag

SEQ ID NO: 2163804 - RNA, 19 nt, Artificial Sequence
  Description of Artificial Sequence: Synthetic oligonucleotide
cuuaaacuccguccggauc

SEQ ID NO: 2163805 - RNA, 19 nt, Artificial Sequence
  Description of Artificial Sequence: Synthetic oligonucleotide
guuccuccagacaggaagg

SEQ ID NO: 2163806 - RNA, 19 nt, Artificial Sequence
  Description of Artificial Sequence: Synthetic oligonucleotide
gucaacucucgaaagacuc

SEQ ID NO: 2163807 - RNA, 19 nt, Artificial Sequence
  Description of Artificial Sequence: Synthetic oligonucleotide
ugguugugaacguuauaaa

SEQ ID NO: 2163808 - RNA, 19 nt, Artificial Sequence
  Description of Artificial Sequence: Synthetic oligonucleotide
ucccaguaguauuuuccug

SEQ ID NO: 2163809 - RNA, 19 nt, Artificial Sequence
  Description of Artificial Sequence: Synthetic oligonucleotide
cacccaguaguuuuggaca

SEQ ID NO: 2163810 - RNA, 19 nt, Artificial Sequence
  Description of Artificial Sequence: Synthetic oligonucleotide
agaugggcaagccaugguu

SEQ ID NO: 2163811 - RNA, 19 nt, Artificial Sequence
  Description of Artificial Sequence: Synthetic oligonucleotide
gguugugaacguuauaaaa

SEQ ID NO: 2163812 - RNA, 19 nt, Artificial Sequence
  Description of Artificial Sequence: Synthetic oligonucleotide
caugcuuaugcugcagccc

SEQ ID NO: 2163813 - RNA, 19 nt, Artificial Sequence
  Description of Artificial Sequence: Synthetic oligonucleotide
ugcuuaaacuccguccgga

SEQ ID NO: 2163814 - RNA, 19 nt, Artificial Sequence
  Description of Artificial Sequence: Synthetic oligonucleotide
agguggcacugucauagag

SEQ ID NO: 2163815 - RNA, 19 nt, Artificial Sequence
  Description of Artificial Sequence: Synthetic oligonucleotide
caugaggaaugugugauga

SEQ ID NO: 2163816 - RNA, 19 nt, Artificial Sequence
  Description of Artificial Sequence: Synthetic oligonucleotide
gcuugaggcuuccucaggg

SEQ ID NO: 2163817 - RNA, 19 nt, Artificial Sequence
  Description of Artificial Sequence: Synthetic oligonucleotide
agauacagugccagccucg

SEQ ID NO: 2163818 - RNA, 19 nt, Artificial Sequence
  Description of Artificial Sequence: Synthetic oligonucleotide
uaugcggcgagguggcacu

SEQ ID NO: 2163819 - RNA, 19 nt, Artificial Sequence
  Description of Artificial Sequence: Synthetic oligonucleotide
agcuuuuagccgcucggcu

SEQ ID NO: 2163820 - RNA, 19 nt, Artificial Sequence
  Description of Artificial Sequence: Synthetic oligonucleotide
gacagcuuggcacccacaa

SEQ ID NO: 2163821 - RNA, 19 nt, Artificial Sequence
  Description of Artificial Sequence: Synthetic oligonucleotide
agccucguagucuaagaaa

SEQ ID NO: 2163822 - RNA, 19 nt, Artificial Sequence
  Description of Artificial Sequence: Synthetic oligonucleotide
cacauccugcagcagcucc

SEQ ID NO: 2163823 - RNA, 19 nt, Artificial Sequence
  Description of Artificial Sequence: Synthetic oligonucleotide
cguagucuaagaaaacccc

SEQ ID NO: 2163824 - RNA, 19 nt, Artificial Sequence
  Description of Artificial Sequence: Synthetic oligonucleotide
cacugucauagagaggagc

SEQ ID NO: 2163825 - RNA, 19 nt, Artificial Sequence
  Description of Artificial Sequence: Synthetic oligonucleotide
agauccggggcucgaaaca

SEQ ID NO: 2163826 - RNA, 19 nt, Artificial Sequence
  Description of Artificial Sequence: Synthetic oligonucleotide
uaugaugcucagacccuuc

SEQ ID NO: 2163827 - RNA, 19 nt, Artificial Sequence
  Description of Artificial Sequence: Synthetic oligonucleotide
gauucagagucacguccac

SEQ ID NO: 2163828 - RNA, 19 nt, Artificial Sequence
  Description of Artificial Sequence: Synthetic oligonucleotide
caguaguauuuuccugagg

SEQ ID NO: 2163829 - RNA, 19 nt, Artificial Sequence
  Description of Artificial Sequence: Synthetic oligonucleotide
uggggcugauaccuggagu

SEQ ID NO: 2163830 - RNA, 19 nt, Artificial Sequence
  Description of Artificial Sequence: Synthetic oligonucleotide
gaacaucuccugguagucc

SEQ ID NO: 2163831 - RNA, 19 nt, Artificial Sequence
  Description of Artificial Sequence: Synthetic oligonucleotide
uagauaggacaagauuuaa

SEQ ID NO: 2163832 - RNA, 19 nt, Artificial Sequence
  Description of Artificial Sequence: Synthetic oligonucleotide
cugcuugccuggauacugg

SEQ ID NO: 2163833 - RNA, 19 nt, Artificial Sequence
  Description of Artificial Sequence: Synthetic oligonucleotide
cuccgcuuucucuaugaug

SEQ ID NO: 2163834 - RNA, 19 nt, Artificial Sequence
  Description of Artificial Sequence: Synthetic oligonucleotide
gacaucgcucacauccugc

SEQ ID NO: 2163835 - RNA, 19 nt, Artificial Sequence
  Description of Artificial Sequence: Synthetic oligonucleotide
cugaaagagaacauggguu

SEQ ID NO: 2163836 - RNA, 19 nt, Artificial Sequence
  Description of Artificial Sequence: Synthetic oligonucleotide
aauuagccgucuguggauu

SEQ ID NO: 2163837 - RNA, 19 nt, Artificial Sequence
  Description of Artificial Sequence: Synthetic oligonucleotide
auaccuggaguaggcacuc

SEQ ID NO: 2163838 - RNA, 19 nt, Artificial Sequence
  Description of Artificial Sequence: Synthetic oligonucleotide
gaccaugguguucuugaga

SEQ ID NO: 2163839 - RNA, 19 nt, Artificial Sequence
  Description of Artificial Sequence: Synthetic oligonucleotide
gugcuuaaacuccguccgg

SEQ ID NO: 2163840 - RNA, 19 nt, Artificial Sequence
  Description of Artificial Sequence: Synthetic oligonucleotide
accccuggcaccgaugcuc

SEQ ID NO: 2163841 - RNA, 19 nt, Artificial Sequence
  Description of Artificial Sequence: Synthetic oligonucleotide
accuggaguaggcacucug

SEQ ID NO: 2163842 - RNA, 19 nt, Artificial Sequence
  Description of Artificial Sequence: Synthetic oligonucleotide
ucagauccggggcucgaaa

SEQ ID NO: 2163843 - RNA, 19 nt, Artificial Sequence
  Description of Artificial Sequence: Synthetic oligonucleotide
augggcaagccaugguugu

SEQ ID NO: 2163844 - RNA, 19 nt, Artificial Sequence
  Description of Artificial Sequence: Synthetic oligonucleotide
gaguaggcacucugcuugc

SEQ ID NO: 2163845 - RNA, 19 nt, Artificial Sequence
  Description of Artificial Sequence: Synthetic oligonucleotide
uacagucauaauguuccuc

SEQ ID NO: 2163846 - RNA, 19 nt, Artificial Sequence
  Description of Artificial Sequence: Synthetic oligonucleotide
ccaaucacccaguauccgc

SEQ ID NO: 2163847 - RNA, 19 nt, Artificial Sequence
  Description of Artificial Sequence: Synthetic oligonucleotide
ugcuugccuggauacuggc

SEQ ID NO: 2163848 - RNA, 19 nt, Artificial Sequence
  Description of Artificial Sequence: Synthetic oligonucleotide
ggcugaaagagaacauggg

SEQ ID NO: 2163849 - RNA, 19 nt, Artificial Sequence
  Description of Artificial Sequence: Synthetic oligonucleotide
uggcacugucauagagagg

SEQ ID NO: 2163850 - RNA, 19 nt, Artificial Sequence
  Description of Artificial Sequence: Synthetic oligonucleotide
agauaggacaagauuuaaa

SEQ ID NO: 2163851 - RNA, 19 nt, Artificial Sequence
  Description of Artificial Sequence: Synthetic oligonucleotide
cacacacccaggauccaug

SEQ ID NO: 2163852 - RNA, 19 nt, Artificial Sequence
  Description of Artificial Sequence: Synthetic oligonucleotide
gagcuuuuagccgcucggc

SEQ ID NO: 2163853 - RNA, 19 nt, Artificial Sequence
  Description of Artificial Sequence: Synthetic oligonucleotide
caggacacuacagucauaa

SEQ ID NO: 2163854 - RNA, 19 nt, Artificial Sequence
  Description of Artificial Sequence: Synthetic oligonucleotide
acguccacccaguaguuuu

SEQ ID NO: 2163855 - RNA, 19 nt, Artificial Sequence
  Description of Artificial Sequence: Synthetic oligonucleotide
cacuguggaccccuggcac

SEQ ID NO: 2163856 - RNA, 19 nt, Artificial Sequence
  Description of Artificial Sequence: Synthetic oligonucleotide
cuguggauucagagucacg

SEQ ID NO: 2163857 - RNA, 19 nt, Artificial Sequence
  Description of Artificial Sequence: Synthetic oligonucleotide
acccaguaguuuuggacau

SEQ ID NO: 2163858 - RNA, 19 nt, Artificial Sequence
  Description of Artificial Sequence: Synthetic oligonucleotide
aggaaugugugaugaccau

SEQ ID NO: 2163859 - RNA, 19 nt, Artificial Sequence
  Description of Artificial Sequence: Synthetic oligonucleotide
uuucucuaugaugcucaga

SEQ ID NO: 2163860 - RNA, 19 nt, Artificial Sequence
  Description of Artificial Sequence: Synthetic oligonucleotide
uuuggacaucugucaacuc

SEQ ID NO: 2163861 - RNA, 19 nt, Artificial Sequence
  Description of Artificial Sequence: Synthetic oligonucleotide
cagauccggggcucgaaac

SEQ ID NO: 2163862 - RNA, 19 nt, Artificial Sequence
  Description of Artificial Sequence: Synthetic oligonucleotide
uuagccgucuguggauuca

SEQ ID NO: 2163863 - RNA, 19 nt, Artificial Sequence
  Description of Artificial Sequence: Synthetic oligonucleotide
gacaucugucaacucucga

SEQ ID NO: 2163864 - RNA, 19 nt, Artificial Sequence
  Description of Artificial Sequence: Synthetic oligonucleotide
cccaguauccgcucugggg

SEQ ID NO: 2163865 - RNA, 19 nt, Artificial Sequence
  Description of Artificial Sequence: Synthetic oligonucleotide
cuuaugcugcagcccaauc

SEQ ID NO: 2163866 - RNA, 19 nt, Artificial Sequence
  Description of Artificial Sequence: Synthetic oligonucleotide
acccaguauccgcucuggg

SEQ ID NO: 2163867 - RNA, 19 nt, Artificial Sequence
  Description of Artificial Sequence: Synthetic oligonucleotide
acagugccagccucguagu

SEQ ID NO: 2163868 - RNA, 19 nt, Artificial Sequence
  Description of Artificial Sequence: Synthetic oligonucleotide
aaccccuaugcggcgaggu

SEQ ID NO: 2163869 - RNA, 19 nt, Artificial Sequence
  Description of Artificial Sequence: Synthetic oligonucleotide
aucacccaguauccgcucu

SEQ ID NO: 2163870 - RNA, 19 nt, Artificial Sequence
  Description of Artificial Sequence: Synthetic oligonucleotide
gacucugguggaucagguc

SEQ ID NO: 2163871 - RNA, 19 nt, Artificial Sequence
  Description of Artificial Sequence: Synthetic oligonucleotide
guuccaccugguuacugca

SEQ ID NO: 2163872 - RNA, 19 nt, Artificial Sequence
  Description of Artificial Sequence: Synthetic oligonucleotide
aggcucuguauucaugcuu

SEQ ID NO: 2163873 - RNA, 19 nt, Artificial Sequence
  Description of Artificial Sequence: Synthetic oligonucleotide
ugcagcccaaucacccagu

SEQ ID NO: 2163874 - RNA, 19 nt, Artificial Sequence
  Description of Artificial Sequence: Synthetic oligonucleotide
gccgucuguggauucagag

SEQ ID NO: 2163875 - RNA, 19 nt, Artificial Sequence
  Description of Artificial Sequence: Synthetic oligonucleotide
guggauucagagucacguc

SEQ ID NO: 2163876 - RNA, 19 nt, Artificial Sequence
  Description of Artificial Sequence: Synthetic oligonucleotide
cuguggaccccuggcaccg

SEQ ID NO: 2163877 - RNA, 19 nt, Artificial Sequence
  Description of Artificial Sequence: Synthetic oligonucleotide
cucuguauucaugcuuaug

SEQ ID NO: 2163878 - RNA, 19 nt, Artificial Sequence
  Description of Artificial Sequence: Synthetic oligonucleotide
ggaaugugugaugaccaug

SEQ ID NO: 2163879 - RNA, 19 nt, Artificial Sequence
  Description of Artificial Sequence: Synthetic oligonucleotide
aaaccccuaugcggcgagg

SEQ ID NO: 2163880 - RNA, 19 nt, Artificial Sequence
  Description of Artificial Sequence: Synthetic oligonucleotide
gcugaaagagaacaugggu

SEQ ID NO: 2163881 - RNA, 19 nt, Artificial Sequence
  Description of Artificial Sequence: Synthetic oligonucleotide
uccacccaguaguuuugga

SEQ ID NO: 2163882 - RNA, 19 nt, Artificial Sequence
  Description of Artificial Sequence: Synthetic oligonucleotide
acacuacagucauaauguu

SEQ ID NO: 2163883 - RNA, 19 nt, Artificial Sequence
  Description of Artificial Sequence: Synthetic oligonucleotide
guagucuaagaaaaccccu

SEQ ID NO: 2163884 - RNA, 19 nt, Artificial Sequence
  Description of Artificial Sequence: Synthetic oligonucleotide
cuuuucagcuuggugggga

SEQ ID NO: 2163885 - RNA, 19 nt, Artificial Sequence
  Description of Artificial Sequence: Synthetic oligonucleotide
ccacccaguaguuuuggac

SEQ ID NO: 2163886 - RNA, 19 nt, Artificial Sequence
  Description of Artificial Sequence: Synthetic oligonucleotide
gcugauaccuggaguaggc

SEQ ID NO: 2163887 - RNA, 19 nt, Artificial Sequence
  Description of Artificial Sequence: Synthetic oligonucleotide
caacucucgaaagacucga

SEQ ID NO: 2163888 - RNA, 19 nt, Artificial Sequence
  Description of Artificial Sequence: Synthetic oligonucleotide
ggcugauaccuggaguagg

SEQ ID NO: 2163889 - RNA, 19 nt, Artificial Sequence
  Description of Artificial Sequence: Synthetic oligonucleotide
ggaccccuggcaccgaugc

SEQ ID NO: 2163890 - RNA, 19 nt, Artificial Sequence
  Description of Artificial Sequence: Synthetic oligonucleotide
caccugauucuuccaggac

SEQ ID NO: 2163891 - RNA, 19 nt, Artificial Sequence
  Description of Artificial Sequence: Synthetic oligonucleotide
ugacugacucugguggauc

SEQ ID NO: 2163892 - RNA, 19 nt, Artificial Sequence
  Description of Artificial Sequence: Synthetic oligonucleotide
acugacucugguggaucag

SEQ ID NO: 2163893 - RNA, 19 nt, Artificial Sequence
  Description of Artificial Sequence: Synthetic oligonucleotide
gaaaaccccuaugcggcga

SEQ ID NO: 2163894 - RNA, 19 nt, Artificial Sequence
  Description of Artificial Sequence: Synthetic oligonucleotide
caggugcuuaaacuccguc

SEQ ID NO: 2163895 - RNA, 19 nt, Artificial Sequence
  Description of Artificial Sequence: Synthetic oligonucleotide
auaagagcuuuuagccgcu

SEQ ID NO: 2163896 - RNA, 19 nt, Artificial Sequence
  Description of Artificial Sequence: Synthetic oligonucleotide
ggauccggugucucucagg

SEQ ID NO: 2163897 - RNA, 19 nt, Artificial Sequence
  Description of Artificial Sequence: Synthetic oligonucleotide
uagccgucuguggauucag

SEQ ID NO: 2163898 - RNA, 19 nt, Artificial Sequence
  Description of Artificial Sequence: Synthetic oligonucleotide
cuccucccgguccaggaug

SEQ ID NO: 2163899 - RNA, 19 nt, Artificial Sequence
  Description of Artificial Sequence: Synthetic oligonucleotide
cuaugcggcgagguggcac

SEQ ID NO: 2163900 - RNA, 19 nt, Artificial Sequence
  Description of Artificial Sequence: Synthetic oligonucleotide
ugcuuaugcugcagcccaa

SEQ ID NO: 2163901 - RNA, 19 nt, Artificial Sequence
  Description of Artificial Sequence: Synthetic oligonucleotide
caaucacccaguauccgcu

SEQ ID NO: 2163902 - RNA, 19 nt, Artificial Sequence
  Description of Artificial Sequence: Synthetic oligonucleotide
cagucauaauguuccucca

SEQ ID NO: 2163903 - RNA, 19 nt, Artificial Sequence
  Description of Artificial Sequence: Synthetic oligonucleotide
uuuuagccgcucggcuucc

SEQ ID NO: 2163904 - RNA, 19 nt, Artificial Sequence
  Description of Artificial Sequence: Synthetic oligonucleotide
gagcccaggacacuacagu

SEQ ID NO: 2163905 - RNA, 19 nt, Artificial Sequence
  Description of Artificial Sequence: Synthetic oligonucleotide
ccugguuacugcacacacc

SEQ ID NO: 2163906 - RNA, 19 nt, Artificial Sequence
  Description of Artificial Sequence: Synthetic oligonucleotide
uggggagagcuugaggcuu

SEQ ID NO: 2163907 - RNA, 19 nt, Artificial Sequence
  Description of Artificial Sequence: Synthetic oligonucleotide
guccacccaguaguuuugg

SEQ ID NO: 2163908 - RNA, 19 nt, Artificial Sequence
  Description of Artificial Sequence: Synthetic oligonucleotide
agagucacguccacccagu

SEQ ID NO: 2163909 - RNA, 19 nt, Artificial Sequence
  Description of Artificial Sequence: Synthetic oligonucleotide
accccuaugcggcgaggug

SEQ ID NO: 2163910 - RNA, 19 nt, Artificial Sequence
  Description of Artificial Sequence: Synthetic oligonucleotide
gauccggggcucgaaacaa

SEQ ID NO: 2163911 - RNA, 19 nt, Artificial Sequence
  Description of Artificial Sequence: Synthetic oligonucleotide
ucacguccacccaguaguu

SEQ ID NO: 2163912 - RNA, 19 nt, Artificial Sequence
  Description of Artificial Sequence: Synthetic oligonucleotide
ugggcaagccaugguugug

SEQ ID NO: 2163913 - RNA, 19 nt, Artificial Sequence
  Description of Artificial Sequence: Synthetic oligonucleotide
cgaaacaaacuuuucagcu

SEQ ID NO: 2163914 - RNA, 19 nt, Artificial Sequence
  Description of Artificial Sequence: Synthetic oligonucleotide
ccgcaggugcuuaaacucc

SEQ ID NO: 2163915 - RNA, 19 nt, Artificial Sequence
  Description of Artificial Sequence: Synthetic oligonucleotide
gguggcacugucauagaga

SEQ ID NO: 2163916 - RNA, 19 nt, Artificial Sequence
  Description of Artificial Sequence: Synthetic oligonucleotide
gacucccucuucucuugga

SEQ ID NO: 2163917 - RNA, 19 nt, Artificial Sequence
  Description of Artificial Sequence: Synthetic oligonucleotide
aacucucgaaagacucgaa

SEQ ID NO: 2163918 - RNA, 19 nt, Artificial Sequence
  Description of Artificial Sequence: Synthetic oligonucleotide
gccucguagucuaagaaaa

SEQ ID NO: 2163919 - RNA, 19 nt, Artificial Sequence
  Description of Artificial Sequence: Synthetic oligonucleotide
cuugguggggagagcuuga

SEQ ID NO: 2163920 - RNA, 19 nt, Artificial Sequence
  Description of Artificial Sequence: Synthetic oligonucleotide
augacugacucugguggau

SEQ ID NO: 2163921 - RNA, 19 nt, Artificial Sequence
  Description of Artificial Sequence: Synthetic oligonucleotide
caccgaugcuccaggucug

SEQ ID NO: 2163922 - RNA, 19 nt, Artificial Sequence
  Description of Artificial Sequence: Synthetic oligonucleotide
gcuugguggggagagcuug

SEQ ID NO: 2163923 - RNA, 19 nt, Artificial Sequence
  Description of Artificial Sequence: Synthetic oligonucleotide
uucagauccggggcucgaa

SEQ ID NO: 2163924 - RNA, 19 nt, Artificial Sequence
  Description of Artificial Sequence: Synthetic oligonucleotide
ggaacaucuccugguaguc

SEQ ID NO: 2163925 - RNA, 19 nt, Artificial Sequence
  Description of Artificial Sequence: Synthetic oligonucleotide
uccguccggauccgguguc

SEQ ID NO: 2163926 - RNA, 19 nt, Artificial Sequence
  Description of Artificial Sequence: Synthetic oligonucleotide
gcaccgaugcuccaggucu

SEQ ID NO: 2163927 - RNA, 19 nt, Artificial Sequence
  Description of Artificial Sequence: Synthetic oligonucleotide
ggacucccucuucucuugg

SEQ ID NO: 2163928 - RNA, 19 nt, Artificial Sequence
  Description of Artificial Sequence: Synthetic oligonucleotide
aggacacuacagucauaau

SEQ ID NO: 2163929 - RNA, 19 nt, Artificial Sequence
  Description of Artificial Sequence: Synthetic oligonucleotide
ccucguagucuaagaaaac

SEQ ID NO: 2163930 - RNA, 19 nt, Artificial Sequence
  Description of Artificial Sequence: Synthetic oligonucleotide
acauggguuccaccugguu

SEQ ID NO: 2163931 - RNA, 19 nt, Artificial Sequence
  Description of Artificial Sequence: Synthetic oligonucleotide
ccccuaugcggcgaggugg

SEQ ID NO: 2163932 - RNA, 19 nt, Artificial Sequence
  Description of Artificial Sequence: Synthetic oligonucleotide
cgcaggugcuuaaacuccg

SEQ ID NO: 2163933 - RNA, 19 nt, Artificial Sequence
  Description of Artificial Sequence: Synthetic oligonucleotide
uaagagcuuuuagccgcuc

SEQ ID NO: 2163934 - RNA, 19 nt, Artificial Sequence
  Description of Artificial Sequence: Synthetic oligonucleotide
cagccucguagucuaagaa

SEQ ID NO: 2163935 - RNA, 19 nt, Artificial Sequence
  Description of Artificial Sequence: Synthetic oligonucleotide
gcccaaucacccaguaucc

SEQ ID NO: 2163936 - RNA, 19 nt, Artificial Sequence
  Description of Artificial Sequence: Synthetic oligonucleotide
ggcucuguauucaugcuua

SEQ ID NO: 2163937 - RNA, 19 nt, Artificial Sequence
  Description of Artificial Sequence: Synthetic oligonucleotide
cacucugcuugccuggaua

SEQ ID NO: 2163938 - RNA, 19 nt, Artificial Sequence
  Description of Artificial Sequence: Synthetic oligonucleotide
auccggugucucucaggcu

SEQ ID NO: 2163939 - RNA, 19 nt, Artificial Sequence
  Description of Artificial Sequence: Synthetic oligonucleotide
ggauacuggcugaaagaga

SEQ ID NO: 2163940 - RNA, 19 nt, Artificial Sequence
  Description of Artificial Sequence: Synthetic oligonucleotide
guaggcacucugcuugccu

SEQ ID NO: 2163941 - RNA, 19 nt, Artificial Sequence
  Description of Artificial Sequence: Synthetic oligonucleotide
uggcaccgaugcuccaggu

SEQ ID NO: 2163942 - RNA, 19 nt, Artificial Sequence
  Description of Artificial Sequence: Synthetic oligonucleotide
cccuaugcggcgagguggc

SEQ ID NO: 2163943 - RNA, 19 nt, Artificial Sequence
  Description of Artificial Sequence: Synthetic oligonucleotide
cuugaggcuuccucagggu

SEQ ID NO: 2163944 - RNA, 19 nt, Artificial Sequence
  Description of Artificial Sequence: Synthetic oligonucleotide
cugauaccuggaguaggca

SEQ ID NO: 2163945 - RNA, 19 nt, Artificial Sequence
  Description of Artificial Sequence: Synthetic oligonucleotide
guggggagagcuugaggcu

SEQ ID NO: 2163946 - RNA, 19 nt, Artificial Sequence
  Description of Artificial Sequence: Synthetic oligonucleotide
cccaaucacccaguauccg

SEQ ID NO: 2163947 - RNA, 19 nt, Artificial Sequence
  Description of Artificial Sequence: Synthetic oligonucleotide
gggcugauaccuggaguag

SEQ ID NO: 2163948 - RNA, 19 nt, Artificial Sequence
  Description of Artificial Sequence: Synthetic oligonucleotide
ugcuccgcaggugcuuaaa

SEQ ID NO: 2163949 - RNA, 19 nt, Artificial Sequence
  Description of Artificial Sequence: Synthetic oligonucleotide
gcuccgcaggugcuuaaac

SEQ ID NO: 2163950 - RNA, 19 nt, Artificial Sequence
  Description of Artificial Sequence: Synthetic oligonucleotide
ggcaccgaugcuccagguc

SEQ ID NO: 2163951 - RNA, 19 nt, Artificial Sequence
  Description of Artificial Sequence: Synthetic oligonucleotide
gcucagacccuucuucucu

SEQ ID NO: 2163952 - RNA, 19 nt, Artificial Sequence
  Description of Artificial Sequence: Synthetic oligonucleotide
uuuagccgcucggcuuccu

SEQ ID NO: 2163953 - RNA, 19 nt, Artificial Sequence
  Description of Artificial Sequence: Synthetic oligonucleotide
accucaccugucuccgguu

SEQ ID NO: 2163954 - RNA, 19 nt, Artificial Sequence
  Description of Artificial Sequence: Synthetic oligonucleotide
cucgaaagacucgaagcau

SEQ ID NO: 2163955 - RNA, 19 nt, Artificial Sequence
  Description of Artificial Sequence: Synthetic oligonucleotide
uggguuccaccugguuacu

SEQ ID NO: 2163956 - RNA, 19 nt, Artificial Sequence
  Description of Artificial Sequence: Synthetic oligonucleotide
gggcaagccaugguuguga

SEQ ID NO: 2163957 - RNA, 19 nt, Artificial Sequence
  Description of Artificial Sequence: Synthetic oligonucleotide
accgaugcuccaggucuga

SEQ ID NO: 2163958 - RNA, 19 nt, Artificial Sequence
  Description of Artificial Sequence: Synthetic oligonucleotide
gcaaggagguggaggaguc

SEQ ID NO: 2163959 - RNA, 19 nt, Artificial Sequence
  Description of Artificial Sequence: Synthetic oligonucleotide
ggcucgaaacaaacuuuuc

SEQ ID NO: 2163960 - RNA, 19 nt, Artificial Sequence
  Description of Artificial Sequence: Synthetic oligonucleotide
ggaguccucauaggcucug

SEQ ID NO: 2163961 - RNA, 19 nt, Artificial Sequence
  Description of Artificial Sequence: Synthetic oligonucleotide
gcaagccaugguugugaac

SEQ ID NO: 2163962 - RNA, 19 nt, Artificial Sequence
  Description of Artificial Sequence: Synthetic oligonucleotide
caccugguuacugcacaca

SEQ ID NO: 2163963 - RNA, 19 nt, Artificial Sequence
  Description of Artificial Sequence: Synthetic oligonucleotide
agccaugguugugaacguu

SEQ ID NO: 2163964 - RNA, 19 nt, Artificial Sequence
  Description of Artificial Sequence: Synthetic oligonucleotide
gccagccucguagucuaag

SEQ ID NO: 2163965 - RNA, 19 nt, Artificial Sequence
  Description of Artificial Sequence: Synthetic oligonucleotide
ggcgagguggcacugucau

SEQ ID NO: 2163966 - RNA, 19 nt, Artificial Sequence
  Description of Artificial Sequence: Synthetic oligonucleotide
ugcggcgagguggcacugu

SEQ ID NO: 2163967 - RNA, 19 nt, Artificial Sequence
  Description of Artificial Sequence: Synthetic oligonucleotide
ccagccucguagucuaaga

SEQ ID NO: 2163968 - RNA, 19 nt, Artificial Sequence
  Description of Artificial Sequence: Synthetic oligonucleotide
ggcaagccaugguugugaa

SEQ ID NO: 2163969 - RNA, 19 nt, Artificial Sequence
  Description of Artificial Sequence: Synthetic oligonucleotide
gcuuuuagccgcucggcuu

SEQ ID NO: 2163970 - RNA, 19 nt, Artificial Sequence
  Description of Artificial Sequence: Synthetic oligonucleotide
gccaugguugugaacguua

SEQ ID NO: 2163971 - RNA, 19 nt, Artificial Sequence
  Description of Artificial Sequence: Synthetic oligonucleotide
uguggaccccuggcaccga

SEQ ID NO: 2163972 - RNA, 19 nt, Artificial Sequence
  Description of Artificial Sequence: Synthetic oligonucleotide
augcuccgcaggugcuuaa

SEQ ID NO: 2163973 - RNA, 19 nt, Artificial Sequence
  Description of Artificial Sequence: Synthetic oligonucleotide
caguauccgcucuggggcu

SEQ ID NO: 2163974 - RNA, 19 nt, Artificial Sequence
  Description of Artificial Sequence: Synthetic oligonucleotide
gcacugucauagagaggag

SEQ ID NO: 2163975 - RNA, 19 nt, Artificial Sequence
  Description of Artificial Sequence: Synthetic oligonucleotide
gcuuaaacuccguccggau

SEQ ID NO: 2163976 - RNA, 19 nt, Artificial Sequence
  Description of Artificial Sequence: Synthetic oligonucleotide
ccaguaguuuuggacaucu

SEQ ID NO: 2163977 - RNA, 19 nt, Artificial Sequence
  Description of Artificial Sequence: Synthetic oligonucleotide
cuaugaugcucagacccuu

SEQ ID NO: 2163978 - RNA, 19 nt, Artificial Sequence
  Description of Artificial Sequence: Synthetic oligonucleotide
gugugaugaccaugguguu

SEQ ID NO: 2163979 - RNA, 19 nt, Artificial Sequence
  Description of Artificial Sequence: Synthetic oligonucleotide
cguccacccaguaguuuug

SEQ ID NO: 2163980 - RNA, 19 nt, Artificial Sequence
  Description of Artificial Sequence: Synthetic oligonucleotide
agccgucuguggauucaga

SEQ ID NO: 2163981 - RNA, 19 nt, Artificial Sequence
  Description of Artificial Sequence: Synthetic oligonucleotide
ggguuccaccugguuacug

SEQ ID NO: 2163982 - RNA, 19 nt, Artificial Sequence
  Description of Artificial Sequence: Synthetic oligonucleotide
caggacucccucuucucuu

SEQ ID NO: 2163983 - RNA, 19 nt, Artificial Sequence
  Description of Artificial Sequence: Synthetic oligonucleotide
cccgguccaggaugcuccg

SEQ ID NO: 2163984 - RNA, 19 nt, Artificial Sequence
  Description of Artificial Sequence: Synthetic oligonucleotide
gggagagcuugaggcuucc

SEQ ID NO: 2163985 - RNA, 19 nt, Artificial Sequence
  Description of Artificial Sequence: Synthetic oligonucleotide
augcggcgagguggcacug

SEQ ID NO: 2163986 - RNA, 19 nt, Artificial Sequence
  Description of Artificial Sequence: Synthetic oligonucleotide
cuccguccggauccggugu

SEQ ID NO: 2163987 - RNA, 19 nt, Artificial Sequence
  Description of Artificial Sequence: Synthetic oligonucleotide
gcggcgagguggcacuguc

SEQ ID NO: 2163988 - RNA, 19 nt, Artificial Sequence
  Description of Artificial Sequence: Synthetic oligonucleotide
ccgcucuggggcugauacc

SEQ ID NO: 2163989 - RNA, 19 nt, Artificial Sequence
  Description of Artificial Sequence: Synthetic oligonucleotide
gggcucgaaacaaacuuuu

SEQ ID NO: 2163990 - RNA, 19 nt, Artificial Sequence
  Description of Artificial Sequence: Synthetic oligonucleotide
uauccgcucuggggcugau

SEQ ID NO: 2163991 - RNA, 19 nt, Artificial Sequence
  Description of Artificial Sequence: Synthetic oligonucleotide
ggggcucgaaacaaacuuu

SEQ ID NO: 2163992 - RNA, 19 nt, Artificial Sequence
  Description of Artificial Sequence: Synthetic oligonucleotide
cccaguaguuuuggacauc

SEQ ID NO: 2163993 - RNA, 19 nt, Artificial Sequence
  Description of Artificial Sequence: Synthetic oligonucleotide
cucaccugucuccgguuuu

SEQ ID NO: 2163994 - RNA, 19 nt, Artificial Sequence
  Description of Artificial Sequence: Synthetic oligonucleotide
guggaccccuggcaccgau

SEQ ID NO: 2163995 - RNA, 19 nt, Artificial Sequence
  Description of Artificial Sequence: Synthetic oligonucleotide
auccgcucuggggcugaua

SEQ ID NO: 2163996 - RNA, 19 nt, Artificial Sequence
  Description of Artificial Sequence: Synthetic oligonucleotide
gcuuaugcugcagcccaau

SEQ ID NO: 2163997 - RNA, 19 nt, Artificial Sequence
  Description of Artificial Sequence: Synthetic oligonucleotide
ccccuccgcuuucucuaug

SEQ ID NO: 2163998 - RNA, 19 nt, Artificial Sequence
  Description of Artificial Sequence: Synthetic oligonucleotide
gccuggauacuggcugaaa

SEQ ID NO: 2163999 - RNA, 19 nt, Artificial Sequence
  Description of Artificial Sequence: Synthetic oligonucleotide
gcaggugcuuaaacuccgu

SEQ ID NO: 2164000 - RNA, 19 nt, Artificial Sequence
  Description of Artificial Sequence: Synthetic oligonucleotide
caggcuccaccugauucuu

SEQ ID NO: 2164001 - RNA, 19 nt, Artificial Sequence
  Description of Artificial Sequence: Synthetic oligonucleotide
ccggggcucgaaacaaacu

SEQ ID NO: 2164002 - RNA, 19 nt, Artificial Sequence
  Description of Artificial Sequence: Synthetic oligonucleotide
cacguccacccaguaguuu

SEQ ID NO: 2164003 - RNA, 19 nt, Artificial Sequence
  Description of Artificial Sequence: Synthetic oligonucleotide
cguccggauccggugucuc

SEQ ID NO: 2164004 - RNA, 19 nt, Artificial Sequence
  Description of Artificial Sequence: Synthetic oligonucleotide
gcacucugcuugccuggau

SEQ ID NO: 2164005 - RNA, 19 nt, Artificial Sequence
  Description of Artificial Sequence: Synthetic oligonucleotide
ccucaccugucuccgguuu

SEQ ID NO: 2164006 - RNA, 19 nt, Artificial Sequence
  Description of Artificial Sequence: Synthetic oligonucleotide
cggcgagguggcacuguca

SEQ ID NO: 2164007 - RNA, 19 nt, Artificial Sequence
  Description of Artificial Sequence: Synthetic oligonucleotide
ccuaugcggcgagguggca

SEQ ID NO: 2164008 - RNA, 19 nt, Artificial Sequence
  Description of Artificial Sequence: Synthetic oligonucleotide
ccguccggauccggugucu

SEQ ID NO: 2164009 - RNA, 19 nt, Artificial Sequence
  Description of Artificial Sequence: Synthetic oligonucleotide
uuuaauaggauucuggucc

SEQ ID NO: 2164010 - RNA, 19 nt, Artificial Sequence
  Description of Artificial Sequence: Synthetic oligonucleotide
uuugcuaacacuuaaacgc

SEQ ID NO: 2164011 - RNA, 19 nt, Artificial Sequence
  Description of Artificial Sequence: Synthetic oligonucleotide
uuuacuuccaagaagcuca

SEQ ID NO: 2164012 - RNA, 19 nt, Artificial Sequence
  Description of Artificial Sequence: Synthetic oligonucleotide
uuuauuauuucaccgacgc

SEQ ID NO: 2164013 - RNA, 19 nt, Artificial Sequence
  Description of Artificial Sequence: Synthetic oligonucleotide
uaauuuuauuauuucaccg

SEQ ID NO: 2164014 - RNA, 19 nt, Artificial Sequence
  Description of Artificial Sequence: Synthetic oligonucleotide
uucuguuucgucauaaugc

SEQ ID NO: 2164015 - RNA, 19 nt, Artificial Sequence
  Description of Artificial Sequence: Synthetic oligonucleotide
aacuugacacgucugacuc

SEQ ID NO: 2164016 - RNA, 19 nt, Artificial Sequence
  Description of Artificial Sequence: Synthetic oligonucleotide
aacgaagugggucauuuuc

SEQ ID NO: 2164017 - RNA, 19 nt, Artificial Sequence
  Description of Artificial Sequence: Synthetic oligonucleotide
uccuuuacuuccaagaagc

SEQ ID NO: 2164018 - RNA, 19 nt, Artificial Sequence
  Description of Artificial Sequence: Synthetic oligonucleotide
cuuaaacgcaccaucaugc

SEQ ID NO: 2164019 - RNA, 19 nt, Artificial Sequence
  Description of Artificial Sequence: Synthetic oligonucleotide
agauccauaagguacauga

SEQ ID NO: 2164020 - RNA, 19 nt, Artificial Sequence
  Description of Artificial Sequence: Synthetic oligonucleotide
aauuugauauuucaguuuu

SEQ ID NO: 2164021 - RNA, 19 nt, Artificial Sequence
  Description of Artificial Sequence: Synthetic oligonucleotide
aagugggucauuuucacug

SEQ ID NO: 2164022 - RNA, 19 nt, Artificial Sequence
  Description of Artificial Sequence: Synthetic oligonucleotide
uuaagcucacgaaugacag

SEQ ID NO: 2164023 - RNA, 19 nt, Artificial Sequence
  Description of Artificial Sequence: Synthetic oligonucleotide
auccauaagguacaugagc

SEQ ID NO: 2164024 - RNA, 19 nt, Artificial Sequence
  Description of Artificial Sequence: Synthetic oligonucleotide
aaaaguguuaucgaacuug

SEQ ID NO: 2164025 - RNA, 19 nt, Artificial Sequence
  Description of Artificial Sequence: Synthetic oligonucleotide
uuccaagaagcucagaccc

SEQ ID NO: 2164026 - RNA, 19 nt, Artificial Sequence
  Description of Artificial Sequence: Synthetic oligonucleotide
uugacuguaagcauaauua

SEQ ID NO: 2164027 - RNA, 19 nt, Artificial Sequence
  Description of Artificial Sequence: Synthetic oligonucleotide
uauuauuucaccgacgccu

SEQ ID NO: 2164028 - RNA, 19 nt, Artificial Sequence
  Description of Artificial Sequence: Synthetic oligonucleotide
ugaguauugcuccuuaagc

SEQ ID NO: 2164029 - RNA, 19 nt, Artificial Sequence
  Description of Artificial Sequence: Synthetic oligonucleotide
aguuacagccaucaccugc

SEQ ID NO: 2164030 - RNA, 19 nt, Artificial Sequence
  Description of Artificial Sequence: Synthetic oligonucleotide
uucaacuugcuuaucaugu

SEQ ID NO: 2164031 - RNA, 19 nt, Artificial Sequence
  Description of Artificial Sequence: Synthetic oligonucleotide
aauccuaugcugauccucc

SEQ ID NO: 2164032 - RNA, 19 nt, Artificial Sequence
  Description of Artificial Sequence: Synthetic oligonucleotide
aacacuugcucgcuuucgc

SEQ ID NO: 2164033 - RNA, 19 nt, Artificial Sequence
  Description of Artificial Sequence: Synthetic oligonucleotide
ucaaaaguguuaucgaacu

SEQ ID NO: 2164034 - RNA, 19 nt, Artificial Sequence
  Description of Artificial Sequence: Synthetic oligonucleotide
ucauaguuaauccuaugcu

SEQ ID NO: 2164035 - RNA, 19 nt, Artificial Sequence
  Description of Artificial Sequence: Synthetic oligonucleotide
uuuucacugaggcugcccg

SEQ ID NO: 2164036 - RNA, 19 nt, Artificial Sequence
  Description of Artificial Sequence: Synthetic oligonucleotide
guuugcuaacacuuaaacg

SEQ ID NO: 2164037 - RNA, 19 nt, Artificial Sequence
  Description of Artificial Sequence: Synthetic oligonucleotide
aguguuaucgaacuugaca

SEQ ID NO: 2164038 - RNA, 19 nt, Artificial Sequence
  Description of Artificial Sequence: Synthetic oligonucleotide
ucucuguagaguauguacc

SEQ ID NO: 2164039 - RNA, 19 nt, Artificial Sequence
  Description of Artificial Sequence: Synthetic oligonucleotide
aacuugcuuaucauguugc

SEQ ID NO: 2164040 - RNA, 19 nt, Artificial Sequence
  Description of Artificial Sequence: Synthetic oligonucleotide
guguuaucgaacuugacac

SEQ ID NO: 2164041 - RNA, 19 nt, Artificial Sequence
  Description of Artificial Sequence: Synthetic oligonucleotide
agggaauuaagcugcgagc

SEQ ID NO: 2164042 - RNA, 19 nt, Artificial Sequence
  Description of Artificial Sequence: Synthetic oligonucleotide
aagcucacgaaugacagag

SEQ ID NO: 2164043 - RNA, 19 nt, Artificial Sequence
  Description of Artificial Sequence: Synthetic oligonucleotide
cauaguuaauccuaugcug

SEQ ID NO: 2164044 - RNA, 19 nt, Artificial Sequence
  Description of Artificial Sequence: Synthetic oligonucleotide
ucuaaaaccguucggaguu

SEQ ID NO: 2164045 - RNA, 19 nt, Artificial Sequence
  Description of Artificial Sequence: Synthetic oligonucleotide
uucaaaaguguuaucgaac

SEQ ID NO: 2164046 - RNA, 19 nt, Artificial Sequence
  Description of Artificial Sequence: Synthetic oligonucleotide
gucauaaugcacuggaacc

SEQ ID NO: 2164047 - RNA, 19 nt, Artificial Sequence
  Description of Artificial Sequence: Synthetic oligonucleotide
agcucauaacacuugcucg

SEQ ID NO: 2164048 - RNA, 19 nt, Artificial Sequence
  Description of Artificial Sequence: Synthetic oligonucleotide
aaccguucggaguuccacc

SEQ ID NO: 2164049 - RNA, 19 nt, Artificial Sequence
  Description of Artificial Sequence: Synthetic oligonucleotide
ucuguuucgucauaaugca

SEQ ID NO: 2164050 - RNA, 19 nt, Artificial Sequence
  Description of Artificial Sequence: Synthetic oligonucleotide
uugucaauuugauauuuca

SEQ ID NO: 2164051 - RNA, 19 nt, Artificial Sequence
  Description of Artificial Sequence: Synthetic oligonucleotide
gagggaauuaagcugcgag

SEQ ID NO: 2164052 - RNA, 19 nt, Artificial Sequence
  Description of Artificial Sequence: Synthetic oligonucleotide
ucaauuugauauuucaguu

SEQ ID NO: 2164053 - RNA, 19 nt, Artificial Sequence
  Description of Artificial Sequence: Synthetic oligonucleotide
guacaugagcaacaguugg

SEQ ID NO: 2164054 - RNA, 19 nt, Artificial Sequence
  Description of Artificial Sequence: Synthetic oligonucleotide
cucucuucauaguuaaucc

SEQ ID NO: 2164055 - RNA, 19 nt, Artificial Sequence
  Description of Artificial Sequence: Synthetic oligonucleotide
uguagaguauguaccagcu

SEQ ID NO: 2164056 - RNA, 19 nt, Artificial Sequence
  Description of Artificial Sequence: Synthetic oligonucleotide
uucuuagguaucuucuucc

SEQ ID NO: 2164057 - RNA, 19 nt, Artificial Sequence
  Description of Artificial Sequence: Synthetic oligonucleotide
ucuuagguaucuucuuccg

SEQ ID NO: 2164058 - RNA, 19 nt, Artificial Sequence
  Description of Artificial Sequence: Synthetic oligonucleotide
agauguuccuuuuacagau

SEQ ID NO: 2164059 - RNA, 19 nt, Artificial Sequence
  Description of Artificial Sequence: Synthetic oligonucleotide
uguuaucgaacuugacacg

SEQ ID NO: 2164060 - RNA, 19 nt, Artificial Sequence
  Description of Artificial Sequence: Synthetic oligonucleotide
guggcucagauccauaagg

SEQ ID NO: 2164061 - RNA, 19 nt, Artificial Sequence
  Description of Artificial Sequence: Synthetic oligonucleotide
aguauguaccagcuugaac

SEQ ID NO: 2164062 - RNA, 19 nt, Artificial Sequence
  Description of Artificial Sequence: Synthetic oligonucleotide
uuuuaauaggauucugguc

SEQ ID NO: 2164063 - RNA, 19 nt, Artificial Sequence
  Description of Artificial Sequence: Synthetic oligonucleotide
uuugacuguaagcauaauu

SEQ ID NO: 2164064 - RNA, 19 nt, Artificial Sequence
  Description of Artificial Sequence: Synthetic oligonucleotide
acuuaaacgcaccaucaug

SEQ ID NO: 2164065 - RNA, 19 nt, Artificial Sequence
  Description of Artificial Sequence: Synthetic oligonucleotide
cuggcgagugacaugaggg

SEQ ID NO: 2164066 - RNA, 19 nt, Artificial Sequence
  Description of Artificial Sequence: Synthetic oligonucleotide
aaagcacugaugucgcuga

SEQ ID NO: 2164067 - RNA, 19 nt, Artificial Sequence
  Description of Artificial Sequence: Synthetic oligonucleotide
aaacgcaccaucaugcucu

SEQ ID NO: 2164068 - RNA, 19 nt, Artificial Sequence
  Description of Artificial Sequence: Synthetic oligonucleotide
agugcucguuucuuggccc

SEQ ID NO: 2164069 - RNA, 19 nt, Artificial Sequence
  Description of Artificial Sequence: Synthetic oligonucleotide
uuaagcugcgagcucauaa

SEQ ID NO: 2164070 - RNA, 19 nt, Artificial Sequence
  Description of Artificial Sequence: Synthetic oligonucleotide
agugacaugagggugccgg

SEQ ID NO: 2164071 - RNA, 19 nt, Artificial Sequence
  Description of Artificial Sequence: Synthetic oligonucleotide
ugguccuuuacuuccaaga

SEQ ID NO: 2164072 - RNA, 19 nt, Artificial Sequence
  Description of Artificial Sequence: Synthetic oligonucleotide
gaaaaccuuucuucuuccg

SEQ ID NO: 2164073 - RNA, 19 nt, Artificial Sequence
  Description of Artificial Sequence: Synthetic oligonucleotide
uugcuaacacuuaaacgca

SEQ ID NO: 2164074 - RNA, 19 nt, Artificial Sequence
  Description of Artificial Sequence: Synthetic oligonucleotide
uaucgaacuugacacgucu

SEQ ID NO: 2164075 - RNA, 19 nt, Artificial Sequence
  Description of Artificial Sequence: Synthetic oligonucleotide
uuauuauuucaccgacgcc

SEQ ID NO: 2164076 - RNA, 19 nt, Artificial Sequence
  Description of Artificial Sequence: Synthetic oligonucleotide
uagauguuccuuuuacaga

SEQ ID NO: 2164077 - RNA, 19 nt, Artificial Sequence
  Description of Artificial Sequence: Synthetic oligonucleotide
uucuaaaaccguucggagu

SEQ ID NO: 2164078 - RNA, 19 nt, Artificial Sequence
  Description of Artificial Sequence: Synthetic oligonucleotide
aaaccguucggaguuccac

SEQ ID NO: 2164079 - RNA, 19 nt, Artificial Sequence
  Description of Artificial Sequence: Synthetic oligonucleotide
acguauuucuuagauguuc

SEQ ID NO: 2164080 - RNA, 19 nt, Artificial Sequence
  Description of Artificial Sequence: Synthetic oligonucleotide
ugaccaguuugucaauuug

SEQ ID NO: 2164081 - RNA, 19 nt, Artificial Sequence
  Description of Artificial Sequence: Synthetic oligonucleotide
acaguugguccuuuacuuc

SEQ ID NO: 2164082 - RNA, 19 nt, Artificial Sequence
  Description of Artificial Sequence: Synthetic oligonucleotide
uuuugucagggcuuguacu

SEQ ID NO: 2164083 - RNA, 19 nt, Artificial Sequence
  Description of Artificial Sequence: Synthetic oligonucleotide
auaguuaauccuaugcuga

SEQ ID NO: 2164084 - RNA, 19 nt, Artificial Sequence
  Description of Artificial Sequence: Synthetic oligonucleotide
aaaguguuaucgaacuuga

SEQ ID NO: 2164085 - RNA, 19 nt, Artificial Sequence
  Description of Artificial Sequence: Synthetic oligonucleotide
ucgaacuugacacgucuga

SEQ ID NO: 2164086 - RNA, 19 nt, Artificial Sequence
  Description of Artificial Sequence: Synthetic oligonucleotide
caucaagaugagcagcucc

SEQ ID NO: 2164087 - RNA, 19 nt, Artificial Sequence
  Description of Artificial Sequence: Synthetic oligonucleotide
cauguugcugggauggggc

SEQ ID NO: 2164088 - RNA, 19 nt, Artificial Sequence
  Description of Artificial Sequence: Synthetic oligonucleotide
acacuugcucgcuuucgcc

SEQ ID NO: 2164089 - RNA, 19 nt, Artificial Sequence
  Description of Artificial Sequence: Synthetic oligonucleotide
uaagguacaugagcaacag

SEQ ID NO: 2164090 - RNA, 19 nt, Artificial Sequence
  Description of Artificial Sequence: Synthetic oligonucleotide
cuugacacgucugacuccg

SEQ ID NO: 2164091 - RNA, 19 nt, Artificial Sequence
  Description of Artificial Sequence: Synthetic oligonucleotide
cuuaagcucacgaaugaca

SEQ ID NO: 2164092 - RNA, 19 nt, Artificial Sequence
  Description of Artificial Sequence: Synthetic oligonucleotide
cugguccucaucaagauga

SEQ ID NO: 2164093 - RNA, 19 nt, Artificial Sequence
  Description of Artificial Sequence: Synthetic oligonucleotide
ucauuuucacugaggcugc

SEQ ID NO: 2164094 - RNA, 19 nt, Artificial Sequence
  Description of Artificial Sequence: Synthetic oligonucleotide
auaacacuugcucgcuuuc

SEQ ID NO: 2164095 - RNA, 19 nt, Artificial Sequence
  Description of Artificial Sequence: Synthetic oligonucleotide
uuaauaggauucugguccu

SEQ ID NO: 2164096 - RNA, 19 nt, Artificial Sequence
  Description of Artificial Sequence: Synthetic oligonucleotide
uccucaucaagaugagcag

SEQ ID NO: 2164097 - RNA, 19 nt, Artificial Sequence
  Description of Artificial Sequence: Synthetic oligonucleotide
uccuuaagcucacgaauga

SEQ ID NO: 2164098 - RNA, 19 nt, Artificial Sequence
  Description of Artificial Sequence: Synthetic oligonucleotide
uaagcugcgagcucauaac

SEQ ID NO: 2164099 - RNA, 19 nt, Artificial Sequence
  Description of Artificial Sequence: Synthetic oligonucleotide
cauaagguacaugagcaac

SEQ ID NO: 2164100 - RNA, 19 nt, Artificial Sequence
  Description of Artificial Sequence: Synthetic oligonucleotide
uauuucaccgacgccuccg

SEQ ID NO: 2164101 - RNA, 19 nt, Artificial Sequence
  Description of Artificial Sequence: Synthetic oligonucleotide
cugaguauugcuccuuaag

SEQ ID NO: 2164102 - RNA, 19 nt, Artificial Sequence
  Description of Artificial Sequence: Synthetic oligonucleotide
uuugcucgcguucugcuuc

SEQ ID NO: 2164103 - RNA, 19 nt, Artificial Sequence
  Description of Artificial Sequence: Synthetic oligonucleotide
acuguaagcauaauuaauu

SEQ ID NO: 2164104 - RNA, 19 nt, Artificial Sequence
  Description of Artificial Sequence: Synthetic oligonucleotide
aauaggauucugguccuca

SEQ ID NO: 2164105 - RNA, 19 nt, Artificial Sequence
  Description of Artificial Sequence: Synthetic oligonucleotide
gaauuaagcugcgagcuca

SEQ ID NO: 2164106 - RNA, 19 nt, Artificial Sequence
  Description of Artificial Sequence: Synthetic oligonucleotide
aagcauaauuaauuuuauu

SEQ ID NO: 2164107 - RNA, 19 nt, Artificial Sequence
  Description of Artificial Sequence: Synthetic oligonucleotide
cuccuuaagcucacgaaug

SEQ ID NO: 2164108 - RNA, 19 nt, Artificial Sequence
  Description of Artificial Sequence: Synthetic oligonucleotide
aaaacgaagugggucauuu

SEQ ID NO: 2164109 - RNA, 19 nt, Artificial Sequence
  Description of Artificial Sequence: Synthetic oligonucleotide
accgacgccuccgaaaacc

SEQ ID NO: 2164110 - RNA, 19 nt, Artificial Sequence
  Description of Artificial Sequence: Synthetic oligonucleotide
ugggacguauuucuuagau

SEQ ID NO: 2164111 - RNA, 19 nt, Artificial Sequence
  Description of Artificial Sequence: Synthetic oligonucleotide
guccuuuacuuccaagaag

SEQ ID NO: 2164112 - RNA, 19 nt, Artificial Sequence
  Description of Artificial Sequence: Synthetic oligonucleotide
uuugucagggcuuguacuu

SEQ ID NO: 2164113 - RNA, 19 nt, Artificial Sequence
  Description of Artificial Sequence: Synthetic oligonucleotide
aaccaagcguggugggacg

SEQ ID NO: 2164114 - RNA, 19 nt, Artificial Sequence
  Description of Artificial Sequence: Synthetic oligonucleotide
gaaucgcggauuuccuccg

SEQ ID NO: 2164115 - RNA, 19 nt, Artificial Sequence
  Description of Artificial Sequence: Synthetic oligonucleotide
uuaaacgcaccaucaugcu

SEQ ID NO: 2164116 - RNA, 19 nt, Artificial Sequence
  Description of Artificial Sequence: Synthetic oligonucleotide
ugcuuaucauguugcuggg

SEQ ID NO: 2164117 - RNA, 19 nt, Artificial Sequence
  Description of Artificial Sequence: Synthetic oligonucleotide
aagcugcgagcucauaaca

SEQ ID NO: 2164118 - RNA, 19 nt, Artificial Sequence
  Description of Artificial Sequence: Synthetic oligonucleotide
caugagcaacaguuggucc

SEQ ID NO: 2164119 - RNA, 19 nt, Artificial Sequence
  Description of Artificial Sequence: Synthetic oligonucleotide
aguuccaccagccuccaaa

SEQ ID NO: 2164120 - RNA, 19 nt, Artificial Sequence
  Description of Artificial Sequence: Synthetic oligonucleotide
gggcuuaaaacgaaguggg

SEQ ID NO: 2164121 - RNA, 19 nt, Artificial Sequence
  Description of Artificial Sequence: Synthetic oligonucleotide
auuuucacugaggcugccc

SEQ ID NO: 2164122 - RNA, 19 nt, Artificial Sequence
  Description of Artificial Sequence: Synthetic oligonucleotide
gaguauugcuccuuaagcu

SEQ ID NO: 2164123 - RNA, 19 nt, Artificial Sequence
  Description of Artificial Sequence: Synthetic oligonucleotide
auuauuucaccgacgccuc

SEQ ID NO: 2164124 - RNA, 19 nt, Artificial Sequence
  Description of Artificial Sequence: Synthetic oligonucleotide
agguacaugagcaacaguu

SEQ ID NO: 2164125 - RNA, 19 nt, Artificial Sequence
  Description of Artificial Sequence: Synthetic oligonucleotide
uguaccagcuugaacuuuu

SEQ ID NO: 2164126 - RNA, 19 nt, Artificial Sequence
  Description of Artificial Sequence: Synthetic oligonucleotide
ucuguagaguauguaccag

SEQ ID NO: 2164127 - RNA, 19 nt, Artificial Sequence
  Description of Artificial Sequence: Synthetic oligonucleotide
gggucauuuucacugaggc

SEQ ID NO: 2164128 - RNA, 19 nt, Artificial Sequence
  Description of Artificial Sequence: Synthetic oligonucleotide
uaugcugauccuccugacu

SEQ ID NO: 2164129 - RNA, 19 nt, Artificial Sequence
  Description of Artificial Sequence: Synthetic oligonucleotide
uuugguccaagggacggag

SEQ ID NO: 2164130 - RNA, 19 nt, Artificial Sequence
  Description of Artificial Sequence: Synthetic oligonucleotide
ucauguugcugggaugggg

SEQ ID NO: 2164131 - RNA, 19 nt, Artificial Sequence
  Description of Artificial Sequence: Synthetic oligonucleotide
uggcucagauccauaaggu

SEQ ID NO: 2164132 - RNA, 19 nt, Artificial Sequence
  Description of Artificial Sequence: Synthetic oligonucleotide
uuacuuccaagaagcucag

SEQ ID NO: 2164133 - RNA, 19 nt, Artificial Sequence
  Description of Artificial Sequence: Synthetic oligonucleotide
ugcuucgucuuccucuuca

SEQ ID NO: 2164134 - RNA, 19 nt, Artificial Sequence
  Description of Artificial Sequence: Synthetic oligonucleotide
cacuugcucgcuuucgccg

SEQ ID NO: 2164135 - RNA, 19 nt, Artificial Sequence
  Description of Artificial Sequence: Synthetic oligonucleotide
ugucgcugaagugugugag

SEQ ID NO: 2164136 - RNA, 19 nt, Artificial Sequence
  Description of Artificial Sequence: Synthetic oligonucleotide
agucuugaccaguuuguca

SEQ ID NO: 2164137 - RNA, 19 nt, Artificial Sequence
  Description of Artificial Sequence: Synthetic oligonucleotide
ggacguauuucuuagaugu

SEQ ID NO: 2164138 - RNA, 19 nt, Artificial Sequence
  Description of Artificial Sequence: Synthetic oligonucleotide
guuucgucauaaugcacug

SEQ ID NO: 2164139 - RNA, 19 nt, Artificial Sequence
  Description of Artificial Sequence: Synthetic oligonucleotide
uaaacgcaccaucaugcuc

SEQ ID NO: 2164140 - RNA, 19 nt, Artificial Sequence
  Description of Artificial Sequence: Synthetic oligonucleotide
aagugugugagggaauuaa

SEQ ID NO: 2164141 - RNA, 19 nt, Artificial Sequence
  Description of Artificial Sequence: Synthetic oligonucleotide
aguuaauccuaugcugauc

SEQ ID NO: 2164142 - RNA, 19 nt, Artificial Sequence
  Description of Artificial Sequence: Synthetic oligonucleotide
ggaaucgcggauuuccucc

SEQ ID NO: 2164143 - RNA, 19 nt, Artificial Sequence
  Description of Artificial Sequence: Synthetic oligonucleotide
gauccauaagguacaugag

SEQ ID NO: 2164144 - RNA, 19 nt, Artificial Sequence
  Description of Artificial Sequence: Synthetic oligonucleotide
uaacacuugcucgcuuucg

SEQ ID NO: 2164145 - RNA, 19 nt, Artificial Sequence
  Description of Artificial Sequence: Synthetic oligonucleotide
ugcuaacacuuaaacgcac

SEQ ID NO: 2164146 - RNA, 19 nt, Artificial Sequence
  Description of Artificial Sequence: Synthetic oligonucleotide
ucuuccggccuuucuuagg

SEQ ID NO: 2164147 - RNA, 19 nt, Artificial Sequence
  Description of Artificial Sequence: Synthetic oligonucleotide
aaucgcggauuuccuccgg

SEQ ID NO: 2164148 - RNA, 19 nt, Artificial Sequence
  Description of Artificial Sequence: Synthetic oligonucleotide
ugacacgucugacuccggc

SEQ ID NO: 2164149 - RNA, 19 nt, Artificial Sequence
  Description of Artificial Sequence: Synthetic oligonucleotide
cuggaaccaagcguggugg

SEQ ID NO: 2164150 - RNA, 19 nt, Artificial Sequence
  Description of Artificial Sequence: Synthetic oligonucleotide
ucaccgacgccuccgaaaa

SEQ ID NO: 2164151 - RNA, 19 nt, Artificial Sequence
  Description of Artificial Sequence: Synthetic oligonucleotide
ggcaucugaguauugcucc

SEQ ID NO: 2164152 - RNA, 19 nt, Artificial Sequence
  Description of Artificial Sequence: Synthetic oligonucleotide
ucguuucuuggcccggucc

SEQ ID NO: 2164153 - RNA, 19 nt, Artificial Sequence
  Description of Artificial Sequence: Synthetic oligonucleotide
ggugggacguauuucuuag

SEQ ID NO: 2164154 - RNA, 19 nt, Artificial Sequence
  Description of Artificial Sequence: Synthetic oligonucleotide
ugcgagcucauaacacuug

SEQ ID NO: 2164155 - RNA, 19 nt, Artificial Sequence
  Description of Artificial Sequence: Synthetic oligonucleotide
aaguguuaucgaacuugac

SEQ ID NO: 2164156 - RNA, 19 nt, Artificial Sequence
  Description of Artificial Sequence: Synthetic oligonucleotide
cuuucucucguuugcuaac

SEQ ID NO: 2164157 - RNA, 19 nt, Artificial Sequence
  Description of Artificial Sequence: Synthetic oligonucleotide
gacuccggcaccuccggag

SEQ ID NO: 2164158 - RNA, 19 nt, Artificial Sequence
  Description of Artificial Sequence: Synthetic oligonucleotide
uuauuucaccgacgccucc

SEQ ID NO: 2164159 - RNA, 19 nt, Artificial Sequence
  Description of Artificial Sequence: Synthetic oligonucleotide
gaugucgcugaagugugug

SEQ ID NO: 2164160 - RNA, 19 nt, Artificial Sequence
  Description of Artificial Sequence: Synthetic oligonucleotide
acgaaugacagagcugcuc

SEQ ID NO: 2164161 - RNA, 19 nt, Artificial Sequence
  Description of Artificial Sequence: Synthetic oligonucleotide
ucagugcucguuucuuggc

SEQ ID NO: 2164162 - RNA, 19 nt, Artificial Sequence
  Description of Artificial Sequence: Synthetic oligonucleotide
cuaacacuuaaacgcacca

SEQ ID NO: 2164163 - RNA, 19 nt, Artificial Sequence
  Description of Artificial Sequence: Synthetic oligonucleotide
uaauccuaugcugauccuc

SEQ ID NO: 2164164 - RNA, 19 nt, Artificial Sequence
  Description of Artificial Sequence: Synthetic oligonucleotide
aagguacaugagcaacagu

SEQ ID NO: 2164165 - RNA, 19 nt, Artificial Sequence
  Description of Artificial Sequence: Synthetic oligonucleotide
gcagagauccucccgaggc

SEQ ID NO: 2164166 - RNA, 19 nt, Artificial Sequence
  Description of Artificial Sequence: Synthetic oligonucleotide
ucguuugcuaacacuuaaa

SEQ ID NO: 2164167 - RNA, 19 nt, Artificial Sequence
  Description of Artificial Sequence: Synthetic oligonucleotide
uauguaccagcuugaacuu

SEQ ID NO: 2164168 - RNA, 19 nt, Artificial Sequence
  Description of Artificial Sequence: Synthetic oligonucleotide
uccuaugcugauccuccug

SEQ ID NO: 2164169 - RNA, 19 nt, Artificial Sequence
  Description of Artificial Sequence: Synthetic oligonucleotide
cuugcuuaucauguugcug

SEQ ID NO: 2164170 - RNA, 19 nt, Artificial Sequence
  Description of Artificial Sequence: Synthetic oligonucleotide
uuaucgaacuugacacguc

SEQ ID NO: 2164171 - RNA, 19 nt, Artificial Sequence
  Description of Artificial Sequence: Synthetic oligonucleotide
uaaaaccguucggaguucc

SEQ ID NO: 2164172 - RNA, 19 nt, Artificial Sequence
  Description of Artificial Sequence: Synthetic oligonucleotide
uaguuaauccuaugcugau

SEQ ID NO: 2164173 - RNA, 19 nt, Artificial Sequence
  Description of Artificial Sequence: Synthetic oligonucleotide
aacgcaccaucaugcucuc

SEQ ID NO: 2164174 - RNA, 19 nt, Artificial Sequence
  Description of Artificial Sequence: Synthetic oligonucleotide
acuugcuuaucauguugcu

SEQ ID NO: 2164175 - RNA, 19 nt, Artificial Sequence
  Description of Artificial Sequence: Synthetic oligonucleotide
uuucucucguuugcuaaca

SEQ ID NO: 2164176 - RNA, 19 nt, Artificial Sequence
  Description of Artificial Sequence: Synthetic oligonucleotide
gaagcucagacccuucucu

SEQ ID NO: 2164177 - RNA, 19 nt, Artificial Sequence
  Description of Artificial Sequence: Synthetic oligonucleotide
gagggugccgggaaucgcg

SEQ ID NO: 2164178 - RNA, 19 nt, Artificial Sequence
  Description of Artificial Sequence: Synthetic oligonucleotide
aucaagaugagcagcuccu

SEQ ID NO: 2164179 - RNA, 19 nt, Artificial Sequence
  Description of Artificial Sequence: Synthetic oligonucleotide
gucgcugaagugugugagg

SEQ ID NO: 2164180 - RNA, 19 nt, Artificial Sequence
  Description of Artificial Sequence: Synthetic oligonucleotide
uccaagaagcucagacccu

SEQ ID NO: 2164181 - RNA, 19 nt, Artificial Sequence
  Description of Artificial Sequence: Synthetic oligonucleotide
cucacgaaugacagagcug

SEQ ID NO: 2164182 - RNA, 19 nt, Artificial Sequence
  Description of Artificial Sequence: Synthetic oligonucleotide
uaagcucacgaaugacaga

SEQ ID NO: 2164183 - RNA, 19 nt, Artificial Sequence
  Description of Artificial Sequence: Synthetic oligonucleotide
gaaccaagcguggugggac

SEQ ID NO: 2164184 - RNA, 19 nt, Artificial Sequence
  Description of Artificial Sequence: Synthetic oligonucleotide
uuaauccuaugcugauccu

SEQ ID NO: 2164185 - RNA, 19 nt, Artificial Sequence
  Description of Artificial Sequence: Synthetic oligonucleotide
aucgcggauuuccuccggg

SEQ ID NO: 2164186 - RNA, 19 nt, Artificial Sequence
  Description of Artificial Sequence: Synthetic oligonucleotide
uauugcuccuuaagcucac

SEQ ID NO: 2164187 - RNA, 19 nt, Artificial Sequence
  Description of Artificial Sequence: Synthetic oligonucleotide
gcucagauccauaagguac

SEQ ID NO: 2164188 - RNA, 19 nt, Artificial Sequence
  Description of Artificial Sequence: Synthetic oligonucleotide
ucgcggauuuccuccgggg

SEQ ID NO: 2164189 - RNA, 19 nt, Artificial Sequence
  Description of Artificial Sequence: Synthetic oligonucleotide
uucuuagauguuccuuuua

SEQ ID NO: 2164190 - RNA, 19 nt, Artificial Sequence
  Description of Artificial Sequence: Synthetic oligonucleotide
agcugcgagcucauaacac

SEQ ID NO: 2164191 - RNA, 19 nt, Artificial Sequence
  Description of Artificial Sequence: Synthetic oligonucleotide
cguauuucuuagauguucc

SEQ ID NO: 2164192 - RNA, 19 nt, Artificial Sequence
  Description of Artificial Sequence: Synthetic oligonucleotide
uucaccgacgccuccgaaa

SEQ ID NO: 2164193 - RNA, 19 nt, Artificial Sequence
  Description of Artificial Sequence: Synthetic oligonucleotide
ucugaguauugcuccuuaa

SEQ ID NO: 2164194 - RNA, 19 nt, Artificial Sequence
  Description of Artificial Sequence: Synthetic oligonucleotide
uuucuuggcccgguccagg

SEQ ID NO: 2164195 - RNA, 19 nt, Artificial Sequence
  Description of Artificial Sequence: Synthetic oligonucleotide
ugucagggcuuguacuugu

SEQ ID NO: 2164196 - RNA, 19 nt, Artificial Sequence
  Description of Artificial Sequence: Synthetic oligonucleotide
ugguccucaucaagaugag

SEQ ID NO: 2164197 - RNA, 19 nt, Artificial Sequence
  Description of Artificial Sequence: Synthetic oligonucleotide
cagugcucguuucuuggcc

SEQ ID NO: 2164198 - RNA, 19 nt, Artificial Sequence
  Description of Artificial Sequence: Synthetic oligonucleotide
gcuuaaaacgaaguggguc

SEQ ID NO: 2164199 - RNA, 19 nt, Artificial Sequence
  Description of Artificial Sequence: Synthetic oligonucleotide
accguucggaguuccacca

SEQ ID NO: 2164200 - RNA, 19 nt, Artificial Sequence
  Description of Artificial Sequence: Synthetic oligonucleotide
guauugcuccuuaagcuca

SEQ ID NO: 2164201 - RNA, 19 nt, Artificial Sequence
  Description of Artificial Sequence: Synthetic oligonucleotide
aaacgaagugggucauuuu

SEQ ID NO: 2164202 - RNA, 19 nt, Artificial Sequence
  Description of Artificial Sequence: Synthetic oligonucleotide
uaacacuuaaacgcaccau

SEQ ID NO: 2164203 - RNA, 19 nt, Artificial Sequence
  Description of Artificial Sequence: Synthetic oligonucleotide
uuaaaacgaagugggucau

SEQ ID NO: 2164204 - RNA, 19 nt, Artificial Sequence
  Description of Artificial Sequence: Synthetic oligonucleotide
ucgucauaaugcacuggaa

SEQ ID NO: 2164205 - RNA, 19 nt, Artificial Sequence
  Description of Artificial Sequence: Synthetic oligonucleotide
uccggccuuucuuagguau

SEQ ID NO: 2164206 - RNA, 19 nt, Artificial Sequence
  Description of Artificial Sequence: Synthetic oligonucleotide
uggcgagugacaugagggu

SEQ ID NO: 2164207 - RNA, 19 nt, Artificial Sequence
  Description of Artificial Sequence: Synthetic oligonucleotide
cuguuucgucauaaugcac

SEQ ID NO: 2164208 - RNA, 19 nt, Artificial Sequence
  Description of Artificial Sequence: Synthetic oligonucleotide
uccgaaaaccuuucuucuu

SEQ ID NO: 2164209 - RNA, 19 nt, Artificial Sequence
  Description of Artificial Sequence: Synthetic oligonucleotide
acuugcucgcuuucgccgu

SEQ ID NO: 2164210 - RNA, 19 nt, Artificial Sequence
  Description of Artificial Sequence: Synthetic oligonucleotide
ccuccgaaaaccuuucuuc

SEQ ID NO: 2164211 - RNA, 19 nt, Artificial Sequence
  Description of Artificial Sequence: Synthetic oligonucleotide
uucggaguuccaccagccu

SEQ ID NO: 2164212 - RNA, 19 nt, Artificial Sequence
  Description of Artificial Sequence: Synthetic oligonucleotide
cuaugcugauccuccugac

SEQ ID NO: 2164213 - RNA, 19 nt, Artificial Sequence
  Description of Artificial Sequence: Synthetic oligonucleotide
aucaugcucucuucauagu

SEQ ID NO: 2164214 - RNA, 19 nt, Artificial Sequence
  Description of Artificial Sequence: Synthetic oligonucleotide
uccuccugucaaagcacug

SEQ ID NO: 2164215 - RNA, 19 nt, Artificial Sequence
  Description of Artificial Sequence: Synthetic oligonucleotide
guuaucgaacuugacacgu

SEQ ID NO: 2164216 - RNA, 19 nt, Artificial Sequence
  Description of Artificial Sequence: Synthetic oligonucleotide
agaguauguaccagcuuga

SEQ ID NO: 2164217 - RNA, 19 nt, Artificial Sequence
  Description of Artificial Sequence: Synthetic oligonucleotide
augagggugccgggaaucg

SEQ ID NO: 2164218 - RNA, 19 nt, Artificial Sequence
  Description of Artificial Sequence: Synthetic oligonucleotide
uugucagggcuuguacuug

SEQ ID NO: 2164219 - RNA, 19 nt, Artificial Sequence
  Description of Artificial Sequence: Synthetic oligonucleotide
uuucacugaggcugcccgu

SEQ ID NO: 2164220 - RNA, 19 nt, Artificial Sequence
  Description of Artificial Sequence: Synthetic oligonucleotide
cagggcuuguacuugugca

SEQ ID NO: 2164221 - RNA, 19 nt, Artificial Sequence
  Description of Artificial Sequence: Synthetic oligonucleotide
auaggauucugguccucau

SEQ ID NO: 2164222 - RNA, 19 nt, Artificial Sequence
  Description of Artificial Sequence: Synthetic oligonucleotide
gugcucguuucuuggcccg

SEQ ID NO: 2164223 - RNA, 19 nt, Artificial Sequence
  Description of Artificial Sequence: Synthetic oligonucleotide
uggugggacguauuucuua

SEQ ID NO: 2164224 - RNA, 19 nt, Artificial Sequence
  Description of Artificial Sequence: Synthetic oligonucleotide
acgaagugggucauuuuca

SEQ ID NO: 2164225 - RNA, 19 nt, Artificial Sequence
  Description of Artificial Sequence: Synthetic oligonucleotide
auuucaccgacgccuccga

SEQ ID NO: 2164226 - RNA, 19 nt, Artificial Sequence
  Description of Artificial Sequence: Synthetic oligonucleotide
agcacugaugucgcugaag

SEQ ID NO: 2164227 - RNA, 19 nt, Artificial Sequence
  Description of Artificial Sequence: Synthetic oligonucleotide
acuugugcaguuacagcca

SEQ ID NO: 2164228 - RNA, 19 nt, Artificial Sequence
  Description of Artificial Sequence: Synthetic oligonucleotide
agacccuucucuguagagu

SEQ ID NO: 2164229 - RNA, 19 nt, Artificial Sequence
  Description of Artificial Sequence: Synthetic oligonucleotide
ucaaagcacugaugucgcu

SEQ ID NO: 2164230 - RNA, 19 nt, Artificial Sequence
  Description of Artificial Sequence: Synthetic oligonucleotide
gacucuggcgagugacaug

SEQ ID NO: 2164231 - RNA, 19 nt, Artificial Sequence
  Description of Artificial Sequence: Synthetic oligonucleotide
ugucccugcagagauccuc

SEQ ID NO: 2164232 - RNA, 19 nt, Artificial Sequence
  Description of Artificial Sequence: Synthetic oligonucleotide
cgucauaaugcacuggaac

SEQ ID NO: 2164233 - RNA, 19 nt, Artificial Sequence
  Description of Artificial Sequence: Synthetic oligonucleotide
uccuuucucucguuugcua

SEQ ID NO: 2164234 - RNA, 19 nt, Artificial Sequence
  Description of Artificial Sequence: Synthetic oligonucleotide
ucacugaggcugcccguca

SEQ ID NO: 2164235 - RNA, 19 nt, Artificial Sequence
  Description of Artificial Sequence: Synthetic oligonucleotide
cguuugcuaacacuuaaac

SEQ ID NO: 2164236 - RNA, 19 nt, Artificial Sequence
  Description of Artificial Sequence: Synthetic oligonucleotide
aauuaagcugcgagcucau

SEQ ID NO: 2164237 - RNA, 19 nt, Artificial Sequence
  Description of Artificial Sequence: Synthetic oligonucleotide
aaacugcagggugucccug

SEQ ID NO: 2164238 - RNA, 19 nt, Artificial Sequence
  Description of Artificial Sequence: Synthetic oligonucleotide
agcucacgaaugacagagc

SEQ ID NO: 2164239 - RNA, 19 nt, Artificial Sequence
  Description of Artificial Sequence: Synthetic oligonucleotide
guucggaguuccaccagcc

SEQ ID NO: 2164240 - RNA, 19 nt, Artificial Sequence
  Description of Artificial Sequence: Synthetic oligonucleotide
gcuaacacuuaaacgcacc

SEQ ID NO: 2164241 - RNA, 19 nt, Artificial Sequence
  Description of Artificial Sequence: Synthetic oligonucleotide
uugacacgucugacuccgg

SEQ ID NO: 2164242 - RNA, 19 nt, Artificial Sequence
  Description of Artificial Sequence: Synthetic oligonucleotide
uagguaucuucuuccgcuu

SEQ ID NO: 2164243 - RNA, 19 nt, Artificial Sequence
  Description of Artificial Sequence: Synthetic oligonucleotide
gcaacaguugguccuuuac

SEQ ID NO: 2164244 - RNA, 19 nt, Artificial Sequence
  Description of Artificial Sequence: Synthetic oligonucleotide
ucaucaagaugagcagcuc

SEQ ID NO: 2164245 - RNA, 19 nt, Artificial Sequence
  Description of Artificial Sequence: Synthetic oligonucleotide
cugcagagauccucccgag

SEQ ID NO: 2164246 - RNA, 19 nt, Artificial Sequence
  Description of Artificial Sequence: Synthetic oligonucleotide
ugagggaauuaagcugcga

SEQ ID NO: 2164247 - RNA, 19 nt, Artificial Sequence
  Description of Artificial Sequence: Synthetic oligonucleotide
aaaaccguucggaguucca

SEQ ID NO: 2164248 - RNA, 19 nt, Artificial Sequence
  Description of Artificial Sequence: Synthetic oligonucleotide
ccgaaaaccuuucuucuuc

SEQ ID NO: 2164249 - RNA, 19 nt, Artificial Sequence
  Description of Artificial Sequence: Synthetic oligonucleotide
gguccuuuacuuccaagaa

SEQ ID NO: 2164250 - RNA, 19 nt, Artificial Sequence
  Description of Artificial Sequence: Synthetic oligonucleotide
ucgccguccuuucucucgu

SEQ ID NO: 2164251 - RNA, 19 nt, Artificial Sequence
  Description of Artificial Sequence: Synthetic oligonucleotide
gaagugggucauuuucacu

SEQ ID NO: 2164252 - RNA, 19 nt, Artificial Sequence
  Description of Artificial Sequence: Synthetic oligonucleotide
gcgagcucauaacacuugc

SEQ ID NO: 2164253 - RNA, 19 nt, Artificial Sequence
  Description of Artificial Sequence: Synthetic oligonucleotide
ggagccgccaucuuugcaa

SEQ ID NO: 2164254 - RNA, 19 nt, Artificial Sequence
  Description of Artificial Sequence: Synthetic oligonucleotide
agcguggugggacguauuu

SEQ ID NO: 2164255 - RNA, 19 nt, Artificial Sequence
  Description of Artificial Sequence: Synthetic oligonucleotide
caagaagcucagacccuuc

SEQ ID NO: 2164256 - RNA, 19 nt, Artificial Sequence
  Description of Artificial Sequence: Synthetic oligonucleotide
aucgaacuugacacgucug

SEQ ID NO: 2164257 - RNA, 19 nt, Artificial Sequence
  Description of Artificial Sequence: Synthetic oligonucleotide
guauuucuuagauguuccu

SEQ ID NO: 2164258 - RNA, 19 nt, Artificial Sequence
  Description of Artificial Sequence: Synthetic oligonucleotide
gugagggaauuaagcugcg

SEQ ID NO: 2164259 - RNA, 19 nt, Artificial Sequence
  Description of Artificial Sequence: Synthetic oligonucleotide
ggaauuaagcugcgagcuc

SEQ ID NO: 2164260 - RNA, 19 nt, Artificial Sequence
  Description of Artificial Sequence: Synthetic oligonucleotide
ucccgaggcuuuguccagg

SEQ ID NO: 2164261 - RNA, 19 nt, Artificial Sequence
  Description of Artificial Sequence: Synthetic oligonucleotide
ugcucguuucuuggcccgg

SEQ ID NO: 2164262 - RNA, 19 nt, Artificial Sequence
  Description of Artificial Sequence: Synthetic oligonucleotide
ucgcguucugcuucuguuu

SEQ ID NO: 2164263 - RNA, 19 nt, Artificial Sequence
  Description of Artificial Sequence: Synthetic oligonucleotide
auccuaugcugauccuccu

SEQ ID NO: 2164264 - RNA, 19 nt, Artificial Sequence
  Description of Artificial Sequence: Synthetic oligonucleotide
cuccgaaaaccuuucuucu

SEQ ID NO: 2164265 - RNA, 19 nt, Artificial Sequence
  Description of Artificial Sequence: Synthetic oligonucleotide
uccaaacugcagggugucc

SEQ ID NO: 2164266 - RNA, 19 nt, Artificial Sequence
  Description of Artificial Sequence: Synthetic oligonucleotide
cauaaugcacuggaaccaa

SEQ ID NO: 2164267 - RNA, 19 nt, Artificial Sequence
  Description of Artificial Sequence: Synthetic oligonucleotide
cgaaaaccuuucuucuucc

SEQ ID NO: 2164268 - RNA, 19 nt, Artificial Sequence
  Description of Artificial Sequence: Synthetic oligonucleotide
gggaauuaagcugcgagcu

SEQ ID NO: 2164269 - RNA, 19 nt, Artificial Sequence
  Description of Artificial Sequence: Synthetic oligonucleotide
uuucaccgacgccuccgaa

SEQ ID NO: 2164270 - RNA, 19 nt, Artificial Sequence
  Description of Artificial Sequence: Synthetic oligonucleotide
uugugcaguuacagccauc

SEQ ID NO: 2164271 - RNA, 19 nt, Artificial Sequence
  Description of Artificial Sequence: Synthetic oligonucleotide
cacgucugacuccggcacc

SEQ ID NO: 2164272 - RNA, 19 nt, Artificial Sequence
  Description of Artificial Sequence: Synthetic oligonucleotide
ugagggugccgggaaucgc

SEQ ID NO: 2164273 - RNA, 19 nt, Artificial Sequence
  Description of Artificial Sequence: Synthetic oligonucleotide
aagcacugaugucgcugaa

SEQ ID NO: 2164274 - RNA, 19 nt, Artificial Sequence
  Description of Artificial Sequence: Synthetic oligonucleotide
cuaaaaccguucggaguuc

SEQ ID NO: 2164275 - RNA, 19 nt, Artificial Sequence
  Description of Artificial Sequence: Synthetic oligonucleotide
cgaggcuuuguccaggaug

SEQ ID NO: 2164276 - RNA, 19 nt, Artificial Sequence
  Description of Artificial Sequence: Synthetic oligonucleotide
ccucaucaagaugagcagc

SEQ ID NO: 2164277 - RNA, 19 nt, Artificial Sequence
  Description of Artificial Sequence: Synthetic oligonucleotide
agguaucuucuuccgcuuu

SEQ ID NO: 2164278 - RNA, 19 nt, Artificial Sequence
  Description of Artificial Sequence: Synthetic oligonucleotide
ugcucucuucauaguuaau

SEQ ID NO: 2164279 - RNA, 19 nt, Artificial Sequence
  Description of Artificial Sequence: Synthetic oligonucleotide
uaauaggauucugguccuc

SEQ ID NO: 2164280 - RNA, 19 nt, Artificial Sequence
  Description of Artificial Sequence: Synthetic oligonucleotide
uuuugacuguaagcauaau

SEQ ID NO: 2164281 - RNA, 19 nt, Artificial Sequence
  Description of Artificial Sequence: Synthetic oligonucleotide
acaugagggugccgggaau

SEQ ID NO: 2164282 - RNA, 19 nt, Artificial Sequence
  Description of Artificial Sequence: Synthetic oligonucleotide
agagcugcucagugcucgu

SEQ ID NO: 2164283 - RNA, 19 nt, Artificial Sequence
  Description of Artificial Sequence: Synthetic oligonucleotide
uugcucgcguucugcuucu

SEQ ID NO: 2164284 - RNA, 19 nt, Artificial Sequence
  Description of Artificial Sequence: Synthetic oligonucleotide
gcgagugacaugagggugc

SEQ ID NO: 2164285 - RNA, 19 nt, Artificial Sequence
  Description of Artificial Sequence: Synthetic oligonucleotide
cugaggcugcccgucacug

SEQ ID NO: 2164286 - RNA, 19 nt, Artificial Sequence
  Description of Artificial Sequence: Synthetic oligonucleotide
uaaaacgaagugggucauu

SEQ ID NO: 2164287 - RNA, 19 nt, Artificial Sequence
  Description of Artificial Sequence: Synthetic oligonucleotide
gaguauguaccagcuugaa

SEQ ID NO: 2164288 - RNA, 19 nt, Artificial Sequence
  Description of Artificial Sequence: Synthetic oligonucleotide
ccgggaaucgcggauuucc

SEQ ID NO: 2164289 - RNA, 19 nt, Artificial Sequence
  Description of Artificial Sequence: Synthetic oligonucleotide
ggcgagugacaugagggug

SEQ ID NO: 2164290 - RNA, 19 nt, Artificial Sequence
  Description of Artificial Sequence: Synthetic oligonucleotide
cggaguuccaccagccucc

SEQ ID NO: 2164291 - RNA, 19 nt, Artificial Sequence
  Description of Artificial Sequence: Synthetic oligonucleotide
ugcccgucacugcagucuu

SEQ ID NO: 2164292 - RNA, 19 nt, Artificial Sequence
  Description of Artificial Sequence: Synthetic oligonucleotide
uccugacucuggcgaguga

SEQ ID NO: 2164293 - RNA, 19 nt, Artificial Sequence
  Description of Artificial Sequence: Synthetic oligonucleotide
caccaucaugcucucuuca

SEQ ID NO: 2164294 - RNA, 19 nt, Artificial Sequence
  Description of Artificial Sequence: Synthetic oligonucleotide
ucgcuuucgccguccuuuc

SEQ ID NO: 2164295 - RNA, 19 nt, Artificial Sequence
  Description of Artificial Sequence: Synthetic oligonucleotide
agcaacaguugguccuuua

SEQ ID NO: 2164296 - RNA, 19 nt, Artificial Sequence
  Description of Artificial Sequence: Synthetic oligonucleotide
acgucugacuccggcaccu

SEQ ID NO: 2164297 - RNA, 19 nt, Artificial Sequence
  Description of Artificial Sequence: Synthetic oligonucleotide
uuucgccguccuuucucuc

SEQ ID NO: 2164298 - RNA, 19 nt, Artificial Sequence
  Description of Artificial Sequence: Synthetic oligonucleotide
ccuaugcugauccuccuga

SEQ ID NO: 2164299 - RNA, 19 nt, Artificial Sequence
  Description of Artificial Sequence: Synthetic oligonucleotide
uguugcugggauggggcuu

SEQ ID NO: 2164300 - RNA, 19 nt, Artificial Sequence
  Description of Artificial Sequence: Synthetic oligonucleotide
gcuuucgccguccuuucuc

SEQ ID NO: 2164301 - RNA, 19 nt, Artificial Sequence
  Description of Artificial Sequence: Synthetic oligonucleotide
acgccuccgaaaaccuuuc

SEQ ID NO: 2164302 - RNA, 19 nt, Artificial Sequence
  Description of Artificial Sequence: Synthetic oligonucleotide
uccggggcaucugaguauu

SEQ ID NO: 2164303 - RNA, 19 nt, Artificial Sequence
  Description of Artificial Sequence: Synthetic oligonucleotide
agggugccgggaaucgcgg

SEQ ID NO: 2164304 - RNA, 19 nt, Artificial Sequence
  Description of Artificial Sequence: Synthetic oligonucleotide
accuccggagccgccaucu

SEQ ID NO: 2164305 - RNA, 19 nt, Artificial Sequence
  Description of Artificial Sequence: Synthetic oligonucleotide
cgaaugacagagcugcuca

SEQ ID NO: 2164306 - RNA, 19 nt, Artificial Sequence
  Description of Artificial Sequence: Synthetic oligonucleotide
guugguccuuuacuuccaa

SEQ ID NO: 2164307 - RNA, 19 nt, Artificial Sequence
  Description of Artificial Sequence: Synthetic oligonucleotide
gagccgccaucuuugcaaa

SEQ ID NO: 2164308 - RNA, 19 nt, Artificial Sequence
  Description of Artificial Sequence: Synthetic oligonucleotide
gaagugugugagggaauua

SEQ ID NO: 2164309 - RNA, 19 nt, Artificial Sequence
  Description of Artificial Sequence: Synthetic oligonucleotide
agauccucccgaggcuuug

SEQ ID NO: 2164310 - RNA, 19 nt, Artificial Sequence
  Description of Artificial Sequence: Synthetic oligonucleotide
gggaaucgcggauuuccuc

SEQ ID NO: 2164311 - RNA, 19 nt, Artificial Sequence
  Description of Artificial Sequence: Synthetic oligonucleotide
gugggacguauuucuuaga

SEQ ID NO: 2164312 - RNA, 19 nt, Artificial Sequence
  Description of Artificial Sequence: Synthetic oligonucleotide
cuuucgccguccuuucucu

SEQ ID NO: 2164313 - RNA, 19 nt, Artificial Sequence
  Description of Artificial Sequence: Synthetic oligonucleotide
gcugcgagcucauaacacu

SEQ ID NO: 2164314 - RNA, 19 nt, Artificial Sequence
  Description of Artificial Sequence: Synthetic oligonucleotide
ggcucagauccauaaggua

SEQ ID NO: 2164315 - RNA, 19 nt, Artificial Sequence
  Description of Artificial Sequence: Synthetic oligonucleotide
ugguccuccucugcuucgu

SEQ ID NO: 2164316 - RNA, 19 nt, Artificial Sequence
  Description of Artificial Sequence: Synthetic oligonucleotide
ggucauuuucacugaggcu

SEQ ID NO: 2164317 - RNA, 19 nt, Artificial Sequence
  Description of Artificial Sequence: Synthetic oligonucleotide
gguccucaucaagaugagc

SEQ ID NO: 2164318 - RNA, 19 nt, Artificial Sequence
  Description of Artificial Sequence: Synthetic oligonucleotide
cguucggaguuccaccagc

SEQ ID NO: 2164319 - RNA, 19 nt, Artificial Sequence
  Description of Artificial Sequence: Synthetic oligonucleotide
gucagggcuuguacuugug

SEQ ID NO: 2164320 - RNA, 19 nt, Artificial Sequence
  Description of Artificial Sequence: Synthetic oligonucleotide
uuccggccuuucuuaggua

SEQ ID NO: 2164321 - RNA, 19 nt, Artificial Sequence
  Description of Artificial Sequence: Synthetic oligonucleotide
cucuggcgagugacaugag

SEQ ID NO: 2164322 - RNA, 19 nt, Artificial Sequence
  Description of Artificial Sequence: Synthetic oligonucleotide
auguaccagcuugaacuuu

SEQ ID NO: 2164323 - RNA, 19 nt, Artificial Sequence
  Description of Artificial Sequence: Synthetic oligonucleotide
cacuuaaacgcaccaucau

SEQ ID NO: 2164324 - RNA, 19 nt, Artificial Sequence
  Description of Artificial Sequence: Synthetic oligonucleotide
accaagcguggugggacgu

SEQ ID NO: 2164325 - RNA, 19 nt, Artificial Sequence
  Description of Artificial Sequence: Synthetic oligonucleotide
guagaguauguaccagcuu

SEQ ID NO: 2164326 - RNA, 19 nt, Artificial Sequence
  Description of Artificial Sequence: Synthetic oligonucleotide
caaaaguguuaucgaacuu

SEQ ID NO: 2164327 - RNA, 19 nt, Artificial Sequence
  Description of Artificial Sequence: Synthetic oligonucleotide
gcaccaucaugcucucuuc

SEQ ID NO: 2164328 - RNA, 19 nt, Artificial Sequence
  Description of Artificial Sequence: Synthetic oligonucleotide
gcacuggaaccaagcgugg

SEQ ID NO: 2164329 - RNA, 19 nt, Artificial Sequence
  Description of Artificial Sequence: Synthetic oligonucleotide
cuugugcaguuacagccau

SEQ ID NO: 2164330 - RNA, 19 nt, Artificial Sequence
  Description of Artificial Sequence: Synthetic oligonucleotide
ccauaagguacaugagcaa

SEQ ID NO: 2164331 - RNA, 19 nt, Artificial Sequence
  Description of Artificial Sequence: Synthetic oligonucleotide
ggaaccaagcgugguggga

SEQ ID NO: 2164332 - RNA, 19 nt, Artificial Sequence
  Description of Artificial Sequence: Synthetic oligonucleotide
gcucagacccuucucugua

SEQ ID NO: 2164333 - RNA, 19 nt, Artificial Sequence
  Description of Artificial Sequence: Synthetic oligonucleotide
ccaguuugucaauuugaua

SEQ ID NO: 2164334 - RNA, 19 nt, Artificial Sequence
  Description of Artificial Sequence: Synthetic oligonucleotide
cucgcuuucgccguccuuu

SEQ ID NO: 2164335 - RNA, 19 nt, Artificial Sequence
  Description of Artificial Sequence: Synthetic oligonucleotide
cagggugucccugcagaga

SEQ ID NO: 2164336 - RNA, 19 nt, Artificial Sequence
  Description of Artificial Sequence: Synthetic oligonucleotide
cugcgagcucauaacacuu

SEQ ID NO: 2164337 - RNA, 19 nt, Artificial Sequence
  Description of Artificial Sequence: Synthetic oligonucleotide
cucgcguucugcuucuguu

SEQ ID NO: 2164338 - RNA, 19 nt, Artificial Sequence
  Description of Artificial Sequence: Synthetic oligonucleotide
cagagauccucccgaggcu

SEQ ID NO: 2164339 - RNA, 19 nt, Artificial Sequence
  Description of Artificial Sequence: Synthetic oligonucleotide
caccgacgccuccgaaaac

SEQ ID NO: 2164340 - RNA, 19 nt, Artificial Sequence
  Description of Artificial Sequence: Synthetic oligonucleotide
gacguauuucuuagauguu

SEQ ID NO: 2164341 - RNA, 19 nt, Artificial Sequence
  Description of Artificial Sequence: Synthetic oligonucleotide
guccaagggacggaguuuu

SEQ ID NO: 2164342 - RNA, 19 nt, Artificial Sequence
  Description of Artificial Sequence: Synthetic oligonucleotide
aagcguggugggacguauu

SEQ ID NO: 2164343 - RNA, 19 nt, Artificial Sequence
  Description of Artificial Sequence: Synthetic oligonucleotide
ggauggggcuuaaaacgaa

SEQ ID NO: 2164344 - RNA, 19 nt, Artificial Sequence
  Description of Artificial Sequence: Synthetic oligonucleotide
cuugaccaguuugucaauu

SEQ ID NO: 2164345 - RNA, 19 nt, Artificial Sequence
  Description of Artificial Sequence: Synthetic oligonucleotide
ccggccuuucuuagguauc

SEQ ID NO: 2164346 - RNA, 19 nt, Artificial Sequence
  Description of Artificial Sequence: Synthetic oligonucleotide
aggcugcccgucacugcag

SEQ ID NO: 2164347 - RNA, 19 nt, Artificial Sequence
  Description of Artificial Sequence: Synthetic oligonucleotide
cugcccgucacugcagucu

SEQ ID NO: 2164348 - RNA, 19 nt, Artificial Sequence
  Description of Artificial Sequence: Synthetic oligonucleotide
ugcucgcguucugcuucug

SEQ ID NO: 2164349 - RNA, 19 nt, Artificial Sequence
  Description of Artificial Sequence: Synthetic oligonucleotide
cgagugacaugagggugcc

SEQ ID NO: 2164350 - RNA, 19 nt, Artificial Sequence
  Description of Artificial Sequence: Synthetic oligonucleotide
ccguucggaguuccaccag

SEQ ID NO: 2164351 - RNA, 19 nt, Artificial Sequence
  Description of Artificial Sequence: Synthetic oligonucleotide
ggcuuaaaacgaagugggu

SEQ ID NO: 2164352 - RNA, 19 nt, Artificial Sequence
  Description of Artificial Sequence: Synthetic oligonucleotide
ggugccgggaaucgcggau

SEQ ID NO: 2164353 - RNA, 19 nt, Artificial Sequence
  Description of Artificial Sequence: Synthetic oligonucleotide
cugcagccucagacugguc

SEQ ID NO: 2164354 - RNA, 19 nt, Artificial Sequence
  Description of Artificial Sequence: Synthetic oligonucleotide
gccuccgaaaaccuuucuu

SEQ ID NO: 2164355 - RNA, 19 nt, Artificial Sequence
  Description of Artificial Sequence: Synthetic oligonucleotide
gcguggugggacguauuuc

SEQ ID NO: 2164356 - RNA, 19 nt, Artificial Sequence
  Description of Artificial Sequence: Synthetic oligonucleotide
ccuccggggcaucugagua

SEQ ID NO: 2164357 - RNA, 19 nt, Artificial Sequence
  Description of Artificial Sequence: Synthetic oligonucleotide
cuccggggcaucugaguau

SEQ ID NO: 2164358 - RNA, 19 nt, Artificial Sequence
  Description of Artificial Sequence: Synthetic oligonucleotide
ccggagccgccaucuuugc

SEQ ID NO: 2164359 - RNA, 19 nt, Artificial Sequence
  Description of Artificial Sequence: Synthetic oligonucleotide
cccgucacugcagucuuga

SEQ ID NO: 2164360 - RNA, 19 nt, Artificial Sequence
  Description of Artificial Sequence: Synthetic oligonucleotide
cugcuucuguuucgucaua

SEQ ID NO: 2164361 - RNA, 19 nt, Artificial Sequence
  Description of Artificial Sequence: Synthetic oligonucleotide
caagcguggugggacguau

SEQ ID NO: 2164362 - RNA, 19 nt, Artificial Sequence
  Description of Artificial Sequence: Synthetic oligonucleotide
caucugaguauugcuccuu

SEQ ID NO: 2164363 - RNA, 19 nt, Artificial Sequence
  Description of Artificial Sequence: Synthetic oligonucleotide
ccgucacugcagucuugac

SEQ ID NO: 2164364 - RNA, 19 nt, Artificial Sequence
  Description of Artificial Sequence: Synthetic oligonucleotide
acgcaccaucaugcucucu

SEQ ID NO: 2164365 - RNA, 19 nt, Artificial Sequence
  Description of Artificial Sequence: Synthetic oligonucleotide
gggugccgggaaucgcgga

SEQ ID NO: 2164366 - RNA, 19 nt, Artificial Sequence
  Description of Artificial Sequence: Synthetic oligonucleotide
cuccggagccgccaucuuu

SEQ ID NO: 2164367 - RNA, 19 nt, Artificial Sequence
  Description of Artificial Sequence: Synthetic oligonucleotide
cccgaggcuuuguccagga

SEQ ID NO: 2164368 - RNA, 19 nt, Artificial Sequence
  Description of Artificial Sequence: Synthetic oligonucleotide
ggauuuccuccggggcauc

SEQ ID NO: 2164369 - RNA, 19 nt, Artificial Sequence
  Description of Artificial Sequence: Synthetic oligonucleotide
guggugggacguauuucuu

SEQ ID NO: 2164370 - RNA, 19 nt, Artificial Sequence
  Description of Artificial Sequence: Synthetic oligonucleotide
ccucagaguucaacuugcu

SEQ ID NO: 2164371 - RNA, 19 nt, Artificial Sequence
  Description of Artificial Sequence: Synthetic oligonucleotide
cgagcucauaacacuugcu

SEQ ID NO: 2164372 - RNA, 19 nt, Artificial Sequence
  Description of Artificial Sequence: Synthetic oligonucleotide
ccggggcaucugaguauug

SEQ ID NO: 2164373 - RNA, 19 nt, Artificial Sequence
  Description of Artificial Sequence: Synthetic oligonucleotide
ccugcagccucagacuggu

SEQ ID NO: 2164374 - RNA, 19 nt, Artificial Sequence
  Description of Artificial Sequence: Synthetic oligonucleotide
gguccaagggacggaguuu

SEQ ID NO: 2164375 - RNA, 19 nt, Artificial Sequence
  Description of Artificial Sequence: Synthetic oligonucleotide
ccaagaagcucagacccuu

SEQ ID NO: 2164376 - RNA, 19 nt, Artificial Sequence
  Description of Artificial Sequence: Synthetic oligonucleotide
gagcaacaguugguccuuu

SEQ ID NO: 2164377 - RNA, 19 nt, Artificial Sequence
  Description of Artificial Sequence: Synthetic oligonucleotide
ccggcaccuccggagccgc

SEQ ID NO: 2164378 - RNA, 19 nt, Artificial Sequence
  Description of Artificial Sequence: Synthetic oligonucleotide
ccgacgccuccgaaaaccu

SEQ ID NO: 2164379 - RNA, 19 nt, Artificial Sequence
  Description of Artificial Sequence: Synthetic oligonucleotide
gccguccuuucucucguuu

SEQ ID NO: 2164380 - RNA, 19 nt, Artificial Sequence
  Description of Artificial Sequence: Synthetic oligonucleotide
gcccgucacugcagucuug

SEQ ID NO: 2164381 - RNA, 19 nt, Artificial Sequence
  Description of Artificial Sequence: Synthetic oligonucleotide
gccgggaaucgcggauuuc

SEQ ID NO: 2164382 - RNA, 19 nt, Artificial Sequence
  Description of Artificial Sequence: Synthetic oligonucleotide
cggagccgccaucuuugca

SEQ ID NO: 2164383 - RNA, 19 nt, Artificial Sequence
  Description of Artificial Sequence: Synthetic oligonucleotide
ccaagcguggugggacgua

SEQ ID NO: 2164384 - RNA, 19 nt, Artificial Sequence
  Description of Artificial Sequence: Synthetic oligonucleotide
gcucgcuuucgccguccuu

SEQ ID NO: 2164385 - RNA, 19 nt, Artificial Sequence
  Description of Artificial Sequence: Synthetic oligonucleotide
cggauuuccuccggggcau

SEQ ID NO: 2164386 - RNA, 19 nt, Artificial Sequence
  Description of Artificial Sequence: Synthetic oligonucleotide
ggcccgguccaggcguuuu

SEQ ID NO: 2164387 - RNA, 19 nt, Artificial Sequence
  Description of Artificial Sequence: Synthetic oligonucleotide
ccgaggcuuuguccaggau

SEQ ID NO: 2164388 - RNA, 19 nt, Artificial Sequence
  Description of Artificial Sequence: Synthetic oligonucleotide
cgcuuucgccguccuuucu

SEQ ID NO: 2164389 - RNA, 19 nt, Artificial Sequence
  Description of Artificial Sequence: Synthetic oligonucleotide
cgacgccuccgaaaaccuu

SEQ ID NO: 2164390 - RNA, 19 nt, Artificial Sequence
  Description of Artificial Sequence: Synthetic oligonucleotide
cgccguccuuucucucguu

SEQ ID NO: 2164391 - RNA, 19 nt, Artificial Sequence
  Description of Artificial Sequence: Synthetic oligonucleotide
gauauagugguccagcagc

SEQ ID NO: 2164392 - RNA, 19 nt, Artificial Sequence
  Description of Artificial Sequence: Synthetic oligonucleotide
aaaugaaugagaacacggc

SEQ ID NO: 2164393 - RNA, 19 nt, Artificial Sequence
  Description of Artificial Sequence: Synthetic oligonucleotide
acaggaaggacucacauug

SEQ ID NO: 2164394 - RNA, 19 nt, Artificial Sequence
  Description of Artificial Sequence: Synthetic oligonucleotide
gaaaugaaugagaacacgg

SEQ ID NO: 2164395 - RNA, 19 nt, Artificial Sequence
  Description of Artificial Sequence: Synthetic oligonucleotide
aaugaaugagaacacggca

SEQ ID NO: 2164396 - RNA, 19 nt, Artificial Sequence
  Description of Artificial Sequence: Synthetic oligonucleotide
uacacgugcucaaugaagg

SEQ ID NO: 2164397 - RNA, 19 nt, Artificial Sequence
  Description of Artificial Sequence: Synthetic oligonucleotide
gaucaggacgacuuuaagg

SEQ ID NO: 2164398 - RNA, 19 nt, Artificial Sequence
  Description of Artificial Sequence: Synthetic oligonucleotide
ugacguacgauccaggugu

SEQ ID NO: 2164399 - RNA, 19 nt, Artificial Sequence
  Description of Artificial Sequence: Synthetic oligonucleotide
ugaaaucugucucugggcc

SEQ ID NO: 2164400 - RNA, 19 nt, Artificial Sequence
  Description of Artificial Sequence: Synthetic oligonucleotide
gaagcugugaagcaggcug

SEQ ID NO: 2164401 - RNA, 19 nt, Artificial Sequence
  Description of Artificial Sequence: Synthetic oligonucleotide
ucgagaaagaccuugcgug

SEQ ID NO: 2164402 - RNA, 19 nt, Artificial Sequence
  Description of Artificial Sequence: Synthetic oligonucleotide
aucgaagaagcugugaagc

SEQ ID NO: 2164403 - RNA, 19 nt, Artificial Sequence
  Description of Artificial Sequence: Synthetic oligonucleotide
agagugucgagguacgagc

SEQ ID NO: 2164404 - RNA, 19 nt, Artificial Sequence
  Description of Artificial Sequence: Synthetic oligonucleotide
cuugaagcugaucaggacg

SEQ ID NO: 2164405 - RNA, 19 nt, Artificial Sequence
  Description of Artificial Sequence: Synthetic oligonucleotide
aucaggacgacuuuaaggu

SEQ ID NO: 2164406 - RNA, 19 nt, Artificial Sequence
  Description of Artificial Sequence: Synthetic oligonucleotide
guugaaaucugucucuggg

SEQ ID NO: 2164407 - RNA, 19 nt, Artificial Sequence
  Description of Artificial Sequence: Synthetic oligonucleotide
uguaguguucauacugugg

SEQ ID NO: 2164408 - RNA, 19 nt, Artificial Sequence
  Description of Artificial Sequence: Synthetic oligonucleotide
ucagcguagaguuucuggg

SEQ ID NO: 2164409 - RNA, 19 nt, Artificial Sequence
  Description of Artificial Sequence: Synthetic oligonucleotide
uuaagguugaaaucugucu

SEQ ID NO: 2164410 - RNA, 19 nt, Artificial Sequence
  Description of Artificial Sequence: Synthetic oligonucleotide
auaugaaggggccccaggc

SEQ ID NO: 2164411 - RNA, 19 nt, Artificial Sequence
  Description of Artificial Sequence: Synthetic oligonucleotide
uuuggaauaugaaggggcc

SEQ ID NO: 2164412 - RNA, 19 nt, Artificial Sequence
  Description of Artificial Sequence: Synthetic oligonucleotide
aauaugaaggggccccagg

SEQ ID NO: 2164413 - RNA, 19 nt, Artificial Sequence
  Description of Artificial Sequence: Synthetic oligonucleotide
acgacuuuaagguugaaau

SEQ ID NO: 2164414 - RNA, 19 nt, Artificial Sequence
  Description of Artificial Sequence: Synthetic oligonucleotide
guuugucuggcacugaucc

SEQ ID NO: 2164415 - RNA, 19 nt, Artificial Sequence
  Description of Artificial Sequence: Synthetic oligonucleotide
aaccugaccagccccuucc

SEQ ID NO: 2164416 - RNA, 19 nt, Artificial Sequence
  Description of Artificial Sequence: Synthetic oligonucleotide
cuguuugauaugcagaggc

SEQ ID NO: 2164417 - RNA, 19 nt, Artificial Sequence
  Description of Artificial Sequence: Synthetic oligonucleotide
auagugguccagcagcacc

SEQ ID NO: 2164418 - RNA, 19 nt, Artificial Sequence
  Description of Artificial Sequence: Synthetic oligonucleotide
gaaggacucacauuggcug

SEQ ID NO: 2164419 - RNA, 19 nt, Artificial Sequence
  Description of Artificial Sequence: Synthetic oligonucleotide
acugauccaugccucaggc

SEQ ID NO: 2164420 - RNA, 19 nt, Artificial Sequence
  Description of Artificial Sequence: Synthetic oligonucleotide
uuugauaugcagaggcuga

SEQ ID NO: 2164421 - RNA, 19 nt, Artificial Sequence
  Description of Artificial Sequence: Synthetic oligonucleotide
aaggacucacauuggcugg

SEQ ID NO: 2164422 - RNA, 19 nt, Artificial Sequence
  Description of Artificial Sequence: Synthetic oligonucleotide
ugggagaugucauacacgu

SEQ ID NO: 2164423 - RNA, 19 nt, Artificial Sequence
  Description of Artificial Sequence: Synthetic oligonucleotide
gguacgagcauccucagag

SEQ ID NO: 2164424 - RNA, 19 nt, Artificial Sequence
  Description of Artificial Sequence: Synthetic oligonucleotide
aggaaggacucacauuggc

SEQ ID NO: 2164425 - RNA, 19 nt, Artificial Sequence
  Description of Artificial Sequence: Synthetic oligonucleotide
cuuguugcccaccucauag

SEQ ID NO: 2164426 - RNA, 19 nt, Artificial Sequence
  Description of Artificial Sequence: Synthetic oligonucleotide
uccucauugagacacugcu

SEQ ID NO: 2164427 - RNA, 19 nt, Artificial Sequence
  Description of Artificial Sequence: Synthetic oligonucleotide
aagguugaaaucugucucu

SEQ ID NO: 2164428 - RNA, 19 nt, Artificial Sequence
  Description of Artificial Sequence: Synthetic oligonucleotide
caugccacggccaaggaac

SEQ ID NO: 2164429 - RNA, 19 nt, Artificial Sequence
  Description of Artificial Sequence: Synthetic oligonucleotide
uaggcaucacugcagagug

SEQ ID NO: 2164430 - RNA, 19 nt, Artificial Sequence
  Description of Artificial Sequence: Synthetic oligonucleotide
cuagggaggucuuagcuag

SEQ ID NO: 2164431 - RNA, 19 nt, Artificial Sequence
  Description of Artificial Sequence: Synthetic oligonucleotide
aaagaccuugcgugugggc

SEQ ID NO: 2164432 - RNA, 19 nt, Artificial Sequence
  Description of Artificial Sequence: Synthetic oligonucleotide
ucuucaguacucaugccac

SEQ ID NO: 2164433 - RNA, 19 nt, Artificial Sequence
  Description of Artificial Sequence: Synthetic oligonucleotide
ucugggagaugucauacac

SEQ ID NO: 2164434 - RNA, 19 nt, Artificial Sequence
  Description of Artificial Sequence: Synthetic oligonucleotide
uucagaaaccugaccagcc

SEQ ID NO: 2164435 - RNA, 19 nt, Artificial Sequence
  Description of Artificial Sequence: Synthetic oligonucleotide
ugauaggcagccagugugg

SEQ ID NO: 2164436 - RNA, 19 nt, Artificial Sequence
  Description of Artificial Sequence: Synthetic oligonucleotide
aguuucuauuuccaaggag

SEQ ID NO: 2164437 - RNA, 19 nt, Artificial Sequence
  Description of Artificial Sequence: Synthetic oligonucleotide
ucauacacgugcucaauga

SEQ ID NO: 2164438 - RNA, 19 nt, Artificial Sequence
  Description of Artificial Sequence: Synthetic oligonucleotide
aucagcguagaguuucugg

SEQ ID NO: 2164439 - RNA, 19 nt, Artificial Sequence
  Description of Artificial Sequence: Synthetic oligonucleotide
uaggguaucgggaacggga

SEQ ID NO: 2164440 - RNA, 19 nt, Artificial Sequence
  Description of Artificial Sequence: Synthetic oligonucleotide
uuauaggcaucacugcaga

SEQ ID NO: 2164441 - RNA, 19 nt, Artificial Sequence
  Description of Artificial Sequence: Synthetic oligonucleotide
ugcucaaugaagggcagcg

SEQ ID NO: 2164442 - RNA, 19 nt, Artificial Sequence
  Description of Artificial Sequence: Synthetic oligonucleotide
ugagacacugcuugaagcu

SEQ ID NO: 2164443 - RNA, 19 nt, Artificial Sequence
  Description of Artificial Sequence: Synthetic oligonucleotide
uugaaaucugucucugggc

SEQ ID NO: 2164444 - RNA, 19 nt, Artificial Sequence
  Description of Artificial Sequence: Synthetic oligonucleotide
gagaacacggcacccaggc

SEQ ID NO: 2164445 - RNA, 19 nt, Artificial Sequence
  Description of Artificial Sequence: Synthetic oligonucleotide
uggaaaugaaugagaacac

SEQ ID NO: 2164446 - RNA, 19 nt, Artificial Sequence
  Description of Artificial Sequence: Synthetic oligonucleotide
auaucgaagaagcugugaa

SEQ ID NO: 2164447 - RNA, 19 nt, Artificial Sequence
  Description of Artificial Sequence: Synthetic oligonucleotide
uacgauccaggugugauag

SEQ ID NO: 2164448 - RNA, 19 nt, Artificial Sequence
  Description of Artificial Sequence: Synthetic oligonucleotide
ugugaagcaggcugcacug

SEQ ID NO: 2164449 - RNA, 19 nt, Artificial Sequence
  Description of Artificial Sequence: Synthetic oligonucleotide
gugauaggcagccagugug

SEQ ID NO: 2164450 - RNA, 19 nt, Artificial Sequence
  Description of Artificial Sequence: Synthetic oligonucleotide
ucagaaaccugaccagccc

SEQ ID NO: 2164451 - RNA, 19 nt, Artificial Sequence
  Description of Artificial Sequence: Synthetic oligonucleotide
uccuuggaaaugaaugaga

SEQ ID NO: 2164452 - RNA, 19 nt, Artificial Sequence
  Description of Artificial Sequence: Synthetic oligonucleotide
agaaagaccuugcgugugg

SEQ ID NO: 2164453 - RNA, 19 nt, Artificial Sequence
  Description of Artificial Sequence: Synthetic oligonucleotide
acaagggccuguuugauau

SEQ ID NO: 2164454 - RNA, 19 nt, Artificial Sequence
  Description of Artificial Sequence: Synthetic oligonucleotide
uguugcccaccucauaggc

SEQ ID NO: 2164455 - RNA, 19 nt, Artificial Sequence
  Description of Artificial Sequence: Synthetic oligonucleotide
gcuuuuggaauaugaaggg

SEQ ID NO: 2164456 - RNA, 19 nt, Artificial Sequence
  Description of Artificial Sequence: Synthetic oligonucleotide
uggaauaugaaggggcccc

SEQ ID NO: 2164457 - RNA, 19 nt, Artificial Sequence
  Description of Artificial Sequence: Synthetic oligonucleotide
auacugugggcuuuuccuc

SEQ ID NO: 2164458 - RNA, 19 nt, Artificial Sequence
  Description of Artificial Sequence: Synthetic oligonucleotide
agcuagcaguuucagacag

SEQ ID NO: 2164459 - RNA, 19 nt, Artificial Sequence
  Description of Artificial Sequence: Synthetic oligonucleotide
auuauaggcaucacugcag

SEQ ID NO: 2164460 - RNA, 19 nt, Artificial Sequence
  Description of Artificial Sequence: Synthetic oligonucleotide
uccagcuguugauauagug

SEQ ID NO: 2164461 - RNA, 19 nt, Artificial Sequence
  Description of Artificial Sequence: Synthetic oligonucleotide
cauguugacugcuagggca

SEQ ID NO: 2164462 - RNA, 19 nt, Artificial Sequence
  Description of Artificial Sequence: Synthetic oligonucleotide
ggcauuauaggcaucacug

SEQ ID NO: 2164463 - RNA, 19 nt, Artificial Sequence
  Description of Artificial Sequence: Synthetic oligonucleotide
auccaggugugauaggcag

SEQ ID NO: 2164464 - RNA, 19 nt, Artificial Sequence
  Description of Artificial Sequence: Synthetic oligonucleotide
gcuaguguaguguucauac

SEQ ID NO: 2164465 - RNA, 19 nt, Artificial Sequence
  Description of Artificial Sequence: Synthetic oligonucleotide
gaugucauacacgugcuca

SEQ ID NO: 2164466 - RNA, 19 nt, Artificial Sequence
  Description of Artificial Sequence: Synthetic oligonucleotide
agcacaguccggcagccgg

SEQ ID NO: 2164467 - RNA, 19 nt, Artificial Sequence
  Description of Artificial Sequence: Synthetic oligonucleotide
uugacguacgauccaggug

SEQ ID NO: 2164468 - RNA, 19 nt, Artificial Sequence
  Description of Artificial Sequence: Synthetic oligonucleotide
gauaugcagaggcugacaa

SEQ ID NO: 2164469 - RNA, 19 nt, Artificial Sequence
  Description of Artificial Sequence: Synthetic oligonucleotide
ugcagagugucgagguacg

SEQ ID NO: 2164470 - RNA, 19 nt, Artificial Sequence
  Description of Artificial Sequence: Synthetic oligonucleotide
ugaucaggacgacuuuaag

SEQ ID NO: 2164471 - RNA, 19 nt, Artificial Sequence
  Description of Artificial Sequence: Synthetic oligonucleotide
guuugauaugcagaggcug

SEQ ID NO: 2164472 - RNA, 19 nt, Artificial Sequence
  Description of Artificial Sequence: Synthetic oligonucleotide
uacgagcauccucagagcu

SEQ ID NO: 2164473 - RNA, 19 nt, Artificial Sequence
  Description of Artificial Sequence: Synthetic oligonucleotide
guagccagcgcagagcgcg

SEQ ID NO: 2164474 - RNA, 19 nt, Artificial Sequence
  Description of Artificial Sequence: Synthetic oligonucleotide
accgcuugacguacgaucc

SEQ ID NO: 2164475 - RNA, 19 nt, Artificial Sequence
  Description of Artificial Sequence: Synthetic oligonucleotide
uaugaaggggccccaggca

SEQ ID NO: 2164476 - RNA, 19 nt, Artificial Sequence
  Description of Artificial Sequence: Synthetic oligonucleotide
caaggaaccucaucuuacc

SEQ ID NO: 2164477 - RNA, 19 nt, Artificial Sequence
  Description of Artificial Sequence: Synthetic oligonucleotide
aaugagaacacggcaccca

SEQ ID NO: 2164478 - RNA, 19 nt, Artificial Sequence
  Description of Artificial Sequence: Synthetic oligonucleotide
uccuagggaggucuuagcu

SEQ ID NO: 2164479 - RNA, 19 nt, Artificial Sequence
  Description of Artificial Sequence: Synthetic oligonucleotide
cuuugagaccacauccuug

SEQ ID NO: 2164480 - RNA, 19 nt, Artificial Sequence
  Description of Artificial Sequence: Synthetic oligonucleotide
aagaccuugcgugugggca

SEQ ID NO: 2164481 - RNA, 19 nt, Artificial Sequence
  Description of Artificial Sequence: Synthetic oligonucleotide
cuguagccagcgcagagcg

SEQ ID NO: 2164482 - RNA, 19 nt, Artificial Sequence
  Description of Artificial Sequence: Synthetic oligonucleotide
aggugugauaggcagccag

SEQ ID NO: 2164483 - RNA, 19 nt, Artificial Sequence
  Description of Artificial Sequence: Synthetic oligonucleotide
ugucgagguacgagcaucc

SEQ ID NO: 2164484 - RNA, 19 nt, Artificial Sequence
  Description of Artificial Sequence: Synthetic oligonucleotide
uuuccuagggaggucuuag

SEQ ID NO: 2164485 - RNA, 19 nt, Artificial Sequence
  Description of Artificial Sequence: Synthetic oligonucleotide
ugagaccacauccuuggaa

SEQ ID NO: 2164486 - RNA, 19 nt, Artificial Sequence
  Description of Artificial Sequence: Synthetic oligonucleotide
aaaccugaccagccccuuc

SEQ ID NO: 2164487 - RNA, 19 nt, Artificial Sequence
  Description of Artificial Sequence: Synthetic oligonucleotide
auuggcugggcauguugac

SEQ ID NO: 2164488 - RNA, 19 nt, Artificial Sequence
  Description of Artificial Sequence: Synthetic oligonucleotide
aguguggcauuauaggcau

SEQ ID NO: 2164489 - RNA, 19 nt, Artificial Sequence
  Description of Artificial Sequence: Synthetic oligonucleotide
ugaagggugaugcuaccau

SEQ ID NO: 2164490 - RNA, 19 nt, Artificial Sequence
  Description of Artificial Sequence: Synthetic oligonucleotide
uggcauuauaggcaucacu

SEQ ID NO: 2164491 - RNA, 19 nt, Artificial Sequence
  Description of Artificial Sequence: Synthetic oligonucleotide
acugcaagcuaguguagug

SEQ ID NO: 2164492 - RNA, 19 nt, Artificial Sequence
  Description of Artificial Sequence: Synthetic oligonucleotide
aggaaccucaucuuaccca

SEQ ID NO: 2164493 - RNA, 19 nt, Artificial Sequence
  Description of Artificial Sequence: Synthetic oligonucleotide
gucuagguccaccagcuug

SEQ ID NO: 2164494 - RNA, 19 nt, Artificial Sequence
  Description of Artificial Sequence: Synthetic oligonucleotide
uuucugggagaugucauac

SEQ ID NO: 2164495 - RNA, 19 nt, Artificial Sequence
  Description of Artificial Sequence: Synthetic oligonucleotide
ugugauaggcagccagugu

SEQ ID NO: 2164496 - RNA, 19 nt, Artificial Sequence
  Description of Artificial Sequence: Synthetic oligonucleotide
cugggagaugucauacacg

SEQ ID NO: 2164497 - RNA, 19 nt, Artificial Sequence
  Description of Artificial Sequence: Synthetic oligonucleotide
ggaaaugaaugagaacacg

SEQ ID NO: 2164498 - RNA, 19 nt, Artificial Sequence
  Description of Artificial Sequence: Synthetic oligonucleotide
uauaggcaucacugcagag

SEQ ID NO: 2164499 - RNA, 19 nt, Artificial Sequence
  Description of Artificial Sequence: Synthetic oligonucleotide
ugcacugaccagagcaggc

SEQ ID NO: 2164500 - RNA, 19 nt, Artificial Sequence
  Description of Artificial Sequence: Synthetic oligonucleotide
auaugcagaggcugacaag

SEQ ID NO: 2164501 - RNA, 19 nt, Artificial Sequence
  Description of Artificial Sequence: Synthetic oligonucleotide
auccuuggaaaugaaugag

SEQ ID NO: 2164502 - RNA, 19 nt, Artificial Sequence
  Description of Artificial Sequence: Synthetic oligonucleotide
auggacugcaagcuagugu

SEQ ID NO: 2164503 - RNA, 19 nt, Artificial Sequence
  Description of Artificial Sequence: Synthetic oligonucleotide
auaggcaucacugcagagu

SEQ ID NO: 2164504 - RNA, 19 nt, Artificial Sequence
  Description of Artificial Sequence: Synthetic oligonucleotide
gccaguguggcauuauagg

SEQ ID NO: 2164505 - RNA, 19 nt, Artificial Sequence
  Description of Artificial Sequence: Synthetic oligonucleotide
uaguguucauacugugggc

SEQ ID NO: 2164506 - RNA, 19 nt, Artificial Sequence
  Description of Artificial Sequence: Synthetic oligonucleotide
cagaaaccugaccagcccc

SEQ ID NO: 2164507 - RNA, 19 nt, Artificial Sequence
  Description of Artificial Sequence: Synthetic oligonucleotide
acacgugcucaaugaaggg

SEQ ID NO: 2164508 - RNA, 19 nt, Artificial Sequence
  Description of Artificial Sequence: Synthetic oligonucleotide
cuucaguacucaugccacg

SEQ ID NO: 2164509 - RNA, 19 nt, Artificial Sequence
  Description of Artificial Sequence: Synthetic oligonucleotide
gaccgcuugacguacgauc

SEQ ID NO: 2164510 - RNA, 19 nt, Artificial Sequence
  Description of Artificial Sequence: Synthetic oligonucleotide
auacacgugcucaaugaag

SEQ ID NO: 2164511 - RNA, 19 nt, Artificial Sequence
  Description of Artificial Sequence: Synthetic oligonucleotide
aagggcaaggaagucuuca

SEQ ID NO: 2164512 - RNA, 19 nt, Artificial Sequence
  Description of Artificial Sequence: Synthetic oligonucleotide
gucauacacgugcucaaug

SEQ ID NO: 2164513 - RNA, 19 nt, Artificial Sequence
  Description of Artificial Sequence: Synthetic oligonucleotide
gaaagaccuugcguguggg

SEQ ID NO: 2164514 - RNA, 19 nt, Artificial Sequence
  Description of Artificial Sequence: Synthetic oligonucleotide
gguaucgggaacgggagcg

SEQ ID NO: 2164515 - RNA, 19 nt, Artificial Sequence
  Description of Artificial Sequence: Synthetic oligonucleotide
caguacucaugccacggcc

SEQ ID NO: 2164516 - RNA, 19 nt, Artificial Sequence
  Description of Artificial Sequence: Synthetic oligonucleotide
acauuggcugggcauguug

SEQ ID NO: 2164517 - RNA, 19 nt, Artificial Sequence
  Description of Artificial Sequence: Synthetic oligonucleotide
aucacugcagagugucgag

SEQ ID NO: 2164518 - RNA, 19 nt, Artificial Sequence
  Description of Artificial Sequence: Synthetic oligonucleotide
aaaucugucucugggccau

SEQ ID NO: 2164519 - RNA, 19 nt, Artificial Sequence
  Description of Artificial Sequence: Synthetic oligonucleotide
aguuucagacaguuucuau

SEQ ID NO: 2164520 - RNA, 19 nt, Artificial Sequence
  Description of Artificial Sequence: Synthetic oligonucleotide
ugaccagccccuuccagcu

SEQ ID NO: 2164521 - RNA, 19 nt, Artificial Sequence
  Description of Artificial Sequence: Synthetic oligonucleotide
uuggaauaugaaggggccc

SEQ ID NO: 2164522 - RNA, 19 nt, Artificial Sequence
  Description of Artificial Sequence: Synthetic oligonucleotide
acuuuaagguugaaaucug

SEQ ID NO: 2164523 - RNA, 19 nt, Artificial Sequence
  Description of Artificial Sequence: Synthetic oligonucleotide
accauggacugcaagcuag

SEQ ID NO: 2164524 - RNA, 19 nt, Artificial Sequence
  Description of Artificial Sequence: Synthetic oligonucleotide
uguuugucuggcacugauc

SEQ ID NO: 2164525 - RNA, 19 nt, Artificial Sequence
  Description of Artificial Sequence: Synthetic oligonucleotide
ucacugcagagugucgagg

SEQ ID NO: 2164526 - RNA, 19 nt, Artificial Sequence
  Description of Artificial Sequence: Synthetic oligonucleotide
ccaguguggcauuauaggc

SEQ ID NO: 2164527 - RNA, 19 nt, Artificial Sequence
  Description of Artificial Sequence: Synthetic oligonucleotide
uagcuagcaguuucagaca

SEQ ID NO: 2164528 - RNA, 19 nt, Artificial Sequence
  Description of Artificial Sequence: Synthetic oligonucleotide
aagggugaugcuaccauau

SEQ ID NO: 2164529 - RNA, 19 nt, Artificial Sequence
  Description of Artificial Sequence: Synthetic oligonucleotide
uuaggguaucgggaacggg

SEQ ID NO: 2164530 - RNA, 19 nt, Artificial Sequence
  Description of Artificial Sequence: Synthetic oligonucleotide
aucuuacccaaggacagcu

SEQ ID NO: 2164531 - RNA, 19 nt, Artificial Sequence
  Description of Artificial Sequence: Synthetic oligonucleotide
gagugaucagcguagaguu

SEQ ID NO: 2164532 - RNA, 19 nt, Artificial Sequence
  Description of Artificial Sequence: Synthetic oligonucleotide
guuaggguaucgggaacgg

SEQ ID NO: 2164533 - RNA, 19 nt, Artificial Sequence
  Description of Artificial Sequence: Synthetic oligonucleotide
uuugucuggcacugaucca

SEQ ID NO: 2164534 - RNA, 19 nt, Artificial Sequence
  Description of Artificial Sequence: Synthetic oligonucleotide
gugaucagcguagaguuuc

SEQ ID NO: 2164535 - RNA, 19 nt, Artificial Sequence
  Description of Artificial Sequence: Synthetic oligonucleotide
cacgugcucaaugaagggc

SEQ ID NO: 2164536 - RNA, 19 nt, Artificial Sequence
  Description of Artificial Sequence: Synthetic oligonucleotide
acucacauuggcugggcau

SEQ ID NO: 2164537 - RNA, 19 nt, Artificial Sequence
  Description of Artificial Sequence: Synthetic oligonucleotide
cacugauccaugccucagg

SEQ ID NO: 2164538 - RNA, 19 nt, Artificial Sequence
  Description of Artificial Sequence: Synthetic oligonucleotide
gagaaagaccuugcgugug

SEQ ID NO: 2164539 - RNA, 19 nt, Artificial Sequence
  Description of Artificial Sequence: Synthetic oligonucleotide
uucugggagaugucauaca

SEQ ID NO: 2164540 - RNA, 19 nt, Artificial Sequence
  Description of Artificial Sequence: Synthetic oligonucleotide
ucgagguacgagcauccuc

SEQ ID NO: 2164541 - RNA, 19 nt, Artificial Sequence
  Description of Artificial Sequence: Synthetic oligonucleotide
cauaggccaccauggacug

SEQ ID NO: 2164542 - RNA, 19 nt, Artificial Sequence
  Description of Artificial Sequence: Synthetic oligonucleotide
cagacaguuucuauuucca

SEQ ID NO: 2164543 - RNA, 19 nt, Artificial Sequence
  Description of Artificial Sequence: Synthetic oligonucleotide
uacccaaggacagcuuuug

SEQ ID NO: 2164544 - RNA, 19 nt, Artificial Sequence
  Description of Artificial Sequence: Synthetic oligonucleotide
gaauaugaaggggccccag

SEQ ID NO: 2164545 - RNA, 19 nt, Artificial Sequence
  Description of Artificial Sequence: Synthetic oligonucleotide
acggccaaggaaccucauc

SEQ ID NO: 2164546 - RNA, 19 nt, Artificial Sequence
  Description of Artificial Sequence: Synthetic oligonucleotide
ugaaggggccccaggcaug

SEQ ID NO: 2164547 - RNA, 19 nt, Artificial Sequence
  Description of Artificial Sequence: Synthetic oligonucleotide
ugaucagcguagaguuucu

SEQ ID NO: 2164548 - RNA, 19 nt, Artificial Sequence
  Description of Artificial Sequence: Synthetic oligonucleotide
uuacccaaggacagcuuuu

SEQ ID NO: 2164549 - RNA, 19 nt, Artificial Sequence
  Description of Artificial Sequence: Synthetic oligonucleotide
cucacauuggcugggcaug

SEQ ID NO: 2164550 - RNA, 19 nt, Artificial Sequence
  Description of Artificial Sequence: Synthetic oligonucleotide
uugcgugugggcagggcac

SEQ ID NO: 2164551 - RNA, 19 nt, Artificial Sequence
  Description of Artificial Sequence: Synthetic oligonucleotide
ggaacagcuguagccagcg

SEQ ID NO: 2164552 - RNA, 19 nt, Artificial Sequence
  Description of Artificial Sequence: Synthetic oligonucleotide
ugugggcagggcacagaag

SEQ ID NO: 2164553 - RNA, 19 nt, Artificial Sequence
  Description of Artificial Sequence: Synthetic oligonucleotide
uuccuagggaggucuuagc

SEQ ID NO: 2164554 - RNA, 19 nt, Artificial Sequence
  Description of Artificial Sequence: Synthetic oligonucleotide
ggucuuagcuagcaguuuc

SEQ ID NO: 2164555 - RNA, 19 nt, Artificial Sequence
  Description of Artificial Sequence: Synthetic oligonucleotide
gaguuaggguaucgggaac

SEQ ID NO: 2164556 - RNA, 19 nt, Artificial Sequence
  Description of Artificial Sequence: Synthetic oligonucleotide
aggcuguucagaaaccuga

SEQ ID NO: 2164557 - RNA, 19 nt, Artificial Sequence
  Description of Artificial Sequence: Synthetic oligonucleotide
guacgagcauccucagagc

SEQ ID NO: 2164558 - RNA, 19 nt, Artificial Sequence
  Description of Artificial Sequence: Synthetic oligonucleotide
guuucagacaguuucuauu

SEQ ID NO: 2164559 - RNA, 19 nt, Artificial Sequence
  Description of Artificial Sequence: Synthetic oligonucleotide
aggucuagcagggagugau

SEQ ID NO: 2164560 - RNA, 19 nt, Artificial Sequence
  Description of Artificial Sequence: Synthetic oligonucleotide
cugcagagugucgagguac

SEQ ID NO: 2164561 - RNA, 19 nt, Artificial Sequence
  Description of Artificial Sequence: Synthetic oligonucleotide
uguugacugcuagggcagg

SEQ ID NO: 2164562 - RNA, 19 nt, Artificial Sequence
  Description of Artificial Sequence: Synthetic oligonucleotide
auauagugguccagcagca

SEQ ID NO: 2164563 - RNA, 19 nt, Artificial Sequence
  Description of Artificial Sequence: Synthetic oligonucleotide
auccucagagcuggugcgc

SEQ ID NO: 2164564 - RNA, 19 nt, Artificial Sequence
  Description of Artificial Sequence: Synthetic oligonucleotide
cagagugucgagguacgag

SEQ ID NO: 2164565 - RNA, 19 nt, Artificial Sequence
  Description of Artificial Sequence: Synthetic oligonucleotide
aggacucacauuggcuggg

SEQ ID NO: 2164566 - RNA, 19 nt, Artificial Sequence
  Description of Artificial Sequence: Synthetic oligonucleotide
gucuguuugucuggcacug

SEQ ID NO: 2164567 - RNA, 19 nt, Artificial Sequence
  Description of Artificial Sequence: Synthetic oligonucleotide
cagcuguugauauaguggu

SEQ ID NO: 2164568 - RNA, 19 nt, Artificial Sequence
  Description of Artificial Sequence: Synthetic oligonucleotide
ccaaggaaccucaucuuac

SEQ ID NO: 2164569 - RNA, 19 nt, Artificial Sequence
  Description of Artificial Sequence: Synthetic oligonucleotide
gcuagggcaggucuagcag

SEQ ID NO: 2164570 - RNA, 19 nt, Artificial Sequence
  Description of Artificial Sequence: Synthetic oligonucleotide
cacagugaccgcuugacgu

SEQ ID NO: 2164571 - RNA, 19 nt, Artificial Sequence
  Description of Artificial Sequence: Synthetic oligonucleotide
gacgacuuuaagguugaaa

SEQ ID NO: 2164572 - RNA, 19 nt, Artificial Sequence
  Description of Artificial Sequence: Synthetic oligonucleotide
aguacucaugccacggcca

SEQ ID NO: 2164573 - RNA, 19 nt, Artificial Sequence
  Description of Artificial Sequence: Synthetic oligonucleotide
ucaggacgacuuuaagguu

SEQ ID NO: 2164574 - RNA, 19 nt, Artificial Sequence
  Description of Artificial Sequence: Synthetic oligonucleotide
agcuuugagaccacauccu

SEQ ID NO: 2164575 - RNA, 19 nt, Artificial Sequence
  Description of Artificial Sequence: Synthetic oligonucleotide
gaagggugaugcuaccaua

SEQ ID NO: 2164576 - RNA, 19 nt, Artificial Sequence
  Description of Artificial Sequence: Synthetic oligonucleotide
acggcacccaggcuguuca

SEQ ID NO: 2164577 - RNA, 19 nt, Artificial Sequence
  Description of Artificial Sequence: Synthetic oligonucleotide
gugugauaggcagccagug

SEQ ID NO: 2164578 - RNA, 19 nt, Artificial Sequence
  Description of Artificial Sequence: Synthetic oligonucleotide
ggaaccucaucuuacccaa

SEQ ID NO: 2164579 - RNA, 19 nt, Artificial Sequence
  Description of Artificial Sequence: Synthetic oligonucleotide
aacacggcacccaggcugu

SEQ ID NO: 2164580 - RNA, 19 nt, Artificial Sequence
  Description of Artificial Sequence: Synthetic oligonucleotide
ggugcgcaggccuuccagg

SEQ ID NO: 2164581 - RNA, 19 nt, Artificial Sequence
  Description of Artificial Sequence: Synthetic oligonucleotide
cuugcgugugggcagggca

SEQ ID NO: 2164582 - RNA, 19 nt, Artificial Sequence
  Description of Artificial Sequence: Synthetic oligonucleotide
uuggcugggcauguugacu

SEQ ID NO: 2164583 - RNA, 19 nt, Artificial Sequence
  Description of Artificial Sequence: Synthetic oligonucleotide
aacgggagcggcggucuag

SEQ ID NO: 2164584 - RNA, 19 nt, Artificial Sequence
  Description of Artificial Sequence: Synthetic oligonucleotide
cugccugcucagaggaccc

SEQ ID NO: 2164585 - RNA, 19 nt, Artificial Sequence
  Description of Artificial Sequence: Synthetic oligonucleotide
ccggaguuaggguaucggg

SEQ ID NO: 2164586 - RNA, 19 nt, Artificial Sequence
  Description of Artificial Sequence: Synthetic oligonucleotide
cugaucaggacgacuuuaa

SEQ ID NO: 2164587 - RNA, 19 nt, Artificial Sequence
  Description of Artificial Sequence: Synthetic oligonucleotide
caucuuacccaaggacagc

SEQ ID NO: 2164588 - RNA, 19 nt, Artificial Sequence
  Description of Artificial Sequence: Synthetic oligonucleotide
agcuguugauauagugguc

SEQ ID NO: 2164589 - RNA, 19 nt, Artificial Sequence
  Description of Artificial Sequence: Synthetic oligonucleotide
caaggaagucuucaguacu

SEQ ID NO: 2164590 - RNA, 19 nt, Artificial Sequence
  Description of Artificial Sequence: Synthetic oligonucleotide
gucuagcagggagugauca

SEQ ID NO: 2164591 - RNA, 19 nt, Artificial Sequence
  Description of Artificial Sequence: Synthetic oligonucleotide
guugcccaccucauaggcc

SEQ ID NO: 2164592 - RNA, 19 nt, Artificial Sequence
  Description of Artificial Sequence: Synthetic oligonucleotide
uccucaggugcuccauuau

SEQ ID NO: 2164593 - RNA, 19 nt, Artificial Sequence
  Description of Artificial Sequence: Synthetic oligonucleotide
cauacacgugcucaaugaa

SEQ ID NO: 2164594 - RNA, 19 nt, Artificial Sequence
  Description of Artificial Sequence: Synthetic oligonucleotide
agcgcagagcgcgaugcag

SEQ ID NO: 2164595 - RNA, 19 nt, Artificial Sequence
  Description of Artificial Sequence: Synthetic oligonucleotide
ugucauacacgugcucaau

SEQ ID NO: 2164596 - RNA, 19 nt, Artificial Sequence
  Description of Artificial Sequence: Synthetic oligonucleotide
agugucgagguacgagcau

SEQ ID NO: 2164597 - RNA, 19 nt, Artificial Sequence
  Description of Artificial Sequence: Synthetic oligonucleotide
ucuuacccaaggacagcuu

SEQ ID NO: 2164598 - RNA, 19 nt, Artificial Sequence
  Description of Artificial Sequence: Synthetic oligonucleotide
gagugucgagguacgagca

SEQ ID NO: 2164599 - RNA, 19 nt, Artificial Sequence
  Description of Artificial Sequence: Synthetic oligonucleotide
guaucgggaacgggagcgg

SEQ ID NO: 2164600 - RNA, 19 nt, Artificial Sequence
  Description of Artificial Sequence: Synthetic oligonucleotide
gugaugcuaccauaucgaa

SEQ ID NO: 2164601 - RNA, 19 nt, Artificial Sequence
  Description of Artificial Sequence: Synthetic oligonucleotide
cauaucgaagaagcuguga

SEQ ID NO: 2164602 - RNA, 19 nt, Artificial Sequence
  Description of Artificial Sequence: Synthetic oligonucleotide
gauccaggugugauaggca

SEQ ID NO: 2164603 - RNA, 19 nt, Artificial Sequence
  Description of Artificial Sequence: Synthetic oligonucleotide
cuugacguacgauccaggu

SEQ ID NO: 2164604 - RNA, 19 nt, Artificial Sequence
  Description of Artificial Sequence: Synthetic oligonucleotide
agaacacggcacccaggcu

SEQ ID NO: 2164605 - RNA, 19 nt, Artificial Sequence
  Description of Artificial Sequence: Synthetic oligonucleotide
auaggccaccauggacugc

SEQ ID NO: 2164606 - RNA, 19 nt, Artificial Sequence
  Description of Artificial Sequence: Synthetic oligonucleotide
augccacggccaaggaacc

SEQ ID NO: 2164607 - RNA, 19 nt, Artificial Sequence
  Description of Artificial Sequence: Synthetic oligonucleotide
ucacauuggcugggcaugu

SEQ ID NO: 2164608 - RNA, 19 nt, Artificial Sequence
  Description of Artificial Sequence: Synthetic oligonucleotide
caucacugcagagugucga

SEQ ID NO: 2164609 - RNA, 19 nt, Artificial Sequence
  Description of Artificial Sequence: Synthetic oligonucleotide
gaugggcacaggaaggacu

SEQ ID NO: 2164610 - RNA, 19 nt, Artificial Sequence
  Description of Artificial Sequence: Synthetic oligonucleotide
gaccuugcgugugggcagg

SEQ ID NO: 2164611 - RNA, 19 nt, Artificial Sequence
  Description of Artificial Sequence: Synthetic oligonucleotide
gaucagcguagaguuucug

SEQ ID NO: 2164612 - RNA, 19 nt, Artificial Sequence
  Description of Artificial Sequence: Synthetic oligonucleotide
uugacugcuagggcagguc

SEQ ID NO: 2164613 - RNA, 19 nt, Artificial Sequence
  Description of Artificial Sequence: Synthetic oligonucleotide
uccucagagcuggugcgca

SEQ ID NO: 2164614 - RNA, 19 nt, Artificial Sequence
  Description of Artificial Sequence: Synthetic oligonucleotide
gacucacauuggcugggca

SEQ ID NO: 2164615 - RNA, 19 nt, Artificial Sequence
  Description of Artificial Sequence: Synthetic oligonucleotide
gacaagggccuguuugaua

SEQ ID NO: 2164616 - RNA, 19 nt, Artificial Sequence
  Description of Artificial Sequence: Synthetic oligonucleotide
cucgagaaagaccuugcgu

SEQ ID NO: 2164617 - RNA, 19 nt, Artificial Sequence
  Description of Artificial Sequence: Synthetic oligonucleotide
agggaggucuuagcuagca

SEQ ID NO: 2164618 - RNA, 19 nt, Artificial Sequence
  Description of Artificial Sequence: Synthetic oligonucleotide
ggcaucacugcagaguguc

SEQ ID NO: 2164619 - RNA, 19 nt, Artificial Sequence
  Description of Artificial Sequence: Synthetic oligonucleotide
cagcguagaguuucuggga

SEQ ID NO: 2164620 - RNA, 19 nt, Artificial Sequence
  Description of Artificial Sequence: Synthetic oligonucleotide
caggccuuccaggaacagc

SEQ ID NO: 2164621 - RNA, 19 nt, Artificial Sequence
  Description of Artificial Sequence: Synthetic oligonucleotide
aucgggaacgggagcggcg

SEQ ID NO: 2164622 - RNA, 19 nt, Artificial Sequence
  Description of Artificial Sequence: Synthetic oligonucleotide
agaagcugugaagcaggcu

SEQ ID NO: 2164623 - RNA, 19 nt, Artificial Sequence
  Description of Artificial Sequence: Synthetic oligonucleotide
uccuccucauugagacacu

SEQ ID NO: 2164624 - RNA, 19 nt, Artificial Sequence
  Description of Artificial Sequence: Synthetic oligonucleotide
aggacgacuuuaagguuga

SEQ ID NO: 2164625 - RNA, 19 nt, Artificial Sequence
  Description of Artificial Sequence: Synthetic oligonucleotide
gucuuagcuagcaguuuca

SEQ ID NO: 2164626 - RNA, 19 nt, Artificial Sequence
  Description of Artificial Sequence: Synthetic oligonucleotide
ccucgagaaagaccuugcg

SEQ ID NO: 2164627 - RNA, 19 nt, Artificial Sequence
  Description of Artificial Sequence: Synthetic oligonucleotide
gugucgagguacgagcauc

SEQ ID NO: 2164628 - RNA, 19 nt, Artificial Sequence
  Description of Artificial Sequence: Synthetic oligonucleotide
acgagcauccucagagcug

SEQ ID NO: 2164629 - RNA, 19 nt, Artificial Sequence
  Description of Artificial Sequence: Synthetic oligonucleotide
gcggucuagguccaccagc

SEQ ID NO: 2164630 - RNA, 19 nt, Artificial Sequence
  Description of Artificial Sequence: Synthetic oligonucleotide
cugugggcuuuuccucagg

SEQ ID NO: 2164631 - RNA, 19 nt, Artificial Sequence
  Description of Artificial Sequence: Synthetic oligonucleotide
cuggcacugauccaugccu

SEQ ID NO: 2164632 - RNA, 19 nt, Artificial Sequence
  Description of Artificial Sequence: Synthetic oligonucleotide
gcaggcuuuccuagggagg

SEQ ID NO: 2164633 - RNA, 19 nt, Artificial Sequence
  Description of Artificial Sequence: Synthetic oligonucleotide
aggacagcuuuuggaauau

SEQ ID NO: 2164634 - RNA, 19 nt, Artificial Sequence
  Description of Artificial Sequence: Synthetic oligonucleotide
gucucugggccauccaucu

SEQ ID NO: 2164635 - RNA, 19 nt, Artificial Sequence
  Description of Artificial Sequence: Synthetic oligonucleotide
agaggcugacaaggaagca

SEQ ID NO: 2164636 - RNA, 19 nt, Artificial Sequence
  Description of Artificial Sequence: Synthetic oligonucleotide
acgggagcggcggucuagg

SEQ ID NO: 2164637 - RNA, 19 nt, Artificial Sequence
  Description of Artificial Sequence: Synthetic oligonucleotide
agugaccgcuugacguacg

SEQ ID NO: 2164638 - RNA, 19 nt, Artificial Sequence
  Description of Artificial Sequence: Synthetic oligonucleotide
agaggaccccacauucaug

SEQ ID NO: 2164639 - RNA, 19 nt, Artificial Sequence
  Description of Artificial Sequence: Synthetic oligonucleotide
caugccucaggcucaagau

SEQ ID NO: 2164640 - RNA, 19 nt, Artificial Sequence
  Description of Artificial Sequence: Synthetic oligonucleotide
gacguacgauccaggugug

SEQ ID NO: 2164641 - RNA, 19 nt, Artificial Sequence
  Description of Artificial Sequence: Synthetic oligonucleotide
gggaggucuuagcuagcag

SEQ ID NO: 2164642 - RNA, 19 nt, Artificial Sequence
  Description of Artificial Sequence: Synthetic oligonucleotide
agcuaguguaguguucaua

SEQ ID NO: 2164643 - RNA, 19 nt, Artificial Sequence
  Description of Artificial Sequence: Synthetic oligonucleotide
caagggccuguuugauaug

SEQ ID NO: 2164644 - RNA, 19 nt, Artificial Sequence
  Description of Artificial Sequence: Synthetic oligonucleotide
gcuguagccagcgcagagc

SEQ ID NO: 2164645 - RNA, 19 nt, Artificial Sequence
  Description of Artificial Sequence: Synthetic oligonucleotide
gacugcaagcuaguguagu

SEQ ID NO: 2164646 - RNA, 19 nt, Artificial Sequence
  Description of Artificial Sequence: Synthetic oligonucleotide
ugcgugugggcagggcaca

SEQ ID NO: 2164647 - RNA, 19 nt, Artificial Sequence
  Description of Artificial Sequence: Synthetic oligonucleotide
agacaagggccuguuugau

SEQ ID NO: 2164648 - RNA, 19 nt, Artificial Sequence
  Description of Artificial Sequence: Synthetic oligonucleotide
agccggaguuaggguaucg

SEQ ID NO: 2164649 - RNA, 19 nt, Artificial Sequence
  Description of Artificial Sequence: Synthetic oligonucleotide
cuaccauaucgaagaagcu

SEQ ID NO: 2164650 - RNA, 19 nt, Artificial Sequence
  Description of Artificial Sequence: Synthetic oligonucleotide
gcuugacguacgauccagg

SEQ ID NO: 2164651 - RNA, 19 nt, Artificial Sequence
  Description of Artificial Sequence: Synthetic oligonucleotide
cagugaccgcuugacguac

SEQ ID NO: 2164652 - RNA, 19 nt, Artificial Sequence
  Description of Artificial Sequence: Synthetic oligonucleotide
cuuacccaaggacagcuuu

SEQ ID NO: 2164653 - RNA, 19 nt, Artificial Sequence
  Description of Artificial Sequence: Synthetic oligonucleotide
ggccucgagaaagaccuug

SEQ ID NO: 2164654 - RNA, 19 nt, Artificial Sequence
  Description of Artificial Sequence: Synthetic oligonucleotide
gugaccgcuugacguacga

SEQ ID NO: 2164655 - RNA, 19 nt, Artificial Sequence
  Description of Artificial Sequence: Synthetic oligonucleotide
ggcugacaaggaagcaggg

SEQ ID NO: 2164656 - RNA, 19 nt, Artificial Sequence
  Description of Artificial Sequence: Synthetic oligonucleotide
accugaccagccccuucca

SEQ ID NO: 2164657 - RNA, 19 nt, Artificial Sequence
  Description of Artificial Sequence: Synthetic oligonucleotide
gccggaguuaggguaucgg

SEQ ID NO: 2164658 - RNA, 19 nt, Artificial Sequence
  Description of Artificial Sequence: Synthetic oligonucleotide
agcgccucucccagcaucu

SEQ ID NO: 2164659 - RNA, 19 nt, Artificial Sequence
  Description of Artificial Sequence: Synthetic oligonucleotide
ccacagugaccgcuugacg

SEQ ID NO: 2164660 - RNA, 19 nt, Artificial Sequence
  Description of Artificial Sequence: Synthetic oligonucleotide
ccauaucgaagaagcugug

SEQ ID NO: 2164661 - RNA, 19 nt, Artificial Sequence
  Description of Artificial Sequence: Synthetic oligonucleotide
agcuggugcgcaggccuuc

SEQ ID NO: 2164662 - RNA, 19 nt, Artificial Sequence
  Description of Artificial Sequence: Synthetic oligonucleotide
gcgcagagcgcgaugcagg

SEQ ID NO: 2164663 - RNA, 19 nt, Artificial Sequence
  Description of Artificial Sequence: Synthetic oligonucleotide
cacaguccggcagccggag

SEQ ID NO: 2164664 - RNA, 19 nt, Artificial Sequence
  Description of Artificial Sequence: Synthetic oligonucleotide
ggguaucgggaacgggagc

SEQ ID NO: 2164665 - RNA, 19 nt, Artificial Sequence
  Description of Artificial Sequence: Synthetic oligonucleotide
ccagcgcagagcgcgaugc

SEQ ID NO: 2164666 - RNA, 19 nt, Artificial Sequence
  Description of Artificial Sequence: Synthetic oligonucleotide
gccaaggaaccucaucuua

SEQ ID NO: 2164667 - RNA, 19 nt, Artificial Sequence
  Description of Artificial Sequence: Synthetic oligonucleotide
ccucaggugcuccauuauc

SEQ ID NO: 2164668 - RNA, 19 nt, Artificial Sequence
  Description of Artificial Sequence: Synthetic oligonucleotide
ugaccgcuugacguacgau

SEQ ID NO: 2164669 - RNA, 19 nt, Artificial Sequence
  Description of Artificial Sequence: Synthetic oligonucleotide
aggucuuagcuagcaguuu

SEQ ID NO: 2164670 - RNA, 19 nt, Artificial Sequence
  Description of Artificial Sequence: Synthetic oligonucleotide
ugcccaccucauaggccac

SEQ ID NO: 2164671 - RNA, 19 nt, Artificial Sequence
  Description of Artificial Sequence: Synthetic oligonucleotide
agugaucagcguagaguuu

SEQ ID NO: 2164672 - RNA, 19 nt, Artificial Sequence
  Description of Artificial Sequence: Synthetic oligonucleotide
gcgcaggccuuccaggaac

SEQ ID NO: 2164673 - RNA, 19 nt, Artificial Sequence
  Description of Artificial Sequence: Synthetic oligonucleotide
aggagacaagggccuguuu

SEQ ID NO: 2164674 - RNA, 19 nt, Artificial Sequence
  Description of Artificial Sequence: Synthetic oligonucleotide
ugccugcucagaggacccc

SEQ ID NO: 2164675 - RNA, 19 nt, Artificial Sequence
  Description of Artificial Sequence: Synthetic oligonucleotide
gcuuuuccucaggugcucc

SEQ ID NO: 2164676 - RNA, 19 nt, Artificial Sequence
  Description of Artificial Sequence: Synthetic oligonucleotide
caggcgcagcacaguccgg

SEQ ID NO: 2164677 - RNA, 19 nt, Artificial Sequence
  Description of Artificial Sequence: Synthetic oligonucleotide
ggaaggacucacauuggcu

SEQ ID NO: 2164678 - RNA, 19 nt, Artificial Sequence
  Description of Artificial Sequence: Synthetic oligonucleotide
ggaauaugaaggggcccca

SEQ ID NO: 2164679 - RNA, 19 nt, Artificial Sequence
  Description of Artificial Sequence: Synthetic oligonucleotide
gggagcggcggucuagguc

SEQ ID NO: 2164680 - RNA, 19 nt, Artificial Sequence
  Description of Artificial Sequence: Synthetic oligonucleotide
gaugcaggcgcagcacagu

SEQ ID NO: 2164681 - RNA, 19 nt, Artificial Sequence
  Description of Artificial Sequence: Synthetic oligonucleotide
cggaguuaggguaucggga

SEQ ID NO: 2164682 - RNA, 19 nt, Artificial Sequence
  Description of Artificial Sequence: Synthetic oligonucleotide
gcacccaggcuguucagaa

SEQ ID NO: 2164683 - RNA, 19 nt, Artificial Sequence
  Description of Artificial Sequence: Synthetic oligonucleotide
gacugcuagggcaggucua

SEQ ID NO: 2164684 - RNA, 19 nt, Artificial Sequence
  Description of Artificial Sequence: Synthetic oligonucleotide
cugcuagggcaggucuagc

SEQ ID NO: 2164685 - RNA, 19 nt, Artificial Sequence
  Description of Artificial Sequence: Synthetic oligonucleotide
ugccacggccaaggaaccu

SEQ ID NO: 2164686 - RNA, 19 nt, Artificial Sequence
  Description of Artificial Sequence: Synthetic oligonucleotide
ccuagggaggucuuagcua

SEQ ID NO: 2164687 - RNA, 19 nt, Artificial Sequence
  Description of Artificial Sequence: Synthetic oligonucleotide
gcaagcuaguguaguguuc

SEQ ID NO: 2164688 - RNA, 19 nt, Artificial Sequence
  Description of Artificial Sequence: Synthetic oligonucleotide
gugaagcaggcugcacuga

SEQ ID NO: 2164689 - RNA, 19 nt, Artificial Sequence
  Description of Artificial Sequence: Synthetic oligonucleotide
guguucauacugugggcuu

SEQ ID NO: 2164690 - RNA, 19 nt, Artificial Sequence
  Description of Artificial Sequence: Synthetic oligonucleotide
agggccuguuugauaugca

SEQ ID NO: 2164691 - RNA, 19 nt, Artificial Sequence
  Description of Artificial Sequence: Synthetic oligonucleotide
ggcucaagaugggcacagg

SEQ ID NO: 2164692 - RNA, 19 nt, Artificial Sequence
  Description of Artificial Sequence: Synthetic oligonucleotide
acguacgauccagguguga

SEQ ID NO: 2164693 - RNA, 19 nt, Artificial Sequence
  Description of Artificial Sequence: Synthetic oligonucleotide
accuugcgugugggcaggg

SEQ ID NO: 2164694 - RNA, 19 nt, Artificial Sequence
  Description of Artificial Sequence: Synthetic oligonucleotide
guccggcagccggaguuag

SEQ ID NO: 2164695 - RNA, 19 nt, Artificial Sequence
  Description of Artificial Sequence: Synthetic oligonucleotide
gcgaugcaggcgcagcaca

SEQ ID NO: 2164696 - RNA, 19 nt, Artificial Sequence
  Description of Artificial Sequence: Synthetic oligonucleotide
cucaugccacggccaagga

SEQ ID NO: 2164697 - RNA, 19 nt, Artificial Sequence
  Description of Artificial Sequence: Synthetic oligonucleotide
gcugaucaggacgacuuua

SEQ ID NO: 2164698 - RNA, 19 nt, Artificial Sequence
  Description of Artificial Sequence: Synthetic oligonucleotide
ggaagggcaaggaagucuu

SEQ ID NO: 2164699 - RNA, 19 nt, Artificial Sequence
  Description of Artificial Sequence: Synthetic oligonucleotide
aguccggcagccggaguua

SEQ ID NO: 2164700 - RNA, 19 nt, Artificial Sequence
  Description of Artificial Sequence: Synthetic oligonucleotide
guugacugcuagggcaggu

SEQ ID NO: 2164701 - RNA, 19 nt, Artificial Sequence
  Description of Artificial Sequence: Synthetic oligonucleotide
cacggcacccaggcuguuc

SEQ ID NO: 2164702 - RNA, 19 nt, Artificial Sequence
  Description of Artificial Sequence: Synthetic oligonucleotide
auccaugccucaggcucaa

SEQ ID NO: 2164703 - RNA, 19 nt, Artificial Sequence
  Description of Artificial Sequence: Synthetic oligonucleotide
cacccaggcuguucagaaa

SEQ ID NO: 2164704 - RNA, 19 nt, Artificial Sequence
  Description of Artificial Sequence: Synthetic oligonucleotide
gccacggccaaggaaccuc

SEQ ID NO: 2164705 - RNA, 19 nt, Artificial Sequence
  Description of Artificial Sequence: Synthetic oligonucleotide
gcuuugagaccacauccuu

SEQ ID NO: 2164706 - RNA, 19 nt, Artificial Sequence
  Description of Artificial Sequence: Synthetic oligonucleotide
ccccacauucauggccucg

SEQ ID NO: 2164707 - RNA, 19 nt, Artificial Sequence
  Description of Artificial Sequence: Synthetic oligonucleotide
agagcgcgaugcaggcgca

SEQ ID NO: 2164708 - RNA, 19 nt, Artificial Sequence
  Description of Artificial Sequence: Synthetic oligonucleotide
ggucuagcagggagugauc

SEQ ID NO: 2164709 - RNA, 19 nt, Artificial Sequence
  Description of Artificial Sequence: Synthetic oligonucleotide
cggccaaggaaccucaucu

SEQ ID NO: 2164710 - RNA, 19 nt, Artificial Sequence
  Description of Artificial Sequence: Synthetic oligonucleotide
caguccggcagccggaguu

SEQ ID NO: 2164711 - RNA, 19 nt, Artificial Sequence
  Description of Artificial Sequence: Synthetic oligonucleotide
gccagcgcagagcgcgaug

SEQ ID NO: 2164712 - RNA, 19 nt, Artificial Sequence
  Description of Artificial Sequence: Synthetic oligonucleotide
gcuggugcgcaggccuucc

SEQ ID NO: 2164713 - RNA, 19 nt, Artificial Sequence
  Description of Artificial Sequence: Synthetic oligonucleotide
gaacgggagcggcggucua

SEQ ID NO: 2164714 - RNA, 19 nt, Artificial Sequence
  Description of Artificial Sequence: Synthetic oligonucleotide
gcgcgaugcaggcgcagca

SEQ ID NO: 2164715 - RNA, 19 nt, Artificial Sequence
  Description of Artificial Sequence: Synthetic oligonucleotide
cugggccauccaucuucca

SEQ ID NO: 2164716 - RNA, 19 nt, Artificial Sequence
  Description of Artificial Sequence: Synthetic oligonucleotide
ccacggccaaggaaccuca

SEQ ID NO: 2164717 - RNA, 19 nt, Artificial Sequence
  Description of Artificial Sequence: Synthetic oligonucleotide
cagccggaguuaggguauc

SEQ ID NO: 2164718 - RNA, 19 nt, Artificial Sequence
  Description of Artificial Sequence: Synthetic oligonucleotide
gggaacgggagcggcgguc

SEQ ID NO: 2164719 - RNA, 19 nt, Artificial Sequence
  Description of Artificial Sequence: Synthetic oligonucleotide
cagcuguagccagcgcaga

SEQ ID NO: 2164720 - RNA, 19 nt, Artificial Sequence
  Description of Artificial Sequence: Synthetic oligonucleotide
cuggugcgcaggccuucca

SEQ ID NO: 2164721 - RNA, 19 nt, Artificial Sequence
  Description of Artificial Sequence: Synthetic oligonucleotide
caggucuagcagggaguga

SEQ ID NO: 2164722 - RNA, 19 nt, Artificial Sequence
  Description of Artificial Sequence: Synthetic oligonucleotide
cgagaaagaccuugcgugu

SEQ ID NO: 2164723 - RNA, 19 nt, Artificial Sequence
  Description of Artificial Sequence: Synthetic oligonucleotide
gcggcggucuagguccacc

SEQ ID NO: 2164724 - RNA, 19 nt, Artificial Sequence
  Description of Artificial Sequence: Synthetic oligonucleotide
agccagcgcagagcgcgau

SEQ ID NO: 2164725 - RNA, 19 nt, Artificial Sequence
  Description of Artificial Sequence: Synthetic oligonucleotide
ggaacgggagcggcggucu

SEQ ID NO: 2164726 - RNA, 19 nt, Artificial Sequence
  Description of Artificial Sequence: Synthetic oligonucleotide
gcagagugucgagguacga

SEQ ID NO: 2164727 - RNA, 19 nt, Artificial Sequence
  Description of Artificial Sequence: Synthetic oligonucleotide
ccuugcgugugggcagggc

SEQ ID NO: 2164728 - RNA, 19 nt, Artificial Sequence
  Description of Artificial Sequence: Synthetic oligonucleotide
gccugcucagaggacccca

SEQ ID NO: 2164729 - RNA, 19 nt, Artificial Sequence
  Description of Artificial Sequence: Synthetic oligonucleotide
gucgagguacgagcauccu

SEQ ID NO: 2164730 - RNA, 19 nt, Artificial Sequence
  Description of Artificial Sequence: Synthetic oligonucleotide
gcccaccucauaggccacc

SEQ ID NO: 2164731 - RNA, 19 nt, Artificial Sequence
  Description of Artificial Sequence: Synthetic oligonucleotide
gccccuuccagcuguugau

SEQ ID NO: 2164732 - RNA, 19 nt, Artificial Sequence
  Description of Artificial Sequence: Synthetic oligonucleotide
gcgugugggcagggcacag

SEQ ID NO: 2164733 - RNA, 19 nt, Artificial Sequence
  Description of Artificial Sequence: Synthetic oligonucleotide
cggucuagguccaccagcu

SEQ ID NO: 2164734 - RNA, 19 nt, Artificial Sequence
  Description of Artificial Sequence: Synthetic oligonucleotide
gcuagcaguuucagacagu

SEQ ID NO: 2164735 - RNA, 19 nt, Artificial Sequence
  Description of Artificial Sequence: Synthetic oligonucleotide
gcagccggaguuaggguau

SEQ ID NO: 2164736 - RNA, 19 nt, Artificial Sequence
  Description of Artificial Sequence: Synthetic oligonucleotide
ccgcuugacguacgaucca

SEQ ID NO: 2164737 - RNA, 19 nt, Artificial Sequence
  Description of Artificial Sequence: Synthetic oligonucleotide
cgcgaugcaggcgcagcac

SEQ ID NO: 2164738 - RNA, 19 nt, Artificial Sequence
  Description of Artificial Sequence: Synthetic oligonucleotide
cccuuccagcuguugauau

SEQ ID NO: 2164739 - RNA, 19 nt, Artificial Sequence
  Description of Artificial Sequence: Synthetic oligonucleotide
gcuccauuaucugcagcuu

SEQ ID NO: 2164740 - RNA, 19 nt, Artificial Sequence
  Description of Artificial Sequence: Synthetic oligonucleotide
cguacgauccaggugugau

SEQ ID NO: 2164741 - RNA, 19 nt, Artificial Sequence
  Description of Artificial Sequence: Synthetic oligonucleotide
ggcagccaguguggcauua

SEQ ID NO: 2164742 - RNA, 19 nt, Artificial Sequence
  Description of Artificial Sequence: Synthetic oligonucleotide
cacggccaaggaaccucau

SEQ ID NO: 2164743 - RNA, 19 nt, Artificial Sequence
  Description of Artificial Sequence: Synthetic oligonucleotide
ggucuagguccaccagcuu

SEQ ID NO: 2164744 - RNA, 19 nt, Artificial Sequence
  Description of Artificial Sequence: Synthetic oligonucleotide
gagcauccucagagcuggu

SEQ ID NO: 2164745 - RNA, 19 nt, Artificial Sequence
  Description of Artificial Sequence: Synthetic oligonucleotide
ggacgacuuuaagguugaa

SEQ ID NO: 2164746 - RNA, 19 nt, Artificial Sequence
  Description of Artificial Sequence: Synthetic oligonucleotide
cuagguccaccagcuuguu

SEQ ID NO: 2164747 - RNA, 19 nt, Artificial Sequence
  Description of Artificial Sequence: Synthetic oligonucleotide
acacggcacccaggcuguu

SEQ ID NO: 2164748 - RNA, 19 nt, Artificial Sequence
  Description of Artificial Sequence: Synthetic oligonucleotide
gcuuuccuagggaggucuu

SEQ ID NO: 2164749 - RNA, 19 nt, Artificial Sequence
  Description of Artificial Sequence: Synthetic oligonucleotide
cggcagccggaguuagggu

SEQ ID NO: 2164750 - RNA, 19 nt, Artificial Sequence
  Description of Artificial Sequence: Synthetic oligonucleotide
cgggagcggcggucuaggu

SEQ ID NO: 2164751 - RNA, 19 nt, Artificial Sequence
  Description of Artificial Sequence: Synthetic oligonucleotide
aauacuacauuaugaaucc

SEQ ID NO: 2164752 - RNA, 19 nt, Artificial Sequence
  Description of Artificial Sequence: Synthetic oligonucleotide
aaugugaccugauugaccc

SEQ ID NO: 2164753 - RNA, 19 nt, Artificial Sequence
  Description of Artificial Sequence: Synthetic oligonucleotide
aauauuacaaaaugaauca

SEQ ID NO: 2164754 - RNA, 19 nt, Artificial Sequence
  Description of Artificial Sequence: Synthetic oligonucleotide
aauauuaccccauaggacu

SEQ ID NO: 2164755 - RNA, 19 nt, Artificial Sequence
  Description of Artificial Sequence: Synthetic oligonucleotide
aaagauggugacuucaaac

SEQ ID NO: 2164756 - RNA, 19 nt, Artificial Sequence
  Description of Artificial Sequence: Synthetic oligonucleotide
aaucaguucagguuucgcc

SEQ ID NO: 2164757 - RNA, 19 nt, Artificial Sequence
  Description of Artificial Sequence: Synthetic oligonucleotide
uccacaacaaauauuaccc

SEQ ID NO: 2164758 - RNA, 19 nt, Artificial Sequence
  Description of Artificial Sequence: Synthetic oligonucleotide
uguuuauucgccaauacca

SEQ ID NO: 2164759 - RNA, 19 nt, Artificial Sequence
  Description of Artificial Sequence: Synthetic oligonucleotide
accugauugacccaggucc

SEQ ID NO: 2164760 - RNA, 19 nt, Artificial Sequence
  Description of Artificial Sequence: Synthetic oligonucleotide
aaaagugugaguuugguuu

SEQ ID NO: 2164761 - RNA, 19 nt, Artificial Sequence
  Description of Artificial Sequence: Synthetic oligonucleotide
aaaucauguaauuggguag

SEQ ID NO: 2164762 - RNA, 19 nt, Artificial Sequence
  Description of Artificial Sequence: Synthetic oligonucleotide
uaauaauucuuccaaauuc

SEQ ID NO: 2164763 - RNA, 19 nt, Artificial Sequence
  Description of Artificial Sequence: Synthetic oligonucleotide
ucuaaggucaauuuuagaa

SEQ ID NO: 2164764 - RNA, 19 nt, Artificial Sequence
  Description of Artificial Sequence: Synthetic oligonucleotide
acaaauauuaccccauagg

SEQ ID NO: 2164765 - RNA, 19 nt, Artificial Sequence
  Description of Artificial Sequence: Synthetic oligonucleotide
ugcauuauaaacauuuaac

SEQ ID NO: 2164766 - RNA, 19 nt, Artificial Sequence
  Description of Artificial Sequence: Synthetic oligonucleotide
aaaugaaucaaaaggauga

SEQ ID NO: 2164767 - RNA, 19 nt, Artificial Sequence
  Description of Artificial Sequence: Synthetic oligonucleotide
uucaaaucauguaauuggg

SEQ ID NO: 2164768 - RNA, 19 nt, Artificial Sequence
  Description of Artificial Sequence: Synthetic oligonucleotide
aauaugucuauggucacac

SEQ ID NO: 2164769 - RNA, 19 nt, Artificial Sequence
  Description of Artificial Sequence: Synthetic oligonucleotide
aauuggguagaauuaaaga

SEQ ID NO: 2164770 - RNA, 19 nt, Artificial Sequence
  Description of Artificial Sequence: Synthetic oligonucleotide
aacucacagaaacaccacc

SEQ ID NO: 2164771 - RNA, 19 nt, Artificial Sequence
  Description of Artificial Sequence: Synthetic oligonucleotide
aaauauuaccccauaggac

SEQ ID NO: 2164772 - RNA, 19 nt, Artificial Sequence
  Description of Artificial Sequence: Synthetic oligonucleotide
uuaacagacaaauaaucgu

SEQ ID NO: 2164773 - RNA, 19 nt, Artificial Sequence
  Description of Artificial Sequence: Synthetic oligonucleotide
aacaaauauuaccccauag

SEQ ID NO: 2164774 - RNA, 19 nt, Artificial Sequence
  Description of Artificial Sequence: Synthetic oligonucleotide
agaauuaaagaaccacugg

SEQ ID NO: 2164775 - RNA, 19 nt, Artificial Sequence
  Description of Artificial Sequence: Synthetic oligonucleotide
uuagaaaauccaacagugg

SEQ ID NO: 2164776 - RNA, 19 nt, Artificial Sequence
  Description of Artificial Sequence: Synthetic oligonucleotide
ucuaaaucaguucagguuu

SEQ ID NO: 2164777 - RNA, 19 nt, Artificial Sequence
  Description of Artificial Sequence: Synthetic oligonucleotide
guaaucuucaccuugacaa

SEQ ID NO: 2164778 - RNA, 19 nt, Artificial Sequence
  Description of Artificial Sequence: Synthetic oligonucleotide
gaauacuacauuaugaauc

SEQ ID NO: 2164779 - RNA, 19 nt, Artificial Sequence
  Description of Artificial Sequence: Synthetic oligonucleotide
uggacuuaccuucagaaac

SEQ ID NO: 2164780 - RNA, 19 nt, Artificial Sequence
  Description of Artificial Sequence: Synthetic oligonucleotide
aacagugggagcuacgucu

SEQ ID NO: 2164781 - RNA, 19 nt, Artificial Sequence
  Description of Artificial Sequence: Synthetic oligonucleotide
ugucuauggucacacaagg

SEQ ID NO: 2164782 - RNA, 19 nt, Artificial Sequence
  Description of Artificial Sequence: Synthetic oligonucleotide
uggguagaauuaaagaacc

SEQ ID NO: 2164783 - RNA, 19 nt, Artificial Sequence
  Description of Artificial Sequence: Synthetic oligonucleotide
uacuaauucugcauauggg

SEQ ID NO: 2164784 - RNA, 19 nt, Artificial Sequence
  Description of Artificial Sequence: Synthetic oligonucleotide
auuggguagaauuaaagaa

SEQ ID NO: 2164785 - RNA, 19 nt, Artificial Sequence
  Description of Artificial Sequence: Synthetic oligonucleotide
ucaauugaauacuacauua

SEQ ID NO: 2164786 - RNA, 19 nt, Artificial Sequence
  Description of Artificial Sequence: Synthetic oligonucleotide
cucacuagaacaaugugac

SEQ ID NO: 2164787 - RNA, 19 nt, Artificial Sequence
  Description of Artificial Sequence: Synthetic oligonucleotide
acuaauucugcauaugggu

SEQ ID NO: 2164788 - RNA, 19 nt, Artificial Sequence
  Description of Artificial Sequence: Synthetic oligonucleotide
cuacuaauucugcauaugg

SEQ ID NO: 2164789 - RNA, 19 nt, Artificial Sequence
  Description of Artificial Sequence: Synthetic oligonucleotide
uucgccaauaccaguauag

SEQ ID NO: 2164790 - RNA, 19 nt, Artificial Sequence
  Description of Artificial Sequence: Synthetic oligonucleotide
agaauuguucuuuguaauc

SEQ ID NO: 2164791 - RNA, 19 nt, Artificial Sequence
  Description of Artificial Sequence: Synthetic oligonucleotide
agaaguuuugguaaaggac

SEQ ID NO: 2164792 - RNA, 19 nt, Artificial Sequence
  Description of Artificial Sequence: Synthetic oligonucleotide
aaaagauagcaaaagugug

SEQ ID NO: 2164793 - RNA, 19 nt, Artificial Sequence
  Description of Artificial Sequence: Synthetic oligonucleotide
uuuugguaaaggacaacag

SEQ ID NO: 2164794 - RNA, 19 nt, Artificial Sequence
  Description of Artificial Sequence: Synthetic oligonucleotide
aaauaaucguaucagucua

SEQ ID NO: 2164795 - RNA, 19 nt, Artificial Sequence
  Description of Artificial Sequence: Synthetic oligonucleotide
acuaaauauaucucuagaa

SEQ ID NO: 2164796 - RNA, 19 nt, Artificial Sequence
  Description of Artificial Sequence: Synthetic oligonucleotide
ucagaaaccagaauauguc

SEQ ID NO: 2164797 - RNA, 19 nt, Artificial Sequence
  Description of Artificial Sequence: Synthetic oligonucleotide
ucuauggucacacaaggua

SEQ ID NO: 2164798 - RNA, 19 nt, Artificial Sequence
  Description of Artificial Sequence: Synthetic oligonucleotide
uccguuacuacuuucaaau

SEQ ID NO: 2164799 - RNA, 19 nt, Artificial Sequence
  Description of Artificial Sequence: Synthetic oligonucleotide
acagaaacaccaccagugc

SEQ ID NO: 2164800 - RNA, 19 nt, Artificial Sequence
  Description of Artificial Sequence: Synthetic oligonucleotide
aaucguaucagucuaccuu

SEQ ID NO: 2164801 - RNA, 19 nt, Artificial Sequence
  Description of Artificial Sequence: Synthetic oligonucleotide
gaaguuuugguaaaggaca

SEQ ID NO: 2164802 - RNA, 19 nt, Artificial Sequence
  Description of Artificial Sequence: Synthetic oligonucleotide
aaauccaacagugggagcu

SEQ ID NO: 2164803 - RNA, 19 nt, Artificial Sequence
  Description of Artificial Sequence: Synthetic oligonucleotide
ugagcuaaaaugugaacac

SEQ ID NO: 2164804 - RNA, 19 nt, Artificial Sequence
  Description of Artificial Sequence: Synthetic oligonucleotide
uuaaagaaccacugguccc

SEQ ID NO: 2164805 - RNA, 19 nt, Artificial Sequence
  Description of Artificial Sequence: Synthetic oligonucleotide
cagaauaugucuaugguca

SEQ ID NO: 2164806 - RNA, 19 nt, Artificial Sequence
  Description of Artificial Sequence: Synthetic oligonucleotide
auggguuuugcauagaaau

SEQ ID NO: 2164807 - RNA, 19 nt, Artificial Sequence
  Description of Artificial Sequence: Synthetic oligonucleotide
aacugaauucucuccuccg

SEQ ID NO: 2164808 - RNA, 19 nt, Artificial Sequence
  Description of Artificial Sequence: Synthetic oligonucleotide
uuccugauauccuaggaug

SEQ ID NO: 2164809 - RNA, 19 nt, Artificial Sequence
  Description of Artificial Sequence: Synthetic oligonucleotide
uccuguguuccuaugaucu

SEQ ID NO: 2164810 - RNA, 19 nt, Artificial Sequence
  Description of Artificial Sequence: Synthetic oligonucleotide
ucagcauaauaauucuucc

SEQ ID NO: 2164811 - RNA, 19 nt, Artificial Sequence
  Description of Artificial Sequence: Synthetic oligonucleotide
uaugucuauggucacacaa

SEQ ID NO: 2164812 - RNA, 19 nt, Artificial Sequence
  Description of Artificial Sequence: Synthetic oligonucleotide
uugccucuaaaucaguuca

SEQ ID NO: 2164813 - RNA, 19 nt, Artificial Sequence
  Description of Artificial Sequence: Synthetic oligonucleotide
agcauaauaauucuuccaa

SEQ ID NO: 2164814 - RNA, 19 nt, Artificial Sequence
  Description of Artificial Sequence: Synthetic oligonucleotide
ugucuaaggucaauuuuag

SEQ ID NO: 2164815 - RNA, 19 nt, Artificial Sequence
  Description of Artificial Sequence: Synthetic oligonucleotide
ugagaauuguucuuuguaa

SEQ ID NO: 2164816 - RNA, 19 nt, Artificial Sequence
  Description of Artificial Sequence: Synthetic oligonucleotide
ugagucaacuacuaauucu

SEQ ID NO: 2164817 - RNA, 19 nt, Artificial Sequence
  Description of Artificial Sequence: Synthetic oligonucleotide
ucauugaccagcuucucca

SEQ ID NO: 2164818 - RNA, 19 nt, Artificial Sequence
  Description of Artificial Sequence: Synthetic oligonucleotide
uaugaucugucauaucuga

SEQ ID NO: 2164819 - RNA, 19 nt, Artificial Sequence
  Description of Artificial Sequence: Synthetic oligonucleotide
aaagauagcaaaaguguga

SEQ ID NO: 2164820 - RNA, 19 nt, Artificial Sequence
  Description of Artificial Sequence: Synthetic oligonucleotide
aaugaaucaaaaggaugag

SEQ ID NO: 2164821 - RNA, 19 nt, Artificial Sequence
  Description of Artificial Sequence: Synthetic oligonucleotide
caaauauuaccccauagga

SEQ ID NO: 2164822 - RNA, 19 nt, Artificial Sequence
  Description of Artificial Sequence: Synthetic oligonucleotide
acauuaugaauccauuacu

SEQ ID NO: 2164823 - RNA, 19 nt, Artificial Sequence
  Description of Artificial Sequence: Synthetic oligonucleotide
ugucuuagcacuucugaca

SEQ ID NO: 2164824 - RNA, 19 nt, Artificial Sequence
  Description of Artificial Sequence: Synthetic oligonucleotide
gaauccacaacaaauauua

SEQ ID NO: 2164825 - RNA, 19 nt, Artificial Sequence
  Description of Artificial Sequence: Synthetic oligonucleotide
cuuagcuggacuuaccuuc

SEQ ID NO: 2164826 - RNA, 19 nt, Artificial Sequence
  Description of Artificial Sequence: Synthetic oligonucleotide
uacuacuuucaaaucaugu

SEQ ID NO: 2164827 - RNA, 19 nt, Artificial Sequence
  Description of Artificial Sequence: Synthetic oligonucleotide
auaaucguaucagucuacc

SEQ ID NO: 2164828 - RNA, 19 nt, Artificial Sequence
  Description of Artificial Sequence: Synthetic oligonucleotide
ucaacuacuaauucugcau

SEQ ID NO: 2164829 - RNA, 19 nt, Artificial Sequence
  Description of Artificial Sequence: Synthetic oligonucleotide
aucggcuucuccuaaggcg

SEQ ID NO: 2164830 - RNA, 19 nt, Artificial Sequence
  Description of Artificial Sequence: Synthetic oligonucleotide
aucgcuggaauccacaaca

SEQ ID NO: 2164831 - RNA, 19 nt, Artificial Sequence
  Description of Artificial Sequence: Synthetic oligonucleotide
aauaaucguaucagucuac

SEQ ID NO: 2164832 - RNA, 19 nt, Artificial Sequence
  Description of Artificial Sequence: Synthetic oligonucleotide
augaaucaaaaggaugagc

SEQ ID NO: 2164833 - RNA, 19 nt, Artificial Sequence
  Description of Artificial Sequence: Synthetic oligonucleotide
aaugugaacacaaugcauu

SEQ ID NO: 2164834 - RNA, 19 nt, Artificial Sequence
  Description of Artificial Sequence: Synthetic oligonucleotide
ucucuagaaguuuugguaa

SEQ ID NO: 2164835 - RNA, 19 nt, Artificial Sequence
  Description of Artificial Sequence: Synthetic oligonucleotide
aauaccaguauaggcuuuc

SEQ ID NO: 2164836 - RNA, 19 nt, Artificial Sequence
  Description of Artificial Sequence: Synthetic oligonucleotide
augucuuagcacuucugac

SEQ ID NO: 2164837 - RNA, 19 nt, Artificial Sequence
  Description of Artificial Sequence: Synthetic oligonucleotide
uacgucuucaggaugcucu

SEQ ID NO: 2164838 - RNA, 19 nt, Artificial Sequence
  Description of Artificial Sequence: Synthetic oligonucleotide
aaaucaguucagguuucgc

SEQ ID NO: 2164839 - RNA, 19 nt, Artificial Sequence
  Description of Artificial Sequence: Synthetic oligonucleotide
ucugacauugucucuuuug

SEQ ID NO: 2164840 - RNA, 19 nt, Artificial Sequence
  Description of Artificial Sequence: Synthetic oligonucleotide
accaguauaggcuuuccug

SEQ ID NO: 2164841 - RNA, 19 nt, Artificial Sequence
  Description of Artificial Sequence: Synthetic oligonucleotide
acagacaaauaaucguauc

SEQ ID NO: 2164842 - RNA, 19 nt, Artificial Sequence
  Description of Artificial Sequence: Synthetic oligonucleotide
uuugguuuuaaaagggauu

SEQ ID NO: 2164843 - RNA, 19 nt, Artificial Sequence
  Description of Artificial Sequence: Synthetic oligonucleotide
cuuaccuucagaaaccaga

SEQ ID NO: 2164844 - RNA, 19 nt, Artificial Sequence
  Description of Artificial Sequence: Synthetic oligonucleotide
aaucauguaauuggguaga

SEQ ID NO: 2164845 - RNA, 19 nt, Artificial Sequence
  Description of Artificial Sequence: Synthetic oligonucleotide
uucaauugaauacuacauu

SEQ ID NO: 2164846 - RNA, 19 nt, Artificial Sequence
  Description of Artificial Sequence: Synthetic oligonucleotide
aaagggauuuuaaauauua

SEQ ID NO: 2164847 - RNA, 19 nt, Artificial Sequence
  Description of Artificial Sequence: Synthetic oligonucleotide
uauggucacacaagguacc

SEQ ID NO: 2164848 - RNA, 19 nt, Artificial Sequence
  Description of Artificial Sequence: Synthetic oligonucleotide
ucaaaucauguaauugggu

SEQ ID NO: 2164849 - RNA, 19 nt, Artificial Sequence
  Description of Artificial Sequence: Synthetic oligonucleotide
cuauggucacacaagguac

SEQ ID NO: 2164850 - RNA, 19 nt, Artificial Sequence
  Description of Artificial Sequence: Synthetic oligonucleotide
uuauucgccaauaccagua

SEQ ID NO: 2164851 - RNA, 19 nt, Artificial Sequence
  Description of Artificial Sequence: Synthetic oligonucleotide
aagguaccaaauccuaaca

SEQ ID NO: 2164852 - RNA, 19 nt, Artificial Sequence
  Description of Artificial Sequence: Synthetic oligonucleotide
uacuacauuaugaauccau

SEQ ID NO: 2164853 - RNA, 19 nt, Artificial Sequence
  Description of Artificial Sequence: Synthetic oligonucleotide
gguccagugagcuaaaaug

SEQ ID NO: 2164854 - RNA, 19 nt, Artificial Sequence
  Description of Artificial Sequence: Synthetic oligonucleotide
aggucaauuuuagaaaauc

SEQ ID NO: 2164855 - RNA, 19 nt, Artificial Sequence
  Description of Artificial Sequence: Synthetic oligonucleotide
gaugucuuagcacuucuga

SEQ ID NO: 2164856 - RNA, 19 nt, Artificial Sequence
  Description of Artificial Sequence: Synthetic oligonucleotide
agaauaugucuauggucac

SEQ ID NO: 2164857 - RNA, 19 nt, Artificial Sequence
  Description of Artificial Sequence: Synthetic oligonucleotide
gcauuauaaacauuuaaca

SEQ ID NO: 2164858 - RNA, 19 nt, Artificial Sequence
  Description of Artificial Sequence: Synthetic oligonucleotide
acuacuuucaaaucaugua

SEQ ID NO: 2164859 - RNA, 19 nt, Artificial Sequence
  Description of Artificial Sequence: Synthetic oligonucleotide
cuuagcacuucugacauug

SEQ ID NO: 2164860 - RNA, 19 nt, Artificial Sequence
  Description of Artificial Sequence: Synthetic oligonucleotide
ugaauacuacauuaugaau

SEQ ID NO: 2164861 - RNA, 19 nt, Artificial Sequence
  Description of Artificial Sequence: Synthetic oligonucleotide
aucaguucagguuucgccu

SEQ ID NO: 2164862 - RNA, 19 nt, Artificial Sequence
  Description of Artificial Sequence: Synthetic oligonucleotide
gguucuaucuggcacaggc

SEQ ID NO: 2164863 - RNA, 19 nt, Artificial Sequence
  Description of Artificial Sequence: Synthetic oligonucleotide
uguaauuggguagaauuaa

SEQ ID NO: 2164864 - RNA, 19 nt, Artificial Sequence
  Description of Artificial Sequence: Synthetic oligonucleotide
uuaccuucagaaaccagaa

SEQ ID NO: 2164865 - RNA, 19 nt, Artificial Sequence
  Description of Artificial Sequence: Synthetic oligonucleotide
agaacugaauucucuccuc

SEQ ID NO: 2164866 - RNA, 19 nt, Artificial Sequence
  Description of Artificial Sequence: Synthetic oligonucleotide
ugguaaaggacaacagaac

SEQ ID NO: 2164867 - RNA, 19 nt, Artificial Sequence
  Description of Artificial Sequence: Synthetic oligonucleotide
aacuacuaauucugcauau

SEQ ID NO: 2164868 - RNA, 19 nt, Artificial Sequence
  Description of Artificial Sequence: Synthetic oligonucleotide
gaacugaauucucuccucc

SEQ ID NO: 2164869 - RNA, 19 nt, Artificial Sequence
  Description of Artificial Sequence: Synthetic oligonucleotide
uauccuaggaugucuuagc

SEQ ID NO: 2164870 - RNA, 19 nt, Artificial Sequence
  Description of Artificial Sequence: Synthetic oligonucleotide
aucucuagaaguuuuggua

SEQ ID NO: 2164871 - RNA, 19 nt, Artificial Sequence
  Description of Artificial Sequence: Synthetic oligonucleotide
acuagaacaaugugaccug

SEQ ID NO: 2164872 - RNA, 19 nt, Artificial Sequence
  Description of Artificial Sequence: Synthetic oligonucleotide
ugugcaaggcagaugcaca

SEQ ID NO: 2164873 - RNA, 19 nt, Artificial Sequence
  Description of Artificial Sequence: Synthetic oligonucleotide
aauauaucucuagaaguuu

SEQ ID NO: 2164874 - RNA, 19 nt, Artificial Sequence
  Description of Artificial Sequence: Synthetic oligonucleotide
agaaacaccaccagugcuc

SEQ ID NO: 2164875 - RNA, 19 nt, Artificial Sequence
  Description of Artificial Sequence: Synthetic oligonucleotide
uccagugagcuaaaaugug

SEQ ID NO: 2164876 - RNA, 19 nt, Artificial Sequence
  Description of Artificial Sequence: Synthetic oligonucleotide
ucagguuucgccuccugug

SEQ ID NO: 2164877 - RNA, 19 nt, Artificial Sequence
  Description of Artificial Sequence: Synthetic oligonucleotide
uaucucuagaaguuuuggu

SEQ ID NO: 2164878 - RNA, 19 nt, Artificial Sequence
  Description of Artificial Sequence: Synthetic oligonucleotide
uguucuuuguaaucuucac

SEQ ID NO: 2164879 - RNA, 19 nt, Artificial Sequence
  Description of Artificial Sequence: Synthetic oligonucleotide
uuuauucgccaauaccagu

SEQ ID NO: 2164880 - RNA, 19 nt, Artificial Sequence
  Description of Artificial Sequence: Synthetic oligonucleotide
uugguuuuaaaagggauuu

SEQ ID NO: 2164881 - RNA, 19 nt, Artificial Sequence
  Description of Artificial Sequence: Synthetic oligonucleotide
uccaaauuccccgaauucu

SEQ ID NO: 2164882 - RNA, 19 nt, Artificial Sequence
  Description of Artificial Sequence: Synthetic oligonucleotide
augcauuauaaacauuuaa

SEQ ID NO: 2164883 - RNA, 19 nt, Artificial Sequence
  Description of Artificial Sequence: Synthetic oligonucleotide
agcuacgucuucaggaugc

SEQ ID NO: 2164884 - RNA, 19 nt, Artificial Sequence
  Description of Artificial Sequence: Synthetic oligonucleotide
uguuccuaugaucugucau

SEQ ID NO: 2164885 - RNA, 19 nt, Artificial Sequence
  Description of Artificial Sequence: Synthetic oligonucleotide
cuaaggucaauuuuagaaa

SEQ ID NO: 2164886 - RNA, 19 nt, Artificial Sequence
  Description of Artificial Sequence: Synthetic oligonucleotide
uagcaaaagugugaguuug

SEQ ID NO: 2164887 - RNA, 19 nt, Artificial Sequence
  Description of Artificial Sequence: Synthetic oligonucleotide
uaaagaaccacuggucccu

SEQ ID NO: 2164888 - RNA, 19 nt, Artificial Sequence
  Description of Artificial Sequence: Synthetic oligonucleotide
agagacauucgaucacauc

SEQ ID NO: 2164889 - RNA, 19 nt, Artificial Sequence
  Description of Artificial Sequence: Synthetic oligonucleotide
cuaugaucugucauaucug

SEQ ID NO: 2164890 - RNA, 19 nt, Artificial Sequence
  Description of Artificial Sequence: Synthetic oligonucleotide
gugagcuaaaaugugaaca

SEQ ID NO: 2164891 - RNA, 19 nt, Artificial Sequence
  Description of Artificial Sequence: Synthetic oligonucleotide
ugcauauggguuuugcaua

SEQ ID NO: 2164892 - RNA, 19 nt, Artificial Sequence
  Description of Artificial Sequence: Synthetic oligonucleotide
uucgguucuaucuggcaca

SEQ ID NO: 2164893 - RNA, 19 nt, Artificial Sequence
  Description of Artificial Sequence: Synthetic oligonucleotide
caaaucauguaauugggua

SEQ ID NO: 2164894 - RNA, 19 nt, Artificial Sequence
  Description of Artificial Sequence: Synthetic oligonucleotide
guuuauucgccaauaccag

SEQ ID NO: 2164895 - RNA, 19 nt, Artificial Sequence
  Description of Artificial Sequence: Synthetic oligonucleotide
ugcucacuagaacaaugug

SEQ ID NO: 2164896 - RNA, 19 nt, Artificial Sequence
  Description of Artificial Sequence: Synthetic oligonucleotide
ucacacaagguaccaaauc

SEQ ID NO: 2164897 - RNA, 19 nt, Artificial Sequence
  Description of Artificial Sequence: Synthetic oligonucleotide
uccugauauccuaggaugu

SEQ ID NO: 2164898 - RNA, 19 nt, Artificial Sequence
  Description of Artificial Sequence: Synthetic oligonucleotide
aaauccuaacaaguugaca

SEQ ID NO: 2164899 - RNA, 19 nt, Artificial Sequence
  Description of Artificial Sequence: Synthetic oligonucleotide
agaugcacaaacucacaga

SEQ ID NO: 2164900 - RNA, 19 nt, Artificial Sequence
  Description of Artificial Sequence: Synthetic oligonucleotide
cagaugcacaaacucacag

SEQ ID NO: 2164901 - RNA, 19 nt, Artificial Sequence
  Description of Artificial Sequence: Synthetic oligonucleotide
caaugugaccugauugacc

SEQ ID NO: 2164902 - RNA, 19 nt, Artificial Sequence
  Description of Artificial Sequence: Synthetic oligonucleotide
uaaaucaguucagguuucg

SEQ ID NO: 2164903 - RNA, 19 nt, Artificial Sequence
  Description of Artificial Sequence: Synthetic oligonucleotide
gauagcaaaagugugaguu

SEQ ID NO: 2164904 - RNA, 19 nt, Artificial Sequence
  Description of Artificial Sequence: Synthetic oligonucleotide
uuagcuggacuuaccuuca

SEQ ID NO: 2164905 - RNA, 19 nt, Artificial Sequence
  Description of Artificial Sequence: Synthetic oligonucleotide
uccuccguuacuacuuuca

SEQ ID NO: 2164906 - RNA, 19 nt, Artificial Sequence
  Description of Artificial Sequence: Synthetic oligonucleotide
gauugacccagguccagug

SEQ ID NO: 2164907 - RNA, 19 nt, Artificial Sequence
  Description of Artificial Sequence: Synthetic oligonucleotide
augagaauuguucuuugua

SEQ ID NO: 2164908 - RNA, 19 nt, Artificial Sequence
  Description of Artificial Sequence: Synthetic oligonucleotide
acaucggcuucuccuaagg

SEQ ID NO: 2164909 - RNA, 19 nt, Artificial Sequence
  Description of Artificial Sequence: Synthetic oligonucleotide
gguagaauuaaagaaccac

SEQ ID NO: 2164910 - RNA, 19 nt, Artificial Sequence
  Description of Artificial Sequence: Synthetic oligonucleotide
auccuaacaaguugacaug

SEQ ID NO: 2164911 - RNA, 19 nt, Artificial Sequence
  Description of Artificial Sequence: Synthetic oligonucleotide
agucaacuacuaauucugc

SEQ ID NO: 2164912 - RNA, 19 nt, Artificial Sequence
  Description of Artificial Sequence: Synthetic oligonucleotide
agaaaauccaacaguggga

SEQ ID NO: 2164913 - RNA, 19 nt, Artificial Sequence
  Description of Artificial Sequence: Synthetic oligonucleotide
uaggacucagcauaauaau

SEQ ID NO: 2164914 - RNA, 19 nt, Artificial Sequence
  Description of Artificial Sequence: Synthetic oligonucleotide
aucguaucagucuaccuua

SEQ ID NO: 2164915 - RNA, 19 nt, Artificial Sequence
  Description of Artificial Sequence: Synthetic oligonucleotide
aaauuccccgaauucuuuu

SEQ ID NO: 2164916 - RNA, 19 nt, Artificial Sequence
  Description of Artificial Sequence: Synthetic oligonucleotide
aacagacaaauaaucguau

SEQ ID NO: 2164917 - RNA, 19 nt, Artificial Sequence
  Description of Artificial Sequence: Synthetic oligonucleotide
aaaccagaauaugucuaug

SEQ ID NO: 2164918 - RNA, 19 nt, Artificial Sequence
  Description of Artificial Sequence: Synthetic oligonucleotide
uucaucgcuggaauccaca

SEQ ID NO: 2164919 - RNA, 19 nt, Artificial Sequence
  Description of Artificial Sequence: Synthetic oligonucleotide
cuucgguucuaucuggcac

SEQ ID NO: 2164920 - RNA, 19 nt, Artificial Sequence
  Description of Artificial Sequence: Synthetic oligonucleotide
acaaguugacaugagaauu

SEQ ID NO: 2164921 - RNA, 19 nt, Artificial Sequence
  Description of Artificial Sequence: Synthetic oligonucleotide
cauucucucuucaucgcug

SEQ ID NO: 2164922 - RNA, 19 nt, Artificial Sequence
  Description of Artificial Sequence: Synthetic oligonucleotide
cucauugaccagcuucucc

SEQ ID NO: 2164923 - RNA, 19 nt, Artificial Sequence
  Description of Artificial Sequence: Synthetic oligonucleotide
gacauucgaucacaucggc

SEQ ID NO: 2164924 - RNA, 19 nt, Artificial Sequence
  Description of Artificial Sequence: Synthetic oligonucleotide
caaauccuaacaaguugac

SEQ ID NO: 2164925 - RNA, 19 nt, Artificial Sequence
  Description of Artificial Sequence: Synthetic oligonucleotide
gaauuguucuuuguaaucu

SEQ ID NO: 2164926 - RNA, 19 nt, Artificial Sequence
  Description of Artificial Sequence: Synthetic oligonucleotide
ucgccaauaccaguauagg

SEQ ID NO: 2164927 - RNA, 19 nt, Artificial Sequence
  Description of Artificial Sequence: Synthetic oligonucleotide
uaaucuucaccuugacaaa

SEQ ID NO: 2164928 - RNA, 19 nt, Artificial Sequence
  Description of Artificial Sequence: Synthetic oligonucleotide
cuaacaaguugacaugaga

SEQ ID NO: 2164929 - RNA, 19 nt, Artificial Sequence
  Description of Artificial Sequence: Synthetic oligonucleotide
uaaucguaucagucuaccu

SEQ ID NO: 2164930 - RNA, 19 nt, Artificial Sequence
  Description of Artificial Sequence: Synthetic oligonucleotide
cauguaauuggguagaauu

SEQ ID NO: 2164931 - RNA, 19 nt, Artificial Sequence
  Description of Artificial Sequence: Synthetic oligonucleotide
cuaaaucaguucagguuuc

SEQ ID NO: 2164932 - RNA, 19 nt, Artificial Sequence
  Description of Artificial Sequence: Synthetic oligonucleotide
ucuaucuggcacaggcacu

SEQ ID NO: 2164933 - RNA, 19 nt, Artificial Sequence
  Description of Artificial Sequence: Synthetic oligonucleotide
accuuagcuggacuuaccu

SEQ ID NO: 2164934 - RNA, 19 nt, Artificial Sequence
  Description of Artificial Sequence: Synthetic oligonucleotide
ugaauucucuccuccguua

SEQ ID NO: 2164935 - RNA, 19 nt, Artificial Sequence
  Description of Artificial Sequence: Synthetic oligonucleotide
agucaaagauggugacuuc

SEQ ID NO: 2164936 - RNA, 19 nt, Artificial Sequence
  Description of Artificial Sequence: Synthetic oligonucleotide
gaucacaucggcuucuccu

SEQ ID NO: 2164937 - RNA, 19 nt, Artificial Sequence
  Description of Artificial Sequence: Synthetic oligonucleotide
uccuaggaugucuuagcac

SEQ ID NO: 2164938 - RNA, 19 nt, Artificial Sequence
  Description of Artificial Sequence: Synthetic oligonucleotide
augucuauggucacacaag

SEQ ID NO: 2164939 - RNA, 19 nt, Artificial Sequence
  Description of Artificial Sequence: Synthetic oligonucleotide
auagcaaaagugugaguuu

SEQ ID NO: 2164940 - RNA, 19 nt, Artificial Sequence
  Description of Artificial Sequence: Synthetic oligonucleotide
ugucuuguuuauucgccaa

SEQ ID NO: 2164941 - RNA, 19 nt, Artificial Sequence
  Description of Artificial Sequence: Synthetic oligonucleotide
ucacuagaacaaugugacc

SEQ ID NO: 2164942 - RNA, 19 nt, Artificial Sequence
  Description of Artificial Sequence: Synthetic oligonucleotide
auggugacuucaaacuuuc

SEQ ID NO: 2164943 - RNA, 19 nt, Artificial Sequence
  Description of Artificial Sequence: Synthetic oligonucleotide
auccauuacuaaauauauc

SEQ ID NO: 2164944 - RNA, 19 nt, Artificial Sequence
  Description of Artificial Sequence: Synthetic oligonucleotide
ucguaucagucuaccuuag

SEQ ID NO: 2164945 - RNA, 19 nt, Artificial Sequence
  Description of Artificial Sequence: Synthetic oligonucleotide
uaucugagucaacuacuaa

SEQ ID NO: 2164946 - RNA, 19 nt, Artificial Sequence
  Description of Artificial Sequence: Synthetic oligonucleotide
acuacuaauucugcauaug

SEQ ID NO: 2164947 - RNA, 19 nt, Artificial Sequence
  Description of Artificial Sequence: Synthetic oligonucleotide
auauuaccccauaggacuc

SEQ ID NO: 2164948 - RNA, 19 nt, Artificial Sequence
  Description of Artificial Sequence: Synthetic oligonucleotide
agcacuucugacauugucu

SEQ ID NO: 2164949 - RNA, 19 nt, Artificial Sequence
  Description of Artificial Sequence: Synthetic oligonucleotide
auauuacaaaaugaaucaa

SEQ ID NO: 2164950 - RNA, 19 nt, Artificial Sequence
  Description of Artificial Sequence: Synthetic oligonucleotide
ucuuccaaauuccccgaau

SEQ ID NO: 2164951 - RNA, 19 nt, Artificial Sequence
  Description of Artificial Sequence: Synthetic oligonucleotide
agauggugacuucaaacuu

SEQ ID NO: 2164952 - RNA, 19 nt, Artificial Sequence
  Description of Artificial Sequence: Synthetic oligonucleotide
agguaccaaauccuaacaa

SEQ ID NO: 2164953 - RNA, 19 nt, Artificial Sequence
  Description of Artificial Sequence: Synthetic oligonucleotide
auaccaguauaggcuuucc

SEQ ID NO: 2164954 - RNA, 19 nt, Artificial Sequence
  Description of Artificial Sequence: Synthetic oligonucleotide
aaaccagaugaauguuaaa

SEQ ID NO: 2164955 - RNA, 19 nt, Artificial Sequence
  Description of Artificial Sequence: Synthetic oligonucleotide
cacuugugcucauugacca

SEQ ID NO: 2164956 - RNA, 19 nt, Artificial Sequence
  Description of Artificial Sequence: Synthetic oligonucleotide
ucuucgguucuaucuggca

SEQ ID NO: 2164957 - RNA, 19 nt, Artificial Sequence
  Description of Artificial Sequence: Synthetic oligonucleotide
ucaccuugacaaaggcaug

SEQ ID NO: 2164958 - RNA, 19 nt, Artificial Sequence
  Description of Artificial Sequence: Synthetic oligonucleotide
ucuuguuuauucgccaaua

SEQ ID NO: 2164959 - RNA, 19 nt, Artificial Sequence
  Description of Artificial Sequence: Synthetic oligonucleotide
uauucgccaauaccaguau

SEQ ID NO: 2164960 - RNA, 19 nt, Artificial Sequence
  Description of Artificial Sequence: Synthetic oligonucleotide
cugagucaacuacuaauuc

SEQ ID NO: 2164961 - RNA, 19 nt, Artificial Sequence
  Description of Artificial Sequence: Synthetic oligonucleotide
acaaaggcaugcuuucaau

SEQ ID NO: 2164962 - RNA, 19 nt, Artificial Sequence
  Description of Artificial Sequence: Synthetic oligonucleotide
acucacagaaacaccacca

SEQ ID NO: 2164963 - RNA, 19 nt, Artificial Sequence
  Description of Artificial Sequence: Synthetic oligonucleotide
agagagacauucgaucaca

SEQ ID NO: 2164964 - RNA, 19 nt, Artificial Sequence
  Description of Artificial Sequence: Synthetic oligonucleotide
ugacaugagaauuguucuu

SEQ ID NO: 2164965 - RNA, 19 nt, Artificial Sequence
  Description of Artificial Sequence: Synthetic oligonucleotide
uaccaguauaggcuuuccu

SEQ ID NO: 2164966 - RNA, 19 nt, Artificial Sequence
  Description of Artificial Sequence: Synthetic oligonucleotide
gugaacacaaugcauuaua

SEQ ID NO: 2164967 - RNA, 19 nt, Artificial Sequence
  Description of Artificial Sequence: Synthetic oligonucleotide
uuuccaccucccaagucaa

SEQ ID NO: 2164968 - RNA, 19 nt, Artificial Sequence
  Description of Artificial Sequence: Synthetic oligonucleotide
acaacaaauauuaccccau

SEQ ID NO: 2164969 - RNA, 19 nt, Artificial Sequence
  Description of Artificial Sequence: Synthetic oligonucleotide
gaaaccagaauaugucuau

SEQ ID NO: 2164970 - RNA, 19 nt, Artificial Sequence
  Description of Artificial Sequence: Synthetic oligonucleotide
aguuugguuuuaaaaggga

SEQ ID NO: 2164971 - RNA, 19 nt, Artificial Sequence
  Description of Artificial Sequence: Synthetic oligonucleotide
agugcucacuagaacaaug

SEQ ID NO: 2164972 - RNA, 19 nt, Artificial Sequence
  Description of Artificial Sequence: Synthetic oligonucleotide
augugaacacaaugcauua

SEQ ID NO: 2164973 - RNA, 19 nt, Artificial Sequence
  Description of Artificial Sequence: Synthetic oligonucleotide
ugaccugauugacccaggu

SEQ ID NO: 2164974 - RNA, 19 nt, Artificial Sequence
  Description of Artificial Sequence: Synthetic oligonucleotide
cagaugaauguuaaaagau

SEQ ID NO: 2164975 - RNA, 19 nt, Artificial Sequence
  Description of Artificial Sequence: Synthetic oligonucleotide
ucaucgcuggaauccacaa

SEQ ID NO: 2164976 - RNA, 19 nt, Artificial Sequence
  Description of Artificial Sequence: Synthetic oligonucleotide
cacuagaacaaugugaccu

SEQ ID NO: 2164977 - RNA, 19 nt, Artificial Sequence
  Description of Artificial Sequence: Synthetic oligonucleotide
ggacucagcauaauaauuc

SEQ ID NO: 2164978 - RNA, 19 nt, Artificial Sequence
  Description of Artificial Sequence: Synthetic oligonucleotide
uuccuaugaucugucauau

SEQ ID NO: 2164979 - RNA, 19 nt, Artificial Sequence
  Description of Artificial Sequence: Synthetic oligonucleotide
uagaacaaugugaccugau

SEQ ID NO: 2164980 - RNA, 19 nt, Artificial Sequence
  Description of Artificial Sequence: Synthetic oligonucleotide
uugugcucauugaccagcu

SEQ ID NO: 2164981 - RNA, 19 nt, Artificial Sequence
  Description of Artificial Sequence: Synthetic oligonucleotide
agcaaaagugugaguuugg

SEQ ID NO: 2164982 - RNA, 19 nt, Artificial Sequence
  Description of Artificial Sequence: Synthetic oligonucleotide
ucucuccuccguuacuacu

SEQ ID NO: 2164983 - RNA, 19 nt, Artificial Sequence
  Description of Artificial Sequence: Synthetic oligonucleotide
ccagaugaauguuaaaaga

SEQ ID NO: 2164984 - RNA, 19 nt, Artificial Sequence
  Description of Artificial Sequence: Synthetic oligonucleotide
uaccuuagcuggacuuacc

SEQ ID NO: 2164985 - RNA, 19 nt, Artificial Sequence
  Description of Artificial Sequence: Synthetic oligonucleotide
acacaagguaccaaauccu

SEQ ID NO: 2164986 - RNA, 19 nt, Artificial Sequence
  Description of Artificial Sequence: Synthetic oligonucleotide
cacaaugcauuauaaacau

SEQ ID NO: 2164987 - RNA, 19 nt, Artificial Sequence
  Description of Artificial Sequence: Synthetic oligonucleotide
ugacccagguccagugagc

SEQ ID NO: 2164988 - RNA, 19 nt, Artificial Sequence
  Description of Artificial Sequence: Synthetic oligonucleotide
uaaggcgccuccuugucuu

SEQ ID NO: 2164989 - RNA, 19 nt, Artificial Sequence
  Description of Artificial Sequence: Synthetic oligonucleotide
uccuaaggcgccuccuugu

SEQ ID NO: 2164990 - RNA, 19 nt, Artificial Sequence
  Description of Artificial Sequence: Synthetic oligonucleotide
gaauaugucuauggucaca

SEQ ID NO: 2164991 - RNA, 19 nt, Artificial Sequence
  Description of Artificial Sequence: Synthetic oligonucleotide
gaaacaccaccagugcuca

SEQ ID NO: 2164992 - RNA, 19 nt, Artificial Sequence
  Description of Artificial Sequence: Synthetic oligonucleotide
uuuccuugucuaaggucaa

SEQ ID NO: 2164993 - RNA, 19 nt, Artificial Sequence
  Description of Artificial Sequence: Synthetic oligonucleotide
agaaaccagaauaugucua

SEQ ID NO: 2164994 - RNA, 19 nt, Artificial Sequence
  Description of Artificial Sequence: Synthetic oligonucleotide
gucaaagauggugacuuca

SEQ ID NO: 2164995 - RNA, 19 nt, Artificial Sequence
  Description of Artificial Sequence: Synthetic oligonucleotide
agauagcaaaagugugagu

SEQ ID NO: 2164996 - RNA, 19 nt, Artificial Sequence
  Description of Artificial Sequence: Synthetic oligonucleotide
auguaauuggguagaauua

SEQ ID NO: 2164997 - RNA, 19 nt, Artificial Sequence
  Description of Artificial Sequence: Synthetic oligonucleotide
ucuaccuuagcuggacuua

SEQ ID NO: 2164998 - RNA, 19 nt, Artificial Sequence
  Description of Artificial Sequence: Synthetic oligonucleotide
ugugaacacaaugcauuau

SEQ ID NO: 2164999 - RNA, 19 nt, Artificial Sequence
  Description of Artificial Sequence: Synthetic oligonucleotide
auugaccagcuucuccaga

SEQ ID NO: 2165000 - RNA, 19 nt, Artificial Sequence
  Description of Artificial Sequence: Synthetic oligonucleotide
acuacauuaugaauccauu

SEQ ID NO: 2165001 - RNA, 19 nt, Artificial Sequence
  Description of Artificial Sequence: Synthetic oligonucleotide
guaccaaauccuaacaagu

SEQ ID NO: 2165002 - RNA, 19 nt, Artificial Sequence
  Description of Artificial Sequence: Synthetic oligonucleotide
aguauaggcuuuccugaua

SEQ ID NO: 2165003 - RNA, 19 nt, Artificial Sequence
  Description of Artificial Sequence: Synthetic oligonucleotide
agguccagugagcuaaaau

SEQ ID NO: 2165004 - RNA, 19 nt, Artificial Sequence
  Description of Artificial Sequence: Synthetic oligonucleotide
uauuaccccauaggacuca

SEQ ID NO: 2165005 - RNA, 19 nt, Artificial Sequence
  Description of Artificial Sequence: Synthetic oligonucleotide
caucggcuucuccuaaggc

SEQ ID NO: 2165006 - RNA, 19 nt, Artificial Sequence
  Description of Artificial Sequence: Synthetic oligonucleotide
guauaggcuuuccugauau

SEQ ID NO: 2165007 - RNA, 19 nt, Artificial Sequence
  Description of Artificial Sequence: Synthetic oligonucleotide
ccauuacuaaauauaucuc

SEQ ID NO: 2165008 - RNA, 19 nt, Artificial Sequence
  Description of Artificial Sequence: Synthetic oligonucleotide
uuagcacuucugacauugu

SEQ ID NO: 2165009 - RNA, 19 nt, Artificial Sequence
  Description of Artificial Sequence: Synthetic oligonucleotide
cauucgaucacaucggcuu

SEQ ID NO: 2165010 - RNA, 19 nt, Artificial Sequence
  Description of Artificial Sequence: Synthetic oligonucleotide
ggacuuaccuucagaaacc

SEQ ID NO: 2165011 - RNA, 19 nt, Artificial Sequence
  Description of Artificial Sequence: Synthetic oligonucleotide
ucagugugcaaggcagaug

SEQ ID NO: 2165012 - RNA, 19 nt, Artificial Sequence
  Description of Artificial Sequence: Synthetic oligonucleotide
cagugagcuaaaaugugaa

SEQ ID NO: 2165013 - RNA, 19 nt, Artificial Sequence
  Description of Artificial Sequence: Synthetic oligonucleotide
uggugacuucaaacuuucc

SEQ ID NO: 2165014 - RNA, 19 nt, Artificial Sequence
  Description of Artificial Sequence: Synthetic oligonucleotide
ucgguucuaucuggcacag

SEQ ID NO: 2165015 - RNA, 19 nt, Artificial Sequence
  Description of Artificial Sequence: Synthetic oligonucleotide
ucauguaauuggguagaau

SEQ ID NO: 2165016 - RNA, 19 nt, Artificial Sequence
  Description of Artificial Sequence: Synthetic oligonucleotide
gugacuucaaacuuuccuu

SEQ ID NO: 2165017 - RNA, 19 nt, Artificial Sequence
  Description of Artificial Sequence: Synthetic oligonucleotide
gagcuacgucuucaggaug

SEQ ID NO: 2165018 - RNA, 19 nt, Artificial Sequence
  Description of Artificial Sequence: Synthetic oligonucleotide
gaccugauugacccagguc

SEQ ID NO: 2165019 - RNA, 19 nt, Artificial Sequence
  Description of Artificial Sequence: Synthetic oligonucleotide
ccuaugaucugucauaucu

SEQ ID NO: 2165020 - RNA, 19 nt, Artificial Sequence
  Description of Artificial Sequence: Synthetic oligonucleotide
ccacaacaaauauuacccc

SEQ ID NO: 2165021 - RNA, 19 nt, Artificial Sequence
  Description of Artificial Sequence: Synthetic oligonucleotide
cuaccuuagcuggacuuac

SEQ ID NO: 2165022 - RNA, 19 nt, Artificial Sequence
  Description of Artificial Sequence: Synthetic oligonucleotide
auaugucuauggucacaca

SEQ ID NO: 2165023 - RNA, 19 nt, Artificial Sequence
  Description of Artificial Sequence: Synthetic oligonucleotide
cucuaaaucaguucagguu

SEQ ID NO: 2165024 - RNA, 19 nt, Artificial Sequence
  Description of Artificial Sequence: Synthetic oligonucleotide
ggacaacagaacugaauuc

SEQ ID NO: 2165025 - RNA, 19 nt, Artificial Sequence
  Description of Artificial Sequence: Synthetic oligonucleotide
caacuacuaauucugcaua

SEQ ID NO: 2165026 - RNA, 19 nt, Artificial Sequence
  Description of Artificial Sequence: Synthetic oligonucleotide
gauauccuaggaugucuua

SEQ ID NO: 2165027 - RNA, 19 nt, Artificial Sequence
  Description of Artificial Sequence: Synthetic oligonucleotide
gcucacuagaacaauguga

SEQ ID NO: 2165028 - RNA, 19 nt, Artificial Sequence
  Description of Artificial Sequence: Synthetic oligonucleotide
gugugcaaggcagaugcac

SEQ ID NO: 2165029 - RNA, 19 nt, Artificial Sequence
  Description of Artificial Sequence: Synthetic oligonucleotide
uucgaucacaucggcuucu

SEQ ID NO: 2165030 - RNA, 19 nt, Artificial Sequence
  Description of Artificial Sequence: Synthetic oligonucleotide
gacuuaccuucagaaacca

SEQ ID NO: 2165031 - RNA, 19 nt, Artificial Sequence
  Description of Artificial Sequence: Synthetic oligonucleotide
ugauugacccagguccagu

SEQ ID NO: 2165032 - RNA, 19 nt, Artificial Sequence
  Description of Artificial Sequence: Synthetic oligonucleotide
gucauaucugagucaacua

SEQ ID NO: 2165033 - RNA, 19 nt, Artificial Sequence
  Description of Artificial Sequence: Synthetic oligonucleotide
uccuugucuaaggucaauu

SEQ ID NO: 2165034 - RNA, 19 nt, Artificial Sequence
  Description of Artificial Sequence: Synthetic oligonucleotide
auuaccccauaggacucag

SEQ ID NO: 2165035 - RNA, 19 nt, Artificial Sequence
  Description of Artificial Sequence: Synthetic oligonucleotide
auccaacagugggagcuac

SEQ ID NO: 2165036 - RNA, 19 nt, Artificial Sequence
  Description of Artificial Sequence: Synthetic oligonucleotide
cuaauucugcauauggguu

SEQ ID NO: 2165037 - RNA, 19 nt, Artificial Sequence
  Description of Artificial Sequence: Synthetic oligonucleotide
gacuucaaacuuuccuugu

SEQ ID NO: 2165038 - RNA, 19 nt, Artificial Sequence
  Description of Artificial Sequence: Synthetic oligonucleotide
uuaccccauaggacucagc

SEQ ID NO: 2165039 - RNA, 19 nt, Artificial Sequence
  Description of Artificial Sequence: Synthetic oligonucleotide
agucuaccuuagcuggacu

SEQ ID NO: 2165040 - RNA, 19 nt, Artificial Sequence
  Description of Artificial Sequence: Synthetic oligonucleotide
guaauuggguagaauuaaa

SEQ ID NO: 2165041 - RNA, 19 nt, Artificial Sequence
  Description of Artificial Sequence: Synthetic oligonucleotide
gccucuaaaucaguucagg

SEQ ID NO: 2165042 - RNA, 19 nt, Artificial Sequence
  Description of Artificial Sequence: Synthetic oligonucleotide
gucuaaggucaauuuuaga

SEQ ID NO: 2165043 - RNA, 19 nt, Artificial Sequence
  Description of Artificial Sequence: Synthetic oligonucleotide
cuucaucgcuggaauccac

SEQ ID NO: 2165044 - RNA, 19 nt, Artificial Sequence
  Description of Artificial Sequence: Synthetic oligonucleotide
gagccuuuugccucuaaau

SEQ ID NO: 2165045 - RNA, 19 nt, Artificial Sequence
  Description of Artificial Sequence: Synthetic oligonucleotide
ucgcuggaauccacaacaa

SEQ ID NO: 2165046 - RNA, 19 nt, Artificial Sequence
  Description of Artificial Sequence: Synthetic oligonucleotide
ggguuuugcauagaaauua

SEQ ID NO: 2165047 - RNA, 19 nt, Artificial Sequence
  Description of Artificial Sequence: Synthetic oligonucleotide
cuccuaaggcgccuccuug

SEQ ID NO: 2165048 - RNA, 19 nt, Artificial Sequence
  Description of Artificial Sequence: Synthetic oligonucleotide
cacaagguaccaaauccua

SEQ ID NO: 2165049 - RNA, 19 nt, Artificial Sequence
  Description of Artificial Sequence: Synthetic oligonucleotide
acaagguaccaaauccuaa

SEQ ID NO: 2165050 - RNA, 19 nt, Artificial Sequence
  Description of Artificial Sequence: Synthetic oligonucleotide
gcauaauaauucuuccaaa

SEQ ID NO: 2165051 - RNA, 19 nt, Artificial Sequence
  Description of Artificial Sequence: Synthetic oligonucleotide
aggcuuuccugauauccua

SEQ ID NO: 2165052 - RNA, 19 nt, Artificial Sequence
  Description of Artificial Sequence: Synthetic oligonucleotide
ccuaacaaguugacaugag

SEQ ID NO: 2165053 - RNA, 19 nt, Artificial Sequence
  Description of Artificial Sequence: Synthetic oligonucleotide
ccaguauaggcuuuccuga

SEQ ID NO: 2165054 - RNA, 19 nt, Artificial Sequence
  Description of Artificial Sequence: Synthetic oligonucleotide
aggacucagcauaauaauu

SEQ ID NO: 2165055 - RNA, 19 nt, Artificial Sequence
  Description of Artificial Sequence: Synthetic oligonucleotide
gcaugcuuucaauugaaua

SEQ ID NO: 2165056 - RNA, 19 nt, Artificial Sequence
  Description of Artificial Sequence: Synthetic oligonucleotide
gacaugagaauuguucuuu

SEQ ID NO: 2165057 - RNA, 19 nt, Artificial Sequence
  Description of Artificial Sequence: Synthetic oligonucleotide
acuuaccuucagaaaccag

SEQ ID NO: 2165058 - RNA, 19 nt, Artificial Sequence
  Description of Artificial Sequence: Synthetic oligonucleotide
acauucgaucacaucggcu

SEQ ID NO: 2165059 - RNA, 19 nt, Artificial Sequence
  Description of Artificial Sequence: Synthetic oligonucleotide
guccagugagcuaaaaugu

SEQ ID NO: 2165060 - RNA, 19 nt, Artificial Sequence
  Description of Artificial Sequence: Synthetic oligonucleotide
gccaauaccaguauaggcu

SEQ ID NO: 2165061 - RNA, 19 nt, Artificial Sequence
  Description of Artificial Sequence: Synthetic oligonucleotide
aauccaacagugggagcua

SEQ ID NO: 2165062 - RNA, 19 nt, Artificial Sequence
  Description of Artificial Sequence: Synthetic oligonucleotide
guuugguuuuaaaagggau

SEQ ID NO: 2165063 - RNA, 19 nt, Artificial Sequence
  Description of Artificial Sequence: Synthetic oligonucleotide
auucgccaauaccaguaua

SEQ ID NO: 2165064 - RNA, 19 nt, Artificial Sequence
  Description of Artificial Sequence: Synthetic oligonucleotide
caccagugcucacuagaac

SEQ ID NO: 2165065 - RNA, 19 nt, Artificial Sequence
  Description of Artificial Sequence: Synthetic oligonucleotide
ucuccuccguuacuacuuu

SEQ ID NO: 2165066 - RNA, 19 nt, Artificial Sequence
  Description of Artificial Sequence: Synthetic oligonucleotide
auacuacauuaugaaucca

SEQ ID NO: 2165067 - RNA, 19 nt, Artificial Sequence
  Description of Artificial Sequence: Synthetic oligonucleotide
uccuaugaucugucauauc

SEQ ID NO: 2165068 - RNA, 19 nt, Artificial Sequence
  Description of Artificial Sequence: Synthetic oligonucleotide
gaaccacuggucccuucca

SEQ ID NO: 2165069 - RNA, 19 nt, Artificial Sequence
  Description of Artificial Sequence: Synthetic oligonucleotide
gauggugacuucaaacuuu

SEQ ID NO: 2165070 - RNA, 19 nt, Artificial Sequence
  Description of Artificial Sequence: Synthetic oligonucleotide
auggucacacaagguacca

SEQ ID NO: 2165071 - RNA, 19 nt, Artificial Sequence
  Description of Artificial Sequence: Synthetic oligonucleotide
ugguuuuaaaagggauuuu

SEQ ID NO: 2165072 - RNA, 19 nt, Artificial Sequence
  Description of Artificial Sequence: Synthetic oligonucleotide
cuugucuaaggucaauuuu

SEQ ID NO: 2165073 - RNA, 19 nt, Artificial Sequence
  Description of Artificial Sequence: Synthetic oligonucleotide
aguuugcucucguucucuu

SEQ ID NO: 2165074 - RNA, 19 nt, Artificial Sequence
  Description of Artificial Sequence: Synthetic oligonucleotide
accccauaggacucagcau

SEQ ID NO: 2165075 - RNA, 19 nt, Artificial Sequence
  Description of Artificial Sequence: Synthetic oligonucleotide
caacagugggagcuacguc

SEQ ID NO: 2165076 - RNA, 19 nt, Artificial Sequence
  Description of Artificial Sequence: Synthetic oligonucleotide
cgccaauaccaguauaggc

SEQ ID NO: 2165077 - RNA, 19 nt, Artificial Sequence
  Description of Artificial Sequence: Synthetic oligonucleotide
gugcaaggcagaugcacaa

SEQ ID NO: 2165078 - RNA, 19 nt, Artificial Sequence
  Description of Artificial Sequence: Synthetic oligonucleotide
cuccguuacuacuuucaaa

SEQ ID NO: 2165079 - RNA, 19 nt, Artificial Sequence
  Description of Artificial Sequence: Synthetic oligonucleotide
ccagugagcuaaaauguga

SEQ ID NO: 2165080 - RNA, 19 nt, Artificial Sequence
  Description of Artificial Sequence: Synthetic oligonucleotide
uucuccagagagagacauu

SEQ ID NO: 2165081 - RNA, 19 nt, Artificial Sequence
  Description of Artificial Sequence: Synthetic oligonucleotide
guucuaucuggcacaggca

SEQ ID NO: 2165082 - RNA, 19 nt, Artificial Sequence
  Description of Artificial Sequence: Synthetic oligonucleotide
cugauugacccagguccag

SEQ ID NO: 2165083 - RNA, 19 nt, Artificial Sequence
  Description of Artificial Sequence: Synthetic oligonucleotide
aucauguaauuggguagaa

SEQ ID NO: 2165084 - RNA, 19 nt, Artificial Sequence
  Description of Artificial Sequence: Synthetic oligonucleotide
agugugaguuugguuuuaa

SEQ ID NO: 2165085 - RNA, 19 nt, Artificial Sequence
  Description of Artificial Sequence: Synthetic oligonucleotide
ugugcucauugaccagcuu

SEQ ID NO: 2165086 - RNA, 19 nt, Artificial Sequence
  Description of Artificial Sequence: Synthetic oligonucleotide
augugaccugauugaccca

SEQ ID NO: 2165087 - RNA, 19 nt, Artificial Sequence
  Description of Artificial Sequence: Synthetic oligonucleotide
gugugaguuugguuuuaaa

SEQ ID NO: 2165088 - RNA, 19 nt, Artificial Sequence
  Description of Artificial Sequence: Synthetic oligonucleotide
cagaaacaccaccagugcu

SEQ ID NO: 2165089 - RNA, 19 nt, Artificial Sequence
  Description of Artificial Sequence: Synthetic oligonucleotide
agguuucgccuccuguguu

SEQ ID NO: 2165090 - RNA, 19 nt, Artificial Sequence
  Description of Artificial Sequence: Synthetic oligonucleotide
ggaugucuuagcacuucug

SEQ ID NO: 2165091 - RNA, 19 nt, Artificial Sequence
  Description of Artificial Sequence: Synthetic oligonucleotide
cugauauccuaggaugucu

SEQ ID NO: 2165092 - RNA, 19 nt, Artificial Sequence
  Description of Artificial Sequence: Synthetic oligonucleotide
caaaagugugaguuugguu

SEQ ID NO: 2165093 - RNA, 19 nt, Artificial Sequence
  Description of Artificial Sequence: Synthetic oligonucleotide
aggcaugcuuucaauugaa

SEQ ID NO: 2165094 - RNA, 19 nt, Artificial Sequence
  Description of Artificial Sequence: Synthetic oligonucleotide
ucgaucacaucggcuucuc

SEQ ID NO: 2165095 - RNA, 19 nt, Artificial Sequence
  Description of Artificial Sequence: Synthetic oligonucleotide
cuccuccguuacuacuuuc

SEQ ID NO: 2165096 - RNA, 19 nt, Artificial Sequence
  Description of Artificial Sequence: Synthetic oligonucleotide
uuccuugucuaaggucaau

SEQ ID NO: 2165097 - RNA, 19 nt, Artificial Sequence
  Description of Artificial Sequence: Synthetic oligonucleotide
ccuguguuccuaugaucug

SEQ ID NO: 2165098 - RNA, 19 nt, Artificial Sequence
  Description of Artificial Sequence: Synthetic oligonucleotide
gucuaccuuagcuggacuu

SEQ ID NO: 2165099 - RNA, 19 nt, Artificial Sequence
  Description of Artificial Sequence: Synthetic oligonucleotide
ggagcuacgucuucaggau

SEQ ID NO: 2165100 - RNA, 19 nt, Artificial Sequence
  Description of Artificial Sequence: Synthetic oligonucleotide
ccccauaggacucagcaua

SEQ ID NO: 2165101 - RNA, 19 nt, Artificial Sequence
  Description of Artificial Sequence: Synthetic oligonucleotide
ggguagaauuaaagaacca

SEQ ID NO: 2165102 - RNA, 19 nt, Artificial Sequence
  Description of Artificial Sequence: Synthetic oligonucleotide
ucgccuccuguguuccuau

SEQ ID NO: 2165103 - RNA, 19 nt, Artificial Sequence
  Description of Artificial Sequence: Synthetic oligonucleotide
ccguuacuacuuucaaauc

SEQ ID NO: 2165104 - RNA, 19 nt, Artificial Sequence
  Description of Artificial Sequence: Synthetic oligonucleotide
cuacgucuucaggaugcuc

SEQ ID NO: 2165105 - RNA, 19 nt, Artificial Sequence
  Description of Artificial Sequence: Synthetic oligonucleotide
caagucaaagauggugacu

SEQ ID NO: 2165106 - RNA, 19 nt, Artificial Sequence
  Description of Artificial Sequence: Synthetic oligonucleotide
ccugauugacccaggucca

SEQ ID NO: 2165107 - RNA, 19 nt, Artificial Sequence
  Description of Artificial Sequence: Synthetic oligonucleotide
ccugauauccuaggauguc

SEQ ID NO: 2165108 - RNA, 19 nt, Artificial Sequence
  Description of Artificial Sequence: Synthetic oligonucleotide
cucguucucuuucuucggu

SEQ ID NO: 2165109 - RNA, 19 nt, Artificial Sequence
  Description of Artificial Sequence: Synthetic oligonucleotide
agugugcaaggcagaugca

SEQ ID NO: 2165110 - RNA, 19 nt, Artificial Sequence
  Description of Artificial Sequence: Synthetic oligonucleotide
cucuccuccguuacuacuu

SEQ ID NO: 2165111 - RNA, 19 nt, Artificial Sequence
  Description of Artificial Sequence: Synthetic oligonucleotide
uggucccuuccaguucagu

SEQ ID NO: 2165112 - RNA, 19 nt, Artificial Sequence
  Description of Artificial Sequence: Synthetic oligonucleotide
gucuauggucacacaaggu

SEQ ID NO: 2165113 - RNA, 19 nt, Artificial Sequence
  Description of Artificial Sequence: Synthetic oligonucleotide
cagguuucgccuccugugu

SEQ ID NO: 2165114 - RNA, 19 nt, Artificial Sequence
  Description of Artificial Sequence: Synthetic oligonucleotide
ccucuaaaucaguucaggu

SEQ ID NO: 2165115 - RNA, 19 nt, Artificial Sequence
  Description of Artificial Sequence: Synthetic oligonucleotide
gagagacauucgaucacau

SEQ ID NO: 2165116 - RNA, 19 nt, Artificial Sequence
  Description of Artificial Sequence: Synthetic oligonucleotide
cuaaggcgccuccuugucu

SEQ ID NO: 2165117 - RNA, 19 nt, Artificial Sequence
  Description of Artificial Sequence: Synthetic oligonucleotide
gcuaaaaugugaacacaau

SEQ ID NO: 2165118 - RNA, 19 nt, Artificial Sequence
  Description of Artificial Sequence: Synthetic oligonucleotide
gcaaaagugugaguuuggu

SEQ ID NO: 2165119 - RNA, 19 nt, Artificial Sequence
  Description of Artificial Sequence: Synthetic oligonucleotide
ccuaaggcgccuccuuguc

SEQ ID NO: 2165120 - RNA, 19 nt, Artificial Sequence
  Description of Artificial Sequence: Synthetic oligonucleotide
cagugggagcuacgucuuc

SEQ ID NO: 2165121 - RNA, 19 nt, Artificial Sequence
  Description of Artificial Sequence: Synthetic oligonucleotide
ggucccuuccaguucaguu

SEQ ID NO: 2165122 - RNA, 19 nt, Artificial Sequence
  Description of Artificial Sequence: Synthetic oligonucleotide
ccaauaccaguauaggcuu

SEQ ID NO: 2165123 - RNA, 19 nt, Artificial Sequence
  Description of Artificial Sequence: Synthetic oligonucleotide
gcacaggcacuugugcuca

SEQ ID NO: 2165124 - RNA, 19 nt, Artificial Sequence
  Description of Artificial Sequence: Synthetic oligonucleotide
ccaccagugcucacuagaa

SEQ ID NO: 2165125 - RNA, 19 nt, Artificial Sequence
  Description of Artificial Sequence: Synthetic oligonucleotide
acccagguccagugagcua

SEQ ID NO: 2165126 - RNA, 19 nt, Artificial Sequence
  Description of Artificial Sequence: Synthetic oligonucleotide
caauaccaguauaggcuuu

SEQ ID NO: 2165127 - RNA, 19 nt, Artificial Sequence
  Description of Artificial Sequence: Synthetic oligonucleotide
ccagagagagacauucgau

SEQ ID NO: 2165128 - RNA, 19 nt, Artificial Sequence
  Description of Artificial Sequence: Synthetic oligonucleotide
aggcgccuccuugucuugu

SEQ ID NO: 2165129 - RNA, 19 nt, Artificial Sequence
  Description of Artificial Sequence: Synthetic oligonucleotide
gaugagccuuuugccucua

SEQ ID NO: 2165130 - RNA, 19 nt, Artificial Sequence
  Description of Artificial Sequence: Synthetic oligonucleotide
ccuugucuaaggucaauuu

SEQ ID NO: 2165131 - RNA, 19 nt, Artificial Sequence
  Description of Artificial Sequence: Synthetic oligonucleotide
caguucaguuugcucucgu

SEQ ID NO: 2165132 - RNA, 19 nt, Artificial Sequence
  Description of Artificial Sequence: Synthetic oligonucleotide
cgaucacaucggcuucucc

SEQ ID NO: 2165133 - RNA, 19 nt, Artificial Sequence
  Description of Artificial Sequence: Synthetic oligonucleotide
ccauucucucuucaucgcu

SEQ ID NO: 2165134 - RNA, 19 nt, Artificial Sequence
  Description of Artificial Sequence: Synthetic oligonucleotide
gcuucuccuaaggcgccuc

SEQ ID NO: 2165135 - RNA, 19 nt, Artificial Sequence
  Description of Artificial Sequence: Synthetic oligonucleotide
ccaacagugggagcuacgu

SEQ ID NO: 2165136 - RNA, 19 nt, Artificial Sequence
  Description of Artificial Sequence: Synthetic oligonucleotide
cggcuucuccuaaggcgcc

SEQ ID NO: 2165137 - RNA, 19 nt, Artificial Sequence
  Description of Artificial Sequence: Synthetic oligonucleotide
cagugcucacuagaacaau

SEQ ID NO: 2165138 - RNA, 19 nt, Artificial Sequence
  Description of Artificial Sequence: Synthetic oligonucleotide
cagguccagugagcuaaaa

SEQ ID NO: 2165139 - RNA, 19 nt, Artificial Sequence
  Description of Artificial Sequence: Synthetic oligonucleotide
ggcaugcuuucaauugaau

SEQ ID NO: 2165140 - RNA, 19 nt, Artificial Sequence
  Description of Artificial Sequence: Synthetic oligonucleotide
ccuuagcuggacuuaccuu

SEQ ID NO: 2165141 - RNA, 19 nt, Artificial Sequence
  Description of Artificial Sequence: Synthetic oligonucleotide
cgcuggaauccacaacaaa

SEQ ID NO: 2165142 - RNA, 19 nt, Artificial Sequence
  Description of Artificial Sequence: Synthetic oligonucleotide
gcuacgucuucaggaugcu

SEQ ID NO: 2165143 - RNA, 19 nt, Artificial Sequence
  Description of Artificial Sequence: Synthetic oligonucleotide
ccacuggucccuuccaguu

SEQ ID NO: 2165144 - RNA, 19 nt, Artificial Sequence
  Description of Artificial Sequence: Synthetic oligonucleotide
ccagguccagugagcuaaa

SEQ ID NO: 2165145 - RNA, 19 nt, Artificial Sequence
  Description of Artificial Sequence: Synthetic oligonucleotide
cgguucuaucuggcacagg

SEQ ID NO: 2165146 - RNA, 19 nt, Artificial Sequence
  Description of Artificial Sequence: Synthetic oligonucleotide
cgccuccuguguuccuaug

SEQ ID NO: 2165147 - RNA, 19 nt, Artificial Sequence
  Description of Artificial Sequence: Synthetic oligonucleotide
cacaggcacuugugcucau

SEQ ID NO: 2165148 - RNA, 19 nt, Artificial Sequence
  Description of Artificial Sequence: Synthetic oligonucleotide
ggcgccuccuugucuuguu

SEQ ID NO: 2165149 - RNA, 19 nt, Artificial Sequence
  Description of Artificial Sequence: Synthetic oligonucleotide
ccauaggacucagcauaau

SEQ ID NO: 2165150 - RNA, 19 nt, Artificial Sequence
  Description of Artificial Sequence: Synthetic oligonucleotide
aaugaucgaggccacagcc

SEQ ID NO: 2165151 - RNA, 19 nt, Artificial Sequence
  Description of Artificial Sequence: Synthetic oligonucleotide
aguguauucagaaugaucg

SEQ ID NO: 2165152 - RNA, 19 nt, Artificial Sequence
  Description of Artificial Sequence: Synthetic oligonucleotide
gacucaaacacuuuggcag

SEQ ID NO: 2165153 - RNA, 19 nt, Artificial Sequence
  Description of Artificial Sequence: Synthetic oligonucleotide
uucagaaugaucgaggcca

SEQ ID NO: 2165154 - RNA, 19 nt, Artificial Sequence
  Description of Artificial Sequence: Synthetic oligonucleotide
aaggaaaguguauucagaa

SEQ ID NO: 2165155 - RNA, 19 nt, Artificial Sequence
  Description of Artificial Sequence: Synthetic oligonucleotide
ggaaaguguauucagaaug

SEQ ID NO: 2165156 - RNA, 19 nt, Artificial Sequence
  Description of Artificial Sequence: Synthetic oligonucleotide
agaaggaaaguguauucag

SEQ ID NO: 2165157 - RNA, 19 nt, Artificial Sequence
  Description of Artificial Sequence: Synthetic oligonucleotide
uguauucagaaugaucgag

SEQ ID NO: 2165158 - RNA, 19 nt, Artificial Sequence
  Description of Artificial Sequence: Synthetic oligonucleotide
acucaaacacuuuggcagc

SEQ ID NO: 2165159 - RNA, 19 nt, Artificial Sequence
  Description of Artificial Sequence: Synthetic oligonucleotide
auucagaaugaucgaggcc

SEQ ID NO: 2165160 - RNA, 19 nt, Artificial Sequence
  Description of Artificial Sequence: Synthetic oligonucleotide
uccugcaacugcuaaagcc

SEQ ID NO: 2165161 - RNA, 19 nt, Artificial Sequence
  Description of Artificial Sequence: Synthetic oligonucleotide
uccccuaccacaauguccu

SEQ ID NO: 2165162 - RNA, 19 nt, Artificial Sequence
  Description of Artificial Sequence: Synthetic oligonucleotide
aaguguauucagaaugauc

SEQ ID NO: 2165163 - RNA, 19 nt, Artificial Sequence
  Description of Artificial Sequence: Synthetic oligonucleotide
guauucagaaugaucgagg

SEQ ID NO: 2165164 - RNA, 19 nt, Artificial Sequence
  Description of Artificial Sequence: Synthetic oligonucleotide
uggacucaaacacuuuggc

SEQ ID NO: 2165165 - RNA, 19 nt, Artificial Sequence
  Description of Artificial Sequence: Synthetic oligonucleotide
acuuuggcagccauaauuc

SEQ ID NO: 2165166 - RNA, 19 nt, Artificial Sequence
  Description of Artificial Sequence: Synthetic oligonucleotide
aacacuuuggcagccauaa

SEQ ID NO: 2165167 - RNA, 19 nt, Artificial Sequence
  Description of Artificial Sequence: Synthetic oligonucleotide
ucacuggguaagcuggagg

SEQ ID NO: 2165168 - RNA, 19 nt, Artificial Sequence
  Description of Artificial Sequence: Synthetic oligonucleotide
ugaucgaggccacagccug

SEQ ID NO: 2165169 - RNA, 19 nt, Artificial Sequence
  Description of Artificial Sequence: Synthetic oligonucleotide
agaaggugcaagcagugga

SEQ ID NO: 2165170 - RNA, 19 nt, Artificial Sequence
  Description of Artificial Sequence: Synthetic oligonucleotide
uuccccuaccacaaugucc

SEQ ID NO: 2165171 - RNA, 19 nt, Artificial Sequence
  Description of Artificial Sequence: Synthetic oligonucleotide
aggugcaagcaguggaggc

SEQ ID NO: 2165172 - RNA, 19 nt, Artificial Sequence
  Description of Artificial Sequence: Synthetic oligonucleotide
ugagaaggugcaagcagug

SEQ ID NO: 2165173 - RNA, 19 nt, Artificial Sequence
  Description of Artificial Sequence: Synthetic oligonucleotide
gaaaguguauucagaauga

SEQ ID NO: 2165174 - RNA, 19 nt, Artificial Sequence
  Description of Artificial Sequence: Synthetic oligonucleotide
agccugagaaggugcaagc

SEQ ID NO: 2165175 - RNA, 19 nt, Artificial Sequence
  Description of Artificial Sequence: Synthetic oligonucleotide
gaggccacagccugguuag

SEQ ID NO: 2165176 - RNA, 19 nt, Artificial Sequence
  Description of Artificial Sequence: Synthetic oligonucleotide
agugagucccuuccccuac

SEQ ID NO: 2165177 - RNA, 19 nt, Artificial Sequence
  Description of Artificial Sequence: Synthetic oligonucleotide
aaggugcaagcaguggagg

SEQ ID NO: 2165178 - RNA, 19 nt, Artificial Sequence
  Description of Artificial Sequence: Synthetic oligonucleotide
gaaggugcaagcaguggag

SEQ ID NO: 2165179 - RNA, 19 nt, Artificial Sequence
  Description of Artificial Sequence: Synthetic oligonucleotide
uuucacgcugaccuccaca

SEQ ID NO: 2165180 - RNA, 19 nt, Artificial Sequence
  Description of Artificial Sequence: Synthetic oligonucleotide
agucccuuccccuaccaca

SEQ ID NO: 2165181 - RNA, 19 nt, Artificial Sequence
  Description of Artificial Sequence: Synthetic oligonucleotide
uucacgcugaccuccacau

SEQ ID NO: 2165182 - RNA, 19 nt, Artificial Sequence
  Description of Artificial Sequence: Synthetic oligonucleotide
uggguaagcuggaggagca

SEQ ID NO: 2165183 - RNA, 19 nt, Artificial Sequence
  Description of Artificial Sequence: Synthetic oligonucleotide
guaagcuggaggagcaccg

SEQ ID NO: 2165184 - RNA, 19 nt, Artificial Sequence
  Description of Artificial Sequence: Synthetic oligonucleotide
agccugguuagccugagaa

SEQ ID NO: 2165185 - RNA, 19 nt, Artificial Sequence
  Description of Artificial Sequence: Synthetic oligonucleotide
aaaguguauucagaaugau

SEQ ID NO: 2165186 - RNA, 19 nt, Artificial Sequence
  Description of Artificial Sequence: Synthetic oligonucleotide
gaaggaaaguguauucaga

SEQ ID NO: 2165187 - RNA, 19 nt, Artificial Sequence
  Description of Artificial Sequence: Synthetic oligonucleotide
ccugguuagccugagaagg

SEQ ID NO: 2165188 - RNA, 19 nt, Artificial Sequence
  Description of Artificial Sequence: Synthetic oligonucleotide
uagccugagaaggugcaag

SEQ ID NO: 2165189 - RNA, 19 nt, Artificial Sequence
  Description of Artificial Sequence: Synthetic oligonucleotide
gagaaggugcaagcagugg

SEQ ID NO: 2165190 - RNA, 19 nt, Artificial Sequence
  Description of Artificial Sequence: Synthetic oligonucleotide
ucagaaugaucgaggccac

SEQ ID NO: 2165191 - RNA, 19 nt, Artificial Sequence
  Description of Artificial Sequence: Synthetic oligonucleotide
ucggcggcuuuccagcuug

SEQ ID NO: 2165192 - RNA, 19 nt, Artificial Sequence
  Description of Artificial Sequence: Synthetic oligonucleotide
uccucggcggcuuuccagc

SEQ ID NO: 2165193 - RNA, 19 nt, Artificial Sequence
  Description of Artificial Sequence: Synthetic oligonucleotide
cugcaacugcuaaagccag

SEQ ID NO: 2165194 - RNA, 19 nt, Artificial Sequence
  Description of Artificial Sequence: Synthetic oligonucleotide
cuggguaagcuggaggagc

SEQ ID NO: 2165195 - RNA, 19 nt, Artificial Sequence
  Description of Artificial Sequence: Synthetic oligonucleotide
uucaccacgccuccugcaa

SEQ ID NO: 2165196 - RNA, 19 nt, Artificial Sequence
  Description of Artificial Sequence: Synthetic oligonucleotide
gaggcugguaagcaauguc

SEQ ID NO: 2165197 - RNA, 19 nt, Artificial Sequence
  Description of Artificial Sequence: Synthetic oligonucleotide
cacuggguaagcuggagga

SEQ ID NO: 2165198 - RNA, 19 nt, Artificial Sequence
  Description of Artificial Sequence: Synthetic oligonucleotide
cacgcugaccuccacauga

SEQ ID NO: 2165199 - RNA, 19 nt, Artificial Sequence
  Description of Artificial Sequence: Synthetic oligonucleotide
agcgcgagaggcugguaag

SEQ ID NO: 2165200 - RNA, 19 nt, Artificial Sequence
  Description of Artificial Sequence: Synthetic oligonucleotide
uucgagagcgcgagaggcu

SEQ ID NO: 2165201 - RNA, 19 nt, Artificial Sequence
  Description of Artificial Sequence: Synthetic oligonucleotide
ugguuagccugagaaggug

SEQ ID NO: 2165202 - RNA, 19 nt, Artificial Sequence
  Description of Artificial Sequence: Synthetic oligonucleotide
aagugagucccuuccccua

SEQ ID NO: 2165203 - RNA, 19 nt, Artificial Sequence
  Description of Artificial Sequence: Synthetic oligonucleotide
ucgagagcgcgagaggcug

SEQ ID NO: 2165204 - RNA, 19 nt, Artificial Sequence
  Description of Artificial Sequence: Synthetic oligonucleotide
ugagucccuuccccuacca

SEQ ID NO: 2165205 - RNA, 19 nt, Artificial Sequence
  Description of Artificial Sequence: Synthetic oligonucleotide
guguauucagaaugaucga

SEQ ID NO: 2165206 - RNA, 19 nt, Artificial Sequence
  Description of Artificial Sequence: Synthetic oligonucleotide
ucaaacacuuuggcagcca

SEQ ID NO: 2165207 - RNA, 19 nt, Artificial Sequence
  Description of Artificial Sequence: Synthetic oligonucleotide
cucaaacacuuuggcagcc

SEQ ID NO: 2165208 - RNA, 19 nt, Artificial Sequence
  Description of Artificial Sequence: Synthetic oligonucleotide
ccugagaaggugcaagcag

SEQ ID NO: 2165209 - RNA, 19 nt, Artificial Sequence
  Description of Artificial Sequence: Synthetic oligonucleotide
aagcaguggaggccucacu

SEQ ID NO: 2165210 - RNA, 19 nt, Artificial Sequence
  Description of Artificial Sequence: Synthetic oligonucleotide
auguccucggcggcuuucc

SEQ ID NO: 2165211 - RNA, 19 nt, Artificial Sequence
  Description of Artificial Sequence: Synthetic oligonucleotide
gcagaaggaaaguguauuc

SEQ ID NO: 2165212 - RNA, 19 nt, Artificial Sequence
  Description of Artificial Sequence: Synthetic oligonucleotide
ccugcaacugcuaaagcca

SEQ ID NO: 2165213 - RNA, 19 nt, Artificial Sequence
  Description of Artificial Sequence: Synthetic oligonucleotide
ggacucaaacacuuuggca

SEQ ID NO: 2165214 - RNA, 19 nt, Artificial Sequence
  Description of Artificial Sequence: Synthetic oligonucleotide
gagaggcugguaagcaaug

SEQ ID NO: 2165215 - RNA, 19 nt, Artificial Sequence
  Description of Artificial Sequence: Synthetic oligonucleotide
ucaccacgccuccugcaac

SEQ ID NO: 2165216 - RNA, 19 nt, Artificial Sequence
  Description of Artificial Sequence: Synthetic oligonucleotide
gguaagcuggaggagcacc

SEQ ID NO: 2165217 - RNA, 19 nt, Artificial Sequence
  Description of Artificial Sequence: Synthetic oligonucleotide
gaucgaggccacagccugg

SEQ ID NO: 2165218 - RNA, 19 nt, Artificial Sequence
  Description of Artificial Sequence: Synthetic oligonucleotide
cugagaaggugcaagcagu

SEQ ID NO: 2165219 - RNA, 19 nt, Artificial Sequence
  Description of Artificial Sequence: Synthetic oligonucleotide
ggugcaagcaguggaggcc

SEQ ID NO: 2165220 - RNA, 19 nt, Artificial Sequence
  Description of Artificial Sequence: Synthetic oligonucleotide
ucacgcugaccuccacaug

SEQ ID NO: 2165221 - RNA, 19 nt, Artificial Sequence
  Description of Artificial Sequence: Synthetic oligonucleotide
guuagccugagaaggugca

SEQ ID NO: 2165222 - RNA, 19 nt, Artificial Sequence
  Description of Artificial Sequence: Synthetic oligonucleotide
gguuagccugagaaggugc

SEQ ID NO: 2165223 - RNA, 19 nt, Artificial Sequence
  Description of Artificial Sequence: Synthetic oligonucleotide
cuuccccuaccacaauguc

SEQ ID NO: 2165224 - RNA, 19 nt, Artificial Sequence
  Description of Artificial Sequence: Synthetic oligonucleotide
guccucggcggcuuuccag

SEQ ID NO: 2165225 - RNA, 19 nt, Artificial Sequence
  Description of Artificial Sequence: Synthetic oligonucleotide
gagcgcgagaggcugguaa

SEQ ID NO: 2165226 - RNA, 19 nt, Artificial Sequence
  Description of Artificial Sequence: Synthetic oligonucleotide
cacuuuggcagccauaauu

SEQ ID NO: 2165227 - RNA, 19 nt, Artificial Sequence
  Description of Artificial Sequence: Synthetic oligonucleotide
agaggcugguaagcaaugu

SEQ ID NO: 2165228 - RNA, 19 nt, Artificial Sequence
  Description of Artificial Sequence: Synthetic oligonucleotide
cuccugcaacugcuaaagc

SEQ ID NO: 2165229 - RNA, 19 nt, Artificial Sequence
  Description of Artificial Sequence: Synthetic oligonucleotide
uuagccugagaaggugcaa

SEQ ID NO: 2165230 - RNA, 19 nt, Artificial Sequence
  Description of Artificial Sequence: Synthetic oligonucleotide
augaucgaggccacagccu

SEQ ID NO: 2165231 - RNA, 19 nt, Artificial Sequence
  Description of Artificial Sequence: Synthetic oligonucleotide
ccuccugcaacugcuaaag

SEQ ID NO: 2165232 - RNA, 19 nt, Artificial Sequence
  Description of Artificial Sequence: Synthetic oligonucleotide
agggcagaaggaaagugua

SEQ ID NO: 2165233 - RNA, 19 nt, Artificial Sequence
  Description of Artificial Sequence: Synthetic oligonucleotide
aaacacuuuggcagccaua

SEQ ID NO: 2165234 - RNA, 19 nt, Artificial Sequence
  Description of Artificial Sequence: Synthetic oligonucleotide
gccugguuagccugagaag

SEQ ID NO: 2165235 - RNA, 19 nt, Artificial Sequence
  Description of Artificial Sequence: Synthetic oligonucleotide
gagucccuuccccuaccac

SEQ ID NO: 2165236 - RNA, 19 nt, Artificial Sequence
  Description of Artificial Sequence: Synthetic oligonucleotide
cagggcagaaggaaagugu

SEQ ID NO: 2165237 - RNA, 19 nt, Artificial Sequence
  Description of Artificial Sequence: Synthetic oligonucleotide
acccgcuuucacgcugacc

SEQ ID NO: 2165238 - RNA, 19 nt, Artificial Sequence
  Description of Artificial Sequence: Synthetic oligonucleotide
uguccucggcggcuuucca

SEQ ID NO: 2165239 - RNA, 19 nt, Artificial Sequence
  Description of Artificial Sequence: Synthetic oligonucleotide
gugagucccuuccccuacc

SEQ ID NO: 2165240 - RNA, 19 nt, Artificial Sequence
  Description of Artificial Sequence: Synthetic oligonucleotide
gcggcuuuccagcuugcgc

SEQ ID NO: 2165241 - RNA, 19 nt, Artificial Sequence
  Description of Artificial Sequence: Synthetic oligonucleotide
ggcuuuccagcuugcgcag

SEQ ID NO: 2165242 - RNA, 19 nt, Artificial Sequence
  Description of Artificial Sequence: Synthetic oligonucleotide
aucgaggccacagccuggu

SEQ ID NO: 2165243 - RNA, 19 nt, Artificial Sequence
  Description of Artificial Sequence: Synthetic oligonucleotide
caagcaguggaggccucac

SEQ ID NO: 2165244 - RNA, 19 nt, Artificial Sequence
  Description of Artificial Sequence: Synthetic oligonucleotide
guggaggccucacugggua

SEQ ID NO: 2165245 - RNA, 19 nt, Artificial Sequence
  Description of Artificial Sequence: Synthetic oligonucleotide
cuuucacgcugaccuccac

SEQ ID NO: 2165246 - RNA, 19 nt, Artificial Sequence
  Description of Artificial Sequence: Synthetic oligonucleotide
cccgcuuucacgcugaccu

SEQ ID NO: 2165247 - RNA, 19 nt, Artificial Sequence
  Description of Artificial Sequence: Synthetic oligonucleotide
gcagggcagaaggaaagug

SEQ ID NO: 2165248 - RNA, 19 nt, Artificial Sequence
  Description of Artificial Sequence: Synthetic oligonucleotide
acagccugguuagccugag

SEQ ID NO: 2165249 - RNA, 19 nt, Artificial Sequence
  Description of Artificial Sequence: Synthetic oligonucleotide
ggaggccucacuggguaag

SEQ ID NO: 2165250 - RNA, 19 nt, Artificial Sequence
  Description of Artificial Sequence: Synthetic oligonucleotide
uggaggccucacuggguaa

SEQ ID NO: 2165251 - RNA, 19 nt, Artificial Sequence
  Description of Artificial Sequence: Synthetic oligonucleotide
acacuuuggcagccauaau

SEQ ID NO: 2165252 - RNA, 19 nt, Artificial Sequence
  Description of Artificial Sequence: Synthetic oligonucleotide
ugcaagcaguggaggccuc

SEQ ID NO: 2165253 - RNA, 19 nt, Artificial Sequence
  Description of Artificial Sequence: Synthetic oligonucleotide
cugguuagccugagaaggu

SEQ ID NO: 2165254 - RNA, 19 nt, Artificial Sequence
  Description of Artificial Sequence: Synthetic oligonucleotide
gucccuuccccuaccacaa

SEQ ID NO: 2165255 - RNA, 19 nt, Artificial Sequence
  Description of Artificial Sequence: Synthetic oligonucleotide
cacagccugguuagccuga

SEQ ID NO: 2165256 - RNA, 19 nt, Artificial Sequence
  Description of Artificial Sequence: Synthetic oligonucleotide
cuuuccagcuugcgcagcu

SEQ ID NO: 2165257 - RNA, 19 nt, Artificial Sequence
  Description of Artificial Sequence: Synthetic oligonucleotide
ccacagccugguuagccug

SEQ ID NO: 2165258 - RNA, 19 nt, Artificial Sequence
  Description of Artificial Sequence: Synthetic oligonucleotide
cacgccuccugcaacugcu

SEQ ID NO: 2165259 - RNA, 19 nt, Artificial Sequence
  Description of Artificial Sequence: Synthetic oligonucleotide
caaacacuuuggcagccau

SEQ ID NO: 2165260 - RNA, 19 nt, Artificial Sequence
  Description of Artificial Sequence: Synthetic oligonucleotide
cccuuccccuaccacaaug

SEQ ID NO: 2165261 - RNA, 19 nt, Artificial Sequence
  Description of Artificial Sequence: Synthetic oligonucleotide
acacccgcuuucacgcuga

SEQ ID NO: 2165262 - RNA, 19 nt, Artificial Sequence
  Description of Artificial Sequence: Synthetic oligonucleotide
gugcaagcaguggaggccu

SEQ ID NO: 2165263 - RNA, 19 nt, Artificial Sequence
  Description of Artificial Sequence: Synthetic oligonucleotide
ucccuuccccuaccacaau

SEQ ID NO: 2165264 - RNA, 19 nt, Artificial Sequence
  Description of Artificial Sequence: Synthetic oligonucleotide
ggcagaaggaaaguguauu

SEQ ID NO: 2165265 - RNA, 19 nt, Artificial Sequence
  Description of Artificial Sequence: Synthetic oligonucleotide
ggcggcuuuccagcuugcg

SEQ ID NO: 2165266 - RNA, 19 nt, Artificial Sequence
  Description of Artificial Sequence: Synthetic oligonucleotide
cgcuuucacgcugaccucc

SEQ ID NO: 2165267 - RNA, 19 nt, Artificial Sequence
  Description of Artificial Sequence: Synthetic oligonucleotide
gccugagaaggugcaagca

SEQ ID NO: 2165268 - RNA, 19 nt, Artificial Sequence
  Description of Artificial Sequence: Synthetic oligonucleotide
cagaaugaucgaggccaca

SEQ ID NO: 2165269 - RNA, 19 nt, Artificial Sequence
  Description of Artificial Sequence: Synthetic oligonucleotide
gcgagaggcugguaagcaa

SEQ ID NO: 2165270 - RNA, 19 nt, Artificial Sequence
  Description of Artificial Sequence: Synthetic oligonucleotide
caccacgccuccugcaacu

SEQ ID NO: 2165271 - RNA, 19 nt, Artificial Sequence
  Description of Artificial Sequence: Synthetic oligonucleotide
acgcugaccuccacaugaa

SEQ ID NO: 2165272 - RNA, 19 nt, Artificial Sequence
  Description of Artificial Sequence: Synthetic oligonucleotide
gcgcgagaggcugguaagc

SEQ ID NO: 2165273 - RNA, 19 nt, Artificial Sequence
  Description of Artificial Sequence: Synthetic oligonucleotide
ccacgccuccugcaacugc

SEQ ID NO: 2165274 - RNA, 19 nt, Artificial Sequence
  Description of Artificial Sequence: Synthetic oligonucleotide
gagagcgcgagaggcuggu

SEQ ID NO: 2165275 - RNA, 19 nt, Artificial Sequence
  Description of Artificial Sequence: Synthetic oligonucleotide
gcuuuccagcuugcgcagc

SEQ ID NO: 2165276 - RNA, 19 nt, Artificial Sequence
  Description of Artificial Sequence: Synthetic oligonucleotide
ccuuccccuaccacaaugu

SEQ ID NO: 2165277 - RNA, 19 nt, Artificial Sequence
  Description of Artificial Sequence: Synthetic oligonucleotide
gccacagccugguuagccu

SEQ ID NO: 2165278 - RNA, 19 nt, Artificial Sequence
  Description of Artificial Sequence: Synthetic oligonucleotide
cgagagcgcgagaggcugg

SEQ ID NO: 2165279 - RNA, 19 nt, Artificial Sequence
  Description of Artificial Sequence: Synthetic oligonucleotide
cacccgcuuucacgcugac

SEQ ID NO: 2165280 - RNA, 19 nt, Artificial Sequence
  Description of Artificial Sequence: Synthetic oligonucleotide
ggguaagcuggaggagcac

SEQ ID NO: 2165281 - RNA, 19 nt, Artificial Sequence
  Description of Artificial Sequence: Synthetic oligonucleotide
gcaagcaguggaggccuca

SEQ ID NO: 2165282 - RNA, 19 nt, Artificial Sequence
  Description of Artificial Sequence: Synthetic oligonucleotide
cagccugguuagccugaga

SEQ ID NO: 2165283 - RNA, 19 nt, Artificial Sequence
  Description of Artificial Sequence: Synthetic oligonucleotide
ccgcuuucacgcugaccuc

SEQ ID NO: 2165284 - RNA, 19 nt, Artificial Sequence
  Description of Artificial Sequence: Synthetic oligonucleotide
cgagaggcugguaagcaau

SEQ ID NO: 2165285 - RNA, 19 nt, Artificial Sequence
  Description of Artificial Sequence: Synthetic oligonucleotide
ggcagggcagaaggaaagu

SEQ ID NO: 2165286 - RNA, 19 nt, Artificial Sequence
  Description of Artificial Sequence: Synthetic oligonucleotide
cgaggccacagccugguua

SEQ ID NO: 2165287 - RNA, 19 nt, Artificial Sequence
  Description of Artificial Sequence: Synthetic oligonucleotide
agagcgcgagaggcuggua

SEQ ID NO: 2165288 - RNA, 19 nt, Artificial Sequence
  Description of Artificial Sequence: Synthetic oligonucleotide
gggcagaaggaaaguguau

SEQ ID NO: 2165289 - RNA, 19 nt, Artificial Sequence
  Description of Artificial Sequence: Synthetic oligonucleotide
acgccuccugcaacugcua

SEQ ID NO: 2165290 - RNA, 19 nt, Artificial Sequence
  Description of Artificial Sequence: Synthetic oligonucleotide
cgcgagaggcugguaagca

SEQ ID NO: 2165291 - RNA, 19 nt, Artificial Sequence
  Description of Artificial Sequence: Synthetic oligonucleotide
cucggcggcuuuccagcuu

SEQ ID NO: 2165292 - RNA, 19 nt, Artificial Sequence
  Description of Artificial Sequence: Synthetic oligonucleotide
cggcggcuuuccagcuugc

SEQ ID NO: 2165293 - RNA, 19 nt, Artificial Sequence
  Description of Artificial Sequence: Synthetic oligonucleotide
cgccuccugcaacugcuaa

SEQ ID NO: 2165294 - RNA, 19 nt, Artificial Sequence
  Description of Artificial Sequence: Synthetic oligonucleotide
ccucggcggcuuuccagcu

SEQ ID NO: 2165295 - RNA, 19 nt, Artificial Sequence
  Description of Artificial Sequence: Synthetic oligonucleotide
cgcugaccuccacaugaau

SEQ ID NO: 2165296 - RNA, 19 nt, Artificial Sequence
  Description of Artificial Sequence: Synthetic oligonucleotide
uguacaguaacacugggag

SEQ ID NO: 2165297 - RNA, 19 nt, Artificial Sequence
  Description of Artificial Sequence: Synthetic oligonucleotide
ugaaugauguccaucacca

SEQ ID NO: 2165298 - RNA, 19 nt, Artificial Sequence
  Description of Artificial Sequence: Synthetic oligonucleotide
uucagaaugaaugugccgg

SEQ ID NO: 2165299 - RNA, 19 nt, Artificial Sequence
  Description of Artificial Sequence: Synthetic oligonucleotide
auaguucugaaugaugucc

SEQ ID NO: 2165300 - RNA, 19 nt, Artificial Sequence
  Description of Artificial Sequence: Synthetic oligonucleotide
aagauugcauccgagcugc

SEQ ID NO: 2165301 - RNA, 19 nt, Artificial Sequence
  Description of Artificial Sequence: Synthetic oligonucleotide
ucauacuaacagcagagag

SEQ ID NO: 2165302 - RNA, 19 nt, Artificial Sequence
  Description of Artificial Sequence: Synthetic oligonucleotide
cauacuaacagcagagagg

SEQ ID NO: 2165303 - RNA, 19 nt, Artificial Sequence
  Description of Artificial Sequence: Synthetic oligonucleotide
auugucuccucgcaggagc

SEQ ID NO: 2165304 - RNA, 19 nt, Artificial Sequence
  Description of Artificial Sequence: Synthetic oligonucleotide
uacaguaacacugggagcc

SEQ ID NO: 2165305 - RNA, 19 nt, Artificial Sequence
  Description of Artificial Sequence: Synthetic oligonucleotide
aaugugccggcacaaacag

SEQ ID NO: 2165306 - RNA, 19 nt, Artificial Sequence
  Description of Artificial Sequence: Synthetic oligonucleotide
guagucuucagaaugaaug

SEQ ID NO: 2165307 - RNA, 19 nt, Artificial Sequence
  Description of Artificial Sequence: Synthetic oligonucleotide
cuucauacuaacagcagag

SEQ ID NO: 2165308 - RNA, 19 nt, Artificial Sequence
  Description of Artificial Sequence: Synthetic oligonucleotide
ucuguagaguuccugagcu

SEQ ID NO: 2165309 - RNA, 19 nt, Artificial Sequence
  Description of Artificial Sequence: Synthetic oligonucleotide
gaacacaaaguacagcccc

SEQ ID NO: 2165310 - RNA, 19 nt, Artificial Sequence
  Description of Artificial Sequence: Synthetic oligonucleotide
ugcuguagucuucagaaug

SEQ ID NO: 2165311 - RNA, 19 nt, Artificial Sequence
  Description of Artificial Sequence: Synthetic oligonucleotide
ggugauggcacccacaccg

SEQ ID NO: 2165312 - RNA, 19 nt, Artificial Sequence
  Description of Artificial Sequence: Synthetic oligonucleotide
acuaacagcagagaggaag

SEQ ID NO: 2165313 - RNA, 19 nt, Artificial Sequence
  Description of Artificial Sequence: Synthetic oligonucleotide
aaaguacagccccagcaag

SEQ ID NO: 2165314 - RNA, 19 nt, Artificial Sequence
  Description of Artificial Sequence: Synthetic oligonucleotide
acagaaacgaagcugcucu

SEQ ID NO: 2165315 - RNA, 19 nt, Artificial Sequence
  Description of Artificial Sequence: Synthetic oligonucleotide
ugccggcacaaacagaugg

SEQ ID NO: 2165316 - RNA, 19 nt, Artificial Sequence
  Description of Artificial Sequence: Synthetic oligonucleotide
aaagcuguuaagagacccc

SEQ ID NO: 2165317 - RNA, 19 nt, Artificial Sequence
  Description of Artificial Sequence: Synthetic oligonucleotide
uccauugucuccucgcagg

SEQ ID NO: 2165318 - RNA, 19 nt, Artificial Sequence
  Description of Artificial Sequence: Synthetic oligonucleotide
cagauggacaggaacaacc

SEQ ID NO: 2165319 - RNA, 19 nt, Artificial Sequence
  Description of Artificial Sequence: Synthetic oligonucleotide
aacgaagcugcucuugucu

SEQ ID NO: 2165320 - RNA, 19 nt, Artificial Sequence
  Description of Artificial Sequence: Synthetic oligonucleotide
auacuaacagcagagagga

SEQ ID NO: 2165321 - RNA, 19 nt, Artificial Sequence
  Description of Artificial Sequence: Synthetic oligonucleotide
agcucaaugacagcaacac

SEQ ID NO: 2165322 - RNA, 19 nt, Artificial Sequence
  Description of Artificial Sequence: Synthetic oligonucleotide
uguagaguuccugagcucc

SEQ ID NO: 2165323 - RNA, 19 nt, Artificial Sequence
  Description of Artificial Sequence: Synthetic oligonucleotide
auaggccccaaccugcagc

SEQ ID NO: 2165324 - RNA, 19 nt, Artificial Sequence
  Description of Artificial Sequence: Synthetic oligonucleotide
gacaguaagccacaggaca

SEQ ID NO: 2165325 - RNA, 19 nt, Artificial Sequence
  Description of Artificial Sequence: Synthetic oligonucleotide
aguagaagaggaccccuac

SEQ ID NO: 2165326 - RNA, 19 nt, Artificial Sequence
  Description of Artificial Sequence: Synthetic oligonucleotide
ugugccggcacaaacagau

SEQ ID NO: 2165327 - RNA, 19 nt, Artificial Sequence
  Description of Artificial Sequence: Synthetic oligonucleotide
aaggacagaaacgaagcug

SEQ ID NO: 2165328 - RNA, 19 nt, Artificial Sequence
  Description of Artificial Sequence: Synthetic oligonucleotide
cuuauaguucugaaugaug

SEQ ID NO: 2165329 - RNA, 19 nt, Artificial Sequence
  Description of Artificial Sequence: Synthetic oligonucleotide
cacucuucauggaagauug

SEQ ID NO: 2165330 - RNA, 19 nt, Artificial Sequence
  Description of Artificial Sequence: Synthetic oligonucleotide
gaagaggaccccuacaguc

SEQ ID NO: 2165331 - RNA, 19 nt, Artificial Sequence
  Description of Artificial Sequence: Synthetic oligonucleotide
ugagcuccaaguuaucugu

SEQ ID NO: 2165332 - RNA, 19 nt, Artificial Sequence
  Description of Artificial Sequence: Synthetic oligonucleotide
auacugaggguggagagac

SEQ ID NO: 2165333 - RNA, 19 nt, Artificial Sequence
  Description of Artificial Sequence: Synthetic oligonucleotide
caaacagauggacaggaac

SEQ ID NO: 2165334 - RNA, 19 nt, Artificial Sequence
  Description of Artificial Sequence: Synthetic oligonucleotide
agaccuuagugguggaugg

SEQ ID NO: 2165335 - RNA, 19 nt, Artificial Sequence
  Description of Artificial Sequence: Synthetic oligonucleotide
ugcaccuucuucauacacc

SEQ ID NO: 2165336 - RNA, 19 nt, Artificial Sequence
  Description of Artificial Sequence: Synthetic oligonucleotide
gaugauccacacuccaaag

SEQ ID NO: 2165337 - RNA, 19 nt, Artificial Sequence
  Description of Artificial Sequence: Synthetic oligonucleotide
agaaaguccccgcuaugac

SEQ ID NO: 2165338 - RNA, 19 nt, Artificial Sequence
  Description of Artificial Sequence: Synthetic oligonucleotide
aaguacagccccagcaagc

SEQ ID NO: 2165339 - RNA, 19 nt, Artificial Sequence
  Description of Artificial Sequence: Synthetic oligonucleotide
ucuguccaguuguagaagc

SEQ ID NO: 2165340 - RNA, 19 nt, Artificial Sequence
  Description of Artificial Sequence: Synthetic oligonucleotide
uguagaagcuggcccagcc

SEQ ID NO: 2165341 - RNA, 19 nt, Artificial Sequence
  Description of Artificial Sequence: Synthetic oligonucleotide
uggaagauugcauccgagc

SEQ ID NO: 2165342 - RNA, 19 nt, Artificial Sequence
  Description of Artificial Sequence: Synthetic oligonucleotide
ucagcagcucaguacuugg

SEQ ID NO: 2165343 - RNA, 19 nt, Artificial Sequence
  Description of Artificial Sequence: Synthetic oligonucleotide
accgaugaagacauaggcc

SEQ ID NO: 2165344 - RNA, 19 nt, Artificial Sequence
  Description of Artificial Sequence: Synthetic oligonucleotide
cuugcuguagucuucagaa

SEQ ID NO: 2165345 - RNA, 19 nt, Artificial Sequence
  Description of Artificial Sequence: Synthetic oligonucleotide
aguuguagaagcuggccca

SEQ ID NO: 2165346 - RNA, 19 nt, Artificial Sequence
  Description of Artificial Sequence: Synthetic oligonucleotide
agauggacaggaacaaccc

SEQ ID NO: 2165347 - RNA, 19 nt, Artificial Sequence
  Description of Artificial Sequence: Synthetic oligonucleotide
ucauggaagauugcauccg

SEQ ID NO: 2165348 - RNA, 19 nt, Artificial Sequence
  Description of Artificial Sequence: Synthetic oligonucleotide
agcuggacgaaguuugaag

SEQ ID NO: 2165349 - RNA, 19 nt, Artificial Sequence
  Description of Artificial Sequence: Synthetic oligonucleotide
caaguuaucuguccaguug

SEQ ID NO: 2165350 - RNA, 19 nt, Artificial Sequence
  Description of Artificial Sequence: Synthetic oligonucleotide
caagcagcggaccucauug

SEQ ID NO: 2165351 - RNA, 19 nt, Artificial Sequence
  Description of Artificial Sequence: Synthetic oligonucleotide
ccgaugaagacauaggccc

SEQ ID NO: 2165352 - RNA, 19 nt, Artificial Sequence
  Description of Artificial Sequence: Synthetic oligonucleotide
caccgaugaagacauaggc

SEQ ID NO: 2165353 - RNA, 19 nt, Artificial Sequence
  Description of Artificial Sequence: Synthetic oligonucleotide
uugucugcgaugauccaca

SEQ ID NO: 2165354 - RNA, 19 nt, Artificial Sequence
  Description of Artificial Sequence: Synthetic oligonucleotide
caugggauacugagggugg

SEQ ID NO: 2165355 - RNA, 19 nt, Artificial Sequence
  Description of Artificial Sequence: Synthetic oligonucleotide
acagagaggacgucagcag

SEQ ID NO: 2165356 - RNA, 19 nt, Artificial Sequence
  Description of Artificial Sequence: Synthetic oligonucleotide
cagaaggaacacaaaguac

SEQ ID NO: 2165357 - RNA, 19 nt, Artificial Sequence
  Description of Artificial Sequence: Synthetic oligonucleotide
ucagaaugaaugugccggc

SEQ ID NO: 2165358 - RNA, 19 nt, Artificial Sequence
  Description of Artificial Sequence: Synthetic oligonucleotide
gauggacaggaacaacccc

SEQ ID NO: 2165359 - RNA, 19 nt, Artificial Sequence
  Description of Artificial Sequence: Synthetic oligonucleotide
cugcacauagucccaagcc

SEQ ID NO: 2165360 - RNA, 19 nt, Artificial Sequence
  Description of Artificial Sequence: Synthetic oligonucleotide
aggguccaggcccagaaag

SEQ ID NO: 2165361 - RNA, 19 nt, Artificial Sequence
  Description of Artificial Sequence: Synthetic oligonucleotide
agacauaggccccaaccug

SEQ ID NO: 2165362 - RNA, 19 nt, Artificial Sequence
  Description of Artificial Sequence: Synthetic oligonucleotide
uggcauucgucuuauaguu

SEQ ID NO: 2165363 - RNA, 19 nt, Artificial Sequence
  Description of Artificial Sequence: Synthetic oligonucleotide
uugcagaaccccuucuuca

SEQ ID NO: 2165364 - RNA, 19 nt, Artificial Sequence
  Description of Artificial Sequence: Synthetic oligonucleotide
agcacccagaauaaagaac

SEQ ID NO: 2165365 - RNA, 19 nt, Artificial Sequence
  Description of Artificial Sequence: Synthetic oligonucleotide
gcaacaccaacacacacgc

SEQ ID NO: 2165366 - RNA, 19 nt, Artificial Sequence
  Description of Artificial Sequence: Synthetic oligonucleotide
uaggccccaaccugcagcg

SEQ ID NO: 2165367 - RNA, 19 nt, Artificial Sequence
  Description of Artificial Sequence: Synthetic oligonucleotide
cacuccaaagcccaggauc

SEQ ID NO: 2165368 - RNA, 19 nt, Artificial Sequence
  Description of Artificial Sequence: Synthetic oligonucleotide
cauugaaguagaagaggac

SEQ ID NO: 2165369 - RNA, 19 nt, Artificial Sequence
  Description of Artificial Sequence: Synthetic oligonucleotide
gacgucagcagcucaguac

SEQ ID NO: 2165370 - RNA, 19 nt, Artificial Sequence
  Description of Artificial Sequence: Synthetic oligonucleotide
cagcggaccucauugacag

SEQ ID NO: 2165371 - RNA, 19 nt, Artificial Sequence
  Description of Artificial Sequence: Synthetic oligonucleotide
gaccucauugacagcaccg

SEQ ID NO: 2165372 - RNA, 19 nt, Artificial Sequence
  Description of Artificial Sequence: Synthetic oligonucleotide
acgucagcagcucaguacu

SEQ ID NO: 2165373 - RNA, 19 nt, Artificial Sequence
  Description of Artificial Sequence: Synthetic oligonucleotide
uuccauugucuccucgcag

SEQ ID NO: 2165374 - RNA, 19 nt, Artificial Sequence
  Description of Artificial Sequence: Synthetic oligonucleotide
accugcagcgagcuggacg

SEQ ID NO: 2165375 - RNA, 19 nt, Artificial Sequence
  Description of Artificial Sequence: Synthetic oligonucleotide
ucuuauaguucugaaugau

SEQ ID NO: 2165376 - RNA, 19 nt, Artificial Sequence
  Description of Artificial Sequence: Synthetic oligonucleotide
gacgaaguuugaaggacag

SEQ ID NO: 2165377 - RNA, 19 nt, Artificial Sequence
  Description of Artificial Sequence: Synthetic oligonucleotide
agcagcggaccucauugac

SEQ ID NO: 2165378 - RNA, 19 nt, Artificial Sequence
  Description of Artificial Sequence: Synthetic oligonucleotide
ugcgaugauccacacucca

SEQ ID NO: 2165379 - RNA, 19 nt, Artificial Sequence
  Description of Artificial Sequence: Synthetic oligonucleotide
cuagacaguaagccacagg

SEQ ID NO: 2165380 - RNA, 19 nt, Artificial Sequence
  Description of Artificial Sequence: Synthetic oligonucleotide
aguaagccacaggacagcg

SEQ ID NO: 2165381 - RNA, 19 nt, Artificial Sequence
  Description of Artificial Sequence: Synthetic oligonucleotide
cacaggccacucuucaugg

SEQ ID NO: 2165382 - RNA, 19 nt, Artificial Sequence
  Description of Artificial Sequence: Synthetic oligonucleotide
gaaugaaugugccggcaca

SEQ ID NO: 2165383 - RNA, 19 nt, Artificial Sequence
  Description of Artificial Sequence: Synthetic oligonucleotide
uccaguuguagaagcuggc

SEQ ID NO: 2165384 - RNA, 19 nt, Artificial Sequence
  Description of Artificial Sequence: Synthetic oligonucleotide
cuaugaccugcucaggaug

SEQ ID NO: 2165385 - RNA, 19 nt, Artificial Sequence
  Description of Artificial Sequence: Synthetic oligonucleotide
gaaccccuucuucacaaug

SEQ ID NO: 2165386 - RNA, 19 nt, Artificial Sequence
  Description of Artificial Sequence: Synthetic oligonucleotide
gagaccuuagugguggaug

SEQ ID NO: 2165387 - RNA, 19 nt, Artificial Sequence
  Description of Artificial Sequence: Synthetic oligonucleotide
uguagucuucagaaugaau

SEQ ID NO: 2165388 - RNA, 19 nt, Artificial Sequence
  Description of Artificial Sequence: Synthetic oligonucleotide
gcuggcauucgucuuauag

SEQ ID NO: 2165389 - RNA, 19 nt, Artificial Sequence
  Description of Artificial Sequence: Synthetic oligonucleotide
acaguaagccacaggacag

SEQ ID NO: 2165390 - RNA, 19 nt, Artificial Sequence
  Description of Artificial Sequence: Synthetic oligonucleotide
cacaauguacugguugucc

SEQ ID NO: 2165391 - RNA, 19 nt, Artificial Sequence
  Description of Artificial Sequence: Synthetic oligonucleotide
cacugggagccauuuaaag

SEQ ID NO: 2165392 - RNA, 19 nt, Artificial Sequence
  Description of Artificial Sequence: Synthetic oligonucleotide
ggguaaauguucucuguag

SEQ ID NO: 2165393 - RNA, 19 nt, Artificial Sequence
  Description of Artificial Sequence: Synthetic oligonucleotide
cuuagugguggauggagca

SEQ ID NO: 2165394 - RNA, 19 nt, Artificial Sequence
  Description of Artificial Sequence: Synthetic oligonucleotide
gggccagagaccuuagugg

SEQ ID NO: 2165395 - RNA, 19 nt, Artificial Sequence
  Description of Artificial Sequence: Synthetic oligonucleotide
gaugccgagguucuccuga

SEQ ID NO: 2165396 - RNA, 19 nt, Artificial Sequence
  Description of Artificial Sequence: Synthetic oligonucleotide
aguacuuggggaccuugcu

SEQ ID NO: 2165397 - RNA, 19 nt, Artificial Sequence
  Description of Artificial Sequence: Synthetic oligonucleotide
guacugguuguccucuucc

SEQ ID NO: 2165398 - RNA, 19 nt, Artificial Sequence
  Description of Artificial Sequence: Synthetic oligonucleotide
cacauagucccaagccucc

SEQ ID NO: 2165399 - RNA, 19 nt, Artificial Sequence
  Description of Artificial Sequence: Synthetic oligonucleotide
aaugaaugugccggcacaa

SEQ ID NO: 2165400 - RNA, 19 nt, Artificial Sequence
  Description of Artificial Sequence: Synthetic oligonucleotide
agucccaagccuccucacg

SEQ ID NO: 2165401 - RNA, 19 nt, Artificial Sequence
  Description of Artificial Sequence: Synthetic oligonucleotide
auagucccaagccuccuca

SEQ ID NO: 2165402 - RNA, 19 nt, Artificial Sequence
  Description of Artificial Sequence: Synthetic oligonucleotide
ucgucuuauaguucugaau

SEQ ID NO: 2165403 - RNA, 19 nt, Artificial Sequence
  Description of Artificial Sequence: Synthetic oligonucleotide
uucauacuaacagcagaga

SEQ ID NO: 2165404 - RNA, 19 nt, Artificial Sequence
  Description of Artificial Sequence: Synthetic oligonucleotide
uugccagcauugaaguaga

SEQ ID NO: 2165405 - RNA, 19 nt, Artificial Sequence
  Description of Artificial Sequence: Synthetic oligonucleotide
guuaucuguccaguuguag

SEQ ID NO: 2165406 - RNA, 19 nt, Artificial Sequence
  Description of Artificial Sequence: Synthetic oligonucleotide
uuucaccugcgccugcaca

SEQ ID NO: 2165407 - RNA, 19 nt, Artificial Sequence
  Description of Artificial Sequence: Synthetic oligonucleotide
gguggagagacacagcaca

SEQ ID NO: 2165408 - RNA, 19 nt, Artificial Sequence
  Description of Artificial Sequence: Synthetic oligonucleotide
ugcuguuggagaccuugca

SEQ ID NO: 2165409 - RNA, 19 nt, Artificial Sequence
  Description of Artificial Sequence: Synthetic oligonucleotide
cugggagccauuuaaagcu

SEQ ID NO: 2165410 - RNA, 19 nt, Artificial Sequence
  Description of Artificial Sequence: Synthetic oligonucleotide
guacaguaacacugggagc

SEQ ID NO: 2165411 - RNA, 19 nt, Artificial Sequence
  Description of Artificial Sequence: Synthetic oligonucleotide
uucgucuuauaguucugaa

SEQ ID NO: 2165412 - RNA, 19 nt, Artificial Sequence
  Description of Artificial Sequence: Synthetic oligonucleotide
cauacaccccuccuuguac

SEQ ID NO: 2165413 - RNA, 19 nt, Artificial Sequence
  Description of Artificial Sequence: Synthetic oligonucleotide
cuccaaguuaucuguccag

SEQ ID NO: 2165414 - RNA, 19 nt, Artificial Sequence
  Description of Artificial Sequence: Synthetic oligonucleotide
acagcaccgaugcagccca

SEQ ID NO: 2165415 - RNA, 19 nt, Artificial Sequence
  Description of Artificial Sequence: Synthetic oligonucleotide
uccaaguuaucuguccagu

SEQ ID NO: 2165416 - RNA, 19 nt, Artificial Sequence
  Description of Artificial Sequence: Synthetic oligonucleotide
agaagaggaccccuacagu

SEQ ID NO: 2165417 - RNA, 19 nt, Artificial Sequence
  Description of Artificial Sequence: Synthetic oligonucleotide
acagauggacaggaacaac

SEQ ID NO: 2165418 - RNA, 19 nt, Artificial Sequence
  Description of Artificial Sequence: Synthetic oligonucleotide
gguaaauguucucuguaga

SEQ ID NO: 2165419 - RNA, 19 nt, Artificial Sequence
  Description of Artificial Sequence: Synthetic oligonucleotide
aagaggaccccuacaguca

SEQ ID NO: 2165420 - RNA, 19 nt, Artificial Sequence
  Description of Artificial Sequence: Synthetic oligonucleotide
aggcccagaaaguccccgc

SEQ ID NO: 2165421 - RNA, 19 nt, Artificial Sequence
  Description of Artificial Sequence: Synthetic oligonucleotide
uuggggaccuugcuguagu

SEQ ID NO: 2165422 - RNA, 19 nt, Artificial Sequence
  Description of Artificial Sequence: Synthetic oligonucleotide
gaugcagcccaggagcccc

SEQ ID NO: 2165423 - RNA, 19 nt, Artificial Sequence
  Description of Artificial Sequence: Synthetic oligonucleotide
acgaagcugcucuugucug

SEQ ID NO: 2165424 - RNA, 19 nt, Artificial Sequence
  Description of Artificial Sequence: Synthetic oligonucleotide
auuucaccugcgccugcac

SEQ ID NO: 2165425 - RNA, 19 nt, Artificial Sequence
  Description of Artificial Sequence: Synthetic oligonucleotide
agggguaaauguucucugu

SEQ ID NO: 2165426 - RNA, 19 nt, Artificial Sequence
  Description of Artificial Sequence: Synthetic oligonucleotide
ucauacaccccuccuugua

SEQ ID NO: 2165427 - RNA, 19 nt, Artificial Sequence
  Description of Artificial Sequence: Synthetic oligonucleotide
agaaacgaagcugcucuug

SEQ ID NO: 2165428 - RNA, 19 nt, Artificial Sequence
  Description of Artificial Sequence: Synthetic oligonucleotide
ggauacugaggguggagag

SEQ ID NO: 2165429 - RNA, 19 nt, Artificial Sequence
  Description of Artificial Sequence: Synthetic oligonucleotide
accuuagugguggauggag

SEQ ID NO: 2165430 - RNA, 19 nt, Artificial Sequence
  Description of Artificial Sequence: Synthetic oligonucleotide
aguuccugagcuccaaguu

SEQ ID NO: 2165431 - RNA, 19 nt, Artificial Sequence
  Description of Artificial Sequence: Synthetic oligonucleotide
caauguacugguuguccuc

SEQ ID NO: 2165432 - RNA, 19 nt, Artificial Sequence
  Description of Artificial Sequence: Synthetic oligonucleotide
caccccuccuuguacacag

SEQ ID NO: 2165433 - RNA, 19 nt, Artificial Sequence
  Description of Artificial Sequence: Synthetic oligonucleotide
cuugucugcgaugauccac

SEQ ID NO: 2165434 - RNA, 19 nt, Artificial Sequence
  Description of Artificial Sequence: Synthetic oligonucleotide
cugaagccacaucugcacc

SEQ ID NO: 2165435 - RNA, 19 nt, Artificial Sequence
  Description of Artificial Sequence: Synthetic oligonucleotide
auacaccccuccuuguaca

SEQ ID NO: 2165436 - RNA, 19 nt, Artificial Sequence
  Description of Artificial Sequence: Synthetic oligonucleotide
gucaccugugcaaugagga

SEQ ID NO: 2165437 - RNA, 19 nt, Artificial Sequence
  Description of Artificial Sequence: Synthetic oligonucleotide
gagucagagaggucccaug

SEQ ID NO: 2165438 - RNA, 19 nt, Artificial Sequence
  Description of Artificial Sequence: Synthetic oligonucleotide
uacugguuguccucuucca

SEQ ID NO: 2165439 - RNA, 19 nt, Artificial Sequence
  Description of Artificial Sequence: Synthetic oligonucleotide
caggaacaaccccagcagc

SEQ ID NO: 2165440 - RNA, 19 nt, Artificial Sequence
  Description of Artificial Sequence: Synthetic oligonucleotide
cacagcauuucaccugcgc

SEQ ID NO: 2165441 - RNA, 19 nt, Artificial Sequence
  Description of Artificial Sequence: Synthetic oligonucleotide
agcagggguaaauguucuc

SEQ ID NO: 2165442 - RNA, 19 nt, Artificial Sequence
  Description of Artificial Sequence: Synthetic oligonucleotide
gaggaugccgagguucucc

SEQ ID NO: 2165443 - RNA, 19 nt, Artificial Sequence
  Description of Artificial Sequence: Synthetic oligonucleotide
ggggcuucauacuaacagc

SEQ ID NO: 2165444 - RNA, 19 nt, Artificial Sequence
  Description of Artificial Sequence: Synthetic oligonucleotide
uccucacggcugcugcugg

SEQ ID NO: 2165445 - RNA, 19 nt, Artificial Sequence
  Description of Artificial Sequence: Synthetic oligonucleotide
cagcucaguacuuggggac

SEQ ID NO: 2165446 - RNA, 19 nt, Artificial Sequence
  Description of Artificial Sequence: Synthetic oligonucleotide
gcuguuggagaccuugcag

SEQ ID NO: 2165447 - RNA, 19 nt, Artificial Sequence
  Description of Artificial Sequence: Synthetic oligonucleotide
caccugugcaaugaggaug

SEQ ID NO: 2165448 - RNA, 19 nt, Artificial Sequence
  Description of Artificial Sequence: Synthetic oligonucleotide
agucaccugugcaaugagg

SEQ ID NO: 2165449 - RNA, 19 nt, Artificial Sequence
  Description of Artificial Sequence: Synthetic oligonucleotide
gaaacgaagcugcucuugu

SEQ ID NO: 2165450 - RNA, 19 nt, Artificial Sequence
  Description of Artificial Sequence: Synthetic oligonucleotide
gauacugaggguggagaga

SEQ ID NO: 2165451 - RNA, 19 nt, Artificial Sequence
  Description of Artificial Sequence: Synthetic oligonucleotide
caagccuccucacggcugc

SEQ ID NO: 2165452 - RNA, 19 nt, Artificial Sequence
  Description of Artificial Sequence: Synthetic oligonucleotide
auucgucuuauaguucuga

SEQ ID NO: 2165453 - RNA, 19 nt, Artificial Sequence
  Description of Artificial Sequence: Synthetic oligonucleotide
gagaggucccaugggauac

SEQ ID NO: 2165454 - RNA, 19 nt, Artificial Sequence
  Description of Artificial Sequence: Synthetic oligonucleotide
gcuucauacuaacagcaga

SEQ ID NO: 2165455 - RNA, 19 nt, Artificial Sequence
  Description of Artificial Sequence: Synthetic oligonucleotide
aagcagcggaccucauuga

SEQ ID NO: 2165456 - RNA, 19 nt, Artificial Sequence
  Description of Artificial Sequence: Synthetic oligonucleotide
uuagugguggauggagcac

SEQ ID NO: 2165457 - RNA, 19 nt, Artificial Sequence
  Description of Artificial Sequence: Synthetic oligonucleotide
acacaaaguacagccccag

SEQ ID NO: 2165458 - RNA, 19 nt, Artificial Sequence
  Description of Artificial Sequence: Synthetic oligonucleotide
gaaggguccaggcccagaa

SEQ ID NO: 2165459 - RNA, 19 nt, Artificial Sequence
  Description of Artificial Sequence: Synthetic oligonucleotide
uccacacuccaaagcccag

SEQ ID NO: 2165460 - RNA, 19 nt, Artificial Sequence
  Description of Artificial Sequence: Synthetic oligonucleotide
accugugcaaugaggauga

SEQ ID NO: 2165461 - RNA, 19 nt, Artificial Sequence
  Description of Artificial Sequence: Synthetic oligonucleotide
agcacagagaggacgucag

SEQ ID NO: 2165462 - RNA, 19 nt, Artificial Sequence
  Description of Artificial Sequence: Synthetic oligonucleotide
cugugcaaugaggaugagc

SEQ ID NO: 2165463 - RNA, 19 nt, Artificial Sequence
  Description of Artificial Sequence: Synthetic oligonucleotide
uguucucuguagaguuccu

SEQ ID NO: 2165464 - RNA, 19 nt, Artificial Sequence
  Description of Artificial Sequence: Synthetic oligonucleotide
aggaacaaccccagcagcu

SEQ ID NO: 2165465 - RNA, 19 nt, Artificial Sequence
  Description of Artificial Sequence: Synthetic oligonucleotide
agagaggucccaugggaua

SEQ ID NO: 2165466 - RNA, 19 nt, Artificial Sequence
  Description of Artificial Sequence: Synthetic oligonucleotide
uccgagcugcuguuggaga

SEQ ID NO: 2165467 - RNA, 19 nt, Artificial Sequence
  Description of Artificial Sequence: Synthetic oligonucleotide
cauucgucuuauaguucug

SEQ ID NO: 2165468 - RNA, 19 nt, Artificial Sequence
  Description of Artificial Sequence: Synthetic oligonucleotide
caaugacagcaacaccaac

SEQ ID NO: 2165469 - RNA, 19 nt, Artificial Sequence
  Description of Artificial Sequence: Synthetic oligonucleotide
ggaagauugcauccgagcu

SEQ ID NO: 2165470 - RNA, 19 nt, Artificial Sequence
  Description of Artificial Sequence: Synthetic oligonucleotide
uccucgcaggagcaggggu

SEQ ID NO: 2165471 - RNA, 19 nt, Artificial Sequence
  Description of Artificial Sequence: Synthetic oligonucleotide
agagaggacgucagcagcu

SEQ ID NO: 2165472 - RNA, 19 nt, Artificial Sequence
  Description of Artificial Sequence: Synthetic oligonucleotide
auggaagauugcauccgag

SEQ ID NO: 2165473 - RNA, 19 nt, Artificial Sequence
  Description of Artificial Sequence: Synthetic oligonucleotide
cauggaagauugcauccga

SEQ ID NO: 2165474 - RNA, 19 nt, Artificial Sequence
  Description of Artificial Sequence: Synthetic oligonucleotide
gaccccuacagucaccugu

SEQ ID NO: 2165475 - RNA, 19 nt, Artificial Sequence
  Description of Artificial Sequence: Synthetic oligonucleotide
gccgagguucuccugaagc

SEQ ID NO: 2165476 - RNA, 19 nt, Artificial Sequence
  Description of Artificial Sequence: Synthetic oligonucleotide
ggaacacaaaguacagccc

SEQ ID NO: 2165477 - RNA, 19 nt, Artificial Sequence
  Description of Artificial Sequence: Synthetic oligonucleotide
aguccccgcuaugaccugc

SEQ ID NO: 2165478 - RNA, 19 nt, Artificial Sequence
  Description of Artificial Sequence: Synthetic oligonucleotide
cccgcuaugaccugcucag

SEQ ID NO: 2165479 - RNA, 19 nt, Artificial Sequence
  Description of Artificial Sequence: Synthetic oligonucleotide
ugaccugcucaggaugggc

SEQ ID NO: 2165480 - RNA, 19 nt, Artificial Sequence
  Description of Artificial Sequence: Synthetic oligonucleotide
cugcgaugauccacacucc

SEQ ID NO: 2165481 - RNA, 19 nt, Artificial Sequence
  Description of Artificial Sequence: Synthetic oligonucleotide
ucuucacaauguacugguu

SEQ ID NO: 2165482 - RNA, 19 nt, Artificial Sequence
  Description of Artificial Sequence: Synthetic oligonucleotide
gcauccgagcugcuguugg

SEQ ID NO: 2165483 - RNA, 19 nt, Artificial Sequence
  Description of Artificial Sequence: Synthetic oligonucleotide
gucagcagcucaguacuug

SEQ ID NO: 2165484 - RNA, 19 nt, Artificial Sequence
  Description of Artificial Sequence: Synthetic oligonucleotide
aggaugccgagguucuccu

SEQ ID NO: 2165485 - RNA, 19 nt, Artificial Sequence
  Description of Artificial Sequence: Synthetic oligonucleotide
ugcagcgagcuggacgaag

SEQ ID NO: 2165486 - RNA, 19 nt, Artificial Sequence
  Description of Artificial Sequence: Synthetic oligonucleotide
caguaagccacaggacagc

SEQ ID NO: 2165487 - RNA, 19 nt, Artificial Sequence
  Description of Artificial Sequence: Synthetic oligonucleotide
ccccuagacaguaagccac

SEQ ID NO: 2165488 - RNA, 19 nt, Artificial Sequence
  Description of Artificial Sequence: Synthetic oligonucleotide
cuuccauugucuccucgca

SEQ ID NO: 2165489 - RNA, 19 nt, Artificial Sequence
  Description of Artificial Sequence: Synthetic oligonucleotide
agcggaccucauugacagc

SEQ ID NO: 2165490 - RNA, 19 nt, Artificial Sequence
  Description of Artificial Sequence: Synthetic oligonucleotide
agaggacgucagcagcuca

SEQ ID NO: 2165491 - RNA, 19 nt, Artificial Sequence
  Description of Artificial Sequence: Synthetic oligonucleotide
uugcuguagucuucagaau

SEQ ID NO: 2165492 - RNA, 19 nt, Artificial Sequence
  Description of Artificial Sequence: Synthetic oligonucleotide
gaccuugcagaaccccuuc

SEQ ID NO: 2165493 - RNA, 19 nt, Artificial Sequence
  Description of Artificial Sequence: Synthetic oligonucleotide
cugcgccugcacauagucc

SEQ ID NO: 2165494 - RNA, 19 nt, Artificial Sequence
  Description of Artificial Sequence: Synthetic oligonucleotide
uccuuguacacaggccacu

SEQ ID NO: 2165495 - RNA, 19 nt, Artificial Sequence
  Description of Artificial Sequence: Synthetic oligonucleotide
ccagaauaaagaacagaca

SEQ ID NO: 2165496 - RNA, 19 nt, Artificial Sequence
  Description of Artificial Sequence: Synthetic oligonucleotide
uaacacugggagccauuua

SEQ ID NO: 2165497 - RNA, 19 nt, Artificial Sequence
  Description of Artificial Sequence: Synthetic oligonucleotide
ccuuagugguggauggagc

SEQ ID NO: 2165498 - RNA, 19 nt, Artificial Sequence
  Description of Artificial Sequence: Synthetic oligonucleotide
gcauucgucuuauaguucu

SEQ ID NO: 2165499 - RNA, 19 nt, Artificial Sequence
  Description of Artificial Sequence: Synthetic oligonucleotide
ugccgagguucuccugaag

SEQ ID NO: 2165500 - RNA, 19 nt, Artificial Sequence
  Description of Artificial Sequence: Synthetic oligonucleotide
uggauggagcacaggccau

SEQ ID NO: 2165501 - RNA, 19 nt, Artificial Sequence
  Description of Artificial Sequence: Synthetic oligonucleotide
guacagccccagcaagcag

SEQ ID NO: 2165502 - RNA, 19 nt, Artificial Sequence
  Description of Artificial Sequence: Synthetic oligonucleotide
cagcucaaugacagcaaca

SEQ ID NO: 2165503 - RNA, 19 nt, Artificial Sequence
  Description of Artificial Sequence: Synthetic oligonucleotide
gcucaaugacagcaacacc

SEQ ID NO: 2165504 - RNA, 19 nt, Artificial Sequence
  Description of Artificial Sequence: Synthetic oligonucleotide
agcugcucuugucugcgau

SEQ ID NO: 2165505 - RNA, 19 nt, Artificial Sequence
  Description of Artificial Sequence: Synthetic oligonucleotide
caacaccaacacacacgcc

SEQ ID NO: 2165506 - RNA, 19 nt, Artificial Sequence
  Description of Artificial Sequence: Synthetic oligonucleotide
ugucugcgaugauccacac

SEQ ID NO: 2165507 - RNA, 19 nt, Artificial Sequence
  Description of Artificial Sequence: Synthetic oligonucleotide
ggcacccacaccgaugaag

SEQ ID NO: 2165508 - RNA, 19 nt, Artificial Sequence
  Description of Artificial Sequence: Synthetic oligonucleotide
cagaaccccuucuucacaa

SEQ ID NO: 2165509 - RNA, 19 nt, Artificial Sequence
  Description of Artificial Sequence: Synthetic oligonucleotide
acacacgcccaggaggaug

SEQ ID NO: 2165510 - RNA, 19 nt, Artificial Sequence
  Description of Artificial Sequence: Synthetic oligonucleotide
gcgagcuggacgaaguuug

SEQ ID NO: 2165511 - RNA, 19 nt, Artificial Sequence
  Description of Artificial Sequence: Synthetic oligonucleotide
ccugcacauagucccaagc

SEQ ID NO: 2165512 - RNA, 19 nt, Artificial Sequence
  Description of Artificial Sequence: Synthetic oligonucleotide
ccaugggauacugagggug

SEQ ID NO: 2165513 - RNA, 19 nt, Artificial Sequence
  Description of Artificial Sequence: Synthetic oligonucleotide
cauugucuccucgcaggag

SEQ ID NO: 2165514 - RNA, 19 nt, Artificial Sequence
  Description of Artificial Sequence: Synthetic oligonucleotide
gggcuucauacuaacagca

SEQ ID NO: 2165515 - RNA, 19 nt, Artificial Sequence
  Description of Artificial Sequence: Synthetic oligonucleotide
aagcugcucuugucugcga

SEQ ID NO: 2165516 - RNA, 19 nt, Artificial Sequence
  Description of Artificial Sequence: Synthetic oligonucleotide
uagucccaagccuccucac

SEQ ID NO: 2165517 - RNA, 19 nt, Artificial Sequence
  Description of Artificial Sequence: Synthetic oligonucleotide
ggcuucauacuaacagcag

SEQ ID NO: 2165518 - RNA, 19 nt, Artificial Sequence
  Description of Artificial Sequence: Synthetic oligonucleotide
cagcauuucaccugcgccu

SEQ ID NO: 2165519 - RNA, 19 nt, Artificial Sequence
  Description of Artificial Sequence: Synthetic oligonucleotide
cagcacccagaauaaagaa

SEQ ID NO: 2165520 - RNA, 19 nt, Artificial Sequence
  Description of Artificial Sequence: Synthetic oligonucleotide
gaugggccagagaccuuag

SEQ ID NO: 2165521 - RNA, 19 nt, Artificial Sequence
  Description of Artificial Sequence: Synthetic oligonucleotide
cauaggccccaaccugcag

SEQ ID NO: 2165522 - RNA, 19 nt, Artificial Sequence
  Description of Artificial Sequence: Synthetic oligonucleotide
gcuguagucuucagaauga

SEQ ID NO: 2165523 - RNA, 19 nt, Artificial Sequence
  Description of Artificial Sequence: Synthetic oligonucleotide
uacuaacagcagagaggaa

SEQ ID NO: 2165524 - RNA, 19 nt, Artificial Sequence
  Description of Artificial Sequence: Synthetic oligonucleotide
cugcucuugucugcgauga

SEQ ID NO: 2165525 - RNA, 19 nt, Artificial Sequence
  Description of Artificial Sequence: Synthetic oligonucleotide
ccugcagcgagcuggacga

SEQ ID NO: 2165526 - RNA, 19 nt, Artificial Sequence
  Description of Artificial Sequence: Synthetic oligonucleotide
aggagcagggguaaauguu

SEQ ID NO: 2165527 - RNA, 19 nt, Artificial Sequence
  Description of Artificial Sequence: Synthetic oligonucleotide
gagccauuuaaagcuguua

SEQ ID NO: 2165528 - RNA, 19 nt, Artificial Sequence
  Description of Artificial Sequence: Synthetic oligonucleotide
agcauggugauggcaccca

SEQ ID NO: 2165529 - RNA, 19 nt, Artificial Sequence
  Description of Artificial Sequence: Synthetic oligonucleotide
gagccccaugagcauggug

SEQ ID NO: 2165530 - RNA, 19 nt, Artificial Sequence
  Description of Artificial Sequence: Synthetic oligonucleotide
aggaggaugccgagguucu

SEQ ID NO: 2165531 - RNA, 19 nt, Artificial Sequence
  Description of Artificial Sequence: Synthetic oligonucleotide
accccuacagucaccugug

SEQ ID NO: 2165532 - RNA, 19 nt, Artificial Sequence
  Description of Artificial Sequence: Synthetic oligonucleotide
ccaguuguagaagcuggcc

SEQ ID NO: 2165533 - RNA, 19 nt, Artificial Sequence
  Description of Artificial Sequence: Synthetic oligonucleotide
acaguaacacugggagcca

SEQ ID NO: 2165534 - RNA, 19 nt, Artificial Sequence
  Description of Artificial Sequence: Synthetic oligonucleotide
acgaaguuugaaggacaga

SEQ ID NO: 2165535 - RNA, 19 nt, Artificial Sequence
  Description of Artificial Sequence: Synthetic oligonucleotide
cgaaguuugaaggacagaa

SEQ ID NO: 2165536 - RNA, 19 nt, Artificial Sequence
  Description of Artificial Sequence: Synthetic oligonucleotide
caccugcgccugcacauag

SEQ ID NO: 2165537 - RNA, 19 nt, Artificial Sequence
  Description of Artificial Sequence: Synthetic oligonucleotide
gagaggacgucagcagcuc

SEQ ID NO: 2165538 - RNA, 19 nt, Artificial Sequence
  Description of Artificial Sequence: Synthetic oligonucleotide
acauagucccaagccuccu

SEQ ID NO: 2165539 - RNA, 19 nt, Artificial Sequence
  Description of Artificial Sequence: Synthetic oligonucleotide
gcugcucuugucugcgaug

SEQ ID NO: 2165540 - RNA, 19 nt, Artificial Sequence
  Description of Artificial Sequence: Synthetic oligonucleotide
gcggaccucauugacagca

SEQ ID NO: 2165541 - RNA, 19 nt, Artificial Sequence
  Description of Artificial Sequence: Synthetic oligonucleotide
uugcauccgagcugcuguu

SEQ ID NO: 2165542 - RNA, 19 nt, Artificial Sequence
  Description of Artificial Sequence: Synthetic oligonucleotide
augggccagagaccuuagu

SEQ ID NO: 2165543 - RNA, 19 nt, Artificial Sequence
  Description of Artificial Sequence: Synthetic oligonucleotide
cacgcccaggaggaugccg

SEQ ID NO: 2165544 - RNA, 19 nt, Artificial Sequence
  Description of Artificial Sequence: Synthetic oligonucleotide
cagaaugaaugugccggca

SEQ ID NO: 2165545 - RNA, 19 nt, Artificial Sequence
  Description of Artificial Sequence: Synthetic oligonucleotide
cacccacaccgaugaagac

SEQ ID NO: 2165546 - RNA, 19 nt, Artificial Sequence
  Description of Artificial Sequence: Synthetic oligonucleotide
augaaugugccggcacaaa

SEQ ID NO: 2165547 - RNA, 19 nt, Artificial Sequence
  Description of Artificial Sequence: Synthetic oligonucleotide
agcgagcuggacgaaguuu

SEQ ID NO: 2165548 - RNA, 19 nt, Artificial Sequence
  Description of Artificial Sequence: Synthetic oligonucleotide
cccuccuuguacacaggcc

SEQ ID NO: 2165549 - RNA, 19 nt, Artificial Sequence
  Description of Artificial Sequence: Synthetic oligonucleotide
acauaggccccaaccugca

SEQ ID NO: 2165550 - RNA, 19 nt, Artificial Sequence
  Description of Artificial Sequence: Synthetic oligonucleotide
ggaacaaccccagcagcuc

SEQ ID NO: 2165551 - RNA, 19 nt, Artificial Sequence
  Description of Artificial Sequence: Synthetic oligonucleotide
gaaugauguccaucaccau

SEQ ID NO: 2165552 - RNA, 19 nt, Artificial Sequence
  Description of Artificial Sequence: Synthetic oligonucleotide
uggggaccuugcuguaguc

SEQ ID NO: 2165553 - RNA, 19 nt, Artificial Sequence
  Description of Artificial Sequence: Synthetic oligonucleotide
acacugggagccauuuaaa

SEQ ID NO: 2165554 - RNA, 19 nt, Artificial Sequence
  Description of Artificial Sequence: Synthetic oligonucleotide
gggauacugaggguggaga

SEQ ID NO: 2165555 - RNA, 19 nt, Artificial Sequence
  Description of Artificial Sequence: Synthetic oligonucleotide
aguuaucuguccaguugua

SEQ ID NO: 2165556 - RNA, 19 nt, Artificial Sequence
  Description of Artificial Sequence: Synthetic oligonucleotide
gcucuugucugcgaugauc

SEQ ID NO: 2165557 - RNA, 19 nt, Artificial Sequence
  Description of Artificial Sequence: Synthetic oligonucleotide
ugcucuugucugcgaugau

SEQ ID NO: 2165558 - RNA, 19 nt, Artificial Sequence
  Description of Artificial Sequence: Synthetic oligonucleotide
ccgagcugcuguuggagac

SEQ ID NO: 2165559 - RNA, 19 nt, Artificial Sequence
  Description of Artificial Sequence: Synthetic oligonucleotide
ggccacucuucauggaaga

SEQ ID NO: 2165560 - RNA, 19 nt, Artificial Sequence
  Description of Artificial Sequence: Synthetic oligonucleotide
gaccuuagugguggaugga

SEQ ID NO: 2165561 - RNA, 19 nt, Artificial Sequence
  Description of Artificial Sequence: Synthetic oligonucleotide
ggauggagcacaggccaug

SEQ ID NO: 2165562 - RNA, 19 nt, Artificial Sequence
  Description of Artificial Sequence: Synthetic oligonucleotide
cauccgagcugcuguugga

SEQ ID NO: 2165563 - RNA, 19 nt, Artificial Sequence
  Description of Artificial Sequence: Synthetic oligonucleotide
ccccuucuucacaauguac

SEQ ID NO: 2165564 - RNA, 19 nt, Artificial Sequence
  Description of Artificial Sequence: Synthetic oligonucleotide
cuccucgcaggagcagggg

SEQ ID NO: 2165565 - RNA, 19 nt, Artificial Sequence
  Description of Artificial Sequence: Synthetic oligonucleotide
ccugcgccugcacauaguc

SEQ ID NO: 2165566 - RNA, 19 nt, Artificial Sequence
  Description of Artificial Sequence: Synthetic oligonucleotide
gagaaggguccaggcccag

SEQ ID NO: 2165567 - RNA, 19 nt, Artificial Sequence
  Description of Artificial Sequence: Synthetic oligonucleotide
agaggucccaugggauacu

SEQ ID NO: 2165568 - RNA, 19 nt, Artificial Sequence
  Description of Artificial Sequence: Synthetic oligonucleotide
cuguagucuucagaaugaa

SEQ ID NO: 2165569 - RNA, 19 nt, Artificial Sequence
  Description of Artificial Sequence: Synthetic oligonucleotide
aggagucagagagguccca

SEQ ID NO: 2165570 - RNA, 19 nt, Artificial Sequence
  Description of Artificial Sequence: Synthetic oligonucleotide
gagcuggacgaaguuugaa

SEQ ID NO: 2165571 - RNA, 19 nt, Artificial Sequence
  Description of Artificial Sequence: Synthetic oligonucleotide
gagcagggguaaauguucu

SEQ ID NO: 2165572 - RNA, 19 nt, Artificial Sequence
  Description of Artificial Sequence: Synthetic oligonucleotide
agaaggguccaggcccaga

SEQ ID NO: 2165573 - RNA, 19 nt, Artificial Sequence
  Description of Artificial Sequence: Synthetic oligonucleotide
cuuguacacaggccacucu

SEQ ID NO: 2165574 - RNA, 19 nt, Artificial Sequence
  Description of Artificial Sequence: Synthetic oligonucleotide
acacgcccaggaggaugcc

SEQ ID NO: 2165575 - RNA, 19 nt, Artificial Sequence
  Description of Artificial Sequence: Synthetic oligonucleotide
acaccccuccuuguacaca

SEQ ID NO: 2165576 - RNA, 19 nt, Artificial Sequence
  Description of Artificial Sequence: Synthetic oligonucleotide
ggcauucgucuuauaguuc

SEQ ID NO: 2165577 - RNA, 19 nt, Artificial Sequence
  Description of Artificial Sequence: Synthetic oligonucleotide
gcugcuggcauucgucuua

SEQ ID NO: 2165578 - RNA, 19 nt, Artificial Sequence
  Description of Artificial Sequence: Synthetic oligonucleotide
cauugacagcaccgaugca

SEQ ID NO: 2165579 - RNA, 19 nt, Artificial Sequence
  Description of Artificial Sequence: Synthetic oligonucleotide
ucaccugcgccugcacaua

SEQ ID NO: 2165580 - RNA, 19 nt, Artificial Sequence
  Description of Artificial Sequence: Synthetic oligonucleotide
ccuagacaguaagccacag

SEQ ID NO: 2165581 - RNA, 19 nt, Artificial Sequence
  Description of Artificial Sequence: Synthetic oligonucleotide
ccggcacaaacagauggac

SEQ ID NO: 2165582 - RNA, 19 nt, Artificial Sequence
  Description of Artificial Sequence: Synthetic oligonucleotide
gcaccgaugcagcccagga

SEQ ID NO: 2165583 - RNA, 19 nt, Artificial Sequence
  Description of Artificial Sequence: Synthetic oligonucleotide
ggaugggccagagaccuua

SEQ ID NO: 2165584 - RNA, 19 nt, Artificial Sequence
  Description of Artificial Sequence: Synthetic oligonucleotide
gcagcggaccucauugaca

SEQ ID NO: 2165585 - RNA, 19 nt, Artificial Sequence
  Description of Artificial Sequence: Synthetic oligonucleotide
gcuaugaccugcucaggau

SEQ ID NO: 2165586 - RNA, 19 nt, Artificial Sequence
  Description of Artificial Sequence: Synthetic oligonucleotide
cgaugauccacacuccaaa

SEQ ID NO: 2165587 - RNA, 19 nt, Artificial Sequence
  Description of Artificial Sequence: Synthetic oligonucleotide
uccccgcuaugaccugcuc

SEQ ID NO: 2165588 - RNA, 19 nt, Artificial Sequence
  Description of Artificial Sequence: Synthetic oligonucleotide
ggaugccgagguucuccug

SEQ ID NO: 2165589 - RNA, 19 nt, Artificial Sequence
  Description of Artificial Sequence: Synthetic oligonucleotide
augugccggcacaaacaga

SEQ ID NO: 2165590 - RNA, 19 nt, Artificial Sequence
  Description of Artificial Sequence: Synthetic oligonucleotide
ggguggagagacacagcac

SEQ ID NO: 2165591 - RNA, 19 nt, Artificial Sequence
  Description of Artificial Sequence: Synthetic oligonucleotide
gcauuucaccugcgccugc

SEQ ID NO: 2165592 - RNA, 19 nt, Artificial Sequence
  Description of Artificial Sequence: Synthetic oligonucleotide
cccacaccgaugaagacau

SEQ ID NO: 2165593 - RNA, 19 nt, Artificial Sequence
  Description of Artificial Sequence: Synthetic oligonucleotide
gugccggcacaaacagaug

SEQ ID NO: 2165594 - RNA, 19 nt, Artificial Sequence
  Description of Artificial Sequence: Synthetic oligonucleotide
cucgcaggagcagggguaa

SEQ ID NO: 2165595 - RNA, 19 nt, Artificial Sequence
  Description of Artificial Sequence: Synthetic oligonucleotide
cuacagucaccugugcaau

SEQ ID NO: 2165596 - RNA, 19 nt, Artificial Sequence
  Description of Artificial Sequence: Synthetic oligonucleotide
gggaccuugcuguagucuu

SEQ ID NO: 2165597 - RNA, 19 nt, Artificial Sequence
  Description of Artificial Sequence: Synthetic oligonucleotide
gucugcgaugauccacacu

SEQ ID NO: 2165598 - RNA, 19 nt, Artificial Sequence
  Description of Artificial Sequence: Synthetic oligonucleotide
ccacagcauuucaccugcg

SEQ ID NO: 2165599 - RNA, 19 nt, Artificial Sequence
  Description of Artificial Sequence: Synthetic oligonucleotide
aggucccaugggauacuga

SEQ ID NO: 2165600 - RNA, 19 nt, Artificial Sequence
  Description of Artificial Sequence: Synthetic oligonucleotide
aagccuccucacggcugcu

SEQ ID NO: 2165601 - RNA, 19 nt, Artificial Sequence
  Description of Artificial Sequence: Synthetic oligonucleotide
cccuagacaguaagccaca

SEQ ID NO: 2165602 - RNA, 19 nt, Artificial Sequence
  Description of Artificial Sequence: Synthetic oligonucleotide
gccggcacaaacagaugga

SEQ ID NO: 2165603 - RNA, 19 nt, Artificial Sequence
  Description of Artificial Sequence: Synthetic oligonucleotide
cgcuaugaccugcucagga

SEQ ID NO: 2165604 - RNA, 19 nt, Artificial Sequence
  Description of Artificial Sequence: Synthetic oligonucleotide
ugcuggcauucgucuuaua

SEQ ID NO: 2165605 - RNA, 19 nt, Artificial Sequence
  Description of Artificial Sequence: Synthetic oligonucleotide
gcgaugauccacacuccaa

SEQ ID NO: 2165606 - RNA, 19 nt, Artificial Sequence
  Description of Artificial Sequence: Synthetic oligonucleotide
accugcgccugcacauagu

SEQ ID NO: 2165607 - RNA, 19 nt, Artificial Sequence
  Description of Artificial Sequence: Synthetic oligonucleotide
ggaccccuacagucaccug

SEQ ID NO: 2165608 - RNA, 19 nt, Artificial Sequence
  Description of Artificial Sequence: Synthetic oligonucleotide
cagcaccgaugcagcccag

SEQ ID NO: 2165609 - RNA, 19 nt, Artificial Sequence
  Description of Artificial Sequence: Synthetic oligonucleotide
agauugcauccgagcugcu

SEQ ID NO: 2165610 - RNA, 19 nt, Artificial Sequence
  Description of Artificial Sequence: Synthetic oligonucleotide
cagaaacgaagcugcucuu

SEQ ID NO: 2165611 - RNA, 19 nt, Artificial Sequence
  Description of Artificial Sequence: Synthetic oligonucleotide
gcccaggaucacagcaccc

SEQ ID NO: 2165612 - RNA, 19 nt, Artificial Sequence
  Description of Artificial Sequence: Synthetic oligonucleotide
ggcccagaaaguccccgcu

SEQ ID NO: 2165613 - RNA, 19 nt, Artificial Sequence
  Description of Artificial Sequence: Synthetic oligonucleotide
ccccuacagucaccugugc

SEQ ID NO: 2165614 - RNA, 19 nt, Artificial Sequence
  Description of Artificial Sequence: Synthetic oligonucleotide
cgagguucuccugaagcca

SEQ ID NO: 2165615 - RNA, 19 nt, Artificial Sequence
  Description of Artificial Sequence: Synthetic oligonucleotide
ccucgcaggagcaggggua

SEQ ID NO: 2165616 - RNA, 19 nt, Artificial Sequence
  Description of Artificial Sequence: Synthetic oligonucleotide
gcagcgagcuggacgaagu

SEQ ID NO: 2165617 - RNA, 19 nt, Artificial Sequence
  Description of Artificial Sequence: Synthetic oligonucleotide
ccaaguuaucuguccaguu

SEQ ID NO: 2165618 - RNA, 19 nt, Artificial Sequence
  Description of Artificial Sequence: Synthetic oligonucleotide
ccgcuaugaccugcucagg

SEQ ID NO: 2165619 - RNA, 19 nt, Artificial Sequence
  Description of Artificial Sequence: Synthetic oligonucleotide
ggggaccuugcuguagucu

SEQ ID NO: 2165620 - RNA, 19 nt, Artificial Sequence
  Description of Artificial Sequence: Synthetic oligonucleotide
ggaggaugccgagguucuc

SEQ ID NO: 2165621 - RNA, 19 nt, Artificial Sequence
  Description of Artificial Sequence: Synthetic oligonucleotide
ggagucagagaggucccau

SEQ ID NO: 2165622 - RNA, 19 nt, Artificial Sequence
  Description of Artificial Sequence: Synthetic oligonucleotide
ggguccaggcccagaaagu

SEQ ID NO: 2165623 - RNA, 19 nt, Artificial Sequence
  Description of Artificial Sequence: Synthetic oligonucleotide
aggccccaaccugcagcga

SEQ ID NO: 2165624 - RNA, 19 nt, Artificial Sequence
  Description of Artificial Sequence: Synthetic oligonucleotide
gcaagcagcggaccucauu

SEQ ID NO: 2165625 - RNA, 19 nt, Artificial Sequence
  Description of Artificial Sequence: Synthetic oligonucleotide
cgagcuggacgaaguuuga

SEQ ID NO: 2165626 - RNA, 19 nt, Artificial Sequence
  Description of Artificial Sequence: Synthetic oligonucleotide
caguaacacugggagccau

SEQ ID NO: 2165627 - RNA, 19 nt, Artificial Sequence
  Description of Artificial Sequence: Synthetic oligonucleotide
ggagccauuuaaagcuguu

SEQ ID NO: 2165628 - RNA, 19 nt, Artificial Sequence
  Description of Artificial Sequence: Synthetic oligonucleotide
cccagcaagcagcggaccu

SEQ ID NO: 2165629 - RNA, 19 nt, Artificial Sequence
  Description of Artificial Sequence: Synthetic oligonucleotide
aggaugggccagagaccuu

SEQ ID NO: 2165630 - RNA, 19 nt, Artificial Sequence
  Description of Artificial Sequence: Synthetic oligonucleotide
guccccgcuaugaccugcu

SEQ ID NO: 2165631 - RNA, 19 nt, Artificial Sequence
  Description of Artificial Sequence: Synthetic oligonucleotide
ccucauugacagcaccgau

SEQ ID NO: 2165632 - RNA, 19 nt, Artificial Sequence
  Description of Artificial Sequence: Synthetic oligonucleotide
cugcuggcauucgucuuau

SEQ ID NO: 2165633 - RNA, 19 nt, Artificial Sequence
  Description of Artificial Sequence: Synthetic oligonucleotide
cagcgagcuggacgaaguu

SEQ ID NO: 2165634 - RNA, 19 nt, Artificial Sequence
  Description of Artificial Sequence: Synthetic oligonucleotide
gcgccugcacauaguccca

SEQ ID NO: 2165635 - RNA, 19 nt, Artificial Sequence
  Description of Artificial Sequence: Synthetic oligonucleotide
cucaguacuuggggaccuu

SEQ ID NO: 2165636 - RNA, 19 nt, Artificial Sequence
  Description of Artificial Sequence: Synthetic oligonucleotide
cugcagcgagcuggacgaa

SEQ ID NO: 2165637 - RNA, 19 nt, Artificial Sequence
  Description of Artificial Sequence: Synthetic oligonucleotide
cacacacgcccaggaggau

SEQ ID NO: 2165638 - RNA, 19 nt, Artificial Sequence
  Description of Artificial Sequence: Synthetic oligonucleotide
ccacaccgaugaagacaua

SEQ ID NO: 2165639 - RNA, 19 nt, Artificial Sequence
  Description of Artificial Sequence: Synthetic oligonucleotide
cgccugcacauagucccaa

SEQ ID NO: 2165640 - RNA, 19 nt, Artificial Sequence
  Description of Artificial Sequence: Synthetic oligonucleotide
cgucagcagcucaguacuu

SEQ ID NO: 2165641 - RNA, 19 nt, Artificial Sequence
  Description of Artificial Sequence: Synthetic oligonucleotide
ucuuuacaggguaagaccg

SEQ ID NO: 2165642 - RNA, 19 nt, Artificial Sequence
  Description of Artificial Sequence: Synthetic oligonucleotide
agaacaagaaaucucacug

SEQ ID NO: 2165643 - RNA, 19 nt, Artificial Sequence
  Description of Artificial Sequence: Synthetic oligonucleotide
agugacguaucucuaaggc

SEQ ID NO: 2165644 - RNA, 19 nt, Artificial Sequence
  Description of Artificial Sequence: Synthetic oligonucleotide
aauuccauuagggaauccc

SEQ ID NO: 2165645 - RNA, 19 nt, Artificial Sequence
  Description of Artificial Sequence: Synthetic oligonucleotide
ugaggcaaaacacagaauc

SEQ ID NO: 2165646 - RNA, 19 nt, Artificial Sequence
  Description of Artificial Sequence: Synthetic oligonucleotide
aaaggaauggcugugaagu

SEQ ID NO: 2165647 - RNA, 19 nt, Artificial Sequence
  Description of Artificial Sequence: Synthetic oligonucleotide
aaauuagcguuccuaaucu

SEQ ID NO: 2165648 - RNA, 19 nt, Artificial Sequence
  Description of Artificial Sequence: Synthetic oligonucleotide
uacaccacugacuucauag

SEQ ID NO: 2165649 - RNA, 19 nt, Artificial Sequence
  Description of Artificial Sequence: Synthetic oligonucleotide
augauaucaugucuuuucc

SEQ ID NO: 2165650 - RNA, 19 nt, Artificial Sequence
  Description of Artificial Sequence: Synthetic oligonucleotide
uguaccaacgaucagccac

SEQ ID NO: 2165651 - RNA, 19 nt, Artificial Sequence
  Description of Artificial Sequence: Synthetic oligonucleotide
ugguauuugcucuuuacag

SEQ ID NO: 2165652 - RNA, 19 nt, Artificial Sequence
  Description of Artificial Sequence: Synthetic oligonucleotide
ucuugugcuagccagggcc

SEQ ID NO: 2165653 - RNA, 19 nt, Artificial Sequence
  Description of Artificial Sequence: Synthetic oligonucleotide
ugaaauggagcuagugacg

SEQ ID NO: 2165654 - RNA, 19 nt, Artificial Sequence
  Description of Artificial Sequence: Synthetic oligonucleotide
uaucucuaaggcaagcugc

SEQ ID NO: 2165655 - RNA, 19 nt, Artificial Sequence
  Description of Artificial Sequence: Synthetic oligonucleotide
uuuccaacugagaacaaga

SEQ ID NO: 2165656 - RNA, 19 nt, Artificial Sequence
  Description of Artificial Sequence: Synthetic oligonucleotide
aaggcaagcugcuuuaugu

SEQ ID NO: 2165657 - RNA, 19 nt, Artificial Sequence
  Description of Artificial Sequence: Synthetic oligonucleotide
auuagggaaucccagagga

SEQ ID NO: 2165658 - RNA, 19 nt, Artificial Sequence
  Description of Artificial Sequence: Synthetic oligonucleotide
ugacguaucucuaaggcaa

SEQ ID NO: 2165659 - RNA, 19 nt, Artificial Sequence
  Description of Artificial Sequence: Synthetic oligonucleotide
gacuucauaguccaaaguc

SEQ ID NO: 2165660 - RNA, 19 nt, Artificial Sequence
  Description of Artificial Sequence: Synthetic oligonucleotide
uaagcaugaggugugaaag

SEQ ID NO: 2165661 - RNA, 19 nt, Artificial Sequence
  Description of Artificial Sequence: Synthetic oligonucleotide
uuccuaaucucccuguuug

SEQ ID NO: 2165662 - RNA, 19 nt, Artificial Sequence
  Description of Artificial Sequence: Synthetic oligonucleotide
aaguuguaauucuugauuu

SEQ ID NO: 2165663 - RNA, 19 nt, Artificial Sequence
  Description of Artificial Sequence: Synthetic oligonucleotide
uucuugauuucacuguacc

SEQ ID NO: 2165664 - RNA, 19 nt, Artificial Sequence
  Description of Artificial Sequence: Synthetic oligonucleotide
uaugucacauuuaaaggaa

SEQ ID NO: 2165665 - RNA, 19 nt, Artificial Sequence
  Description of Artificial Sequence: Synthetic oligonucleotide
auuagcguuccuaaucucc

SEQ ID NO: 2165666 - RNA, 19 nt, Artificial Sequence
  Description of Artificial Sequence: Synthetic oligonucleotide
uucuugcaaagcuugagug

SEQ ID NO: 2165667 - RNA, 19 nt, Artificial Sequence
  Description of Artificial Sequence: Synthetic oligonucleotide
guuaaacagcuauucagag

SEQ ID NO: 2165668 - RNA, 19 nt, Artificial Sequence
  Description of Artificial Sequence: Synthetic oligonucleotide
auaucaugucuuuuccaac

SEQ ID NO: 2165669 - RNA, 19 nt, Artificial Sequence
  Description of Artificial Sequence: Synthetic oligonucleotide
uaucaugucuuuuccaacu

SEQ ID NO: 2165670 - RNA, 19 nt, Artificial Sequence
  Description of Artificial Sequence: Synthetic oligonucleotide
aauuagcguuccuaaucuc

SEQ ID NO: 2165671 - RNA, 19 nt, Artificial Sequence
  Description of Artificial Sequence: Synthetic oligonucleotide
uauucagagagaacugugu

SEQ ID NO: 2165672 - RNA, 19 nt, Artificial Sequence
  Description of Artificial Sequence: Synthetic oligonucleotide
ucacauuuaaaggaauggc

SEQ ID NO: 2165673 - RNA, 19 nt, Artificial Sequence
  Description of Artificial Sequence: Synthetic oligonucleotide
gauaucaugucuuuuccaa

SEQ ID NO: 2165674 - RNA, 19 nt, Artificial Sequence
  Description of Artificial Sequence: Synthetic oligonucleotide
uuagcguuccuaaucuccc

SEQ ID NO: 2165675 - RNA, 19 nt, Artificial Sequence
  Description of Artificial Sequence: Synthetic oligonucleotide
aguuguaauucuugauuuc

SEQ ID NO: 2165676 - RNA, 19 nt, Artificial Sequence
  Description of Artificial Sequence: Synthetic oligonucleotide
caaauuagcguuccuaauc

SEQ ID NO: 2165677 - RNA, 19 nt, Artificial Sequence
  Description of Artificial Sequence: Synthetic oligonucleotide
uaaucucccuguuugggcc

SEQ ID NO: 2165678 - RNA, 19 nt, Artificial Sequence
  Description of Artificial Sequence: Synthetic oligonucleotide
agauguaaggcuguaagca

SEQ ID NO: 2165679 - RNA, 19 nt, Artificial Sequence
  Description of Artificial Sequence: Synthetic oligonucleotide
aaaugggcucacccucucc

SEQ ID NO: 2165680 - RNA, 19 nt, Artificial Sequence
  Description of Artificial Sequence: Synthetic oligonucleotide
aaucucacugacucuguga

SEQ ID NO: 2165681 - RNA, 19 nt, Artificial Sequence
  Description of Artificial Sequence: Synthetic oligonucleotide
uguaaggcuguaagcauga

SEQ ID NO: 2165682 - RNA, 19 nt, Artificial Sequence
  Description of Artificial Sequence: Synthetic oligonucleotide
agaaaucucacugacucug

SEQ ID NO: 2165683 - RNA, 19 nt, Artificial Sequence
  Description of Artificial Sequence: Synthetic oligonucleotide
uacaggguaagaccgcaag

SEQ ID NO: 2165684 - RNA, 19 nt, Artificial Sequence
  Description of Artificial Sequence: Synthetic oligonucleotide
cugagaacaagaaaucuca

SEQ ID NO: 2165685 - RNA, 19 nt, Artificial Sequence
  Description of Artificial Sequence: Synthetic oligonucleotide
acucaacuggaccucuagc

SEQ ID NO: 2165686 - RNA, 19 nt, Artificial Sequence
  Description of Artificial Sequence: Synthetic oligonucleotide
aucaaauuagcguuccuaa

SEQ ID NO: 2165687 - RNA, 19 nt, Artificial Sequence
  Description of Artificial Sequence: Synthetic oligonucleotide
uggcaauuccauuagggaa

SEQ ID NO: 2165688 - RNA, 19 nt, Artificial Sequence
  Description of Artificial Sequence: Synthetic oligonucleotide
uugaggauucuugugcuag

SEQ ID NO: 2165689 - RNA, 19 nt, Artificial Sequence
  Description of Artificial Sequence: Synthetic oligonucleotide
uuguaauucuugauuucac

SEQ ID NO: 2165690 - RNA, 19 nt, Artificial Sequence
  Description of Artificial Sequence: Synthetic oligonucleotide
aauggagcuagugacguau

SEQ ID NO: 2165691 - RNA, 19 nt, Artificial Sequence
  Description of Artificial Sequence: Synthetic oligonucleotide
uuaaacugcuuagaagcug

SEQ ID NO: 2165692 - RNA, 19 nt, Artificial Sequence
  Description of Artificial Sequence: Synthetic oligonucleotide
ucgucugaggcaaaacaca

SEQ ID NO: 2165693 - RNA, 19 nt, Artificial Sequence
  Description of Artificial Sequence: Synthetic oligonucleotide
aaucaaauuagcguuccua

SEQ ID NO: 2165694 - RNA, 19 nt, Artificial Sequence
  Description of Artificial Sequence: Synthetic oligonucleotide
ucagagagaacuguguauc

SEQ ID NO: 2165695 - RNA, 19 nt, Artificial Sequence
  Description of Artificial Sequence: Synthetic oligonucleotide
uagggaaucccagaggaug

SEQ ID NO: 2165696 - RNA, 19 nt, Artificial Sequence
  Description of Artificial Sequence: Synthetic oligonucleotide
ugugggaugauaucauguc

SEQ ID NO: 2165697 - RNA, 19 nt, Artificial Sequence
  Description of Artificial Sequence: Synthetic oligonucleotide
gaugccgucauuucaggga

SEQ ID NO: 2165698 - RNA, 19 nt, Artificial Sequence
  Description of Artificial Sequence: Synthetic oligonucleotide
acacagaaucaaauuagcg

SEQ ID NO: 2165699 - RNA, 19 nt, Artificial Sequence
  Description of Artificial Sequence: Synthetic oligonucleotide
aacagcuauucagagagaa

SEQ ID NO: 2165700 - RNA, 19 nt, Artificial Sequence
  Description of Artificial Sequence: Synthetic oligonucleotide
acaggguaagaccgcaagg

SEQ ID NO: 2165701 - RNA, 19 nt, Artificial Sequence
  Description of Artificial Sequence: Synthetic oligonucleotide
ccaacgaucagccacuucc

SEQ ID NO: 2165702 - RNA, 19 nt, Artificial Sequence
  Description of Artificial Sequence: Synthetic oligonucleotide
ucagggacacucaacugga

SEQ ID NO: 2165703 - RNA, 19 nt, Artificial Sequence
  Description of Artificial Sequence: Synthetic oligonucleotide
uagugacguaucucuaagg

SEQ ID NO: 2165704 - RNA, 19 nt, Artificial Sequence
  Description of Artificial Sequence: Synthetic oligonucleotide
accgcaaggaaguaaggcu

SEQ ID NO: 2165705 - RNA, 19 nt, Artificial Sequence
  Description of Artificial Sequence: Synthetic oligonucleotide
acuagccacgacuggacuc

SEQ ID NO: 2165706 - RNA, 19 nt, Artificial Sequence
  Description of Artificial Sequence: Synthetic oligonucleotide
ggugaagccaggcugcugg

SEQ ID NO: 2165707 - RNA, 19 nt, Artificial Sequence
  Description of Artificial Sequence: Synthetic oligonucleotide
aggcugucggguuuccucc

SEQ ID NO: 2165708 - RNA, 19 nt, Artificial Sequence
  Description of Artificial Sequence: Synthetic oligonucleotide
cagauguaaggcuguaagc

SEQ ID NO: 2165709 - RNA, 19 nt, Artificial Sequence
  Description of Artificial Sequence: Synthetic oligonucleotide
cauuagggaaucccagagg

SEQ ID NO: 2165710 - RNA, 19 nt, Artificial Sequence
  Description of Artificial Sequence: Synthetic oligonucleotide
cacuguaccaacgaucagc

SEQ ID NO: 2165711 - RNA, 19 nt, Artificial Sequence
  Description of Artificial Sequence: Synthetic oligonucleotide
uugucacacauuccaggag

SEQ ID NO: 2165712 - RNA, 19 nt, Artificial Sequence
  Description of Artificial Sequence: Synthetic oligonucleotide
cuagugacguaucucuaag

SEQ ID NO: 2165713 - RNA, 19 nt, Artificial Sequence
  Description of Artificial Sequence: Synthetic oligonucleotide
ugagaacaagaaaucucac

SEQ ID NO: 2165714 - RNA, 19 nt, Artificial Sequence
  Description of Artificial Sequence: Synthetic oligonucleotide
ugugaaguguccugucccc

SEQ ID NO: 2165715 - RNA, 19 nt, Artificial Sequence
  Description of Artificial Sequence: Synthetic oligonucleotide
ucggguuuccuccaggguc

SEQ ID NO: 2165716 - RNA, 19 nt, Artificial Sequence
  Description of Artificial Sequence: Synthetic oligonucleotide
uguuugggccucuucccgg

SEQ ID NO: 2165717 - RNA, 19 nt, Artificial Sequence
  Description of Artificial Sequence: Synthetic oligonucleotide
aaggaauggcugugaagug

SEQ ID NO: 2165718 - RNA, 19 nt, Artificial Sequence
  Description of Artificial Sequence: Synthetic oligonucleotide
ugggaugauaucaugucuu

SEQ ID NO: 2165719 - RNA, 19 nt, Artificial Sequence
  Description of Artificial Sequence: Synthetic oligonucleotide
ucguugugggccuucagga

SEQ ID NO: 2165720 - RNA, 19 nt, Artificial Sequence
  Description of Artificial Sequence: Synthetic oligonucleotide
ugucggguuuccuccaggg

SEQ ID NO: 2165721 - RNA, 19 nt, Artificial Sequence
  Description of Artificial Sequence: Synthetic oligonucleotide
uguguaucgucugaggcaa

SEQ ID NO: 2165722 - RNA, 19 nt, Artificial Sequence
  Description of Artificial Sequence: Synthetic oligonucleotide
gaggugugaaaggugcucg

SEQ ID NO: 2165723 - RNA, 19 nt, Artificial Sequence
  Description of Artificial Sequence: Synthetic oligonucleotide
uucaggaccucguuguuaa

SEQ ID NO: 2165724 - RNA, 19 nt, Artificial Sequence
  Description of Artificial Sequence: Synthetic oligonucleotide
acagcugcaggggacaagg

SEQ ID NO: 2165725 - RNA, 19 nt, Artificial Sequence
  Description of Artificial Sequence: Synthetic oligonucleotide
uguccuguccccgagguga

SEQ ID NO: 2165726 - RNA, 19 nt, Artificial Sequence
  Description of Artificial Sequence: Synthetic oligonucleotide
cugacucugugaaauggag

SEQ ID NO: 2165727 - RNA, 19 nt, Artificial Sequence
  Description of Artificial Sequence: Synthetic oligonucleotide
uccccaaaugggcucaccc

SEQ ID NO: 2165728 - RNA, 19 nt, Artificial Sequence
  Description of Artificial Sequence: Synthetic oligonucleotide
agaagccagauguaaggcu

SEQ ID NO: 2165729 - RNA, 19 nt, Artificial Sequence
  Description of Artificial Sequence: Synthetic oligonucleotide
uccuaaucucccuguuugg

SEQ ID NO: 2165730 - RNA, 19 nt, Artificial Sequence
  Description of Artificial Sequence: Synthetic oligonucleotide
gaaguuguaauucuugauu

SEQ ID NO: 2165731 - RNA, 19 nt, Artificial Sequence
  Description of Artificial Sequence: Synthetic oligonucleotide
agcuuggucccucccaagg

SEQ ID NO: 2165732 - RNA, 19 nt, Artificial Sequence
  Description of Artificial Sequence: Synthetic oligonucleotide
guuguaauucuugauuuca

SEQ ID NO: 2165733 - RNA, 19 nt, Artificial Sequence
  Description of Artificial Sequence: Synthetic oligonucleotide
ucaaauuagcguuccuaau

SEQ ID NO: 2165734 - RNA, 19 nt, Artificial Sequence
  Description of Artificial Sequence: Synthetic oligonucleotide
cucugugaaauggagcuag

SEQ ID NO: 2165735 - RNA, 19 nt, Artificial Sequence
  Description of Artificial Sequence: Synthetic oligonucleotide
cuucccgggagcauuuggg

SEQ ID NO: 2165736 - RNA, 19 nt, Artificial Sequence
  Description of Artificial Sequence: Synthetic oligonucleotide
cagagagaacuguguaucg

SEQ ID NO: 2165737 - RNA, 19 nt, Artificial Sequence
  Description of Artificial Sequence: Synthetic oligonucleotide
uuuacaggguaagaccgca

SEQ ID NO: 2165738 - RNA, 19 nt, Artificial Sequence
  Description of Artificial Sequence: Synthetic oligonucleotide
gaagggcagaggcugucgg

SEQ ID NO: 2165739 - RNA, 19 nt, Artificial Sequence
  Description of Artificial Sequence: Synthetic oligonucleotide
auucuugugcuagccaggg

SEQ ID NO: 2165740 - RNA, 19 nt, Artificial Sequence
  Description of Artificial Sequence: Synthetic oligonucleotide
cuuuacaggguaagaccgc

SEQ ID NO: 2165741 - RNA, 19 nt, Artificial Sequence
  Description of Artificial Sequence: Synthetic oligonucleotide
cauaguccaaagucuuggc

SEQ ID NO: 2165742 - RNA, 19 nt, Artificial Sequence
  Description of Artificial Sequence: Synthetic oligonucleotide
agaugccgucauuucaggg

SEQ ID NO: 2165743 - RNA, 19 nt, Artificial Sequence
  Description of Artificial Sequence: Synthetic oligonucleotide
cuuggucccucccaagggg

SEQ ID NO: 2165744 - RNA, 19 nt, Artificial Sequence
  Description of Artificial Sequence: Synthetic oligonucleotide
aggaugugggaugauauca

SEQ ID NO: 2165745 - RNA, 19 nt, Artificial Sequence
  Description of Artificial Sequence: Synthetic oligonucleotide
aggcaagcugcuuuauguc

SEQ ID NO: 2165746 - RNA, 19 nt, Artificial Sequence
  Description of Artificial Sequence: Synthetic oligonucleotide
uuugcucuuuacaggguaa

SEQ ID NO: 2165747 - RNA, 19 nt, Artificial Sequence
  Description of Artificial Sequence: Synthetic oligonucleotide
caacuggaccucuagcuug

SEQ ID NO: 2165748 - RNA, 19 nt, Artificial Sequence
  Description of Artificial Sequence: Synthetic oligonucleotide
gagaugccgucauuucagg

SEQ ID NO: 2165749 - RNA, 19 nt, Artificial Sequence
  Description of Artificial Sequence: Synthetic oligonucleotide
cuguuuggucguaggaugc

SEQ ID NO: 2165750 - RNA, 19 nt, Artificial Sequence
  Description of Artificial Sequence: Synthetic oligonucleotide
gagaacuguguaucgucug

SEQ ID NO: 2165751 - RNA, 19 nt, Artificial Sequence
  Description of Artificial Sequence: Synthetic oligonucleotide
aggaccucguuguuaaacu

SEQ ID NO: 2165752 - RNA, 19 nt, Artificial Sequence
  Description of Artificial Sequence: Synthetic oligonucleotide
ucuaaggcaagcugcuuua

SEQ ID NO: 2165753 - RNA, 19 nt, Artificial Sequence
  Description of Artificial Sequence: Synthetic oligonucleotide
ucaacuggaccucuagcuu

SEQ ID NO: 2165754 - RNA, 19 nt, Artificial Sequence
  Description of Artificial Sequence: Synthetic oligonucleotide
aauggcugugaaguguccu

SEQ ID NO: 2165755 - RNA, 19 nt, Artificial Sequence
  Description of Artificial Sequence: Synthetic oligonucleotide
gcuugucacacauuccagg

SEQ ID NO: 2165756 - RNA, 19 nt, Artificial Sequence
  Description of Artificial Sequence: Synthetic oligonucleotide
auuugggcuugucacacau

SEQ ID NO: 2165757 - RNA, 19 nt, Artificial Sequence
  Description of Artificial Sequence: Synthetic oligonucleotide
gacugcauuccagaccuag

SEQ ID NO: 2165758 - RNA, 19 nt, Artificial Sequence
  Description of Artificial Sequence: Synthetic oligonucleotide
ugaggauucuugugcuagc

SEQ ID NO: 2165759 - RNA, 19 nt, Artificial Sequence
  Description of Artificial Sequence: Synthetic oligonucleotide
gaccgcaaggaaguaaggc

SEQ ID NO: 2165760 - RNA, 19 nt, Artificial Sequence
  Description of Artificial Sequence: Synthetic oligonucleotide
gugguauuugcucuuuaca

SEQ ID NO: 2165761 - RNA, 19 nt, Artificial Sequence
  Description of Artificial Sequence: Synthetic oligonucleotide
gaccucguuguuaaacugc

SEQ ID NO: 2165762 - RNA, 19 nt, Artificial Sequence
  Description of Artificial Sequence: Synthetic oligonucleotide
ugguugagcuucuugcaaa

SEQ ID NO: 2165763 - RNA, 19 nt, Artificial Sequence
  Description of Artificial Sequence: Synthetic oligonucleotide
guccagugagaugagagug

SEQ ID NO: 2165764 - RNA, 19 nt, Artificial Sequence
  Description of Artificial Sequence: Synthetic oligonucleotide
ccagauguaaggcuguaag

SEQ ID NO: 2165765 - RNA, 19 nt, Artificial Sequence
  Description of Artificial Sequence: Synthetic oligonucleotide
uggagcuagugacguaucu

SEQ ID NO: 2165766 - RNA, 19 nt, Artificial Sequence
  Description of Artificial Sequence: Synthetic oligonucleotide
acugcauuccagaccuagc

SEQ ID NO: 2165767 - RNA, 19 nt, Artificial Sequence
  Description of Artificial Sequence: Synthetic oligonucleotide
gaaguguccuguccccgag

SEQ ID NO: 2165768 - RNA, 19 nt, Artificial Sequence
  Description of Artificial Sequence: Synthetic oligonucleotide
gaggauucuugugcuagcc

SEQ ID NO: 2165769 - RNA, 19 nt, Artificial Sequence
  Description of Artificial Sequence: Synthetic oligonucleotide
ugaaguguccuguccccga

SEQ ID NO: 2165770 - RNA, 19 nt, Artificial Sequence
  Description of Artificial Sequence: Synthetic oligonucleotide
gaggcaaaacacagaauca

SEQ ID NO: 2165771 - RNA, 19 nt, Artificial Sequence
  Description of Artificial Sequence: Synthetic oligonucleotide
acagcuauucagagagaac

SEQ ID NO: 2165772 - RNA, 19 nt, Artificial Sequence
  Description of Artificial Sequence: Synthetic oligonucleotide
guaagcaugaggugugaaa

SEQ ID NO: 2165773 - RNA, 19 nt, Artificial Sequence
  Description of Artificial Sequence: Synthetic oligonucleotide
gcauuccagaccuagcccc

SEQ ID NO: 2165774 - RNA, 19 nt, Artificial Sequence
  Description of Artificial Sequence: Synthetic oligonucleotide
gagcuagugacguaucucu

SEQ ID NO: 2165775 - RNA, 19 nt, Artificial Sequence
  Description of Artificial Sequence: Synthetic oligonucleotide
ucguaggaugcccacgcaa

SEQ ID NO: 2165776 - RNA, 19 nt, Artificial Sequence
  Description of Artificial Sequence: Synthetic oligonucleotide
guuugggccucuucccggg

SEQ ID NO: 2165777 - RNA, 19 nt, Artificial Sequence
  Description of Artificial Sequence: Synthetic oligonucleotide
auuccauuagggaauccca

SEQ ID NO: 2165778 - RNA, 19 nt, Artificial Sequence
  Description of Artificial Sequence: Synthetic oligonucleotide
acguaucucuaaggcaagc

SEQ ID NO: 2165779 - RNA, 19 nt, Artificial Sequence
  Description of Artificial Sequence: Synthetic oligonucleotide
gugacguaucucuaaggca

SEQ ID NO: 2165780 - RNA, 19 nt, Artificial Sequence
  Description of Artificial Sequence: Synthetic oligonucleotide
uugcucuuuacaggguaag

SEQ ID NO: 2165781 - RNA, 19 nt, Artificial Sequence
  Description of Artificial Sequence: Synthetic oligonucleotide
cucguuguuaaacugcuua

SEQ ID NO: 2165782 - RNA, 19 nt, Artificial Sequence
  Description of Artificial Sequence: Synthetic oligonucleotide
ucacccucuccccuacacc

SEQ ID NO: 2165783 - RNA, 19 nt, Artificial Sequence
  Description of Artificial Sequence: Synthetic oligonucleotide
agcguuccuaaucucccug

SEQ ID NO: 2165784 - RNA, 19 nt, Artificial Sequence
  Description of Artificial Sequence: Synthetic oligonucleotide
cuguguaucgucugaggca

SEQ ID NO: 2165785 - RNA, 19 nt, Artificial Sequence
  Description of Artificial Sequence: Synthetic oligonucleotide
ugggcuugucacacauucc

SEQ ID NO: 2165786 - RNA, 19 nt, Artificial Sequence
  Description of Artificial Sequence: Synthetic oligonucleotide
auguaaggcuguaagcaug

SEQ ID NO: 2165787 - RNA, 19 nt, Artificial Sequence
  Description of Artificial Sequence: Synthetic oligonucleotide
auuugcucuuuggcaauuc

SEQ ID NO: 2165788 - RNA, 19 nt, Artificial Sequence
  Description of Artificial Sequence: Synthetic oligonucleotide
cugaauacugcugggcuuc

SEQ ID NO: 2165789 - RNA, 19 nt, Artificial Sequence
  Description of Artificial Sequence: Synthetic oligonucleotide
uguuuggucguaggaugcc

SEQ ID NO: 2165790 - RNA, 19 nt, Artificial Sequence
  Description of Artificial Sequence: Synthetic oligonucleotide
uuagggaaucccagaggau

SEQ ID NO: 2165791 - RNA, 19 nt, Artificial Sequence
  Description of Artificial Sequence: Synthetic oligonucleotide
gaggcugucggguuuccuc

SEQ ID NO: 2165792 - RNA, 19 nt, Artificial Sequence
  Description of Artificial Sequence: Synthetic oligonucleotide
gguugagcuucuugcaaag

SEQ ID NO: 2165793 - RNA, 19 nt, Artificial Sequence
  Description of Artificial Sequence: Synthetic oligonucleotide
aggaauggcugugaagugu

SEQ ID NO: 2165794 - RNA, 19 nt, Artificial Sequence
  Description of Artificial Sequence: Synthetic oligonucleotide
gauguaaggcuguaagcau

SEQ ID NO: 2165795 - RNA, 19 nt, Artificial Sequence
  Description of Artificial Sequence: Synthetic oligonucleotide
acacuagccacgacuggac

SEQ ID NO: 2165796 - RNA, 19 nt, Artificial Sequence
  Description of Artificial Sequence: Synthetic oligonucleotide
agagagaacuguguaucgu

SEQ ID NO: 2165797 - RNA, 19 nt, Artificial Sequence
  Description of Artificial Sequence: Synthetic oligonucleotide
uguaucgucugaggcaaaa

SEQ ID NO: 2165798 - RNA, 19 nt, Artificial Sequence
  Description of Artificial Sequence: Synthetic oligonucleotide
augugggaugauaucaugu

SEQ ID NO: 2165799 - RNA, 19 nt, Artificial Sequence
  Description of Artificial Sequence: Synthetic oligonucleotide
agagaacuguguaucgucu

SEQ ID NO: 2165800 - RNA, 19 nt, Artificial Sequence
  Description of Artificial Sequence: Synthetic oligonucleotide
uaagaccgcaaggaaguaa

SEQ ID NO: 2165801 - RNA, 19 nt, Artificial Sequence
  Description of Artificial Sequence: Synthetic oligonucleotide
cucaacuggaccucuagcu

SEQ ID NO: 2165802 - RNA, 19 nt, Artificial Sequence
  Description of Artificial Sequence: Synthetic oligonucleotide
ccauuagggaaucccagag

SEQ ID NO: 2165803 - RNA, 19 nt, Artificial Sequence
  Description of Artificial Sequence: Synthetic oligonucleotide
agcuauucagagagaacug

SEQ ID NO: 2165804 - RNA, 19 nt, Artificial Sequence
  Description of Artificial Sequence: Synthetic oligonucleotide
ggucguaggaugcccacgc

SEQ ID NO: 2165805 - RNA, 19 nt, Artificial Sequence
  Description of Artificial Sequence: Synthetic oligonucleotide
acgacuggacucugggcug

SEQ ID NO: 2165806 - RNA, 19 nt, Artificial Sequence
  Description of Artificial Sequence: Synthetic oligonucleotide
ccuguuuggucguaggaug

SEQ ID NO: 2165807 - RNA, 19 nt, Artificial Sequence
  Description of Artificial Sequence: Synthetic oligonucleotide
aacgaucagccacuuccuu

SEQ ID NO: 2165808 - RNA, 19 nt, Artificial Sequence
  Description of Artificial Sequence: Synthetic oligonucleotide
uucuugugcuagccagggc

SEQ ID NO: 2165809 - RNA, 19 nt, Artificial Sequence
  Description of Artificial Sequence: Synthetic oligonucleotide
aggguaagaccgcaaggaa

SEQ ID NO: 2165810 - RNA, 19 nt, Artificial Sequence
  Description of Artificial Sequence: Synthetic oligonucleotide
uccaggagggagucacagc

SEQ ID NO: 2165811 - RNA, 19 nt, Artificial Sequence
  Description of Artificial Sequence: Synthetic oligonucleotide
ugcucuuuacaggguaaga

SEQ ID NO: 2165812 - RNA, 19 nt, Artificial Sequence
  Description of Artificial Sequence: Synthetic oligonucleotide
cagcuauucagagagaacu

SEQ ID NO: 2165813 - RNA, 19 nt, Artificial Sequence
  Description of Artificial Sequence: Synthetic oligonucleotide
gacguaucucuaaggcaag

SEQ ID NO: 2165814 - RNA, 19 nt, Artificial Sequence
  Description of Artificial Sequence: Synthetic oligonucleotide
aaauggagcuagugacgua

SEQ ID NO: 2165815 - RNA, 19 nt, Artificial Sequence
  Description of Artificial Sequence: Synthetic oligonucleotide
uggucguaggaugcccacg

SEQ ID NO: 2165816 - RNA, 19 nt, Artificial Sequence
  Description of Artificial Sequence: Synthetic oligonucleotide
gaccugguuaaacagcuau

SEQ ID NO: 2165817 - RNA, 19 nt, Artificial Sequence
  Description of Artificial Sequence: Synthetic oligonucleotide
acgaucagccacuuccuuu

SEQ ID NO: 2165818 - RNA, 19 nt, Artificial Sequence
  Description of Artificial Sequence: Synthetic oligonucleotide
ggguaagaccgcaaggaag

SEQ ID NO: 2165819 - RNA, 19 nt, Artificial Sequence
  Description of Artificial Sequence: Synthetic oligonucleotide
agcuacagcugcaggggac

SEQ ID NO: 2165820 - RNA, 19 nt, Artificial Sequence
  Description of Artificial Sequence: Synthetic oligonucleotide
agucuuggcccaaagccca

SEQ ID NO: 2165821 - RNA, 19 nt, Artificial Sequence
  Description of Artificial Sequence: Synthetic oligonucleotide
gaucagccacuuccuuucc

SEQ ID NO: 2165822 - RNA, 19 nt, Artificial Sequence
  Description of Artificial Sequence: Synthetic oligonucleotide
caagguucuccccacacua

SEQ ID NO: 2165823 - RNA, 19 nt, Artificial Sequence
  Description of Artificial Sequence: Synthetic oligonucleotide
caggguaagaccgcaagga

SEQ ID NO: 2165824 - RNA, 19 nt, Artificial Sequence
  Description of Artificial Sequence: Synthetic oligonucleotide
gggcuugucacacauucca

SEQ ID NO: 2165825 - RNA, 19 nt, Artificial Sequence
  Description of Artificial Sequence: Synthetic oligonucleotide
gugaaguguccuguccccg

SEQ ID NO: 2165826 - RNA, 19 nt, Artificial Sequence
  Description of Artificial Sequence: Synthetic oligonucleotide
ggagcauuugggcuuguca

SEQ ID NO: 2165827 - RNA, 19 nt, Artificial Sequence
  Description of Artificial Sequence: Synthetic oligonucleotide
cagugagaugagagugggg

SEQ ID NO: 2165828 - RNA, 19 nt, Artificial Sequence
  Description of Artificial Sequence: Synthetic oligonucleotide
gcucuuuacaggguaagac

SEQ ID NO: 2165829 - RNA, 19 nt, Artificial Sequence
  Description of Artificial Sequence: Synthetic oligonucleotide
uguaagcaugaggugugaa

SEQ ID NO: 2165830 - RNA, 19 nt, Artificial Sequence
  Description of Artificial Sequence: Synthetic oligonucleotide
gcugugaaguguccugucc

SEQ ID NO: 2165831 - RNA, 19 nt, Artificial Sequence
  Description of Artificial Sequence: Synthetic oligonucleotide
accaacgaucagccacuuc

SEQ ID NO: 2165832 - RNA, 19 nt, Artificial Sequence
  Description of Artificial Sequence: Synthetic oligonucleotide
cacccucuccccuacacca

SEQ ID NO: 2165833 - RNA, 19 nt, Artificial Sequence
  Description of Artificial Sequence: Synthetic oligonucleotide
ggguccagugagaugagag

SEQ ID NO: 2165834 - RNA, 19 nt, Artificial Sequence
  Description of Artificial Sequence: Synthetic oligonucleotide
gacaaggcuggguggucac

SEQ ID NO: 2165835 - RNA, 19 nt, Artificial Sequence
  Description of Artificial Sequence: Synthetic oligonucleotide
cuguccccgaggugaagcc

SEQ ID NO: 2165836 - RNA, 19 nt, Artificial Sequence
  Description of Artificial Sequence: Synthetic oligonucleotide
gccacgacuggacucuggg

SEQ ID NO: 2165837 - RNA, 19 nt, Artificial Sequence
  Description of Artificial Sequence: Synthetic oligonucleotide
uagcguuccuaaucucccu

SEQ ID NO: 2165838 - RNA, 19 nt, Artificial Sequence
  Description of Artificial Sequence: Synthetic oligonucleotide
agcccgguacucguugugg

SEQ ID NO: 2165839 - RNA, 19 nt, Artificial Sequence
  Description of Artificial Sequence: Synthetic oligonucleotide
ggaccucguuguuaaacug

SEQ ID NO: 2165840 - RNA, 19 nt, Artificial Sequence
  Description of Artificial Sequence: Synthetic oligonucleotide
aaaggugcucguggcugug

SEQ ID NO: 2165841 - RNA, 19 nt, Artificial Sequence
  Description of Artificial Sequence: Synthetic oligonucleotide
aggugugaaaggugcucgu

SEQ ID NO: 2165842 - RNA, 19 nt, Artificial Sequence
  Description of Artificial Sequence: Synthetic oligonucleotide
ucucacugacucugugaaa

SEQ ID NO: 2165843 - RNA, 19 nt, Artificial Sequence
  Description of Artificial Sequence: Synthetic oligonucleotide
ugggcucacccucuccccu

SEQ ID NO: 2165844 - RNA, 19 nt, Artificial Sequence
  Description of Artificial Sequence: Synthetic oligonucleotide
uagcuuggucccucccaag

SEQ ID NO: 2165845 - RNA, 19 nt, Artificial Sequence
  Description of Artificial Sequence: Synthetic oligonucleotide
cacgcaagguucuccccac

SEQ ID NO: 2165846 - RNA, 19 nt, Artificial Sequence
  Description of Artificial Sequence: Synthetic oligonucleotide
accucuagcuuggucccuc

SEQ ID NO: 2165847 - RNA, 19 nt, Artificial Sequence
  Description of Artificial Sequence: Synthetic oligonucleotide
cccuguuugggccucuucc

SEQ ID NO: 2165848 - RNA, 19 nt, Artificial Sequence
  Description of Artificial Sequence: Synthetic oligonucleotide
gugggaugauaucaugucu

SEQ ID NO: 2165849 - RNA, 19 nt, Artificial Sequence
  Description of Artificial Sequence: Synthetic oligonucleotide
gguaagaccgcaaggaagu

SEQ ID NO: 2165850 - RNA, 19 nt, Artificial Sequence
  Description of Artificial Sequence: Synthetic oligonucleotide
caaggcuggguggucacug

SEQ ID NO: 2165851 - RNA, 19 nt, Artificial Sequence
  Description of Artificial Sequence: Synthetic oligonucleotide
aaacagcuauucagagaga

SEQ ID NO: 2165852 - RNA, 19 nt, Artificial Sequence
  Description of Artificial Sequence: Synthetic oligonucleotide
cugucggguuuccuccagg

SEQ ID NO: 2165853 - RNA, 19 nt, Artificial Sequence
  Description of Artificial Sequence: Synthetic oligonucleotide
cugagcccgguacucguug

SEQ ID NO: 2165854 - RNA, 19 nt, Artificial Sequence
  Description of Artificial Sequence: Synthetic oligonucleotide
gcuguaagcaugaggugug

SEQ ID NO: 2165855 - RNA, 19 nt, Artificial Sequence
  Description of Artificial Sequence: Synthetic oligonucleotide
ugagcccgguacucguugu

SEQ ID NO: 2165856 - RNA, 19 nt, Artificial Sequence
  Description of Artificial Sequence: Synthetic oligonucleotide
cgucugaggcaaaacacag

SEQ ID NO: 2165857 - RNA, 19 nt, Artificial Sequence
  Description of Artificial Sequence: Synthetic oligonucleotide
cccacacuagccacgacug

SEQ ID NO: 2165858 - RNA, 19 nt, Artificial Sequence
  Description of Artificial Sequence: Synthetic oligonucleotide
uacagcugcaggggacaag

SEQ ID NO: 2165859 - RNA, 19 nt, Artificial Sequence
  Description of Artificial Sequence: Synthetic oligonucleotide
cacacuagccacgacugga

SEQ ID NO: 2165860 - RNA, 19 nt, Artificial Sequence
  Description of Artificial Sequence: Synthetic oligonucleotide
gucauuucagggacacuca

SEQ ID NO: 2165861 - RNA, 19 nt, Artificial Sequence
  Description of Artificial Sequence: Synthetic oligonucleotide
guaucgucugaggcaaaac

SEQ ID NO: 2165862 - RNA, 19 nt, Artificial Sequence
  Description of Artificial Sequence: Synthetic oligonucleotide
acucguugugggccuucag

SEQ ID NO: 2165863 - RNA, 19 nt, Artificial Sequence
  Description of Artificial Sequence: Synthetic oligonucleotide
ccagugagaugagaguggg

SEQ ID NO: 2165864 - RNA, 19 nt, Artificial Sequence
  Description of Artificial Sequence: Synthetic oligonucleotide
agaccgcaaggaaguaagg

SEQ ID NO: 2165865 - RNA, 19 nt, Artificial Sequence
  Description of Artificial Sequence: Synthetic oligonucleotide
uuugggccucuucccggga

SEQ ID NO: 2165866 - RNA, 19 nt, Artificial Sequence
  Description of Artificial Sequence: Synthetic oligonucleotide
uuugggcuugucacacauu

SEQ ID NO: 2165867 - RNA, 19 nt, Artificial Sequence
  Description of Artificial Sequence: Synthetic oligonucleotide
cuagcuuggucccucccaa

SEQ ID NO: 2165868 - RNA, 19 nt, Artificial Sequence
  Description of Artificial Sequence: Synthetic oligonucleotide
agggcagaggcugucgggu

SEQ ID NO: 2165869 - RNA, 19 nt, Artificial Sequence
  Description of Artificial Sequence: Synthetic oligonucleotide
gaaucaaauuagcguuccu

SEQ ID NO: 2165870 - RNA, 19 nt, Artificial Sequence
  Description of Artificial Sequence: Synthetic oligonucleotide
ccgaggugaagccaggcug

SEQ ID NO: 2165871 - RNA, 19 nt, Artificial Sequence
  Description of Artificial Sequence: Synthetic oligonucleotide
cucacugacucugugaaau

SEQ ID NO: 2165872 - RNA, 19 nt, Artificial Sequence
  Description of Artificial Sequence: Synthetic oligonucleotide
ugugcuagccagggccucu

SEQ ID NO: 2165873 - RNA, 19 nt, Artificial Sequence
  Description of Artificial Sequence: Synthetic oligonucleotide
gaaaggugcucguggcugu

SEQ ID NO: 2165874 - RNA, 19 nt, Artificial Sequence
  Description of Artificial Sequence: Synthetic oligonucleotide
gggagucacagcucagcug

SEQ ID NO: 2165875 - RNA, 19 nt, Artificial Sequence
  Description of Artificial Sequence: Synthetic oligonucleotide
gggacacucaacuggaccu

SEQ ID NO: 2165876 - RNA, 19 nt, Artificial Sequence
  Description of Artificial Sequence: Synthetic oligonucleotide
cucuagcuuggucccuccc

SEQ ID NO: 2165877 - RNA, 19 nt, Artificial Sequence
  Description of Artificial Sequence: Synthetic oligonucleotide
ggcaggacugcauuccaga

SEQ ID NO: 2165878 - RNA, 19 nt, Artificial Sequence
  Description of Artificial Sequence: Synthetic oligonucleotide
gugaggguccagugagaug

SEQ ID NO: 2165879 - RNA, 19 nt, Artificial Sequence
  Description of Artificial Sequence: Synthetic oligonucleotide
auggagcuagugacguauc

SEQ ID NO: 2165880 - RNA, 19 nt, Artificial Sequence
  Description of Artificial Sequence: Synthetic oligonucleotide
guccccgaggugaagccag

SEQ ID NO: 2165881 - RNA, 19 nt, Artificial Sequence
  Description of Artificial Sequence: Synthetic oligonucleotide
ggaauggcugugaaguguc

SEQ ID NO: 2165882 - RNA, 19 nt, Artificial Sequence
  Description of Artificial Sequence: Synthetic oligonucleotide
cugguugagcuucuugcaa

SEQ ID NO: 2165883 - RNA, 19 nt, Artificial Sequence
  Description of Artificial Sequence: Synthetic oligonucleotide
gcuagugacguaucucuaa

SEQ ID NO: 2165884 - RNA, 19 nt, Artificial Sequence
  Description of Artificial Sequence: Synthetic oligonucleotide
caagcugcuuuaugucaca

SEQ ID NO: 2165885 - RNA, 19 nt, Artificial Sequence
  Description of Artificial Sequence: Synthetic oligonucleotide
ugccgucauuucagggaca

SEQ ID NO: 2165886 - RNA, 19 nt, Artificial Sequence
  Description of Artificial Sequence: Synthetic oligonucleotide
cuggguggucacugccugc

SEQ ID NO: 2165887 - RNA, 19 nt, Artificial Sequence
  Description of Artificial Sequence: Synthetic oligonucleotide
caauuccauuagggaaucc

SEQ ID NO: 2165888 - RNA, 19 nt, Artificial Sequence
  Description of Artificial Sequence: Synthetic oligonucleotide
gugcugagcccgguacucg

SEQ ID NO: 2165889 - RNA, 19 nt, Artificial Sequence
  Description of Artificial Sequence: Synthetic oligonucleotide
caggagggagucacagcuc

SEQ ID NO: 2165890 - RNA, 19 nt, Artificial Sequence
  Description of Artificial Sequence: Synthetic oligonucleotide
ugcccacgcaagguucucc

SEQ ID NO: 2165891 - RNA, 19 nt, Artificial Sequence
  Description of Artificial Sequence: Synthetic oligonucleotide
uacucguugugggccuuca

SEQ ID NO: 2165892 - RNA, 19 nt, Artificial Sequence
  Description of Artificial Sequence: Synthetic oligonucleotide
ggagcuagugacguaucuc

SEQ ID NO: 2165893 - RNA, 19 nt, Artificial Sequence
  Description of Artificial Sequence: Synthetic oligonucleotide
ccaaagucuuggcccaaag

SEQ ID NO: 2165894 - RNA, 19 nt, Artificial Sequence
  Description of Artificial Sequence: Synthetic oligonucleotide
cgaucagccacuuccuuuc

SEQ ID NO: 2165895 - RNA, 19 nt, Artificial Sequence
  Description of Artificial Sequence: Synthetic oligonucleotide
gcccgguacucguuguggg

SEQ ID NO: 2165896 - RNA, 19 nt, Artificial Sequence
  Description of Artificial Sequence: Synthetic oligonucleotide
cuggaccucuagcuugguc

SEQ ID NO: 2165897 - RNA, 19 nt, Artificial Sequence
  Description of Artificial Sequence: Synthetic oligonucleotide
ucccuguuugggccucuuc

SEQ ID NO: 2165898 - RNA, 19 nt, Artificial Sequence
  Description of Artificial Sequence: Synthetic oligonucleotide
gaaaucucacugacucugu

SEQ ID NO: 2165899 - RNA, 19 nt, Artificial Sequence
  Description of Artificial Sequence: Synthetic oligonucleotide
cuugaggauucuugugcua

SEQ ID NO: 2165900 - RNA, 19 nt, Artificial Sequence
  Description of Artificial Sequence: Synthetic oligonucleotide
caaagcccaggcaguguga

SEQ ID NO: 2165901 - RNA, 19 nt, Artificial Sequence
  Description of Artificial Sequence: Synthetic oligonucleotide
gucugaggcaaaacacaga

SEQ ID NO: 2165902 - RNA, 19 nt, Artificial Sequence
  Description of Artificial Sequence: Synthetic oligonucleotide
guaccaacgaucagccacu

SEQ ID NO: 2165903 - RNA, 19 nt, Artificial Sequence
  Description of Artificial Sequence: Synthetic oligonucleotide
ggcuguaagcaugaggugu

SEQ ID NO: 2165904 - RNA, 19 nt, Artificial Sequence
  Description of Artificial Sequence: Synthetic oligonucleotide
ccaggcagugugagggucc

SEQ ID NO: 2165905 - RNA, 19 nt, Artificial Sequence
  Description of Artificial Sequence: Synthetic oligonucleotide
cuugugcuagccagggccu

SEQ ID NO: 2165906 - RNA, 19 nt, Artificial Sequence
  Description of Artificial Sequence: Synthetic oligonucleotide
aucucccuguuugggccuc

SEQ ID NO: 2165907 - RNA, 19 nt, Artificial Sequence
  Description of Artificial Sequence: Synthetic oligonucleotide
ggcaauuccauuagggaau

SEQ ID NO: 2165908 - RNA, 19 nt, Artificial Sequence
  Description of Artificial Sequence: Synthetic oligonucleotide
ggacaccgugcugagcccg

SEQ ID NO: 2165909 - RNA, 19 nt, Artificial Sequence
  Description of Artificial Sequence: Synthetic oligonucleotide
cauuugggcuugucacaca

SEQ ID NO: 2165910 - RNA, 19 nt, Artificial Sequence
  Description of Artificial Sequence: Synthetic oligonucleotide
gaggguccagugagaugag

SEQ ID NO: 2165911 - RNA, 19 nt, Artificial Sequence
  Description of Artificial Sequence: Synthetic oligonucleotide
gcccacgcaagguucuccc

SEQ ID NO: 2165912 - RNA, 19 nt, Artificial Sequence
  Description of Artificial Sequence: Synthetic oligonucleotide
cuagccacgacuggacucu

SEQ ID NO: 2165913 - RNA, 19 nt, Artificial Sequence
  Description of Artificial Sequence: Synthetic oligonucleotide
cuccccuacaccacugacu

SEQ ID NO: 2165914 - RNA, 19 nt, Artificial Sequence
  Description of Artificial Sequence: Synthetic oligonucleotide
ccgguacucguugugggcc

SEQ ID NO: 2165915 - RNA, 19 nt, Artificial Sequence
  Description of Artificial Sequence: Synthetic oligonucleotide
gguccagugagaugagagu

SEQ ID NO: 2165916 - RNA, 19 nt, Artificial Sequence
  Description of Artificial Sequence: Synthetic oligonucleotide
gaugcccacgcaagguucu

SEQ ID NO: 2165917 - RNA, 19 nt, Artificial Sequence
  Description of Artificial Sequence: Synthetic oligonucleotide
caacgaucagccacuuccu

SEQ ID NO: 2165918 - RNA, 19 nt, Artificial Sequence
  Description of Artificial Sequence: Synthetic oligonucleotide
gcaauuccauuagggaauc

SEQ ID NO: 2165919 - RNA, 19 nt, Artificial Sequence
  Description of Artificial Sequence: Synthetic oligonucleotide
acgcaagguucuccccaca

SEQ ID NO: 2165920 - RNA, 19 nt, Artificial Sequence
  Description of Artificial Sequence: Synthetic oligonucleotide
gucguaggaugcccacgca

SEQ ID NO: 2165921 - RNA, 19 nt, Artificial Sequence
  Description of Artificial Sequence: Synthetic oligonucleotide
ccuguccccgaggugaagc

SEQ ID NO: 2165922 - RNA, 19 nt, Artificial Sequence
  Description of Artificial Sequence: Synthetic oligonucleotide
augcccacgcaagguucuc

SEQ ID NO: 2165923 - RNA, 19 nt, Artificial Sequence
  Description of Artificial Sequence: Synthetic oligonucleotide
gacacucaacuggaccucu

SEQ ID NO: 2165924 - RNA, 19 nt, Artificial Sequence
  Description of Artificial Sequence: Synthetic oligonucleotide
uugugcuagccagggccuc

SEQ ID NO: 2165925 - RNA, 19 nt, Artificial Sequence
  Description of Artificial Sequence: Synthetic oligonucleotide
gccgucauuucagggacac

SEQ ID NO: 2165926 - RNA, 19 nt, Artificial Sequence
  Description of Artificial Sequence: Synthetic oligonucleotide
agccacgacuggacucugg

SEQ ID NO: 2165927 - RNA, 19 nt, Artificial Sequence
  Description of Artificial Sequence: Synthetic oligonucleotide
cccgguacucguugugggc

SEQ ID NO: 2165928 - RNA, 19 nt, Artificial Sequence
  Description of Artificial Sequence: Synthetic oligonucleotide
ccacgacuggacucugggc

SEQ ID NO: 2165929 - RNA, 19 nt, Artificial Sequence
  Description of Artificial Sequence: Synthetic oligonucleotide
cagaggaugugggaugaua

SEQ ID NO: 2165930 - RNA, 19 nt, Artificial Sequence
  Description of Artificial Sequence: Synthetic oligonucleotide
aggguccagugagaugaga

SEQ ID NO: 2165931 - RNA, 19 nt, Artificial Sequence
  Description of Artificial Sequence: Synthetic oligonucleotide
agcuagugacguaucucua

SEQ ID NO: 2165932 - RNA, 19 nt, Artificial Sequence
  Description of Artificial Sequence: Synthetic oligonucleotide
cuguaccaacgaucagcca

SEQ ID NO: 2165933 - RNA, 19 nt, Artificial Sequence
  Description of Artificial Sequence: Synthetic oligonucleotide
ugcucguggcugugguauu

SEQ ID NO: 2165934 - RNA, 19 nt, Artificial Sequence
  Description of Artificial Sequence: Synthetic oligonucleotide
cuguaagcaugagguguga

SEQ ID NO: 2165935 - RNA, 19 nt, Artificial Sequence
  Description of Artificial Sequence: Synthetic oligonucleotide
gggacaccgugcugagccc

SEQ ID NO: 2165936 - RNA, 19 nt, Artificial Sequence
  Description of Artificial Sequence: Synthetic oligonucleotide
caggguccccaaaugggcu

SEQ ID NO: 2165937 - RNA, 19 nt, Artificial Sequence
  Description of Artificial Sequence: Synthetic oligonucleotide
ggacacucaacuggaccuc

SEQ ID NO: 2165938 - RNA, 19 nt, Artificial Sequence
  Description of Artificial Sequence: Synthetic oligonucleotide
agaggcugucggguuuccu

SEQ ID NO: 2165939 - RNA, 19 nt, Artificial Sequence
  Description of Artificial Sequence: Synthetic oligonucleotide
uagccacgacuggacucug

SEQ ID NO: 2165940 - RNA, 19 nt, Artificial Sequence
  Description of Artificial Sequence: Synthetic oligonucleotide
guaagaccgcaaggaagua

SEQ ID NO: 2165941 - RNA, 19 nt, Artificial Sequence
  Description of Artificial Sequence: Synthetic oligonucleotide
ggucccucccaaggggacc

SEQ ID NO: 2165942 - RNA, 19 nt, Artificial Sequence
  Description of Artificial Sequence: Synthetic oligonucleotide
ggcugcuggaaguuguaau

SEQ ID NO: 2165943 - RNA, 19 nt, Artificial Sequence
  Description of Artificial Sequence: Synthetic oligonucleotide
ggagggagucacagcucag

SEQ ID NO: 2165944 - RNA, 19 nt, Artificial Sequence
  Description of Artificial Sequence: Synthetic oligonucleotide
cuccccacacuagccacga

SEQ ID NO: 2165945 - RNA, 19 nt, Artificial Sequence
  Description of Artificial Sequence: Synthetic oligonucleotide
cugugguauuugcucuuua

SEQ ID NO: 2165946 - RNA, 19 nt, Artificial Sequence
  Description of Artificial Sequence: Synthetic oligonucleotide
gggaugauaucaugucuuu

SEQ ID NO: 2165947 - RNA, 19 nt, Artificial Sequence
  Description of Artificial Sequence: Synthetic oligonucleotide
gucggguuuccuccagggu

SEQ ID NO: 2165948 - RNA, 19 nt, Artificial Sequence
  Description of Artificial Sequence: Synthetic oligonucleotide
uaccaacgaucagccacuu

SEQ ID NO: 2165949 - RNA, 19 nt, Artificial Sequence
  Description of Artificial Sequence: Synthetic oligonucleotide
cccacgcaagguucucccc

SEQ ID NO: 2165950 - RNA, 19 nt, Artificial Sequence
  Description of Artificial Sequence: Synthetic oligonucleotide
ccacgcaagguucucccca

SEQ ID NO: 2165951 - RNA, 19 nt, Artificial Sequence
  Description of Artificial Sequence: Synthetic oligonucleotide
cguuguuaaacugcuuaga

SEQ ID NO: 2165952 - RNA, 19 nt, Artificial Sequence
  Description of Artificial Sequence: Synthetic oligonucleotide
gcaagguucuccccacacu

SEQ ID NO: 2165953 - RNA, 19 nt, Artificial Sequence
  Description of Artificial Sequence: Synthetic oligonucleotide
ucucccuguuugggccucu

SEQ ID NO: 2165954 - RNA, 19 nt, Artificial Sequence
  Description of Artificial Sequence: Synthetic oligonucleotide
cuacaccacugacuucaua

SEQ ID NO: 2165955 - RNA, 19 nt, Artificial Sequence
  Description of Artificial Sequence: Synthetic oligonucleotide
guacucguugugggccuuc

SEQ ID NO: 2165956 - RNA, 19 nt, Artificial Sequence
  Description of Artificial Sequence: Synthetic oligonucleotide
caggcagugugagggucca

SEQ ID NO: 2165957 - RNA, 19 nt, Artificial Sequence
  Description of Artificial Sequence: Synthetic oligonucleotide
cacuagccacgacuggacu

SEQ ID NO: 2165958 - RNA, 19 nt, Artificial Sequence
  Description of Artificial Sequence: Synthetic oligonucleotide
ggcucacccucuccccuac

SEQ ID NO: 2165959 - RNA, 19 nt, Artificial Sequence
  Description of Artificial Sequence: Synthetic oligonucleotide
ggaugugggaugauaucau

SEQ ID NO: 2165960 - RNA, 19 nt, Artificial Sequence
  Description of Artificial Sequence: Synthetic oligonucleotide
ggcugucggguuuccucca

SEQ ID NO: 2165961 - RNA, 19 nt, Artificial Sequence
  Description of Artificial Sequence: Synthetic oligonucleotide
caggaggagaugccgucau

SEQ ID NO: 2165962 - RNA, 19 nt, Artificial Sequence
  Description of Artificial Sequence: Synthetic oligonucleotide
cuacagcugcaggggacaa

SEQ ID NO: 2165963 - RNA, 19 nt, Artificial Sequence
  Description of Artificial Sequence: Synthetic oligonucleotide
ccaaaugggcucacccucu

SEQ ID NO: 2165964 - RNA, 19 nt, Artificial Sequence
  Description of Artificial Sequence: Synthetic oligonucleotide
gcguuccuaaucucccugu

SEQ ID NO: 2165965 - RNA, 19 nt, Artificial Sequence
  Description of Artificial Sequence: Synthetic oligonucleotide
ucccucccaaggggaccug

SEQ ID NO: 2165966 - RNA, 19 nt, Artificial Sequence
  Description of Artificial Sequence: Synthetic oligonucleotide
ccccacacuagccacgacu

SEQ ID NO: 2165967 - RNA, 19 nt, Artificial Sequence
  Description of Artificial Sequence: Synthetic oligonucleotide
cuaaggcaagcugcuuuau

SEQ ID NO: 2165968 - RNA, 19 nt, Artificial Sequence
  Description of Artificial Sequence: Synthetic oligonucleotide
ccgcaaggaaguaaggcuu

SEQ ID NO: 2165969 - RNA, 19 nt, Artificial Sequence
  Description of Artificial Sequence: Synthetic oligonucleotide
cauuugcucuuuggcaauu

SEQ ID NO: 2165970 - RNA, 19 nt, Artificial Sequence
  Description of Artificial Sequence: Synthetic oligonucleotide
gggagcauuugggcuuguc

SEQ ID NO: 2165971 - RNA, 19 nt, Artificial Sequence
  Description of Artificial Sequence: Synthetic oligonucleotide
gggacaaggcugggugguc

SEQ ID NO: 2165972 - RNA, 19 nt, Artificial Sequence
  Description of Artificial Sequence: Synthetic oligonucleotide
ggucacugccugcuggguu

SEQ ID NO: 2165973 - RNA, 19 nt, Artificial Sequence
  Description of Artificial Sequence: Synthetic oligonucleotide
ccccaaaugggcucacccu

SEQ ID NO: 2165974 - RNA, 19 nt, Artificial Sequence
  Description of Artificial Sequence: Synthetic oligonucleotide
guccuguccccgaggugaa

SEQ ID NO: 2165975 - RNA, 19 nt, Artificial Sequence
  Description of Artificial Sequence: Synthetic oligonucleotide
ggcugugguauuugcucuu

SEQ ID NO: 2165976 - RNA, 19 nt, Artificial Sequence
  Description of Artificial Sequence: Synthetic oligonucleotide
cucccaaggggaccugguu

SEQ ID NO: 2165977 - RNA, 19 nt, Artificial Sequence
  Description of Artificial Sequence: Synthetic oligonucleotide
ccgggagcauuugggcuug

SEQ ID NO: 2165978 - RNA, 19 nt, Artificial Sequence
  Description of Artificial Sequence: Synthetic oligonucleotide
cguaucucuaaggcaagcu

SEQ ID NO: 2165979 - RNA, 19 nt, Artificial Sequence
  Description of Artificial Sequence: Synthetic oligonucleotide
ccccgaggugaagccaggc

SEQ ID NO: 2165980 - RNA, 19 nt, Artificial Sequence
  Description of Artificial Sequence: Synthetic oligonucleotide
gguccccaaaugggcucac

SEQ ID NO: 2165981 - RNA, 19 nt, Artificial Sequence
  Description of Artificial Sequence: Synthetic oligonucleotide
ggaccugguuaaacagcua

SEQ ID NO: 2165982 - RNA, 19 nt, Artificial Sequence
  Description of Artificial Sequence: Synthetic oligonucleotide
ccccuacaccacugacuuc

SEQ ID NO: 2165983 - RNA, 19 nt, Artificial Sequence
  Description of Artificial Sequence: Synthetic oligonucleotide
cccgaggugaagccaggcu

SEQ ID NO: 2165984 - RNA, 19 nt, Artificial Sequence
  Description of Artificial Sequence: Synthetic oligonucleotide
cccgggagcauuugggcuu

SEQ ID NO: 2165985 - RNA, 19 nt, Artificial Sequence
  Description of Artificial Sequence: Synthetic oligonucleotide
gcaaggaaguaaggcuuuu

SEQ ID NO: 2165986 - RNA, 19 nt, Artificial Sequence
  Description of Artificial Sequence: Synthetic oligonucleotide
ccucccaaggggaccuggu

SEQ ID NO: 2165987 - RNA, 19 nt, Artificial Sequence
  Description of Artificial Sequence: Synthetic oligonucleotide
gcccaggcagugugagggu

SEQ ID NO: 2165988 - RNA, 19 nt, Artificial Sequence
  Description of Artificial Sequence: Synthetic oligonucleotide
ccucguuguuaaacugcuu

SEQ ID NO: 2165989 - RNA, 19 nt, Artificial Sequence
  Description of Artificial Sequence: Synthetic oligonucleotide
ccgugcugagcccgguacu

SEQ ID NO: 2165990 - RNA, 19 nt, Artificial Sequence
  Description of Artificial Sequence: Synthetic oligonucleotide
gguacucguugugggccuu

SEQ ID NO: 2165991 - RNA, 19 nt, Artificial Sequence
  Description of Artificial Sequence: Synthetic oligonucleotide
cgguacucguugugggccu

SEQ ID NO: 2165992 - RNA, 19 nt, Artificial Sequence
  Description of Artificial Sequence: Synthetic oligonucleotide
cguuccuaaucucccuguu

SEQ ID NO: 2165993 - RNA, 19 nt, Artificial Sequence
  Description of Artificial Sequence: Synthetic oligonucleotide
cucccuguuugggccucuu

SEQ ID NO: 2165994 - RNA, 19 nt, Artificial Sequence
  Description of Artificial Sequence: Synthetic oligonucleotide
ccgucauuucagggacacu

SEQ ID NO: 2165995 - RNA, 19 nt, Artificial Sequence
  Description of Artificial Sequence: Synthetic oligonucleotide
cgacuggacucugggcugu

SEQ ID NO: 2165996 - RNA, 19 nt, Artificial Sequence
  Description of Artificial Sequence: Synthetic oligonucleotide
cgggagcauuugggcuugu

SEQ ID NO: 2165997 - RNA, 19 nt, Artificial Sequence
  Description of Artificial Sequence: Synthetic oligonucleotide
aauuuuguccgcuuugugg

SEQ ID NO: 2165998 - RNA, 19 nt, Artificial Sequence
  Description of Artificial Sequence: Synthetic oligonucleotide
aaugaauacauagcaacgc

SEQ ID NO: 2165999 - RNA, 19 nt, Artificial Sequence
  Description of Artificial Sequence: Synthetic oligonucleotide
aacagcgacgacucgaucg

SEQ ID NO: 2166000 - RNA, 19 nt, Artificial Sequence
  Description of Artificial Sequence: Synthetic oligonucleotide
auugaagaccaucaccugc

SEQ ID NO: 2166001 - RNA, 19 nt, Artificial Sequence
  Description of Artificial Sequence: Synthetic oligonucleotide
uguauugaagaccaucacc

SEQ ID NO: 2166002 - RNA, 19 nt, Artificial Sequence
  Description of Artificial Sequence: Synthetic oligonucleotide
auuuuguccgcuuuguggg

SEQ ID NO: 2166003 - RNA, 19 nt, Artificial Sequence
  Description of Artificial Sequence: Synthetic oligonucleotide
acuacaaugaauacauagc

SEQ ID NO: 2166004 - RNA, 19 nt, Artificial Sequence
  Description of Artificial Sequence: Synthetic oligonucleotide
auugggaauugcuuaagac

SEQ ID NO: 2166005 - RNA, 19 nt, Artificial Sequence
  Description of Artificial Sequence: Synthetic oligonucleotide
uuugcuacgcuccucuggg

SEQ ID NO: 2166006 - RNA, 19 nt, Artificial Sequence
  Description of Artificial Sequence: Synthetic oligonucleotide
uugggaauugcuuaagacc

SEQ ID NO: 2166007 - RNA, 19 nt, Artificial Sequence
  Description of Artificial Sequence: Synthetic oligonucleotide
augaauacauagcaacgcg

SEQ ID NO: 2166008 - RNA, 19 nt, Artificial Sequence
  Description of Artificial Sequence: Synthetic oligonucleotide
caaugaauacauagcaacg

SEQ ID NO: 2166009 - RNA, 19 nt, Artificial Sequence
  Description of Artificial Sequence: Synthetic oligonucleotide
gugaauaccugcgugagcg

SEQ ID NO: 2166010 - RNA, 19 nt, Artificial Sequence
  Description of Artificial Sequence: Synthetic oligonucleotide
ugcucagugaauaccugcg

SEQ ID NO: 2166011 - RNA, 19 nt, Artificial Sequence
  Description of Artificial Sequence: Synthetic oligonucleotide
aagaccaccugguuucuuc

SEQ ID NO: 2166012 - RNA, 19 nt, Artificial Sequence
  Description of Artificial Sequence: Synthetic oligonucleotide
aauacauagcaacgcgucu

SEQ ID NO: 2166013 - RNA, 19 nt, Artificial Sequence
  Description of Artificial Sequence: Synthetic oligonucleotide
aaggugcucagugaauacc

SEQ ID NO: 2166014 - RNA, 19 nt, Artificial Sequence
  Description of Artificial Sequence: Synthetic oligonucleotide
cugggcuccacauaguucc

SEQ ID NO: 2166015 - RNA, 19 nt, Artificial Sequence
  Description of Artificial Sequence: Synthetic oligonucleotide
cucauuguccuucugucgg

SEQ ID NO: 2166016 - RNA, 19 nt, Artificial Sequence
  Description of Artificial Sequence: Synthetic oligonucleotide
ugaauacauagcaacgcgu

SEQ ID NO: 2166017 - RNA, 19 nt, Artificial Sequence
  Description of Artificial Sequence: Synthetic oligonucleotide
ugugcaagcacaaggugcu

SEQ ID NO: 2166018 - RNA, 19 nt, Artificial Sequence
  Description of Artificial Sequence: Synthetic oligonucleotide
aagcacaaggugcucagug

SEQ ID NO: 2166019 - RNA, 19 nt, Artificial Sequence
  Description of Artificial Sequence: Synthetic oligonucleotide
gauguauugaagaccauca

SEQ ID NO: 2166020 - RNA, 19 nt, Artificial Sequence
  Description of Artificial Sequence: Synthetic oligonucleotide
acggcgugcacuucgagcg

SEQ ID NO: 2166021 - RNA, 19 nt, Artificial Sequence
  Description of Artificial Sequence: Synthetic oligonucleotide
ugagcugacucccucacac

SEQ ID NO: 2166022 - RNA, 19 nt, Artificial Sequence
  Description of Artificial Sequence: Synthetic oligonucleotide
augugcaagcacaaggugc

SEQ ID NO: 2166023 - RNA, 19 nt, Artificial Sequence
  Description of Artificial Sequence: Synthetic oligonucleotide
cuacaaugaauacauagca

SEQ ID NO: 2166024 - RNA, 19 nt, Artificial Sequence
  Description of Artificial Sequence: Synthetic oligonucleotide
agauguauugaagaccauc

SEQ ID NO: 2166025 - RNA, 19 nt, Artificial Sequence
  Description of Artificial Sequence: Synthetic oligonucleotide
ucaaguaccugggugagca

SEQ ID NO: 2166026 - RNA, 19 nt, Artificial Sequence
  Description of Artificial Sequence: Synthetic oligonucleotide
caagcaacuaccugagagc

SEQ ID NO: 2166027 - RNA, 19 nt, Artificial Sequence
  Description of Artificial Sequence: Synthetic oligonucleotide
auagcaacgcgucuucaag

SEQ ID NO: 2166028 - RNA, 19 nt, Artificial Sequence
  Description of Artificial Sequence: Synthetic oligonucleotide
auagaucugggcuguccgc

SEQ ID NO: 2166029 - RNA, 19 nt, Artificial Sequence
  Description of Artificial Sequence: Synthetic oligonucleotide
uucacagcccaagagguag

SEQ ID NO: 2166030 - RNA, 19 nt, Artificial Sequence
  Description of Artificial Sequence: Synthetic oligonucleotide
gaaacggccgccgaggugc

SEQ ID NO: 2166031 - RNA, 19 nt, Artificial Sequence
  Description of Artificial Sequence: Synthetic oligonucleotide
auggguauagugucaccac

SEQ ID NO: 2166032 - RNA, 19 nt, Artificial Sequence
  Description of Artificial Sequence: Synthetic oligonucleotide
aaguaccugggugagcaac

SEQ ID NO: 2166033 - RNA, 19 nt, Artificial Sequence
  Description of Artificial Sequence: Synthetic oligonucleotide
gacgacucgaucgugcgcg

SEQ ID NO: 2166034 - RNA, 19 nt, Artificial Sequence
  Description of Artificial Sequence: Synthetic oligonucleotide
uuggugcagggauagaucu

SEQ ID NO: 2166035 - RNA, 19 nt, Artificial Sequence
  Description of Artificial Sequence: Synthetic oligonucleotide
agugaauaccugcgugagc

SEQ ID NO: 2166036 - RNA, 19 nt, Artificial Sequence
  Description of Artificial Sequence: Synthetic oligonucleotide
uucuugggacucaagaguc

SEQ ID NO: 2166037 - RNA, 19 nt, Artificial Sequence
  Description of Artificial Sequence: Synthetic oligonucleotide
uagacagguccuuagugca

SEQ ID NO: 2166038 - RNA, 19 nt, Artificial Sequence
  Description of Artificial Sequence: Synthetic oligonucleotide
aauaccugcgugagcgggc

SEQ ID NO: 2166039 - RNA, 19 nt, Artificial Sequence
  Description of Artificial Sequence: Synthetic oligonucleotide
ugcgaaugacuucugcccc

SEQ ID NO: 2166040 - RNA, 19 nt, Artificial Sequence
  Description of Artificial Sequence: Synthetic oligonucleotide
ucuacgugggagacggugc

SEQ ID NO: 2166041 - RNA, 19 nt, Artificial Sequence
  Description of Artificial Sequence: Synthetic oligonucleotide
agaccaccugguuucuucc

SEQ ID NO: 2166042 - RNA, 19 nt, Artificial Sequence
  Description of Artificial Sequence: Synthetic oligonucleotide
cugcgugccaccuaccgcg

SEQ ID NO: 2166043 - RNA, 19 nt, Artificial Sequence
  Description of Artificial Sequence: Synthetic oligonucleotide
gaauacauagcaacgcguc

SEQ ID NO: 2166044 - RNA, 19 nt, Artificial Sequence
  Description of Artificial Sequence: Synthetic oligonucleotide
caacgcgucuucaaguacc

SEQ ID NO: 2166045 - RNA, 19 nt, Artificial Sequence
  Description of Artificial Sequence: Synthetic oligonucleotide
cuucgcuuugcuacgcucc

SEQ ID NO: 2166046 - RNA, 19 nt, Artificial Sequence
  Description of Artificial Sequence: Synthetic oligonucleotide
cuuugcuacgcuccucugg

SEQ ID NO: 2166047 - RNA, 19 nt, Artificial Sequence
  Description of Artificial Sequence: Synthetic oligonucleotide
uccuuccgcgcucacgugg

SEQ ID NO: 2166048 - RNA, 19 nt, Artificial Sequence
  Description of Artificial Sequence: Synthetic oligonucleotide
gaauaccugcgugagcggg

SEQ ID NO: 2166049 - RNA, 19 nt, Artificial Sequence
  Description of Artificial Sequence: Synthetic oligonucleotide
gagguagacagguccuuag

SEQ ID NO: 2166050 - RNA, 19 nt, Artificial Sequence
  Description of Artificial Sequence: Synthetic oligonucleotide
ggugacacagaugacagug

SEQ ID NO: 2166051 - RNA, 19 nt, Artificial Sequence
  Description of Artificial Sequence: Synthetic oligonucleotide
uggguauagugucaccacu

SEQ ID NO: 2166052 - RNA, 19 nt, Artificial Sequence
  Description of Artificial Sequence: Synthetic oligonucleotide
ccaagcaacuaccugagag

SEQ ID NO: 2166053 - RNA, 19 nt, Artificial Sequence
  Description of Artificial Sequence: Synthetic oligonucleotide
cucagugaauaccugcgug

SEQ ID NO: 2166054 - RNA, 19 nt, Artificial Sequence
  Description of Artificial Sequence: Synthetic oligonucleotide
ugagcaacccggccgggcc

SEQ ID NO: 2166055 - RNA, 19 nt, Artificial Sequence
  Description of Artificial Sequence: Synthetic oligonucleotide
cucaagagucccacugagg

SEQ ID NO: 2166056 - RNA, 19 nt, Artificial Sequence
  Description of Artificial Sequence: Synthetic oligonucleotide
ugaauaccugcgugagcgg

SEQ ID NO: 2166057 - RNA, 19 nt, Artificial Sequence
  Description of Artificial Sequence: Synthetic oligonucleotide
gagcgccuauucuacgugg

SEQ ID NO: 2166058 - RNA, 19 nt, Artificial Sequence
  Description of Artificial Sequence: Synthetic oligonucleotide
aaacagcgacgacucgauc

SEQ ID NO: 2166059 - RNA, 19 nt, Artificial Sequence
  Description of Artificial Sequence: Synthetic oligonucleotide
caacaccugcaacaggugc

SEQ ID NO: 2166060 - RNA, 19 nt, Artificial Sequence
  Description of Artificial Sequence: Synthetic oligonucleotide
uacgcugcuguguggagca

SEQ ID NO: 2166061 - RNA, 19 nt, Artificial Sequence
  Description of Artificial Sequence: Synthetic oligonucleotide
uucuacgugggagacggug

SEQ ID NO: 2166062 - RNA, 19 nt, Artificial Sequence
  Description of Artificial Sequence: Synthetic oligonucleotide
acuucgagcgccuauucua

SEQ ID NO: 2166063 - RNA, 19 nt, Artificial Sequence
  Description of Artificial Sequence: Synthetic oligonucleotide
ucugagcugacucccucac

SEQ ID NO: 2166064 - RNA, 19 nt, Artificial Sequence
  Description of Artificial Sequence: Synthetic oligonucleotide
agggauugggaauugcuua

SEQ ID NO: 2166065 - RNA, 19 nt, Artificial Sequence
  Description of Artificial Sequence: Synthetic oligonucleotide
uacauagcaacgcgucuuc

SEQ ID NO: 2166066 - RNA, 19 nt, Artificial Sequence
  Description of Artificial Sequence: Synthetic oligonucleotide
cagggauagaucugggcug

SEQ ID NO: 2166067 - RNA, 19 nt, Artificial Sequence
  Description of Artificial Sequence: Synthetic oligonucleotide
gaagaccaucaccugccag

SEQ ID NO: 2166068 - RNA, 19 nt, Artificial Sequence
  Description of Artificial Sequence: Synthetic oligonucleotide
ugcagggauagaucugggc

SEQ ID NO: 2166069 - RNA, 19 nt, Artificial Sequence
  Description of Artificial Sequence: Synthetic oligonucleotide
ugggagacggugcgaauga

SEQ ID NO: 2166070 - RNA, 19 nt, Artificial Sequence
  Description of Artificial Sequence: Synthetic oligonucleotide
gacggcgugcacuucgagc

SEQ ID NO: 2166071 - RNA, 19 nt, Artificial Sequence
  Description of Artificial Sequence: Synthetic oligonucleotide
ugggaaacggccgccgagg

SEQ ID NO: 2166072 - RNA, 19 nt, Artificial Sequence
  Description of Artificial Sequence: Synthetic oligonucleotide
aaaacagcgacgacucgau

SEQ ID NO: 2166073 - RNA, 19 nt, Artificial Sequence
  Description of Artificial Sequence: Synthetic oligonucleotide
cuucgagcgccuauucuac

SEQ ID NO: 2166074 - RNA, 19 nt, Artificial Sequence
  Description of Artificial Sequence: Synthetic oligonucleotide
uuuuguccgcuuugugggc

SEQ ID NO: 2166075 - RNA, 19 nt, Artificial Sequence
  Description of Artificial Sequence: Synthetic oligonucleotide
acaugugcaagcacaaggu

SEQ ID NO: 2166076 - RNA, 19 nt, Artificial Sequence
  Description of Artificial Sequence: Synthetic oligonucleotide
uccccuacgcugcugugug

SEQ ID NO: 2166077 - RNA, 19 nt, Artificial Sequence
  Description of Artificial Sequence: Synthetic oligonucleotide
uucgagcgccuauucuacg

SEQ ID NO: 2166078 - RNA, 19 nt, Artificial Sequence
  Description of Artificial Sequence: Synthetic oligonucleotide
cuacgugggagacggugcg

SEQ ID NO: 2166079 - RNA, 19 nt, Artificial Sequence
  Description of Artificial Sequence: Synthetic oligonucleotide
acagcgacgacucgaucgu

SEQ ID NO: 2166080 - RNA, 19 nt, Artificial Sequence
  Description of Artificial Sequence: Synthetic oligonucleotide
ucacguggugcccugggaa

SEQ ID NO: 2166081 - RNA, 19 nt, Artificial Sequence
  Description of Artificial Sequence: Synthetic oligonucleotide
uagcaacgcgucuucaagu

SEQ ID NO: 2166082 - RNA, 19 nt, Artificial Sequence
  Description of Artificial Sequence: Synthetic oligonucleotide
auaccugcgugagcgggcc

SEQ ID NO: 2166083 - RNA, 19 nt, Artificial Sequence
  Description of Artificial Sequence: Synthetic oligonucleotide
uggguuggugcagggauag

SEQ ID NO: 2166084 - RNA, 19 nt, Artificial Sequence
  Description of Artificial Sequence: Synthetic oligonucleotide
agaccaucaccugccaggg

SEQ ID NO: 2166085 - RNA, 19 nt, Artificial Sequence
  Description of Artificial Sequence: Synthetic oligonucleotide
accgccucauccaggaggc

SEQ ID NO: 2166086 - RNA, 19 nt, Artificial Sequence
  Description of Artificial Sequence: Synthetic oligonucleotide
acagaugacagugccuuca

SEQ ID NO: 2166087 - RNA, 19 nt, Artificial Sequence
  Description of Artificial Sequence: Synthetic oligonucleotide
agcggagguuccuggguac

SEQ ID NO: 2166088 - RNA, 19 nt, Artificial Sequence
  Description of Artificial Sequence: Synthetic oligonucleotide
ggacucaagagucccacug

SEQ ID NO: 2166089 - RNA, 19 nt, Artificial Sequence
  Description of Artificial Sequence: Synthetic oligonucleotide
uaccugggugagcaacccg

SEQ ID NO: 2166090 - RNA, 19 nt, Artificial Sequence
  Description of Artificial Sequence: Synthetic oligonucleotide
accugggugagcaacccgg

SEQ ID NO: 2166091 - RNA, 19 nt, Artificial Sequence
  Description of Artificial Sequence: Synthetic oligonucleotide
aacucggggagagccggcg

SEQ ID NO: 2166092 - RNA, 19 nt, Artificial Sequence
  Description of Artificial Sequence: Synthetic oligonucleotide
uccccuucgcuuugcuacg

SEQ ID NO: 2166093 - RNA, 19 nt, Artificial Sequence
  Description of Artificial Sequence: Synthetic oligonucleotide
ugcaagcacaaggugcuca

SEQ ID NO: 2166094 - RNA, 19 nt, Artificial Sequence
  Description of Artificial Sequence: Synthetic oligonucleotide
uucgcuuugcuacgcuccu

SEQ ID NO: 2166095 - RNA, 19 nt, Artificial Sequence
  Description of Artificial Sequence: Synthetic oligonucleotide
agcgacgacucgaucgugc

SEQ ID NO: 2166096 - RNA, 19 nt, Artificial Sequence
  Description of Artificial Sequence: Synthetic oligonucleotide
gacucaagagucccacuga

SEQ ID NO: 2166097 - RNA, 19 nt, Artificial Sequence
  Description of Artificial Sequence: Synthetic oligonucleotide
aacccggccgggcccgacc

SEQ ID NO: 2166098 - RNA, 19 nt, Artificial Sequence
  Description of Artificial Sequence: Synthetic oligonucleotide
ucgagcgccuauucuacgu

SEQ ID NO: 2166099 - RNA, 19 nt, Artificial Sequence
  Description of Artificial Sequence: Synthetic oligonucleotide
cugacucccucacaccagc

SEQ ID NO: 2166100 - RNA, 19 nt, Artificial Sequence
  Description of Artificial Sequence: Synthetic oligonucleotide
caaggugcucagugaauac

SEQ ID NO: 2166101 - RNA, 19 nt, Artificial Sequence
  Description of Artificial Sequence: Synthetic oligonucleotide
gcagccuugacuguggcgc

SEQ ID NO: 2166102 - RNA, 19 nt, Artificial Sequence
  Description of Artificial Sequence: Synthetic oligonucleotide
gagguuccuggguaccacc

SEQ ID NO: 2166103 - RNA, 19 nt, Artificial Sequence
  Description of Artificial Sequence: Synthetic oligonucleotide
agacggugcgaaugacuuc

SEQ ID NO: 2166104 - RNA, 19 nt, Artificial Sequence
  Description of Artificial Sequence: Synthetic oligonucleotide
uaccgcgagggcuacuaca

SEQ ID NO: 2166105 - RNA, 19 nt, Artificial Sequence
  Description of Artificial Sequence: Synthetic oligonucleotide
cagugaauaccugcgugag

SEQ ID NO: 2166106 - RNA, 19 nt, Artificial Sequence
  Description of Artificial Sequence: Synthetic oligonucleotide
gacucgaucgugcgcgcug

SEQ ID NO: 2166107 - RNA, 19 nt, Artificial Sequence
  Description of Artificial Sequence: Synthetic oligonucleotide
acucgaucgugcgcgcugc

SEQ ID NO: 2166108 - RNA, 19 nt, Artificial Sequence
  Description of Artificial Sequence: Synthetic oligonucleotide
auacauagcaacgcgucuu

SEQ ID NO: 2166109 - RNA, 19 nt, Artificial Sequence
  Description of Artificial Sequence: Synthetic oligonucleotide
cuauucuacgugggagacg

SEQ ID NO: 2166110 - RNA, 19 nt, Artificial Sequence
  Description of Artificial Sequence: Synthetic oligonucleotide
agcaacgcgucuucaagua

SEQ ID NO: 2166111 - RNA, 19 nt, Artificial Sequence
  Description of Artificial Sequence: Synthetic oligonucleotide
cuucagagaaggagagcuc

SEQ ID NO: 2166112 - RNA, 19 nt, Artificial Sequence
  Description of Artificial Sequence: Synthetic oligonucleotide
uggugcagggauagaucug

SEQ ID NO: 2166113 - RNA, 19 nt, Artificial Sequence
  Description of Artificial Sequence: Synthetic oligonucleotide
gcaacuaccugagagccug

SEQ ID NO: 2166114 - RNA, 19 nt, Artificial Sequence
  Description of Artificial Sequence: Synthetic oligonucleotide
ggcagugcuggguuggugc

SEQ ID NO: 2166115 - RNA, 19 nt, Artificial Sequence
  Description of Artificial Sequence: Synthetic oligonucleotide
gugcugaagauguauugaa

SEQ ID NO: 2166116 - RNA, 19 nt, Artificial Sequence
  Description of Artificial Sequence: Synthetic oligonucleotide
gcuacuacaaugaauacau

SEQ ID NO: 2166117 - RNA, 19 nt, Artificial Sequence
  Description of Artificial Sequence: Synthetic oligonucleotide
gagaaggagagcucauugu

SEQ ID NO: 2166118 - RNA, 19 nt, Artificial Sequence
  Description of Artificial Sequence: Synthetic oligonucleotide
aggcgcggcuaccccaugc

SEQ ID NO: 2166119 - RNA, 19 nt, Artificial Sequence
  Description of Artificial Sequence: Synthetic oligonucleotide
uuuguccgcuuugugggcu

SEQ ID NO: 2166120 - RNA, 19 nt, Artificial Sequence
  Description of Artificial Sequence: Synthetic oligonucleotide
acaaggugcucagugaaua

SEQ ID NO: 2166121 - RNA, 19 nt, Artificial Sequence
  Description of Artificial Sequence: Synthetic oligonucleotide
ggaauugcuuaagaccacc

SEQ ID NO: 2166122 - RNA, 19 nt, Artificial Sequence
  Description of Artificial Sequence: Synthetic oligonucleotide
ugggacucaagagucccac

SEQ ID NO: 2166123 - RNA, 19 nt, Artificial Sequence
  Description of Artificial Sequence: Synthetic oligonucleotide
acuaccugagagccugcgu

SEQ ID NO: 2166124 - RNA, 19 nt, Artificial Sequence
  Description of Artificial Sequence: Synthetic oligonucleotide
ugccccuccccuacgcugc

SEQ ID NO: 2166125 - RNA, 19 nt, Artificial Sequence
  Description of Artificial Sequence: Synthetic oligonucleotide
guauggguauagugucacc

SEQ ID NO: 2166126 - RNA, 19 nt, Artificial Sequence
  Description of Artificial Sequence: Synthetic oligonucleotide
gagccggcggcggagacag

SEQ ID NO: 2166127 - RNA, 19 nt, Artificial Sequence
  Description of Artificial Sequence: Synthetic oligonucleotide
gcggcuaccccaugcaccg

SEQ ID NO: 2166128 - RNA, 19 nt, Artificial Sequence
  Description of Artificial Sequence: Synthetic oligonucleotide
aggugcucagugaauaccu

SEQ ID NO: 2166129 - RNA, 19 nt, Artificial Sequence
  Description of Artificial Sequence: Synthetic oligonucleotide
aacgcgucuucaaguaccu

SEQ ID NO: 2166130 - RNA, 19 nt, Artificial Sequence
  Description of Artificial Sequence: Synthetic oligonucleotide
gaagaauccagugcccucu

SEQ ID NO: 2166131 - RNA, 19 nt, Artificial Sequence
  Description of Artificial Sequence: Synthetic oligonucleotide
gaucgugcgcgcugcgccc

SEQ ID NO: 2166132 - RNA, 19 nt, Artificial Sequence
  Description of Artificial Sequence: Synthetic oligonucleotide
uccgcgcucacguggugcc

SEQ ID NO: 2166133 - RNA, 19 nt, Artificial Sequence
  Description of Artificial Sequence: Synthetic oligonucleotide
acgacucgaucgugcgcgc

SEQ ID NO: 2166134 - RNA, 19 nt, Artificial Sequence
  Description of Artificial Sequence: Synthetic oligonucleotide
ugcuuaagaccaccugguu

SEQ ID NO: 2166135 - RNA, 19 nt, Artificial Sequence
  Description of Artificial Sequence: Synthetic oligonucleotide
uuagugcagccuugacugu

SEQ ID NO: 2166136 - RNA, 19 nt, Artificial Sequence
  Description of Artificial Sequence: Synthetic oligonucleotide
gacggugcgaaugacuucu

SEQ ID NO: 2166137 - RNA, 19 nt, Artificial Sequence
  Description of Artificial Sequence: Synthetic oligonucleotide
acguggccuucccaaggcg

SEQ ID NO: 2166138 - RNA, 19 nt, Artificial Sequence
  Description of Artificial Sequence: Synthetic oligonucleotide
gcugaacacaguucacagc

SEQ ID NO: 2166139 - RNA, 19 nt, Artificial Sequence
  Description of Artificial Sequence: Synthetic oligonucleotide
acacgcacagcugcucgcg

SEQ ID NO: 2166140 - RNA, 19 nt, Artificial Sequence
  Description of Artificial Sequence: Synthetic oligonucleotide
uggcaagcggggacguggc

SEQ ID NO: 2166141 - RNA, 19 nt, Artificial Sequence
  Description of Artificial Sequence: Synthetic oligonucleotide
acgccugcggccuuccaca

SEQ ID NO: 2166142 - RNA, 19 nt, Artificial Sequence
  Description of Artificial Sequence: Synthetic oligonucleotide
uccuggguaccaccucucu

SEQ ID NO: 2166143 - RNA, 19 nt, Artificial Sequence
  Description of Artificial Sequence: Synthetic oligonucleotide
cuacgcugcuguguggagc

SEQ ID NO: 2166144 - RNA, 19 nt, Artificial Sequence
  Description of Artificial Sequence: Synthetic oligonucleotide
agcgccuauucuacguggg

SEQ ID NO: 2166145 - RNA, 19 nt, Artificial Sequence
  Description of Artificial Sequence: Synthetic oligonucleotide
uucaaguaccugggugagc

SEQ ID NO: 2166146 - RNA, 19 nt, Artificial Sequence
  Description of Artificial Sequence: Synthetic oligonucleotide
cauagcaacgcgucuucaa

SEQ ID NO: 2166147 - RNA, 19 nt, Artificial Sequence
  Description of Artificial Sequence: Synthetic oligonucleotide
ggaacucggggagagccgg

SEQ ID NO: 2166148 - RNA, 19 nt, Artificial Sequence
  Description of Artificial Sequence: Synthetic oligonucleotide
cugggaaacggccgccgag

SEQ ID NO: 2166149 - RNA, 19 nt, Artificial Sequence
  Description of Artificial Sequence: Synthetic oligonucleotide
ggcuacuacaaugaauaca

SEQ ID NO: 2166150 - RNA, 19 nt, Artificial Sequence
  Description of Artificial Sequence: Synthetic oligonucleotide
acguggugcccugggaaac

SEQ ID NO: 2166151 - RNA, 19 nt, Artificial Sequence
  Description of Artificial Sequence: Synthetic oligonucleotide
cacacgcacagcugcucgc

SEQ ID NO: 2166152 - RNA, 19 nt, Artificial Sequence
  Description of Artificial Sequence: Synthetic oligonucleotide
accgcucgaggacugcuga

SEQ ID NO: 2166153 - RNA, 19 nt, Artificial Sequence
  Description of Artificial Sequence: Synthetic oligonucleotide
uuaagaccaccugguuucu

SEQ ID NO: 2166154 - RNA, 19 nt, Artificial Sequence
  Description of Artificial Sequence: Synthetic oligonucleotide
acucggggagagccggcgg

SEQ ID NO: 2166155 - RNA, 19 nt, Artificial Sequence
  Description of Artificial Sequence: Synthetic oligonucleotide
cucgaggacugcugacgcc

SEQ ID NO: 2166156 - RNA, 19 nt, Artificial Sequence
  Description of Artificial Sequence: Synthetic oligonucleotide
gaggugcgccaacaccugc

SEQ ID NO: 2166157 - RNA, 19 nt, Artificial Sequence
  Description of Artificial Sequence: Synthetic oligonucleotide
gugccaccuaccgcgaggg

SEQ ID NO: 2166158 - RNA, 19 nt, Artificial Sequence
  Description of Artificial Sequence: Synthetic oligonucleotide
gugcugaacacaguucaca

SEQ ID NO: 2166159 - RNA, 19 nt, Artificial Sequence
  Description of Artificial Sequence: Synthetic oligonucleotide
ggcacagaaggcugagccc

SEQ ID NO: 2166160 - RNA, 19 nt, Artificial Sequence
  Description of Artificial Sequence: Synthetic oligonucleotide
ggugcugaagauguauuga

SEQ ID NO: 2166161 - RNA, 19 nt, Artificial Sequence
  Description of Artificial Sequence: Synthetic oligonucleotide
caagagucccacugaggca

SEQ ID NO: 2166162 - RNA, 19 nt, Artificial Sequence
  Description of Artificial Sequence: Synthetic oligonucleotide
ccugcggccuuccacacgc

SEQ ID NO: 2166163 - RNA, 19 nt, Artificial Sequence
  Description of Artificial Sequence: Synthetic oligonucleotide
gcagggauagaucugggcu

SEQ ID NO: 2166164 - RNA, 19 nt, Artificial Sequence
  Description of Artificial Sequence: Synthetic oligonucleotide
uuguccgcuuugugggcug

SEQ ID NO: 2166165 - RNA, 19 nt, Artificial Sequence
  Description of Artificial Sequence: Synthetic oligonucleotide
cccgccaacaugugcaagc

SEQ ID NO: 2166166 - RNA, 19 nt, Artificial Sequence
  Description of Artificial Sequence: Synthetic oligonucleotide
cucucugccccuccccuac

SEQ ID NO: 2166167 - RNA, 19 nt, Artificial Sequence
  Description of Artificial Sequence: Synthetic oligonucleotide
accugcgugagcgggcccg

SEQ ID NO: 2166168 - RNA, 19 nt, Artificial Sequence
  Description of Artificial Sequence: Synthetic oligonucleotide
uggcgcuggcuucuuggga

SEQ ID NO: 2166169 - RNA, 19 nt, Artificial Sequence
  Description of Artificial Sequence: Synthetic oligonucleotide
cucggggagagccggcggc

SEQ ID NO: 2166170 - RNA, 19 nt, Artificial Sequence
  Description of Artificial Sequence: Synthetic oligonucleotide
cugagcccagcuccuuccg

SEQ ID NO: 2166171 - RNA, 19 nt, Artificial Sequence
  Description of Artificial Sequence: Synthetic oligonucleotide
ggggaacucggggagagcc

SEQ ID NO: 2166172 - RNA, 19 nt, Artificial Sequence
  Description of Artificial Sequence: Synthetic oligonucleotide
ugcggccuuccacacgcac

SEQ ID NO: 2166173 - RNA, 19 nt, Artificial Sequence
  Description of Artificial Sequence: Synthetic oligonucleotide
ugcacuucgagcgccuauu

SEQ ID NO: 2166174 - RNA, 19 nt, Artificial Sequence
  Description of Artificial Sequence: Synthetic oligonucleotide
gcgacgacucgaucgugcg

SEQ ID NO: 2166175 - RNA, 19 nt, Artificial Sequence
  Description of Artificial Sequence: Synthetic oligonucleotide
ucggggagagccggcggcg

SEQ ID NO: 2166176 - RNA, 19 nt, Artificial Sequence
  Description of Artificial Sequence: Synthetic oligonucleotide
agcccaagagguagacagg

SEQ ID NO: 2166177 - RNA, 19 nt, Artificial Sequence
  Description of Artificial Sequence: Synthetic oligonucleotide
uuccuggguaccaccucuc

SEQ ID NO: 2166178 - RNA, 19 nt, Artificial Sequence
  Description of Artificial Sequence: Synthetic oligonucleotide
uuccgcgcucacguggugc

SEQ ID NO: 2166179 - RNA, 19 nt, Artificial Sequence
  Description of Artificial Sequence: Synthetic oligonucleotide
uugcuacgcuccucugggc

SEQ ID NO: 2166180 - RNA, 19 nt, Artificial Sequence
  Description of Artificial Sequence: Synthetic oligonucleotide
gaauugcuuaagaccaccu

SEQ ID NO: 2166181 - RNA, 19 nt, Artificial Sequence
  Description of Artificial Sequence: Synthetic oligonucleotide
ggauagaucugggcugucc

SEQ ID NO: 2166182 - RNA, 19 nt, Artificial Sequence
  Description of Artificial Sequence: Synthetic oligonucleotide
accugcaacaggugcugaa

SEQ ID NO: 2166183 - RNA, 19 nt, Artificial Sequence
  Description of Artificial Sequence: Synthetic oligonucleotide
gucggguguauggguauag

SEQ ID NO: 2166184 - RNA, 19 nt, Artificial Sequence
  Description of Artificial Sequence: Synthetic oligonucleotide
gggcauuucuggaauuuug

SEQ ID NO: 2166185 - RNA, 19 nt, Artificial Sequence
  Description of Artificial Sequence: Synthetic oligonucleotide
ggaagaauccagugcccuc

SEQ ID NO: 2166186 - RNA, 19 nt, Artificial Sequence
  Description of Artificial Sequence: Synthetic oligonucleotide
caagagguagacagguccu

SEQ ID NO: 2166187 - RNA, 19 nt, Artificial Sequence
  Description of Artificial Sequence: Synthetic oligonucleotide
guaccugggugagcaaccc

SEQ ID NO: 2166188 - RNA, 19 nt, Artificial Sequence
  Description of Artificial Sequence: Synthetic oligonucleotide
agcuccuuccgcgcucacg

SEQ ID NO: 2166189 - RNA, 19 nt, Artificial Sequence
  Description of Artificial Sequence: Synthetic oligonucleotide
gagcaacccggccgggccc

SEQ ID NO: 2166190 - RNA, 19 nt, Artificial Sequence
  Description of Artificial Sequence: Synthetic oligonucleotide
cugaggcagugcuggguug

SEQ ID NO: 2166191 - RNA, 19 nt, Artificial Sequence
  Description of Artificial Sequence: Synthetic oligonucleotide
gccuauucuacgugggaga

SEQ ID NO: 2166192 - RNA, 19 nt, Artificial Sequence
  Description of Artificial Sequence: Synthetic oligonucleotide
gggauugggaauugcuuaa

SEQ ID NO: 2166193 - RNA, 19 nt, Artificial Sequence
  Description of Artificial Sequence: Synthetic oligonucleotide
ggugcccugggaaacggcc

SEQ ID NO: 2166194 - RNA, 19 nt, Artificial Sequence
  Description of Artificial Sequence: Synthetic oligonucleotide
ggcuccacauaguucccug

SEQ ID NO: 2166195 - RNA, 19 nt, Artificial Sequence
  Description of Artificial Sequence: Synthetic oligonucleotide
aagauguauugaagaccau

SEQ ID NO: 2166196 - RNA, 19 nt, Artificial Sequence
  Description of Artificial Sequence: Synthetic oligonucleotide
ucggguguauggguauagu

SEQ ID NO: 2166197 - RNA, 19 nt, Artificial Sequence
  Description of Artificial Sequence: Synthetic oligonucleotide
ugggcauuucuggaauuuu

SEQ ID NO: 2166198 - RNA, 19 nt, Artificial Sequence
  Description of Artificial Sequence: Synthetic oligonucleotide
ucgaucgugcgcgcugcgc

SEQ ID NO: 2166199 - RNA, 19 nt, Artificial Sequence
  Description of Artificial Sequence: Synthetic oligonucleotide
cugcgcccggccaagcaac

SEQ ID NO: 2166200 - RNA, 19 nt, Artificial Sequence
  Description of Artificial Sequence: Synthetic oligonucleotide
gagacggugcgaaugacuu

SEQ ID NO: 2166201 - RNA, 19 nt, Artificial Sequence
  Description of Artificial Sequence: Synthetic oligonucleotide
agcggggacguggccuucc

SEQ ID NO: 2166202 - RNA, 19 nt, Artificial Sequence
  Description of Artificial Sequence: Synthetic oligonucleotide
caacuaccugagagccugc

SEQ ID NO: 2166203 - RNA, 19 nt, Artificial Sequence
  Description of Artificial Sequence: Synthetic oligonucleotide
gcacagaaggcugagccca

SEQ ID NO: 2166204 - RNA, 19 nt, Artificial Sequence
  Description of Artificial Sequence: Synthetic oligonucleotide
ggacugcugacgccugcgg

SEQ ID NO: 2166205 - RNA, 19 nt, Artificial Sequence
  Description of Artificial Sequence: Synthetic oligonucleotide
uccuucugucggguguaug

SEQ ID NO: 2166206 - RNA, 19 nt, Artificial Sequence
  Description of Artificial Sequence: Synthetic oligonucleotide
gggagcggagguuccuggg

SEQ ID NO: 2166207 - RNA, 19 nt, Artificial Sequence
  Description of Artificial Sequence: Synthetic oligonucleotide
cuuugugggcugggagcgg

SEQ ID NO: 2166208 - RNA, 19 nt, Artificial Sequence
  Description of Artificial Sequence: Synthetic oligonucleotide
ggguguauggguauagugu

SEQ ID NO: 2166209 - RNA, 19 nt, Artificial Sequence
  Description of Artificial Sequence: Synthetic oligonucleotide
gagcggagguuccugggua

SEQ ID NO: 2166210 - RNA, 19 nt, Artificial Sequence
  Description of Artificial Sequence: Synthetic oligonucleotide
ugcgugccaccuaccgcga

SEQ ID NO: 2166211 - RNA, 19 nt, Artificial Sequence
  Description of Artificial Sequence: Synthetic oligonucleotide
ccuauucuacgugggagac

SEQ ID NO: 2166212 - RNA, 19 nt, Artificial Sequence
  Description of Artificial Sequence: Synthetic oligonucleotide
accgcgagggcuacuacaa

SEQ ID NO: 2166213 - RNA, 19 nt, Artificial Sequence
  Description of Artificial Sequence: Synthetic oligonucleotide
gugcagggauagaucuggg

SEQ ID NO: 2166214 - RNA, 19 nt, Artificial Sequence
  Description of Artificial Sequence: Synthetic oligonucleotide
aaacggccgccgaggugcg

SEQ ID NO: 2166215 - RNA, 19 nt, Artificial Sequence
  Description of Artificial Sequence: Synthetic oligonucleotide
agcaacccggccgggcccg

SEQ ID NO: 2166216 - RNA, 19 nt, Artificial Sequence
  Description of Artificial Sequence: Synthetic oligonucleotide
cugccccgccaacaugugc

SEQ ID NO: 2166217 - RNA, 19 nt, Artificial Sequence
  Description of Artificial Sequence: Synthetic oligonucleotide
uccacacgcacagcugcuc

SEQ ID NO: 2166218 - RNA, 19 nt, Artificial Sequence
  Description of Artificial Sequence: Synthetic oligonucleotide
ugcgcgcugcgcccggcca

SEQ ID NO: 2166219 - RNA, 19 nt, Artificial Sequence
  Description of Artificial Sequence: Synthetic oligonucleotide
cacgcacagcugcucgcgc

SEQ ID NO: 2166220 - RNA, 19 nt, Artificial Sequence
  Description of Artificial Sequence: Synthetic oligonucleotide
ugagcgggcccgcgacggc

SEQ ID NO: 2166221 - RNA, 19 nt, Artificial Sequence
  Description of Artificial Sequence: Synthetic oligonucleotide
gaccgcucgaggacugcug

SEQ ID NO: 2166222 - RNA, 19 nt, Artificial Sequence
  Description of Artificial Sequence: Synthetic oligonucleotide
gacacagaugacagugccu

SEQ ID NO: 2166223 - RNA, 19 nt, Artificial Sequence
  Description of Artificial Sequence: Synthetic oligonucleotide
gggcuacuacaaugaauac

SEQ ID NO: 2166224 - RNA, 19 nt, Artificial Sequence
  Description of Artificial Sequence: Synthetic oligonucleotide
cucgaucgugcgcgcugcg

SEQ ID NO: 2166225 - RNA, 19 nt, Artificial Sequence
  Description of Artificial Sequence: Synthetic oligonucleotide
gcaacgcgucuucaaguac

SEQ ID NO: 2166226 - RNA, 19 nt, Artificial Sequence
  Description of Artificial Sequence: Synthetic oligonucleotide
gcgggugacacagaugaca

SEQ ID NO: 2166227 - RNA, 19 nt, Artificial Sequence
  Description of Artificial Sequence: Synthetic oligonucleotide
gcucacguggugcccuggg

SEQ ID NO: 2166228 - RNA, 19 nt, Artificial Sequence
  Description of Artificial Sequence: Synthetic oligonucleotide
aaggcgcggcuaccccaug

SEQ ID NO: 2166229 - RNA, 19 nt, Artificial Sequence
  Description of Artificial Sequence: Synthetic oligonucleotide
ugcgcccggccaagcaacu

SEQ ID NO: 2166230 - RNA, 19 nt, Artificial Sequence
  Description of Artificial Sequence: Synthetic oligonucleotide
uucccaaggcgcggcuacc

SEQ ID NO: 2166231 - RNA, 19 nt, Artificial Sequence
  Description of Artificial Sequence: Synthetic oligonucleotide
gugcagccuugacuguggc

SEQ ID NO: 2166232 - RNA, 19 nt, Artificial Sequence
  Description of Artificial Sequence: Synthetic oligonucleotide
gaguagcggcgggugacac

SEQ ID NO: 2166233 - RNA, 19 nt, Artificial Sequence
  Description of Artificial Sequence: Synthetic oligonucleotide
ccuucagagaaggagagcu

SEQ ID NO: 2166234 - RNA, 19 nt, Artificial Sequence
  Description of Artificial Sequence: Synthetic oligonucleotide
agcaacuaccugagagccu

SEQ ID NO: 2166235 - RNA, 19 nt, Artificial Sequence
  Description of Artificial Sequence: Synthetic oligonucleotide
aacggccgccgaggugcgc

SEQ ID NO: 2166236 - RNA, 19 nt, Artificial Sequence
  Description of Artificial Sequence: Synthetic oligonucleotide
cggguguauggguauagug

SEQ ID NO: 2166237 - RNA, 19 nt, Artificial Sequence
  Description of Artificial Sequence: Synthetic oligonucleotide
cacguggugcccugggaaa

SEQ ID NO: 2166238 - RNA, 19 nt, Artificial Sequence
  Description of Artificial Sequence: Synthetic oligonucleotide
cuaccgcgagggcuacuac

SEQ ID NO: 2166239 - RNA, 19 nt, Artificial Sequence
  Description of Artificial Sequence: Synthetic oligonucleotide
gugagcaacccggccgggc

SEQ ID NO: 2166240 - RNA, 19 nt, Artificial Sequence
  Description of Artificial Sequence: Synthetic oligonucleotide
ugccaccuaccgcgagggc

SEQ ID NO: 2166241 - RNA, 19 nt, Artificial Sequence
  Description of Artificial Sequence: Synthetic oligonucleotide
accugccaggggaacucgg

SEQ ID NO: 2166242 - RNA, 19 nt, Artificial Sequence
  Description of Artificial Sequence: Synthetic oligonucleotide
gaacucggggagagccggc

SEQ ID NO: 2166243 - RNA, 19 nt, Artificial Sequence
  Description of Artificial Sequence: Synthetic oligonucleotide
ugucggguguauggguaua

SEQ ID NO: 2166244 - RNA, 19 nt, Artificial Sequence
  Description of Artificial Sequence: Synthetic oligonucleotide
ggggacguggccuucccaa

SEQ ID NO: 2166245 - RNA, 19 nt, Artificial Sequence
  Description of Artificial Sequence: Synthetic oligonucleotide
cugggagcggagguuccug

SEQ ID NO: 2166246 - RNA, 19 nt, Artificial Sequence
  Description of Artificial Sequence: Synthetic oligonucleotide
uaccugcgugagcgggccc

SEQ ID NO: 2166247 - RNA, 19 nt, Artificial Sequence
  Description of Artificial Sequence: Synthetic oligonucleotide
cagggauugggaauugcuu

SEQ ID NO: 2166248 - RNA, 19 nt, Artificial Sequence
  Description of Artificial Sequence: Synthetic oligonucleotide
ccugcgugccaccuaccgc

SEQ ID NO: 2166249 - RNA, 19 nt, Artificial Sequence
  Description of Artificial Sequence: Synthetic oligonucleotide
cggcgggugacacagauga

SEQ ID NO: 2166250 - RNA, 19 nt, Artificial Sequence
  Description of Artificial Sequence: Synthetic oligonucleotide
gcugacucccucacaccag

SEQ ID NO: 2166251 - RNA, 19 nt, Artificial Sequence
  Description of Artificial Sequence: Synthetic oligonucleotide
gcuccuuccgcgcucacgu

SEQ ID NO: 2166252 - RNA, 19 nt, Artificial Sequence
  Description of Artificial Sequence: Synthetic oligonucleotide
ccuucgcuuugcuacgcuc

SEQ ID NO: 2166253 - RNA, 19 nt, Artificial Sequence
  Description of Artificial Sequence: Synthetic oligonucleotide
agugcccucugagcugacu

SEQ ID NO: 2166254 - RNA, 19 nt, Artificial Sequence
  Description of Artificial Sequence: Synthetic oligonucleotide
cucacguggugcccuggga

SEQ ID NO: 2166255 - RNA, 19 nt, Artificial Sequence
  Description of Artificial Sequence: Synthetic oligonucleotide
cuaccccaugcaccgccuc

SEQ ID NO: 2166256 - RNA, 19 nt, Artificial Sequence
  Description of Artificial Sequence: Synthetic oligonucleotide
gaccaccugguuucuuccu

SEQ ID NO: 2166257 - RNA, 19 nt, Artificial Sequence
  Description of Artificial Sequence: Synthetic oligonucleotide
cgaucgugcgcgcugcgcc

SEQ ID NO: 2166258 - RNA, 19 nt, Artificial Sequence
  Description of Artificial Sequence: Synthetic oligonucleotide
uaagaccaccugguuucuu

SEQ ID NO: 2166259 - RNA, 19 nt, Artificial Sequence
  Description of Artificial Sequence: Synthetic oligonucleotide
cggccaagcaacuaccuga

SEQ ID NO: 2166260 - RNA, 19 nt, Artificial Sequence
  Description of Artificial Sequence: Synthetic oligonucleotide
cugagcugacucccucaca

SEQ ID NO: 2166261 - RNA, 19 nt, Artificial Sequence
  Description of Artificial Sequence: Synthetic oligonucleotide
cgcggcuaccccaugcacc

SEQ ID NO: 2166262 - RNA, 19 nt, Artificial Sequence
  Description of Artificial Sequence: Synthetic oligonucleotide
cuccuuccgcgcucacgug

SEQ ID NO: 2166263 - RNA, 19 nt, Artificial Sequence
  Description of Artificial Sequence: Synthetic oligonucleotide
gcuuugcuacgcuccucug

SEQ ID NO: 2166264 - RNA, 19 nt, Artificial Sequence
  Description of Artificial Sequence: Synthetic oligonucleotide
cuggguuggugcagggaua

SEQ ID NO: 2166265 - RNA, 19 nt, Artificial Sequence
  Description of Artificial Sequence: Synthetic oligonucleotide
ccuuagugcagccuugacu

SEQ ID NO: 2166266 - RNA, 19 nt, Artificial Sequence
  Description of Artificial Sequence: Synthetic oligonucleotide
cgugccaccuaccgcgagg

SEQ ID NO: 2166267 - RNA, 19 nt, Artificial Sequence
  Description of Artificial Sequence: Synthetic oligonucleotide
agccugcgugccaccuacc

SEQ ID NO: 2166268 - RNA, 19 nt, Artificial Sequence
  Description of Artificial Sequence: Synthetic oligonucleotide
ggagguuccuggguaccac

SEQ ID NO: 2166269 - RNA, 19 nt, Artificial Sequence
  Description of Artificial Sequence: Synthetic oligonucleotide
gguuggugcagggauagau

SEQ ID NO: 2166270 - RNA, 19 nt, Artificial Sequence
  Description of Artificial Sequence: Synthetic oligonucleotide
cgccuauucuacgugggag

SEQ ID NO: 2166271 - RNA, 19 nt, Artificial Sequence
  Description of Artificial Sequence: Synthetic oligonucleotide
cgaaaacagcgacgacucg

SEQ ID NO: 2166272 - RNA, 19 nt, Artificial Sequence
  Description of Artificial Sequence: Synthetic oligonucleotide
guccgcuuugugggcuggg

SEQ ID NO: 2166273 - RNA, 19 nt, Artificial Sequence
  Description of Artificial Sequence: Synthetic oligonucleotide
ucgcuuugcuacgcuccuc

SEQ ID NO: 2166274 - RNA, 19 nt, Artificial Sequence
  Description of Artificial Sequence: Synthetic oligonucleotide
ccggucagaguagcggcgg

SEQ ID NO: 2166275 - RNA, 19 nt, Artificial Sequence
  Description of Artificial Sequence: Synthetic oligonucleotide
cuuccgcgcucacguggug

SEQ ID NO: 2166276 - RNA, 19 nt, Artificial Sequence
  Description of Artificial Sequence: Synthetic oligonucleotide
cacuucgagcgccuauucu

SEQ ID NO: 2166277 - RNA, 19 nt, Artificial Sequence
  Description of Artificial Sequence: Synthetic oligonucleotide
ggcccgaccgcucgaggac

SEQ ID NO: 2166278 - RNA, 19 nt, Artificial Sequence
  Description of Artificial Sequence: Synthetic oligonucleotide
ccuacgcugcuguguggag

SEQ ID NO: 2166279 - RNA, 19 nt, Artificial Sequence
  Description of Artificial Sequence: Synthetic oligonucleotide
ccggccaagcaacuaccug

SEQ ID NO: 2166280 - RNA, 19 nt, Artificial Sequence
  Description of Artificial Sequence: Synthetic oligonucleotide
cgcucgaggacugcugacg

SEQ ID NO: 2166281 - RNA, 19 nt, Artificial Sequence
  Description of Artificial Sequence: Synthetic oligonucleotide
cacaaggugcucagugaau

SEQ ID NO: 2166282 - RNA, 19 nt, Artificial Sequence
  Description of Artificial Sequence: Synthetic oligonucleotide
cccaagagguagacagguc

SEQ ID NO: 2166283 - RNA, 19 nt, Artificial Sequence
  Description of Artificial Sequence: Synthetic oligonucleotide
gacuguggcgcuggcuucu

SEQ ID NO: 2166284 - RNA, 19 nt, Artificial Sequence
  Description of Artificial Sequence: Synthetic oligonucleotide
gccuucagagaaggagagc

SEQ ID NO: 2166285 - RNA, 19 nt, Artificial Sequence
  Description of Artificial Sequence: Synthetic oligonucleotide
cuguggcgcuggcuucuug

SEQ ID NO: 2166286 - RNA, 19 nt, Artificial Sequence
  Description of Artificial Sequence: Synthetic oligonucleotide
acgcgucuucaaguaccug

SEQ ID NO: 2166287 - RNA, 19 nt, Artificial Sequence
  Description of Artificial Sequence: Synthetic oligonucleotide
ccgaggugcgccaacaccu

SEQ ID NO: 2166288 - RNA, 19 nt, Artificial Sequence
  Description of Artificial Sequence: Synthetic oligonucleotide
ggcgcggcuaccccaugca

SEQ ID NO: 2166289 - RNA, 19 nt, Artificial Sequence
  Description of Artificial Sequence: Synthetic oligonucleotide
gggcccgaccgcucgagga

SEQ ID NO: 2166290 - RNA, 19 nt, Artificial Sequence
  Description of Artificial Sequence: Synthetic oligonucleotide
ggcaagcggggacguggcc

SEQ ID NO: 2166291 - RNA, 19 nt, Artificial Sequence
  Description of Artificial Sequence: Synthetic oligonucleotide
gcucagugaauaccugcgu

SEQ ID NO: 2166292 - RNA, 19 nt, Artificial Sequence
  Description of Artificial Sequence: Synthetic oligonucleotide
gccugcggccuuccacacg

SEQ ID NO: 2166293 - RNA, 19 nt, Artificial Sequence
  Description of Artificial Sequence: Synthetic oligonucleotide
ggccgggcccgaccgcucg

SEQ ID NO: 2166294 - RNA, 19 nt, Artificial Sequence
  Description of Artificial Sequence: Synthetic oligonucleotide
caccugguuucuuccuucu

SEQ ID NO: 2166295 - RNA, 19 nt, Artificial Sequence
  Description of Artificial Sequence: Synthetic oligonucleotide
cgagcgccuauucuacgug

SEQ ID NO: 2166296 - RNA, 19 nt, Artificial Sequence
  Description of Artificial Sequence: Synthetic oligonucleotide
gcgccuauucuacguggga

SEQ ID NO: 2166297 - RNA, 19 nt, Artificial Sequence
  Description of Artificial Sequence: Synthetic oligonucleotide
cccaaggcgcggcuacccc

SEQ ID NO: 2166298 - RNA, 19 nt, Artificial Sequence
  Description of Artificial Sequence: Synthetic oligonucleotide
gcggagacagggcagggau

SEQ ID NO: 2166299 - RNA, 19 nt, Artificial Sequence
  Description of Artificial Sequence: Synthetic oligonucleotide
ggagacggugcgaaugacu

SEQ ID NO: 2166300 - RNA, 19 nt, Artificial Sequence
  Description of Artificial Sequence: Synthetic oligonucleotide
acggugcgaaugacuucug

SEQ ID NO: 2166301 - RNA, 19 nt, Artificial Sequence
  Description of Artificial Sequence: Synthetic oligonucleotide
gugcgcgcugcgcccggcc

SEQ ID NO: 2166302 - RNA, 19 nt, Artificial Sequence
  Description of Artificial Sequence: Synthetic oligonucleotide
ggagcggagguuccugggu

SEQ ID NO: 2166303 - RNA, 19 nt, Artificial Sequence
  Description of Artificial Sequence: Synthetic oligonucleotide
gcccaagagguagacaggu

SEQ ID NO: 2166304 - RNA, 19 nt, Artificial Sequence
  Description of Artificial Sequence: Synthetic oligonucleotide
gcugcgcccggccaagcaa

SEQ ID NO: 2166305 - RNA, 19 nt, Artificial Sequence
  Description of Artificial Sequence: Synthetic oligonucleotide
cugcgugagcgggcccgcg

SEQ ID NO: 2166306 - RNA, 19 nt, Artificial Sequence
  Description of Artificial Sequence: Synthetic oligonucleotide
cagcgacgacucgaucgug

SEQ ID NO: 2166307 - RNA, 19 nt, Artificial Sequence
  Description of Artificial Sequence: Synthetic oligonucleotide
cugucggguguauggguau

SEQ ID NO: 2166308 - RNA, 19 nt, Artificial Sequence
  Description of Artificial Sequence: Synthetic oligonucleotide
gcccggccaagcaacuacc

SEQ ID NO: 2166309 - RNA, 19 nt, Artificial Sequence
  Description of Artificial Sequence: Synthetic oligonucleotide
cggugcgaaugacuucugc

SEQ ID NO: 2166310 - RNA, 19 nt, Artificial Sequence
  Description of Artificial Sequence: Synthetic oligonucleotide
gcgaaugacuucugccccu

SEQ ID NO: 2166311 - RNA, 19 nt, Artificial Sequence
  Description of Artificial Sequence: Synthetic oligonucleotide
cucccucacaccagccggu

SEQ ID NO: 2166312 - RNA, 19 nt, Artificial Sequence
  Description of Artificial Sequence: Synthetic oligonucleotide
ccaaggcgcggcuacccca

SEQ ID NO: 2166313 - RNA, 19 nt, Artificial Sequence
  Description of Artificial Sequence: Synthetic oligonucleotide
gcggagguuccuggguacc

SEQ ID NO: 2166314 - RNA, 19 nt, Artificial Sequence
  Description of Artificial Sequence: Synthetic oligonucleotide
auucuacgugggagacggu

SEQ ID NO: 2166315 - RNA, 19 nt, Artificial Sequence
  Description of Artificial Sequence: Synthetic oligonucleotide
caaggcgcggcuaccccau

SEQ ID NO: 2166316 - RNA, 19 nt, Artificial Sequence
  Description of Artificial Sequence: Synthetic oligonucleotide
cgaggugcgccaacaccug

SEQ ID NO: 2166317 - RNA, 19 nt, Artificial Sequence
  Description of Artificial Sequence: Synthetic oligonucleotide
gggagacggugcgaaugac

SEQ ID NO: 2166318 - RNA, 19 nt, Artificial Sequence
  Description of Artificial Sequence: Synthetic oligonucleotide
gccaagcaacuaccugaga

SEQ ID NO: 2166319 - RNA, 19 nt, Artificial Sequence
  Description of Artificial Sequence: Synthetic oligonucleotide
cgcccggccaagcaacuac

SEQ ID NO: 2166320 - RNA, 19 nt, Artificial Sequence
  Description of Artificial Sequence: Synthetic oligonucleotide
gcaagcggggacguggccu

SEQ ID NO: 2166321 - RNA, 19 nt, Artificial Sequence
  Description of Artificial Sequence: Synthetic oligonucleotide
ccaccuaccgcgagggcua

SEQ ID NO: 2166322 - RNA, 19 nt, Artificial Sequence
  Description of Artificial Sequence: Synthetic oligonucleotide
gugcacuucgagcgccuau

SEQ ID NO: 2166323 - RNA, 19 nt, Artificial Sequence
  Description of Artificial Sequence: Synthetic oligonucleotide
cgacgacucgaucgugcgc

SEQ ID NO: 2166324 - RNA, 19 nt, Artificial Sequence
  Description of Artificial Sequence: Synthetic oligonucleotide
ccccuacgcugcugugugg

SEQ ID NO: 2166325 - RNA, 19 nt, Artificial Sequence
  Description of Artificial Sequence: Synthetic oligonucleotide
gcgcggcuaccccaugcac

SEQ ID NO: 2166326 - RNA, 19 nt, Artificial Sequence
  Description of Artificial Sequence: Synthetic oligonucleotide
caccuaccgcgagggcuac

SEQ ID NO: 2166327 - RNA, 19 nt, Artificial Sequence
  Description of Artificial Sequence: Synthetic oligonucleotide
gcgugccaccuaccgcgag

SEQ ID NO: 2166328 - RNA, 19 nt, Artificial Sequence
  Description of Artificial Sequence: Synthetic oligonucleotide
cagccuugacuguggcgcu

SEQ ID NO: 2166329 - RNA, 19 nt, Artificial Sequence
  Description of Artificial Sequence: Synthetic oligonucleotide
gcggggacguggccuuccc

SEQ ID NO: 2166330 - RNA, 19 nt, Artificial Sequence
  Description of Artificial Sequence: Synthetic oligonucleotide
cccuacgcugcugugugga

SEQ ID NO: 2166331 - RNA, 19 nt, Artificial Sequence
  Description of Artificial Sequence: Synthetic oligonucleotide
gcuacgcuccucugggcau

SEQ ID NO: 2166332 - RNA, 19 nt, Artificial Sequence
  Description of Artificial Sequence: Synthetic oligonucleotide
ccgcucgaggacugcugac

SEQ ID NO: 2166333 - RNA, 19 nt, Artificial Sequence
  Description of Artificial Sequence: Synthetic oligonucleotide
ccgccaacaugugcaagca

SEQ ID NO: 2166334 - RNA, 19 nt, Artificial Sequence
  Description of Artificial Sequence: Synthetic oligonucleotide
ccugggaaacggccgccga

SEQ ID NO: 2166335 - RNA, 19 nt, Artificial Sequence
  Description of Artificial Sequence: Synthetic oligonucleotide
cgccaacaugugcaagcac

SEQ ID NO: 2166336 - RNA, 19 nt, Artificial Sequence
  Description of Artificial Sequence: Synthetic oligonucleotide
ggcgggugacacagaugac

SEQ ID NO: 2166337 - RNA, 19 nt, Artificial Sequence
  Description of Artificial Sequence: Synthetic oligonucleotide
ccccuucgcuuugcuacgc

SEQ ID NO: 2166338 - RNA, 19 nt, Artificial Sequence
  Description of Artificial Sequence: Synthetic oligonucleotide
gcugccccgccaacaugug

SEQ ID NO: 2166339 - RNA, 19 nt, Artificial Sequence
  Description of Artificial Sequence: Synthetic oligonucleotide
accuaccgcgagggcuacu

SEQ ID NO: 2166340 - RNA, 19 nt, Artificial Sequence
  Description of Artificial Sequence: Synthetic oligonucleotide
gcgcucacguggugcccug

SEQ ID NO: 2166341 - RNA, 19 nt, Artificial Sequence
  Description of Artificial Sequence: Synthetic oligonucleotide
ccuaccgcgagggcuacua

SEQ ID NO: 2166342 - RNA, 19 nt, Artificial Sequence
  Description of Artificial Sequence: Synthetic oligonucleotide
cugcggccuuccacacgca

SEQ ID NO: 2166343 - RNA, 19 nt, Artificial Sequence
  Description of Artificial Sequence: Synthetic oligonucleotide
gggauagaucugggcuguc

SEQ ID NO: 2166344 - RNA, 19 nt, Artificial Sequence
  Description of Artificial Sequence: Synthetic oligonucleotide
cugccccuuggggcugcug

SEQ ID NO: 2166345 - RNA, 19 nt, Artificial Sequence
  Description of Artificial Sequence: Synthetic oligonucleotide
caacccggccgggcccgac

SEQ ID NO: 2166346 - RNA, 19 nt, Artificial Sequence
  Description of Artificial Sequence: Synthetic oligonucleotide
gccccgccaacaugugcaa

SEQ ID NO: 2166347 - RNA, 19 nt, Artificial Sequence
  Description of Artificial Sequence: Synthetic oligonucleotide
cgcugccccgccaacaugu

SEQ ID NO: 2166348 - RNA, 19 nt, Artificial Sequence
  Description of Artificial Sequence: Synthetic oligonucleotide
ccccgccaacaugugcaag

SEQ ID NO: 2166349 - RNA, 19 nt, Artificial Sequence
  Description of Artificial Sequence: Synthetic oligonucleotide
cggcgugcacuucgagcgc

SEQ ID NO: 2166350 - RNA, 19 nt, Artificial Sequence
  Description of Artificial Sequence: Synthetic oligonucleotide
ccccaugcaccgccucauc

SEQ ID NO: 2166351 - RNA, 19 nt, Artificial Sequence
  Description of Artificial Sequence: Synthetic oligonucleotide
cgacggcgugcacuucgag

SEQ ID NO: 2166352 - RNA, 19 nt, Artificial Sequence
  Description of Artificial Sequence: Synthetic oligonucleotide
gcgacggcgugcacuucga

SEQ ID NO: 2166353 - RNA, 19 nt, Artificial Sequence
  Description of Artificial Sequence: Synthetic oligonucleotide
gggcccgcgacggcgugca

SEQ ID NO: 2166354 - RNA, 19 nt, Artificial Sequence
  Description of Artificial Sequence: Synthetic oligonucleotide
gcgcuggcuucuugggacu

SEQ ID NO: 2166355 - RNA, 19 nt, Artificial Sequence
  Description of Artificial Sequence: Synthetic oligonucleotide
ggguuggugcagggauaga

SEQ ID NO: 2166356 - RNA, 19 nt, Artificial Sequence
  Description of Artificial Sequence: Synthetic oligonucleotide
cuacgcuccucugggcauu

SEQ ID NO: 2166357 - RNA, 19 nt, Artificial Sequence
  Description of Artificial Sequence: Synthetic oligonucleotide
ccgaccgcucgaggacugc

SEQ ID NO: 2166358 - RNA, 19 nt, Artificial Sequence
  Description of Artificial Sequence: Synthetic oligonucleotide
ccaggggaacucggggaga

SEQ ID NO: 2166359 - RNA, 19 nt, Artificial Sequence
  Description of Artificial Sequence: Synthetic oligonucleotide
cccggccaagcaacuaccu

SEQ ID NO: 2166360 - RNA, 19 nt, Artificial Sequence
  Description of Artificial Sequence: Synthetic oligonucleotide
gcugggagcggagguuccu

SEQ ID NO: 2166361 - RNA, 19 nt, Artificial Sequence
  Description of Artificial Sequence: Synthetic oligonucleotide
cgggcccgaccgcucgagg

SEQ ID NO: 2166362 - RNA, 19 nt, Artificial Sequence
  Description of Artificial Sequence: Synthetic oligonucleotide
ccgggcccgaccgcucgag

SEQ ID NO: 2166363 - RNA, 19 nt, Artificial Sequence
  Description of Artificial Sequence: Synthetic oligonucleotide
cgcucacguggugcccugg

SEQ ID NO: 2166364 - RNA, 19 nt, Artificial Sequence
  Description of Artificial Sequence: Synthetic oligonucleotide
cggcggcggagacagggca

SEQ ID NO: 2166365 - RNA, 19 nt, Artificial Sequence
  Description of Artificial Sequence: Synthetic oligonucleotide
gcccagcuccuuccgcgcu

SEQ ID NO: 2166366 - RNA, 19 nt, Artificial Sequence
  Description of Artificial Sequence: Synthetic oligonucleotide
cggagguuccuggguacca

SEQ ID NO: 2166367 - RNA, 19 nt, Artificial Sequence
  Description of Artificial Sequence: Synthetic oligonucleotide
cgcuggcuucuugggacuc

SEQ ID NO: 2166368 - RNA, 19 nt, Artificial Sequence
  Description of Artificial Sequence: Synthetic oligonucleotide
gcccgcgacggcgugcacu

SEQ ID NO: 2166369 - RNA, 19 nt, Artificial Sequence
  Description of Artificial Sequence: Synthetic oligonucleotide
cccgcgacggcgugcacuu

SEQ ID NO: 2166370 - RNA, 19 nt, Artificial Sequence
  Description of Artificial Sequence: Synthetic oligonucleotide
gccgggcccgaccgcucga

SEQ ID NO: 2166371 - RNA, 19 nt, Artificial Sequence
  Description of Artificial Sequence: Synthetic oligonucleotide
gcccgaccgcucgaggacu

SEQ ID NO: 2166372 - RNA, 19 nt, Artificial Sequence
  Description of Artificial Sequence: Synthetic oligonucleotide
cccggccgggcccgaccgc

SEQ ID NO: 2166373 - RNA, 19 nt, Artificial Sequence
  Description of Artificial Sequence: Synthetic oligonucleotide
cccuucgcuuugcuacgcu

SEQ ID NO: 2166374 - RNA, 19 nt, Artificial Sequence
  Description of Artificial Sequence: Synthetic oligonucleotide
cgcugcgcccggccaagca

SEQ ID NO: 2166375 - RNA, 19 nt, Artificial Sequence
  Description of Artificial Sequence: Synthetic oligonucleotide
gcgcugcgcccggccaagc

SEQ ID NO: 2166376 - RNA, 19 nt, Artificial Sequence
  Description of Artificial Sequence: Synthetic oligonucleotide
gcgugcacuucgagcgccu

SEQ ID NO: 2166377 - RNA, 19 nt, Artificial Sequence
  Description of Artificial Sequence: Synthetic oligonucleotide
gcgcccggccaagcaacua

SEQ ID NO: 2166378 - RNA, 19 nt, Artificial Sequence
  Description of Artificial Sequence: Synthetic oligonucleotide
cgugcgcgcugcgcccggc

SEQ ID NO: 2166379 - RNA, 19 nt, Artificial Sequence
  Description of Artificial Sequence: Synthetic oligonucleotide
gcaacccggccgggcccga

SEQ ID NO: 2166380 - RNA, 19 nt, Artificial Sequence
  Description of Artificial Sequence: Synthetic oligonucleotide
cgugggagacggugcgaau

SEQ ID NO: 2166381 - RNA, 19 nt, Artificial Sequence
  Description of Artificial Sequence: Synthetic oligonucleotide
ggccgccgaggugcgccaa

SEQ ID NO: 2166382 - RNA, 19 nt, Artificial Sequence
  Description of Artificial Sequence: Synthetic oligonucleotide
ccgcgagggcuacuacaau

SEQ ID NO: 2166383 - RNA, 19 nt, Artificial Sequence
  Description of Artificial Sequence: Synthetic oligonucleotide
cgugcacuucgagcgccua

SEQ ID NO: 2166384 - RNA, 19 nt, Artificial Sequence
  Description of Artificial Sequence: Synthetic oligonucleotide
cgaccgcucgaggacugcu

SEQ ID NO: 2166385 - RNA, 19 nt, Artificial Sequence
  Description of Artificial Sequence: Synthetic oligonucleotide
ccgccucauccaggaggca

SEQ ID NO: 2166386 - RNA, 19 nt, Artificial Sequence
  Description of Artificial Sequence: Synthetic oligonucleotide
ccgcgacggcgugcacuuc

SEQ ID NO: 2166387 - RNA, 19 nt, Artificial Sequence
  Description of Artificial Sequence: Synthetic oligonucleotide
cgacucgaucgugcgcgcu

SEQ ID NO: 2166388 - RNA, 19 nt, Artificial Sequence
  Description of Artificial Sequence: Synthetic oligonucleotide
aaaguuuaguaauucacac

SEQ ID NO: 2166389 - RNA, 19 nt, Artificial Sequence
  Description of Artificial Sequence: Synthetic oligonucleotide
aguuuaguaauucacacac

SEQ ID NO: 2166390 - RNA, 19 nt, Artificial Sequence
  Description of Artificial Sequence: Synthetic oligonucleotide
aaugaaucccuuuaucccc

SEQ ID NO: 2166391 - RNA, 19 nt, Artificial Sequence
  Description of Artificial Sequence: Synthetic oligonucleotide
aauguagaauuucacacgg

SEQ ID NO: 2166392 - RNA, 19 nt, Artificial Sequence
  Description of Artificial Sequence: Synthetic oligonucleotide
uucaauaaaacugacaugc

SEQ ID NO: 2166393 - RNA, 19 nt, Artificial Sequence
  Description of Artificial Sequence: Synthetic oligonucleotide
aaaagcacaaagcauguuc

SEQ ID NO: 2166394 - RNA, 19 nt, Artificial Sequence
  Description of Artificial Sequence: Synthetic oligonucleotide
aaauuggccacucuguggg

SEQ ID NO: 2166395 - RNA, 19 nt, Artificial Sequence
  Description of Artificial Sequence: Synthetic oligonucleotide
aauucacacacucaagcgg

SEQ ID NO: 2166396 - RNA, 19 nt, Artificial Sequence
  Description of Artificial Sequence: Synthetic oligonucleotide
aaaaucguguagaacaagc

SEQ ID NO: 2166397 - RNA, 19 nt, Artificial Sequence
  Description of Artificial Sequence: Synthetic oligonucleotide
ucuaguaggagccacuucc

SEQ ID NO: 2166398 - RNA, 19 nt, Artificial Sequence
  Description of Artificial Sequence: Synthetic oligonucleotide
ucgaaauucaaauuggcca

SEQ ID NO: 2166399 - RNA, 19 nt, Artificial Sequence
  Description of Artificial Sequence: Synthetic oligonucleotide
ucaauguagaauuucacac

SEQ ID NO: 2166400 - RNA, 19 nt, Artificial Sequence
  Description of Artificial Sequence: Synthetic oligonucleotide
aaaguguggcaacaauugc

SEQ ID NO: 2166401 - RNA, 19 nt, Artificial Sequence
  Description of Artificial Sequence: Synthetic oligonucleotide
ggaacgauuaucuucaacg

SEQ ID NO: 2166402 - RNA, 19 nt, Artificial Sequence
  Description of Artificial Sequence: Synthetic oligonucleotide
auagacacuugcuugcugc

SEQ ID NO: 2166403 - RNA, 19 nt, Artificial Sequence
  Description of Artificial Sequence: Synthetic oligonucleotide
aacgauuaucuucaacgac

SEQ ID NO: 2166404 - RNA, 19 nt, Artificial Sequence
  Description of Artificial Sequence: Synthetic oligonucleotide
uguagaacaagccaccugu

SEQ ID NO: 2166405 - RNA, 19 nt, Artificial Sequence
  Description of Artificial Sequence: Synthetic oligonucleotide
cuuucugagaaguugagac

SEQ ID NO: 2166406 - RNA, 19 nt, Artificial Sequence
  Description of Artificial Sequence: Synthetic oligonucleotide
uccccaaacacacugauca

SEQ ID NO: 2166407 - RNA, 19 nt, Artificial Sequence
  Description of Artificial Sequence: Synthetic oligonucleotide
aauaaaacugacaugcugu

SEQ ID NO: 2166408 - RNA, 19 nt, Artificial Sequence
  Description of Artificial Sequence: Synthetic oligonucleotide
aauugcuugcccaaggaac

SEQ ID NO: 2166409 - RNA, 19 nt, Artificial Sequence
  Description of Artificial Sequence: Synthetic oligonucleotide
aaacaguucuuugaaaauc

SEQ ID NO: 2166410 - RNA, 19 nt, Artificial Sequence
  Description of Artificial Sequence: Synthetic oligonucleotide
ucuuuuaacucuuuuggga

SEQ ID NO: 2166411 - RNA, 19 nt, Artificial Sequence
  Description of Artificial Sequence: Synthetic oligonucleotide
ucugugaauagacacuugc

SEQ ID NO: 2166412 - RNA, 19 nt, Artificial Sequence
  Description of Artificial Sequence: Synthetic oligonucleotide
uuguucauacucaugaacu

SEQ ID NO: 2166413 - RNA, 19 nt, Artificial Sequence
  Description of Artificial Sequence: Synthetic oligonucleotide
aacaguucuuugaaaaucg

SEQ ID NO: 2166414 - RNA, 19 nt, Artificial Sequence
  Description of Artificial Sequence: Synthetic oligonucleotide
acgacaauagaucuaguag

SEQ ID NO: 2166415 - RNA, 19 nt, Artificial Sequence
  Description of Artificial Sequence: Synthetic oligonucleotide
caauagaucuaguaggagc

SEQ ID NO: 2166416 - RNA, 19 nt, Artificial Sequence
  Description of Artificial Sequence: Synthetic oligonucleotide
ucuucaacgacaauagauc

SEQ ID NO: 2166417 - RNA, 19 nt, Artificial Sequence
  Description of Artificial Sequence: Synthetic oligonucleotide
guaauucacacacucaagc

SEQ ID NO: 2166418 - RNA, 19 nt, Artificial Sequence
  Description of Artificial Sequence: Synthetic oligonucleotide
aaaaccucagucugguuug

SEQ ID NO: 2166419 - RNA, 19 nt, Artificial Sequence
  Description of Artificial Sequence: Synthetic oligonucleotide
aaucguguagaacaagcca

SEQ ID NO: 2166420 - RNA, 19 nt, Artificial Sequence
  Description of Artificial Sequence: Synthetic oligonucleotide
ucaacgacaauagaucuag

SEQ ID NO: 2166421 - RNA, 19 nt, Artificial Sequence
  Description of Artificial Sequence: Synthetic oligonucleotide
acacggaugcgcuuuagcc

SEQ ID NO: 2166422 - RNA, 19 nt, Artificial Sequence
  Description of Artificial Sequence: Synthetic oligonucleotide
auacucaugaacucucacg

SEQ ID NO: 2166423 - RNA, 19 nt, Artificial Sequence
  Description of Artificial Sequence: Synthetic oligonucleotide
uuuguucauacucaugaac

SEQ ID NO: 2166424 - RNA, 19 nt, Artificial Sequence
  Description of Artificial Sequence: Synthetic oligonucleotide
ugaauagacacuugcuugc

SEQ ID NO: 2166425 - RNA, 19 nt, Artificial Sequence
  Description of Artificial Sequence: Synthetic oligonucleotide
uacucaugaacucucacgu

SEQ ID NO: 2166426 - RNA, 19 nt, Artificial Sequence
  Description of Artificial Sequence: Synthetic oligonucleotide
ucuaaaguuuaguaauuca

SEQ ID NO: 2166427 - RNA, 19 nt, Artificial Sequence
  Description of Artificial Sequence: Synthetic oligonucleotide
ugauguuaggacuggauga

SEQ ID NO: 2166428 - RNA, 19 nt, Artificial Sequence
  Description of Artificial Sequence: Synthetic oligonucleotide
aaacacacugaucaccuca

SEQ ID NO: 2166429 - RNA, 19 nt, Artificial Sequence
  Description of Artificial Sequence: Synthetic oligonucleotide
ucguagaaaagcacaaagc

SEQ ID NO: 2166430 - RNA, 19 nt, Artificial Sequence
  Description of Artificial Sequence: Synthetic oligonucleotide
uuuaacucuuuugggaacg

SEQ ID NO: 2166431 - RNA, 19 nt, Artificial Sequence
  Description of Artificial Sequence: Synthetic oligonucleotide
aacaagccaccuguaaugc

SEQ ID NO: 2166432 - RNA, 19 nt, Artificial Sequence
  Description of Artificial Sequence: Synthetic oligonucleotide
uguagaauuucacacggau

SEQ ID NO: 2166433 - RNA, 19 nt, Artificial Sequence
  Description of Artificial Sequence: Synthetic oligonucleotide
aaguuuaguaauucacaca

SEQ ID NO: 2166434 - RNA, 19 nt, Artificial Sequence
  Description of Artificial Sequence: Synthetic oligonucleotide
auaaaacugacaugcuguc

SEQ ID NO: 2166435 - RNA, 19 nt, Artificial Sequence
  Description of Artificial Sequence: Synthetic oligonucleotide
uucagagcccucaauguag

SEQ ID NO: 2166436 - RNA, 19 nt, Artificial Sequence
  Description of Artificial Sequence: Synthetic oligonucleotide
uaucgaaauucaaauuggc

SEQ ID NO: 2166437 - RNA, 19 nt, Artificial Sequence
  Description of Artificial Sequence: Synthetic oligonucleotide
ucugguuuguucauacuca

SEQ ID NO: 2166438 - RNA, 19 nt, Artificial Sequence
  Description of Artificial Sequence: Synthetic oligonucleotide
caaaguguggcaacaauug

SEQ ID NO: 2166439 - RNA, 19 nt, Artificial Sequence
  Description of Artificial Sequence: Synthetic oligonucleotide
aaguaggugaagucucuuc

SEQ ID NO: 2166440 - RNA, 19 nt, Artificial Sequence
  Description of Artificial Sequence: Synthetic oligonucleotide
uucccauauaugauguuag

SEQ ID NO: 2166441 - RNA, 19 nt, Artificial Sequence
  Description of Artificial Sequence: Synthetic oligonucleotide
uacguaucgaaauucaaau

SEQ ID NO: 2166442 - RNA, 19 nt, Artificial Sequence
  Description of Artificial Sequence: Synthetic oligonucleotide
aagcauguucaccaaaccu

SEQ ID NO: 2166443 - RNA, 19 nt, Artificial Sequence
  Description of Artificial Sequence: Synthetic oligonucleotide
aucgaaauucaaauuggcc

SEQ ID NO: 2166444 - RNA, 19 nt, Artificial Sequence
  Description of Artificial Sequence: Synthetic oligonucleotide
uuugcuacauuucaugauu

SEQ ID NO: 2166445 - RNA, 19 nt, Artificial Sequence
  Description of Artificial Sequence: Synthetic oligonucleotide
gugaauagacacuugcuug

SEQ ID NO: 2166446 - RNA, 19 nt, Artificial Sequence
  Description of Artificial Sequence: Synthetic oligonucleotide
uguuaggacuggaugaaga

SEQ ID NO: 2166447 - RNA, 19 nt, Artificial Sequence
  Description of Artificial Sequence: Synthetic oligonucleotide
uguggcaacaauugcuugc

SEQ ID NO: 2166448 - RNA, 19 nt, Artificial Sequence
  Description of Artificial Sequence: Synthetic oligonucleotide
guaucgaaauucaaauugg

SEQ ID NO: 2166449 - RNA, 19 nt, Artificial Sequence
  Description of Artificial Sequence: Synthetic oligonucleotide
aguucuuugaaaaucgugu

SEQ ID NO: 2166450 - RNA, 19 nt, Artificial Sequence
  Description of Artificial Sequence: Synthetic oligonucleotide
ucacguuauacucacuuuc

SEQ ID NO: 2166451 - RNA, 19 nt, Artificial Sequence
  Description of Artificial Sequence: Synthetic oligonucleotide
ugaacucucacguuauacu

SEQ ID NO: 2166452 - RNA, 19 nt, Artificial Sequence
  Description of Artificial Sequence: Synthetic oligonucleotide
guugugaagaucacagugg

SEQ ID NO: 2166453 - RNA, 19 nt, Artificial Sequence
  Description of Artificial Sequence: Synthetic oligonucleotide
ucacuuucugagaaguuga

SEQ ID NO: 2166454 - RNA, 19 nt, Artificial Sequence
  Description of Artificial Sequence: Synthetic oligonucleotide
aacgacaauagaucuagua

SEQ ID NO: 2166455 - RNA, 19 nt, Artificial Sequence
  Description of Artificial Sequence: Synthetic oligonucleotide
uuuucuagggcuuucccau

SEQ ID NO: 2166456 - RNA, 19 nt, Artificial Sequence
  Description of Artificial Sequence: Synthetic oligonucleotide
aacccaauagcaguucuag

SEQ ID NO: 2166457 - RNA, 19 nt, Artificial Sequence
  Description of Artificial Sequence: Synthetic oligonucleotide
aucguguagaacaagccac

SEQ ID NO: 2166458 - RNA, 19 nt, Artificial Sequence
  Description of Artificial Sequence: Synthetic oligonucleotide
ugguucagagcccucaaug

SEQ ID NO: 2166459 - RNA, 19 nt, Artificial Sequence
  Description of Artificial Sequence: Synthetic oligonucleotide
acucucacguuauacucac

SEQ ID NO: 2166460 - RNA, 19 nt, Artificial Sequence
  Description of Artificial Sequence: Synthetic oligonucleotide
uauaugauguuaggacugg

SEQ ID NO: 2166461 - RNA, 19 nt, Artificial Sequence
  Description of Artificial Sequence: Synthetic oligonucleotide
uucugggcgaacccaauag

SEQ ID NO: 2166462 - RNA, 19 nt, Artificial Sequence
  Description of Artificial Sequence: Synthetic oligonucleotide
aaauucaaauuggccacuc

SEQ ID NO: 2166463 - RNA, 19 nt, Artificial Sequence
  Description of Artificial Sequence: Synthetic oligonucleotide
acggaugcgcuuuagcccg

SEQ ID NO: 2166464 - RNA, 19 nt, Artificial Sequence
  Description of Artificial Sequence: Synthetic oligonucleotide
aauagcaguucuaggaugu

SEQ ID NO: 2166465 - RNA, 19 nt, Artificial Sequence
  Description of Artificial Sequence: Synthetic oligonucleotide
ugcacaacucguagaaaag

SEQ ID NO: 2166466 - RNA, 19 nt, Artificial Sequence
  Description of Artificial Sequence: Synthetic oligonucleotide
ugaaaaucguguagaacaa

SEQ ID NO: 2166467 - RNA, 19 nt, Artificial Sequence
  Description of Artificial Sequence: Synthetic oligonucleotide
uaucaaguaggugaagucu

SEQ ID NO: 2166468 - RNA, 19 nt, Artificial Sequence
  Description of Artificial Sequence: Synthetic oligonucleotide
aaguugagacgcugguuuc

SEQ ID NO: 2166469 - RNA, 19 nt, Artificial Sequence
  Description of Artificial Sequence: Synthetic oligonucleotide
ucugauuucugugaauaga

SEQ ID NO: 2166470 - RNA, 19 nt, Artificial Sequence
  Description of Artificial Sequence: Synthetic oligonucleotide
aggauguacuguuuucuuc

SEQ ID NO: 2166471 - RNA, 19 nt, Artificial Sequence
  Description of Artificial Sequence: Synthetic oligonucleotide
caaauuggccacucugugg

SEQ ID NO: 2166472 - RNA, 19 nt, Artificial Sequence
  Description of Artificial Sequence: Synthetic oligonucleotide
aaauacguaucgaaauuca

SEQ ID NO: 2166473 - RNA, 19 nt, Artificial Sequence
  Description of Artificial Sequence: Synthetic oligonucleotide
acugacaugcugucuccgc

SEQ ID NO: 2166474 - RNA, 19 nt, Artificial Sequence
  Description of Artificial Sequence: Synthetic oligonucleotide
gguuuguucauacucauga

SEQ ID NO: 2166475 - RNA, 19 nt, Artificial Sequence
  Description of Artificial Sequence: Synthetic oligonucleotide
aaucccuuuauccccuaca

SEQ ID NO: 2166476 - RNA, 19 nt, Artificial Sequence
  Description of Artificial Sequence: Synthetic oligonucleotide
augaacucucacguuauac

SEQ ID NO: 2166477 - RNA, 19 nt, Artificial Sequence
  Description of Artificial Sequence: Synthetic oligonucleotide
cauauucaauaaaacugac

SEQ ID NO: 2166478 - RNA, 19 nt, Artificial Sequence
  Description of Artificial Sequence: Synthetic oligonucleotide
cacacugaucaccucaggg

SEQ ID NO: 2166479 - RNA, 19 nt, Artificial Sequence
  Description of Artificial Sequence: Synthetic oligonucleotide
uucauacucaugaacucuc

SEQ ID NO: 2166480 - RNA, 19 nt, Artificial Sequence
  Description of Artificial Sequence: Synthetic oligonucleotide
cuuuauccccuacaggaag

SEQ ID NO: 2166481 - RNA, 19 nt, Artificial Sequence
  Description of Artificial Sequence: Synthetic oligonucleotide
uuuuaacucuuuugggaac

SEQ ID NO: 2166482 - RNA, 19 nt, Artificial Sequence
  Description of Artificial Sequence: Synthetic oligonucleotide
ugauuucugugaauagaca

SEQ ID NO: 2166483 - RNA, 19 nt, Artificial Sequence
  Description of Artificial Sequence: Synthetic oligonucleotide
acuuccacaaauacguauc

SEQ ID NO: 2166484 - RNA, 19 nt, Artificial Sequence
  Description of Artificial Sequence: Synthetic oligonucleotide
cuuccacaaauacguaucg

SEQ ID NO: 2166485 - RNA, 19 nt, Artificial Sequence
  Description of Artificial Sequence: Synthetic oligonucleotide
aauucaaauuggccacucu

SEQ ID NO: 2166486 - RNA, 19 nt, Artificial Sequence
  Description of Artificial Sequence: Synthetic oligonucleotide
ugcaagcaagcucugguga

SEQ ID NO: 2166487 - RNA, 19 nt, Artificial Sequence
  Description of Artificial Sequence: Synthetic oligonucleotide
gaacucucacguuauacuc

SEQ ID NO: 2166488 - RNA, 19 nt, Artificial Sequence
  Description of Artificial Sequence: Synthetic oligonucleotide
auugcuugcccaaggaacg

SEQ ID NO: 2166489 - RNA, 19 nt, Artificial Sequence
  Description of Artificial Sequence: Synthetic oligonucleotide
ucgacauuuccccguagcc

SEQ ID NO: 2166490 - RNA, 19 nt, Artificial Sequence
  Description of Artificial Sequence: Synthetic oligonucleotide
ucccauauaugauguuagg

SEQ ID NO: 2166491 - RNA, 19 nt, Artificial Sequence
  Description of Artificial Sequence: Synthetic oligonucleotide
auauaugauguuaggacug

SEQ ID NO: 2166492 - RNA, 19 nt, Artificial Sequence
  Description of Artificial Sequence: Synthetic oligonucleotide
uuauacucacuuucugugu

SEQ ID NO: 2166493 - RNA, 19 nt, Artificial Sequence
  Description of Artificial Sequence: Synthetic oligonucleotide
ucucacguuauacucacuu

SEQ ID NO: 2166494 - RNA, 19 nt, Artificial Sequence
  Description of Artificial Sequence: Synthetic oligonucleotide
guaggugaagucucuuccg

SEQ ID NO: 2166495 - RNA, 19 nt, Artificial Sequence
  Description of Artificial Sequence: Synthetic oligonucleotide
guaaugcugacuccgaaga

SEQ ID NO: 2166496 - RNA, 19 nt, Artificial Sequence
  Description of Artificial Sequence: Synthetic oligonucleotide
cucaauguagaauuucaca

SEQ ID NO: 2166497 - RNA, 19 nt, Artificial Sequence
  Description of Artificial Sequence: Synthetic oligonucleotide
gaacgauuaucuucaacga

SEQ ID NO: 2166498 - RNA, 19 nt, Artificial Sequence
  Description of Artificial Sequence: Synthetic oligonucleotide
gggacugcaacuucuaaag

SEQ ID NO: 2166499 - RNA, 19 nt, Artificial Sequence
  Description of Artificial Sequence: Synthetic oligonucleotide
aaaauuugcuacauuucau

SEQ ID NO: 2166500 - RNA, 19 nt, Artificial Sequence
  Description of Artificial Sequence: Synthetic oligonucleotide
acaaauacguaucgaaauu

SEQ ID NO: 2166501 - RNA, 19 nt, Artificial Sequence
  Description of Artificial Sequence: Synthetic oligonucleotide
aacggggcagcuucuccac

SEQ ID NO: 2166502 - RNA, 19 nt, Artificial Sequence
  Description of Artificial Sequence: Synthetic oligonucleotide
agcauguucaccaaaccug

SEQ ID NO: 2166503 - RNA, 19 nt, Artificial Sequence
  Description of Artificial Sequence: Synthetic oligonucleotide
aaguguggcaacaauugcu

SEQ ID NO: 2166504 - RNA, 19 nt, Artificial Sequence
  Description of Artificial Sequence: Synthetic oligonucleotide
cacgucucgacauuucccc

SEQ ID NO: 2166505 - RNA, 19 nt, Artificial Sequence
  Description of Artificial Sequence: Synthetic oligonucleotide
gaagagcaccacuaucaag

SEQ ID NO: 2166506 - RNA, 19 nt, Artificial Sequence
  Description of Artificial Sequence: Synthetic oligonucleotide
ucguguagaacaagccacc

SEQ ID NO: 2166507 - RNA, 19 nt, Artificial Sequence
  Description of Artificial Sequence: Synthetic oligonucleotide
uaaugcugacuccgaagag

SEQ ID NO: 2166508 - RNA, 19 nt, Artificial Sequence
  Description of Artificial Sequence: Synthetic oligonucleotide
aucaaguaggugaagucuc

SEQ ID NO: 2166509 - RNA, 19 nt, Artificial Sequence
  Description of Artificial Sequence: Synthetic oligonucleotide
acgauuaucuucaacgaca

SEQ ID NO: 2166510 - RNA, 19 nt, Artificial Sequence
  Description of Artificial Sequence: Synthetic oligonucleotide
ugggcgaacccaauagcag

SEQ ID NO: 2166511 - RNA, 19 nt, Artificial Sequence
  Description of Artificial Sequence: Synthetic oligonucleotide
acaacucguagaaaagcac

SEQ ID NO: 2166512 - RNA, 19 nt, Artificial Sequence
  Description of Artificial Sequence: Synthetic oligonucleotide
cuaucaaguaggugaaguc

SEQ ID NO: 2166513 - RNA, 19 nt, Artificial Sequence
  Description of Artificial Sequence: Synthetic oligonucleotide
ucccuuuauccccuacagg

SEQ ID NO: 2166514 - RNA, 19 nt, Artificial Sequence
  Description of Artificial Sequence: Synthetic oligonucleotide
accuguaaugcugacuccg

SEQ ID NO: 2166515 - RNA, 19 nt, Artificial Sequence
  Description of Artificial Sequence: Synthetic oligonucleotide
caaauacguaucgaaauuc

SEQ ID NO: 2166516 - RNA, 19 nt, Artificial Sequence
  Description of Artificial Sequence: Synthetic oligonucleotide
ucuuuugggaacgauuauc

SEQ ID NO: 2166517 - RNA, 19 nt, Artificial Sequence
  Description of Artificial Sequence: Synthetic oligonucleotide
auguucaccaaaccuguga

SEQ ID NO: 2166518 - RNA, 19 nt, Artificial Sequence
  Description of Artificial Sequence: Synthetic oligonucleotide
accucagucugguuuguuc

SEQ ID NO: 2166519 - RNA, 19 nt, Artificial Sequence
  Description of Artificial Sequence: Synthetic oligonucleotide
uuccacaugcacuguuccg

SEQ ID NO: 2166520 - RNA, 19 nt, Artificial Sequence
  Description of Artificial Sequence: Synthetic oligonucleotide
gacaauagaucuaguagga

SEQ ID NO: 2166521 - RNA, 19 nt, Artificial Sequence
  Description of Artificial Sequence: Synthetic oligonucleotide
acaggcuccccaaacacac

SEQ ID NO: 2166522 - RNA, 19 nt, Artificial Sequence
  Description of Artificial Sequence: Synthetic oligonucleotide
caauagcaguucuaggaug

SEQ ID NO: 2166523 - RNA, 19 nt, Artificial Sequence
  Description of Artificial Sequence: Synthetic oligonucleotide
ucugggcgaacccaauagc

SEQ ID NO: 2166524 - RNA, 19 nt, Artificial Sequence
  Description of Artificial Sequence: Synthetic oligonucleotide
aguugagacgcugguuucc

SEQ ID NO: 2166525 - RNA, 19 nt, Artificial Sequence
  Description of Artificial Sequence: Synthetic oligonucleotide
cgacaauagaucuaguagg

SEQ ID NO: 2166526 - RNA, 19 nt, Artificial Sequence
  Description of Artificial Sequence: Synthetic oligonucleotide
gaaaaucguguagaacaag

SEQ ID NO: 2166527 - RNA, 19 nt, Artificial Sequence
  Description of Artificial Sequence: Synthetic oligonucleotide
aucuucaacgacaauagau

SEQ ID NO: 2166528 - RNA, 19 nt, Artificial Sequence
  Description of Artificial Sequence: Synthetic oligonucleotide
cacggaugcgcuuuagccc

SEQ ID NO: 2166529 - RNA, 19 nt, Artificial Sequence
  Description of Artificial Sequence: Synthetic oligonucleotide
aguaggagccacuuccaca

SEQ ID NO: 2166530 - RNA, 19 nt, Artificial Sequence
  Description of Artificial Sequence: Synthetic oligonucleotide
cguaucgaaauucaaauug

SEQ ID NO: 2166531 - RNA, 19 nt, Artificial Sequence
  Description of Artificial Sequence: Synthetic oligonucleotide
uuucccauauaugauguua

SEQ ID NO: 2166532 - RNA, 19 nt, Artificial Sequence
  Description of Artificial Sequence: Synthetic oligonucleotide
ucucugauuucugugaaua

SEQ ID NO: 2166533 - RNA, 19 nt, Artificial Sequence
  Description of Artificial Sequence: Synthetic oligonucleotide
cauauaugauguuaggacu

SEQ ID NO: 2166534 - RNA, 19 nt, Artificial Sequence
  Description of Artificial Sequence: Synthetic oligonucleotide
uccccuacaggaagcagca

SEQ ID NO: 2166535 - RNA, 19 nt, Artificial Sequence
  Description of Artificial Sequence: Synthetic oligonucleotide
cacugaucaccucagggug

SEQ ID NO: 2166536 - RNA, 19 nt, Artificial Sequence
  Description of Artificial Sequence: Synthetic oligonucleotide
uaucuucaacgacaauaga

SEQ ID NO: 2166537 - RNA, 19 nt, Artificial Sequence
  Description of Artificial Sequence: Synthetic oligonucleotide
aaccugugaggcuucggga

SEQ ID NO: 2166538 - RNA, 19 nt, Artificial Sequence
  Description of Artificial Sequence: Synthetic oligonucleotide
gugaagaucacaguggcaa

SEQ ID NO: 2166539 - RNA, 19 nt, Artificial Sequence
  Description of Artificial Sequence: Synthetic oligonucleotide
ucaugaacucucacguuau

SEQ ID NO: 2166540 - RNA, 19 nt, Artificial Sequence
  Description of Artificial Sequence: Synthetic oligonucleotide
gaggcuucgggacugcaac

SEQ ID NO: 2166541 - RNA, 19 nt, Artificial Sequence
  Description of Artificial Sequence: Synthetic oligonucleotide
aauacguaucgaaauucaa

SEQ ID NO: 2166542 - RNA, 19 nt, Artificial Sequence
  Description of Artificial Sequence: Synthetic oligonucleotide
caaggaacggggcagcuuc

SEQ ID NO: 2166543 - RNA, 19 nt, Artificial Sequence
  Description of Artificial Sequence: Synthetic oligonucleotide
agaauuucacacggaugcg

SEQ ID NO: 2166544 - RNA, 19 nt, Artificial Sequence
  Description of Artificial Sequence: Synthetic oligonucleotide
ugauucuuuuaacucuuuu

SEQ ID NO: 2166545 - RNA, 19 nt, Artificial Sequence
  Description of Artificial Sequence: Synthetic oligonucleotide
uucaacgacaauagaucua

SEQ ID NO: 2166546 - RNA, 19 nt, Artificial Sequence
  Description of Artificial Sequence: Synthetic oligonucleotide
guagaauuucacacggaug

SEQ ID NO: 2166547 - RNA, 19 nt, Artificial Sequence
  Description of Artificial Sequence: Synthetic oligonucleotide
ugacaugcugucuccgccc

SEQ ID NO: 2166548 - RNA, 19 nt, Artificial Sequence
  Description of Artificial Sequence: Synthetic oligonucleotide
cacaacucguagaaaagca

SEQ ID NO: 2166549 - RNA, 19 nt, Artificial Sequence
  Description of Artificial Sequence: Synthetic oligonucleotide
caacucguagaaaagcaca

SEQ ID NO: 2166550 - RNA, 19 nt, Artificial Sequence
  Description of Artificial Sequence: Synthetic oligonucleotide
acguuauacucacuuucug

SEQ ID NO: 2166551 - RNA, 19 nt, Artificial Sequence
  Description of Artificial Sequence: Synthetic oligonucleotide
uucuaggauguacuguuuu

SEQ ID NO: 2166552 - RNA, 19 nt, Artificial Sequence
  Description of Artificial Sequence: Synthetic oligonucleotide
aacugacaugcugucuccg

SEQ ID NO: 2166553 - RNA, 19 nt, Artificial Sequence
  Description of Artificial Sequence: Synthetic oligonucleotide
aacucucacguuauacuca

SEQ ID NO: 2166554 - RNA, 19 nt, Artificial Sequence
  Description of Artificial Sequence: Synthetic oligonucleotide
acccaauagcaguucuagg

SEQ ID NO: 2166555 - RNA, 19 nt, Artificial Sequence
  Description of Artificial Sequence: Synthetic oligonucleotide
cagguuugauucuuuuaac

SEQ ID NO: 2166556 - RNA, 19 nt, Artificial Sequence
  Description of Artificial Sequence: Synthetic oligonucleotide
auucacacacucaagcgga

SEQ ID NO: 2166557 - RNA, 19 nt, Artificial Sequence
  Description of Artificial Sequence: Synthetic oligonucleotide
gaaguugagacgcugguuu

SEQ ID NO: 2166558 - RNA, 19 nt, Artificial Sequence
  Description of Artificial Sequence: Synthetic oligonucleotide
ugagacgcugguuuccccu

SEQ ID NO: 2166559 - RNA, 19 nt, Artificial Sequence
  Description of Artificial Sequence: Synthetic oligonucleotide
ggaugaagaaaacaguucu

SEQ ID NO: 2166560 - RNA, 19 nt, Artificial Sequence
  Description of Artificial Sequence: Synthetic oligonucleotide
cuuuugggaacgauuaucu

SEQ ID NO: 2166561 - RNA, 19 nt, Artificial Sequence
  Description of Artificial Sequence: Synthetic oligonucleotide
uuaggacuggaugaagaaa

SEQ ID NO: 2166562 - RNA, 19 nt, Artificial Sequence
  Description of Artificial Sequence: Synthetic oligonucleotide
ucugugggugcucuuccac

SEQ ID NO: 2166563 - RNA, 19 nt, Artificial Sequence
  Description of Artificial Sequence: Synthetic oligonucleotide
ugagcacaaaguguggcaa

SEQ ID NO: 2166564 - RNA, 19 nt, Artificial Sequence
  Description of Artificial Sequence: Synthetic oligonucleotide
agaaaagcacaaagcaugu

SEQ ID NO: 2166565 - RNA, 19 nt, Artificial Sequence
  Description of Artificial Sequence: Synthetic oligonucleotide
ugaagucucuuccggcuuc

SEQ ID NO: 2166566 - RNA, 19 nt, Artificial Sequence
  Description of Artificial Sequence: Synthetic oligonucleotide
gagcaccacuaucaaguag

SEQ ID NO: 2166567 - RNA, 19 nt, Artificial Sequence
  Description of Artificial Sequence: Synthetic oligonucleotide
auacguaucgaaauucaaa

SEQ ID NO: 2166568 - RNA, 19 nt, Artificial Sequence
  Description of Artificial Sequence: Synthetic oligonucleotide
cagucugguuuguucauac

SEQ ID NO: 2166569 - RNA, 19 nt, Artificial Sequence
  Description of Artificial Sequence: Synthetic oligonucleotide
aacucuuuugggaacgauu

SEQ ID NO: 2166570 - RNA, 19 nt, Artificial Sequence
  Description of Artificial Sequence: Synthetic oligonucleotide
uugcccaaggaacggggca

SEQ ID NO: 2166571 - RNA, 19 nt, Artificial Sequence
  Description of Artificial Sequence: Synthetic oligonucleotide
cacuuucugugugacauac

SEQ ID NO: 2166572 - RNA, 19 nt, Artificial Sequence
  Description of Artificial Sequence: Synthetic oligonucleotide
guuaggacuggaugaagaa

SEQ ID NO: 2166573 - RNA, 19 nt, Artificial Sequence
  Description of Artificial Sequence: Synthetic oligonucleotide
ucuuccggcuuccuucacu

SEQ ID NO: 2166574 - RNA, 19 nt, Artificial Sequence
  Description of Artificial Sequence: Synthetic oligonucleotide
cugcacaacucguagaaaa

SEQ ID NO: 2166575 - RNA, 19 nt, Artificial Sequence
  Description of Artificial Sequence: Synthetic oligonucleotide
acucuuuugggaacgauua

SEQ ID NO: 2166576 - RNA, 19 nt, Artificial Sequence
  Description of Artificial Sequence: Synthetic oligonucleotide
gauguuaggacuggaugaa

SEQ ID NO: 2166577 - RNA, 19 nt, Artificial Sequence
  Description of Artificial Sequence: Synthetic oligonucleotide
agcaguucuaggauguacu

SEQ ID NO: 2166578 - RNA, 19 nt, Artificial Sequence
  Description of Artificial Sequence: Synthetic oligonucleotide
uaguaggagccacuuccac

SEQ ID NO: 2166579 - RNA, 19 nt, Artificial Sequence
  Description of Artificial Sequence: Synthetic oligonucleotide
ccuacaggaagcagcaggc

SEQ ID NO: 2166580 - RNA, 19 nt, Artificial Sequence
  Description of Artificial Sequence: Synthetic oligonucleotide
aagcaagcucuggugagca

SEQ ID NO: 2166581 - RNA, 19 nt, Artificial Sequence
  Description of Artificial Sequence: Synthetic oligonucleotide
ucucuuccggcuuccuuca

SEQ ID NO: 2166582 - RNA, 19 nt, Artificial Sequence
  Description of Artificial Sequence: Synthetic oligonucleotide
uagaucuaguaggagccac

SEQ ID NO: 2166583 - RNA, 19 nt, Artificial Sequence
  Description of Artificial Sequence: Synthetic oligonucleotide
cuugcccaaggaacggggc

SEQ ID NO: 2166584 - RNA, 19 nt, Artificial Sequence
  Description of Artificial Sequence: Synthetic oligonucleotide
acgucucgacauuuccccg

SEQ ID NO: 2166585 - RNA, 19 nt, Artificial Sequence
  Description of Artificial Sequence: Synthetic oligonucleotide
cugcaagcaagcucuggug

SEQ ID NO: 2166586 - RNA, 19 nt, Artificial Sequence
  Description of Artificial Sequence: Synthetic oligonucleotide
uggcaaugaaucccuuuau

SEQ ID NO: 2166587 - RNA, 19 nt, Artificial Sequence
  Description of Artificial Sequence: Synthetic oligonucleotide
uguuccgugcuucccuggu

SEQ ID NO: 2166588 - RNA, 19 nt, Artificial Sequence
  Description of Artificial Sequence: Synthetic oligonucleotide
ugaagaucacaguggcaau

SEQ ID NO: 2166589 - RNA, 19 nt, Artificial Sequence
  Description of Artificial Sequence: Synthetic oligonucleotide
cccuuuauccccuacagga

SEQ ID NO: 2166590 - RNA, 19 nt, Artificial Sequence
  Description of Artificial Sequence: Synthetic oligonucleotide
acguaucgaaauucaaauu

SEQ ID NO: 2166591 - RNA, 19 nt, Artificial Sequence
  Description of Artificial Sequence: Synthetic oligonucleotide
cacaaauacguaucgaaau

SEQ ID NO: 2166592 - RNA, 19 nt, Artificial Sequence
  Description of Artificial Sequence: Synthetic oligonucleotide
acuguuccgugcuucccug

SEQ ID NO: 2166593 - RNA, 19 nt, Artificial Sequence
  Description of Artificial Sequence: Synthetic oligonucleotide
uaggauguacuguuuucuu

SEQ ID NO: 2166594 - RNA, 19 nt, Artificial Sequence
  Description of Artificial Sequence: Synthetic oligonucleotide
uuucugggcgaacccaaua

SEQ ID NO: 2166595 - RNA, 19 nt, Artificial Sequence
  Description of Artificial Sequence: Synthetic oligonucleotide
cuucaacgacaauagaucu

SEQ ID NO: 2166596 - RNA, 19 nt, Artificial Sequence
  Description of Artificial Sequence: Synthetic oligonucleotide
caugcugucuccgcccacg

SEQ ID NO: 2166597 - RNA, 19 nt, Artificial Sequence
  Description of Artificial Sequence: Synthetic oligonucleotide
aauuggccacucugugggu

SEQ ID NO: 2166598 - RNA, 19 nt, Artificial Sequence
  Description of Artificial Sequence: Synthetic oligonucleotide
uuauccccuacaggaagca

SEQ ID NO: 2166599 - RNA, 19 nt, Artificial Sequence
  Description of Artificial Sequence: Synthetic oligonucleotide
guggcaaugaaucccuuua

SEQ ID NO: 2166600 - RNA, 19 nt, Artificial Sequence
  Description of Artificial Sequence: Synthetic oligonucleotide
accucagggugcauucugc

SEQ ID NO: 2166601 - RNA, 19 nt, Artificial Sequence
  Description of Artificial Sequence: Synthetic oligonucleotide
gaacggggcagcuucucca

SEQ ID NO: 2166602 - RNA, 19 nt, Artificial Sequence
  Description of Artificial Sequence: Synthetic oligonucleotide
uuccacaaauacguaucga

SEQ ID NO: 2166603 - RNA, 19 nt, Artificial Sequence
  Description of Artificial Sequence: Synthetic oligonucleotide
gagaguugugaagaucaca

SEQ ID NO: 2166604 - RNA, 19 nt, Artificial Sequence
  Description of Artificial Sequence: Synthetic oligonucleotide
uuaacucuuuugggaacga

SEQ ID NO: 2166605 - RNA, 19 nt, Artificial Sequence
  Description of Artificial Sequence: Synthetic oligonucleotide
cugggcgaacccaauagca

SEQ ID NO: 2166606 - RNA, 19 nt, Artificial Sequence
  Description of Artificial Sequence: Synthetic oligonucleotide
agcacaaaguguggcaaca

SEQ ID NO: 2166607 - RNA, 19 nt, Artificial Sequence
  Description of Artificial Sequence: Synthetic oligonucleotide
cccaauagcaguucuagga

SEQ ID NO: 2166608 - RNA, 19 nt, Artificial Sequence
  Description of Artificial Sequence: Synthetic oligonucleotide
cccuacaggaagcagcagg

SEQ ID NO: 2166609 - RNA, 19 nt, Artificial Sequence
  Description of Artificial Sequence: Synthetic oligonucleotide
gagcccucaauguagaauu

SEQ ID NO: 2166610 - RNA, 19 nt, Artificial Sequence
  Description of Artificial Sequence: Synthetic oligonucleotide
ccagaagguuuucugggcg

SEQ ID NO: 2166611 - RNA, 19 nt, Artificial Sequence
  Description of Artificial Sequence: Synthetic oligonucleotide
uguguccagaagguuuucu

SEQ ID NO: 2166612 - RNA, 19 nt, Artificial Sequence
  Description of Artificial Sequence: Synthetic oligonucleotide
cacacggaugcgcuuuagc

SEQ ID NO: 2166613 - RNA, 19 nt, Artificial Sequence
  Description of Artificial Sequence: Synthetic oligonucleotide
acaagccaccuguaaugcu

SEQ ID NO: 2166614 - RNA, 19 nt, Artificial Sequence
  Description of Artificial Sequence: Synthetic oligonucleotide
ucucgacauuuccccguag

SEQ ID NO: 2166615 - RNA, 19 nt, Artificial Sequence
  Description of Artificial Sequence: Synthetic oligonucleotide
uacucacuuucugugugac

SEQ ID NO: 2166616 - RNA, 19 nt, Artificial Sequence
  Description of Artificial Sequence: Synthetic oligonucleotide
caagcaagcucuggugagc

SEQ ID NO: 2166617 - RNA, 19 nt, Artificial Sequence
  Description of Artificial Sequence: Synthetic oligonucleotide
uugauucuuuuaacucuuu

SEQ ID NO: 2166618 - RNA, 19 nt, Artificial Sequence
  Description of Artificial Sequence: Synthetic oligonucleotide
cuggaugaagaaaacaguu

SEQ ID NO: 2166619 - RNA, 19 nt, Artificial Sequence
  Description of Artificial Sequence: Synthetic oligonucleotide
gcaagcaagcucuggugag

SEQ ID NO: 2166620 - RNA, 19 nt, Artificial Sequence
  Description of Artificial Sequence: Synthetic oligonucleotide
aggagccacuuccacaaau

SEQ ID NO: 2166621 - RNA, 19 nt, Artificial Sequence
  Description of Artificial Sequence: Synthetic oligonucleotide
gacauuuccccguagccuu

SEQ ID NO: 2166622 - RNA, 19 nt, Artificial Sequence
  Description of Artificial Sequence: Synthetic oligonucleotide
auguuaggacuggaugaag

SEQ ID NO: 2166623 - RNA, 19 nt, Artificial Sequence
  Description of Artificial Sequence: Synthetic oligonucleotide
cuuucugugugacauacuu

SEQ ID NO: 2166624 - RNA, 19 nt, Artificial Sequence
  Description of Artificial Sequence: Synthetic oligonucleotide
ggcaaugaaucccuuuauc

SEQ ID NO: 2166625 - RNA, 19 nt, Artificial Sequence
  Description of Artificial Sequence: Synthetic oligonucleotide
uugagacgcugguuucccc

SEQ ID NO: 2166626 - RNA, 19 nt, Artificial Sequence
  Description of Artificial Sequence: Synthetic oligonucleotide
cugagaaguugagacgcug

SEQ ID NO: 2166627 - RNA, 19 nt, Artificial Sequence
  Description of Artificial Sequence: Synthetic oligonucleotide
cuaguaggagccacuucca

SEQ ID NO: 2166628 - RNA, 19 nt, Artificial Sequence
  Description of Artificial Sequence: Synthetic oligonucleotide
auagaucuaguaggagcca

SEQ ID NO: 2166629 - RNA, 19 nt, Artificial Sequence
  Description of Artificial Sequence: Synthetic oligonucleotide
gagaaguugagacgcuggu

SEQ ID NO: 2166630 - RNA, 19 nt, Artificial Sequence
  Description of Artificial Sequence: Synthetic oligonucleotide
guguggcaacaauugcuug

SEQ ID NO: 2166631 - RNA, 19 nt, Artificial Sequence
  Description of Artificial Sequence: Synthetic oligonucleotide
caacaauugcuugcccaag

SEQ ID NO: 2166632 - RNA, 19 nt, Artificial Sequence
  Description of Artificial Sequence: Synthetic oligonucleotide
agagcccucaauguagaau

SEQ ID NO: 2166633 - RNA, 19 nt, Artificial Sequence
  Description of Artificial Sequence: Synthetic oligonucleotide
gcaguucuaggauguacug

SEQ ID NO: 2166634 - RNA, 19 nt, Artificial Sequence
  Description of Artificial Sequence: Synthetic oligonucleotide
ggugagcacaaaguguggc

SEQ ID NO: 2166635 - RNA, 19 nt, Artificial Sequence
  Description of Artificial Sequence: Synthetic oligonucleotide
ccgaagagcaccacuauca

SEQ ID NO: 2166636 - RNA, 19 nt, Artificial Sequence
  Description of Artificial Sequence: Synthetic oligonucleotide
ccucaauguagaauuucac

SEQ ID NO: 2166637 - RNA, 19 nt, Artificial Sequence
  Description of Artificial Sequence: Synthetic oligonucleotide
acucacuuucugugugaca

SEQ ID NO: 2166638 - RNA, 19 nt, Artificial Sequence
  Description of Artificial Sequence: Synthetic oligonucleotide
augaaucccuuuauccccu

SEQ ID NO: 2166639 - RNA, 19 nt, Artificial Sequence
  Description of Artificial Sequence: Synthetic oligonucleotide
caccuguaaugcugacucc

SEQ ID NO: 2166640 - RNA, 19 nt, Artificial Sequence
  Description of Artificial Sequence: Synthetic oligonucleotide
ucgggacugcaacuucuaa

SEQ ID NO: 2166641 - RNA, 19 nt, Artificial Sequence
  Description of Artificial Sequence: Synthetic oligonucleotide
caaacacacugaucaccuc

SEQ ID NO: 2166642 - RNA, 19 nt, Artificial Sequence
  Description of Artificial Sequence: Synthetic oligonucleotide
cugacuccgaagagcacca

SEQ ID NO: 2166643 - RNA, 19 nt, Artificial Sequence
  Description of Artificial Sequence: Synthetic oligonucleotide
agagcaccacuaucaagua

SEQ ID NO: 2166644 - RNA, 19 nt, Artificial Sequence
  Description of Artificial Sequence: Synthetic oligonucleotide
acaugcugucuccgcccac

SEQ ID NO: 2166645 - RNA, 19 nt, Artificial Sequence
  Description of Artificial Sequence: Synthetic oligonucleotide
ugucuccgcccacgucucg

SEQ ID NO: 2166646 - RNA, 19 nt, Artificial Sequence
  Description of Artificial Sequence: Synthetic oligonucleotide
agaucuaguaggagccacu

SEQ ID NO: 2166647 - RNA, 19 nt, Artificial Sequence
  Description of Artificial Sequence: Synthetic oligonucleotide
uccgcccacgucucgacau

SEQ ID NO: 2166648 - RNA, 19 nt, Artificial Sequence
  Description of Artificial Sequence: Synthetic oligonucleotide
acucaugaacucucacguu

SEQ ID NO: 2166649 - RNA, 19 nt, Artificial Sequence
  Description of Artificial Sequence: Synthetic oligonucleotide
cacguuauacucacuuucu

SEQ ID NO: 2166650 - RNA, 19 nt, Artificial Sequence
  Description of Artificial Sequence: Synthetic oligonucleotide
cagaagguuuucugggcga

SEQ ID NO: 2166651 - RNA, 19 nt, Artificial Sequence
  Description of Artificial Sequence: Synthetic oligonucleotide
caucucaaaggcugggucu

SEQ ID NO: 2166652 - RNA, 19 nt, Artificial Sequence
  Description of Artificial Sequence: Synthetic oligonucleotide
cuguuccgugcuucccugg

SEQ ID NO: 2166653 - RNA, 19 nt, Artificial Sequence
  Description of Artificial Sequence: Synthetic oligonucleotide
cccaaacacacugaucacc

SEQ ID NO: 2166654 - RNA, 19 nt, Artificial Sequence
  Description of Artificial Sequence: Synthetic oligonucleotide
aaaccucagucugguuugu

SEQ ID NO: 2166655 - RNA, 19 nt, Artificial Sequence
  Description of Artificial Sequence: Synthetic oligonucleotide
acuccgaagagcaccacua

SEQ ID NO: 2166656 - RNA, 19 nt, Artificial Sequence
  Description of Artificial Sequence: Synthetic oligonucleotide
augcgcuuuagcccguuuu

SEQ ID NO: 2166657 - RNA, 19 nt, Artificial Sequence
  Description of Artificial Sequence: Synthetic oligonucleotide
agccaccuguaaugcugac

SEQ ID NO: 2166658 - RNA, 19 nt, Artificial Sequence
  Description of Artificial Sequence: Synthetic oligonucleotide
acucguagaaaagcacaaa

SEQ ID NO: 2166659 - RNA, 19 nt, Artificial Sequence
  Description of Artificial Sequence: Synthetic oligonucleotide
caccucagggugcauucug

SEQ ID NO: 2166660 - RNA, 19 nt, Artificial Sequence
  Description of Artificial Sequence: Synthetic oligonucleotide
ucucaaaggcugggucugc

SEQ ID NO: 2166661 - RNA, 19 nt, Artificial Sequence
  Description of Artificial Sequence: Synthetic oligonucleotide
agaaguugagacgcugguu

SEQ ID NO: 2166662 - RNA, 19 nt, Artificial Sequence
  Description of Artificial Sequence: Synthetic oligonucleotide
gaagguuuucugggcgaac

SEQ ID NO: 2166663 - RNA, 19 nt, Artificial Sequence
  Description of Artificial Sequence: Synthetic oligonucleotide
ucacuuucugugugacaua

SEQ ID NO: 2166664 - RNA, 19 nt, Artificial Sequence
  Description of Artificial Sequence: Synthetic oligonucleotide
uaacucuuuugggaacgau

SEQ ID NO: 2166665 - RNA, 19 nt, Artificial Sequence
  Description of Artificial Sequence: Synthetic oligonucleotide
gaguugugaagaucacagu

SEQ ID NO: 2166666 - RNA, 19 nt, Artificial Sequence
  Description of Artificial Sequence: Synthetic oligonucleotide
uucacacggaugcgcuuua

SEQ ID NO: 2166667 - RNA, 19 nt, Artificial Sequence
  Description of Artificial Sequence: Synthetic oligonucleotide
cuaggauguacuguuuucu

SEQ ID NO: 2166668 - RNA, 19 nt, Artificial Sequence
  Description of Artificial Sequence: Synthetic oligonucleotide
agaagguuuucugggcgaa

SEQ ID NO: 2166669 - RNA, 19 nt, Artificial Sequence
  Description of Artificial Sequence: Synthetic oligonucleotide
auguagaauuucacacgga

SEQ ID NO: 2166670 - RNA, 19 nt, Artificial Sequence
  Description of Artificial Sequence: Synthetic oligonucleotide
ucacacggaugcgcuuuag

SEQ ID NO: 2166671 - RNA, 19 nt, Artificial Sequence
  Description of Artificial Sequence: Synthetic oligonucleotide
cccucaauguagaauuuca

SEQ ID NO: 2166672 - RNA, 19 nt, Artificial Sequence
  Description of Artificial Sequence: Synthetic oligonucleotide
ccacgucucgacauuuccc

SEQ ID NO: 2166673 - RNA, 19 nt, Artificial Sequence
  Description of Artificial Sequence: Synthetic oligonucleotide
cacuaucaaguaggugaag

SEQ ID NO: 2166674 - RNA, 19 nt, Artificial Sequence
  Description of Artificial Sequence: Synthetic oligonucleotide
aggaacggggcagcuucuc

SEQ ID NO: 2166675 - RNA, 19 nt, Artificial Sequence
  Description of Artificial Sequence: Synthetic oligonucleotide
agacgcugguuuccccucu

SEQ ID NO: 2166676 - RNA, 19 nt, Artificial Sequence
  Description of Artificial Sequence: Synthetic oligonucleotide
ucuccgcccacgucucgac

SEQ ID NO: 2166677 - RNA, 19 nt, Artificial Sequence
  Description of Artificial Sequence: Synthetic oligonucleotide
gcuugcccaaggaacgggg

SEQ ID NO: 2166678 - RNA, 19 nt, Artificial Sequence
  Description of Artificial Sequence: Synthetic oligonucleotide
agccuuugacaggcucccc

SEQ ID NO: 2166679 - RNA, 19 nt, Artificial Sequence
  Description of Artificial Sequence: Synthetic oligonucleotide
cacuuccacaaauacguau

SEQ ID NO: 2166680 - RNA, 19 nt, Artificial Sequence
  Description of Artificial Sequence: Synthetic oligonucleotide
auuuccccguagccuuuga

SEQ ID NO: 2166681 - RNA, 19 nt, Artificial Sequence
  Description of Artificial Sequence: Synthetic oligonucleotide
cugcaacuucuaaaguuua

SEQ ID NO: 2166682 - RNA, 19 nt, Artificial Sequence
  Description of Artificial Sequence: Synthetic oligonucleotide
cugugaggcuucgggacug

SEQ ID NO: 2166683 - RNA, 19 nt, Artificial Sequence
  Description of Artificial Sequence: Synthetic oligonucleotide
ugaaucccuuuauccccua

SEQ ID NO: 2166684 - RNA, 19 nt, Artificial Sequence
  Description of Artificial Sequence: Synthetic oligonucleotide
cuguaaugcugacuccgaa

SEQ ID NO: 2166685 - RNA, 19 nt, Artificial Sequence
  Description of Artificial Sequence: Synthetic oligonucleotide
aaggaacggggcagcuucu

SEQ ID NO: 2166686 - RNA, 19 nt, Artificial Sequence
  Description of Artificial Sequence: Synthetic oligonucleotide
cccauauaugauguuagga

SEQ ID NO: 2166687 - RNA, 19 nt, Artificial Sequence
  Description of Artificial Sequence: Synthetic oligonucleotide
cccacgucucgacauuucc

SEQ ID NO: 2166688 - RNA, 19 nt, Artificial Sequence
  Description of Artificial Sequence: Synthetic oligonucleotide
guuuaguaauucacacacu

SEQ ID NO: 2166689 - RNA, 19 nt, Artificial Sequence
  Description of Artificial Sequence: Synthetic oligonucleotide
ugggaacgauuaucuucaa

SEQ ID NO: 2166690 - RNA, 19 nt, Artificial Sequence
  Description of Artificial Sequence: Synthetic oligonucleotide
cuucgggacugcaacuucu

SEQ ID NO: 2166691 - RNA, 19 nt, Artificial Sequence
  Description of Artificial Sequence: Synthetic oligonucleotide
gacgcugguuuccccucuc

SEQ ID NO: 2166692 - RNA, 19 nt, Artificial Sequence
  Description of Artificial Sequence: Synthetic oligonucleotide
augcugucuccgcccacgu

SEQ ID NO: 2166693 - RNA, 19 nt, Artificial Sequence
  Description of Artificial Sequence: Synthetic oligonucleotide
ugcugucuccgcccacguc

SEQ ID NO: 2166694 - RNA, 19 nt, Artificial Sequence
  Description of Artificial Sequence: Synthetic oligonucleotide
ugguuuccccucucugauu

SEQ ID NO: 2166695 - RNA, 19 nt, Artificial Sequence
  Description of Artificial Sequence: Synthetic oligonucleotide
acgcugguuuccccucucu

SEQ ID NO: 2166696 - RNA, 19 nt, Artificial Sequence
  Description of Artificial Sequence: Synthetic oligonucleotide
gccuuugacaggcucccca

SEQ ID NO: 2166697 - RNA, 19 nt, Artificial Sequence
  Description of Artificial Sequence: Synthetic oligonucleotide
gaucuaguaggagccacuu

SEQ ID NO: 2166698 - RNA, 19 nt, Artificial Sequence
  Description of Artificial Sequence: Synthetic oligonucleotide
cugguuuguucauacucau

SEQ ID NO: 2166699 - RNA, 19 nt, Artificial Sequence
  Description of Artificial Sequence: Synthetic oligonucleotide
guuuccccucucugauuuc

SEQ ID NO: 2166700 - RNA, 19 nt, Artificial Sequence
  Description of Artificial Sequence: Synthetic oligonucleotide
gcuuucccauauaugaugu

SEQ ID NO: 2166701 - RNA, 19 nt, Artificial Sequence
  Description of Artificial Sequence: Synthetic oligonucleotide
ccacuaucaaguaggugaa

SEQ ID NO: 2166702 - RNA, 19 nt, Artificial Sequence
  Description of Artificial Sequence: Synthetic oligonucleotide
gucucgacauuuccccgua

SEQ ID NO: 2166703 - RNA, 19 nt, Artificial Sequence
  Description of Artificial Sequence: Synthetic oligonucleotide
aaccucagucugguuuguu

SEQ ID NO: 2166704 - RNA, 19 nt, Artificial Sequence
  Description of Artificial Sequence: Synthetic oligonucleotide
cucacguuauacucacuuu

SEQ ID NO: 2166705 - RNA, 19 nt, Artificial Sequence
  Description of Artificial Sequence: Synthetic oligonucleotide
guagaacaagccaccugua

SEQ ID NO: 2166706 - RNA, 19 nt, Artificial Sequence
  Description of Artificial Sequence: Synthetic oligonucleotide
gaaaagcacaaagcauguu

SEQ ID NO: 2166707 - RNA, 19 nt, Artificial Sequence
  Description of Artificial Sequence: Synthetic oligonucleotide
cucaaaggcugggucugca

SEQ ID NO: 2166708 - RNA, 19 nt, Artificial Sequence
  Description of Artificial Sequence: Synthetic oligonucleotide
gggcgaacccaauagcagu

SEQ ID NO: 2166709 - RNA, 19 nt, Artificial Sequence
  Description of Artificial Sequence: Synthetic oligonucleotide
cugguuuccccucucugau

SEQ ID NO: 2166710 - RNA, 19 nt, Artificial Sequence
  Description of Artificial Sequence: Synthetic oligonucleotide
caugaacucucacguuaua

SEQ ID NO: 2166711 - RNA, 19 nt, Artificial Sequence
  Description of Artificial Sequence: Synthetic oligonucleotide
ggguccggcccuugugucc

SEQ ID NO: 2166712 - RNA, 19 nt, Artificial Sequence
  Description of Artificial Sequence: Synthetic oligonucleotide
cgauuaucuucaacgacaa

SEQ ID NO: 2166713 - RNA, 19 nt, Artificial Sequence
  Description of Artificial Sequence: Synthetic oligonucleotide
gcauguucaccaaaccugu

SEQ ID NO: 2166714 - RNA, 19 nt, Artificial Sequence
  Description of Artificial Sequence: Synthetic oligonucleotide
cuuccggcuuccuucacuu

SEQ ID NO: 2166715 - RNA, 19 nt, Artificial Sequence
  Description of Artificial Sequence: Synthetic oligonucleotide
ccuuuauccccuacaggaa

SEQ ID NO: 2166716 - RNA, 19 nt, Artificial Sequence
  Description of Artificial Sequence: Synthetic oligonucleotide
ccuguaaugcugacuccga

SEQ ID NO: 2166717 - RNA, 19 nt, Artificial Sequence
  Description of Artificial Sequence: Synthetic oligonucleotide
cugugggugcucuuccacu

SEQ ID NO: 2166718 - RNA, 19 nt, Artificial Sequence
  Description of Artificial Sequence: Synthetic oligonucleotide
gcuucgggacugcaacuuc

SEQ ID NO: 2166719 - RNA, 19 nt, Artificial Sequence
  Description of Artificial Sequence: Synthetic oligonucleotide
cguuauacucacuuucugu

SEQ ID NO: 2166720 - RNA, 19 nt, Artificial Sequence
  Description of Artificial Sequence: Synthetic oligonucleotide
cacacgcugcacaacucgu

SEQ ID NO: 2166721 - RNA, 19 nt, Artificial Sequence
  Description of Artificial Sequence: Synthetic oligonucleotide
ccccguagccuuugacagg

SEQ ID NO: 2166722 - RNA, 19 nt, Artificial Sequence
  Description of Artificial Sequence: Synthetic oligonucleotide
ccaauagcaguucuaggau

SEQ ID NO: 2166723 - RNA, 19 nt, Artificial Sequence
  Description of Artificial Sequence: Synthetic oligonucleotide
gcccucaauguagaauuuc

SEQ ID NO: 2166724 - RNA, 19 nt, Artificial Sequence
  Description of Artificial Sequence: Synthetic oligonucleotide
cucuuccggcuuccuucac

SEQ ID NO: 2166725 - RNA, 19 nt, Artificial Sequence
  Description of Artificial Sequence: Synthetic oligonucleotide
cucuuuugggaacgauuau

SEQ ID NO: 2166726 - RNA, 19 nt, Artificial Sequence
  Description of Artificial Sequence: Synthetic oligonucleotide
ggacugcaacuucuaaagu

SEQ ID NO: 2166727 - RNA, 19 nt, Artificial Sequence
  Description of Artificial Sequence: Synthetic oligonucleotide
cucagggugcauucugcau

SEQ ID NO: 2166728 - RNA, 19 nt, Artificial Sequence
  Description of Artificial Sequence: Synthetic oligonucleotide
ccuuguguccagaagguuu

SEQ ID NO: 2166729 - RNA, 19 nt, Artificial Sequence
  Description of Artificial Sequence: Synthetic oligonucleotide
ccaaaccugugaggcuucg

SEQ ID NO: 2166730 - RNA, 19 nt, Artificial Sequence
  Description of Artificial Sequence: Synthetic oligonucleotide
caccaaaccugugaggcuu

SEQ ID NO: 2166731 - RNA, 19 nt, Artificial Sequence
  Description of Artificial Sequence: Synthetic oligonucleotide
gucuccgcccacgucucga

SEQ ID NO: 2166732 - RNA, 19 nt, Artificial Sequence
  Description of Artificial Sequence: Synthetic oligonucleotide
ccuuugacaggcuccccaa

SEQ ID NO: 2166733 - RNA, 19 nt, Artificial Sequence
  Description of Artificial Sequence: Synthetic oligonucleotide
agcccucaauguagaauuu

SEQ ID NO: 2166734 - RNA, 19 nt, Artificial Sequence
  Description of Artificial Sequence: Synthetic oligonucleotide
cuuucccauauaugauguu

SEQ ID NO: 2166735 - RNA, 19 nt, Artificial Sequence
  Description of Artificial Sequence: Synthetic oligonucleotide
uccggcccuuguguccaga

SEQ ID NO: 2166736 - RNA, 19 nt, Artificial Sequence
  Description of Artificial Sequence: Synthetic oligonucleotide
caacgacaauagaucuagu

SEQ ID NO: 2166737 - RNA, 19 nt, Artificial Sequence
  Description of Artificial Sequence: Synthetic oligonucleotide
gggguccggcccuuguguc

SEQ ID NO: 2166738 - RNA, 19 nt, Artificial Sequence
  Description of Artificial Sequence: Synthetic oligonucleotide
gcgaacccaauagcaguuc

SEQ ID NO: 2166739 - RNA, 19 nt, Artificial Sequence
  Description of Artificial Sequence: Synthetic oligonucleotide
cgggacugcaacuucuaaa

SEQ ID NO: 2166740 - RNA, 19 nt, Artificial Sequence
  Description of Artificial Sequence: Synthetic oligonucleotide
gaugcgcuuuagcccguuu

SEQ ID NO: 2166741 - RNA, 19 nt, Artificial Sequence
  Description of Artificial Sequence: Synthetic oligonucleotide
cuccgaagagcaccacuau

SEQ ID NO: 2166742 - RNA, 19 nt, Artificial Sequence
  Description of Artificial Sequence: Synthetic oligonucleotide
ggucugcaagcaagcucug

SEQ ID NO: 2166743 - RNA, 19 nt, Artificial Sequence
  Description of Artificial Sequence: Synthetic oligonucleotide
ggcuccccaaacacacuga

SEQ ID NO: 2166744 - RNA, 19 nt, Artificial Sequence
  Description of Artificial Sequence: Synthetic oligonucleotide
cacuuccacaugcacuguu

SEQ ID NO: 2166745 - RNA, 19 nt, Artificial Sequence
  Description of Artificial Sequence: Synthetic oligonucleotide
cuccgcccacgucucgaca

SEQ ID NO: 2166746 - RNA, 19 nt, Artificial Sequence
  Description of Artificial Sequence: Synthetic oligonucleotide
gcugcacaacucguagaaa

SEQ ID NO: 2166747 - RNA, 19 nt, Artificial Sequence
  Description of Artificial Sequence: Synthetic oligonucleotide
guccggcccuuguguccag

SEQ ID NO: 2166748 - RNA, 19 nt, Artificial Sequence
  Description of Artificial Sequence: Synthetic oligonucleotide
guuccgugcuucccugguu

SEQ ID NO: 2166749 - RNA, 19 nt, Artificial Sequence
  Description of Artificial Sequence: Synthetic oligonucleotide
cucucacguuauacucacu

SEQ ID NO: 2166750 - RNA, 19 nt, Artificial Sequence
  Description of Artificial Sequence: Synthetic oligonucleotide
caugcacuguuccgugcuu

SEQ ID NO: 2166751 - RNA, 19 nt, Artificial Sequence
  Description of Artificial Sequence: Synthetic oligonucleotide
gggcuuucccauauaugau

SEQ ID NO: 2166752 - RNA, 19 nt, Artificial Sequence
  Description of Artificial Sequence: Synthetic oligonucleotide
caggcuccccaaacacacu

SEQ ID NO: 2166753 - RNA, 19 nt, Artificial Sequence
  Description of Artificial Sequence: Synthetic oligonucleotide
ggcgaacccaauagcaguu

SEQ ID NO: 2166754 - RNA, 19 nt, Artificial Sequence
  Description of Artificial Sequence: Synthetic oligonucleotide
gccaccuguaaugcugacu

SEQ ID NO: 2166755 - RNA, 19 nt, Artificial Sequence
  Description of Artificial Sequence: Synthetic oligonucleotide
gcccuuguguccagaaggu

SEQ ID NO: 2166756 - RNA, 19 nt, Artificial Sequence
  Description of Artificial Sequence: Synthetic oligonucleotide
agggugcauucugcauuuu

SEQ ID NO: 2166757 - RNA, 19 nt, Artificial Sequence
  Description of Artificial Sequence: Synthetic oligonucleotide
ccacuuccacaaauacgua

SEQ ID NO: 2166758 - RNA, 19 nt, Artificial Sequence
  Description of Artificial Sequence: Synthetic oligonucleotide
gcaccacuaucaaguaggu

SEQ ID NO: 2166759 - RNA, 19 nt, Artificial Sequence
  Description of Artificial Sequence: Synthetic oligonucleotide
ccggcuuccuucacuuucu

SEQ ID NO: 2166760 - RNA, 19 nt, Artificial Sequence
  Description of Artificial Sequence: Synthetic oligonucleotide
cgaacccaauagcaguucu

SEQ ID NO: 2166761 - RNA, 19 nt, Artificial Sequence
  Description of Artificial Sequence: Synthetic oligonucleotide
ggcuucgggacugcaacuu

SEQ ID NO: 2166762 - RNA, 19 nt, Artificial Sequence
  Description of Artificial Sequence: Synthetic oligonucleotide
gcccacgucucgacauuuc

SEQ ID NO: 2166763 - RNA, 19 nt, Artificial Sequence
  Description of Artificial Sequence: Synthetic oligonucleotide
cgucucgacauuuccccgu

SEQ ID NO: 2166764 - RNA, 19 nt, Artificial Sequence
  Description of Artificial Sequence: Synthetic oligonucleotide
cguguagaacaagccaccu

SEQ ID NO: 2166765 - RNA, 19 nt, Artificial Sequence
  Description of Artificial Sequence: Synthetic oligonucleotide
ccggcccuuguguccagaa

SEQ ID NO: 2166766 - RNA, 19 nt, Artificial Sequence
  Description of Artificial Sequence: Synthetic oligonucleotide
ggccacucugugggugcuc

SEQ ID NO: 2166767 - RNA, 19 nt, Artificial Sequence
  Description of Artificial Sequence: Synthetic oligonucleotide
ccaaggaacggggcagcuu

SEQ ID NO: 2166768 - RNA, 19 nt, Artificial Sequence
  Description of Artificial Sequence: Synthetic oligonucleotide
ggaugcgcuuuagcccguu

SEQ ID NO: 2166769 - RNA, 19 nt, Artificial Sequence
  Description of Artificial Sequence: Synthetic oligonucleotide
ccgcccacgucucgacauu

SEQ ID NO: 2166770 - RNA, 19 nt, Artificial Sequence
  Description of Artificial Sequence: Synthetic oligonucleotide
cggaugcgcuuuagcccgu

SEQ ID NO: 2166771 - RNA, 19 nt, Artificial Sequence
  Description of Artificial Sequence: Synthetic oligonucleotide
cgcccacgucucgacauuu

SEQ ID NO: 2166772 - RNA, 19 nt, Artificial Sequence
  Description of Artificial Sequence: Synthetic oligonucleotide
aauuacaccuaauaaaugg

SEQ ID NO: 2166773 - RNA, 19 nt, Artificial Sequence
  Description of Artificial Sequence: Synthetic oligonucleotide
aacacagacacacacacac

SEQ ID NO: 2166774 - RNA, 19 nt, Artificial Sequence
  Description of Artificial Sequence: Synthetic oligonucleotide
aaaacaugauauuuaacag

SEQ ID NO: 2166775 - RNA, 19 nt, Artificial Sequence
  Description of Artificial Sequence: Synthetic oligonucleotide
aauaaucaucaacaggucg

SEQ ID NO: 2166776 - RNA, 19 nt, Artificial Sequence
  Description of Artificial Sequence: Synthetic oligonucleotide
ucuaguuuuaucuucaaug

SEQ ID NO: 2166777 - RNA, 19 nt, Artificial Sequence
  Description of Artificial Sequence: Synthetic oligonucleotide
auuucuuagugcuucauac

SEQ ID NO: 2166778 - RNA, 19 nt, Artificial Sequence
  Description of Artificial Sequence: Synthetic oligonucleotide
caauuauuacuuaagacgc

SEQ ID NO: 2166779 - RNA, 19 nt, Artificial Sequence
  Description of Artificial Sequence: Synthetic oligonucleotide
aauuaaauuucuuuuaguu

SEQ ID NO: 2166780 - RNA, 19 nt, Artificial Sequence
  Description of Artificial Sequence: Synthetic oligonucleotide
auaagaucucaacaaaggc

SEQ ID NO: 2166781 - RNA, 19 nt, Artificial Sequence
  Description of Artificial Sequence: Synthetic oligonucleotide
ucauacauagcucuaaaug

SEQ ID NO: 2166782 - RNA, 19 nt, Artificial Sequence
  Description of Artificial Sequence: Synthetic oligonucleotide
gcaauuauuacuuaagacg

SEQ ID NO: 2166783 - RNA, 19 nt, Artificial Sequence
  Description of Artificial Sequence: Synthetic oligonucleotide
auaaauggauaacuggccc

SEQ ID NO: 2166784 - RNA, 19 nt, Artificial Sequence
  Description of Artificial Sequence: Synthetic oligonucleotide
uuaaaucuauauaacuuag

SEQ ID NO: 2166785 - RNA, 19 nt, Artificial Sequence
  Description of Artificial Sequence: Synthetic oligonucleotide
cauacauagcucuaaaugc

SEQ ID NO: 2166786 - RNA, 19 nt, Artificial Sequence
  Description of Artificial Sequence: Synthetic oligonucleotide
uaagaucucaacaaaggcc

SEQ ID NO: 2166787 - RNA, 19 nt, Artificial Sequence
  Description of Artificial Sequence: Synthetic oligonucleotide
uuaaccaucuuucuaacac

SEQ ID NO: 2166788 - RNA, 19 nt, Artificial Sequence
  Description of Artificial Sequence: Synthetic oligonucleotide
aucuauauaacuuagcuuu

SEQ ID NO: 2166789 - RNA, 19 nt, Artificial Sequence
  Description of Artificial Sequence: Synthetic oligonucleotide
uguaguaaggcaauuauua

SEQ ID NO: 2166790 - RNA, 19 nt, Artificial Sequence
  Description of Artificial Sequence: Synthetic oligonucleotide
acacauaacacacacaaca

SEQ ID NO: 2166791 - RNA, 19 nt, Artificial Sequence
  Description of Artificial Sequence: Synthetic oligonucleotide
aaacaugauauuuaacaga

SEQ ID NO: 2166792 - RNA, 19 nt, Artificial Sequence
  Description of Artificial Sequence: Synthetic oligonucleotide
auuaacggcaagaacagcc

SEQ ID NO: 2166793 - RNA, 19 nt, Artificial Sequence
  Description of Artificial Sequence: Synthetic oligonucleotide
uuagacaggcuuuagagga

SEQ ID NO: 2166794 - RNA, 19 nt, Artificial Sequence
  Description of Artificial Sequence: Synthetic oligonucleotide
gauaauuccauuggcacgg

SEQ ID NO: 2166795 - RNA, 19 nt, Artificial Sequence
  Description of Artificial Sequence: Synthetic oligonucleotide
gauaagaucucaacaaagg

SEQ ID NO: 2166796 - RNA, 19 nt, Artificial Sequence
  Description of Artificial Sequence: Synthetic oligonucleotide
aguuagacaggcuuuagag

SEQ ID NO: 2166797 - RNA, 19 nt, Artificial Sequence
  Description of Artificial Sequence: Synthetic oligonucleotide
ugauauuuaacagaucuug

SEQ ID NO: 2166798 - RNA, 19 nt, Artificial Sequence
  Description of Artificial Sequence: Synthetic oligonucleotide
acaacaauuucuuagugcu

SEQ ID NO: 2166799 - RNA, 19 nt, Artificial Sequence
  Description of Artificial Sequence: Synthetic oligonucleotide
ugaaucaacuucuuucagg

SEQ ID NO: 2166800 - RNA, 19 nt, Artificial Sequence
  Description of Artificial Sequence: Synthetic oligonucleotide
agauacagugaucuggucg

SEQ ID NO: 2166801 - RNA, 19 nt, Artificial Sequence
  Description of Artificial Sequence: Synthetic oligonucleotide
uucuuuuaguuaaugacca

SEQ ID NO: 2166802 - RNA, 19 nt, Artificial Sequence
  Description of Artificial Sequence: Synthetic oligonucleotide
uugaaaaggcaacuuaacc

SEQ ID NO: 2166803 - RNA, 19 nt, Artificial Sequence
  Description of Artificial Sequence: Synthetic oligonucleotide
cuuagugcuucauacauag

SEQ ID NO: 2166804 - RNA, 19 nt, Artificial Sequence
  Description of Artificial Sequence: Synthetic oligonucleotide
aaacauuguuugaaaaggc

SEQ ID NO: 2166805 - RNA, 19 nt, Artificial Sequence
  Description of Artificial Sequence: Synthetic oligonucleotide
uugaaauuacaccuaauaa

SEQ ID NO: 2166806 - RNA, 19 nt, Artificial Sequence
  Description of Artificial Sequence: Synthetic oligonucleotide
ucuucuauauauuccaaga

SEQ ID NO: 2166807 - RNA, 19 nt, Artificial Sequence
  Description of Artificial Sequence: Synthetic oligonucleotide
agugucaacauauagcagu

SEQ ID NO: 2166808 - RNA, 19 nt, Artificial Sequence
  Description of Artificial Sequence: Synthetic oligonucleotide
cuucuuucaggauuaacgg

SEQ ID NO: 2166809 - RNA, 19 nt, Artificial Sequence
  Description of Artificial Sequence: Synthetic oligonucleotide
acuucuuucaggauuaacg

SEQ ID NO: 2166810 - RNA, 19 nt, Artificial Sequence
  Description of Artificial Sequence: Synthetic oligonucleotide
cuuuagaggacaagaaggg

SEQ ID NO: 2166811 - RNA, 19 nt, Artificial Sequence
  Description of Artificial Sequence: Synthetic oligonucleotide
agacgcuugaaauuacacc

SEQ ID NO: 2166812 - RNA, 19 nt, Artificial Sequence
  Description of Artificial Sequence: Synthetic oligonucleotide
aaugaagacuccuuccucu

SEQ ID NO: 2166813 - RNA, 19 nt, Artificial Sequence
  Description of Artificial Sequence: Synthetic oligonucleotide
uugaauguaccuuaguuuc

SEQ ID NO: 2166814 - RNA, 19 nt, Artificial Sequence
  Description of Artificial Sequence: Synthetic oligonucleotide
caaauaaucaucaacaggu

SEQ ID NO: 2166815 - RNA, 19 nt, Artificial Sequence
  Description of Artificial Sequence: Synthetic oligonucleotide
guuucaaucuuuauaacag

SEQ ID NO: 2166816 - RNA, 19 nt, Artificial Sequence
  Description of Artificial Sequence: Synthetic oligonucleotide
acacacaacaauuucuuag

SEQ ID NO: 2166817 - RNA, 19 nt, Artificial Sequence
  Description of Artificial Sequence: Synthetic oligonucleotide
aaacaucagaacaaguuag

SEQ ID NO: 2166818 - RNA, 19 nt, Artificial Sequence
  Description of Artificial Sequence: Synthetic oligonucleotide
uuuaucuucaaugaauuaa

SEQ ID NO: 2166819 - RNA, 19 nt, Artificial Sequence
  Description of Artificial Sequence: Synthetic oligonucleotide
aguuucaaucuuuauaaca

SEQ ID NO: 2166820 - RNA, 19 nt, Artificial Sequence
  Description of Artificial Sequence: Synthetic oligonucleotide
acacacacauaacacacac

SEQ ID NO: 2166821 - RNA, 19 nt, Artificial Sequence
  Description of Artificial Sequence: Synthetic oligonucleotide
uggucgauaauuccauugg

SEQ ID NO: 2166822 - RNA, 19 nt, Artificial Sequence
  Description of Artificial Sequence: Synthetic oligonucleotide
cauagauacagugaucugg

SEQ ID NO: 2166823 - RNA, 19 nt, Artificial Sequence
  Description of Artificial Sequence: Synthetic oligonucleotide
gauacuagucaucuuaguc

SEQ ID NO: 2166824 - RNA, 19 nt, Artificial Sequence
  Description of Artificial Sequence: Synthetic oligonucleotide
acacacauaacacacacaa

SEQ ID NO: 2166825 - RNA, 19 nt, Artificial Sequence
  Description of Artificial Sequence: Synthetic oligonucleotide
uuaguuucccaaguguugg

SEQ ID NO: 2166826 - RNA, 19 nt, Artificial Sequence
  Description of Artificial Sequence: Synthetic oligonucleotide
acuacugcgauacuaguca

SEQ ID NO: 2166827 - RNA, 19 nt, Artificial Sequence
  Description of Artificial Sequence: Synthetic oligonucleotide
uuagacaacugucuuaaau

SEQ ID NO: 2166828 - RNA, 19 nt, Artificial Sequence
  Description of Artificial Sequence: Synthetic oligonucleotide
aacaggucguaagaaaagg

SEQ ID NO: 2166829 - RNA, 19 nt, Artificial Sequence
  Description of Artificial Sequence: Synthetic oligonucleotide
aaugaccaaauaaucauca

SEQ ID NO: 2166830 - RNA, 19 nt, Artificial Sequence
  Description of Artificial Sequence: Synthetic oligonucleotide
uuugaaaaggcaacuuaac

SEQ ID NO: 2166831 - RNA, 19 nt, Artificial Sequence
  Description of Artificial Sequence: Synthetic oligonucleotide
uuacuuaagacgcuugaaa

SEQ ID NO: 2166832 - RNA, 19 nt, Artificial Sequence
  Description of Artificial Sequence: Synthetic oligonucleotide
agugaaucaacuucuuuca

SEQ ID NO: 2166833 - RNA, 19 nt, Artificial Sequence
  Description of Artificial Sequence: Synthetic oligonucleotide
ugcauagauacagugaucu

SEQ ID NO: 2166834 - RNA, 19 nt, Artificial Sequence
  Description of Artificial Sequence: Synthetic oligonucleotide
aggauuaacggcaagaaca

SEQ ID NO: 2166835 - RNA, 19 nt, Artificial Sequence
  Description of Artificial Sequence: Synthetic oligonucleotide
gaccaaauaaucaucaaca

SEQ ID NO: 2166836 - RNA, 19 nt, Artificial Sequence
  Description of Artificial Sequence: Synthetic oligonucleotide
gucaucuuagucuaccucc

SEQ ID NO: 2166837 - RNA, 19 nt, Artificial Sequence
  Description of Artificial Sequence: Synthetic oligonucleotide
uaagcaguggcauaaguau

SEQ ID NO: 2166838 - RNA, 19 nt, Artificial Sequence
  Description of Artificial Sequence: Synthetic oligonucleotide
ucgauaauuccauuggcac

SEQ ID NO: 2166839 - RNA, 19 nt, Artificial Sequence
  Description of Artificial Sequence: Synthetic oligonucleotide
aguuaaugaccaaauaauc

SEQ ID NO: 2166840 - RNA, 19 nt, Artificial Sequence
  Description of Artificial Sequence: Synthetic oligonucleotide
ugcgauaagaucucaacaa

SEQ ID NO: 2166841 - RNA, 19 nt, Artificial Sequence
  Description of Artificial Sequence: Synthetic oligonucleotide
uauuacuuaagacgcuuga

SEQ ID NO: 2166842 - RNA, 19 nt, Artificial Sequence
  Description of Artificial Sequence: Synthetic oligonucleotide
ugucagugucaacauauag

SEQ ID NO: 2166843 - RNA, 19 nt, Artificial Sequence
  Description of Artificial Sequence: Synthetic oligonucleotide
uguaccuuaguuucccaag

SEQ ID NO: 2166844 - RNA, 19 nt, Artificial Sequence
  Description of Artificial Sequence: Synthetic oligonucleotide
ucaacaggucguaagaaaa

SEQ ID NO: 2166845 - RNA, 19 nt, Artificial Sequence
  Description of Artificial Sequence: Synthetic oligonucleotide
agcucuaaaugcuggcugc

SEQ ID NO: 2166846 - RNA, 19 nt, Artificial Sequence
  Description of Artificial Sequence: Synthetic oligonucleotide
uucuucuauauauuccaag

SEQ ID NO: 2166847 - RNA, 19 nt, Artificial Sequence
  Description of Artificial Sequence: Synthetic oligonucleotide
aacauauagcagugaauca

SEQ ID NO: 2166848 - RNA, 19 nt, Artificial Sequence
  Description of Artificial Sequence: Synthetic oligonucleotide
aacaccucuguuuccauga

SEQ ID NO: 2166849 - RNA, 19 nt, Artificial Sequence
  Description of Artificial Sequence: Synthetic oligonucleotide
guuagacaggcuuuagagg

SEQ ID NO: 2166850 - RNA, 19 nt, Artificial Sequence
  Description of Artificial Sequence: Synthetic oligonucleotide
ucuaccuccauuaaauauu

SEQ ID NO: 2166851 - RNA, 19 nt, Artificial Sequence
  Description of Artificial Sequence: Synthetic oligonucleotide
ggaauuaaauuucuuuuag

SEQ ID NO: 2166852 - RNA, 19 nt, Artificial Sequence
  Description of Artificial Sequence: Synthetic oligonucleotide
accaaauaaucaucaacag

SEQ ID NO: 2166853 - RNA, 19 nt, Artificial Sequence
  Description of Artificial Sequence: Synthetic oligonucleotide
uuugcgauaagaucucaac

SEQ ID NO: 2166854 - RNA, 19 nt, Artificial Sequence
  Description of Artificial Sequence: Synthetic oligonucleotide
uaaaauguaguaaggcaau

SEQ ID NO: 2166855 - RNA, 19 nt, Artificial Sequence
  Description of Artificial Sequence: Synthetic oligonucleotide
aagaacagccucugggaag

SEQ ID NO: 2166856 - RNA, 19 nt, Artificial Sequence
  Description of Artificial Sequence: Synthetic oligonucleotide
gacacacacacacacacac

SEQ ID NO: 2166857 - RNA, 19 nt, Artificial Sequence
  Description of Artificial Sequence: Synthetic oligonucleotide
ugacauauugcacacuuua

SEQ ID NO: 2166858 - RNA, 19 nt, Artificial Sequence
  Description of Artificial Sequence: Synthetic oligonucleotide
ucaucaacaggucguaaga

SEQ ID NO: 2166859 - RNA, 19 nt, Artificial Sequence
  Description of Artificial Sequence: Synthetic oligonucleotide
aaauaaucaucaacagguc

SEQ ID NO: 2166860 - RNA, 19 nt, Artificial Sequence
  Description of Artificial Sequence: Synthetic oligonucleotide
agacaacugucuuaaaucu

SEQ ID NO: 2166861 - RNA, 19 nt, Artificial Sequence
  Description of Artificial Sequence: Synthetic oligonucleotide
cauuguuugaaaaggcaac

SEQ ID NO: 2166862 - RNA, 19 nt, Artificial Sequence
  Description of Artificial Sequence: Synthetic oligonucleotide
uagucuaccuccauuaaau

SEQ ID NO: 2166863 - RNA, 19 nt, Artificial Sequence
  Description of Artificial Sequence: Synthetic oligonucleotide
cacaacaauuucuuagugc

SEQ ID NO: 2166864 - RNA, 19 nt, Artificial Sequence
  Description of Artificial Sequence: Synthetic oligonucleotide
acaccuaauaaauggauaa

SEQ ID NO: 2166865 - RNA, 19 nt, Artificial Sequence
  Description of Artificial Sequence: Synthetic oligonucleotide
aacaaacaggcuuucugga

SEQ ID NO: 2166866 - RNA, 19 nt, Artificial Sequence
  Description of Artificial Sequence: Synthetic oligonucleotide
agcaugcccaguuucaauc

SEQ ID NO: 2166867 - RNA, 19 nt, Artificial Sequence
  Description of Artificial Sequence: Synthetic oligonucleotide
uaugucuccccauugcagc

SEQ ID NO: 2166868 - RNA, 19 nt, Artificial Sequence
  Description of Artificial Sequence: Synthetic oligonucleotide
uugcgauaagaucucaaca

SEQ ID NO: 2166869 - RNA, 19 nt, Artificial Sequence
  Description of Artificial Sequence: Synthetic oligonucleotide
uguuugaaaaggcaacuua

SEQ ID NO: 2166870 - RNA, 19 nt, Artificial Sequence
  Description of Artificial Sequence: Synthetic oligonucleotide
aucgcagcaauuugugugg

SEQ ID NO: 2166871 - RNA, 19 nt, Artificial Sequence
  Description of Artificial Sequence: Synthetic oligonucleotide
ugcgauacuagucaucuua

SEQ ID NO: 2166872 - RNA, 19 nt, Artificial Sequence
  Description of Artificial Sequence: Synthetic oligonucleotide
uuauuacuuaagacgcuug

SEQ ID NO: 2166873 - RNA, 19 nt, Artificial Sequence
  Description of Artificial Sequence: Synthetic oligonucleotide
uacuuaagacgcuugaaau

SEQ ID NO: 2166874 - RNA, 19 nt, Artificial Sequence
  Description of Artificial Sequence: Synthetic oligonucleotide
uuaaagaguuucuuccacu

SEQ ID NO: 2166875 - RNA, 19 nt, Artificial Sequence
  Description of Artificial Sequence: Synthetic oligonucleotide
gaaaaggaaugucaguguc

SEQ ID NO: 2166876 - RNA, 19 nt, Artificial Sequence
  Description of Artificial Sequence: Synthetic oligonucleotide
guuaaugaccaaauaauca

SEQ ID NO: 2166877 - RNA, 19 nt, Artificial Sequence
  Description of Artificial Sequence: Synthetic oligonucleotide
aagacgcuugaaauuacac

SEQ ID NO: 2166878 - RNA, 19 nt, Artificial Sequence
  Description of Artificial Sequence: Synthetic oligonucleotide
aacugucuuaaaucuauau

SEQ ID NO: 2166879 - RNA, 19 nt, Artificial Sequence
  Description of Artificial Sequence: Synthetic oligonucleotide
cuuaaaucuauauaacuua

SEQ ID NO: 2166880 - RNA, 19 nt, Artificial Sequence
  Description of Artificial Sequence: Synthetic oligonucleotide
uccaugaagaaugaagacu

SEQ ID NO: 2166881 - RNA, 19 nt, Artificial Sequence
  Description of Artificial Sequence: Synthetic oligonucleotide
gacgcuugaaauuacaccu

SEQ ID NO: 2166882 - RNA, 19 nt, Artificial Sequence
  Description of Artificial Sequence: Synthetic oligonucleotide
aaaucuaguuuuaucuuca

SEQ ID NO: 2166883 - RNA, 19 nt, Artificial Sequence
  Description of Artificial Sequence: Synthetic oligonucleotide
aucucaacaaaggccauac

SEQ ID NO: 2166884 - RNA, 19 nt, Artificial Sequence
  Description of Artificial Sequence: Synthetic oligonucleotide
acacacacacauaacacac

SEQ ID NO: 2166885 - RNA, 19 nt, Artificial Sequence
  Description of Artificial Sequence: Synthetic oligonucleotide
uguguggaauuaaauuucu

SEQ ID NO: 2166886 - RNA, 19 nt, Artificial Sequence
  Description of Artificial Sequence: Synthetic oligonucleotide
uggaauuaaauuucuuuua

SEQ ID NO: 2166887 - RNA, 19 nt, Artificial Sequence
  Description of Artificial Sequence: Synthetic oligonucleotide
ucuuagucuaccuccauua

SEQ ID NO: 2166888 - RNA, 19 nt, Artificial Sequence
  Description of Artificial Sequence: Synthetic oligonucleotide
cauauagcagugaaucaac

SEQ ID NO: 2166889 - RNA, 19 nt, Artificial Sequence
  Description of Artificial Sequence: Synthetic oligonucleotide
uucuuucaggauuaacggc

SEQ ID NO: 2166890 - RNA, 19 nt, Artificial Sequence
  Description of Artificial Sequence: Synthetic oligonucleotide
ugaauguaccuuaguuucc

SEQ ID NO: 2166891 - RNA, 19 nt, Artificial Sequence
  Description of Artificial Sequence: Synthetic oligonucleotide
uagaggacaagaagggcug

SEQ ID NO: 2166892 - RNA, 19 nt, Artificial Sequence
  Description of Artificial Sequence: Synthetic oligonucleotide
cuuaguuucccaaguguug

SEQ ID NO: 2166893 - RNA, 19 nt, Artificial Sequence
  Description of Artificial Sequence: Synthetic oligonucleotide
aaguuagacaggcuuuaga

SEQ ID NO: 2166894 - RNA, 19 nt, Artificial Sequence
  Description of Artificial Sequence: Synthetic oligonucleotide
uaaguaugucuccccauug

SEQ ID NO: 2166895 - RNA, 19 nt, Artificial Sequence
  Description of Artificial Sequence: Synthetic oligonucleotide
aaauuacaccuaauaaaug

SEQ ID NO: 2166896 - RNA, 19 nt, Artificial Sequence
  Description of Artificial Sequence: Synthetic oligonucleotide
uaacuggccccacacauga

SEQ ID NO: 2166897 - RNA, 19 nt, Artificial Sequence
  Description of Artificial Sequence: Synthetic oligonucleotide
uuuaagcaguggcauaagu

SEQ ID NO: 2166898 - RNA, 19 nt, Artificial Sequence
  Description of Artificial Sequence: Synthetic oligonucleotide
uuucaaucuuuauaacagu

SEQ ID NO: 2166899 - RNA, 19 nt, Artificial Sequence
  Description of Artificial Sequence: Synthetic oligonucleotide
uuacaccuaauaaauggau

SEQ ID NO: 2166900 - RNA, 19 nt, Artificial Sequence
  Description of Artificial Sequence: Synthetic oligonucleotide
uuaacggcaagaacagccu

SEQ ID NO: 2166901 - RNA, 19 nt, Artificial Sequence
  Description of Artificial Sequence: Synthetic oligonucleotide
aauuucuuagugcuucaua

SEQ ID NO: 2166902 - RNA, 19 nt, Artificial Sequence
  Description of Artificial Sequence: Synthetic oligonucleotide
acaucagaacaaguuagac

SEQ ID NO: 2166903 - RNA, 19 nt, Artificial Sequence
  Description of Artificial Sequence: Synthetic oligonucleotide
uuuaacagaucuugaucac

SEQ ID NO: 2166904 - RNA, 19 nt, Artificial Sequence
  Description of Artificial Sequence: Synthetic oligonucleotide
aucaacuucuuucaggauu

SEQ ID NO: 2166905 - RNA, 19 nt, Artificial Sequence
  Description of Artificial Sequence: Synthetic oligonucleotide
uuaacagaucuugaucacc

SEQ ID NO: 2166906 - RNA, 19 nt, Artificial Sequence
  Description of Artificial Sequence: Synthetic oligonucleotide
auaaucaucaacaggucgu

SEQ ID NO: 2166907 - RNA, 19 nt, Artificial Sequence
  Description of Artificial Sequence: Synthetic oligonucleotide
aaguguuggguaacaggcc

SEQ ID NO: 2166908 - RNA, 19 nt, Artificial Sequence
  Description of Artificial Sequence: Synthetic oligonucleotide
ucggcaguugcuugcauag

SEQ ID NO: 2166909 - RNA, 19 nt, Artificial Sequence
  Description of Artificial Sequence: Synthetic oligonucleotide
ugucaucaugguaaacacc

SEQ ID NO: 2166910 - RNA, 19 nt, Artificial Sequence
  Description of Artificial Sequence: Synthetic oligonucleotide
ugcuugcauagauacagug

SEQ ID NO: 2166911 - RNA, 19 nt, Artificial Sequence
  Description of Artificial Sequence: Synthetic oligonucleotide
aaaggcaacuuaaccaucu

SEQ ID NO: 2166912 - RNA, 19 nt, Artificial Sequence
  Description of Artificial Sequence: Synthetic oligonucleotide
cagacacacacacacacac

SEQ ID NO: 2166913 - RNA, 19 nt, Artificial Sequence
  Description of Artificial Sequence: Synthetic oligonucleotide
accuaauaaauggauaacu

SEQ ID NO: 2166914 - RNA, 19 nt, Artificial Sequence
  Description of Artificial Sequence: Synthetic oligonucleotide
uuagucuaccuccauuaaa

SEQ ID NO: 2166915 - RNA, 19 nt, Artificial Sequence
  Description of Artificial Sequence: Synthetic oligonucleotide
guaguaaggcaauuauuac

SEQ ID NO: 2166916 - RNA, 19 nt, Artificial Sequence
  Description of Artificial Sequence: Synthetic oligonucleotide
accuccauuaaauauuaaa

SEQ ID NO: 2166917 - RNA, 19 nt, Artificial Sequence
  Description of Artificial Sequence: Synthetic oligonucleotide
acacacacacacauaacac

SEQ ID NO: 2166918 - RNA, 19 nt, Artificial Sequence
  Description of Artificial Sequence: Synthetic oligonucleotide
ucaacauauagcagugaau

SEQ ID NO: 2166919 - RNA, 19 nt, Artificial Sequence
  Description of Artificial Sequence: Synthetic oligonucleotide
acugucuuaaaucuauaua

SEQ ID NO: 2166920 - RNA, 19 nt, Artificial Sequence
  Description of Artificial Sequence: Synthetic oligonucleotide
uuuagaggacaagaagggc

SEQ ID NO: 2166921 - RNA, 19 nt, Artificial Sequence
  Description of Artificial Sequence: Synthetic oligonucleotide
cacagacacacacacacac

SEQ ID NO: 2166922 - RNA, 19 nt, Artificial Sequence
  Description of Artificial Sequence: Synthetic oligonucleotide
uaagacgcuugaaauuaca

SEQ ID NO: 2166923 - RNA, 19 nt, Artificial Sequence
  Description of Artificial Sequence: Synthetic oligonucleotide
aacuucuuucaggauuaac

SEQ ID NO: 2166924 - RNA, 19 nt, Artificial Sequence
  Description of Artificial Sequence: Synthetic oligonucleotide
gaauguaccuuaguuuccc

SEQ ID NO: 2166925 - RNA, 19 nt, Artificial Sequence
  Description of Artificial Sequence: Synthetic oligonucleotide
ggcaagaacagccucuggg

SEQ ID NO: 2166926 - RNA, 19 nt, Artificial Sequence
  Description of Artificial Sequence: Synthetic oligonucleotide
ucaucuuagucuaccucca

SEQ ID NO: 2166927 - RNA, 19 nt, Artificial Sequence
  Description of Artificial Sequence: Synthetic oligonucleotide
uacaccuaauaaauggaua

SEQ ID NO: 2166928 - RNA, 19 nt, Artificial Sequence
  Description of Artificial Sequence: Synthetic oligonucleotide
aggcaauuauuacuuaaga

SEQ ID NO: 2166929 - RNA, 19 nt, Artificial Sequence
  Description of Artificial Sequence: Synthetic oligonucleotide
uggauaacuggccccacac

SEQ ID NO: 2166930 - RNA, 19 nt, Artificial Sequence
  Description of Artificial Sequence: Synthetic oligonucleotide
ucaugguaaacaccucugu

SEQ ID NO: 2166931 - RNA, 19 nt, Artificial Sequence
  Description of Artificial Sequence: Synthetic oligonucleotide
aaacaccucuguuuccaug

SEQ ID NO: 2166932 - RNA, 19 nt, Artificial Sequence
  Description of Artificial Sequence: Synthetic oligonucleotide
ccaaauaaucaucaacagg

SEQ ID NO: 2166933 - RNA, 19 nt, Artificial Sequence
  Description of Artificial Sequence: Synthetic oligonucleotide
augucuccccauugcagcc

SEQ ID NO: 2166934 - RNA, 19 nt, Artificial Sequence
  Description of Artificial Sequence: Synthetic oligonucleotide
aaaaggcaacuuaaccauc

SEQ ID NO: 2166935 - RNA, 19 nt, Artificial Sequence
  Description of Artificial Sequence: Synthetic oligonucleotide
aaaaggaaugucaguguca

SEQ ID NO: 2166936 - RNA, 19 nt, Artificial Sequence
  Description of Artificial Sequence: Synthetic oligonucleotide
ggcaauuauuacuuaagac

SEQ ID NO: 2166937 - RNA, 19 nt, Artificial Sequence
  Description of Artificial Sequence: Synthetic oligonucleotide
aguaaggcaauuauuacuu

SEQ ID NO: 2166938 - RNA, 19 nt, Artificial Sequence
  Description of Artificial Sequence: Synthetic oligonucleotide
auuguuugaaaaggcaacu

SEQ ID NO: 2166939 - RNA, 19 nt, Artificial Sequence
  Description of Artificial Sequence: Synthetic oligonucleotide
aauuauuacuuaagacgcu

SEQ ID NO: 2166940 - RNA, 19 nt, Artificial Sequence
  Description of Artificial Sequence: Synthetic oligonucleotide
cauagcucuaaaugcuggc

SEQ ID NO: 2166941 - RNA, 19 nt, Artificial Sequence
  Description of Artificial Sequence: Synthetic oligonucleotide
uacuagucaucuuagucua

SEQ ID NO: 2166942 - RNA, 19 nt, Artificial Sequence
  Description of Artificial Sequence: Synthetic oligonucleotide
aaauguaguaaggcaauua

SEQ ID NO: 2166943 - RNA, 19 nt, Artificial Sequence
  Description of Artificial Sequence: Synthetic oligonucleotide
acagugaucuggucgauaa

SEQ ID NO: 2166944 - RNA, 19 nt, Artificial Sequence
  Description of Artificial Sequence: Synthetic oligonucleotide
acugcgauacuagucaucu

SEQ ID NO: 2166945 - RNA, 19 nt, Artificial Sequence
  Description of Artificial Sequence: Synthetic oligonucleotide
uuggguaacaggccaugug

SEQ ID NO: 2166946 - RNA, 19 nt, Artificial Sequence
  Description of Artificial Sequence: Synthetic oligonucleotide
acauauagcagugaaucaa

SEQ ID NO: 2166947 - RNA, 19 nt, Artificial Sequence
  Description of Artificial Sequence: Synthetic oligonucleotide
gaagcacauggcuuaaaga

SEQ ID NO: 2166948 - RNA, 19 nt, Artificial Sequence
  Description of Artificial Sequence: Synthetic oligonucleotide
acacaacaauuucuuagug

SEQ ID NO: 2166949 - RNA, 19 nt, Artificial Sequence
  Description of Artificial Sequence: Synthetic oligonucleotide
caucagaacaaguuagaca

SEQ ID NO: 2166950 - RNA, 19 nt, Artificial Sequence
  Description of Artificial Sequence: Synthetic oligonucleotide
uauagcagugaaucaacuu

SEQ ID NO: 2166951 - RNA, 19 nt, Artificial Sequence
  Description of Artificial Sequence: Synthetic oligonucleotide
acuuaagacgcuugaaauu

SEQ ID NO: 2166952 - RNA, 19 nt, Artificial Sequence
  Description of Artificial Sequence: Synthetic oligonucleotide
caacaggucguaagaaaag

SEQ ID NO: 2166953 - RNA, 19 nt, Artificial Sequence
  Description of Artificial Sequence: Synthetic oligonucleotide
aauuccauuggcacggaaa

SEQ ID NO: 2166954 - RNA, 19 nt, Artificial Sequence
  Description of Artificial Sequence: Synthetic oligonucleotide
uuucuuccacuccacggca

SEQ ID NO: 2166955 - RNA, 19 nt, Artificial Sequence
  Description of Artificial Sequence: Synthetic oligonucleotide
uuuugcgauaagaucucaa

SEQ ID NO: 2166956 - RNA, 19 nt, Artificial Sequence
  Description of Artificial Sequence: Synthetic oligonucleotide
uuuuaucuucaaugaauua

SEQ ID NO: 2166957 - RNA, 19 nt, Artificial Sequence
  Description of Artificial Sequence: Synthetic oligonucleotide
cacaugacauauugcacac

SEQ ID NO: 2166958 - RNA, 19 nt, Artificial Sequence
  Description of Artificial Sequence: Synthetic oligonucleotide
uuaagacgcuugaaauuac

SEQ ID NO: 2166959 - RNA, 19 nt, Artificial Sequence
  Description of Artificial Sequence: Synthetic oligonucleotide
uaccuuaguuucccaagug

SEQ ID NO: 2166960 - RNA, 19 nt, Artificial Sequence
  Description of Artificial Sequence: Synthetic oligonucleotide
auuacaccuaauaaaugga

SEQ ID NO: 2166961 - RNA, 19 nt, Artificial Sequence
  Description of Artificial Sequence: Synthetic oligonucleotide
acagaucuugaucacccca

SEQ ID NO: 2166962 - RNA, 19 nt, Artificial Sequence
  Description of Artificial Sequence: Synthetic oligonucleotide
uucauacauagcucuaaau

SEQ ID NO: 2166963 - RNA, 19 nt, Artificial Sequence
  Description of Artificial Sequence: Synthetic oligonucleotide
cacacacacacacauaaca

SEQ ID NO: 2166964 - RNA, 19 nt, Artificial Sequence
  Description of Artificial Sequence: Synthetic oligonucleotide
auacauagcucuaaaugcu

SEQ ID NO: 2166965 - RNA, 19 nt, Artificial Sequence
  Description of Artificial Sequence: Synthetic oligonucleotide
accuuaguuucccaagugu

SEQ ID NO: 2166966 - RNA, 19 nt, Artificial Sequence
  Description of Artificial Sequence: Synthetic oligonucleotide
aauguaccuuaguuuccca

SEQ ID NO: 2166967 - RNA, 19 nt, Artificial Sequence
  Description of Artificial Sequence: Synthetic oligonucleotide
cacacaugacauauugcac

SEQ ID NO: 2166968 - RNA, 19 nt, Artificial Sequence
  Description of Artificial Sequence: Synthetic oligonucleotide
augacuacugcgauacuag

SEQ ID NO: 2166969 - RNA, 19 nt, Artificial Sequence
  Description of Artificial Sequence: Synthetic oligonucleotide
auagauacagugaucuggu

SEQ ID NO: 2166970 - RNA, 19 nt, Artificial Sequence
  Description of Artificial Sequence: Synthetic oligonucleotide
uugaucaccccaugugaug

SEQ ID NO: 2166971 - RNA, 19 nt, Artificial Sequence
  Description of Artificial Sequence: Synthetic oligonucleotide
ucaggauuaacggcaagaa

SEQ ID NO: 2166972 - RNA, 19 nt, Artificial Sequence
  Description of Artificial Sequence: Synthetic oligonucleotide
aaucuaguuuuaucuucaa

SEQ ID NO: 2166973 - RNA, 19 nt, Artificial Sequence
  Description of Artificial Sequence: Synthetic oligonucleotide
guaacaggccaugugcuag

SEQ ID NO: 2166974 - RNA, 19 nt, Artificial Sequence
  Description of Artificial Sequence: Synthetic oligonucleotide
auuauuacuuaagacgcuu

SEQ ID NO: 2166975 - RNA, 19 nt, Artificial Sequence
  Description of Artificial Sequence: Synthetic oligonucleotide
aucaacaggucguaagaaa

SEQ ID NO: 2166976 - RNA, 19 nt, Artificial Sequence
  Description of Artificial Sequence: Synthetic oligonucleotide
gaaugaagacuccuuccuc

SEQ ID NO: 2166977 - RNA, 19 nt, Artificial Sequence
  Description of Artificial Sequence: Synthetic oligonucleotide
caaacaucagaacaaguua

SEQ ID NO: 2166978 - RNA, 19 nt, Artificial Sequence
  Description of Artificial Sequence: Synthetic oligonucleotide
ugaucaccccaugugaugu

SEQ ID NO: 2166979 - RNA, 19 nt, Artificial Sequence
  Description of Artificial Sequence: Synthetic oligonucleotide
aauggauaacuggccccac

SEQ ID NO: 2166980 - RNA, 19 nt, Artificial Sequence
  Description of Artificial Sequence: Synthetic oligonucleotide
guuugaaaaggcaacuuaa

SEQ ID NO: 2166981 - RNA, 19 nt, Artificial Sequence
  Description of Artificial Sequence: Synthetic oligonucleotide
cuuaagacgcuugaaauua

SEQ ID NO: 2166982 - RNA, 19 nt, Artificial Sequence
  Description of Artificial Sequence: Synthetic oligonucleotide
acaacugucuuaaaucuau

SEQ ID NO: 2166983 - RNA, 19 nt, Artificial Sequence
  Description of Artificial Sequence: Synthetic oligonucleotide
gugaaucaacuucuuucag

SEQ ID NO: 2166984 - RNA, 19 nt, Artificial Sequence
  Description of Artificial Sequence: Synthetic oligonucleotide
cacacacacacacacauaa

SEQ ID NO: 2166985 - RNA, 19 nt, Artificial Sequence
  Description of Artificial Sequence: Synthetic oligonucleotide
gucaucaugguaaacaccu

SEQ ID NO: 2166986 - RNA, 19 nt, Artificial Sequence
  Description of Artificial Sequence: Synthetic oligonucleotide
ucuuagugcuucauacaua

SEQ ID NO: 2166987 - RNA, 19 nt, Artificial Sequence
  Description of Artificial Sequence: Synthetic oligonucleotide
aacaaguuagacaggcuuu

SEQ ID NO: 2166988 - RNA, 19 nt, Artificial Sequence
  Description of Artificial Sequence: Synthetic oligonucleotide
uaacacagacacacacaca

SEQ ID NO: 2166989 - RNA, 19 nt, Artificial Sequence
  Description of Artificial Sequence: Synthetic oligonucleotide
cacacacacacauaacaca

SEQ ID NO: 2166990 - RNA, 19 nt, Artificial Sequence
  Description of Artificial Sequence: Synthetic oligonucleotide
ggauuaacggcaagaacag

SEQ ID NO: 2166991 - RNA, 19 nt, Artificial Sequence
  Description of Artificial Sequence: Synthetic oligonucleotide
aaaauguaguaaggcaauu

SEQ ID NO: 2166992 - RNA, 19 nt, Artificial Sequence
  Description of Artificial Sequence: Synthetic oligonucleotide
gaacaaguuagacaggcuu

SEQ ID NO: 2166993 - RNA, 19 nt, Artificial Sequence
  Description of Artificial Sequence: Synthetic oligonucleotide
uggcauaaguaugucuccc

SEQ ID NO: 2166994 - RNA, 19 nt, Artificial Sequence
  Description of Artificial Sequence: Synthetic oligonucleotide
auacuggccuugaauguac

SEQ ID NO: 2166995 - RNA, 19 nt, Artificial Sequence
  Description of Artificial Sequence: Synthetic oligonucleotide
agugaucuggucgauaauu

SEQ ID NO: 2166996 - RNA, 19 nt, Artificial Sequence
  Description of Artificial Sequence: Synthetic oligonucleotide
caucuuucuaacacagaca

SEQ ID NO: 2166997 - RNA, 19 nt, Artificial Sequence
  Description of Artificial Sequence: Synthetic oligonucleotide
ucuuuuaguuaaugaccaa

SEQ ID NO: 2166998 - RNA, 19 nt, Artificial Sequence
  Description of Artificial Sequence: Synthetic oligonucleotide
uuagugcuucauacauagc

SEQ ID NO: 2166999 - RNA, 19 nt, Artificial Sequence
  Description of Artificial Sequence: Synthetic oligonucleotide
aacggcaagaacagccucu

SEQ ID NO: 2167000 - RNA, 19 nt, Artificial Sequence
  Description of Artificial Sequence: Synthetic oligonucleotide
ugcuagcaugcccaguuuc

SEQ ID NO: 2167001 - RNA, 19 nt, Artificial Sequence
  Description of Artificial Sequence: Synthetic oligonucleotide
uaacaggccaugugcuagc

SEQ ID NO: 2167002 - RNA, 19 nt, Artificial Sequence
  Description of Artificial Sequence: Synthetic oligonucleotide
agaucuugaucaccccaug

SEQ ID NO: 2167003 - RNA, 19 nt, Artificial Sequence
  Description of Artificial Sequence: Synthetic oligonucleotide
ccaaguguuggguaacagg

SEQ ID NO: 2167004 - RNA, 19 nt, Artificial Sequence
  Description of Artificial Sequence: Synthetic oligonucleotide
guggaauuaaauuucuuuu

SEQ ID NO: 2167005 - RNA, 19 nt, Artificial Sequence
  Description of Artificial Sequence: Synthetic oligonucleotide
auuacuuaagacgcuugaa

SEQ ID NO: 2167006 - RNA, 19 nt, Artificial Sequence
  Description of Artificial Sequence: Synthetic oligonucleotide
ucguaagaaaaggaauguc

SEQ ID NO: 2167007 - RNA, 19 nt, Artificial Sequence
  Description of Artificial Sequence: Synthetic oligonucleotide
gaugacuacugcgauacua

SEQ ID NO: 2167008 - RNA, 19 nt, Artificial Sequence
  Description of Artificial Sequence: Synthetic oligonucleotide
uggccuugaauguaccuua

SEQ ID NO: 2167009 - RNA, 19 nt, Artificial Sequence
  Description of Artificial Sequence: Synthetic oligonucleotide
gucgauaauuccauuggca

SEQ ID NO: 2167010 - RNA, 19 nt, Artificial Sequence
  Description of Artificial Sequence: Synthetic oligonucleotide
aucaugguaaacaccucug

SEQ ID NO: 2167011 - RNA, 19 nt, Artificial Sequence
  Description of Artificial Sequence: Synthetic oligonucleotide
ugacuacugcgauacuagu

SEQ ID NO: 2167012 - RNA, 19 nt, Artificial Sequence
  Description of Artificial Sequence: Synthetic oligonucleotide
uugcauagauacagugauc

SEQ ID NO: 2167013 - RNA, 19 nt, Artificial Sequence
  Description of Artificial Sequence: Synthetic oligonucleotide
ccuccauuaaauauuaaaa

SEQ ID NO: 2167014 - RNA, 19 nt, Artificial Sequence
  Description of Artificial Sequence: Synthetic oligonucleotide
ugaagacuccuuccucuuc

SEQ ID NO: 2167015 - RNA, 19 nt, Artificial Sequence
  Description of Artificial Sequence: Synthetic oligonucleotide
agaggacaagaagggcugc

SEQ ID NO: 2167016 - RNA, 19 nt, Artificial Sequence
  Description of Artificial Sequence: Synthetic oligonucleotide
aggccaugugcuagcaugc

SEQ ID NO: 2167017 - RNA, 19 nt, Artificial Sequence
  Description of Artificial Sequence: Synthetic oligonucleotide
gauuaacggcaagaacagc

SEQ ID NO: 2167018 - RNA, 19 nt, Artificial Sequence
  Description of Artificial Sequence: Synthetic oligonucleotide
caggucguaagaaaaggaa

SEQ ID NO: 2167019 - RNA, 19 nt, Artificial Sequence
  Description of Artificial Sequence: Synthetic oligonucleotide
cuuaaccaucuuucuaaca

SEQ ID NO: 2167020 - RNA, 19 nt, Artificial Sequence
  Description of Artificial Sequence: Synthetic oligonucleotide
cuugaauguaccuuaguuu

SEQ ID NO: 2167021 - RNA, 19 nt, Artificial Sequence
  Description of Artificial Sequence: Synthetic oligonucleotide
gacuacugcgauacuaguc

SEQ ID NO: 2167022 - RNA, 19 nt, Artificial Sequence
  Description of Artificial Sequence: Synthetic oligonucleotide
uaacggcaagaacagccuc

SEQ ID NO: 2167023 - RNA, 19 nt, Artificial Sequence
  Description of Artificial Sequence: Synthetic oligonucleotide
ggucgauaauuccauuggc

SEQ ID NO: 2167024 - RNA, 19 nt, Artificial Sequence
  Description of Artificial Sequence: Synthetic oligonucleotide
augaccaaauaaucaucaa

SEQ ID NO: 2167025 - RNA, 19 nt, Artificial Sequence
  Description of Artificial Sequence: Synthetic oligonucleotide
cgauaagaucucaacaaag

SEQ ID NO: 2167026 - RNA, 19 nt, Artificial Sequence
  Description of Artificial Sequence: Synthetic oligonucleotide
cguaagaaaaggaauguca

SEQ ID NO: 2167027 - RNA, 19 nt, Artificial Sequence
  Description of Artificial Sequence: Synthetic oligonucleotide
auguaccuuaguuucccaa

SEQ ID NO: 2167028 - RNA, 19 nt, Artificial Sequence
  Description of Artificial Sequence: Synthetic oligonucleotide
uaaucaucaacaggucgua

SEQ ID NO: 2167029 - RNA, 19 nt, Artificial Sequence
  Description of Artificial Sequence: Synthetic oligonucleotide
acaugauauuuaacagauc

SEQ ID NO: 2167030 - RNA, 19 nt, Artificial Sequence
  Description of Artificial Sequence: Synthetic oligonucleotide
caccuaauaaauggauaac

SEQ ID NO: 2167031 - RNA, 19 nt, Artificial Sequence
  Description of Artificial Sequence: Synthetic oligonucleotide
cacggcacugucacuuggg

SEQ ID NO: 2167032 - RNA, 19 nt, Artificial Sequence
  Description of Artificial Sequence: Synthetic oligonucleotide
ucucaacaaaggccauacu

SEQ ID NO: 2167033 - RNA, 19 nt, Artificial Sequence
  Description of Artificial Sequence: Synthetic oligonucleotide
cgauaauuccauuggcacg

SEQ ID NO: 2167034 - RNA, 19 nt, Artificial Sequence
  Description of Artificial Sequence: Synthetic oligonucleotide
ggcauaaguaugucucccc

SEQ ID NO: 2167035 - RNA, 19 nt, Artificial Sequence
  Description of Artificial Sequence: Synthetic oligonucleotide
acaggucguaagaaaagga

SEQ ID NO: 2167036 - RNA, 19 nt, Artificial Sequence
  Description of Artificial Sequence: Synthetic oligonucleotide
caggcuuuagaggacaaga

SEQ ID NO: 2167037 - RNA, 19 nt, Artificial Sequence
  Description of Artificial Sequence: Synthetic oligonucleotide
ugucuccccauugcagccg

SEQ ID NO: 2167038 - RNA, 19 nt, Artificial Sequence
  Description of Artificial Sequence: Synthetic oligonucleotide
uacugcgauacuagucauc

SEQ ID NO: 2167039 - RNA, 19 nt, Artificial Sequence
  Description of Artificial Sequence: Synthetic oligonucleotide
acacacacacacacauaac

SEQ ID NO: 2167040 - RNA, 19 nt, Artificial Sequence
  Description of Artificial Sequence: Synthetic oligonucleotide
aggucguaagaaaaggaau

SEQ ID NO: 2167041 - RNA, 19 nt, Artificial Sequence
  Description of Artificial Sequence: Synthetic oligonucleotide
ugcuucauacauagcucua

SEQ ID NO: 2167042 - RNA, 19 nt, Artificial Sequence
  Description of Artificial Sequence: Synthetic oligonucleotide
auggauaacuggccccaca

SEQ ID NO: 2167043 - RNA, 19 nt, Artificial Sequence
  Description of Artificial Sequence: Synthetic oligonucleotide
ugucaacauauagcaguga

SEQ ID NO: 2167044 - RNA, 19 nt, Artificial Sequence
  Description of Artificial Sequence: Synthetic oligonucleotide
cuaccuccauuaaauauua

SEQ ID NO: 2167045 - RNA, 19 nt, Artificial Sequence
  Description of Artificial Sequence: Synthetic oligonucleotide
uaauuccauuggcacggaa

SEQ ID NO: 2167046 - RNA, 19 nt, Artificial Sequence
  Description of Artificial Sequence: Synthetic oligonucleotide
aaaggccauacuggccuug

SEQ ID NO: 2167047 - RNA, 19 nt, Artificial Sequence
  Description of Artificial Sequence: Synthetic oligonucleotide
aggcaacuuaaccaucuuu

SEQ ID NO: 2167048 - RNA, 19 nt, Artificial Sequence
  Description of Artificial Sequence: Synthetic oligonucleotide
gcuuaaagaguuucuucca

SEQ ID NO: 2167049 - RNA, 19 nt, Artificial Sequence
  Description of Artificial Sequence: Synthetic oligonucleotide
aaucaucaacaggucguaa

SEQ ID NO: 2167050 - RNA, 19 nt, Artificial Sequence
  Description of Artificial Sequence: Synthetic oligonucleotide
ugcuugucaucaugguaaa

SEQ ID NO: 2167051 - RNA, 19 nt, Artificial Sequence
  Description of Artificial Sequence: Synthetic oligonucleotide
acuagucaucuuagucuac

SEQ ID NO: 2167052 - RNA, 19 nt, Artificial Sequence
  Description of Artificial Sequence: Synthetic oligonucleotide
acaaguuagacaggcuuua

SEQ ID NO: 2167053 - RNA, 19 nt, Artificial Sequence
  Description of Artificial Sequence: Synthetic oligonucleotide
agucuaccuccauuaaaua

SEQ ID NO: 2167054 - RNA, 19 nt, Artificial Sequence
  Description of Artificial Sequence: Synthetic oligonucleotide
caaguuagacaggcuuuag

SEQ ID NO: 2167055 - RNA, 19 nt, Artificial Sequence
  Description of Artificial Sequence: Synthetic oligonucleotide
cuucauacauagcucuaaa

SEQ ID NO: 2167056 - RNA, 19 nt, Artificial Sequence
  Description of Artificial Sequence: Synthetic oligonucleotide
auggcuuaaagaguuucuu

SEQ ID NO: 2167057 - RNA, 19 nt, Artificial Sequence
  Description of Artificial Sequence: Synthetic oligonucleotide
aagggcugcuuuggcaaug

SEQ ID NO: 2167058 - RNA, 19 nt, Artificial Sequence
  Description of Artificial Sequence: Synthetic oligonucleotide
uccccauugcagccgcgug

SEQ ID NO: 2167059 - RNA, 19 nt, Artificial Sequence
  Description of Artificial Sequence: Synthetic oligonucleotide
caugacauauugcacacuu

SEQ ID NO: 2167060 - RNA, 19 nt, Artificial Sequence
  Description of Artificial Sequence: Synthetic oligonucleotide
gucuaccuccauuaaauau

SEQ ID NO: 2167061 - RNA, 19 nt, Artificial Sequence
  Description of Artificial Sequence: Synthetic oligonucleotide
aaggccauacuggccuuga

SEQ ID NO: 2167062 - RNA, 19 nt, Artificial Sequence
  Description of Artificial Sequence: Synthetic oligonucleotide
cacacacacauaacacaca

SEQ ID NO: 2167063 - RNA, 19 nt, Artificial Sequence
  Description of Artificial Sequence: Synthetic oligonucleotide
caagaacagccucugggaa

SEQ ID NO: 2167064 - RNA, 19 nt, Artificial Sequence
  Description of Artificial Sequence: Synthetic oligonucleotide
uccacggcacugucacuug

SEQ ID NO: 2167065 - RNA, 19 nt, Artificial Sequence
  Description of Artificial Sequence: Synthetic oligonucleotide
uagcaugcccaguuucaau

SEQ ID NO: 2167066 - RNA, 19 nt, Artificial Sequence
  Description of Artificial Sequence: Synthetic oligonucleotide
acggcacugucacuuggga

SEQ ID NO: 2167067 - RNA, 19 nt, Artificial Sequence
  Description of Artificial Sequence: Synthetic oligonucleotide
guaccuuaguuucccaagu

SEQ ID NO: 2167068 - RNA, 19 nt, Artificial Sequence
  Description of Artificial Sequence: Synthetic oligonucleotide
cacacacacacacacacau

SEQ ID NO: 2167069 - RNA, 19 nt, Artificial Sequence
  Description of Artificial Sequence: Synthetic oligonucleotide
ucuggucgauaauuccauu

SEQ ID NO: 2167070 - RNA, 19 nt, Artificial Sequence
  Description of Artificial Sequence: Synthetic oligonucleotide
aucuggucgauaauuccau

SEQ ID NO: 2167071 - RNA, 19 nt, Artificial Sequence
  Description of Artificial Sequence: Synthetic oligonucleotide
acggcaagaacagccucug

SEQ ID NO: 2167072 - RNA, 19 nt, Artificial Sequence
  Description of Artificial Sequence: Synthetic oligonucleotide
caccccaugugauguucag

SEQ ID NO: 2167073 - RNA, 19 nt, Artificial Sequence
  Description of Artificial Sequence: Synthetic oligonucleotide
gucguaagaaaaggaaugu

SEQ ID NO: 2167074 - RNA, 19 nt, Artificial Sequence
  Description of Artificial Sequence: Synthetic oligonucleotide
cuuagucuaccuccauuaa

SEQ ID NO: 2167075 - RNA, 19 nt, Artificial Sequence
  Description of Artificial Sequence: Synthetic oligonucleotide
gcgauacuagucaucuuag

SEQ ID NO: 2167076 - RNA, 19 nt, Artificial Sequence
  Description of Artificial Sequence: Synthetic oligonucleotide
uccacuccacggcacuguc

SEQ ID NO: 2167077 - RNA, 19 nt, Artificial Sequence
  Description of Artificial Sequence: Synthetic oligonucleotide
acagacacacacacacaca

SEQ ID NO: 2167078 - RNA, 19 nt, Artificial Sequence
  Description of Artificial Sequence: Synthetic oligonucleotide
cuaaaugcuggcugcuugu

SEQ ID NO: 2167079 - RNA, 19 nt, Artificial Sequence
  Description of Artificial Sequence: Synthetic oligonucleotide
cacacacauaacacacaca

SEQ ID NO: 2167080 - RNA, 19 nt, Artificial Sequence
  Description of Artificial Sequence: Synthetic oligonucleotide
guaaggcaauuauuacuua

SEQ ID NO: 2167081 - RNA, 19 nt, Artificial Sequence
  Description of Artificial Sequence: Synthetic oligonucleotide
aguugcuugcauagauaca

SEQ ID NO: 2167082 - RNA, 19 nt, Artificial Sequence
  Description of Artificial Sequence: Synthetic oligonucleotide
cauggcuuaaagaguuucu

SEQ ID NO: 2167083 - RNA, 19 nt, Artificial Sequence
  Description of Artificial Sequence: Synthetic oligonucleotide
uucucggcaguugcuugca

SEQ ID NO: 2167084 - RNA, 19 nt, Artificial Sequence
  Description of Artificial Sequence: Synthetic oligonucleotide
gcauagauacagugaucug

SEQ ID NO: 2167085 - RNA, 19 nt, Artificial Sequence
  Description of Artificial Sequence: Synthetic oligonucleotide
gcuugcauagauacaguga

SEQ ID NO: 2167086 - RNA, 19 nt, Artificial Sequence
  Description of Artificial Sequence: Synthetic oligonucleotide
aggcuuuagaggacaagaa

SEQ ID NO: 2167087 - RNA, 19 nt, Artificial Sequence
  Description of Artificial Sequence: Synthetic oligonucleotide
gcgauaagaucucaacaaa

SEQ ID NO: 2167088 - RNA, 19 nt, Artificial Sequence
  Description of Artificial Sequence: Synthetic oligonucleotide
cguguucuggggccgaucg

SEQ ID NO: 2167089 - RNA, 19 nt, Artificial Sequence
  Description of Artificial Sequence: Synthetic oligonucleotide
gaucucaacaaaggccaua

SEQ ID NO: 2167090 - RNA, 19 nt, Artificial Sequence
  Description of Artificial Sequence: Synthetic oligonucleotide
gacauauugcacacuuuau

SEQ ID NO: 2167091 - RNA, 19 nt, Artificial Sequence
  Description of Artificial Sequence: Synthetic oligonucleotide
ugcuucucggcaguugcuu

SEQ ID NO: 2167092 - RNA, 19 nt, Artificial Sequence
  Description of Artificial Sequence: Synthetic oligonucleotide
acaugacauauugcacacu

SEQ ID NO: 2167093 - RNA, 19 nt, Artificial Sequence
  Description of Artificial Sequence: Synthetic oligonucleotide
agacacacacacacacaca

SEQ ID NO: 2167094 - RNA, 19 nt, Artificial Sequence
  Description of Artificial Sequence: Synthetic oligonucleotide
cauacuggccuugaaugua

SEQ ID NO: 2167095 - RNA, 19 nt, Artificial Sequence
  Description of Artificial Sequence: Synthetic oligonucleotide
caucaacaggucguaagaa

SEQ ID NO: 2167096 - RNA, 19 nt, Artificial Sequence
  Description of Artificial Sequence: Synthetic oligonucleotide
agaugacuacugcgauacu

SEQ ID NO: 2167097 - RNA, 19 nt, Artificial Sequence
  Description of Artificial Sequence: Synthetic oligonucleotide
uacagugaucuggucgaua

SEQ ID NO: 2167098 - RNA, 19 nt, Artificial Sequence
  Description of Artificial Sequence: Synthetic oligonucleotide
gcagccgcguguucugggg

SEQ ID NO: 2167099 - RNA, 19 nt, Artificial Sequence
  Description of Artificial Sequence: Synthetic oligonucleotide
caaacaggcuuucuggauu

SEQ ID NO: 2167100 - RNA, 19 nt, Artificial Sequence
  Description of Artificial Sequence: Synthetic oligonucleotide
acacacacacacacacaca

SEQ ID NO: 2167101 - RNA, 19 nt, Artificial Sequence
  Description of Artificial Sequence: Synthetic oligonucleotide
ccgaucgcagcaauuugug

SEQ ID NO: 2167102 - RNA, 19 nt, Artificial Sequence
  Description of Artificial Sequence: Synthetic oligonucleotide
acacagacacacacacaca

SEQ ID NO: 2167103 - RNA, 19 nt, Artificial Sequence
  Description of Artificial Sequence: Synthetic oligonucleotide
auaauuccauuggcacgga

SEQ ID NO: 2167104 - RNA, 19 nt, Artificial Sequence
  Description of Artificial Sequence: Synthetic oligonucleotide
guguucuggggccgaucgc

SEQ ID NO: 2167105 - RNA, 19 nt, Artificial Sequence
  Description of Artificial Sequence: Synthetic oligonucleotide
caugguaaacaccucuguu

SEQ ID NO: 2167106 - RNA, 19 nt, Artificial Sequence
  Description of Artificial Sequence: Synthetic oligonucleotide
ggauaacuggccccacaca

SEQ ID NO: 2167107 - RNA, 19 nt, Artificial Sequence
  Description of Artificial Sequence: Synthetic oligonucleotide
accaucuuucuaacacaga

SEQ ID NO: 2167108 - RNA, 19 nt, Artificial Sequence
  Description of Artificial Sequence: Synthetic oligonucleotide
ucgcagcaauuugugugga

SEQ ID NO: 2167109 - RNA, 19 nt, Artificial Sequence
  Description of Artificial Sequence: Synthetic oligonucleotide
cagaucuugaucaccccau

SEQ ID NO: 2167110 - RNA, 19 nt, Artificial Sequence
  Description of Artificial Sequence: Synthetic oligonucleotide
cagccgcguguucuggggc

SEQ ID NO: 2167111 - RNA, 19 nt, Artificial Sequence
  Description of Artificial Sequence: Synthetic oligonucleotide
aacaggcuuucuggauuau

SEQ ID NO: 2167112 - RNA, 19 nt, Artificial Sequence
  Description of Artificial Sequence: Synthetic oligonucleotide
caacugucuuaaaucuaua

SEQ ID NO: 2167113 - RNA, 19 nt, Artificial Sequence
  Description of Artificial Sequence: Synthetic oligonucleotide
ugggaagcacauggcuuaa

SEQ ID NO: 2167114 - RNA, 19 nt, Artificial Sequence
  Description of Artificial Sequence: Synthetic oligonucleotide
gguaacaggccaugugcua

SEQ ID NO: 2167115 - RNA, 19 nt, Artificial Sequence
  Description of Artificial Sequence: Synthetic oligonucleotide
ucucggcaguugcuugcau

SEQ ID NO: 2167116 - RNA, 19 nt, Artificial Sequence
  Description of Artificial Sequence: Synthetic oligonucleotide
accccaugugauguucagu

SEQ ID NO: 2167117 - RNA, 19 nt, Artificial Sequence
  Description of Artificial Sequence: Synthetic oligonucleotide
cuagcaugcccaguuucaa

SEQ ID NO: 2167118 - RNA, 19 nt, Artificial Sequence
  Description of Artificial Sequence: Synthetic oligonucleotide
ggccgaucgcagcaauuug

SEQ ID NO: 2167119 - RNA, 19 nt, Artificial Sequence
  Description of Artificial Sequence: Synthetic oligonucleotide
gcuucauacauagcucuaa

SEQ ID NO: 2167120 - RNA, 19 nt, Artificial Sequence
  Description of Artificial Sequence: Synthetic oligonucleotide
caguggcauaaguaugucu

SEQ ID NO: 2167121 - RNA, 19 nt, Artificial Sequence
  Description of Artificial Sequence: Synthetic oligonucleotide
uggggccgaucgcagcaau

SEQ ID NO: 2167122 - RNA, 19 nt, Artificial Sequence
  Description of Artificial Sequence: Synthetic oligonucleotide
acgcuugaaauuacaccua

SEQ ID NO: 2167123 - RNA, 19 nt, Artificial Sequence
  Description of Artificial Sequence: Synthetic oligonucleotide
ggccuugaauguaccuuag

SEQ ID NO: 2167124 - RNA, 19 nt, Artificial Sequence
  Description of Artificial Sequence: Synthetic oligonucleotide
agcagugaaucaacuucuu

SEQ ID NO: 2167125 - RNA, 19 nt, Artificial Sequence
  Description of Artificial Sequence: Synthetic oligonucleotide
ccuugaauguaccuuaguu

SEQ ID NO: 2167126 - RNA, 19 nt, Artificial Sequence
  Description of Artificial Sequence: Synthetic oligonucleotide
gaggacaagaagggcugcu

SEQ ID NO: 2167127 - RNA, 19 nt, Artificial Sequence
  Description of Artificial Sequence: Synthetic oligonucleotide
uggccccacacaugacaua

SEQ ID NO: 2167128 - RNA, 19 nt, Artificial Sequence
  Description of Artificial Sequence: Synthetic oligonucleotide
acacacacacacacacaua

SEQ ID NO: 2167129 - RNA, 19 nt, Artificial Sequence
  Description of Artificial Sequence: Synthetic oligonucleotide
gaagggcugcuuuggcaau

SEQ ID NO: 2167130 - RNA, 19 nt, Artificial Sequence
  Description of Artificial Sequence: Synthetic oligonucleotide
ccacggcacugucacuugg

SEQ ID NO: 2167131 - RNA, 19 nt, Artificial Sequence
  Description of Artificial Sequence: Synthetic oligonucleotide
guuggguaacaggccaugu

SEQ ID NO: 2167132 - RNA, 19 nt, Artificial Sequence
  Description of Artificial Sequence: Synthetic oligonucleotide
aggccauacuggccuugaa

SEQ ID NO: 2167133 - RNA, 19 nt, Artificial Sequence
  Description of Artificial Sequence: Synthetic oligonucleotide
gcagcaauuuguguggaau

SEQ ID NO: 2167134 - RNA, 19 nt, Artificial Sequence
  Description of Artificial Sequence: Synthetic oligonucleotide
gcacauggcuuaaagaguu

SEQ ID NO: 2167135 - RNA, 19 nt, Artificial Sequence
  Description of Artificial Sequence: Synthetic oligonucleotide
cuacugcgauacuagucau

SEQ ID NO: 2167136 - RNA, 19 nt, Artificial Sequence
  Description of Artificial Sequence: Synthetic oligonucleotide
gcaugcccaguuucaaucu

SEQ ID NO: 2167137 - RNA, 19 nt, Artificial Sequence
  Description of Artificial Sequence: Synthetic oligonucleotide
ccuuaguuucccaaguguu

SEQ ID NO: 2167138 - RNA, 19 nt, Artificial Sequence
  Description of Artificial Sequence: Synthetic oligonucleotide
cuggccuugaauguaccuu

SEQ ID NO: 2167139 - RNA, 19 nt, Artificial Sequence
  Description of Artificial Sequence: Synthetic oligonucleotide
caauuucuuagugcuucau

SEQ ID NO: 2167140 - RNA, 19 nt, Artificial Sequence
  Description of Artificial Sequence: Synthetic oligonucleotide
ccccaugugauguucaguu

SEQ ID NO: 2167141 - RNA, 19 nt, Artificial Sequence
  Description of Artificial Sequence: Synthetic oligonucleotide
cuccacggcacugucacuu

SEQ ID NO: 2167142 - RNA, 19 nt, Artificial Sequence
  Description of Artificial Sequence: Synthetic oligonucleotide
cgcuugaaauuacaccuaa

SEQ ID NO: 2167143 - RNA, 19 nt, Artificial Sequence
  Description of Artificial Sequence: Synthetic oligonucleotide
ggccccacacaugacauau

SEQ ID NO: 2167144 - RNA, 19 nt, Artificial Sequence
  Description of Artificial Sequence: Synthetic oligonucleotide
gccgaucgcagcaauuugu

SEQ ID NO: 2167145 - RNA, 19 nt, Artificial Sequence
  Description of Artificial Sequence: Synthetic oligonucleotide
guguggaauuaaauuucuu

SEQ ID NO: 2167146 - RNA, 19 nt, Artificial Sequence
  Description of Artificial Sequence: Synthetic oligonucleotide
caugcccaguuucaaucuu

SEQ ID NO: 2167147 - RNA, 19 nt, Artificial Sequence
  Description of Artificial Sequence: Synthetic oligonucleotide
gccgcguguucuggggccg

SEQ ID NO: 2167148 - RNA, 19 nt, Artificial Sequence
  Description of Artificial Sequence: Synthetic oligonucleotide
cacauggcuuaaagaguuu

SEQ ID NO: 2167149 - RNA, 19 nt, Artificial Sequence
  Description of Artificial Sequence: Synthetic oligonucleotide
gccuugaauguaccuuagu

SEQ ID NO: 2167150 - RNA, 19 nt, Artificial Sequence
  Description of Artificial Sequence: Synthetic oligonucleotide
guguuggguaacaggccau

SEQ ID NO: 2167151 - RNA, 19 nt, Artificial Sequence
  Description of Artificial Sequence: Synthetic oligonucleotide
gcuugaaauuacaccuaau

SEQ ID NO: 2167152 - RNA, 19 nt, Artificial Sequence
  Description of Artificial Sequence: Synthetic oligonucleotide
gcucuaaaugcuggcugcu

SEQ ID NO: 2167153 - RNA, 19 nt, Artificial Sequence
  Description of Artificial Sequence: Synthetic oligonucleotide
cagugaucuggucgauaau

SEQ ID NO: 2167154 - RNA, 19 nt, Artificial Sequence
  Description of Artificial Sequence: Synthetic oligonucleotide
gugcuagcaugcccaguuu

SEQ ID NO: 2167155 - RNA, 19 nt, Artificial Sequence
  Description of Artificial Sequence: Synthetic oligonucleotide
cuccccauugcagccgcgu

SEQ ID NO: 2167156 - RNA, 19 nt, Artificial Sequence
  Description of Artificial Sequence: Synthetic oligonucleotide
ccacuccacggcacuguca

SEQ ID NO: 2167157 - RNA, 19 nt, Artificial Sequence
  Description of Artificial Sequence: Synthetic oligonucleotide
gggccgaucgcagcaauuu

SEQ ID NO: 2167158 - RNA, 19 nt, Artificial Sequence
  Description of Artificial Sequence: Synthetic oligonucleotide
gggaagcacauggcuuaaa

SEQ ID NO: 2167159 - RNA, 19 nt, Artificial Sequence
  Description of Artificial Sequence: Synthetic oligonucleotide
cgauacuagucaucuuagu

SEQ ID NO: 2167160 - RNA, 19 nt, Artificial Sequence
  Description of Artificial Sequence: Synthetic oligonucleotide
cuggggccgaucgcagcaa

SEQ ID NO: 2167161 - RNA, 19 nt, Artificial Sequence
  Description of Artificial Sequence: Synthetic oligonucleotide
cugcgauacuagucaucuu

SEQ ID NO: 2167162 - RNA, 19 nt, Artificial Sequence
  Description of Artificial Sequence: Synthetic oligonucleotide
ccauugcagccgcguguuc

SEQ ID NO: 2167163 - RNA, 19 nt, Artificial Sequence
  Description of Artificial Sequence: Synthetic oligonucleotide
ccccauugcagccgcgugu

SEQ ID NO: 2167164 - RNA, 19 nt, Artificial Sequence
  Description of Artificial Sequence: Synthetic oligonucleotide
gcguguucuggggccgauc

SEQ ID NO: 2167165 - RNA, 19 nt, Artificial Sequence
  Description of Artificial Sequence: Synthetic oligonucleotide
cgaucgcagcaauuugugu

SEQ ID NO: 2167166 - RNA, 19 nt, Artificial Sequence
  Description of Artificial Sequence: Synthetic oligonucleotide
cgcagcaauuuguguggaa

SEQ ID NO: 2167167 - RNA, 19 nt, Artificial Sequence
  Description of Artificial Sequence: Synthetic oligonucleotide
cggcaguugcuugcauaga

SEQ ID NO: 2167168 - RNA, 19 nt, Artificial Sequence
  Description of Artificial Sequence: Synthetic oligonucleotide
ggggccgaucgcagcaauu

SEQ ID NO: 2167169 - RNA, 19 nt, Artificial Sequence
  Description of Artificial Sequence: Synthetic oligonucleotide
ccgcguguucuggggccga

SEQ ID NO: 2167170 - RNA, 19 nt, Artificial Sequence
  Description of Artificial Sequence: Synthetic oligonucleotide
cgcguguucuggggccgau

SEQ ID NO: 2167171 - RNA, 19 nt, Artificial Sequence
  Description of Artificial Sequence: Synthetic oligonucleotide
aauacuguuaaucaaaacc

SEQ ID NO: 2167172 - RNA, 19 nt, Artificial Sequence
  Description of Artificial Sequence: Synthetic oligonucleotide
uuagacaacaauaagaaga

SEQ ID NO: 2167173 - RNA, 19 nt, Artificial Sequence
  Description of Artificial Sequence: Synthetic oligonucleotide
aguugcaacaccuauaccc

SEQ ID NO: 2167174 - RNA, 19 nt, Artificial Sequence
  Description of Artificial Sequence: Synthetic oligonucleotide
auaagauuaaauaaguugc

SEQ ID NO: 2167175 - RNA, 19 nt, Artificial Sequence
  Description of Artificial Sequence: Synthetic oligonucleotide
aucacugucaaacaaauac

SEQ ID NO: 2167176 - RNA, 19 nt, Artificial Sequence
  Description of Artificial Sequence: Synthetic oligonucleotide
uuuauuaagaggcaaacac

SEQ ID NO: 2167177 - RNA, 19 nt, Artificial Sequence
  Description of Artificial Sequence: Synthetic oligonucleotide
ugguauaaugaauacaugg

SEQ ID NO: 2167178 - RNA, 19 nt, Artificial Sequence
  Description of Artificial Sequence: Synthetic oligonucleotide
auaaaauucacugaacugg

SEQ ID NO: 2167179 - RNA, 19 nt, Artificial Sequence
  Description of Artificial Sequence: Synthetic oligonucleotide
acaccuauaccccagauuc

SEQ ID NO: 2167180 - RNA, 19 nt, Artificial Sequence
  Description of Artificial Sequence: Synthetic oligonucleotide
uguguaauggugcagaagu

SEQ ID NO: 2167181 - RNA, 19 nt, Artificial Sequence
  Description of Artificial Sequence: Synthetic oligonucleotide
ucaaauacacauuuaauuc

SEQ ID NO: 2167182 - RNA, 19 nt, Artificial Sequence
  Description of Artificial Sequence: Synthetic oligonucleotide
uuaaucaaaaccaugguuu

SEQ ID NO: 2167183 - RNA, 19 nt, Artificial Sequence
  Description of Artificial Sequence: Synthetic oligonucleotide
uucaaguuaacuuucugag

SEQ ID NO: 2167184 - RNA, 19 nt, Artificial Sequence
  Description of Artificial Sequence: Synthetic oligonucleotide
auaaugaauacauggguuc

SEQ ID NO: 2167185 - RNA, 19 nt, Artificial Sequence
  Description of Artificial Sequence: Synthetic oligonucleotide
cuguuaaucaaaaccaugg

SEQ ID NO: 2167186 - RNA, 19 nt, Artificial Sequence
  Description of Artificial Sequence: Synthetic oligonucleotide
gauuaaauaaguugcccag

SEQ ID NO: 2167187 - RNA, 19 nt, Artificial Sequence
  Description of Artificial Sequence: Synthetic oligonucleotide
aacacuuguguaauggugc

SEQ ID NO: 2167188 - RNA, 19 nt, Artificial Sequence
  Description of Artificial Sequence: Synthetic oligonucleotide
acaaauacuuuauauaaga

SEQ ID NO: 2167189 - RNA, 19 nt, Artificial Sequence
  Description of Artificial Sequence: Synthetic oligonucleotide
aaauaaguugcccagcuau

SEQ ID NO: 2167190 - RNA, 19 nt, Artificial Sequence
  Description of Artificial Sequence: Synthetic oligonucleotide
gauaaaauucacugaacug

SEQ ID NO: 2167191 - RNA, 19 nt, Artificial Sequence
  Description of Artificial Sequence: Synthetic oligonucleotide
aaugccgaggcggagaggc

SEQ ID NO: 2167192 - RNA, 19 nt, Artificial Sequence
  Description of Artificial Sequence: Synthetic oligonucleotide
uguaauacuguuaaucaaa

SEQ ID NO: 2167193 - RNA, 19 nt, Artificial Sequence
  Description of Artificial Sequence: Synthetic oligonucleotide
ucucaugucuagauaaggg

SEQ ID NO: 2167194 - RNA, 19 nt, Artificial Sequence
  Description of Artificial Sequence: Synthetic oligonucleotide
uccuuagacaacaauaaga

SEQ ID NO: 2167195 - RNA, 19 nt, Artificial Sequence
  Description of Artificial Sequence: Synthetic oligonucleotide
ucaugucuagauaagggag

SEQ ID NO: 2167196 - RNA, 19 nt, Artificial Sequence
  Description of Artificial Sequence: Synthetic oligonucleotide
acuacauuaugguauaaug

SEQ ID NO: 2167197 - RNA, 19 nt, Artificial Sequence
  Description of Artificial Sequence: Synthetic oligonucleotide
auuuugaacucaaaguagc

SEQ ID NO: 2167198 - RNA, 19 nt, Artificial Sequence
  Description of Artificial Sequence: Synthetic oligonucleotide
aauucuacauggucauacg

SEQ ID NO: 2167199 - RNA, 19 nt, Artificial Sequence
  Description of Artificial Sequence: Synthetic oligonucleotide
aaaaccaugguuuguuugu

SEQ ID NO: 2167200 - RNA, 19 nt, Artificial Sequence
  Description of Artificial Sequence: Synthetic oligonucleotide
uaaaauucacugaacuggc

SEQ ID NO: 2167201 - RNA, 19 nt, Artificial Sequence
  Description of Artificial Sequence: Synthetic oligonucleotide
aacugugcaugucucggcc

SEQ ID NO: 2167202 - RNA, 19 nt, Artificial Sequence
  Description of Artificial Sequence: Synthetic oligonucleotide
uggauuuugaacucaaagu

SEQ ID NO: 2167203 - RNA, 19 nt, Artificial Sequence
  Description of Artificial Sequence: Synthetic oligonucleotide
uucaaaaccagguggagga

SEQ ID NO: 2167204 - RNA, 19 nt, Artificial Sequence
  Description of Artificial Sequence: Synthetic oligonucleotide
aguagacuggauuuugaac

SEQ ID NO: 2167205 - RNA, 19 nt, Artificial Sequence
  Description of Artificial Sequence: Synthetic oligonucleotide
ugaguugcaacaccuauac

SEQ ID NO: 2167206 - RNA, 19 nt, Artificial Sequence
  Description of Artificial Sequence: Synthetic oligonucleotide
gaauacauggguuccuuag

SEQ ID NO: 2167207 - RNA, 19 nt, Artificial Sequence
  Description of Artificial Sequence: Synthetic oligonucleotide
uauaaugaauacauggguu

SEQ ID NO: 2167208 - RNA, 19 nt, Artificial Sequence
  Description of Artificial Sequence: Synthetic oligonucleotide
agauuaaauaaguugccca

SEQ ID NO: 2167209 - RNA, 19 nt, Artificial Sequence
  Description of Artificial Sequence: Synthetic oligonucleotide
ucaucaacauauacaacug

SEQ ID NO: 2167210 - RNA, 19 nt, Artificial Sequence
  Description of Artificial Sequence: Synthetic oligonucleotide
gauuuugaacucaaaguag

SEQ ID NO: 2167211 - RNA, 19 nt, Artificial Sequence
  Description of Artificial Sequence: Synthetic oligonucleotide
uguucucaugucuagauaa

SEQ ID NO: 2167212 - RNA, 19 nt, Artificial Sequence
  Description of Artificial Sequence: Synthetic oligonucleotide
aaauucacugaacuggcaa

SEQ ID NO: 2167213 - RNA, 19 nt, Artificial Sequence
  Description of Artificial Sequence: Synthetic oligonucleotide
ucuacauggucauacguga

SEQ ID NO: 2167214 - RNA, 19 nt, Artificial Sequence
  Description of Artificial Sequence: Synthetic oligonucleotide
auacauggguuccuuagac

SEQ ID NO: 2167215 - RNA, 19 nt, Artificial Sequence
  Description of Artificial Sequence: Synthetic oligonucleotide
uauuuauauacauguuagc

SEQ ID NO: 2167216 - RNA, 19 nt, Artificial Sequence
  Description of Artificial Sequence: Synthetic oligonucleotide
aaacugugcaugucucggc

SEQ ID NO: 2167217 - RNA, 19 nt, Artificial Sequence
  Description of Artificial Sequence: Synthetic oligonucleotide
auggucauacgugauaccc

SEQ ID NO: 2167218 - RNA, 19 nt, Artificial Sequence
  Description of Artificial Sequence: Synthetic oligonucleotide
uucuacauggucauacgug

SEQ ID NO: 2167219 - RNA, 19 nt, Artificial Sequence
  Description of Artificial Sequence: Synthetic oligonucleotide
cuugagaggaauguggccg

SEQ ID NO: 2167220 - RNA, 19 nt, Artificial Sequence
  Description of Artificial Sequence: Synthetic oligonucleotide
aacuuucugaguugcaaca

SEQ ID NO: 2167221 - RNA, 19 nt, Artificial Sequence
  Description of Artificial Sequence: Synthetic oligonucleotide
agaggaauguggccggucc

SEQ ID NO: 2167222 - RNA, 19 nt, Artificial Sequence
  Description of Artificial Sequence: Synthetic oligonucleotide
ucggccaagaggaaucugg

SEQ ID NO: 2167223 - RNA, 19 nt, Artificial Sequence
  Description of Artificial Sequence: Synthetic oligonucleotide
uaaucaaaaccaugguuug

SEQ ID NO: 2167224 - RNA, 19 nt, Artificial Sequence
  Description of Artificial Sequence: Synthetic oligonucleotide
uagcauguaauacuguuaa

SEQ ID NO: 2167225 - RNA, 19 nt, Artificial Sequence
  Description of Artificial Sequence: Synthetic oligonucleotide
aacgcaggcaacaccacgc

SEQ ID NO: 2167226 - RNA, 19 nt, Artificial Sequence
  Description of Artificial Sequence: Synthetic oligonucleotide
gguauaaugaauacauggg

SEQ ID NO: 2167227 - RNA, 19 nt, Artificial Sequence
  Description of Artificial Sequence: Synthetic oligonucleotide
auaagggagagcuuuauua

SEQ ID NO: 2167228 - RNA, 19 nt, Artificial Sequence
  Description of Artificial Sequence: Synthetic oligonucleotide
uuucaaaaccagguggagg

SEQ ID NO: 2167229 - RNA, 19 nt, Artificial Sequence
  Description of Artificial Sequence: Synthetic oligonucleotide
aauugcacugucaucaaca

SEQ ID NO: 2167230 - RNA, 19 nt, Artificial Sequence
  Description of Artificial Sequence: Synthetic oligonucleotide
ugaacuggcaauccaaaau

SEQ ID NO: 2167231 - RNA, 19 nt, Artificial Sequence
  Description of Artificial Sequence: Synthetic oligonucleotide
uguuaaucaaaaccauggu

SEQ ID NO: 2167232 - RNA, 19 nt, Artificial Sequence
  Description of Artificial Sequence: Synthetic oligonucleotide
auacuguuaaucaaaacca

SEQ ID NO: 2167233 - RNA, 19 nt, Artificial Sequence
  Description of Artificial Sequence: Synthetic oligonucleotide
aguguuuuggggucgcggg

SEQ ID NO: 2167234 - RNA, 19 nt, Artificial Sequence
  Description of Artificial Sequence: Synthetic oligonucleotide
uaauucuacauggucauac

SEQ ID NO: 2167235 - RNA, 19 nt, Artificial Sequence
  Description of Artificial Sequence: Synthetic oligonucleotide
ugcccagcuauuuuaaacc

SEQ ID NO: 2167236 - RNA, 19 nt, Artificial Sequence
  Description of Artificial Sequence: Synthetic oligonucleotide
aggaguaugauaaaauuca

SEQ ID NO: 2167237 - RNA, 19 nt, Artificial Sequence
  Description of Artificial Sequence: Synthetic oligonucleotide
uaaacaaccuccagugcca

SEQ ID NO: 2167238 - RNA, 19 nt, Artificial Sequence
  Description of Artificial Sequence: Synthetic oligonucleotide
ugucaaacaaauacuuuau

SEQ ID NO: 2167239 - RNA, 19 nt, Artificial Sequence
  Description of Artificial Sequence: Synthetic oligonucleotide
gucaucaacauauacaacu

SEQ ID NO: 2167240 - RNA, 19 nt, Artificial Sequence
  Description of Artificial Sequence: Synthetic oligonucleotide
uuuugaacucaaaguagcu

SEQ ID NO: 2167241 - RNA, 19 nt, Artificial Sequence
  Description of Artificial Sequence: Synthetic oligonucleotide
agaggaaucugguucaagu

SEQ ID NO: 2167242 - RNA, 19 nt, Artificial Sequence
  Description of Artificial Sequence: Synthetic oligonucleotide
aauguggccggucccgccg

SEQ ID NO: 2167243 - RNA, 19 nt, Artificial Sequence
  Description of Artificial Sequence: Synthetic oligonucleotide
uuccuuagacaacaauaag

SEQ ID NO: 2167244 - RNA, 19 nt, Artificial Sequence
  Description of Artificial Sequence: Synthetic oligonucleotide
acauggucauacgugauac

SEQ ID NO: 2167245 - RNA, 19 nt, Artificial Sequence
  Description of Artificial Sequence: Synthetic oligonucleotide
aaguuaacuuucugaguug

SEQ ID NO: 2167246 - RNA, 19 nt, Artificial Sequence
  Description of Artificial Sequence: Synthetic oligonucleotide
ucaacauauacaacuggau

SEQ ID NO: 2167247 - RNA, 19 nt, Artificial Sequence
  Description of Artificial Sequence: Synthetic oligonucleotide
uacacugucccucguauac

SEQ ID NO: 2167248 - RNA, 19 nt, Artificial Sequence
  Description of Artificial Sequence: Synthetic oligonucleotide
ucccucguauaccugaugc

SEQ ID NO: 2167249 - RNA, 19 nt, Artificial Sequence
  Description of Artificial Sequence: Synthetic oligonucleotide
cauuuaauucuacaugguc

SEQ ID NO: 2167250 - RNA, 19 nt, Artificial Sequence
  Description of Artificial Sequence: Synthetic oligonucleotide
uaagaggcaaacacuugug

SEQ ID NO: 2167251 - RNA, 19 nt, Artificial Sequence
  Description of Artificial Sequence: Synthetic oligonucleotide
aaacacuuguguaauggug

SEQ ID NO: 2167252 - RNA, 19 nt, Artificial Sequence
  Description of Artificial Sequence: Synthetic oligonucleotide
cacacaaaugccgaggcgg

SEQ ID NO: 2167253 - RNA, 19 nt, Artificial Sequence
  Description of Artificial Sequence: Synthetic oligonucleotide
cuacauuaugguauaauga

SEQ ID NO: 2167254 - RNA, 19 nt, Artificial Sequence
  Description of Artificial Sequence: Synthetic oligonucleotide
caugucucggccaagagga

SEQ ID NO: 2167255 - RNA, 19 nt, Artificial Sequence
  Description of Artificial Sequence: Synthetic oligonucleotide
cuuagacaacaauaagaag

SEQ ID NO: 2167256 - RNA, 19 nt, Artificial Sequence
  Description of Artificial Sequence: Synthetic oligonucleotide
ugcguguccagcuguacgg

SEQ ID NO: 2167257 - RNA, 19 nt, Artificial Sequence
  Description of Artificial Sequence: Synthetic oligonucleotide
acccacuacaucuccuucc

SEQ ID NO: 2167258 - RNA, 19 nt, Artificial Sequence
  Description of Artificial Sequence: Synthetic oligonucleotide
ugauguaaaggugcacugg

SEQ ID NO: 2167259 - RNA, 19 nt, Artificial Sequence
  Description of Artificial Sequence: Synthetic oligonucleotide
guagacuggauuuugaacu

SEQ ID NO: 2167260 - RNA, 19 nt, Artificial Sequence
  Description of Artificial Sequence: Synthetic oligonucleotide
ucugcugcucaaauaauau

SEQ ID NO: 2167261 - RNA, 19 nt, Artificial Sequence
  Description of Artificial Sequence: Synthetic oligonucleotide
uccuugagaggaauguggc

SEQ ID NO: 2167262 - RNA, 19 nt, Artificial Sequence
  Description of Artificial Sequence: Synthetic oligonucleotide
agaauguguucucaugucu

SEQ ID NO: 2167263 - RNA, 19 nt, Artificial Sequence
  Description of Artificial Sequence: Synthetic oligonucleotide
uguaaaggugcacuggcua

SEQ ID NO: 2167264 - RNA, 19 nt, Artificial Sequence
  Description of Artificial Sequence: Synthetic oligonucleotide
uaagggagagcuuuauuaa

SEQ ID NO: 2167265 - RNA, 19 nt, Artificial Sequence
  Description of Artificial Sequence: Synthetic oligonucleotide
uggcaauccaaaauugcac

SEQ ID NO: 2167266 - RNA, 19 nt, Artificial Sequence
  Description of Artificial Sequence: Synthetic oligonucleotide
cauuaugguauaaugaaua

SEQ ID NO: 2167267 - RNA, 19 nt, Artificial Sequence
  Description of Artificial Sequence: Synthetic oligonucleotide
ucaaguuaacuuucugagu

SEQ ID NO: 2167268 - RNA, 19 nt, Artificial Sequence
  Description of Artificial Sequence: Synthetic oligonucleotide
cucguauaccugaugcugg

SEQ ID NO: 2167269 - RNA, 19 nt, Artificial Sequence
  Description of Artificial Sequence: Synthetic oligonucleotide
ucauacgugauacccacua

SEQ ID NO: 2167270 - RNA, 19 nt, Artificial Sequence
  Description of Artificial Sequence: Synthetic oligonucleotide
uuagcauguaauacuguua

SEQ ID NO: 2167271 - RNA, 19 nt, Artificial Sequence
  Description of Artificial Sequence: Synthetic oligonucleotide
acauggguuccuuagacaa

SEQ ID NO: 2167272 - RNA, 19 nt, Artificial Sequence
  Description of Artificial Sequence: Synthetic oligonucleotide
uaacuuucugaguugcaac

SEQ ID NO: 2167273 - RNA, 19 nt, Artificial Sequence
  Description of Artificial Sequence: Synthetic oligonucleotide
gaagugcaaguuuugaaaa

SEQ ID NO: 2167274 - RNA, 19 nt, Artificial Sequence
  Description of Artificial Sequence: Synthetic oligonucleotide
uggcuaaacaaccuccagu

SEQ ID NO: 2167275 - RNA, 19 nt, Artificial Sequence
  Description of Artificial Sequence: Synthetic oligonucleotide
gacaacaucuguucccaug

SEQ ID NO: 2167276 - RNA, 19 nt, Artificial Sequence
  Description of Artificial Sequence: Synthetic oligonucleotide
ucugaguugcaacaccuau

SEQ ID NO: 2167277 - RNA, 19 nt, Artificial Sequence
  Description of Artificial Sequence: Synthetic oligonucleotide
aaauaagauuaaauaaguu

SEQ ID NO: 2167278 - RNA, 19 nt, Artificial Sequence
  Description of Artificial Sequence: Synthetic oligonucleotide
acacacucagaagaucugc

SEQ ID NO: 2167279 - RNA, 19 nt, Artificial Sequence
  Description of Artificial Sequence: Synthetic oligonucleotide
guaugauaaaauucacuga

SEQ ID NO: 2167280 - RNA, 19 nt, Artificial Sequence
  Description of Artificial Sequence: Synthetic oligonucleotide
ggcuaaacaaccuccagug

SEQ ID NO: 2167281 - RNA, 19 nt, Artificial Sequence
  Description of Artificial Sequence: Synthetic oligonucleotide
aaaggugcacuggcuaaac

SEQ ID NO: 2167282 - RNA, 19 nt, Artificial Sequence
  Description of Artificial Sequence: Synthetic oligonucleotide
uaauacuguuaaucaaaac

SEQ ID NO: 2167283 - RNA, 19 nt, Artificial Sequence
  Description of Artificial Sequence: Synthetic oligonucleotide
uauaccugaugcuggacaa

SEQ ID NO: 2167284 - RNA, 19 nt, Artificial Sequence
  Description of Artificial Sequence: Synthetic oligonucleotide
uguguucucaugucuagau

SEQ ID NO: 2167285 - RNA, 19 nt, Artificial Sequence
  Description of Artificial Sequence: Synthetic oligonucleotide
acaacuggauacacugucc

SEQ ID NO: 2167286 - RNA, 19 nt, Artificial Sequence
  Description of Artificial Sequence: Synthetic oligonucleotide
acuacaucuccuuccugag

SEQ ID NO: 2167287 - RNA, 19 nt, Artificial Sequence
  Description of Artificial Sequence: Synthetic oligonucleotide
caaacugugcaugucucgg

SEQ ID NO: 2167288 - RNA, 19 nt, Artificial Sequence
  Description of Artificial Sequence: Synthetic oligonucleotide
caacuggauacacuguccc

SEQ ID NO: 2167289 - RNA, 19 nt, Artificial Sequence
  Description of Artificial Sequence: Synthetic oligonucleotide
auucuacauggucauacgu

SEQ ID NO: 2167290 - RNA, 19 nt, Artificial Sequence
  Description of Artificial Sequence: Synthetic oligonucleotide
cacuggcuaaacaaccucc

SEQ ID NO: 2167291 - RNA, 19 nt, Artificial Sequence
  Description of Artificial Sequence: Synthetic oligonucleotide
ugaggaagguuguuugcug

SEQ ID NO: 2167292 - RNA, 19 nt, Artificial Sequence
  Description of Artificial Sequence: Synthetic oligonucleotide
ugauacccacuacaucucc

SEQ ID NO: 2167293 - RNA, 19 nt, Artificial Sequence
  Description of Artificial Sequence: Synthetic oligonucleotide
gaggcaaacacuuguguaa

SEQ ID NO: 2167294 - RNA, 19 nt, Artificial Sequence
  Description of Artificial Sequence: Synthetic oligonucleotide
guauaaugaauacaugggu

SEQ ID NO: 2167295 - RNA, 19 nt, Artificial Sequence
  Description of Artificial Sequence: Synthetic oligonucleotide
aaucugguucaaguuaacu

SEQ ID NO: 2167296 - RNA, 19 nt, Artificial Sequence
  Description of Artificial Sequence: Synthetic oligonucleotide
aucaacauauacaacugga

SEQ ID NO: 2167297 - RNA, 19 nt, Artificial Sequence
  Description of Artificial Sequence: Synthetic oligonucleotide
guugcaacaccuauacccc

SEQ ID NO: 2167298 - RNA, 19 nt, Artificial Sequence
  Description of Artificial Sequence: Synthetic oligonucleotide
auucacugaacuggcaauc

SEQ ID NO: 2167299 - RNA, 19 nt, Artificial Sequence
  Description of Artificial Sequence: Synthetic oligonucleotide
auguaauacuguuaaucaa

SEQ ID NO: 2167300 - RNA, 19 nt, Artificial Sequence
  Description of Artificial Sequence: Synthetic oligonucleotide
aguagcuuuuguucugaug

SEQ ID NO: 2167301 - RNA, 19 nt, Artificial Sequence
  Description of Artificial Sequence: Synthetic oligonucleotide
uacgugauacccacuacau

SEQ ID NO: 2167302 - RNA, 19 nt, Artificial Sequence
  Description of Artificial Sequence: Synthetic oligonucleotide
agcuccgcaacccgcacac

SEQ ID NO: 2167303 - RNA, 19 nt, Artificial Sequence
  Description of Artificial Sequence: Synthetic oligonucleotide
uguacggccggcaucuccu

SEQ ID NO: 2167304 - RNA, 19 nt, Artificial Sequence
  Description of Artificial Sequence: Synthetic oligonucleotide
aacccgcacacaaaugccg

SEQ ID NO: 2167305 - RNA, 19 nt, Artificial Sequence
  Description of Artificial Sequence: Synthetic oligonucleotide
uucguuguugugguauagg

SEQ ID NO: 2167306 - RNA, 19 nt, Artificial Sequence
  Description of Artificial Sequence: Synthetic oligonucleotide
aacaccuauaccccagauu

SEQ ID NO: 2167307 - RNA, 19 nt, Artificial Sequence
  Description of Artificial Sequence: Synthetic oligonucleotide
aacuacauuaugguauaau

SEQ ID NO: 2167308 - RNA, 19 nt, Artificial Sequence
  Description of Artificial Sequence: Synthetic oligonucleotide
aacuggcaauccaaaauug

SEQ ID NO: 2167309 - RNA, 19 nt, Artificial Sequence
  Description of Artificial Sequence: Synthetic oligonucleotide
cugauguaaaggugcacug

SEQ ID NO: 2167310 - RNA, 19 nt, Artificial Sequence
  Description of Artificial Sequence: Synthetic oligonucleotide
acuguuaaucaaaaccaug

SEQ ID NO: 2167311 - RNA, 19 nt, Artificial Sequence
  Description of Artificial Sequence: Synthetic oligonucleotide
agguuguuugcuggcagcc

SEQ ID NO: 2167312 - RNA, 19 nt, Artificial Sequence
  Description of Artificial Sequence: Synthetic oligonucleotide
cuggauacacugucccucg

SEQ ID NO: 2167313 - RNA, 19 nt, Artificial Sequence
  Description of Artificial Sequence: Synthetic oligonucleotide
aaguugcccagcuauuuua

SEQ ID NO: 2167314 - RNA, 19 nt, Artificial Sequence
  Description of Artificial Sequence: Synthetic oligonucleotide
guuguuugcuggcagccug

SEQ ID NO: 2167315 - RNA, 19 nt, Artificial Sequence
  Description of Artificial Sequence: Synthetic oligonucleotide
uguuagcauguaauacugu

SEQ ID NO: 2167316 - RNA, 19 nt, Artificial Sequence
  Description of Artificial Sequence: Synthetic oligonucleotide
ugcuggacaaugcauguuu

SEQ ID NO: 2167317 - RNA, 19 nt, Artificial Sequence
  Description of Artificial Sequence: Synthetic oligonucleotide
aggaaucugguucaaguua

SEQ ID NO: 2167318 - RNA, 19 nt, Artificial Sequence
  Description of Artificial Sequence: Synthetic oligonucleotide
aaacaaccuccagugccac

SEQ ID NO: 2167319 - RNA, 19 nt, Artificial Sequence
  Description of Artificial Sequence: Synthetic oligonucleotide
gccggcaucuccuugagag

SEQ ID NO: 2167320 - RNA, 19 nt, Artificial Sequence
  Description of Artificial Sequence: Synthetic oligonucleotide
aagaucugcugcucaaaua

SEQ ID NO: 2167321 - RNA, 19 nt, Artificial Sequence
  Description of Artificial Sequence: Synthetic oligonucleotide
cuggcaauccaaaauugca

SEQ ID NO: 2167322 - RNA, 19 nt, Artificial Sequence
  Description of Artificial Sequence: Synthetic oligonucleotide
uguuuuggggucgcgggag

SEQ ID NO: 2167323 - RNA, 19 nt, Artificial Sequence
  Description of Artificial Sequence: Synthetic oligonucleotide
uucacugaacuggcaaucc

SEQ ID NO: 2167324 - RNA, 19 nt, Artificial Sequence
  Description of Artificial Sequence: Synthetic oligonucleotide
augucuagauaagggagag

SEQ ID NO: 2167325 - RNA, 19 nt, Artificial Sequence
  Description of Artificial Sequence: Synthetic oligonucleotide
aaaauucccuuuaaauauu

SEQ ID NO: 2167326 - RNA, 19 nt, Artificial Sequence
  Description of Artificial Sequence: Synthetic oligonucleotide
uuugaacucaaaguagcuu

SEQ ID NO: 2167327 - RNA, 19 nt, Artificial Sequence
  Description of Artificial Sequence: Synthetic oligonucleotide
uuucagaauguguucucau

SEQ ID NO: 2167328 - RNA, 19 nt, Artificial Sequence
  Description of Artificial Sequence: Synthetic oligonucleotide
guauaccugaugcuggaca

SEQ ID NO: 2167329 - RNA, 19 nt, Artificial Sequence
  Description of Artificial Sequence: Synthetic oligonucleotide
acaacaauaagaagagcaa

SEQ ID NO: 2167330 - RNA, 19 nt, Artificial Sequence
  Description of Artificial Sequence: Synthetic oligonucleotide
ggcaacaccacgccgacgc

SEQ ID NO: 2167331 - RNA, 19 nt, Artificial Sequence
  Description of Artificial Sequence: Synthetic oligonucleotide
agagcaauuuucagaaugu

SEQ ID NO: 2167332 - RNA, 19 nt, Artificial Sequence
  Description of Artificial Sequence: Synthetic oligonucleotide
acgugauacccacuacauc

SEQ ID NO: 2167333 - RNA, 19 nt, Artificial Sequence
  Description of Artificial Sequence: Synthetic oligonucleotide
gcaacccgcacacaaaugc

SEQ ID NO: 2167334 - RNA, 19 nt, Artificial Sequence
  Description of Artificial Sequence: Synthetic oligonucleotide
ugaacucaaaguagcuuuu

SEQ ID NO: 2167335 - RNA, 19 nt, Artificial Sequence
  Description of Artificial Sequence: Synthetic oligonucleotide
guuccuuagacaacaauaa

SEQ ID NO: 2167336 - RNA, 19 nt, Artificial Sequence
  Description of Artificial Sequence: Synthetic oligonucleotide
gucuagauaagggagagcu

SEQ ID NO: 2167337 - RNA, 19 nt, Artificial Sequence
  Description of Artificial Sequence: Synthetic oligonucleotide
ugugcugcguguccagcug

SEQ ID NO: 2167338 - RNA, 19 nt, Artificial Sequence
  Description of Artificial Sequence: Synthetic oligonucleotide
ugguucaaguuaacuuucu

SEQ ID NO: 2167339 - RNA, 19 nt, Artificial Sequence
  Description of Artificial Sequence: Synthetic oligonucleotide
gugguauagggcuccauca

SEQ ID NO: 2167340 - RNA, 19 nt, Artificial Sequence
  Description of Artificial Sequence: Synthetic oligonucleotide
ccagauuccaguagacugg

SEQ ID NO: 2167341 - RNA, 19 nt, Artificial Sequence
  Description of Artificial Sequence: Synthetic oligonucleotide
auaccccagauuccaguag

SEQ ID NO: 2167342 - RNA, 19 nt, Artificial Sequence
  Description of Artificial Sequence: Synthetic oligonucleotide
acgcaggcaacaccacgcc

SEQ ID NO: 2167343 - RNA, 19 nt, Artificial Sequence
  Description of Artificial Sequence: Synthetic oligonucleotide
gaguguuuuggggucgcgg

SEQ ID NO: 2167344 - RNA, 19 nt, Artificial Sequence
  Description of Artificial Sequence: Synthetic oligonucleotide
caacccgcacacaaaugcc

SEQ ID NO: 2167345 - RNA, 19 nt, Artificial Sequence
  Description of Artificial Sequence: Synthetic oligonucleotide
acacuuguguaauggugca

SEQ ID NO: 2167346 - RNA, 19 nt, Artificial Sequence
  Description of Artificial Sequence: Synthetic oligonucleotide
uucuucguuguugugguau

SEQ ID NO: 2167347 - RNA, 19 nt, Artificial Sequence
  Description of Artificial Sequence: Synthetic oligonucleotide
guuaaucaaaaccaugguu

SEQ ID NO: 2167348 - RNA, 19 nt, Artificial Sequence
  Description of Artificial Sequence: Synthetic oligonucleotide
caaaugccgaggcggagag

SEQ ID NO: 2167349 - RNA, 19 nt, Artificial Sequence
  Description of Artificial Sequence: Synthetic oligonucleotide
aagaggaaucugguucaag

SEQ ID NO: 2167350 - RNA, 19 nt, Artificial Sequence
  Description of Artificial Sequence: Synthetic oligonucleotide
ccuuagacaacaauaagaa

SEQ ID NO: 2167351 - RNA, 19 nt, Artificial Sequence
  Description of Artificial Sequence: Synthetic oligonucleotide
aacacacucagaagaucug

SEQ ID NO: 2167352 - RNA, 19 nt, Artificial Sequence
  Description of Artificial Sequence: Synthetic oligonucleotide
caaguuaacuuucugaguu

SEQ ID NO: 2167353 - RNA, 19 nt, Artificial Sequence
  Description of Artificial Sequence: Synthetic oligonucleotide
auuaagaggcaaacacuug

SEQ ID NO: 2167354 - RNA, 19 nt, Artificial Sequence
  Description of Artificial Sequence: Synthetic oligonucleotide
ucguauaccugaugcugga

SEQ ID NO: 2167355 - RNA, 19 nt, Artificial Sequence
  Description of Artificial Sequence: Synthetic oligonucleotide
cccagauuccaguagacug

SEQ ID NO: 2167356 - RNA, 19 nt, Artificial Sequence
  Description of Artificial Sequence: Synthetic oligonucleotide
ugguauagggcuccaucau

SEQ ID NO: 2167357 - RNA, 19 nt, Artificial Sequence
  Description of Artificial Sequence: Synthetic oligonucleotide
acaucuguucccaugugcu

SEQ ID NO: 2167358 - RNA, 19 nt, Artificial Sequence
  Description of Artificial Sequence: Synthetic oligonucleotide
uguucccaugugcugcgug

SEQ ID NO: 2167359 - RNA, 19 nt, Artificial Sequence
  Description of Artificial Sequence: Synthetic oligonucleotide
accaugguuuguuuguuua

SEQ ID NO: 2167360 - RNA, 19 nt, Artificial Sequence
  Description of Artificial Sequence: Synthetic oligonucleotide
ggucauacgugauacccac

SEQ ID NO: 2167361 - RNA, 19 nt, Artificial Sequence
  Description of Artificial Sequence: Synthetic oligonucleotide
gaacuggcaauccaaaauu

SEQ ID NO: 2167362 - RNA, 19 nt, Artificial Sequence
  Description of Artificial Sequence: Synthetic oligonucleotide
aggaauguggccggucccg

SEQ ID NO: 2167363 - RNA, 19 nt, Artificial Sequence
  Description of Artificial Sequence: Synthetic oligonucleotide
aauaaguugcccagcuauu

SEQ ID NO: 2167364 - RNA, 19 nt, Artificial Sequence
  Description of Artificial Sequence: Synthetic oligonucleotide
cauggucauacgugauacc

SEQ ID NO: 2167365 - RNA, 19 nt, Artificial Sequence
  Description of Artificial Sequence: Synthetic oligonucleotide
gauuccaguagacuggauu

SEQ ID NO: 2167366 - RNA, 19 nt, Artificial Sequence
  Description of Artificial Sequence: Synthetic oligonucleotide
cacgccgacgcggacaugg

SEQ ID NO: 2167367 - RNA, 19 nt, Artificial Sequence
  Description of Artificial Sequence: Synthetic oligonucleotide
uagauaagggagagcuuua

SEQ ID NO: 2167368 - RNA, 19 nt, Artificial Sequence
  Description of Artificial Sequence: Synthetic oligonucleotide
cugcguguccagcuguacg

SEQ ID NO: 2167369 - RNA, 19 nt, Artificial Sequence
  Description of Artificial Sequence: Synthetic oligonucleotide
accuauaccccagauucca

SEQ ID NO: 2167370 - RNA, 19 nt, Artificial Sequence
  Description of Artificial Sequence: Synthetic oligonucleotide
ucuagauaagggagagcuu

SEQ ID NO: 2167371 - RNA, 19 nt, Artificial Sequence
  Description of Artificial Sequence: Synthetic oligonucleotide
caaacuacauuaugguaua

SEQ ID NO: 2167372 - RNA, 19 nt, Artificial Sequence
  Description of Artificial Sequence: Synthetic oligonucleotide
aaaaccagguggaggagua

SEQ ID NO: 2167373 - RNA, 19 nt, Artificial Sequence
  Description of Artificial Sequence: Synthetic oligonucleotide
agggagagcuuuauuaaga

SEQ ID NO: 2167374 - RNA, 19 nt, Artificial Sequence
  Description of Artificial Sequence: Synthetic oligonucleotide
gaggcggagaggcgaagcc

SEQ ID NO: 2167375 - RNA, 19 nt, Artificial Sequence
  Description of Artificial Sequence: Synthetic oligonucleotide
guaaaggugcacuggcuaa

SEQ ID NO: 2167376 - RNA, 19 nt, Artificial Sequence
  Description of Artificial Sequence: Synthetic oligonucleotide
gcaauccaaaauugcacug

SEQ ID NO: 2167377 - RNA, 19 nt, Artificial Sequence
  Description of Artificial Sequence: Synthetic oligonucleotide
ugaauacauggguuccuua

SEQ ID NO: 2167378 - RNA, 19 nt, Artificial Sequence
  Description of Artificial Sequence: Synthetic oligonucleotide
cauacgugauacccacuac

SEQ ID NO: 2167379 - RNA, 19 nt, Artificial Sequence
  Description of Artificial Sequence: Synthetic oligonucleotide
acauuuaauucuacauggu

SEQ ID NO: 2167380 - RNA, 19 nt, Artificial Sequence
  Description of Artificial Sequence: Synthetic oligonucleotide
agugccacagauucuucuu

SEQ ID NO: 2167381 - RNA, 19 nt, Artificial Sequence
  Description of Artificial Sequence: Synthetic oligonucleotide
cuggcuaaacaaccuccag

SEQ ID NO: 2167382 - RNA, 19 nt, Artificial Sequence
  Description of Artificial Sequence: Synthetic oligonucleotide
guuagcauguaauacuguu

SEQ ID NO: 2167383 - RNA, 19 nt, Artificial Sequence
  Description of Artificial Sequence: Synthetic oligonucleotide
gguucaaguuaacuuucug

SEQ ID NO: 2167384 - RNA, 19 nt, Artificial Sequence
  Description of Artificial Sequence: Synthetic oligonucleotide
gcggacauggcgcagcucc

SEQ ID NO: 2167385 - RNA, 19 nt, Artificial Sequence
  Description of Artificial Sequence: Synthetic oligonucleotide
gaugcuggacaaugcaugu

SEQ ID NO: 2167386 - RNA, 19 nt, Artificial Sequence
  Description of Artificial Sequence: Synthetic oligonucleotide
agagcuuuauuaagaggca

SEQ ID NO: 2167387 - RNA, 19 nt, Artificial Sequence
  Description of Artificial Sequence: Synthetic oligonucleotide
cauggguuccuuagacaac

SEQ ID NO: 2167388 - RNA, 19 nt, Artificial Sequence
  Description of Artificial Sequence: Synthetic oligonucleotide
gaguaugauaaaauucacu

SEQ ID NO: 2167389 - RNA, 19 nt, Artificial Sequence
  Description of Artificial Sequence: Synthetic oligonucleotide
augguauaaugaauacaug

SEQ ID NO: 2167390 - RNA, 19 nt, Artificial Sequence
  Description of Artificial Sequence: Synthetic oligonucleotide
gauacacugucccucguau

SEQ ID NO: 2167391 - RNA, 19 nt, Artificial Sequence
  Description of Artificial Sequence: Synthetic oligonucleotide
gaguugcaacaccuauacc

SEQ ID NO: 2167392 - RNA, 19 nt, Artificial Sequence
  Description of Artificial Sequence: Synthetic oligonucleotide
caccuauaccccagauucc

SEQ ID NO: 2167393 - RNA, 19 nt, Artificial Sequence
  Description of Artificial Sequence: Synthetic oligonucleotide
uaaaggugcacuggcuaaa

SEQ ID NO: 2167394 - RNA, 19 nt, Artificial Sequence
  Description of Artificial Sequence: Synthetic oligonucleotide
acaaaugccgaggcggaga

SEQ ID NO: 2167395 - RNA, 19 nt, Artificial Sequence
  Description of Artificial Sequence: Synthetic oligonucleotide
aaguagcuuuuguucugau

SEQ ID NO: 2167396 - RNA, 19 nt, Artificial Sequence
  Description of Artificial Sequence: Synthetic oligonucleotide
auacccacuacaucuccuu

SEQ ID NO: 2167397 - RNA, 19 nt, Artificial Sequence
  Description of Artificial Sequence: Synthetic oligonucleotide
gguuccuuagacaacaaua

SEQ ID NO: 2167398 - RNA, 19 nt, Artificial Sequence
  Description of Artificial Sequence: Synthetic oligonucleotide
agcuguacggccggcaucu

SEQ ID NO: 2167399 - RNA, 19 nt, Artificial Sequence
  Description of Artificial Sequence: Synthetic oligonucleotide
ucuucguuguugugguaua

SEQ ID NO: 2167400 - RNA, 19 nt, Artificial Sequence
  Description of Artificial Sequence: Synthetic oligonucleotide
caaacacacucagaagauc

SEQ ID NO: 2167401 - RNA, 19 nt, Artificial Sequence
  Description of Artificial Sequence: Synthetic oligonucleotide
agggcuccaucauuucuca

SEQ ID NO: 2167402 - RNA, 19 nt, Artificial Sequence
  Description of Artificial Sequence: Synthetic oligonucleotide
ugucuagauaagggagagc

SEQ ID NO: 2167403 - RNA, 19 nt, Artificial Sequence
  Description of Artificial Sequence: Synthetic oligonucleotide
cauggcgcagcuccacagc

SEQ ID NO: 2167404 - RNA, 19 nt, Artificial Sequence
  Description of Artificial Sequence: Synthetic oligonucleotide
acugugcaugucucggcca

SEQ ID NO: 2167405 - RNA, 19 nt, Artificial Sequence
  Description of Artificial Sequence: Synthetic oligonucleotide
gaauguggccggucccgcc

SEQ ID NO: 2167406 - RNA, 19 nt, Artificial Sequence
  Description of Artificial Sequence: Synthetic oligonucleotide
uacccacuacaucuccuuc

SEQ ID NO: 2167407 - RNA, 19 nt, Artificial Sequence
  Description of Artificial Sequence: Synthetic oligonucleotide
caucauuucucaucaccaa

SEQ ID NO: 2167408 - RNA, 19 nt, Artificial Sequence
  Description of Artificial Sequence: Synthetic oligonucleotide
agcauguaauacuguuaau

SEQ ID NO: 2167409 - RNA, 19 nt, Artificial Sequence
  Description of Artificial Sequence: Synthetic oligonucleotide
aacaccacgccgacgcgga

SEQ ID NO: 2167410 - RNA, 19 nt, Artificial Sequence
  Description of Artificial Sequence: Synthetic oligonucleotide
aaacuacauuaugguauaa

SEQ ID NO: 2167411 - RNA, 19 nt, Artificial Sequence
  Description of Artificial Sequence: Synthetic oligonucleotide
aaaugccgaggcggagagg

SEQ ID NO: 2167412 - RNA, 19 nt, Artificial Sequence
  Description of Artificial Sequence: Synthetic oligonucleotide
ggaguaugauaaaauucac

SEQ ID NO: 2167413 - RNA, 19 nt, Artificial Sequence
  Description of Artificial Sequence: Synthetic oligonucleotide
guguaauggugcagaagug

SEQ ID NO: 2167414 - RNA, 19 nt, Artificial Sequence
  Description of Artificial Sequence: Synthetic oligonucleotide
uccgcaacccgcacacaaa

SEQ ID NO: 2167415 - RNA, 19 nt, Artificial Sequence
  Description of Artificial Sequence: Synthetic oligonucleotide
gcuaaacaaccuccagugc

SEQ ID NO: 2167416 - RNA, 19 nt, Artificial Sequence
  Description of Artificial Sequence: Synthetic oligonucleotide
uccacagccccgccacgcc

SEQ ID NO: 2167417 - RNA, 19 nt, Artificial Sequence
  Description of Artificial Sequence: Synthetic oligonucleotide
uugcacugucaucaacaua

SEQ ID NO: 2167418 - RNA, 19 nt, Artificial Sequence
  Description of Artificial Sequence: Synthetic oligonucleotide
cuguacggccggcaucucc

SEQ ID NO: 2167419 - RNA, 19 nt, Artificial Sequence
  Description of Artificial Sequence: Synthetic oligonucleotide
ggcaauccaaaauugcacu

SEQ ID NO: 2167420 - RNA, 19 nt, Artificial Sequence
  Description of Artificial Sequence: Synthetic oligonucleotide
aggcggagaggcgaagccg

SEQ ID NO: 2167421 - RNA, 19 nt, Artificial Sequence
  Description of Artificial Sequence: Synthetic oligonucleotide
cuagauaagggagagcuuu

SEQ ID NO: 2167422 - RNA, 19 nt, Artificial Sequence
  Description of Artificial Sequence: Synthetic oligonucleotide
uuaauucuacauggucaua

SEQ ID NO: 2167423 - RNA, 19 nt, Artificial Sequence
  Description of Artificial Sequence: Synthetic oligonucleotide
gaaucugguucaaguuaac

SEQ ID NO: 2167424 - RNA, 19 nt, Artificial Sequence
  Description of Artificial Sequence: Synthetic oligonucleotide
agauaagggagagcuuuau

SEQ ID NO: 2167425 - RNA, 19 nt, Artificial Sequence
  Description of Artificial Sequence: Synthetic oligonucleotide
uuggggucgcgggagcucc

SEQ ID NO: 2167426 - RNA, 19 nt, Artificial Sequence
  Description of Artificial Sequence: Synthetic oligonucleotide
caguagacuggauuuugaa

SEQ ID NO: 2167427 - RNA, 19 nt, Artificial Sequence
  Description of Artificial Sequence: Synthetic oligonucleotide
uggugcagaagugcaaguu

SEQ ID NO: 2167428 - RNA, 19 nt, Artificial Sequence
  Description of Artificial Sequence: Synthetic oligonucleotide
auguaaaggugcacuggcu

SEQ ID NO: 2167429 - RNA, 19 nt, Artificial Sequence
  Description of Artificial Sequence: Synthetic oligonucleotide
gaggaaucugguucaaguu

SEQ ID NO: 2167430 - RNA, 19 nt, Artificial Sequence
  Description of Artificial Sequence: Synthetic oligonucleotide
cagcaacgcaggcaacacc

SEQ ID NO: 2167431 - RNA, 19 nt, Artificial Sequence
  Description of Artificial Sequence: Synthetic oligonucleotide
cugaacuggcaauccaaaa

SEQ ID NO: 2167432 - RNA, 19 nt, Artificial Sequence
  Description of Artificial Sequence: Synthetic oligonucleotide
uggauacacugucccucgu

SEQ ID NO: 2167433 - RNA, 19 nt, Artificial Sequence
  Description of Artificial Sequence: Synthetic oligonucleotide
cugaguugcaacaccuaua

SEQ ID NO: 2167434 - RNA, 19 nt, Artificial Sequence
  Description of Artificial Sequence: Synthetic oligonucleotide
acggccggcaucuccuuga

SEQ ID NO: 2167435 - RNA, 19 nt, Artificial Sequence
  Description of Artificial Sequence: Synthetic oligonucleotide
accccagauuccaguagac

SEQ ID NO: 2167436 - RNA, 19 nt, Artificial Sequence
  Description of Artificial Sequence: Synthetic oligonucleotide
caaacacuuguguaauggu

SEQ ID NO: 2167437 - RNA, 19 nt, Artificial Sequence
  Description of Artificial Sequence: Synthetic oligonucleotide
ccuugagaggaauguggcc

SEQ ID NO: 2167438 - RNA, 19 nt, Artificial Sequence
  Description of Artificial Sequence: Synthetic oligonucleotide
ccaaaauugcacugucauc

SEQ ID NO: 2167439 - RNA, 19 nt, Artificial Sequence
  Description of Artificial Sequence: Synthetic oligonucleotide
uuuuggggucgcgggagcu

SEQ ID NO: 2167440 - RNA, 19 nt, Artificial Sequence
  Description of Artificial Sequence: Synthetic oligonucleotide
ugucucggccaagaggaau

SEQ ID NO: 2167441 - RNA, 19 nt, Artificial Sequence
  Description of Artificial Sequence: Synthetic oligonucleotide
gacauggcgcagcuccaca

SEQ ID NO: 2167442 - RNA, 19 nt, Artificial Sequence
  Description of Artificial Sequence: Synthetic oligonucleotide
ugugcaugucucggccaag

SEQ ID NO: 2167443 - RNA, 19 nt, Artificial Sequence
  Description of Artificial Sequence: Synthetic oligonucleotide
cacuuguguaauggugcag

SEQ ID NO: 2167444 - RNA, 19 nt, Artificial Sequence
  Description of Artificial Sequence: Synthetic oligonucleotide
auacacugucccucguaua

SEQ ID NO: 2167445 - RNA, 19 nt, Artificial Sequence
  Description of Artificial Sequence: Synthetic oligonucleotide
gucucggccaagaggaauc

SEQ ID NO: 2167446 - RNA, 19 nt, Artificial Sequence
  Description of Artificial Sequence: Synthetic oligonucleotide
gauaagggagagcuuuauu

SEQ ID NO: 2167447 - RNA, 19 nt, Artificial Sequence
  Description of Artificial Sequence: Synthetic oligonucleotide
acacaaaugccgaggcgga

SEQ ID NO: 2167448 - RNA, 19 nt, Artificial Sequence
  Description of Artificial Sequence: Synthetic oligonucleotide
ccucguauaccugaugcug

SEQ ID NO: 2167449 - RNA, 19 nt, Artificial Sequence
  Description of Artificial Sequence: Synthetic oligonucleotide
ggaggaguaugauaaaauu

SEQ ID NO: 2167450 - RNA, 19 nt, Artificial Sequence
  Description of Artificial Sequence: Synthetic oligonucleotide
ugccgaggcggagaggcga

SEQ ID NO: 2167451 - RNA, 19 nt, Artificial Sequence
  Description of Artificial Sequence: Synthetic oligonucleotide
ucgcgggagcuccgcaacc

SEQ ID NO: 2167452 - RNA, 19 nt, Artificial Sequence
  Description of Artificial Sequence: Synthetic oligonucleotide
uuccaguagacuggauuuu

SEQ ID NO: 2167453 - RNA, 19 nt, Artificial Sequence
  Description of Artificial Sequence: Synthetic oligonucleotide
cacagccccgccacgccgc

SEQ ID NO: 2167454 - RNA, 19 nt, Artificial Sequence
  Description of Artificial Sequence: Synthetic oligonucleotide
cuauaccccagauuccagu

SEQ ID NO: 2167455 - RNA, 19 nt, Artificial Sequence
  Description of Artificial Sequence: Synthetic oligonucleotide
guguuuuggggucgcggga

SEQ ID NO: 2167456 - RNA, 19 nt, Artificial Sequence
  Description of Artificial Sequence: Synthetic oligonucleotide
accacgccgacgcggacau

SEQ ID NO: 2167457 - RNA, 19 nt, Artificial Sequence
  Description of Artificial Sequence: Synthetic oligonucleotide
guguucucaugucuagaua

SEQ ID NO: 2167458 - RNA, 19 nt, Artificial Sequence
  Description of Artificial Sequence: Synthetic oligonucleotide
cacaaaugccgaggcggag

SEQ ID NO: 2167459 - RNA, 19 nt, Artificial Sequence
  Description of Artificial Sequence: Synthetic oligonucleotide
ugacaacaucuguucccau

SEQ ID NO: 2167460 - RNA, 19 nt, Artificial Sequence
  Description of Artificial Sequence: Synthetic oligonucleotide
caccaaacugugcaugucu

SEQ ID NO: 2167461 - RNA, 19 nt, Artificial Sequence
  Description of Artificial Sequence: Synthetic oligonucleotide
cacacucagaagaucugcu

SEQ ID NO: 2167462 - RNA, 19 nt, Artificial Sequence
  Description of Artificial Sequence: Synthetic oligonucleotide
gauacccacuacaucuccu

SEQ ID NO: 2167463 - RNA, 19 nt, Artificial Sequence
  Description of Artificial Sequence: Synthetic oligonucleotide
uuucuucguuguuguggua

SEQ ID NO: 2167464 - RNA, 19 nt, Artificial Sequence
  Description of Artificial Sequence: Synthetic oligonucleotide
cuccacagccccgccacgc

SEQ ID NO: 2167465 - RNA, 19 nt, Artificial Sequence
  Description of Artificial Sequence: Synthetic oligonucleotide
gcccagcuauuuuaaacca

SEQ ID NO: 2167466 - RNA, 19 nt, Artificial Sequence
  Description of Artificial Sequence: Synthetic oligonucleotide
gucgcgggagcuccgcaac

SEQ ID NO: 2167467 - RNA, 19 nt, Artificial Sequence
  Description of Artificial Sequence: Synthetic oligonucleotide
uggccggucccgccguccc

SEQ ID NO: 2167468 - RNA, 19 nt, Artificial Sequence
  Description of Artificial Sequence: Synthetic oligonucleotide
cagauuccaguagacugga

SEQ ID NO: 2167469 - RNA, 19 nt, Artificial Sequence
  Description of Artificial Sequence: Synthetic oligonucleotide
uucccaugugcugcguguc

SEQ ID NO: 2167470 - RNA, 19 nt, Artificial Sequence
  Description of Artificial Sequence: Synthetic oligonucleotide
uuuggggucgcgggagcuc

SEQ ID NO: 2167471 - RNA, 19 nt, Artificial Sequence
  Description of Artificial Sequence: Synthetic oligonucleotide
uggggucgcgggagcuccg

SEQ ID NO: 2167472 - RNA, 19 nt, Artificial Sequence
  Description of Artificial Sequence: Synthetic oligonucleotide
gucccucguauaccugaug

SEQ ID NO: 2167473 - RNA, 19 nt, Artificial Sequence
  Description of Artificial Sequence: Synthetic oligonucleotide
ccuauaccccagauuccag

SEQ ID NO: 2167474 - RNA, 19 nt, Artificial Sequence
  Description of Artificial Sequence: Synthetic oligonucleotide
ggcgaagccgaagcugagg

SEQ ID NO: 2167475 - RNA, 19 nt, Artificial Sequence
  Description of Artificial Sequence: Synthetic oligonucleotide
ugcugcguguccagcugua

SEQ ID NO: 2167476 - RNA, 19 nt, Artificial Sequence
  Description of Artificial Sequence: Synthetic oligonucleotide
gcacuggcuaaacaaccuc

SEQ ID NO: 2167477 - RNA, 19 nt, Artificial Sequence
  Description of Artificial Sequence: Synthetic oligonucleotide
cuccgcaacccgcacacaa

SEQ ID NO: 2167478 - RNA, 19 nt, Artificial Sequence
  Description of Artificial Sequence: Synthetic oligonucleotide
gagaggaauguggccgguc

SEQ ID NO: 2167479 - RNA, 19 nt, Artificial Sequence
  Description of Artificial Sequence: Synthetic oligonucleotide
gcagaagugcaaguuuuga

SEQ ID NO: 2167480 - RNA, 19 nt, Artificial Sequence
  Description of Artificial Sequence: Synthetic oligonucleotide
gcgcccgaguguuuugggg

SEQ ID NO: 2167481 - RNA, 19 nt, Artificial Sequence
  Description of Artificial Sequence: Synthetic oligonucleotide
gcaggcaacaccacgccga

SEQ ID NO: 2167482 - RNA, 19 nt, Artificial Sequence
  Description of Artificial Sequence: Synthetic oligonucleotide
cacugucccucguauaccu

SEQ ID NO: 2167483 - RNA, 19 nt, Artificial Sequence
  Description of Artificial Sequence: Synthetic oligonucleotide
cugugcaugucucggccaa

SEQ ID NO: 2167484 - RNA, 19 nt, Artificial Sequence
  Description of Artificial Sequence: Synthetic oligonucleotide
acccgcacacaaaugccga

SEQ ID NO: 2167485 - RNA, 19 nt, Artificial Sequence
  Description of Artificial Sequence: Synthetic oligonucleotide
auaccugaugcuggacaau

SEQ ID NO: 2167486 - RNA, 19 nt, Artificial Sequence
  Description of Artificial Sequence: Synthetic oligonucleotide
gccgacgcggacauggcgc

SEQ ID NO: 2167487 - RNA, 19 nt, Artificial Sequence
  Description of Artificial Sequence: Synthetic oligonucleotide
gugcaugucucggccaaga

SEQ ID NO: 2167488 - RNA, 19 nt, Artificial Sequence
  Description of Artificial Sequence: Synthetic oligonucleotide
gcaacaccacgccgacgcg

SEQ ID NO: 2167489 - RNA, 19 nt, Artificial Sequence
  Description of Artificial Sequence: Synthetic oligonucleotide
ccggcaucuccuugagagg

SEQ ID NO: 2167490 - RNA, 19 nt, Artificial Sequence
  Description of Artificial Sequence: Synthetic oligonucleotide
ccgcacacaaaugccgagg

SEQ ID NO: 2167491 - RNA, 19 nt, Artificial Sequence
  Description of Artificial Sequence: Synthetic oligonucleotide
aggcaacaccacgccgacg

SEQ ID NO: 2167492 - RNA, 19 nt, Artificial Sequence
  Description of Artificial Sequence: Synthetic oligonucleotide
uugugguauagggcuccau

SEQ ID NO: 2167493 - RNA, 19 nt, Artificial Sequence
  Description of Artificial Sequence: Synthetic oligonucleotide
ccaguagacuggauuuuga

SEQ ID NO: 2167494 - RNA, 19 nt, Artificial Sequence
  Description of Artificial Sequence: Synthetic oligonucleotide
ggaauguggccggucccgc

SEQ ID NO: 2167495 - RNA, 19 nt, Artificial Sequence
  Description of Artificial Sequence: Synthetic oligonucleotide
gcagcaacgcaggcaacac

SEQ ID NO: 2167496 - RNA, 19 nt, Artificial Sequence
  Description of Artificial Sequence: Synthetic oligonucleotide
cucggccaagaggaaucug

SEQ ID NO: 2167497 - RNA, 19 nt, Artificial Sequence
  Description of Artificial Sequence: Synthetic oligonucleotide
cugcagcaacgcaggcaac

SEQ ID NO: 2167498 - RNA, 19 nt, Artificial Sequence
  Description of Artificial Sequence: Synthetic oligonucleotide
ccaugugcugcguguccag

SEQ ID NO: 2167499 - RNA, 19 nt, Artificial Sequence
  Description of Artificial Sequence: Synthetic oligonucleotide
cugcugcucaaauaauauu

SEQ ID NO: 2167500 - RNA, 19 nt, Artificial Sequence
  Description of Artificial Sequence: Synthetic oligonucleotide
ggcggagaggcgaagccga

SEQ ID NO: 2167501 - RNA, 19 nt, Artificial Sequence
  Description of Artificial Sequence: Synthetic oligonucleotide
cccgcacacaaaugccgag

SEQ ID NO: 2167502 - RNA, 19 nt, Artificial Sequence
  Description of Artificial Sequence: Synthetic oligonucleotide
augccgaggcggagaggcg

SEQ ID NO: 2167503 - RNA, 19 nt, Artificial Sequence
  Description of Artificial Sequence: Synthetic oligonucleotide
cguguccagcuguacggcc

SEQ ID NO: 2167504 - RNA, 19 nt, Artificial Sequence
  Description of Artificial Sequence: Synthetic oligonucleotide
accuccagugccacagauu

SEQ ID NO: 2167505 - RNA, 19 nt, Artificial Sequence
  Description of Artificial Sequence: Synthetic oligonucleotide
gcccgaguguuuugggguc

SEQ ID NO: 2167506 - RNA, 19 nt, Artificial Sequence
  Description of Artificial Sequence: Synthetic oligonucleotide
ggagcuccgcaacccgcac

SEQ ID NO: 2167507 - RNA, 19 nt, Artificial Sequence
  Description of Artificial Sequence: Synthetic oligonucleotide
ccacagccccgccacgccg

SEQ ID NO: 2167508 - RNA, 19 nt, Artificial Sequence
  Description of Artificial Sequence: Synthetic oligonucleotide
cccgaguguuuuggggucg

SEQ ID NO: 2167509 - RNA, 19 nt, Artificial Sequence
  Description of Artificial Sequence: Synthetic oligonucleotide
cgcaggcaacaccacgccg

SEQ ID NO: 2167510 - RNA, 19 nt, Artificial Sequence
  Description of Artificial Sequence: Synthetic oligonucleotide
gcuccacagccccgccacg

SEQ ID NO: 2167511 - RNA, 19 nt, Artificial Sequence
  Description of Artificial Sequence: Synthetic oligonucleotide
gcguguccagcuguacggc

SEQ ID NO: 2167512 - RNA, 19 nt, Artificial Sequence
  Description of Artificial Sequence: Synthetic oligonucleotide
caccacgccgacgcggaca

SEQ ID NO: 2167513 - RNA, 19 nt, Artificial Sequence
  Description of Artificial Sequence: Synthetic oligonucleotide
gugcugcguguccagcugu

SEQ ID NO: 2167514 - RNA, 19 nt, Artificial Sequence
  Description of Artificial Sequence: Synthetic oligonucleotide
guggccggucccgccgucc

SEQ ID NO: 2167515 - RNA, 19 nt, Artificial Sequence
  Description of Artificial Sequence: Synthetic oligonucleotide
ggucgcgggagcuccgcaa

SEQ ID NO: 2167516 - RNA, 19 nt, Artificial Sequence
  Description of Artificial Sequence: Synthetic oligonucleotide
ggguuccuuagacaacaau

SEQ ID NO: 2167517 - RNA, 19 nt, Artificial Sequence
  Description of Artificial Sequence: Synthetic oligonucleotide
gggagcuccgcaacccgca

SEQ ID NO: 2167518 - RNA, 19 nt, Artificial Sequence
  Description of Artificial Sequence: Synthetic oligonucleotide
ccacuacaucuccuuccug

SEQ ID NO: 2167519 - RNA, 19 nt, Artificial Sequence
  Description of Artificial Sequence: Synthetic oligonucleotide
cgcaacccgcacacaaaug

SEQ ID NO: 2167520 - RNA, 19 nt, Artificial Sequence
  Description of Artificial Sequence: Synthetic oligonucleotide
gucauacgugauacccacu

SEQ ID NO: 2167521 - RNA, 19 nt, Artificial Sequence
  Description of Artificial Sequence: Synthetic oligonucleotide
cgggagcuccgcaacccgc

SEQ ID NO: 2167522 - RNA, 19 nt, Artificial Sequence
  Description of Artificial Sequence: Synthetic oligonucleotide
cguauaccugaugcuggac

SEQ ID NO: 2167523 - RNA, 19 nt, Artificial Sequence
  Description of Artificial Sequence: Synthetic oligonucleotide
gcugcguguccagcuguac

SEQ ID NO: 2167524 - RNA, 19 nt, Artificial Sequence
  Description of Artificial Sequence: Synthetic oligonucleotide
gguuguuugcuggcagccu

SEQ ID NO: 2167525 - RNA, 19 nt, Artificial Sequence
  Description of Artificial Sequence: Synthetic oligonucleotide
ccgaguguuuuggggucgc

SEQ ID NO: 2167526 - RNA, 19 nt, Artificial Sequence
  Description of Artificial Sequence: Synthetic oligonucleotide
cacgccgcccgcgcccgag

SEQ ID NO: 2167527 - RNA, 19 nt, Artificial Sequence
  Description of Artificial Sequence: Synthetic oligonucleotide
ccgccgucccugcagcaac

SEQ ID NO: 2167528 - RNA, 19 nt, Artificial Sequence
  Description of Artificial Sequence: Synthetic oligonucleotide
cgaggcggagaggcgaagc

SEQ ID NO: 2167529 - RNA, 19 nt, Artificial Sequence
  Description of Artificial Sequence: Synthetic oligonucleotide
cggcaucuccuugagagga

SEQ ID NO: 2167530 - RNA, 19 nt, Artificial Sequence
  Description of Artificial Sequence: Synthetic oligonucleotide
cgcgcccgaguguuuuggg

SEQ ID NO: 2167531 - RNA, 19 nt, Artificial Sequence
  Description of Artificial Sequence: Synthetic oligonucleotide
ccgcgcccgaguguuuugg

SEQ ID NO: 2167532 - RNA, 19 nt, Artificial Sequence
  Description of Artificial Sequence: Synthetic oligonucleotide
ggccaagaggaaucugguu

SEQ ID NO: 2167533 - RNA, 19 nt, Artificial Sequence
  Description of Artificial Sequence: Synthetic oligonucleotide
cgccgucccugcagcaacg

SEQ ID NO: 2167534 - RNA, 19 nt, Artificial Sequence
  Description of Artificial Sequence: Synthetic oligonucleotide
gccgucccugcagcaacgc

SEQ ID NO: 2167535 - RNA, 19 nt, Artificial Sequence
  Description of Artificial Sequence: Synthetic oligonucleotide
ccgacgcggacauggcgca

SEQ ID NO: 2167536 - RNA, 19 nt, Artificial Sequence
  Description of Artificial Sequence: Synthetic oligonucleotide
cccucguauaccugaugcu

SEQ ID NO: 2167537 - RNA, 19 nt, Artificial Sequence
  Description of Artificial Sequence: Synthetic oligonucleotide
cgcgggagcuccgcaaccc

SEQ ID NO: 2167538 - RNA, 19 nt, Artificial Sequence
  Description of Artificial Sequence: Synthetic oligonucleotide
gccggucccgccgucccug

SEQ ID NO: 2167539 - RNA, 19 nt, Artificial Sequence
  Description of Artificial Sequence: Synthetic oligonucleotide
cgaguguuuuggggucgcg

SEQ ID NO: 2167540 - RNA, 19 nt, Artificial Sequence
  Description of Artificial Sequence: Synthetic oligonucleotide
ggggucgcgggagcuccgc

SEQ ID NO: 2167541 - RNA, 19 nt, Artificial Sequence
  Description of Artificial Sequence: Synthetic oligonucleotide
cuuccugaggaagguuguu

SEQ ID NO: 2167542 - RNA, 19 nt, Artificial Sequence
  Description of Artificial Sequence: Synthetic oligonucleotide
cggagaggcgaagccgaag

SEQ ID NO: 2167543 - RNA, 19 nt, Artificial Sequence
  Description of Artificial Sequence: Synthetic oligonucleotide
ggccggcaucuccuugaga

SEQ ID NO: 2167544 - RNA, 19 nt, Artificial Sequence
  Description of Artificial Sequence: Synthetic oligonucleotide
gggucgcgggagcuccgca

SEQ ID NO: 2167545 - RNA, 19 nt, Artificial Sequence
  Description of Artificial Sequence: Synthetic oligonucleotide
cccgcgcccgaguguuuug

SEQ ID NO: 2167546 - RNA, 19 nt, Artificial Sequence
  Description of Artificial Sequence: Synthetic oligonucleotide
cgcccgaguguuuuggggu

SEQ ID NO: 2167547 - RNA, 19 nt, Artificial Sequence
  Description of Artificial Sequence: Synthetic oligonucleotide
guacggccggcaucuccuu

SEQ ID NO: 2167548 - RNA, 19 nt, Artificial Sequence
  Description of Artificial Sequence: Synthetic oligonucleotide
ccgcaacccgcacacaaau

SEQ ID NO: 2167549 - RNA, 19 nt, Artificial Sequence
  Description of Artificial Sequence: Synthetic oligonucleotide
ccgucccugcagcaacgca

SEQ ID NO: 2167550 - RNA, 19 nt, Artificial Sequence
  Description of Artificial Sequence: Synthetic oligonucleotide
cggccggcaucuccuugag

SEQ ID NO: 2167551 - RNA, 19 nt, Artificial Sequence
  Description of Artificial Sequence: Synthetic oligonucleotide
ccgaggcggagaggcgaag

SEQ ID NO: 2167552 - RNA, 19 nt, Artificial Sequence
  Description of Artificial Sequence: Synthetic oligonucleotide
ccccagauuccaguagacu

SEQ ID NO: 2167553 - RNA, 19 nt, Artificial Sequence
  Description of Artificial Sequence: Synthetic oligonucleotide
gccgaggcggagaggcgaa

SEQ ID NO: 2167554 - RNA, 19 nt, Artificial Sequence
  Description of Artificial Sequence: Synthetic oligonucleotide
cuguucccaugugcugcgu

SEQ ID NO: 2167555 - RNA, 19 nt, Artificial Sequence
  Description of Artificial Sequence: Synthetic oligonucleotide
gcggagaggcgaagccgaa

SEQ ID NO: 2167556 - RNA, 19 nt, Artificial Sequence
  Description of Artificial Sequence: Synthetic oligonucleotide
gcuccgcaacccgcacaca

SEQ ID NO: 2167557 - RNA, 19 nt, Artificial Sequence
  Description of Artificial Sequence: Synthetic oligonucleotide
ccccgccacgccgcccgcg

SEQ ID NO: 2167558 - RNA, 19 nt, Artificial Sequence
  Description of Artificial Sequence: Synthetic oligonucleotide
gccccgccacgccgcccgc

SEQ ID NO: 2167559 - RNA, 19 nt, Artificial Sequence
  Description of Artificial Sequence: Synthetic oligonucleotide
cgcggacauggcgcagcuc

SEQ ID NO: 2167560 - RNA, 19 nt, Artificial Sequence
  Description of Artificial Sequence: Synthetic oligonucleotide
gcccgcgcccgaguguuuu

SEQ ID NO: 2167561 - RNA, 19 nt, Artificial Sequence
  Description of Artificial Sequence: Synthetic oligonucleotide
ccacgccgacgcggacaug

SEQ ID NO: 2167562 - RNA, 19 nt, Artificial Sequence
  Description of Artificial Sequence: Synthetic oligonucleotide
ccgcccgcgcccgaguguu

SEQ ID NO: 2167563 - RNA, 19 nt, Artificial Sequence
  Description of Artificial Sequence: Synthetic oligonucleotide
cgcccgcgcccgaguguuu

SEQ ID NO: 2167564 - RNA, 19 nt, Artificial Sequence
  Description of Artificial Sequence: Synthetic oligonucleotide
acuguuacguucuccaugc

SEQ ID NO: 2167565 - RNA, 19 nt, Artificial Sequence
  Description of Artificial Sequence: Synthetic oligonucleotide
aaugccagggccugaacac

SEQ ID NO: 2167566 - RNA, 19 nt, Artificial Sequence
  Description of Artificial Sequence: Synthetic oligonucleotide
uugguuaccaagauggagc

SEQ ID NO: 2167567 - RNA, 19 nt, Artificial Sequence
  Description of Artificial Sequence: Synthetic oligonucleotide
aguucugaccaauacgggc

SEQ ID NO: 2167568 - RNA, 19 nt, Artificial Sequence
  Description of Artificial Sequence: Synthetic oligonucleotide
uuauuggacacgaauaccu

SEQ ID NO: 2167569 - RNA, 19 nt, Artificial Sequence
  Description of Artificial Sequence: Synthetic oligonucleotide
gauaauacgaggcuccggc

SEQ ID NO: 2167570 - RNA, 19 nt, Artificial Sequence
  Description of Artificial Sequence: Synthetic oligonucleotide
aagaccuccuucucaaugg

SEQ ID NO: 2167571 - RNA, 19 nt, Artificial Sequence
  Description of Artificial Sequence: Synthetic oligonucleotide
aauacgaggcuccggcacc

SEQ ID NO: 2167572 - RNA, 19 nt, Artificial Sequence
  Description of Artificial Sequence: Synthetic oligonucleotide
uucacaugauaauacgagg

SEQ ID NO: 2167573 - RNA, 19 nt, Artificial Sequence
  Description of Artificial Sequence: Synthetic oligonucleotide
cuguugagaacgaagaaag

SEQ ID NO: 2167574 - RNA, 19 nt, Artificial Sequence
  Description of Artificial Sequence: Synthetic oligonucleotide
ucuuauuggacacgaauac

SEQ ID NO: 2167575 - RNA, 19 nt, Artificial Sequence
  Description of Artificial Sequence: Synthetic oligonucleotide
auuggacacgaauaccugc

SEQ ID NO: 2167576 - RNA, 19 nt, Artificial Sequence
  Description of Artificial Sequence: Synthetic oligonucleotide
cuucacaugauaauacgag

SEQ ID NO: 2167577 - RNA, 19 nt, Artificial Sequence
  Description of Artificial Sequence: Synthetic oligonucleotide
uugagaacgaagaaagggu

SEQ ID NO: 2167578 - RNA, 19 nt, Artificial Sequence
  Description of Artificial Sequence: Synthetic oligonucleotide
accuugguuaccaagaugg

SEQ ID NO: 2167579 - RNA, 19 nt, Artificial Sequence
  Description of Artificial Sequence: Synthetic oligonucleotide
caugauaauacgaggcucc

SEQ ID NO: 2167580 - RNA, 19 nt, Artificial Sequence
  Description of Artificial Sequence: Synthetic oligonucleotide
ugugacauguagcucacug

SEQ ID NO: 2167581 - RNA, 19 nt, Artificial Sequence
  Description of Artificial Sequence: Synthetic oligonucleotide
aagaucacgugguccacac

SEQ ID NO: 2167582 - RNA, 19 nt, Artificial Sequence
  Description of Artificial Sequence: Synthetic oligonucleotide
auacuuggaaggcuccucc

SEQ ID NO: 2167583 - RNA, 19 nt, Artificial Sequence
  Description of Artificial Sequence: Synthetic oligonucleotide
ucacuguugagaacgaaga

SEQ ID NO: 2167584 - RNA, 19 nt, Artificial Sequence
  Description of Artificial Sequence: Synthetic oligonucleotide
acaucugugacauguagcu

SEQ ID NO: 2167585 - RNA, 19 nt, Artificial Sequence
  Description of Artificial Sequence: Synthetic oligonucleotide
ucaacaaaacggugaaugc

SEQ ID NO: 2167586 - RNA, 19 nt, Artificial Sequence
  Description of Artificial Sequence: Synthetic oligonucleotide
uccccgauagacuuguggg

SEQ ID NO: 2167587 - RNA, 19 nt, Artificial Sequence
  Description of Artificial Sequence: Synthetic oligonucleotide
uccuucacaugauaauacg

SEQ ID NO: 2167588 - RNA, 19 nt, Artificial Sequence
  Description of Artificial Sequence: Synthetic oligonucleotide
aacgaagaaagggucuucg

SEQ ID NO: 2167589 - RNA, 19 nt, Artificial Sequence
  Description of Artificial Sequence: Synthetic oligonucleotide
uccucuucaugagacaugg

SEQ ID NO: 2167590 - RNA, 19 nt, Artificial Sequence
  Description of Artificial Sequence: Synthetic oligonucleotide
guaggcuucagcuggauac

SEQ ID NO: 2167591 - RNA, 19 nt, Artificial Sequence
  Description of Artificial Sequence: Synthetic oligonucleotide
aaaacggugaaugcggccu

SEQ ID NO: 2167592 - RNA, 19 nt, Artificial Sequence
  Description of Artificial Sequence: Synthetic oligonucleotide
uggagauucggauuccaag

SEQ ID NO: 2167593 - RNA, 19 nt, Artificial Sequence
  Description of Artificial Sequence: Synthetic oligonucleotide
agacuuguggggcagcacg

SEQ ID NO: 2167594 - RNA, 19 nt, Artificial Sequence
  Description of Artificial Sequence: Synthetic oligonucleotide
gaaguuccauggcauauag

SEQ ID NO: 2167595 - RNA, 19 nt, Artificial Sequence
  Description of Artificial Sequence: Synthetic oligonucleotide
uguuacguucuccaugcgc

SEQ ID NO: 2167596 - RNA, 19 nt, Artificial Sequence
  Description of Artificial Sequence: Synthetic oligonucleotide
ucaugagacauggagauuc

SEQ ID NO: 2167597 - RNA, 19 nt, Artificial Sequence
  Description of Artificial Sequence: Synthetic oligonucleotide
ugagaacgaagaaaggguc

SEQ ID NO: 2167598 - RNA, 19 nt, Artificial Sequence
  Description of Artificial Sequence: Synthetic oligonucleotide
ugugucagccucacaaacc

SEQ ID NO: 2167599 - RNA, 19 nt, Artificial Sequence
  Description of Artificial Sequence: Synthetic oligonucleotide
uguccaauguccauccaga

SEQ ID NO: 2167600 - RNA, 19 nt, Artificial Sequence
  Description of Artificial Sequence: Synthetic oligonucleotide
aauaccugcggcuucucaa

SEQ ID NO: 2167601 - RNA, 19 nt, Artificial Sequence
  Description of Artificial Sequence: Synthetic oligonucleotide
aaaggcuccucuucaugag

SEQ ID NO: 2167602 - RNA, 19 nt, Artificial Sequence
  Description of Artificial Sequence: Synthetic oligonucleotide
gacauggagauucggauuc

SEQ ID NO: 2167603 - RNA, 19 nt, Artificial Sequence
  Description of Artificial Sequence: Synthetic oligonucleotide
agggucuucggucucagag

SEQ ID NO: 2167604 - RNA, 19 nt, Artificial Sequence
  Description of Artificial Sequence: Synthetic oligonucleotide
gauacgcugcagcacagag

SEQ ID NO: 2167605 - RNA, 19 nt, Artificial Sequence
  Description of Artificial Sequence: Synthetic oligonucleotide
ccugcauugaucuuauugg

SEQ ID NO: 2167606 - RNA, 19 nt, Artificial Sequence
  Description of Artificial Sequence: Synthetic oligonucleotide
guucugaccaauacgggcg

SEQ ID NO: 2167607 - RNA, 19 nt, Artificial Sequence
  Description of Artificial Sequence: Synthetic oligonucleotide
auagcugccccuccugggc

SEQ ID NO: 2167608 - RNA, 19 nt, Artificial Sequence
  Description of Artificial Sequence: Synthetic oligonucleotide
uacaugccugcauugaucu

SEQ ID NO: 2167609 - RNA, 19 nt, Artificial Sequence
  Description of Artificial Sequence: Synthetic oligonucleotide
uucggucucagagaguagg

SEQ ID NO: 2167610 - RNA, 19 nt, Artificial Sequence
  Description of Artificial Sequence: Synthetic oligonucleotide
gagauucggauuccaagcc

SEQ ID NO: 2167611 - RNA, 19 nt, Artificial Sequence
  Description of Artificial Sequence: Synthetic oligonucleotide
agggccugaacacagucuc

SEQ ID NO: 2167612 - RNA, 19 nt, Artificial Sequence
  Description of Artificial Sequence: Synthetic oligonucleotide
aucacaucacuguugagaa

SEQ ID NO: 2167613 - RNA, 19 nt, Artificial Sequence
  Description of Artificial Sequence: Synthetic oligonucleotide
gaagaccuccuucucaaug

SEQ ID NO: 2167614 - RNA, 19 nt, Artificial Sequence
  Description of Artificial Sequence: Synthetic oligonucleotide
uucucaauggauguaggcu

SEQ ID NO: 2167615 - RNA, 19 nt, Artificial Sequence
  Description of Artificial Sequence: Synthetic oligonucleotide
acaugauaauacgaggcuc

SEQ ID NO: 2167616 - RNA, 19 nt, Artificial Sequence
  Description of Artificial Sequence: Synthetic oligonucleotide
acgaugcacgacucaagcc

SEQ ID NO: 2167617 - RNA, 19 nt, Artificial Sequence
  Description of Artificial Sequence: Synthetic oligonucleotide
ugcauugaucuuauuggac

SEQ ID NO: 2167618 - RNA, 19 nt, Artificial Sequence
  Description of Artificial Sequence: Synthetic oligonucleotide
uaauacgaggcuccggcac

SEQ ID NO: 2167619 - RNA, 19 nt, Artificial Sequence
  Description of Artificial Sequence: Synthetic oligonucleotide
cauugaucuuauuggacac

SEQ ID NO: 2167620 - RNA, 19 nt, Artificial Sequence
  Description of Artificial Sequence: Synthetic oligonucleotide
gaugugcgcaucccgaagc

SEQ ID NO: 2167621 - RNA, 19 nt, Artificial Sequence
  Description of Artificial Sequence: Synthetic oligonucleotide
auaccugcggcuucucaac

SEQ ID NO: 2167622 - RNA, 19 nt, Artificial Sequence
  Description of Artificial Sequence: Synthetic oligonucleotide
cugcauauccuucacauga

SEQ ID NO: 2167623 - RNA, 19 nt, Artificial Sequence
  Description of Artificial Sequence: Synthetic oligonucleotide
ugguuaccaagauggagcc

SEQ ID NO: 2167624 - RNA, 19 nt, Artificial Sequence
  Description of Artificial Sequence: Synthetic oligonucleotide
auauagcugccccuccugg

SEQ ID NO: 2167625 - RNA, 19 nt, Artificial Sequence
  Description of Artificial Sequence: Synthetic oligonucleotide
cuucucaauggauguaggc

SEQ ID NO: 2167626 - RNA, 19 nt, Artificial Sequence
  Description of Artificial Sequence: Synthetic oligonucleotide
gugucgauggaacugcacc

SEQ ID NO: 2167627 - RNA, 19 nt, Artificial Sequence
  Description of Artificial Sequence: Synthetic oligonucleotide
ugucgauggaacugcacca

SEQ ID NO: 2167628 - RNA, 19 nt, Artificial Sequence
  Description of Artificial Sequence: Synthetic oligonucleotide
ugggccauaacugggaaga

SEQ ID NO: 2167629 - RNA, 19 nt, Artificial Sequence
  Description of Artificial Sequence: Synthetic oligonucleotide
ggagauucggauuccaagc

SEQ ID NO: 2167630 - RNA, 19 nt, Artificial Sequence
  Description of Artificial Sequence: Synthetic oligonucleotide
uugaucuuauuggacacga

SEQ ID NO: 2167631 - RNA, 19 nt, Artificial Sequence
  Description of Artificial Sequence: Synthetic oligonucleotide
ucggauuccaagccuuugc

SEQ ID NO: 2167632 - RNA, 19 nt, Artificial Sequence
  Description of Artificial Sequence: Synthetic oligonucleotide
cuuauuggacacgaauacc

SEQ ID NO: 2167633 - RNA, 19 nt, Artificial Sequence
  Description of Artificial Sequence: Synthetic oligonucleotide
cauggcauauagcugcccc

SEQ ID NO: 2167634 - RNA, 19 nt, Artificial Sequence
  Description of Artificial Sequence: Synthetic oligonucleotide
agugggagcggaugugcgc

SEQ ID NO: 2167635 - RNA, 19 nt, Artificial Sequence
  Description of Artificial Sequence: Synthetic oligonucleotide
gauggaacugcaccauggc

SEQ ID NO: 2167636 - RNA, 19 nt, Artificial Sequence
  Description of Artificial Sequence: Synthetic oligonucleotide
cuucucaacaaaacgguga

SEQ ID NO: 2167637 - RNA, 19 nt, Artificial Sequence
  Description of Artificial Sequence: Synthetic oligonucleotide
uuguggggcagcacgcugg

SEQ ID NO: 2167638 - RNA, 19 nt, Artificial Sequence
  Description of Artificial Sequence: Synthetic oligonucleotide
caagccaggagugggagcg

SEQ ID NO: 2167639 - RNA, 19 nt, Artificial Sequence
  Description of Artificial Sequence: Synthetic oligonucleotide
cacaccgggacccagacuc

SEQ ID NO: 2167640 - RNA, 19 nt, Artificial Sequence
  Description of Artificial Sequence: Synthetic oligonucleotide
auccuucacaugauaauac

SEQ ID NO: 2167641 - RNA, 19 nt, Artificial Sequence
  Description of Artificial Sequence: Synthetic oligonucleotide
uaggucucgggccaaugcc

SEQ ID NO: 2167642 - RNA, 19 nt, Artificial Sequence
  Description of Artificial Sequence: Synthetic oligonucleotide
gacccagacucacauuggg

SEQ ID NO: 2167643 - RNA, 19 nt, Artificial Sequence
  Description of Artificial Sequence: Synthetic oligonucleotide
ucaggauguacaugccugc

SEQ ID NO: 2167644 - RNA, 19 nt, Artificial Sequence
  Description of Artificial Sequence: Synthetic oligonucleotide
cagagaguaggucucgggc

SEQ ID NO: 2167645 - RNA, 19 nt, Artificial Sequence
  Description of Artificial Sequence: Synthetic oligonucleotide
cuuggaagggaaaaucaca

SEQ ID NO: 2167646 - RNA, 19 nt, Artificial Sequence
  Description of Artificial Sequence: Synthetic oligonucleotide
ugcgcaucccgaagcaccg

SEQ ID NO: 2167647 - RNA, 19 nt, Artificial Sequence
  Description of Artificial Sequence: Synthetic oligonucleotide
cuugguuaccaagauggag

SEQ ID NO: 2167648 - RNA, 19 nt, Artificial Sequence
  Description of Artificial Sequence: Synthetic oligonucleotide
ucuucggucucagagagua

SEQ ID NO: 2167649 - RNA, 19 nt, Artificial Sequence
  Description of Artificial Sequence: Synthetic oligonucleotide
uggacacgaauaccugcgg

SEQ ID NO: 2167650 - RNA, 19 nt, Artificial Sequence
  Description of Artificial Sequence: Synthetic oligonucleotide
uugagguagaguucaucac

SEQ ID NO: 2167651 - RNA, 19 nt, Artificial Sequence
  Description of Artificial Sequence: Synthetic oligonucleotide
uguacaugccugcauugau

SEQ ID NO: 2167652 - RNA, 19 nt, Artificial Sequence
  Description of Artificial Sequence: Synthetic oligonucleotide
cacgaugcacgacucaagc

SEQ ID NO: 2167653 - RNA, 19 nt, Artificial Sequence
  Description of Artificial Sequence: Synthetic oligonucleotide
acaaaacggugaaugcggc

SEQ ID NO: 2167654 - RNA, 19 nt, Artificial Sequence
  Description of Artificial Sequence: Synthetic oligonucleotide
caugagacauggagauucg

SEQ ID NO: 2167655 - RNA, 19 nt, Artificial Sequence
  Description of Artificial Sequence: Synthetic oligonucleotide
gagguagaguucaucacug

SEQ ID NO: 2167656 - RNA, 19 nt, Artificial Sequence
  Description of Artificial Sequence: Synthetic oligonucleotide
cacagaggggcucaggaug

SEQ ID NO: 2167657 - RNA, 19 nt, Artificial Sequence
  Description of Artificial Sequence: Synthetic oligonucleotide
ugauaauacgaggcuccgg

SEQ ID NO: 2167658 - RNA, 19 nt, Artificial Sequence
  Description of Artificial Sequence: Synthetic oligonucleotide
aaaccaccacaccauacuu

SEQ ID NO: 2167659 - RNA, 19 nt, Artificial Sequence
  Description of Artificial Sequence: Synthetic oligonucleotide
guuacguucuccaugcgca

SEQ ID NO: 2167660 - RNA, 19 nt, Artificial Sequence
  Description of Artificial Sequence: Synthetic oligonucleotide
cuguccaauguccauccag

SEQ ID NO: 2167661 - RNA, 19 nt, Artificial Sequence
  Description of Artificial Sequence: Synthetic oligonucleotide
cacgcuggcuccauugagg

SEQ ID NO: 2167662 - RNA, 19 nt, Artificial Sequence
  Description of Artificial Sequence: Synthetic oligonucleotide
ugcggcuucucaacaaaac

SEQ ID NO: 2167663 - RNA, 19 nt, Artificial Sequence
  Description of Artificial Sequence: Synthetic oligonucleotide
uucugaccaauacgggcgc

SEQ ID NO: 2167664 - RNA, 19 nt, Artificial Sequence
  Description of Artificial Sequence: Synthetic oligonucleotide
gaucuuauuggacacgaau

SEQ ID NO: 2167665 - RNA, 19 nt, Artificial Sequence
  Description of Artificial Sequence: Synthetic oligonucleotide
aaacggugaaugcggccug

SEQ ID NO: 2167666 - RNA, 19 nt, Artificial Sequence
  Description of Artificial Sequence: Synthetic oligonucleotide
caauguccauccagaagcc

SEQ ID NO: 2167667 - RNA, 19 nt, Artificial Sequence
  Description of Artificial Sequence: Synthetic oligonucleotide
agauucggauuccaagccu

SEQ ID NO: 2167668 - RNA, 19 nt, Artificial Sequence
  Description of Artificial Sequence: Synthetic oligonucleotide
caaaacggugaaugcggcc

SEQ ID NO: 2167669 - RNA, 19 nt, Artificial Sequence
  Description of Artificial Sequence: Synthetic oligonucleotide
ucgggccaaugccagaggc

SEQ ID NO: 2167670 - RNA, 19 nt, Artificial Sequence
  Description of Artificial Sequence: Synthetic oligonucleotide
augauaauacgaggcuccg

SEQ ID NO: 2167671 - RNA, 19 nt, Artificial Sequence
  Description of Artificial Sequence: Synthetic oligonucleotide
acgugguccacaccugccg

SEQ ID NO: 2167672 - RNA, 19 nt, Artificial Sequence
  Description of Artificial Sequence: Synthetic oligonucleotide
acaaaccaccacaccauac

SEQ ID NO: 2167673 - RNA, 19 nt, Artificial Sequence
  Description of Artificial Sequence: Synthetic oligonucleotide
gaugcacgacucaagccag

SEQ ID NO: 2167674 - RNA, 19 nt, Artificial Sequence
  Description of Artificial Sequence: Synthetic oligonucleotide
gcauugaucuuauuggaca

SEQ ID NO: 2167675 - RNA, 19 nt, Artificial Sequence
  Description of Artificial Sequence: Synthetic oligonucleotide
cacuguuacguucuccaug

SEQ ID NO: 2167676 - RNA, 19 nt, Artificial Sequence
  Description of Artificial Sequence: Synthetic oligonucleotide
ccauccagaagccaggaag

SEQ ID NO: 2167677 - RNA, 19 nt, Artificial Sequence
  Description of Artificial Sequence: Synthetic oligonucleotide
gggacccagacucacauug

SEQ ID NO: 2167678 - RNA, 19 nt, Artificial Sequence
  Description of Artificial Sequence: Synthetic oligonucleotide
uccaugcgcacccacugac

SEQ ID NO: 2167679 - RNA, 19 nt, Artificial Sequence
  Description of Artificial Sequence: Synthetic oligonucleotide
agccaggaaguuccauggc

SEQ ID NO: 2167680 - RNA, 19 nt, Artificial Sequence
  Description of Artificial Sequence: Synthetic oligonucleotide
ucacgugguccacaccugc

SEQ ID NO: 2167681 - RNA, 19 nt, Artificial Sequence
  Description of Artificial Sequence: Synthetic oligonucleotide
accaauacgggcgcuuggg

SEQ ID NO: 2167682 - RNA, 19 nt, Artificial Sequence
  Description of Artificial Sequence: Synthetic oligonucleotide
ucugugacauguagcucac

SEQ ID NO: 2167683 - RNA, 19 nt, Artificial Sequence
  Description of Artificial Sequence: Synthetic oligonucleotide
ggucuucggucucagagag

SEQ ID NO: 2167684 - RNA, 19 nt, Artificial Sequence
  Description of Artificial Sequence: Synthetic oligonucleotide
caguucugaccaauacggg

SEQ ID NO: 2167685 - RNA, 19 nt, Artificial Sequence
  Description of Artificial Sequence: Synthetic oligonucleotide
gccugcauugaucuuauug

SEQ ID NO: 2167686 - RNA, 19 nt, Artificial Sequence
  Description of Artificial Sequence: Synthetic oligonucleotide
ucucagagaguaggucucg

SEQ ID NO: 2167687 - RNA, 19 nt, Artificial Sequence
  Description of Artificial Sequence: Synthetic oligonucleotide
gugucagccucacaaacca

SEQ ID NO: 2167688 - RNA, 19 nt, Artificial Sequence
  Description of Artificial Sequence: Synthetic oligonucleotide
cacugccaagaucacgugg

SEQ ID NO: 2167689 - RNA, 19 nt, Artificial Sequence
  Description of Artificial Sequence: Synthetic oligonucleotide
agaucacgugguccacacc

SEQ ID NO: 2167690 - RNA, 19 nt, Artificial Sequence
  Description of Artificial Sequence: Synthetic oligonucleotide
accacaccgggacccagac

SEQ ID NO: 2167691 - RNA, 19 nt, Artificial Sequence
  Description of Artificial Sequence: Synthetic oligonucleotide
auaauacgaggcuccggca

SEQ ID NO: 2167692 - RNA, 19 nt, Artificial Sequence
  Description of Artificial Sequence: Synthetic oligonucleotide
ucgauggaacugcaccaug

SEQ ID NO: 2167693 - RNA, 19 nt, Artificial Sequence
  Description of Artificial Sequence: Synthetic oligonucleotide
ggcgcuuggguccacaagc

SEQ ID NO: 2167694 - RNA, 19 nt, Artificial Sequence
  Description of Artificial Sequence: Synthetic oligonucleotide
uguagcucacugccaagau

SEQ ID NO: 2167695 - RNA, 19 nt, Artificial Sequence
  Description of Artificial Sequence: Synthetic oligonucleotide
cagaucacaucacuguuga

SEQ ID NO: 2167696 - RNA, 19 nt, Artificial Sequence
  Description of Artificial Sequence: Synthetic oligonucleotide
gagaguaggucucgggcca

SEQ ID NO: 2167697 - RNA, 19 nt, Artificial Sequence
  Description of Artificial Sequence: Synthetic oligonucleotide
acugccaagaucacguggu

SEQ ID NO: 2167698 - RNA, 19 nt, Artificial Sequence
  Description of Artificial Sequence: Synthetic oligonucleotide
cugugucagccucacaaac

SEQ ID NO: 2167699 - RNA, 19 nt, Artificial Sequence
  Description of Artificial Sequence: Synthetic oligonucleotide
gguagaguucaucacugac

SEQ ID NO: 2167700 - RNA, 19 nt, Artificial Sequence
  Description of Artificial Sequence: Synthetic oligonucleotide
uggggcagcacgcuggcuc

SEQ ID NO: 2167701 - RNA, 19 nt, Artificial Sequence
  Description of Artificial Sequence: Synthetic oligonucleotide
agcuggauacgcugcagca

SEQ ID NO: 2167702 - RNA, 19 nt, Artificial Sequence
  Description of Artificial Sequence: Synthetic oligonucleotide
accauacuuggaaggcucc

SEQ ID NO: 2167703 - RNA, 19 nt, Artificial Sequence
  Description of Artificial Sequence: Synthetic oligonucleotide
ucgcccagcacuguuacgu

SEQ ID NO: 2167704 - RNA, 19 nt, Artificial Sequence
  Description of Artificial Sequence: Synthetic oligonucleotide
uugggcuguccaaugucca

SEQ ID NO: 2167705 - RNA, 19 nt, Artificial Sequence
  Description of Artificial Sequence: Synthetic oligonucleotide
gaccaauacgggcgcuugg

SEQ ID NO: 2167706 - RNA, 19 nt, Artificial Sequence
  Description of Artificial Sequence: Synthetic oligonucleotide
caauacgggcgcuuggguc

SEQ ID NO: 2167707 - RNA, 19 nt, Artificial Sequence
  Description of Artificial Sequence: Synthetic oligonucleotide
gugaaugcggccuguguca

SEQ ID NO: 2167708 - RNA, 19 nt, Artificial Sequence
  Description of Artificial Sequence: Synthetic oligonucleotide
gcacaugccagugaggaag

SEQ ID NO: 2167709 - RNA, 19 nt, Artificial Sequence
  Description of Artificial Sequence: Synthetic oligonucleotide
aggaagaggcacaugccag

SEQ ID NO: 2167710 - RNA, 19 nt, Artificial Sequence
  Description of Artificial Sequence: Synthetic oligonucleotide
aaguccuugggcuguccaa

SEQ ID NO: 2167711 - RNA, 19 nt, Artificial Sequence
  Description of Artificial Sequence: Synthetic oligonucleotide
cuucaugagacauggagau

SEQ ID NO: 2167712 - RNA, 19 nt, Artificial Sequence
  Description of Artificial Sequence: Synthetic oligonucleotide
ugccaagaucacguggucc

SEQ ID NO: 2167713 - RNA, 19 nt, Artificial Sequence
  Description of Artificial Sequence: Synthetic oligonucleotide
cucacugccaagaucacgu

SEQ ID NO: 2167714 - RNA, 19 nt, Artificial Sequence
  Description of Artificial Sequence: Synthetic oligonucleotide
ucucucugggugcuucugu

SEQ ID NO: 2167715 - RNA, 19 nt, Artificial Sequence
  Description of Artificial Sequence: Synthetic oligonucleotide
auggcauauagcugccccu

SEQ ID NO: 2167716 - RNA, 19 nt, Artificial Sequence
  Description of Artificial Sequence: Synthetic oligonucleotide
cugcauugaucuuauugga

SEQ ID NO: 2167717 - RNA, 19 nt, Artificial Sequence
  Description of Artificial Sequence: Synthetic oligonucleotide
gacacgaauaccugcggcu

SEQ ID NO: 2167718 - RNA, 19 nt, Artificial Sequence
  Description of Artificial Sequence: Synthetic oligonucleotide
ucggucucagagaguaggu

SEQ ID NO: 2167719 - RNA, 19 nt, Artificial Sequence
  Description of Artificial Sequence: Synthetic oligonucleotide
uuaccaagauggagccucu

SEQ ID NO: 2167720 - RNA, 19 nt, Artificial Sequence
  Description of Artificial Sequence: Synthetic oligonucleotide
ugaaugcggccugugucag

SEQ ID NO: 2167721 - RNA, 19 nt, Artificial Sequence
  Description of Artificial Sequence: Synthetic oligonucleotide
cuggauacgcugcagcaca

SEQ ID NO: 2167722 - RNA, 19 nt, Artificial Sequence
  Description of Artificial Sequence: Synthetic oligonucleotide
auacgcugcagcacagagg

SEQ ID NO: 2167723 - RNA, 19 nt, Artificial Sequence
  Description of Artificial Sequence: Synthetic oligonucleotide
augccagugaggaaguccu

SEQ ID NO: 2167724 - RNA, 19 nt, Artificial Sequence
  Description of Artificial Sequence: Synthetic oligonucleotide
ggugaaugcggccuguguc

SEQ ID NO: 2167725 - RNA, 19 nt, Artificial Sequence
  Description of Artificial Sequence: Synthetic oligonucleotide
ugaccaauacgggcgcuug

SEQ ID NO: 2167726 - RNA, 19 nt, Artificial Sequence
  Description of Artificial Sequence: Synthetic oligonucleotide
cggcuucucaacaaaacgg

SEQ ID NO: 2167727 - RNA, 19 nt, Artificial Sequence
  Description of Artificial Sequence: Synthetic oligonucleotide
guagcucacugccaagauc

SEQ ID NO: 2167728 - RNA, 19 nt, Artificial Sequence
  Description of Artificial Sequence: Synthetic oligonucleotide
auaacugggaagaccuccu

SEQ ID NO: 2167729 - RNA, 19 nt, Artificial Sequence
  Description of Artificial Sequence: Synthetic oligonucleotide
cuccaccuugguuaccaag

SEQ ID NO: 2167730 - RNA, 19 nt, Artificial Sequence
  Description of Artificial Sequence: Synthetic oligonucleotide
acgcuggcuccauugaggu

SEQ ID NO: 2167731 - RNA, 19 nt, Artificial Sequence
  Description of Artificial Sequence: Synthetic oligonucleotide
uguaggcuucagcuggaua

SEQ ID NO: 2167732 - RNA, 19 nt, Artificial Sequence
  Description of Artificial Sequence: Synthetic oligonucleotide
agaacgaagaaagggucuu

SEQ ID NO: 2167733 - RNA, 19 nt, Artificial Sequence
  Description of Artificial Sequence: Synthetic oligonucleotide
uucggauuccaagccuuug

SEQ ID NO: 2167734 - RNA, 19 nt, Artificial Sequence
  Description of Artificial Sequence: Synthetic oligonucleotide
acaccugccgcggcaagcg

SEQ ID NO: 2167735 - RNA, 19 nt, Artificial Sequence
  Description of Artificial Sequence: Synthetic oligonucleotide
cuccauugagguagaguuc

SEQ ID NO: 2167736 - RNA, 19 nt, Artificial Sequence
  Description of Artificial Sequence: Synthetic oligonucleotide
agaggggcucaggauguac

SEQ ID NO: 2167737 - RNA, 19 nt, Artificial Sequence
  Description of Artificial Sequence: Synthetic oligonucleotide
acgacucaagccaggagug

SEQ ID NO: 2167738 - RNA, 19 nt, Artificial Sequence
  Description of Artificial Sequence: Synthetic oligonucleotide
aagcaccgugcaccgccgg

SEQ ID NO: 2167739 - RNA, 19 nt, Artificial Sequence
  Description of Artificial Sequence: Synthetic oligonucleotide
cugcaccauggcuuggaag

SEQ ID NO: 2167740 - RNA, 19 nt, Artificial Sequence
  Description of Artificial Sequence: Synthetic oligonucleotide
agguagaguucaucacuga

SEQ ID NO: 2167741 - RNA, 19 nt, Artificial Sequence
  Description of Artificial Sequence: Synthetic oligonucleotide
gugguccacaccugccgcg

SEQ ID NO: 2167742 - RNA, 19 nt, Artificial Sequence
  Description of Artificial Sequence: Synthetic oligonucleotide
ugucagccucacaaaccac

SEQ ID NO: 2167743 - RNA, 19 nt, Artificial Sequence
  Description of Artificial Sequence: Synthetic oligonucleotide
gaauaccugcggcuucuca

SEQ ID NO: 2167744 - RNA, 19 nt, Artificial Sequence
  Description of Artificial Sequence: Synthetic oligonucleotide
ugcacgacucaagccagga

SEQ ID NO: 2167745 - RNA, 19 nt, Artificial Sequence
  Description of Artificial Sequence: Synthetic oligonucleotide
uaccugcggcuucucaaca

SEQ ID NO: 2167746 - RNA, 19 nt, Artificial Sequence
  Description of Artificial Sequence: Synthetic oligonucleotide
acccagacucacauugggg

SEQ ID NO: 2167747 - RNA, 19 nt, Artificial Sequence
  Description of Artificial Sequence: Synthetic oligonucleotide
cuccucuucaugagacaug

SEQ ID NO: 2167748 - RNA, 19 nt, Artificial Sequence
  Description of Artificial Sequence: Synthetic oligonucleotide
gauagacuuguggggcagc

SEQ ID NO: 2167749 - RNA, 19 nt, Artificial Sequence
  Description of Artificial Sequence: Synthetic oligonucleotide
cacgugguccacaccugcc

SEQ ID NO: 2167750 - RNA, 19 nt, Artificial Sequence
  Description of Artificial Sequence: Synthetic oligonucleotide
gaagcaccgugcaccgccg

SEQ ID NO: 2167751 - RNA, 19 nt, Artificial Sequence
  Description of Artificial Sequence: Synthetic oligonucleotide
cacgacucaagccaggagu

SEQ ID NO: 2167752 - RNA, 19 nt, Artificial Sequence
  Description of Artificial Sequence: Synthetic oligonucleotide
auacgaggcuccggcaccg

SEQ ID NO: 2167753 - RNA, 19 nt, Artificial Sequence
  Description of Artificial Sequence: Synthetic oligonucleotide
cugggccauaacugggaag

SEQ ID NO: 2167754 - RNA, 19 nt, Artificial Sequence
  Description of Artificial Sequence: Synthetic oligonucleotide
cucagagaguaggucucgg

SEQ ID NO: 2167755 - RNA, 19 nt, Artificial Sequence
  Description of Artificial Sequence: Synthetic oligonucleotide
caccgccggacacacacgc

SEQ ID NO: 2167756 - RNA, 19 nt, Artificial Sequence
  Description of Artificial Sequence: Synthetic oligonucleotide
aggaaguuccauggcauau

SEQ ID NO: 2167757 - RNA, 19 nt, Artificial Sequence
  Description of Artificial Sequence: Synthetic oligonucleotide
cacaugauaauacgaggcu

SEQ ID NO: 2167758 - RNA, 19 nt, Artificial Sequence
  Description of Artificial Sequence: Synthetic oligonucleotide
caccacaccauacuuggaa

SEQ ID NO: 2167759 - RNA, 19 nt, Artificial Sequence
  Description of Artificial Sequence: Synthetic oligonucleotide
caccuugguuaccaagaug

SEQ ID NO: 2167760 - RNA, 19 nt, Artificial Sequence
  Description of Artificial Sequence: Synthetic oligonucleotide
caaaccaccacaccauacu

SEQ ID NO: 2167761 - RNA, 19 nt, Artificial Sequence
  Description of Artificial Sequence: Synthetic oligonucleotide
guacaugccugcauugauc

SEQ ID NO: 2167762 - RNA, 19 nt, Artificial Sequence
  Description of Artificial Sequence: Synthetic oligonucleotide
accgugcaccgccggacac

SEQ ID NO: 2167763 - RNA, 19 nt, Artificial Sequence
  Description of Artificial Sequence: Synthetic oligonucleotide
uggcauauagcugccccuc

SEQ ID NO: 2167764 - RNA, 19 nt, Artificial Sequence
  Description of Artificial Sequence: Synthetic oligonucleotide
uccggcaccgacuccccga

SEQ ID NO: 2167765 - RNA, 19 nt, Artificial Sequence
  Description of Artificial Sequence: Synthetic oligonucleotide
augugcgcaucccgaagca

SEQ ID NO: 2167766 - RNA, 19 nt, Artificial Sequence
  Description of Artificial Sequence: Synthetic oligonucleotide
gugcgcaucccgaagcacc

SEQ ID NO: 2167767 - RNA, 19 nt, Artificial Sequence
  Description of Artificial Sequence: Synthetic oligonucleotide
ugcgcacccacugacccac

SEQ ID NO: 2167768 - RNA, 19 nt, Artificial Sequence
  Description of Artificial Sequence: Synthetic oligonucleotide
cgauggaacugcaccaugg

SEQ ID NO: 2167769 - RNA, 19 nt, Artificial Sequence
  Description of Artificial Sequence: Synthetic oligonucleotide
acgaggcuccggcaccgac

SEQ ID NO: 2167770 - RNA, 19 nt, Artificial Sequence
  Description of Artificial Sequence: Synthetic oligonucleotide
gcuccauugagguagaguu

SEQ ID NO: 2167771 - RNA, 19 nt, Artificial Sequence
  Description of Artificial Sequence: Synthetic oligonucleotide
ccagacucacauuggggcc

SEQ ID NO: 2167772 - RNA, 19 nt, Artificial Sequence
  Description of Artificial Sequence: Synthetic oligonucleotide
cagcacgcuggcuccauug

SEQ ID NO: 2167773 - RNA, 19 nt, Artificial Sequence
  Description of Artificial Sequence: Synthetic oligonucleotide
gaacgaagaaagggucuuc

SEQ ID NO: 2167774 - RNA, 19 nt, Artificial Sequence
  Description of Artificial Sequence: Synthetic oligonucleotide
acgaauaccugcggcuucu

SEQ ID NO: 2167775 - RNA, 19 nt, Artificial Sequence
  Description of Artificial Sequence: Synthetic oligonucleotide
gagaacgaagaaagggucu

SEQ ID NO: 2167776 - RNA, 19 nt, Artificial Sequence
  Description of Artificial Sequence: Synthetic oligonucleotide
ggucucagagaguaggucu

SEQ ID NO: 2167777 - RNA, 19 nt, Artificial Sequence
  Description of Artificial Sequence: Synthetic oligonucleotide
caugccugcauugaucuua

SEQ ID NO: 2167778 - RNA, 19 nt, Artificial Sequence
  Description of Artificial Sequence: Synthetic oligonucleotide
ccuucacaugauaauacga

SEQ ID NO: 2167779 - RNA, 19 nt, Artificial Sequence
  Description of Artificial Sequence: Synthetic oligonucleotide
gucucagagaguaggucuc

SEQ ID NO: 2167780 - RNA, 19 nt, Artificial Sequence
  Description of Artificial Sequence: Synthetic oligonucleotide
gggccaaugccagaggccc

SEQ ID NO: 2167781 - RNA, 19 nt, Artificial Sequence
  Description of Artificial Sequence: Synthetic oligonucleotide
aaggcuccuccaccuuggu

SEQ ID NO: 2167782 - RNA, 19 nt, Artificial Sequence
  Description of Artificial Sequence: Synthetic oligonucleotide
gaaugcggccugugucagc

SEQ ID NO: 2167783 - RNA, 19 nt, Artificial Sequence
  Description of Artificial Sequence: Synthetic oligonucleotide
cuucggucucagagaguag

SEQ ID NO: 2167784 - RNA, 19 nt, Artificial Sequence
  Description of Artificial Sequence: Synthetic oligonucleotide
ggauuccaagccuuugcuc

SEQ ID NO: 2167785 - RNA, 19 nt, Artificial Sequence
  Description of Artificial Sequence: Synthetic oligonucleotide
aguccuugggcuguccaau

SEQ ID NO: 2167786 - RNA, 19 nt, Artificial Sequence
  Description of Artificial Sequence: Synthetic oligonucleotide
acacacacgccguccucca

SEQ ID NO: 2167787 - RNA, 19 nt, Artificial Sequence
  Description of Artificial Sequence: Synthetic oligonucleotide
aagggucuucggucucaga

SEQ ID NO: 2167788 - RNA, 19 nt, Artificial Sequence
  Description of Artificial Sequence: Synthetic oligonucleotide
cauggcuuggaagggaaaa

SEQ ID NO: 2167789 - RNA, 19 nt, Artificial Sequence
  Description of Artificial Sequence: Synthetic oligonucleotide
ucucaacaaaacggugaau

SEQ ID NO: 2167790 - RNA, 19 nt, Artificial Sequence
  Description of Artificial Sequence: Synthetic oligonucleotide
cuguuacguucuccaugcg

SEQ ID NO: 2167791 - RNA, 19 nt, Artificial Sequence
  Description of Artificial Sequence: Synthetic oligonucleotide
aacggugaaugcggccugu

SEQ ID NO: 2167792 - RNA, 19 nt, Artificial Sequence
  Description of Artificial Sequence: Synthetic oligonucleotide
cuuggguccacaagcacau

SEQ ID NO: 2167793 - RNA, 19 nt, Artificial Sequence
  Description of Artificial Sequence: Synthetic oligonucleotide
aagccaggagugggagcgg

SEQ ID NO: 2167794 - RNA, 19 nt, Artificial Sequence
  Description of Artificial Sequence: Synthetic oligonucleotide
ccccgauagacuugugggg

SEQ ID NO: 2167795 - RNA, 19 nt, Artificial Sequence
  Description of Artificial Sequence: Synthetic oligonucleotide
cacgaauaccugcggcuuc

SEQ ID NO: 2167796 - RNA, 19 nt, Artificial Sequence
  Description of Artificial Sequence: Synthetic oligonucleotide
cccgauagacuuguggggc

SEQ ID NO: 2167797 - RNA, 19 nt, Artificial Sequence
  Description of Artificial Sequence: Synthetic oligonucleotide
aguaggucucgggccaaug

SEQ ID NO: 2167798 - RNA, 19 nt, Artificial Sequence
  Description of Artificial Sequence: Synthetic oligonucleotide
cagcgccagcccacgaugc

SEQ ID NO: 2167799 - RNA, 19 nt, Artificial Sequence
  Description of Artificial Sequence: Synthetic oligonucleotide
ggagcggaugugcgcaucc

SEQ ID NO: 2167800 - RNA, 19 nt, Artificial Sequence
  Description of Artificial Sequence: Synthetic oligonucleotide
uccucgcccagcacuguua

SEQ ID NO: 2167801 - RNA, 19 nt, Artificial Sequence
  Description of Artificial Sequence: Synthetic oligonucleotide
ugugcgcaucccgaagcac

SEQ ID NO: 2167802 - RNA, 19 nt, Artificial Sequence
  Description of Artificial Sequence: Synthetic oligonucleotide
gcuucucaacaaaacggug

SEQ ID NO: 2167803 - RNA, 19 nt, Artificial Sequence
  Description of Artificial Sequence: Synthetic oligonucleotide
uuccaagccuuugcuccug

SEQ ID NO: 2167804 - RNA, 19 nt, Artificial Sequence
  Description of Artificial Sequence: Synthetic oligonucleotide
acacgaauaccugcggcuu

SEQ ID NO: 2167805 - RNA, 19 nt, Artificial Sequence
  Description of Artificial Sequence: Synthetic oligonucleotide
ggcauauagcugccccucc

SEQ ID NO: 2167806 - RNA, 19 nt, Artificial Sequence
  Description of Artificial Sequence: Synthetic oligonucleotide
caucugugacauguagcuc

SEQ ID NO: 2167807 - RNA, 19 nt, Artificial Sequence
  Description of Artificial Sequence: Synthetic oligonucleotide
gaacugcaccauggcuugg

SEQ ID NO: 2167808 - RNA, 19 nt, Artificial Sequence
  Description of Artificial Sequence: Synthetic oligonucleotide
cucgggccaaugccagagg

SEQ ID NO: 2167809 - RNA, 19 nt, Artificial Sequence
  Description of Artificial Sequence: Synthetic oligonucleotide
caagcgccuccacuugaug

SEQ ID NO: 2167810 - RNA, 19 nt, Artificial Sequence
  Description of Artificial Sequence: Synthetic oligonucleotide
agaguucaucacugacaau

SEQ ID NO: 2167811 - RNA, 19 nt, Artificial Sequence
  Description of Artificial Sequence: Synthetic oligonucleotide
uucaugagacauggagauu

SEQ ID NO: 2167812 - RNA, 19 nt, Artificial Sequence
  Description of Artificial Sequence: Synthetic oligonucleotide
guccaauguccauccagaa

SEQ ID NO: 2167813 - RNA, 19 nt, Artificial Sequence
  Description of Artificial Sequence: Synthetic oligonucleotide
ugcugcaguucugaccaau

SEQ ID NO: 2167814 - RNA, 19 nt, Artificial Sequence
  Description of Artificial Sequence: Synthetic oligonucleotide
cucgcccagcacuguuacg

SEQ ID NO: 2167815 - RNA, 19 nt, Artificial Sequence
  Description of Artificial Sequence: Synthetic oligonucleotide
gccauaacugggaagaccu

SEQ ID NO: 2167816 - RNA, 19 nt, Artificial Sequence
  Description of Artificial Sequence: Synthetic oligonucleotide
aggucucgggccaaugcca

SEQ ID NO: 2167817 - RNA, 19 nt, Artificial Sequence
  Description of Artificial Sequence: Synthetic oligonucleotide
aggagugggagcggaugug

SEQ ID NO: 2167818 - RNA, 19 nt, Artificial Sequence
  Description of Artificial Sequence: Synthetic oligonucleotide
accugcggcuucucaacaa

SEQ ID NO: 2167819 - RNA, 19 nt, Artificial Sequence
  Description of Artificial Sequence: Synthetic oligonucleotide
cgaagcaccgugcaccgcc

SEQ ID NO: 2167820 - RNA, 19 nt, Artificial Sequence
  Description of Artificial Sequence: Synthetic oligonucleotide
cgaugcacgacucaagcca

SEQ ID NO: 2167821 - RNA, 19 nt, Artificial Sequence
  Description of Artificial Sequence: Synthetic oligonucleotide
gugggagcggaugugcgca

SEQ ID NO: 2167822 - RNA, 19 nt, Artificial Sequence
  Description of Artificial Sequence: Synthetic oligonucleotide
acccacugacccacacggc

SEQ ID NO: 2167823 - RNA, 19 nt, Artificial Sequence
  Description of Artificial Sequence: Synthetic oligonucleotide
gggucuucggucucagaga

SEQ ID NO: 2167824 - RNA, 19 nt, Artificial Sequence
  Description of Artificial Sequence: Synthetic oligonucleotide
ccgccggacacacacgccg

SEQ ID NO: 2167825 - RNA, 19 nt, Artificial Sequence
  Description of Artificial Sequence: Synthetic oligonucleotide
ggacccagacucacauugg

SEQ ID NO: 2167826 - RNA, 19 nt, Artificial Sequence
  Description of Artificial Sequence: Synthetic oligonucleotide
ccugcauauccuucacaug

SEQ ID NO: 2167827 - RNA, 19 nt, Artificial Sequence
  Description of Artificial Sequence: Synthetic oligonucleotide
cucuuggccauggugucga

SEQ ID NO: 2167828 - RNA, 19 nt, Artificial Sequence
  Description of Artificial Sequence: Synthetic oligonucleotide
cacggcagcgccagcccac

SEQ ID NO: 2167829 - RNA, 19 nt, Artificial Sequence
  Description of Artificial Sequence: Synthetic oligonucleotide
cacaccugccgcggcaagc

SEQ ID NO: 2167830 - RNA, 19 nt, Artificial Sequence
  Description of Artificial Sequence: Synthetic oligonucleotide
cagccucacaaaccaccac

SEQ ID NO: 2167831 - RNA, 19 nt, Artificial Sequence
  Description of Artificial Sequence: Synthetic oligonucleotide
aucacgugguccacaccug

SEQ ID NO: 2167832 - RNA, 19 nt, Artificial Sequence
  Description of Artificial Sequence: Synthetic oligonucleotide
augcgcacccacugaccca

SEQ ID NO: 2167833 - RNA, 19 nt, Artificial Sequence
  Description of Artificial Sequence: Synthetic oligonucleotide
agcgccagcccacgaugca

SEQ ID NO: 2167834 - RNA, 19 nt, Artificial Sequence
  Description of Artificial Sequence: Synthetic oligonucleotide
auggagauucggauuccaa

SEQ ID NO: 2167835 - RNA, 19 nt, Artificial Sequence
  Description of Artificial Sequence: Synthetic oligonucleotide
accgccggacacacacgcc

SEQ ID NO: 2167836 - RNA, 19 nt, Artificial Sequence
  Description of Artificial Sequence: Synthetic oligonucleotide
cauggagauucggauucca

SEQ ID NO: 2167837 - RNA, 19 nt, Artificial Sequence
  Description of Artificial Sequence: Synthetic oligonucleotide
augcacgacucaagccagg

SEQ ID NO: 2167838 - RNA, 19 nt, Artificial Sequence
  Description of Artificial Sequence: Synthetic oligonucleotide
accauggcuuggaagggaa

SEQ ID NO: 2167839 - RNA, 19 nt, Artificial Sequence
  Description of Artificial Sequence: Synthetic oligonucleotide
gcagcgccagcccacgaug

SEQ ID NO: 2167840 - RNA, 19 nt, Artificial Sequence
  Description of Artificial Sequence: Synthetic oligonucleotide
caagaucacgugguccaca

SEQ ID NO: 2167841 - RNA, 19 nt, Artificial Sequence
  Description of Artificial Sequence: Synthetic oligonucleotide
gcacgcuggcuccauugag

SEQ ID NO: 2167842 - RNA, 19 nt, Artificial Sequence
  Description of Artificial Sequence: Synthetic oligonucleotide
cugacccacacggcagcgc

SEQ ID NO: 2167843 - RNA, 19 nt, Artificial Sequence
  Description of Artificial Sequence: Synthetic oligonucleotide
gccauggugucgauggaac

SEQ ID NO: 2167844 - RNA, 19 nt, Artificial Sequence
  Description of Artificial Sequence: Synthetic oligonucleotide
agcccacgaugcacgacuc

SEQ ID NO: 2167845 - RNA, 19 nt, Artificial Sequence
  Description of Artificial Sequence: Synthetic oligonucleotide
gcacgacucaagccaggag

SEQ ID NO: 2167846 - RNA, 19 nt, Artificial Sequence
  Description of Artificial Sequence: Synthetic oligonucleotide
ggggcagcacgcuggcucc

SEQ ID NO: 2167847 - RNA, 19 nt, Artificial Sequence
  Description of Artificial Sequence: Synthetic oligonucleotide
ggucucgggccaaugccag

SEQ ID NO: 2167848 - RNA, 19 nt, Artificial Sequence
  Description of Artificial Sequence: Synthetic oligonucleotide
ccacgaugcacgacucaag

SEQ ID NO: 2167849 - RNA, 19 nt, Artificial Sequence
  Description of Artificial Sequence: Synthetic oligonucleotide
ccaaugcugcaguucugac

SEQ ID NO: 2167850 - RNA, 19 nt, Artificial Sequence
  Description of Artificial Sequence: Synthetic oligonucleotide
gacuccccgauagacuugu

SEQ ID NO: 2167851 - RNA, 19 nt, Artificial Sequence
  Description of Artificial Sequence: Synthetic oligonucleotide
caggauguacaugccugca

SEQ ID NO: 2167852 - RNA, 19 nt, Artificial Sequence
  Description of Artificial Sequence: Synthetic oligonucleotide
gcuggauacgcugcagcac

SEQ ID NO: 2167853 - RNA, 19 nt, Artificial Sequence
  Description of Artificial Sequence: Synthetic oligonucleotide
ggccugaacacagucucuc

SEQ ID NO: 2167854 - RNA, 19 nt, Artificial Sequence
  Description of Artificial Sequence: Synthetic oligonucleotide
cugcggcuucucaacaaaa

SEQ ID NO: 2167855 - RNA, 19 nt, Artificial Sequence
  Description of Artificial Sequence: Synthetic oligonucleotide
acggcagcgccagcccacg

SEQ ID NO: 2167856 - RNA, 19 nt, Artificial Sequence
  Description of Artificial Sequence: Synthetic oligonucleotide
cauuggggccaaugcugca

SEQ ID NO: 2167857 - RNA, 19 nt, Artificial Sequence
  Description of Artificial Sequence: Synthetic oligonucleotide
ccaugcgcacccacugacc

SEQ ID NO: 2167858 - RNA, 19 nt, Artificial Sequence
  Description of Artificial Sequence: Synthetic oligonucleotide
cagcccacgaugcacgacu

SEQ ID NO: 2167859 - RNA, 19 nt, Artificial Sequence
  Description of Artificial Sequence: Synthetic oligonucleotide
cacagaucacaucacuguu

SEQ ID NO: 2167860 - RNA, 19 nt, Artificial Sequence
  Description of Artificial Sequence: Synthetic oligonucleotide
augccugcauugaucuuau

SEQ ID NO: 2167861 - RNA, 19 nt, Artificial Sequence
  Description of Artificial Sequence: Synthetic oligonucleotide
acaugccugcauugaucuu

SEQ ID NO: 2167862 - RNA, 19 nt, Artificial Sequence
  Description of Artificial Sequence: Synthetic oligonucleotide
acacgccguccuccaccac

SEQ ID NO: 2167863 - RNA, 19 nt, Artificial Sequence
  Description of Artificial Sequence: Synthetic oligonucleotide
auucggauuccaagccuuu

SEQ ID NO: 2167864 - RNA, 19 nt, Artificial Sequence
  Description of Artificial Sequence: Synthetic oligonucleotide
auccucgcccagcacuguu

SEQ ID NO: 2167865 - RNA, 19 nt, Artificial Sequence
  Description of Artificial Sequence: Synthetic oligonucleotide
acggugaaugcggccugug

SEQ ID NO: 2167866 - RNA, 19 nt, Artificial Sequence
  Description of Artificial Sequence: Synthetic oligonucleotide
ggacugcaggaagaggcac

SEQ ID NO: 2167867 - RNA, 19 nt, Artificial Sequence
  Description of Artificial Sequence: Synthetic oligonucleotide
cuccaugcgcacccacuga

SEQ ID NO: 2167868 - RNA, 19 nt, Artificial Sequence
  Description of Artificial Sequence: Synthetic oligonucleotide
cuccggcaccgacuccccg

SEQ ID NO: 2167869 - RNA, 19 nt, Artificial Sequence
  Description of Artificial Sequence: Synthetic oligonucleotide
ggugucgauggaacugcac

SEQ ID NO: 2167870 - RNA, 19 nt, Artificial Sequence
  Description of Artificial Sequence: Synthetic oligonucleotide
gggcgcuuggguccacaag

SEQ ID NO: 2167871 - RNA, 19 nt, Artificial Sequence
  Description of Artificial Sequence: Synthetic oligonucleotide
ccacaagcacauuccccac

SEQ ID NO: 2167872 - RNA, 19 nt, Artificial Sequence
  Description of Artificial Sequence: Synthetic oligonucleotide
ugggagcggaugugcgcau

SEQ ID NO: 2167873 - RNA, 19 nt, Artificial Sequence
  Description of Artificial Sequence: Synthetic oligonucleotide
ggaaguuccauggcauaua

SEQ ID NO: 2167874 - RNA, 19 nt, Artificial Sequence
  Description of Artificial Sequence: Synthetic oligonucleotide
ggcaagcgccuccacuuga

SEQ ID NO: 2167875 - RNA, 19 nt, Artificial Sequence
  Description of Artificial Sequence: Synthetic oligonucleotide
auacgggcgcuugggucca

SEQ ID NO: 2167876 - RNA, 19 nt, Artificial Sequence
  Description of Artificial Sequence: Synthetic oligonucleotide
ggggcucaggauguacaug

SEQ ID NO: 2167877 - RNA, 19 nt, Artificial Sequence
  Description of Artificial Sequence: Synthetic oligonucleotide
ggcucaggauguacaugcc

SEQ ID NO: 2167878 - RNA, 19 nt, Artificial Sequence
  Description of Artificial Sequence: Synthetic oligonucleotide
caccacaccgggacccaga

SEQ ID NO: 2167879 - RNA, 19 nt, Artificial Sequence
  Description of Artificial Sequence: Synthetic oligonucleotide
agacucacauuggggccaa

SEQ ID NO: 2167880 - RNA, 19 nt, Artificial Sequence
  Description of Artificial Sequence: Synthetic oligonucleotide
ccauaacugggaagaccuc

SEQ ID NO: 2167881 - RNA, 19 nt, Artificial Sequence
  Description of Artificial Sequence: Synthetic oligonucleotide
agaguaggucucgggccaa

SEQ ID NO: 2167882 - RNA, 19 nt, Artificial Sequence
  Description of Artificial Sequence: Synthetic oligonucleotide
caccgggacccagacucac

SEQ ID NO: 2167883 - RNA, 19 nt, Artificial Sequence
  Description of Artificial Sequence: Synthetic oligonucleotide
caccauggcuuggaaggga

SEQ ID NO: 2167884 - RNA, 19 nt, Artificial Sequence
  Description of Artificial Sequence: Synthetic oligonucleotide
ugccccuccugggccauaa

SEQ ID NO: 2167885 - RNA, 19 nt, Artificial Sequence
  Description of Artificial Sequence: Synthetic oligonucleotide
ccucgcccagcacuguuac

SEQ ID NO: 2167886 - RNA, 19 nt, Artificial Sequence
  Description of Artificial Sequence: Synthetic oligonucleotide
gcauauagcugccccuccu

SEQ ID NO: 2167887 - RNA, 19 nt, Artificial Sequence
  Description of Artificial Sequence: Synthetic oligonucleotide
ccuugguuaccaagaugga

SEQ ID NO: 2167888 - RNA, 19 nt, Artificial Sequence
  Description of Artificial Sequence: Synthetic oligonucleotide
cgggccaaugccagaggcc

SEQ ID NO: 2167889 - RNA, 19 nt, Artificial Sequence
  Description of Artificial Sequence: Synthetic oligonucleotide
ggggccaaugcugcaguuc

SEQ ID NO: 2167890 - RNA, 19 nt, Artificial Sequence
  Description of Artificial Sequence: Synthetic oligonucleotide
gucgauggaacugcaccau

SEQ ID NO: 2167891 - RNA, 19 nt, Artificial Sequence
  Description of Artificial Sequence: Synthetic oligonucleotide
uacgaggcuccggcaccga

SEQ ID NO: 2167892 - RNA, 19 nt, Artificial Sequence
  Description of Artificial Sequence: Synthetic oligonucleotide
ccgauagacuuguggggca

SEQ ID NO: 2167893 - RNA, 19 nt, Artificial Sequence
  Description of Artificial Sequence: Synthetic oligonucleotide
cuuggccagcccugcauau

SEQ ID NO: 2167894 - RNA, 19 nt, Artificial Sequence
  Description of Artificial Sequence: Synthetic oligonucleotide
cgaagaaagggucuucggu

SEQ ID NO: 2167895 - RNA, 19 nt, Artificial Sequence
  Description of Artificial Sequence: Synthetic oligonucleotide
caccgugcaccgccggaca

SEQ ID NO: 2167896 - RNA, 19 nt, Artificial Sequence
  Description of Artificial Sequence: Synthetic oligonucleotide
gcggaugugcgcaucccga

SEQ ID NO: 2167897 - RNA, 19 nt, Artificial Sequence
  Description of Artificial Sequence: Synthetic oligonucleotide
acaccgggacccagacuca

SEQ ID NO: 2167898 - RNA, 19 nt, Artificial Sequence
  Description of Artificial Sequence: Synthetic oligonucleotide
cgauagacuuguggggcag

SEQ ID NO: 2167899 - RNA, 19 nt, Artificial Sequence
  Description of Artificial Sequence: Synthetic oligonucleotide
accgggacccagacucaca

SEQ ID NO: 2167900 - RNA, 19 nt, Artificial Sequence
  Description of Artificial Sequence: Synthetic oligonucleotide
ccaagaucacgugguccac

SEQ ID NO: 2167901 - RNA, 19 nt, Artificial Sequence
  Description of Artificial Sequence: Synthetic oligonucleotide
ccauggcauauagcugccc

SEQ ID NO: 2167902 - RNA, 19 nt, Artificial Sequence
  Description of Artificial Sequence: Synthetic oligonucleotide
cuccuccaccuugguuacc

SEQ ID NO: 2167903 - RNA, 19 nt, Artificial Sequence
  Description of Artificial Sequence: Synthetic oligonucleotide
ccaccaccacaccgggacc

SEQ ID NO: 2167904 - RNA, 19 nt, Artificial Sequence
  Description of Artificial Sequence: Synthetic oligonucleotide
cgacucaagccaggagugg

SEQ ID NO: 2167905 - RNA, 19 nt, Artificial Sequence
  Description of Artificial Sequence: Synthetic oligonucleotide
ccaacaucugugacaugua

SEQ ID NO: 2167906 - RNA, 19 nt, Artificial Sequence
  Description of Artificial Sequence: Synthetic oligonucleotide
ggcuccauugagguagagu

SEQ ID NO: 2167907 - RNA, 19 nt, Artificial Sequence
  Description of Artificial Sequence: Synthetic oligonucleotide
uuggguccacaagcacauu

SEQ ID NO: 2167908 - RNA, 19 nt, Artificial Sequence
  Description of Artificial Sequence: Synthetic oligonucleotide
gcaccgugcaccgccggac

SEQ ID NO: 2167909 - RNA, 19 nt, Artificial Sequence
  Description of Artificial Sequence: Synthetic oligonucleotide
ccugcggcuucucaacaaa

SEQ ID NO: 2167910 - RNA, 19 nt, Artificial Sequence
  Description of Artificial Sequence: Synthetic oligonucleotide
cuguccccaaaggcuccuc

SEQ ID NO: 2167911 - RNA, 19 nt, Artificial Sequence
  Description of Artificial Sequence: Synthetic oligonucleotide
ugccugcauugaucuuauu

SEQ ID NO: 2167912 - RNA, 19 nt, Artificial Sequence
  Description of Artificial Sequence: Synthetic oligonucleotide
gcaccgccggacacacacg

SEQ ID NO: 2167913 - RNA, 19 nt, Artificial Sequence
  Description of Artificial Sequence: Synthetic oligonucleotide
auggagccucuuggccaug

SEQ ID NO: 2167914 - RNA, 19 nt, Artificial Sequence
  Description of Artificial Sequence: Synthetic oligonucleotide
gccugaacacagucucucu

SEQ ID NO: 2167915 - RNA, 19 nt, Artificial Sequence
  Description of Artificial Sequence: Synthetic oligonucleotide
gcgcuuggguccacaagca

SEQ ID NO: 2167916 - RNA, 19 nt, Artificial Sequence
  Description of Artificial Sequence: Synthetic oligonucleotide
ccagcacuguuacguucuc

SEQ ID NO: 2167917 - RNA, 19 nt, Artificial Sequence
  Description of Artificial Sequence: Synthetic oligonucleotide
gcaccgacuccccgauaga

SEQ ID NO: 2167918 - RNA, 19 nt, Artificial Sequence
  Description of Artificial Sequence: Synthetic oligonucleotide
acuccccgauagacuugug

SEQ ID NO: 2167919 - RNA, 19 nt, Artificial Sequence
  Description of Artificial Sequence: Synthetic oligonucleotide
gccggacacacacgccguc

SEQ ID NO: 2167920 - RNA, 19 nt, Artificial Sequence
  Description of Artificial Sequence: Synthetic oligonucleotide
acgggcgcuuggguccaca

SEQ ID NO: 2167921 - RNA, 19 nt, Artificial Sequence
  Description of Artificial Sequence: Synthetic oligonucleotide
cgugcaccgccggacacac

SEQ ID NO: 2167922 - RNA, 19 nt, Artificial Sequence
  Description of Artificial Sequence: Synthetic oligonucleotide
ggaagaccuccuucucaau

SEQ ID NO: 2167923 - RNA, 19 nt, Artificial Sequence
  Description of Artificial Sequence: Synthetic oligonucleotide
gccagcccacgaugcacga

SEQ ID NO: 2167924 - RNA, 19 nt, Artificial Sequence
  Description of Artificial Sequence: Synthetic oligonucleotide
cugaccaauacgggcgcuu

SEQ ID NO: 2167925 - RNA, 19 nt, Artificial Sequence
  Description of Artificial Sequence: Synthetic oligonucleotide
gguuaccaagauggagccu

SEQ ID NO: 2167926 - RNA, 19 nt, Artificial Sequence
  Description of Artificial Sequence: Synthetic oligonucleotide
gaguaggucucgggccaau

SEQ ID NO: 2167927 - RNA, 19 nt, Artificial Sequence
  Description of Artificial Sequence: Synthetic oligonucleotide
ccauggcuuggaagggaaa

SEQ ID NO: 2167928 - RNA, 19 nt, Artificial Sequence
  Description of Artificial Sequence: Synthetic oligonucleotide
ggcagcgccagcccacgau

SEQ ID NO: 2167929 - RNA, 19 nt, Artificial Sequence
  Description of Artificial Sequence: Synthetic oligonucleotide
gggagcggaugugcgcauc

SEQ ID NO: 2167930 - RNA, 19 nt, Artificial Sequence
  Description of Artificial Sequence: Synthetic oligonucleotide
ccaauacgggcgcuugggu

SEQ ID NO: 2167931 - RNA, 19 nt, Artificial Sequence
  Description of Artificial Sequence: Synthetic oligonucleotide
cggauuccaagccuuugcu

SEQ ID NO: 2167932 - RNA, 19 nt, Artificial Sequence
  Description of Artificial Sequence: Synthetic oligonucleotide
cgcacccacugacccacac

SEQ ID NO: 2167933 - RNA, 19 nt, Artificial Sequence
  Description of Artificial Sequence: Synthetic oligonucleotide
gucuucggucucagagagu

SEQ ID NO: 2167934 - RNA, 19 nt, Artificial Sequence
  Description of Artificial Sequence: Synthetic oligonucleotide
ccagcccacgaugcacgac

SEQ ID NO: 2167935 - RNA, 19 nt, Artificial Sequence
  Description of Artificial Sequence: Synthetic oligonucleotide
uacgggcgcuuggguccac

SEQ ID NO: 2167936 - RNA, 19 nt, Artificial Sequence
  Description of Artificial Sequence: Synthetic oligonucleotide
gccgcggcaagcgccucca

SEQ ID NO: 2167937 - RNA, 19 nt, Artificial Sequence
  Description of Artificial Sequence: Synthetic oligonucleotide
cggaugugcgcaucccgaa

SEQ ID NO: 2167938 - RNA, 19 nt, Artificial Sequence
  Description of Artificial Sequence: Synthetic oligonucleotide
gcggccugugucagccuca

SEQ ID NO: 2167939 - RNA, 19 nt, Artificial Sequence
  Description of Artificial Sequence: Synthetic oligonucleotide
cugugacauguagcucacu

SEQ ID NO: 2167940 - RNA, 19 nt, Artificial Sequence
  Description of Artificial Sequence: Synthetic oligonucleotide
cccaaaggcuccucuucau

SEQ ID NO: 2167941 - RNA, 19 nt, Artificial Sequence
  Description of Artificial Sequence: Synthetic oligonucleotide
gccagcccugcauauccuu

SEQ ID NO: 2167942 - RNA, 19 nt, Artificial Sequence
  Description of Artificial Sequence: Synthetic oligonucleotide
gcaagcgccuccacuugau

SEQ ID NO: 2167943 - RNA, 19 nt, Artificial Sequence
  Description of Artificial Sequence: Synthetic oligonucleotide
cagaggggcucaggaugua

SEQ ID NO: 2167944 - RNA, 19 nt, Artificial Sequence
  Description of Artificial Sequence: Synthetic oligonucleotide
ccugccgcggcaagcgccu

SEQ ID NO: 2167945 - RNA, 19 nt, Artificial Sequence
  Description of Artificial Sequence: Synthetic oligonucleotide
cauccucgcccagcacugu

SEQ ID NO: 2167946 - RNA, 19 nt, Artificial Sequence
  Description of Artificial Sequence: Synthetic oligonucleotide
cugccgcggcaagcgccuc

SEQ ID NO: 2167947 - RNA, 19 nt, Artificial Sequence
  Description of Artificial Sequence: Synthetic oligonucleotide
ccgugcaccgccggacaca

SEQ ID NO: 2167948 - RNA, 19 nt, Artificial Sequence
  Description of Artificial Sequence: Synthetic oligonucleotide
gugcaccgccggacacaca

SEQ ID NO: 2167949 - RNA, 19 nt, Artificial Sequence
  Description of Artificial Sequence: Synthetic oligonucleotide
guggggcagcacgcuggcu

SEQ ID NO: 2167950 - RNA, 19 nt, Artificial Sequence
  Description of Artificial Sequence: Synthetic oligonucleotide
gacucacauuggggccaau

SEQ ID NO: 2167951 - RNA, 19 nt, Artificial Sequence
  Description of Artificial Sequence: Synthetic oligonucleotide
cggugaaugcggccugugu

SEQ ID NO: 2167952 - RNA, 19 nt, Artificial Sequence
  Description of Artificial Sequence: Synthetic oligonucleotide
cgcggcaagcgccuccacu

SEQ ID NO: 2167953 - RNA, 19 nt, Artificial Sequence
  Description of Artificial Sequence: Synthetic oligonucleotide
ggcagcacgcuggcuccau

SEQ ID NO: 2167954 - RNA, 19 nt, Artificial Sequence
  Description of Artificial Sequence: Synthetic oligonucleotide
cgggcgcuuggguccacaa

SEQ ID NO: 2167955 - RNA, 19 nt, Artificial Sequence
  Description of Artificial Sequence: Synthetic oligonucleotide
ccgcggcaagcgccuccac

SEQ ID NO: 2167956 - RNA, 19 nt, Artificial Sequence
  Description of Artificial Sequence: Synthetic oligonucleotide
ccacaccgggacccagacu

SEQ ID NO: 2167957 - RNA, 19 nt, Artificial Sequence
  Description of Artificial Sequence: Synthetic oligonucleotide
ccggcaccgacuccccgau

SEQ ID NO: 2167958 - RNA, 19 nt, Artificial Sequence
  Description of Artificial Sequence: Synthetic oligonucleotide
cgccggacacacacgccgu

SEQ ID NO: 2167959 - RNA, 19 nt, Artificial Sequence
  Description of Artificial Sequence: Synthetic oligonucleotide
gcgcaucccgaagcaccgu

SEQ ID NO: 2167960 - RNA, 19 nt, Artificial Sequence
  Description of Artificial Sequence: Synthetic oligonucleotide
gcgcacccacugacccaca

SEQ ID NO: 2167961 - RNA, 19 nt, Artificial Sequence
  Description of Artificial Sequence: Synthetic oligonucleotide
cggcagcgccagcccacga

SEQ ID NO: 2167962 - RNA, 19 nt, Artificial Sequence
  Description of Artificial Sequence: Synthetic oligonucleotide
cgggacccagacucacauu

SEQ ID NO: 2167963 - RNA, 19 nt, Artificial Sequence
  Description of Artificial Sequence: Synthetic oligonucleotide
cggcaccgacuccccgaua

SEQ ID NO: 2167964 - RNA, 19 nt, Artificial Sequence
  Description of Artificial Sequence: Synthetic oligonucleotide
uucaucgucacucugguug

SEQ ID NO: 2167965 - RNA, 19 nt, Artificial Sequence
  Description of Artificial Sequence: Synthetic oligonucleotide
uuuauuuauuauaucugcc

SEQ ID NO: 2167966 - RNA, 19 nt, Artificial Sequence
  Description of Artificial Sequence: Synthetic oligonucleotide
  modified_base (2)..(2): a, c, u, g, unknown or other
unuuuauuuauuuauuuau

SEQ ID NO: 2167967 - RNA, 19 nt, Artificial Sequence
  Description of Artificial Sequence: Synthetic oligonucleotide
aaggagauguaaucguggc

SEQ ID NO: 2167968 - RNA, 19 nt, Artificial Sequence
  Description of Artificial Sequence: Synthetic oligonucleotide
auuuauuauaucugccuac

SEQ ID NO: 2167969 - RNA, 19 nt, Artificial Sequence
  Description of Artificial Sequence: Synthetic oligonucleotide
ucugccuacaaaaugguca

SEQ ID NO: 2167970 - RNA, 19 nt, Artificial Sequence
  Description of Artificial Sequence: Synthetic oligonucleotide
uuauuuauuauaucugccu

SEQ ID NO: 2167971 - RNA, 19 nt, Artificial Sequence
  Description of Artificial Sequence: Synthetic oligonucleotide
uauaucugccuacaaaaug

SEQ ID NO: 2167972 - RNA, 19 nt, Artificial Sequence
  Description of Artificial Sequence: Synthetic oligonucleotide
cuacaaaauggucauagcc

SEQ ID NO: 2167973 - RNA, 19 nt, Artificial Sequence
  Description of Artificial Sequence: Synthetic oligonucleotide
acaaaauggucauagccuc

SEQ ID NO: 2167974 - RNA, 19 nt, Artificial Sequence
  Description of Artificial Sequence: Synthetic oligonucleotide
  modified_base (4)..(4): a, c, u, g, unknown or other
uuunuuuauuuauuuauuu

SEQ ID NO: 2167975 - RNA, 19 nt, Artificial Sequence
  Description of Artificial Sequence: Synthetic oligonucleotide
uugagguucgaucugaagu

SEQ ID NO: 2167976 - RNA, 19 nt, Artificial Sequence
  Description of Artificial Sequence: Synthetic oligonucleotide
uaaggagauguaaucgugg

SEQ ID NO: 2167977 - RNA, 19 nt, Artificial Sequence
  Description of Artificial Sequence: Synthetic oligonucleotide
ucauuugcgguccaggagc

SEQ ID NO: 2167978 - RNA, 19 nt, Artificial Sequence
  Description of Artificial Sequence: Synthetic oligonucleotide
auaucugccuacaaaaugg

SEQ ID NO: 2167979 - RNA, 19 nt, Artificial Sequence
  Description of Artificial Sequence: Synthetic oligonucleotide
uauuauaucugccuacaaa

SEQ ID NO: 2167980 - RNA, 19 nt, Artificial Sequence
  Description of Artificial Sequence: Synthetic oligonucleotide
  modified_base (3)..(3): a, c, u, g, unknown or other
uunuuuauuuauuuauuua

SEQ ID NO: 2167981 - RNA, 19 nt, Artificial Sequence
  Description of Artificial Sequence: Synthetic oligonucleotide
uuuaaggagauguaaucgu

SEQ ID NO: 2167982 - RNA, 19 nt, Artificial Sequence
  Description of Artificial Sequence: Synthetic oligonucleotide
guuuaaggagauguaaucg

SEQ ID NO: 2167983 - RNA, 19 nt, Artificial Sequence
  Description of Artificial Sequence: Synthetic oligonucleotide
  modified_base (5)..(5): a, c, u, g, unknown or other
uuuunuuuauuuauuuauu

SEQ ID NO: 2167984 - RNA, 19 nt, Artificial Sequence
  Description of Artificial Sequence: Synthetic oligonucleotide
uuaaggagauguaaucgug

SEQ ID NO: 2167985 - RNA, 19 nt, Artificial Sequence
  Description of Artificial Sequence: Synthetic oligonucleotide
uauuuauuauaucugccua

SEQ ID NO: 2167986 - RNA, 19 nt, Artificial Sequence
  Description of Artificial Sequence: Synthetic oligonucleotide
aaucguggccgucguaggc

SEQ ID NO: 2167987 - RNA, 19 nt, Artificial Sequence
  Description of Artificial Sequence: Synthetic oligonucleotide
cugcuuagagaucugagag

SEQ ID NO: 2167988 - RNA, 19 nt, Artificial Sequence
  Description of Artificial Sequence: Synthetic oligonucleotide
uuuauuauaucugccuaca

SEQ ID NO: 2167989 - RNA, 19 nt, Artificial Sequence
  Description of Artificial Sequence: Synthetic oligonucleotide
uuagagaucugagaggcca

SEQ ID NO: 2167990 - RNA, 19 nt, Artificial Sequence
  Description of Artificial Sequence: Synthetic oligonucleotide
uucgaucugaaguucuucc

SEQ ID NO: 2167991 - RNA, 19 nt, Artificial Sequence
  Description of Artificial Sequence: Synthetic oligonucleotide
ucugcuuagagaucugaga

SEQ ID NO: 2167992 - RNA, 19 nt, Artificial Sequence
  Description of Artificial Sequence: Synthetic oligonucleotide
cagcgugugagguucaucg

SEQ ID NO: 2167993 - RNA, 19 nt, Artificial Sequence
  Description of Artificial Sequence: Synthetic oligonucleotide
ugcuuagagaucugagagg

SEQ ID NO: 2167994 - RNA, 19 nt, Artificial Sequence
  Description of Artificial Sequence: Synthetic oligonucleotide
ggagauguaaucguggccg

SEQ ID NO: 2167995 - RNA, 19 nt, Artificial Sequence
  Description of Artificial Sequence: Synthetic oligonucleotide
ucugacuucugcuuagaga

SEQ ID NO: 2167996 - RNA, 19 nt, Artificial Sequence
  Description of Artificial Sequence: Synthetic oligonucleotide
aggagauguaaucguggcc

SEQ ID NO: 2167997 - RNA, 19 nt, Artificial Sequence
  Description of Artificial Sequence: Synthetic oligonucleotide
gaucugagaggccagguca

SEQ ID NO: 2167998 - RNA, 19 nt, Artificial Sequence
  Description of Artificial Sequence: Synthetic oligonucleotide
uccucguuuaaggagaugu

SEQ ID NO: 2167999 - RNA, 19 nt, Artificial Sequence
  Description of Artificial Sequence: Synthetic oligonucleotide
uucugcuuagagaucugag

SEQ ID NO: 2168000 - RNA, 19 nt, Artificial Sequence
  Description of Artificial Sequence: Synthetic oligonucleotide
guguccuuggcuuuccgcg

SEQ ID NO: 2168001 - RNA, 19 nt, Artificial Sequence
  Description of Artificial Sequence: Synthetic oligonucleotide
ucuacguucucugacuucu

SEQ ID NO: 2168002 - RNA, 19 nt, Artificial Sequence
  Description of Artificial Sequence: Synthetic oligonucleotide
uuauaucugccuacaaaau

SEQ ID NO: 2168003 - RNA, 19 nt, Artificial Sequence
  Description of Artificial Sequence: Synthetic oligonucleotide
agggucuugagguucgauc

SEQ ID NO: 2168004 - RNA, 19 nt, Artificial Sequence
  Description of Artificial Sequence: Synthetic oligonucleotide
ucccuuucccaauaccccg

SEQ ID NO: 2168005 - RNA, 19 nt, Artificial Sequence
  Description of Artificial Sequence: Synthetic oligonucleotide
aaaauggucauagccuccu

SEQ ID NO: 2168006 - RNA, 19 nt, Artificial Sequence
  Description of Artificial Sequence: Synthetic oligonucleotide
ucguuuaaggagauguaau

SEQ ID NO: 2168007 - RNA, 19 nt, Artificial Sequence
  Description of Artificial Sequence: Synthetic oligonucleotide
gaucugaaguucuucccug

SEQ ID NO: 2168008 - RNA, 19 nt, Artificial Sequence
  Description of Artificial Sequence: Synthetic oligonucleotide
gaggccaggucauuugcgg

SEQ ID NO: 2168009 - RNA, 19 nt, Artificial Sequence
  Description of Artificial Sequence: Synthetic oligonucleotide
ugagguucgaucugaaguu

SEQ ID NO: 2168010 - RNA, 19 nt, Artificial Sequence
  Description of Artificial Sequence: Synthetic oligonucleotide
acgucgcacccguacaucc

SEQ ID NO: 2168011 - RNA, 19 nt, Artificial Sequence
  Description of Artificial Sequence: Synthetic oligonucleotide
guaaucguggccgucguag

SEQ ID NO: 2168012 - RNA, 19 nt, Artificial Sequence
  Description of Artificial Sequence: Synthetic oligonucleotide
ugacaauacccgcggagca

SEQ ID NO: 2168013 - RNA, 19 nt, Artificial Sequence
  Description of Artificial Sequence: Synthetic oligonucleotide
ucgaucugaaguucuuccc

SEQ ID NO: 2168014 - RNA, 19 nt, Artificial Sequence
  Description of Artificial Sequence: Synthetic oligonucleotide
aauggucauagccuccuuu

SEQ ID NO: 2168015 - RNA, 19 nt, Artificial Sequence
  Description of Artificial Sequence: Synthetic oligonucleotide
acugcagcgugugagguuc

SEQ ID NO: 2168016 - RNA, 19 nt, Artificial Sequence
  Description of Artificial Sequence: Synthetic oligonucleotide
ucugaaguucuucccugug

SEQ ID NO: 2168017 - RNA, 19 nt, Artificial Sequence
  Description of Artificial Sequence: Synthetic oligonucleotide
uccacugcagcgugugagg

SEQ ID NO: 2168018 - RNA, 19 nt, Artificial Sequence
  Description of Artificial Sequence: Synthetic oligonucleotide
aaguucuucccuguguccu

SEQ ID NO: 2168019 - RNA, 19 nt, Artificial Sequence
  Description of Artificial Sequence: Synthetic oligonucleotide
caaaauggucauagccucc

SEQ ID NO: 2168020 - RNA, 19 nt, Artificial Sequence
  Description of Artificial Sequence: Synthetic oligonucleotide
uucucugacuucugcuuag

SEQ ID NO: 2168021 - RNA, 19 nt, Artificial Sequence
  Description of Artificial Sequence: Synthetic oligonucleotide
uaucugccuacaaaauggu

SEQ ID NO: 2168022 - RNA, 19 nt, Artificial Sequence
  Description of Artificial Sequence: Synthetic oligonucleotide
uaaucguggccgucguagg

SEQ ID NO: 2168023 - RNA, 19 nt, Artificial Sequence
  Description of Artificial Sequence: Synthetic oligonucleotide
uaggccuccugacaauacc

SEQ ID NO: 2168024 - RNA, 19 nt, Artificial Sequence
  Description of Artificial Sequence: Synthetic oligonucleotide
ucacucugguuguaguagc

SEQ ID NO: 2168025 - RNA, 19 nt, Artificial Sequence
  Description of Artificial Sequence: Synthetic oligonucleotide
cucccuuucccaauacccc

SEQ ID NO: 2168026 - RNA, 19 nt, Artificial Sequence
  Description of Artificial Sequence: Synthetic oligonucleotide
cagguaggcccucuggugg

SEQ ID NO: 2168027 - RNA, 19 nt, Artificial Sequence
  Description of Artificial Sequence: Synthetic oligonucleotide
cugacuucugcuuagagau

SEQ ID NO: 2168028 - RNA, 19 nt, Artificial Sequence
  Description of Artificial Sequence: Synthetic oligonucleotide
ugagaggccaggucauuug

SEQ ID NO: 2168029 - RNA, 19 nt, Artificial Sequence
  Description of Artificial Sequence: Synthetic oligonucleotide
gcuuagagaucugagaggc

SEQ ID NO: 2168030 - RNA, 19 nt, Artificial Sequence
  Description of Artificial Sequence: Synthetic oligonucleotide
gucauuugcgguccaggag

SEQ ID NO: 2168031 - RNA, 19 nt, Artificial Sequence
  Description of Artificial Sequence: Synthetic oligonucleotide
cugacaauacccgcggagc

SEQ ID NO: 2168032 - RNA, 19 nt, Artificial Sequence
  Description of Artificial Sequence: Synthetic oligonucleotide
cagguccucguuuaaggag

SEQ ID NO: 2168033 - RNA, 19 nt, Artificial Sequence
  Description of Artificial Sequence: Synthetic oligonucleotide
acaauacccgcggagcagg

SEQ ID NO: 2168034 - RNA, 19 nt, Artificial Sequence
  Description of Artificial Sequence: Synthetic oligonucleotide
cauuugcgguccaggagcg

SEQ ID NO: 2168035 - RNA, 19 nt, Artificial Sequence
  Description of Artificial Sequence: Synthetic oligonucleotide
uguguccuuggcuuuccgc

SEQ ID NO: 2168036 - RNA, 19 nt, Artificial Sequence
  Description of Artificial Sequence: Synthetic oligonucleotide
aucguggccgucguaggcc

SEQ ID NO: 2168037 - RNA, 19 nt, Artificial Sequence
  Description of Artificial Sequence: Synthetic oligonucleotide
gugagguucaucgucacuc

SEQ ID NO: 2168038 - RNA, 19 nt, Artificial Sequence
  Description of Artificial Sequence: Synthetic oligonucleotide
ucgucuacguucucugacu

SEQ ID NO: 2168039 - RNA, 19 nt, Artificial Sequence
  Description of Artificial Sequence: Synthetic oligonucleotide
gucacucugguuguaguag

SEQ ID NO: 2168040 - RNA, 19 nt, Artificial Sequence
  Description of Artificial Sequence: Synthetic oligonucleotide
gagaggccaggucauuugc

SEQ ID NO: 2168041 - RNA, 19 nt, Artificial Sequence
  Description of Artificial Sequence: Synthetic oligonucleotide
cuccugacaauacccgcgg

SEQ ID NO: 2168042 - RNA, 19 nt, Artificial Sequence
  Description of Artificial Sequence: Synthetic oligonucleotide
aggccuccugacaauaccc

SEQ ID NO: 2168043 - RNA, 19 nt, Artificial Sequence
  Description of Artificial Sequence: Synthetic oligonucleotide
ggucauagccuccuuuucc

SEQ ID NO: 2168044 - RNA, 19 nt, Artificial Sequence
  Description of Artificial Sequence: Synthetic oligonucleotide
ucaucgucacucugguugu

SEQ ID NO: 2168045 - RNA, 19 nt, Artificial Sequence
  Description of Artificial Sequence: Synthetic oligonucleotide
uuugcgguccaggagcgca

SEQ ID NO: 2168046 - RNA, 19 nt, Artificial Sequence
  Description of Artificial Sequence: Synthetic oligonucleotide
cuuagagaucugagaggcc

SEQ ID NO: 2168047 - RNA, 19 nt, Artificial Sequence
  Description of Artificial Sequence: Synthetic oligonucleotide
ugagguucaucgucacucu

SEQ ID NO: 2168048 - RNA, 19 nt, Artificial Sequence
  Description of Artificial Sequence: Synthetic oligonucleotide
uucccuguguccuuggcuu

SEQ ID NO: 2168049 - RNA, 19 nt, Artificial Sequence
  Description of Artificial Sequence: Synthetic oligonucleotide
cucgucuacguucucugac

SEQ ID NO: 2168050 - RNA, 19 nt, Artificial Sequence
  Description of Artificial Sequence: Synthetic oligonucleotide
uuggcuuuccgcgucuccc

SEQ ID NO: 2168051 - RNA, 19 nt, Artificial Sequence
  Description of Artificial Sequence: Synthetic oligonucleotide
gccuacaaaauggucauag

SEQ ID NO: 2168052 - RNA, 19 nt, Artificial Sequence
  Description of Artificial Sequence: Synthetic oligonucleotide
gacaauacccgcggagcag

SEQ ID NO: 2168053 - RNA, 19 nt, Artificial Sequence
  Description of Artificial Sequence: Synthetic oligonucleotide
auggucauagccuccuuuu

SEQ ID NO: 2168054 - RNA, 19 nt, Artificial Sequence
  Description of Artificial Sequence: Synthetic oligonucleotide
cacucugguuguaguagcc

SEQ ID NO: 2168055 - RNA, 19 nt, Artificial Sequence
  Description of Artificial Sequence: Synthetic oligonucleotide
ugugagguucaucgucacu

SEQ ID NO: 2168056 - RNA, 19 nt, Artificial Sequence
  Description of Artificial Sequence: Synthetic oligonucleotide
cuaugcacgggcccugcag

SEQ ID NO: 2168057 - RNA, 19 nt, Artificial Sequence
  Description of Artificial Sequence: Synthetic oligonucleotide
auccacugcagcgugugag

SEQ ID NO: 2168058 - RNA, 19 nt, Artificial Sequence
  Description of Artificial Sequence: Synthetic oligonucleotide
aucugaaguucuucccugu

SEQ ID NO: 2168059 - RNA, 19 nt, Artificial Sequence
  Description of Artificial Sequence: Synthetic oligonucleotide
ugggccucgucuacguucu

SEQ ID NO: 2168060 - RNA, 19 nt, Artificial Sequence
  Description of Artificial Sequence: Synthetic oligonucleotide
aggucauuugcgguccagg

SEQ ID NO: 2168061 - RNA, 19 nt, Artificial Sequence
  Description of Artificial Sequence: Synthetic oligonucleotide
gguccaggagcgcaggucc

SEQ ID NO: 2168062 - RNA, 19 nt, Artificial Sequence
  Description of Artificial Sequence: Synthetic oligonucleotide
uggucauagccuccuuuuc

SEQ ID NO: 2168063 - RNA, 19 nt, Artificial Sequence
  Description of Artificial Sequence: Synthetic oligonucleotide
uguccuuggcuuuccgcgu

SEQ ID NO: 2168064 - RNA, 19 nt, Artificial Sequence
  Description of Artificial Sequence: Synthetic oligonucleotide
gacuucugcuuagagaucu

SEQ ID NO: 2168065 - RNA, 19 nt, Artificial Sequence
  Description of Artificial Sequence: Synthetic oligonucleotide
ucuugagguucgaucugaa

SEQ ID NO: 2168066 - RNA, 19 nt, Artificial Sequence
  Description of Artificial Sequence: Synthetic oligonucleotide
gagguucaucgucacucug

SEQ ID NO: 2168067 - RNA, 19 nt, Artificial Sequence
  Description of Artificial Sequence: Synthetic oligonucleotide
cucugacuucugcuuagag

SEQ ID NO: 2168068 - RNA, 19 nt, Artificial Sequence
  Description of Artificial Sequence: Synthetic oligonucleotide
guacauccacugcagcgug

SEQ ID NO: 2168069 - RNA, 19 nt, Artificial Sequence
  Description of Artificial Sequence: Synthetic oligonucleotide
ccguacauccacugcagcg

SEQ ID NO: 2168070 - RNA, 19 nt, Artificial Sequence
  Description of Artificial Sequence: Synthetic oligonucleotide
uucuucccuguguccuugg

SEQ ID NO: 2168071 - RNA, 19 nt, Artificial Sequence
  Description of Artificial Sequence: Synthetic oligonucleotide
ccuccugacaauacccgcg

SEQ ID NO: 2168072 - RNA, 19 nt, Artificial Sequence
  Description of Artificial Sequence: Synthetic oligonucleotide
agguccucguuuaaggaga

SEQ ID NO: 2168073 - RNA, 19 nt, Artificial Sequence
  Description of Artificial Sequence: Synthetic oligonucleotide
ucgucacucugguuguagu

SEQ ID NO: 2168074 - RNA, 19 nt, Artificial Sequence
  Description of Artificial Sequence: Synthetic oligonucleotide
aucugccuacaaaaugguc

SEQ ID NO: 2168075 - RNA, 19 nt, Artificial Sequence
  Description of Artificial Sequence: Synthetic oligonucleotide
agaggccaggucauuugcg

SEQ ID NO: 2168076 - RNA, 19 nt, Artificial Sequence
  Description of Artificial Sequence: Synthetic oligonucleotide
gucguaggccuccugacaa

SEQ ID NO: 2168077 - RNA, 19 nt, Artificial Sequence
  Description of Artificial Sequence: Synthetic oligonucleotide
gcagccacucuaugcacgg

SEQ ID NO: 2168078 - RNA, 19 nt, Artificial Sequence
  Description of Artificial Sequence: Synthetic oligonucleotide
gucucccuuucccaauacc

SEQ ID NO: 2168079 - RNA, 19 nt, Artificial Sequence
  Description of Artificial Sequence: Synthetic oligonucleotide
aucgucacucugguuguag

SEQ ID NO: 2168080 - RNA, 19 nt, Artificial Sequence
  Description of Artificial Sequence: Synthetic oligonucleotide
ugacuucugcuuagagauc

SEQ ID NO: 2168081 - RNA, 19 nt, Artificial Sequence
  Description of Artificial Sequence: Synthetic oligonucleotide
acauccacugcagcgugug

SEQ ID NO: 2168082 - RNA, 19 nt, Artificial Sequence
  Description of Artificial Sequence: Synthetic oligonucleotide
uugcgguccaggagcgcag

SEQ ID NO: 2168083 - RNA, 19 nt, Artificial Sequence
  Description of Artificial Sequence: Synthetic oligonucleotide
ucuaugcacgggcccugca

SEQ ID NO: 2168084 - RNA, 19 nt, Artificial Sequence
  Description of Artificial Sequence: Synthetic oligonucleotide
cucguuuaaggagauguaa

SEQ ID NO: 2168085 - RNA, 19 nt, Artificial Sequence
  Description of Artificial Sequence: Synthetic oligonucleotide
cguuuaaggagauguaauc

SEQ ID NO: 2168086 - RNA, 19 nt, Artificial Sequence
  Description of Artificial Sequence: Synthetic oligonucleotide
aaauggucauagccuccuu

SEQ ID NO: 2168087 - RNA, 19 nt, Artificial Sequence
  Description of Artificial Sequence: Synthetic oligonucleotide
agcagggucuugagguucg

SEQ ID NO: 2168088 - RNA, 19 nt, Artificial Sequence
  Description of Artificial Sequence: Synthetic oligonucleotide
gugggccucgucuacguuc

SEQ ID NO: 2168089 - RNA, 19 nt, Artificial Sequence
  Description of Artificial Sequence: Synthetic oligonucleotide
cacccguacauccacugca

SEQ ID NO: 2168090 - RNA, 19 nt, Artificial Sequence
  Description of Artificial Sequence: Synthetic oligonucleotide
uacauccacugcagcgugu

SEQ ID NO: 2168091 - RNA, 19 nt, Artificial Sequence
  Description of Artificial Sequence: Synthetic oligonucleotide
ccugacaauacccgcggag

SEQ ID NO: 2168092 - RNA, 19 nt, Artificial Sequence
  Description of Artificial Sequence: Synthetic oligonucleotide
uccugacaauacccgcgga

SEQ ID NO: 2168093 - RNA, 19 nt, Artificial Sequence
  Description of Artificial Sequence: Synthetic oligonucleotide
cuuuccgcgucucccuuuc

SEQ ID NO: 2168094 - RNA, 19 nt, Artificial Sequence
  Description of Artificial Sequence: Synthetic oligonucleotide
gagguucgaucugaaguuc

SEQ ID NO: 2168095 - RNA, 19 nt, Artificial Sequence
  Description of Artificial Sequence: Synthetic oligonucleotide
auuugcgguccaggagcgc

SEQ ID NO: 2168096 - RNA, 19 nt, Artificial Sequence
  Description of Artificial Sequence: Synthetic oligonucleotide
ggucauuugcgguccagga

SEQ ID NO: 2168097 - RNA, 19 nt, Artificial Sequence
  Description of Artificial Sequence: Synthetic oligonucleotide
aggccaggucauuugcggu

SEQ ID NO: 2168098 - RNA, 19 nt, Artificial Sequence
  Description of Artificial Sequence: Synthetic oligonucleotide
uggcuuuccgcgucucccu

SEQ ID NO: 2168099 - RNA, 19 nt, Artificial Sequence
  Description of Artificial Sequence: Synthetic oligonucleotide
ucucugacuucugcuuaga

SEQ ID NO: 2168100 - RNA, 19 nt, Artificial Sequence
  Description of Artificial Sequence: Synthetic oligonucleotide
guucgaucugaaguucuuc

SEQ ID NO: 2168101 - RNA, 19 nt, Artificial Sequence
  Description of Artificial Sequence: Synthetic oligonucleotide
gucgcacccguacauccac

SEQ ID NO: 2168102 - RNA, 19 nt, Artificial Sequence
  Description of Artificial Sequence: Synthetic oligonucleotide
caauacccgcggagcaggc

SEQ ID NO: 2168103 - RNA, 19 nt, Artificial Sequence
  Description of Artificial Sequence: Synthetic oligonucleotide
gggucuugagguucgaucu

SEQ ID NO: 2168104 - RNA, 19 nt, Artificial Sequence
  Description of Artificial Sequence: Synthetic oligonucleotide
ucguggccgucguaggccu

SEQ ID NO: 2168105 - RNA, 19 nt, Artificial Sequence
  Description of Artificial Sequence: Synthetic oligonucleotide
agguaggcccucugguggu

SEQ ID NO: 2168106 - RNA, 19 nt, Artificial Sequence
  Description of Artificial Sequence: Synthetic oligonucleotide
uggugggccucgucuacgu

SEQ ID NO: 2168107 - RNA, 19 nt, Artificial Sequence
  Description of Artificial Sequence: Synthetic oligonucleotide
gucuugagguucgaucuga

SEQ ID NO: 2168108 - RNA, 19 nt, Artificial Sequence
  Description of Artificial Sequence: Synthetic oligonucleotide
cuacguucucugacuucug

SEQ ID NO: 2168109 - RNA, 19 nt, Artificial Sequence
  Description of Artificial Sequence: Synthetic oligonucleotide
aguucuucccuguguccuu

SEQ ID NO: 2168110 - RNA, 19 nt, Artificial Sequence
  Description of Artificial Sequence: Synthetic oligonucleotide
uccggcccgacgucgcacc

SEQ ID NO: 2168111 - RNA, 19 nt, Artificial Sequence
  Description of Artificial Sequence: Synthetic oligonucleotide
agguucgaucugaaguucu

SEQ ID NO: 2168112 - RNA, 19 nt, Artificial Sequence
  Description of Artificial Sequence: Synthetic oligonucleotide
gcagguaggcccucuggug

SEQ ID NO: 2168113 - RNA, 19 nt, Artificial Sequence
  Description of Artificial Sequence: Synthetic oligonucleotide
cgcagguccucguuuaagg

SEQ ID NO: 2168114 - RNA, 19 nt, Artificial Sequence
  Description of Artificial Sequence: Synthetic oligonucleotide
ggucuugagguucgaucug

SEQ ID NO: 2168115 - RNA, 19 nt, Artificial Sequence
  Description of Artificial Sequence: Synthetic oligonucleotide
acccguacauccacugcag

SEQ ID NO: 2168116 - RNA, 19 nt, Artificial Sequence
  Description of Artificial Sequence: Synthetic oligonucleotide
agcaggcgcccguccggcc

SEQ ID NO: 2168117 - RNA, 19 nt, Artificial Sequence
  Description of Artificial Sequence: Synthetic oligonucleotide
ugcgguccaggagcgcagg

SEQ ID NO: 2168118 - RNA, 19 nt, Artificial Sequence
  Description of Artificial Sequence: Synthetic oligonucleotide
gugugagguucaucgucac

SEQ ID NO: 2168119 - RNA, 19 nt, Artificial Sequence
  Description of Artificial Sequence: Synthetic oligonucleotide
gucuacguucucugacuuc

SEQ ID NO: 2168120 - RNA, 19 nt, Artificial Sequence
  Description of Artificial Sequence: Synthetic oligonucleotide
guucuucccuguguccuug

SEQ ID NO: 2168121 - RNA, 19 nt, Artificial Sequence
  Description of Artificial Sequence: Synthetic oligonucleotide
ugguggugggccucgucua

SEQ ID NO: 2168122 - RNA, 19 nt, Artificial Sequence
  Description of Artificial Sequence: Synthetic oligonucleotide
guaggcccucugguggugg

SEQ ID NO: 2168123 - RNA, 19 nt, Artificial Sequence
  Description of Artificial Sequence: Synthetic oligonucleotide
gagauguaaucguggccgu

SEQ ID NO: 2168124 - RNA, 19 nt, Artificial Sequence
  Description of Artificial Sequence: Synthetic oligonucleotide
ggagcaggcgcccguccgg

SEQ ID NO: 2168125 - RNA, 19 nt, Artificial Sequence
  Description of Artificial Sequence: Synthetic oligonucleotide
ggccuccugacaauacccg

SEQ ID NO: 2168126 - RNA, 19 nt, Artificial Sequence
  Description of Artificial Sequence: Synthetic oligonucleotide
gccucgucuacguucucug

SEQ ID NO: 2168127 - RNA, 19 nt, Artificial Sequence
  Description of Artificial Sequence: Synthetic oligonucleotide
guggugggccucgucuacg

SEQ ID NO: 2168128 - RNA, 19 nt, Artificial Sequence
  Description of Artificial Sequence: Synthetic oligonucleotide
ucgcacccguacauccacu

SEQ ID NO: 2168129 - RNA, 19 nt, Artificial Sequence
  Description of Artificial Sequence: Synthetic oligonucleotide
cugccuacaaaauggucau

SEQ ID NO: 2168130 - RNA, 19 nt, Artificial Sequence
  Description of Artificial Sequence: Synthetic oligonucleotide
guaggccuccugacaauac

SEQ ID NO: 2168131 - RNA, 19 nt, Artificial Sequence
  Description of Artificial Sequence: Synthetic oligonucleotide
uagccuccuuuuccaccug

SEQ ID NO: 2168132 - RNA, 19 nt, Artificial Sequence
  Description of Artificial Sequence: Synthetic oligonucleotide
acucuaugcacgggcccug

SEQ ID NO: 2168133 - RNA, 19 nt, Artificial Sequence
  Description of Artificial Sequence: Synthetic oligonucleotide
ucguaggccuccugacaau

SEQ ID NO: 2168134 - RNA, 19 nt, Artificial Sequence
  Description of Artificial Sequence: Synthetic oligonucleotide
gcgugugagguucaucguc

SEQ ID NO: 2168135 - RNA, 19 nt, Artificial Sequence
  Description of Artificial Sequence: Synthetic oligonucleotide
gccuccugacaauacccgc

SEQ ID NO: 2168136 - RNA, 19 nt, Artificial Sequence
  Description of Artificial Sequence: Synthetic oligonucleotide
gcagguccucguuuaagga

SEQ ID NO: 2168137 - RNA, 19 nt, Artificial Sequence
  Description of Artificial Sequence: Synthetic oligonucleotide
ggccaggucauuugcgguc

SEQ ID NO: 2168138 - RNA, 19 nt, Artificial Sequence
  Description of Artificial Sequence: Synthetic oligonucleotide
gacgucgcacccguacauc

SEQ ID NO: 2168139 - RNA, 19 nt, Artificial Sequence
  Description of Artificial Sequence: Synthetic oligonucleotide
cucuaugcacgggcccugc

SEQ ID NO: 2168140 - RNA, 19 nt, Artificial Sequence
  Description of Artificial Sequence: Synthetic oligonucleotide
aucugagaggccaggucau

SEQ ID NO: 2168141 - RNA, 19 nt, Artificial Sequence
  Description of Artificial Sequence: Synthetic oligonucleotide
gagcgcagguccucguuua

SEQ ID NO: 2168142 - RNA, 19 nt, Artificial Sequence
  Description of Artificial Sequence: Synthetic oligonucleotide
caggucauuugcgguccag

SEQ ID NO: 2168143 - RNA, 19 nt, Artificial Sequence
  Description of Artificial Sequence: Synthetic oligonucleotide
guggccgucguaggccucc

SEQ ID NO: 2168144 - RNA, 19 nt, Artificial Sequence
  Description of Artificial Sequence: Synthetic oligonucleotide
gagcaggcgcccguccggc

SEQ ID NO: 2168145 - RNA, 19 nt, Artificial Sequence
  Description of Artificial Sequence: Synthetic oligonucleotide
ccacucuaugcacgggccc

SEQ ID NO: 2168146 - RNA, 19 nt, Artificial Sequence
  Description of Artificial Sequence: Synthetic oligonucleotide
ucugagaggccaggucauu

SEQ ID NO: 2168147 - RNA, 19 nt, Artificial Sequence
  Description of Artificial Sequence: Synthetic oligonucleotide
gccaggucauuugcggucc

SEQ ID NO: 2168148 - RNA, 19 nt, Artificial Sequence
  Description of Artificial Sequence: Synthetic oligonucleotide
gccacucuaugcacgggcc

SEQ ID NO: 2168149 - RNA, 19 nt, Artificial Sequence
  Description of Artificial Sequence: Synthetic oligonucleotide
gcacccguacauccacugc

SEQ ID NO: 2168150 - RNA, 19 nt, Artificial Sequence
  Description of Artificial Sequence: Synthetic oligonucleotide
aggagcgcagguccucguu

SEQ ID NO: 2168151 - RNA, 19 nt, Artificial Sequence
  Description of Artificial Sequence: Synthetic oligonucleotide
gguggugggccucgucuac

SEQ ID NO: 2168152 - RNA, 19 nt, Artificial Sequence
  Description of Artificial Sequence: Synthetic oligonucleotide
agcgcagguccucguuuaa

SEQ ID NO: 2168153 - RNA, 19 nt, Artificial Sequence
  Description of Artificial Sequence: Synthetic oligonucleotide
ucccuguguccuuggcuuu

SEQ ID NO: 2168154 - RNA, 19 nt, Artificial Sequence
  Description of Artificial Sequence: Synthetic oligonucleotide
cgugugagguucaucguca

SEQ ID NO: 2168155 - RNA, 19 nt, Artificial Sequence
  Description of Artificial Sequence: Synthetic oligonucleotide
cagccacucuaugcacggg

SEQ ID NO: 2168156 - RNA, 19 nt, Artificial Sequence
  Description of Artificial Sequence: Synthetic oligonucleotide
ugccuacaaaauggucaua

SEQ ID NO: 2168157 - RNA, 19 nt, Artificial Sequence
  Description of Artificial Sequence: Synthetic oligonucleotide
cccgacgucgcacccguac

SEQ ID NO: 2168158 - RNA, 19 nt, Artificial Sequence
  Description of Artificial Sequence: Synthetic oligonucleotide
ugcagcgugugagguucau

SEQ ID NO: 2168159 - RNA, 19 nt, Artificial Sequence
  Description of Artificial Sequence: Synthetic oligonucleotide
gcaggcgcccguccggccc

SEQ ID NO: 2168160 - RNA, 19 nt, Artificial Sequence
  Description of Artificial Sequence: Synthetic oligonucleotide
guccucguuuaaggagaug

SEQ ID NO: 2168161 - RNA, 19 nt, Artificial Sequence
  Description of Artificial Sequence: Synthetic oligonucleotide
ggcccucugguggugggcc

SEQ ID NO: 2168162 - RNA, 19 nt, Artificial Sequence
  Description of Artificial Sequence: Synthetic oligonucleotide
ccaggagcgcagguccucg

SEQ ID NO: 2168163 - RNA, 19 nt, Artificial Sequence
  Description of Artificial Sequence: Synthetic oligonucleotide
cauccacugcagcguguga

SEQ ID NO: 2168164 - RNA, 19 nt, Artificial Sequence
  Description of Artificial Sequence: Synthetic oligonucleotide
cacucuaugcacgggcccu

SEQ ID NO: 2168165 - RNA, 19 nt, Artificial Sequence
  Description of Artificial Sequence: Synthetic oligonucleotide
gcgcagguccucguuuaag

SEQ ID NO: 2168166 - RNA, 19 nt, Artificial Sequence
  Description of Artificial Sequence: Synthetic oligonucleotide
ccuguguccuuggcuuucc

SEQ ID NO: 2168167 - RNA, 19 nt, Artificial Sequence
  Description of Artificial Sequence: Synthetic oligonucleotide
cgcacccguacauccacug

SEQ ID NO: 2168168 - RNA, 19 nt, Artificial Sequence
  Description of Artificial Sequence: Synthetic oligonucleotide
ccucguuuaaggagaugua

SEQ ID NO: 2168169 - RNA, 19 nt, Artificial Sequence
  Description of Artificial Sequence: Synthetic oligonucleotide
gguaggcccucugguggug

SEQ ID NO: 2168170 - RNA, 19 nt, Artificial Sequence
  Description of Artificial Sequence: Synthetic oligonucleotide
cgaucugaaguucuucccu

SEQ ID NO: 2168171 - RNA, 19 nt, Artificial Sequence
  Description of Artificial Sequence: Synthetic oligonucleotide
ccucugguggugggccucg

SEQ ID NO: 2168172 - RNA, 19 nt, Artificial Sequence
  Description of Artificial Sequence: Synthetic oligonucleotide
cugcagcgugugagguuca

SEQ ID NO: 2168173 - RNA, 19 nt, Artificial Sequence
  Description of Artificial Sequence: Synthetic oligonucleotide
guucaucgucacucugguu

SEQ ID NO: 2168174 - RNA, 19 nt, Artificial Sequence
  Description of Artificial Sequence: Synthetic oligonucleotide
uggccgucguaggccuccu

SEQ ID NO: 2168175 - RNA, 19 nt, Artificial Sequence
  Description of Artificial Sequence: Synthetic oligonucleotide
cugagaggccaggucauuu

SEQ ID NO: 2168176 - RNA, 19 nt, Artificial Sequence
  Description of Artificial Sequence: Synthetic oligonucleotide
guccggcccgacgucgcac

SEQ ID NO: 2168177 - RNA, 19 nt, Artificial Sequence
  Description of Artificial Sequence: Synthetic oligonucleotide
gcggagcaggcgcccgucc

SEQ ID NO: 2168178 - RNA, 19 nt, Artificial Sequence
  Description of Artificial Sequence: Synthetic oligonucleotide
ccucgucuacguucucuga

SEQ ID NO: 2168179 - RNA, 19 nt, Artificial Sequence
  Description of Artificial Sequence: Synthetic oligonucleotide
gcagcgugugagguucauc

SEQ ID NO: 2168180 - RNA, 19 nt, Artificial Sequence
  Description of Artificial Sequence: Synthetic oligonucleotide
ggagcgcagguccucguuu

SEQ ID NO: 2168181 - RNA, 19 nt, Artificial Sequence
  Description of Artificial Sequence: Synthetic oligonucleotide
cccguccggcccgacgucg

SEQ ID NO: 2168182 - RNA, 19 nt, Artificial Sequence
  Description of Artificial Sequence: Synthetic oligonucleotide
cguacauccacugcagcgu

SEQ ID NO: 2168183 - RNA, 19 nt, Artificial Sequence
  Description of Artificial Sequence: Synthetic oligonucleotide
ccgacgucgcacccguaca

SEQ ID NO: 2168184 - RNA, 19 nt, Artificial Sequence
  Description of Artificial Sequence: Synthetic oligonucleotide
cgucacucugguuguagua

SEQ ID NO: 2168185 - RNA, 19 nt, Artificial Sequence
  Description of Artificial Sequence: Synthetic oligonucleotide
gguucgaucugaaguucuu

SEQ ID NO: 2168186 - RNA, 19 nt, Artificial Sequence
  Description of Artificial Sequence: Synthetic oligonucleotide
ccguccggcccgacgucgc

SEQ ID NO: 2168187 - RNA, 19 nt, Artificial Sequence
  Description of Artificial Sequence: Synthetic oligonucleotide
cccuguguccuuggcuuuc

SEQ ID NO: 2168188 - RNA, 19 nt, Artificial Sequence
  Description of Artificial Sequence: Synthetic oligonucleotide
cacugcagcgugugagguu

SEQ ID NO: 2168189 - RNA, 19 nt, Artificial Sequence
  Description of Artificial Sequence: Synthetic oligonucleotide
ggccucgucuacguucucu

SEQ ID NO: 2168190 - RNA, 19 nt, Artificial Sequence
  Description of Artificial Sequence: Synthetic oligonucleotide
caucgucacucugguugua

SEQ ID NO: 2168191 - RNA, 19 nt, Artificial Sequence
  Description of Artificial Sequence: Synthetic oligonucleotide
ggcccgacgucgcacccgu

SEQ ID NO: 2168192 - RNA, 19 nt, Artificial Sequence
  Description of Artificial Sequence: Synthetic oligonucleotide
guccaggagcgcagguccu

SEQ ID NO: 2168193 - RNA, 19 nt, Artificial Sequence
  Description of Artificial Sequence: Synthetic oligonucleotide
cgucgcacccguacaucca

SEQ ID NO: 2168194 - RNA, 19 nt, Artificial Sequence
  Description of Artificial Sequence: Synthetic oligonucleotide
gguccucguuuaaggagau

SEQ ID NO: 2168195 - RNA, 19 nt, Artificial Sequence
  Description of Artificial Sequence: Synthetic oligonucleotide
ccggcccgacgucgcaccc

SEQ ID NO: 2168196 - RNA, 19 nt, Artificial Sequence
  Description of Artificial Sequence: Synthetic oligonucleotide
cgguccaggagcgcagguc

SEQ ID NO: 2168197 - RNA, 19 nt, Artificial Sequence
  Description of Artificial Sequence: Synthetic oligonucleotide
ccaggucauuugcggucca

SEQ ID NO: 2168198 - RNA, 19 nt, Artificial Sequence
  Description of Artificial Sequence: Synthetic oligonucleotide
cccucugguggugggccuc

SEQ ID NO: 2168199 - RNA, 19 nt, Artificial Sequence
  Description of Artificial Sequence: Synthetic oligonucleotide
cagggucuugagguucgau

SEQ ID NO: 2168200 - RNA, 19 nt, Artificial Sequence
  Description of Artificial Sequence: Synthetic oligonucleotide
gcagggucuugagguucga

SEQ ID NO: 2168201 - RNA, 19 nt, Artificial Sequence
  Description of Artificial Sequence: Synthetic oligonucleotide
gcuuuccgcgucucccuuu

SEQ ID NO: 2168202 - RNA, 19 nt, Artificial Sequence
  Description of Artificial Sequence: Synthetic oligonucleotide
ggcuuuccgcgucucccuu

SEQ ID NO: 2168203 - RNA, 19 nt, Artificial Sequence
  Description of Artificial Sequence: Synthetic oligonucleotide
cguaggccuccugacaaua

SEQ ID NO: 2168204 - RNA, 19 nt, Artificial Sequence
  Description of Artificial Sequence: Synthetic oligonucleotide
ccacugcagcgugugaggu

SEQ ID NO: 2168205 - RNA, 19 nt, Artificial Sequence
  Description of Artificial Sequence: Synthetic oligonucleotide
gcccguccggcccgacguc

SEQ ID NO: 2168206 - RNA, 19 nt, Artificial Sequence
  Description of Artificial Sequence: Synthetic oligonucleotide
ggugggccucgucuacguu

SEQ ID NO: 2168207 - RNA, 19 nt, Artificial Sequence
  Description of Artificial Sequence: Synthetic oligonucleotide
cgucuacguucucugacuu

SEQ ID NO: 2168208 - RNA, 19 nt, Artificial Sequence
  Description of Artificial Sequence: Synthetic oligonucleotide
cggcccgacgucgcacccg

SEQ ID NO: 2168209 - RNA, 19 nt, Artificial Sequence
  Description of Artificial Sequence: Synthetic oligonucleotide
gcgguccaggagcgcaggu

SEQ ID NO: 2168210 - RNA, 19 nt, Artificial Sequence
  Description of Artificial Sequence: Synthetic oligonucleotide
cguggccgucguaggccuc

SEQ ID NO: 2168211 - RNA, 19 nt, Artificial Sequence
  Description of Artificial Sequence: Synthetic oligonucleotide
aggcgcccguccggcccga

SEQ ID NO: 2168212 - RNA, 19 nt, Artificial Sequence
  Description of Artificial Sequence: Synthetic oligonucleotide
cucugguggugggccucgu

SEQ ID NO: 2168213 - RNA, 19 nt, Artificial Sequence
  Description of Artificial Sequence: Synthetic oligonucleotide
cgacgucgcacccguacau

SEQ ID NO: 2168214 - RNA, 19 nt, Artificial Sequence
  Description of Artificial Sequence: Synthetic oligonucleotide
cgcggagcaggcgcccguc

SEQ ID NO: 2168215 - RNA, 19 nt, Artificial Sequence
  Description of Artificial Sequence: Synthetic oligonucleotide
cguccggcccgacgucgca

SEQ ID NO: 2168216 - RNA, 19 nt, Artificial Sequence
  Description of Artificial Sequence: Synthetic oligonucleotide
gcccgacgucgcacccgua

SEQ ID NO: 2168217 - RNA, 19 nt, Artificial Sequence
  Description of Artificial Sequence: Synthetic oligonucleotide
aaucauaucacauucaaac

SEQ ID NO: 2168218 - RNA, 19 nt, Artificial Sequence
  Description of Artificial Sequence: Synthetic oligonucleotide
aaucagagguuucagaggc

SEQ ID NO: 2168219 - RNA, 19 nt, Artificial Sequence
  Description of Artificial Sequence: Synthetic oligonucleotide
auugacauaaucaaggaac

SEQ ID NO: 2168220 - RNA, 19 nt, Artificial Sequence
  Description of Artificial Sequence: Synthetic oligonucleotide
uguguaugacuccagagcg

SEQ ID NO: 2168221 - RNA, 19 nt, Artificial Sequence
  Description of Artificial Sequence: Synthetic oligonucleotide
aucaucaggauuuugacag

SEQ ID NO: 2168222 - RNA, 19 nt, Artificial Sequence
  Description of Artificial Sequence: Synthetic oligonucleotide
ucugcugucaguuaguaca

SEQ ID NO: 2168223 - RNA, 19 nt, Artificial Sequence
  Description of Artificial Sequence: Synthetic oligonucleotide
aaggauacaaucauaucac

SEQ ID NO: 2168224 - RNA, 19 nt, Artificial Sequence
  Description of Artificial Sequence: Synthetic oligonucleotide
gaugcuucgaacaaggcag

SEQ ID NO: 2168225 - RNA, 19 nt, Artificial Sequence
  Description of Artificial Sequence: Synthetic oligonucleotide
uggaacugcaaucagaggu

SEQ ID NO: 2168226 - RNA, 19 nt, Artificial Sequence
  Description of Artificial Sequence: Synthetic oligonucleotide
uauaugucuucacuaaacc

SEQ ID NO: 2168227 - RNA, 19 nt, Artificial Sequence
  Description of Artificial Sequence: Synthetic oligonucleotide
cagaggaucaacuaguccc

SEQ ID NO: 2168228 - RNA, 19 nt, Artificial Sequence
  Description of Artificial Sequence: Synthetic oligonucleotide
aauuggguaagacaugcca

SEQ ID NO: 2168229 - RNA, 19 nt, Artificial Sequence
  Description of Artificial Sequence: Synthetic oligonucleotide
gagacaaaagacaaaggcg

SEQ ID NO: 2168230 - RNA, 19 nt, Artificial Sequence
  Description of Artificial Sequence: Synthetic oligonucleotide
uuaaguguggagacaaaag

SEQ ID NO: 2168231 - RNA, 19 nt, Artificial Sequence
  Description of Artificial Sequence: Synthetic oligonucleotide
uucacuaaaccugaaauug

SEQ ID NO: 2168232 - RNA, 19 nt, Artificial Sequence
  Description of Artificial Sequence: Synthetic oligonucleotide
uuauaugucuucacuaaac

SEQ ID NO: 2168233 - RNA, 19 nt, Artificial Sequence
  Description of Artificial Sequence: Synthetic oligonucleotide
ucuucacuaaaccugaaau

SEQ ID NO: 2168234 - RNA, 19 nt, Artificial Sequence
  Description of Artificial Sequence: Synthetic oligonucleotide
aacuuuuaggucaaacagg

SEQ ID NO: 2168235 - RNA, 19 nt, Artificial Sequence
  Description of Artificial Sequence: Synthetic oligonucleotide
uauuccuuggcuuuauaug

SEQ ID NO: 2168236 - RNA, 19 nt, Artificial Sequence
  Description of Artificial Sequence: Synthetic oligonucleotide
auugucggagaguaucugc

SEQ ID NO: 2168237 - RNA, 19 nt, Artificial Sequence
  Description of Artificial Sequence: Synthetic oligonucleotide
aauggcuguguaugacucc

SEQ ID NO: 2168238 - RNA, 19 nt, Artificial Sequence
  Description of Artificial Sequence: Synthetic oligonucleotide
caaggauacaaucauauca

SEQ ID NO: 2168239 - RNA, 19 nt, Artificial Sequence
  Description of Artificial Sequence: Synthetic oligonucleotide
aacaggaauugucggagag

SEQ ID NO: 2168240 - RNA, 19 nt, Artificial Sequence
  Description of Artificial Sequence: Synthetic oligonucleotide
aaagacaaaggcgagccug

SEQ ID NO: 2168241 - RNA, 19 nt, Artificial Sequence
  Description of Artificial Sequence: Synthetic oligonucleotide
gaaauuggguaagacaugc

SEQ ID NO: 2168242 - RNA, 19 nt, Artificial Sequence
  Description of Artificial Sequence: Synthetic oligonucleotide
cuuucauauguucauaguc

SEQ ID NO: 2168243 - RNA, 19 nt, Artificial Sequence
  Description of Artificial Sequence: Synthetic oligonucleotide
gacuccgcauguuauaggg

SEQ ID NO: 2168244 - RNA, 19 nt, Artificial Sequence
  Description of Artificial Sequence: Synthetic oligonucleotide
uugaauuaaguguggagac

SEQ ID NO: 2168245 - RNA, 19 nt, Artificial Sequence
  Description of Artificial Sequence: Synthetic oligonucleotide
cauaucacauucaaaccag

SEQ ID NO: 2168246 - RNA, 19 nt, Artificial Sequence
  Description of Artificial Sequence: Synthetic oligonucleotide
ucaacuagucccagugugg

SEQ ID NO: 2168247 - RNA, 19 nt, Artificial Sequence
  Description of Artificial Sequence: Synthetic oligonucleotide
auuccuuggcuuuauaugu

SEQ ID NO: 2168248 - RNA, 19 nt, Artificial Sequence
  Description of Artificial Sequence: Synthetic oligonucleotide
uuuaggucaaacaggaauu

SEQ ID NO: 2168249 - RNA, 19 nt, Artificial Sequence
  Description of Artificial Sequence: Synthetic oligonucleotide
ugaugcuucgaacaaggca

SEQ ID NO: 2168250 - RNA, 19 nt, Artificial Sequence
  Description of Artificial Sequence: Synthetic oligonucleotide
aauauuucugcugucucca

SEQ ID NO: 2168251 - RNA, 19 nt, Artificial Sequence
  Description of Artificial Sequence: Synthetic oligonucleotide
ugugaaagugaacacugcu

SEQ ID NO: 2168252 - RNA, 19 nt, Artificial Sequence
  Description of Artificial Sequence: Synthetic oligonucleotide
aguugaauuaaguguggag

SEQ ID NO: 2168253 - RNA, 19 nt, Artificial Sequence
  Description of Artificial Sequence: Synthetic oligonucleotide
uaaaccugaaauuggguaa

SEQ ID NO: 2168254 - RNA, 19 nt, Artificial Sequence
  Description of Artificial Sequence: Synthetic oligonucleotide
caaaagacaaaggcgagcc

SEQ ID NO: 2168255 - RNA, 19 nt, Artificial Sequence
  Description of Artificial Sequence: Synthetic oligonucleotide
aggauuuugacagcccucc

SEQ ID NO: 2168256 - RNA, 19 nt, Artificial Sequence
  Description of Artificial Sequence: Synthetic oligonucleotide
aauggcaaccccuguuguc

SEQ ID NO: 2168257 - RNA, 19 nt, Artificial Sequence
  Description of Artificial Sequence: Synthetic oligonucleotide
accgucgucaacuuuuagg

SEQ ID NO: 2168258 - RNA, 19 nt, Artificial Sequence
  Description of Artificial Sequence: Synthetic oligonucleotide
augugagcaccacagagag

SEQ ID NO: 2168259 - RNA, 19 nt, Artificial Sequence
  Description of Artificial Sequence: Synthetic oligonucleotide
uguuauagggaauggcugu

SEQ ID NO: 2168260 - RNA, 19 nt, Artificial Sequence
  Description of Artificial Sequence: Synthetic oligonucleotide
agacaaaagacaaaggcga

SEQ ID NO: 2168261 - RNA, 19 nt, Artificial Sequence
  Description of Artificial Sequence: Synthetic oligonucleotide
uaucacauucaaaccagca

SEQ ID NO: 2168262 - RNA, 19 nt, Artificial Sequence
  Description of Artificial Sequence: Synthetic oligonucleotide
cagagggugauccacauug

SEQ ID NO: 2168263 - RNA, 19 nt, Artificial Sequence
  Description of Artificial Sequence: Synthetic oligonucleotide
aaccgagggcaccaagacc

SEQ ID NO: 2168264 - RNA, 19 nt, Artificial Sequence
  Description of Artificial Sequence: Synthetic oligonucleotide
acaaaagacaaaggcgagc

SEQ ID NO: 2168265 - RNA, 19 nt, Artificial Sequence
  Description of Artificial Sequence: Synthetic oligonucleotide
guuggaacugcaaucagag

SEQ ID NO: 2168266 - RNA, 19 nt, Artificial Sequence
  Description of Artificial Sequence: Synthetic oligonucleotide
ucaaacaggaauugucgga

SEQ ID NO: 2168267 - RNA, 19 nt, Artificial Sequence
  Description of Artificial Sequence: Synthetic oligonucleotide
uggcaaaggacaucaaagc

SEQ ID NO: 2168268 - RNA, 19 nt, Artificial Sequence
  Description of Artificial Sequence: Synthetic oligonucleotide
aucaacuagucccagugug

SEQ ID NO: 2168269 - RNA, 19 nt, Artificial Sequence
  Description of Artificial Sequence: Synthetic oligonucleotide
gauuuugacagcccucccc

SEQ ID NO: 2168270 - RNA, 19 nt, Artificial Sequence
  Description of Artificial Sequence: Synthetic oligonucleotide
cauacuagaccuugcuucc

SEQ ID NO: 2168271 - RNA, 19 nt, Artificial Sequence
  Description of Artificial Sequence: Synthetic oligonucleotide
auaugucuucacuaaaccu

SEQ ID NO: 2168272 - RNA, 19 nt, Artificial Sequence
  Description of Artificial Sequence: Synthetic oligonucleotide
cauccuuggaguaaccgag

SEQ ID NO: 2168273 - RNA, 19 nt, Artificial Sequence
  Description of Artificial Sequence: Synthetic oligonucleotide
gucaaacaggaauugucgg

SEQ ID NO: 2168274 - RNA, 19 nt, Artificial Sequence
  Description of Artificial Sequence: Synthetic oligonucleotide
uuggcaaccaccugacaag

SEQ ID NO: 2168275 - RNA, 19 nt, Artificial Sequence
  Description of Artificial Sequence: Synthetic oligonucleotide
aaaccugaaauuggguaag

SEQ ID NO: 2168276 - RNA, 19 nt, Artificial Sequence
  Description of Artificial Sequence: Synthetic oligonucleotide
cuugcuuccagaucaucag

SEQ ID NO: 2168277 - RNA, 19 nt, Artificial Sequence
  Description of Artificial Sequence: Synthetic oligonucleotide
acaaucauaucacauucaa

SEQ ID NO: 2168278 - RNA, 19 nt, Artificial Sequence
  Description of Artificial Sequence: Synthetic oligonucleotide
uugucggagaguaucugcc

SEQ ID NO: 2168279 - RNA, 19 nt, Artificial Sequence
  Description of Artificial Sequence: Synthetic oligonucleotide
agcaguugaauuaagugug

SEQ ID NO: 2168280 - RNA, 19 nt, Artificial Sequence
  Description of Artificial Sequence: Synthetic oligonucleotide
guuaguacaguuucauuga

SEQ ID NO: 2168281 - RNA, 19 nt, Artificial Sequence
  Description of Artificial Sequence: Synthetic oligonucleotide
uagagugugcagaggauca

SEQ ID NO: 2168282 - RNA, 19 nt, Artificial Sequence
  Description of Artificial Sequence: Synthetic oligonucleotide
uucauauguucauagucaa

SEQ ID NO: 2168283 - RNA, 19 nt, Artificial Sequence
  Description of Artificial Sequence: Synthetic oligonucleotide
agguuucagaggcacaguc

SEQ ID NO: 2168284 - RNA, 19 nt, Artificial Sequence
  Description of Artificial Sequence: Synthetic oligonucleotide
ucugauugggcacggggug

SEQ ID NO: 2168285 - RNA, 19 nt, Artificial Sequence
  Description of Artificial Sequence: Synthetic oligonucleotide
uuucauugaugcuucgaac

SEQ ID NO: 2168286 - RNA, 19 nt, Artificial Sequence
  Description of Artificial Sequence: Synthetic oligonucleotide
ucgaacaaggcagacaagu

SEQ ID NO: 2168287 - RNA, 19 nt, Artificial Sequence
  Description of Artificial Sequence: Synthetic oligonucleotide
uccuuggaguaaccgaggg

SEQ ID NO: 2168288 - RNA, 19 nt, Artificial Sequence
  Description of Artificial Sequence: Synthetic oligonucleotide
cuugccaagugcauacuag

SEQ ID NO: 2168289 - RNA, 19 nt, Artificial Sequence
  Description of Artificial Sequence: Synthetic oligonucleotide
aacaaggcagacaaguccu

SEQ ID NO: 2168290 - RNA, 19 nt, Artificial Sequence
  Description of Artificial Sequence: Synthetic oligonucleotide
acuuuuaggucaaacagga

SEQ ID NO: 2168291 - RNA, 19 nt, Artificial Sequence
  Description of Artificial Sequence: Synthetic oligonucleotide
uacaaucauaucacauuca

SEQ ID NO: 2168292 - RNA, 19 nt, Artificial Sequence
  Description of Artificial Sequence: Synthetic oligonucleotide
aaauuggguaagacaugcc

SEQ ID NO: 2168293 - RNA, 19 nt, Artificial Sequence
  Description of Artificial Sequence: Synthetic oligonucleotide
gucgucaacuuuuagguca

SEQ ID NO: 2168294 - RNA, 19 nt, Artificial Sequence
  Description of Artificial Sequence: Synthetic oligonucleotide
ugaucguuucugcugucag

SEQ ID NO: 2168295 - RNA, 19 nt, Artificial Sequence
  Description of Artificial Sequence: Synthetic oligonucleotide
uuggguaagacaugccaug

SEQ ID NO: 2168296 - RNA, 19 nt, Artificial Sequence
  Description of Artificial Sequence: Synthetic oligonucleotide
uguaugacuccagagcgug

SEQ ID NO: 2168297 - RNA, 19 nt, Artificial Sequence
  Description of Artificial Sequence: Synthetic oligonucleotide
uagggaauggcuguguaug

SEQ ID NO: 2168298 - RNA, 19 nt, Artificial Sequence
  Description of Artificial Sequence: Synthetic oligonucleotide
agcgaaagcacuugccaag

SEQ ID NO: 2168299 - RNA, 19 nt, Artificial Sequence
  Description of Artificial Sequence: Synthetic oligonucleotide
uaggcuggucguuggaugg

SEQ ID NO: 2168300 - RNA, 19 nt, Artificial Sequence
  Description of Artificial Sequence: Synthetic oligonucleotide
caaacaggaauugucggag

SEQ ID NO: 2168301 - RNA, 19 nt, Artificial Sequence
  Description of Artificial Sequence: Synthetic oligonucleotide
uuugauggcucgugaagca

SEQ ID NO: 2168302 - RNA, 19 nt, Artificial Sequence
  Description of Artificial Sequence: Synthetic oligonucleotide
cuucugauugggcacgggg

SEQ ID NO: 2168303 - RNA, 19 nt, Artificial Sequence
  Description of Artificial Sequence: Synthetic oligonucleotide
uccccugguaggcuggucg

SEQ ID NO: 2168304 - RNA, 19 nt, Artificial Sequence
  Description of Artificial Sequence: Synthetic oligonucleotide
uaguacaguuucauugaug

SEQ ID NO: 2168305 - RNA, 19 nt, Artificial Sequence
  Description of Artificial Sequence: Synthetic oligonucleotide
aaaggcaacagugaucguu

SEQ ID NO: 2168306 - RNA, 19 nt, Artificial Sequence
  Description of Artificial Sequence: Synthetic oligonucleotide
cugaaauuggguaagacau

SEQ ID NO: 2168307 - RNA, 19 nt, Artificial Sequence
  Description of Artificial Sequence: Synthetic oligonucleotide
aaauggcaaccccuguugu

SEQ ID NO: 2168308 - RNA, 19 nt, Artificial Sequence
  Description of Artificial Sequence: Synthetic oligonucleotide
auguguagagugugcagag

SEQ ID NO: 2168309 - RNA, 19 nt, Artificial Sequence
  Description of Artificial Sequence: Synthetic oligonucleotide
uuaggucaaacaggaauug

SEQ ID NO: 2168310 - RNA, 19 nt, Artificial Sequence
  Description of Artificial Sequence: Synthetic oligonucleotide
cuuggaguaaccgagggca

SEQ ID NO: 2168311 - RNA, 19 nt, Artificial Sequence
  Description of Artificial Sequence: Synthetic oligonucleotide
uacuagaccuugcuuccag

SEQ ID NO: 2168312 - RNA, 19 nt, Artificial Sequence
  Description of Artificial Sequence: Synthetic oligonucleotide
ggucaaacaggaauugucg

SEQ ID NO: 2168313 - RNA, 19 nt, Artificial Sequence
  Description of Artificial Sequence: Synthetic oligonucleotide
gauacaaucauaucacauu

SEQ ID NO: 2168314 - RNA, 19 nt, Artificial Sequence
  Description of Artificial Sequence: Synthetic oligonucleotide
cuucgaacaaggcagacaa

SEQ ID NO: 2168315 - RNA, 19 nt, Artificial Sequence
  Description of Artificial Sequence: Synthetic oligonucleotide
acaguuucauugaugcuuc

SEQ ID NO: 2168316 - RNA, 19 nt, Artificial Sequence
  Description of Artificial Sequence: Synthetic oligonucleotide
acuuucauauguucauagu

SEQ ID NO: 2168317 - RNA, 19 nt, Artificial Sequence
  Description of Artificial Sequence: Synthetic oligonucleotide
uuggugacccuuuccuggg

SEQ ID NO: 2168318 - RNA, 19 nt, Artificial Sequence
  Description of Artificial Sequence: Synthetic oligonucleotide
aaggcauguguagagugug

SEQ ID NO: 2168319 - RNA, 19 nt, Artificial Sequence
  Description of Artificial Sequence: Synthetic oligonucleotide
guuugauggcucgugaagc

SEQ ID NO: 2168320 - RNA, 19 nt, Artificial Sequence
  Description of Artificial Sequence: Synthetic oligonucleotide
auaucacauucaaaccagc

SEQ ID NO: 2168321 - RNA, 19 nt, Artificial Sequence
  Description of Artificial Sequence: Synthetic oligonucleotide
ugaauuaaguguggagaca

SEQ ID NO: 2168322 - RNA, 19 nt, Artificial Sequence
  Description of Artificial Sequence: Synthetic oligonucleotide
ggaucaacuagucccagug

SEQ ID NO: 2168323 - RNA, 19 nt, Artificial Sequence
  Description of Artificial Sequence: Synthetic oligonucleotide
accccuguugucucacugc

SEQ ID NO: 2168324 - RNA, 19 nt, Artificial Sequence
  Description of Artificial Sequence: Synthetic oligonucleotide
aaacaggaauugucggaga

SEQ ID NO: 2168325 - RNA, 19 nt, Artificial Sequence
  Description of Artificial Sequence: Synthetic oligonucleotide
cuaaaccugaaauugggua

SEQ ID NO: 2168326 - RNA, 19 nt, Artificial Sequence
  Description of Artificial Sequence: Synthetic oligonucleotide
gacaaaagacaaaggcgag

SEQ ID NO: 2168327 - RNA, 19 nt, Artificial Sequence
  Description of Artificial Sequence: Synthetic oligonucleotide
uaaccgagggcaccaagac

SEQ ID NO: 2168328 - RNA, 19 nt, Artificial Sequence
  Description of Artificial Sequence: Synthetic oligonucleotide
aagccgaugccagcgaaag

SEQ ID NO: 2168329 - RNA, 19 nt, Artificial Sequence
  Description of Artificial Sequence: Synthetic oligonucleotide
gcagcaguugaauuaagug

SEQ ID NO: 2168330 - RNA, 19 nt, Artificial Sequence
  Description of Artificial Sequence: Synthetic oligonucleotide
uuaguacaguuucauugau

SEQ ID NO: 2168331 - RNA, 19 nt, Artificial Sequence
  Description of Artificial Sequence: Synthetic oligonucleotide
guuucauugaugcuucgaa

SEQ ID NO: 2168332 - RNA, 19 nt, Artificial Sequence
  Description of Artificial Sequence: Synthetic oligonucleotide
aagacaugccauggcacag

SEQ ID NO: 2168333 - RNA, 19 nt, Artificial Sequence
  Description of Artificial Sequence: Synthetic oligonucleotide
uaccuguaacuucugcuac

SEQ ID NO: 2168334 - RNA, 19 nt, Artificial Sequence
  Description of Artificial Sequence: Synthetic oligonucleotide
cauguuauagggaauggcu

SEQ ID NO: 2168335 - RNA, 19 nt, Artificial Sequence
  Description of Artificial Sequence: Synthetic oligonucleotide
guuggcaaccaccugacaa

SEQ ID NO: 2168336 - RNA, 19 nt, Artificial Sequence
  Description of Artificial Sequence: Synthetic oligonucleotide
aauugucggagaguaucug

SEQ ID NO: 2168337 - RNA, 19 nt, Artificial Sequence
  Description of Artificial Sequence: Synthetic oligonucleotide
uguggagacaaaagacaaa

SEQ ID NO: 2168338 - RNA, 19 nt, Artificial Sequence
  Description of Artificial Sequence: Synthetic oligonucleotide
gcauacuagaccuugcuuc

SEQ ID NO: 2168339 - RNA, 19 nt, Artificial Sequence
  Description of Artificial Sequence: Synthetic oligonucleotide
aaccccuguugucucacug

SEQ ID NO: 2168340 - RNA, 19 nt, Artificial Sequence
  Description of Artificial Sequence: Synthetic oligonucleotide
ugccaagugcauacuagac

SEQ ID NO: 2168341 - RNA, 19 nt, Artificial Sequence
  Description of Artificial Sequence: Synthetic oligonucleotide
aggcagacaaguccucuuc

SEQ ID NO: 2168342 - RNA, 19 nt, Artificial Sequence
  Description of Artificial Sequence: Synthetic oligonucleotide
auguuauagggaauggcug

SEQ ID NO: 2168343 - RNA, 19 nt, Artificial Sequence
  Description of Artificial Sequence: Synthetic oligonucleotide
ucagagguuucagaggcac

SEQ ID NO: 2168344 - RNA, 19 nt, Artificial Sequence
  Description of Artificial Sequence: Synthetic oligonucleotide
uuucaccaagugaagggau

SEQ ID NO: 2168345 - RNA, 19 nt, Artificial Sequence
  Description of Artificial Sequence: Synthetic oligonucleotide
ccuuucaccaagugaaggg

SEQ ID NO: 2168346 - RNA, 19 nt, Artificial Sequence
  Description of Artificial Sequence: Synthetic oligonucleotide
ucugccaacacagguccag

SEQ ID NO: 2168347 - RNA, 19 nt, Artificial Sequence
  Description of Artificial Sequence: Synthetic oligonucleotide
ucauauguucauagucaaa

SEQ ID NO: 2168348 - RNA, 19 nt, Artificial Sequence
  Description of Artificial Sequence: Synthetic oligonucleotide
uguguagagugugcagagg

SEQ ID NO: 2168349 - RNA, 19 nt, Artificial Sequence
  Description of Artificial Sequence: Synthetic oligonucleotide
gagggcaccaagaccgucg

SEQ ID NO: 2168350 - RNA, 19 nt, Artificial Sequence
  Description of Artificial Sequence: Synthetic oligonucleotide
gguuugauggcucgugaag

SEQ ID NO: 2168351 - RNA, 19 nt, Artificial Sequence
  Description of Artificial Sequence: Synthetic oligonucleotide
aagaccgucgucaacuuuu

SEQ ID NO: 2168352 - RNA, 19 nt, Artificial Sequence
  Description of Artificial Sequence: Synthetic oligonucleotide
agugaagggaugucauccu

SEQ ID NO: 2168353 - RNA, 19 nt, Artificial Sequence
  Description of Artificial Sequence: Synthetic oligonucleotide
ugcuaccuguaacuucugc

SEQ ID NO: 2168354 - RNA, 19 nt, Artificial Sequence
  Description of Artificial Sequence: Synthetic oligonucleotide
uauagggaauggcugugua

SEQ ID NO: 2168355 - RNA, 19 nt, Artificial Sequence
  Description of Artificial Sequence: Synthetic oligonucleotide
cucacugccgguuccugag

SEQ ID NO: 2168356 - RNA, 19 nt, Artificial Sequence
  Description of Artificial Sequence: Synthetic oligonucleotide
aucaggauuuugacagccc

SEQ ID NO: 2168357 - RNA, 19 nt, Artificial Sequence
  Description of Artificial Sequence: Synthetic oligonucleotide
ucaucaggauuuugacagc

SEQ ID NO: 2168358 - RNA, 19 nt, Artificial Sequence
  Description of Artificial Sequence: Synthetic oligonucleotide
gucccuuucaccaagugaa

SEQ ID NO: 2168359 - RNA, 19 nt, Artificial Sequence
  Description of Artificial Sequence: Synthetic oligonucleotide
ugcagaggaucaacuaguc

SEQ ID NO: 2168360 - RNA, 19 nt, Artificial Sequence
  Description of Artificial Sequence: Synthetic oligonucleotide
ugcauacuagaccuugcuu

SEQ ID NO: 2168361 - RNA, 19 nt, Artificial Sequence
  Description of Artificial Sequence: Synthetic oligonucleotide
gucauccuuggaguaaccg

SEQ ID NO: 2168362 - RNA, 19 nt, Artificial Sequence
  Description of Artificial Sequence: Synthetic oligonucleotide
gaauggcuguguaugacuc

SEQ ID NO: 2168363 - RNA, 19 nt, Artificial Sequence
  Description of Artificial Sequence: Synthetic oligonucleotide
aguaaccgagggcaccaag

SEQ ID NO: 2168364 - RNA, 19 nt, Artificial Sequence
  Description of Artificial Sequence: Synthetic oligonucleotide
uggguuugauggcucguga

SEQ ID NO: 2168365 - RNA, 19 nt, Artificial Sequence
  Description of Artificial Sequence: Synthetic oligonucleotide
aaaccagcagcaguugaau

SEQ ID NO: 2168366 - RNA, 19 nt, Artificial Sequence
  Description of Artificial Sequence: Synthetic oligonucleotide
gcuccuaauauuucugcug

SEQ ID NO: 2168367 - RNA, 19 nt, Artificial Sequence
  Description of Artificial Sequence: Synthetic oligonucleotide
agugaacacugcuggagau

SEQ ID NO: 2168368 - RNA, 19 nt, Artificial Sequence
  Description of Artificial Sequence: Synthetic oligonucleotide
uagaccuugcuuccagauc

SEQ ID NO: 2168369 - RNA, 19 nt, Artificial Sequence
  Description of Artificial Sequence: Synthetic oligonucleotide
ugucggagaguaucugcca

SEQ ID NO: 2168370 - RNA, 19 nt, Artificial Sequence
  Description of Artificial Sequence: Synthetic oligonucleotide
agcguggcaaaggacauca

SEQ ID NO: 2168371 - RNA, 19 nt, Artificial Sequence
  Description of Artificial Sequence: Synthetic oligonucleotide
auucaaaccagcagcaguu

SEQ ID NO: 2168372 - RNA, 19 nt, Artificial Sequence
  Description of Artificial Sequence: Synthetic oligonucleotide
aacuagucccagugugggu

SEQ ID NO: 2168373 - RNA, 19 nt, Artificial Sequence
  Description of Artificial Sequence: Synthetic oligonucleotide
uucugcuaccuguaacuuc

SEQ ID NO: 2168374 - RNA, 19 nt, Artificial Sequence
  Description of Artificial Sequence: Synthetic oligonucleotide
aaggcaacagugaucguuu

SEQ ID NO: 2168375 - RNA, 19 nt, Artificial Sequence
  Description of Artificial Sequence: Synthetic oligonucleotide
guaagacaugccauggcac

SEQ ID NO: 2168376 - RNA, 19 nt, Artificial Sequence
  Description of Artificial Sequence: Synthetic oligonucleotide
ggaauugucggagaguauc

SEQ ID NO: 2168377 - RNA, 19 nt, Artificial Sequence
  Description of Artificial Sequence: Synthetic oligonucleotide
gccauggggcaccagaggg

SEQ ID NO: 2168378 - RNA, 19 nt, Artificial Sequence
  Description of Artificial Sequence: Synthetic oligonucleotide
gacagcccuccccugguag

SEQ ID NO: 2168379 - RNA, 19 nt, Artificial Sequence
  Description of Artificial Sequence: Synthetic oligonucleotide
gccaagugcauacuagacc

SEQ ID NO: 2168380 - RNA, 19 nt, Artificial Sequence
  Description of Artificial Sequence: Synthetic oligonucleotide
accaagugaagggauguca

SEQ ID NO: 2168381 - RNA, 19 nt, Artificial Sequence
  Description of Artificial Sequence: Synthetic oligonucleotide
aacugcaaucagagguuuc

SEQ ID NO: 2168382 - RNA, 19 nt, Artificial Sequence
  Description of Artificial Sequence: Synthetic oligonucleotide
uugucucacugccgguucc

SEQ ID NO: 2168383 - RNA, 19 nt, Artificial Sequence
  Description of Artificial Sequence: Synthetic oligonucleotide
acggggugcaaguuuggug

SEQ ID NO: 2168384 - RNA, 19 nt, Artificial Sequence
  Description of Artificial Sequence: Synthetic oligonucleotide
auggcaaccccuguugucu

SEQ ID NO: 2168385 - RNA, 19 nt, Artificial Sequence
  Description of Artificial Sequence: Synthetic oligonucleotide
cagcaguugaauuaagugu

SEQ ID NO: 2168386 - RNA, 19 nt, Artificial Sequence
  Description of Artificial Sequence: Synthetic oligonucleotide
ucgucaacuuuuaggucaa

SEQ ID NO: 2168387 - RNA, 19 nt, Artificial Sequence
  Description of Artificial Sequence: Synthetic oligonucleotide
gucaacuuuuaggucaaac

SEQ ID NO: 2168388 - RNA, 19 nt, Artificial Sequence
  Description of Artificial Sequence: Synthetic oligonucleotide
ucacugccgguuccugagg

SEQ ID NO: 2168389 - RNA, 19 nt, Artificial Sequence
  Description of Artificial Sequence: Synthetic oligonucleotide
augucuucacuaaaccuga

SEQ ID NO: 2168390 - RNA, 19 nt, Artificial Sequence
  Description of Artificial Sequence: Synthetic oligonucleotide
auggcucgugaagcaaugc

SEQ ID NO: 2168391 - RNA, 19 nt, Artificial Sequence
  Description of Artificial Sequence: Synthetic oligonucleotide
auuggguaagacaugccau

SEQ ID NO: 2168392 - RNA, 19 nt, Artificial Sequence
  Description of Artificial Sequence: Synthetic oligonucleotide
uuacuuucauauguucaua

SEQ ID NO: 2168393 - RNA, 19 nt, Artificial Sequence
  Description of Artificial Sequence: Synthetic oligonucleotide
uggucguuggaugggguug

SEQ ID NO: 2168394 - RNA, 19 nt, Artificial Sequence
  Description of Artificial Sequence: Synthetic oligonucleotide
caagugaagggaugucauc

SEQ ID NO: 2168395 - RNA, 19 nt, Artificial Sequence
  Description of Artificial Sequence: Synthetic oligonucleotide
cauugacauaaucaaggaa

SEQ ID NO: 2168396 - RNA, 19 nt, Artificial Sequence
  Description of Artificial Sequence: Synthetic oligonucleotide
acuaaaccugaaauugggu

SEQ ID NO: 2168397 - RNA, 19 nt, Artificial Sequence
  Description of Artificial Sequence: Synthetic oligonucleotide
ucggagaguaucugccaac

SEQ ID NO: 2168398 - RNA, 19 nt, Artificial Sequence
  Description of Artificial Sequence: Synthetic oligonucleotide
aguuucauugaugcuucga

SEQ ID NO: 2168399 - RNA, 19 nt, Artificial Sequence
  Description of Artificial Sequence: Synthetic oligonucleotide
uuggaguaaccgagggcac

SEQ ID NO: 2168400 - RNA, 19 nt, Artificial Sequence
  Description of Artificial Sequence: Synthetic oligonucleotide
gauggcucgugaagcaaug

SEQ ID NO: 2168401 - RNA, 19 nt, Artificial Sequence
  Description of Artificial Sequence: Synthetic oligonucleotide
ugccagcgaaagcacuugc

SEQ ID NO: 2168402 - RNA, 19 nt, Artificial Sequence
  Description of Artificial Sequence: Synthetic oligonucleotide
cacuucugcuaccuguaac

SEQ ID NO: 2168403 - RNA, 19 nt, Artificial Sequence
  Description of Artificial Sequence: Synthetic oligonucleotide
uuuugacagcccuccccug

SEQ ID NO: 2168404 - RNA, 19 nt, Artificial Sequence
  Description of Artificial Sequence: Synthetic oligonucleotide
gugguuggaacugcaauca

SEQ ID NO: 2168405 - RNA, 19 nt, Artificial Sequence
  Description of Artificial Sequence: Synthetic oligonucleotide
agugaucguuucugcuguc

SEQ ID NO: 2168406 - RNA, 19 nt, Artificial Sequence
  Description of Artificial Sequence: Synthetic oligonucleotide
agccgaugccagcgaaagc

SEQ ID NO: 2168407 - RNA, 19 nt, Artificial Sequence
  Description of Artificial Sequence: Synthetic oligonucleotide
uggaguaaccgagggcacc

SEQ ID NO: 2168408 - RNA, 19 nt, Artificial Sequence
  Description of Artificial Sequence: Synthetic oligonucleotide
uucugcugucaguuaguac

SEQ ID NO: 2168409 - RNA, 19 nt, Artificial Sequence
  Description of Artificial Sequence: Synthetic oligonucleotide
uggugacccuuuccugggg

SEQ ID NO: 2168410 - RNA, 19 nt, Artificial Sequence
  Description of Artificial Sequence: Synthetic oligonucleotide
gcuuuauaugucuucacua

SEQ ID NO: 2168411 - RNA, 19 nt, Artificial Sequence
  Description of Artificial Sequence: Synthetic oligonucleotide
agggaauggcuguguauga

SEQ ID NO: 2168412 - RNA, 19 nt, Artificial Sequence
  Description of Artificial Sequence: Synthetic oligonucleotide
cuccgcauguuauagggaa

SEQ ID NO: 2168413 - RNA, 19 nt, Artificial Sequence
  Description of Artificial Sequence: Synthetic oligonucleotide
ccugaaauuggguaagaca

SEQ ID NO: 2168414 - RNA, 19 nt, Artificial Sequence
  Description of Artificial Sequence: Synthetic oligonucleotide
acuagucccaguguggguu

SEQ ID NO: 2168415 - RNA, 19 nt, Artificial Sequence
  Description of Artificial Sequence: Synthetic oligonucleotide
cuuucaccaagugaaggga

SEQ ID NO: 2168416 - RNA, 19 nt, Artificial Sequence
  Description of Artificial Sequence: Synthetic oligonucleotide
ucgugaagcaaugccaguu

SEQ ID NO: 2168417 - RNA, 19 nt, Artificial Sequence
  Description of Artificial Sequence: Synthetic oligonucleotide
acuagaccuugcuuccaga

SEQ ID NO: 2168418 - RNA, 19 nt, Artificial Sequence
  Description of Artificial Sequence: Synthetic oligonucleotide
caggauuuugacagcccuc

SEQ ID NO: 2168419 - RNA, 19 nt, Artificial Sequence
  Description of Artificial Sequence: Synthetic oligonucleotide
uugggcacggggugcaagu

SEQ ID NO: 2168420 - RNA, 19 nt, Artificial Sequence
  Description of Artificial Sequence: Synthetic oligonucleotide
aggaucaacuagucccagu

SEQ ID NO: 2168421 - RNA, 19 nt, Artificial Sequence
  Description of Artificial Sequence: Synthetic oligonucleotide
caaaccagcagcaguugaa

SEQ ID NO: 2168422 - RNA, 19 nt, Artificial Sequence
  Description of Artificial Sequence: Synthetic oligonucleotide
aggcauguguagagugugc

SEQ ID NO: 2168423 - RNA, 19 nt, Artificial Sequence
  Description of Artificial Sequence: Synthetic oligonucleotide
aggcaacagugaucguuuc

SEQ ID NO: 2168424 - RNA, 19 nt, Artificial Sequence
  Description of Artificial Sequence: Synthetic oligonucleotide
ugcaaguuuggugacccuu

SEQ ID NO: 2168425 - RNA, 19 nt, Artificial Sequence
  Description of Artificial Sequence: Synthetic oligonucleotide
agcagcaguugaauuaagu

SEQ ID NO: 2168426 - RNA, 19 nt, Artificial Sequence
  Description of Artificial Sequence: Synthetic oligonucleotide
aguguggguuugauggcuc

SEQ ID NO: 2168427 - RNA, 19 nt, Artificial Sequence
  Description of Artificial Sequence: Synthetic oligonucleotide
cagacaaguccucuucuga

SEQ ID NO: 2168428 - RNA, 19 nt, Artificial Sequence
  Description of Artificial Sequence: Synthetic oligonucleotide
cauucaaaccagcagcagu

SEQ ID NO: 2168429 - RNA, 19 nt, Artificial Sequence
  Description of Artificial Sequence: Synthetic oligonucleotide
guaaccgagggcaccaaga

SEQ ID NO: 2168430 - RNA, 19 nt, Artificial Sequence
  Description of Artificial Sequence: Synthetic oligonucleotide
ugucggcuccuaauauuuc

SEQ ID NO: 2168431 - RNA, 19 nt, Artificial Sequence
  Description of Artificial Sequence: Synthetic oligonucleotide
aaccugaaauuggguaaga

SEQ ID NO: 2168432 - RNA, 19 nt, Artificial Sequence
  Description of Artificial Sequence: Synthetic oligonucleotide
caguuucauugaugcuucg

SEQ ID NO: 2168433 - RNA, 19 nt, Artificial Sequence
  Description of Artificial Sequence: Synthetic oligonucleotide
acaggaauugucggagagu

SEQ ID NO: 2168434 - RNA, 19 nt, Artificial Sequence
  Description of Artificial Sequence: Synthetic oligonucleotide
ucuccaggugccgcucugg

SEQ ID NO: 2168435 - RNA, 19 nt, Artificial Sequence
  Description of Artificial Sequence: Synthetic oligonucleotide
uccgcauguuauagggaau

SEQ ID NO: 2168436 - RNA, 19 nt, Artificial Sequence
  Description of Artificial Sequence: Synthetic oligonucleotide
caaguuuggugacccuuuc

SEQ ID NO: 2168437 - RNA, 19 nt, Artificial Sequence
  Description of Artificial Sequence: Synthetic oligonucleotide
guugucucacugccgguuc

SEQ ID NO: 2168438 - RNA, 19 nt, Artificial Sequence
  Description of Artificial Sequence: Synthetic oligonucleotide
agccacuguuggcaaccac

SEQ ID NO: 2168439 - RNA, 19 nt, Artificial Sequence
  Description of Artificial Sequence: Synthetic oligonucleotide
gcacuugccaagugcauac

SEQ ID NO: 2168440 - RNA, 19 nt, Artificial Sequence
  Description of Artificial Sequence: Synthetic oligonucleotide
gagugugcagaggaucaac

SEQ ID NO: 2168441 - RNA, 19 nt, Artificial Sequence
  Description of Artificial Sequence: Synthetic oligonucleotide
cagugucccuuucaccaag

SEQ ID NO: 2168442 - RNA, 19 nt, Artificial Sequence
  Description of Artificial Sequence: Synthetic oligonucleotide
gucuucacuaaaccugaaa

SEQ ID NO: 2168443 - RNA, 19 nt, Artificial Sequence
  Description of Artificial Sequence: Synthetic oligonucleotide
uggcuguguaugacuccag

SEQ ID NO: 2168444 - RNA, 19 nt, Artificial Sequence
  Description of Artificial Sequence: Synthetic oligonucleotide
ggugauccacauuguauuc

SEQ ID NO: 2168445 - RNA, 19 nt, Artificial Sequence
  Description of Artificial Sequence: Synthetic oligonucleotide
auccuuggaguaaccgagg

SEQ ID NO: 2168446 - RNA, 19 nt, Artificial Sequence
  Description of Artificial Sequence: Synthetic oligonucleotide
cagaugaacaccagcauuu

SEQ ID NO: 2168447 - RNA, 19 nt, Artificial Sequence
  Description of Artificial Sequence: Synthetic oligonucleotide
gcaguugaauuaagugugg

SEQ ID NO: 2168448 - RNA, 19 nt, Artificial Sequence
  Description of Artificial Sequence: Synthetic oligonucleotide
gcagaggaucaacuagucc

SEQ ID NO: 2168449 - RNA, 19 nt, Artificial Sequence
  Description of Artificial Sequence: Synthetic oligonucleotide
gcauguguagagugugcag

SEQ ID NO: 2168450 - RNA, 19 nt, Artificial Sequence
  Description of Artificial Sequence: Synthetic oligonucleotide
ugauugggcacggggugca

SEQ ID NO: 2168451 - RNA, 19 nt, Artificial Sequence
  Description of Artificial Sequence: Synthetic oligonucleotide
gcauguuauagggaauggc

SEQ ID NO: 2168452 - RNA, 19 nt, Artificial Sequence
  Description of Artificial Sequence: Synthetic oligonucleotide
cugauugggcacggggugc

SEQ ID NO: 2168453 - RNA, 19 nt, Artificial Sequence
  Description of Artificial Sequence: Synthetic oligonucleotide
gaucaacuagucccagugu

SEQ ID NO: 2168454 - RNA, 19 nt, Artificial Sequence
  Description of Artificial Sequence: Synthetic oligonucleotide
gaauugucggagaguaucu

SEQ ID NO: 2168455 - RNA, 19 nt, Artificial Sequence
  Description of Artificial Sequence: Synthetic oligonucleotide
uugauggcucgugaagcaa

SEQ ID NO: 2168456 - RNA, 19 nt, Artificial Sequence
  Description of Artificial Sequence: Synthetic oligonucleotide
auuguauuccuuggcuuua

SEQ ID NO: 2168457 - RNA, 19 nt, Artificial Sequence
  Description of Artificial Sequence: Synthetic oligonucleotide
gcucgugaagcaaugccag

SEQ ID NO: 2168458 - RNA, 19 nt, Artificial Sequence
  Description of Artificial Sequence: Synthetic oligonucleotide
aaagccgaugccagcgaaa

SEQ ID NO: 2168459 - RNA, 19 nt, Artificial Sequence
  Description of Artificial Sequence: Synthetic oligonucleotide
guaugacuccagagcgugg

SEQ ID NO: 2168460 - RNA, 19 nt, Artificial Sequence
  Description of Artificial Sequence: Synthetic oligonucleotide
ggacuccgcauguuauagg

SEQ ID NO: 2168461 - RNA, 19 nt, Artificial Sequence
  Description of Artificial Sequence: Synthetic oligonucleotide
accagagggugauccacau

SEQ ID NO: 2168462 - RNA, 19 nt, Artificial Sequence
  Description of Artificial Sequence: Synthetic oligonucleotide
gccgaugccagcgaaagca

SEQ ID NO: 2168463 - RNA, 19 nt, Artificial Sequence
  Description of Artificial Sequence: Synthetic oligonucleotide
gaccgucgucaacuuuuag

SEQ ID NO: 2168464 - RNA, 19 nt, Artificial Sequence
  Description of Artificial Sequence: Synthetic oligonucleotide
gggacuccgcauguuauag

SEQ ID NO: 2168465 - RNA, 19 nt, Artificial Sequence
  Description of Artificial Sequence: Synthetic oligonucleotide
augucggcuccuaauauuu

SEQ ID NO: 2168466 - RNA, 19 nt, Artificial Sequence
  Description of Artificial Sequence: Synthetic oligonucleotide
ugguaggcuggucguugga

SEQ ID NO: 2168467 - RNA, 19 nt, Artificial Sequence
  Description of Artificial Sequence: Synthetic oligonucleotide
acuccagagcguggcaaag

SEQ ID NO: 2168468 - RNA, 19 nt, Artificial Sequence
  Description of Artificial Sequence: Synthetic oligonucleotide
ggguaagacaugccauggc

SEQ ID NO: 2168469 - RNA, 19 nt, Artificial Sequence
  Description of Artificial Sequence: Synthetic oligonucleotide
uguggguuugauggcucgu

SEQ ID NO: 2168470 - RNA, 19 nt, Artificial Sequence
  Description of Artificial Sequence: Synthetic oligonucleotide
guggguuugauggcucgug

SEQ ID NO: 2168471 - RNA, 19 nt, Artificial Sequence
  Description of Artificial Sequence: Synthetic oligonucleotide
gaugucggcuccuaauauu

SEQ ID NO: 2168472 - RNA, 19 nt, Artificial Sequence
  Description of Artificial Sequence: Synthetic oligonucleotide
gucggagaguaucugccaa

SEQ ID NO: 2168473 - RNA, 19 nt, Artificial Sequence
  Description of Artificial Sequence: Synthetic oligonucleotide
gaagggcagggacuccgca

SEQ ID NO: 2168474 - RNA, 19 nt, Artificial Sequence
  Description of Artificial Sequence: Synthetic oligonucleotide
agggcaccaagaccgucgu

SEQ ID NO: 2168475 - RNA, 19 nt, Artificial Sequence
  Description of Artificial Sequence: Synthetic oligonucleotide
ggugacccuuuccuggggc

SEQ ID NO: 2168476 - RNA, 19 nt, Artificial Sequence
  Description of Artificial Sequence: Synthetic oligonucleotide
cauuguauuccuuggcuuu

SEQ ID NO: 2168477 - RNA, 19 nt, Artificial Sequence
  Description of Artificial Sequence: Synthetic oligonucleotide
ggcuuuauaugucuucacu

SEQ ID NO: 2168478 - RNA, 19 nt, Artificial Sequence
  Description of Artificial Sequence: Synthetic oligonucleotide
cugacccacuucugcuacc

SEQ ID NO: 2168479 - RNA, 19 nt, Artificial Sequence
  Description of Artificial Sequence: Synthetic oligonucleotide
gucggcuccuaauauuucu

SEQ ID NO: 2168480 - RNA, 19 nt, Artificial Sequence
  Description of Artificial Sequence: Synthetic oligonucleotide
ccgcucuggaaacaucugg

SEQ ID NO: 2168481 - RNA, 19 nt, Artificial Sequence
  Description of Artificial Sequence: Synthetic oligonucleotide
uuguauuccuuggcuuuau

SEQ ID NO: 2168482 - RNA, 19 nt, Artificial Sequence
  Description of Artificial Sequence: Synthetic oligonucleotide
ggucguuggaugggguugg

SEQ ID NO: 2168483 - RNA, 19 nt, Artificial Sequence
  Description of Artificial Sequence: Synthetic oligonucleotide
cagcgaaagcacuugccaa

SEQ ID NO: 2168484 - RNA, 19 nt, Artificial Sequence
  Description of Artificial Sequence: Synthetic oligonucleotide
gguuggaacugcaaucaga

SEQ ID NO: 2168485 - RNA, 19 nt, Artificial Sequence
  Description of Artificial Sequence: Synthetic oligonucleotide
agacaugccauggcacaga

SEQ ID NO: 2168486 - RNA, 19 nt, Artificial Sequence
  Description of Artificial Sequence: Synthetic oligonucleotide
cuuuuaggucaaacaggaa

SEQ ID NO: 2168487 - RNA, 19 nt, Artificial Sequence
  Description of Artificial Sequence: Synthetic oligonucleotide
agcacuugccaagugcaua

SEQ ID NO: 2168488 - RNA, 19 nt, Artificial Sequence
  Description of Artificial Sequence: Synthetic oligonucleotide
cucuucugauugggcacgg

SEQ ID NO: 2168489 - RNA, 19 nt, Artificial Sequence
  Description of Artificial Sequence: Synthetic oligonucleotide
gcuaccuguaacuucugcu

SEQ ID NO: 2168490 - RNA, 19 nt, Artificial Sequence
  Description of Artificial Sequence: Synthetic oligonucleotide
ggauuuugacagcccuccc

SEQ ID NO: 2168491 - RNA, 19 nt, Artificial Sequence
  Description of Artificial Sequence: Synthetic oligonucleotide
caggugccgcucuggaaac

SEQ ID NO: 2168492 - RNA, 19 nt, Artificial Sequence
  Description of Artificial Sequence: Synthetic oligonucleotide
gugugcagaggaucaacua

SEQ ID NO: 2168493 - RNA, 19 nt, Artificial Sequence
  Description of Artificial Sequence: Synthetic oligonucleotide
auacuagaccuugcuucca

SEQ ID NO: 2168494 - RNA, 19 nt, Artificial Sequence
  Description of Artificial Sequence: Synthetic oligonucleotide
cagcagcaguugaauuaag

SEQ ID NO: 2168495 - RNA, 19 nt, Artificial Sequence
  Description of Artificial Sequence: Synthetic oligonucleotide
caguugaauuaagugugga

SEQ ID NO: 2168496 - RNA, 19 nt, Artificial Sequence
  Description of Artificial Sequence: Synthetic oligonucleotide
ugcggaugucggcuccuaa

SEQ ID NO: 2168497 - RNA, 19 nt, Artificial Sequence
  Description of Artificial Sequence: Synthetic oligonucleotide
ggagaguaucugccaacac

SEQ ID NO: 2168498 - RNA, 19 nt, Artificial Sequence
  Description of Artificial Sequence: Synthetic oligonucleotide
gugcauacuagaccuugcu

SEQ ID NO: 2168499 - RNA, 19 nt, Artificial Sequence
  Description of Artificial Sequence: Synthetic oligonucleotide
ggcucgugaagcaaugcca

SEQ ID NO: 2168500 - RNA, 19 nt, Artificial Sequence
  Description of Artificial Sequence: Synthetic oligonucleotide
cagugcggaugucggcucc

SEQ ID NO: 2168501 - RNA, 19 nt, Artificial Sequence
  Description of Artificial Sequence: Synthetic oligonucleotide
accaccugacaaggcaugu

SEQ ID NO: 2168502 - RNA, 19 nt, Artificial Sequence
  Description of Artificial Sequence: Synthetic oligonucleotide
gugaucguuucugcuguca

SEQ ID NO: 2168503 - RNA, 19 nt, Artificial Sequence
  Description of Artificial Sequence: Synthetic oligonucleotide
ggcacggggugcaaguuug

SEQ ID NO: 2168504 - RNA, 19 nt, Artificial Sequence
  Description of Artificial Sequence: Synthetic oligonucleotide
ugccgguuccugagguggu

SEQ ID NO: 2168505 - RNA, 19 nt, Artificial Sequence
  Description of Artificial Sequence: Synthetic oligonucleotide
gugacccuuuccuggggca

SEQ ID NO: 2168506 - RNA, 19 nt, Artificial Sequence
  Description of Artificial Sequence: Synthetic oligonucleotide
gguccuggcagugcggaug

SEQ ID NO: 2168507 - RNA, 19 nt, Artificial Sequence
  Description of Artificial Sequence: Synthetic oligonucleotide
uggggcaccagagggugau

SEQ ID NO: 2168508 - RNA, 19 nt, Artificial Sequence
  Description of Artificial Sequence: Synthetic oligonucleotide
gacaaggcauguguagagu

SEQ ID NO: 2168509 - RNA, 19 nt, Artificial Sequence
  Description of Artificial Sequence: Synthetic oligonucleotide
uggcaaccccuguugucuc

SEQ ID NO: 2168510 - RNA, 19 nt, Artificial Sequence
  Description of Artificial Sequence: Synthetic oligonucleotide
cagugaucguuucugcugu

SEQ ID NO: 2168511 - RNA, 19 nt, Artificial Sequence
  Description of Artificial Sequence: Synthetic oligonucleotide
cuagaccuugcuuccagau

SEQ ID NO: 2168512 - RNA, 19 nt, Artificial Sequence
  Description of Artificial Sequence: Synthetic oligonucleotide
ccagcgaaagcacuugcca

SEQ ID NO: 2168513 - RNA, 19 nt, Artificial Sequence
  Description of Artificial Sequence: Synthetic oligonucleotide
ggcauguguagagugugca

SEQ ID NO: 2168514 - RNA, 19 nt, Artificial Sequence
  Description of Artificial Sequence: Synthetic oligonucleotide
ggauacaaucauaucacau

SEQ ID NO: 2168515 - RNA, 19 nt, Artificial Sequence
  Description of Artificial Sequence: Synthetic oligonucleotide
ggcuguguaugacuccaga

SEQ ID NO: 2168516 - RNA, 19 nt, Artificial Sequence
  Description of Artificial Sequence: Synthetic oligonucleotide
gaugccagcgaaagcacuu

SEQ ID NO: 2168517 - RNA, 19 nt, Artificial Sequence
  Description of Artificial Sequence: Synthetic oligonucleotide
gggcugugaaagugaacac

SEQ ID NO: 2168518 - RNA, 19 nt, Artificial Sequence
  Description of Artificial Sequence: Synthetic oligonucleotide
gggugauccacauuguauu

SEQ ID NO: 2168519 - RNA, 19 nt, Artificial Sequence
  Description of Artificial Sequence: Synthetic oligonucleotide
ggaguaaccgagggcacca

SEQ ID NO: 2168520 - RNA, 19 nt, Artificial Sequence
  Description of Artificial Sequence: Synthetic oligonucleotide
uccagaucaucaggauuuu

SEQ ID NO: 2168521 - RNA, 19 nt, Artificial Sequence
  Description of Artificial Sequence: Synthetic oligonucleotide
gacaugccauggcacagau

SEQ ID NO: 2168522 - RNA, 19 nt, Artificial Sequence
  Description of Artificial Sequence: Synthetic oligonucleotide
agagugugcagaggaucaa

SEQ ID NO: 2168523 - RNA, 19 nt, Artificial Sequence
  Description of Artificial Sequence: Synthetic oligonucleotide
cgaacaaggcagacaaguc

SEQ ID NO: 2168524 - RNA, 19 nt, Artificial Sequence
  Description of Artificial Sequence: Synthetic oligonucleotide
acuccgcauguuauaggga

SEQ ID NO: 2168525 - RNA, 19 nt, Artificial Sequence
  Description of Artificial Sequence: Synthetic oligonucleotide
agugucccuuucaccaagu

SEQ ID NO: 2168526 - RNA, 19 nt, Artificial Sequence
  Description of Artificial Sequence: Synthetic oligonucleotide
ccgucgucaacuuuuaggu

SEQ ID NO: 2168527 - RNA, 19 nt, Artificial Sequence
  Description of Artificial Sequence: Synthetic oligonucleotide
caaagccgaugccagcgaa

SEQ ID NO: 2168528 - RNA, 19 nt, Artificial Sequence
  Description of Artificial Sequence: Synthetic oligonucleotide
cuuccagaucaucaggauu

SEQ ID NO: 2168529 - RNA, 19 nt, Artificial Sequence
  Description of Artificial Sequence: Synthetic oligonucleotide
cagagguuucagaggcaca

SEQ ID NO: 2168530 - RNA, 19 nt, Artificial Sequence
  Description of Artificial Sequence: Synthetic oligonucleotide
aucagagguuucagaggca

SEQ ID NO: 2168531 - RNA, 19 nt, Artificial Sequence
  Description of Artificial Sequence: Synthetic oligonucleotide
ccgcauguuauagggaaug

SEQ ID NO: 2168532 - RNA, 19 nt, Artificial Sequence
  Description of Artificial Sequence: Synthetic oligonucleotide
gggaauggcuguguaugac

SEQ ID NO: 2168533 - RNA, 19 nt, Artificial Sequence
  Description of Artificial Sequence: Synthetic oligonucleotide
caccaagaccgucgucaac

SEQ ID NO: 2168534 - RNA, 19 nt, Artificial Sequence
  Description of Artificial Sequence: Synthetic oligonucleotide
caccaagugaagggauguc

SEQ ID NO: 2168535 - RNA, 19 nt, Artificial Sequence
  Description of Artificial Sequence: Synthetic oligonucleotide
gcuucgaacaaggcagaca

SEQ ID NO: 2168536 - RNA, 19 nt, Artificial Sequence
  Description of Artificial Sequence: Synthetic oligonucleotide
cagcccuccccugguaggc

SEQ ID NO: 2168537 - RNA, 19 nt, Artificial Sequence
  Description of Artificial Sequence: Synthetic oligonucleotide
ggguuugauggcucgugaa

SEQ ID NO: 2168538 - RNA, 19 nt, Artificial Sequence
  Description of Artificial Sequence: Synthetic oligonucleotide
ggcuccuaauauuucugcu

SEQ ID NO: 2168539 - RNA, 19 nt, Artificial Sequence
  Description of Artificial Sequence: Synthetic oligonucleotide
cccuguugucucacugccg

SEQ ID NO: 2168540 - RNA, 19 nt, Artificial Sequence
  Description of Artificial Sequence: Synthetic oligonucleotide
ccaggugccgcucuggaaa

SEQ ID NO: 2168541 - RNA, 19 nt, Artificial Sequence
  Description of Artificial Sequence: Synthetic oligonucleotide
cggcuccuaauauuucugc

SEQ ID NO: 2168542 - RNA, 19 nt, Artificial Sequence
  Description of Artificial Sequence: Synthetic oligonucleotide
agugcggaugucggcuccu

SEQ ID NO: 2168543 - RNA, 19 nt, Artificial Sequence
  Description of Artificial Sequence: Synthetic oligonucleotide
ccuuuccuggggcaguguc

SEQ ID NO: 2168544 - RNA, 19 nt, Artificial Sequence
  Description of Artificial Sequence: Synthetic oligonucleotide
cgcauguuauagggaaugg

SEQ ID NO: 2168545 - RNA, 19 nt, Artificial Sequence
  Description of Artificial Sequence: Synthetic oligonucleotide
aggaauugucggagaguau

SEQ ID NO: 2168546 - RNA, 19 nt, Artificial Sequence
  Description of Artificial Sequence: Synthetic oligonucleotide
gaacugcaaucagagguuu

SEQ ID NO: 2168547 - RNA, 19 nt, Artificial Sequence
  Description of Artificial Sequence: Synthetic oligonucleotide
ccgaugccagcgaaagcac

SEQ ID NO: 2168548 - RNA, 19 nt, Artificial Sequence
  Description of Artificial Sequence: Synthetic oligonucleotide
ggggugcaaguuuggugac

SEQ ID NO: 2168549 - RNA, 19 nt, Artificial Sequence
  Description of Artificial Sequence: Synthetic oligonucleotide
gugaagggaugucauccuu

SEQ ID NO: 2168550 - RNA, 19 nt, Artificial Sequence
  Description of Artificial Sequence: Synthetic oligonucleotide
ggcaacagugaucguuucu

SEQ ID NO: 2168551 - RNA, 19 nt, Artificial Sequence
  Description of Artificial Sequence: Synthetic oligonucleotide
gggugcaaguuuggugacc

SEQ ID NO: 2168552 - RNA, 19 nt, Artificial Sequence
  Description of Artificial Sequence: Synthetic oligonucleotide
ggcaaccaccugacaaggc

SEQ ID NO: 2168553 - RNA, 19 nt, Artificial Sequence
  Description of Artificial Sequence: Synthetic oligonucleotide
gcgagccugacccacuucu

SEQ ID NO: 2168554 - RNA, 19 nt, Artificial Sequence
  Description of Artificial Sequence: Synthetic oligonucleotide
caguuaguacaguuucauu

SEQ ID NO: 2168555 - RNA, 19 nt, Artificial Sequence
  Description of Artificial Sequence: Synthetic oligonucleotide
guguaugacuccagagcgu

SEQ ID NO: 2168556 - RNA, 19 nt, Artificial Sequence
  Description of Artificial Sequence: Synthetic oligonucleotide
ggaacugcaaucagagguu

SEQ ID NO: 2168557 - RNA, 19 nt, Artificial Sequence
  Description of Artificial Sequence: Synthetic oligonucleotide
ggaugucggcuccuaauau

SEQ ID NO: 2168558 - RNA, 19 nt, Artificial Sequence
  Description of Artificial Sequence: Synthetic oligonucleotide
agaccgucgucaacuuuua

SEQ ID NO: 2168559 - RNA, 19 nt, Artificial Sequence
  Description of Artificial Sequence: Synthetic oligonucleotide
caaggcagacaaguccucu

SEQ ID NO: 2168560 - RNA, 19 nt, Artificial Sequence
  Description of Artificial Sequence: Synthetic oligonucleotide
cgguuccugaggugguugg

SEQ ID NO: 2168561 - RNA, 19 nt, Artificial Sequence
  Description of Artificial Sequence: Synthetic oligonucleotide
gcagugcggaugucggcuc

SEQ ID NO: 2168562 - RNA, 19 nt, Artificial Sequence
  Description of Artificial Sequence: Synthetic oligonucleotide
aucugccaacacaggucca

SEQ ID NO: 2168563 - RNA, 19 nt, Artificial Sequence
  Description of Artificial Sequence: Synthetic oligonucleotide
cgucgucaacuuuuagguc

SEQ ID NO: 2168564 - RNA, 19 nt, Artificial Sequence
  Description of Artificial Sequence: Synthetic oligonucleotide
ggcaaccccuguugucuca

SEQ ID NO: 2168565 - RNA, 19 nt, Artificial Sequence
  Description of Artificial Sequence: Synthetic oligonucleotide
gaguaaccgagggcaccaa

SEQ ID NO: 2168566 - RNA, 19 nt, Artificial Sequence
  Description of Artificial Sequence: Synthetic oligonucleotide
ggcagugcggaugucggcu

SEQ ID NO: 2168567 - RNA, 19 nt, Artificial Sequence
  Description of Artificial Sequence: Synthetic oligonucleotide
ccacuguuggcaaccaccu

SEQ ID NO: 2168568 - RNA, 19 nt, Artificial Sequence
  Description of Artificial Sequence: Synthetic oligonucleotide
cacugccgguuccugaggu

SEQ ID NO: 2168569 - RNA, 19 nt, Artificial Sequence
  Description of Artificial Sequence: Synthetic oligonucleotide
cgaaagcacuugccaagug

SEQ ID NO: 2168570 - RNA, 19 nt, Artificial Sequence
  Description of Artificial Sequence: Synthetic oligonucleotide
gcaaccccuguugucucac

SEQ ID NO: 2168571 - RNA, 19 nt, Artificial Sequence
  Description of Artificial Sequence: Synthetic oligonucleotide
gcacggggugcaaguuugg

SEQ ID NO: 2168572 - RNA, 19 nt, Artificial Sequence
  Description of Artificial Sequence: Synthetic oligonucleotide
cuggucguuggaugggguu

SEQ ID NO: 2168573 - RNA, 19 nt, Artificial Sequence
  Description of Artificial Sequence: Synthetic oligonucleotide
agcccuccccugguaggcu

SEQ ID NO: 2168574 - RNA, 19 nt, Artificial Sequence
  Description of Artificial Sequence: Synthetic oligonucleotide
cuucugcuaccuguaacuu

SEQ ID NO: 2168575 - RNA, 19 nt, Artificial Sequence
  Description of Artificial Sequence: Synthetic oligonucleotide
caagugcauacuagaccuu

SEQ ID NO: 2168576 - RNA, 19 nt, Artificial Sequence
  Description of Artificial Sequence: Synthetic oligonucleotide
gugccgcucuggaaacauc

SEQ ID NO: 2168577 - RNA, 19 nt, Artificial Sequence
  Description of Artificial Sequence: Synthetic oligonucleotide
gugcaaguuuggugacccu

SEQ ID NO: 2168578 - RNA, 19 nt, Artificial Sequence
  Description of Artificial Sequence: Synthetic oligonucleotide
ccaaagccgaugccagcga

SEQ ID NO: 2168579 - RNA, 19 nt, Artificial Sequence
  Description of Artificial Sequence: Synthetic oligonucleotide
gggguuggaagggcaggga

SEQ ID NO: 2168580 - RNA, 19 nt, Artificial Sequence
  Description of Artificial Sequence: Synthetic oligonucleotide
gcggaugucggcuccuaau

SEQ ID NO: 2168581 - RNA, 19 nt, Artificial Sequence
  Description of Artificial Sequence: Synthetic oligonucleotide
gcgaaagcacuugccaagu

SEQ ID NO: 2168582 - RNA, 19 nt, Artificial Sequence
  Description of Artificial Sequence: Synthetic oligonucleotide
gguaggcuggucguuggau

SEQ ID NO: 2168583 - RNA, 19 nt, Artificial Sequence
  Description of Artificial Sequence: Synthetic oligonucleotide
gcaaguuuggugacccuuu

SEQ ID NO: 2168584 - RNA, 19 nt, Artificial Sequence
  Description of Artificial Sequence: Synthetic oligonucleotide
caaaggcaacagugaucgu

SEQ ID NO: 2168585 - RNA, 19 nt, Artificial Sequence
  Description of Artificial Sequence: Synthetic oligonucleotide
caagaccgucgucaacuuu

SEQ ID NO: 2168586 - RNA, 19 nt, Artificial Sequence
  Description of Artificial Sequence: Synthetic oligonucleotide
cagucacuggcuuccccuu

SEQ ID NO: 2168587 - RNA, 19 nt, Artificial Sequence
  Description of Artificial Sequence: Synthetic oligonucleotide
cggaugucggcuccuaaua

SEQ ID NO: 2168588 - RNA, 19 nt, Artificial Sequence
  Description of Artificial Sequence: Synthetic oligonucleotide
cacggggugcaaguuuggu

SEQ ID NO: 2168589 - RNA, 19 nt, Artificial Sequence
  Description of Artificial Sequence: Synthetic oligonucleotide
cuccccugguaggcugguc

SEQ ID NO: 2168590 - RNA, 19 nt, Artificial Sequence
  Description of Artificial Sequence: Synthetic oligonucleotide
caaccccuguugucucacu

SEQ ID NO: 2168591 - RNA, 19 nt, Artificial Sequence
  Description of Artificial Sequence: Synthetic oligonucleotide
uccuggcagugcggauguc

SEQ ID NO: 2168592 - RNA, 19 nt, Artificial Sequence
  Description of Artificial Sequence: Synthetic oligonucleotide
cacuugccaagugcauacu

SEQ ID NO: 2168593 - RNA, 19 nt, Artificial Sequence
  Description of Artificial Sequence: Synthetic oligonucleotide
ccauggggcaccagagggu

SEQ ID NO: 2168594 - RNA, 19 nt, Artificial Sequence
  Description of Artificial Sequence: Synthetic oligonucleotide
gucccaguguggguuugau

SEQ ID NO: 2168595 - RNA, 19 nt, Artificial Sequence
  Description of Artificial Sequence: Synthetic oligonucleotide
gggcaccaagaccgucguc

SEQ ID NO: 2168596 - RNA, 19 nt, Artificial Sequence
  Description of Artificial Sequence: Synthetic oligonucleotide
gggcacggggugcaaguuu

SEQ ID NO: 2168597 - RNA, 19 nt, Artificial Sequence
  Description of Artificial Sequence: Synthetic oligonucleotide
gcuggucguuggauggggu

SEQ ID NO: 2168598 - RNA, 19 nt, Artificial Sequence
  Description of Artificial Sequence: Synthetic oligonucleotide
cgaugccagcgaaagcacu

SEQ ID NO: 2168599 - RNA, 19 nt, Artificial Sequence
  Description of Artificial Sequence: Synthetic oligonucleotide
ccaagaccgucgucaacuu

SEQ ID NO: 2168600 - RNA, 19 nt, Artificial Sequence
  Description of Artificial Sequence: Synthetic oligonucleotide
cgagggcaccaagaccguc

SEQ ID NO: 2168601 - RNA, 19 nt, Artificial Sequence
  Description of Artificial Sequence: Synthetic oligonucleotide
ccccugguaggcuggucgu

SEQ ID NO: 2168602 - RNA, 19 nt, Artificial Sequence
  Description of Artificial Sequence: Synthetic oligonucleotide
gcguggcaaaggacaucaa

SEQ ID NO: 2168603 - RNA, 19 nt, Artificial Sequence
  Description of Artificial Sequence: Synthetic oligonucleotide
ggcagggacuccgcauguu

SEQ ID NO: 2168604 - RNA, 19 nt, Artificial Sequence
  Description of Artificial Sequence: Synthetic oligonucleotide
gccgguuccugaggugguu

SEQ ID NO: 2168605 - RNA, 19 nt, Artificial Sequence
  Description of Artificial Sequence: Synthetic oligonucleotide
cccugguaggcuggucguu

SEQ ID NO: 2168606 - RNA, 19 nt, Artificial Sequence
  Description of Artificial Sequence: Synthetic oligonucleotide
aaccuuugaacacugaggc

SEQ ID NO: 2168607 - RNA, 19 nt, Artificial Sequence
  Description of Artificial Sequence: Synthetic oligonucleotide
gaagauaagguucagauuc

SEQ ID NO: 2168608 - RNA, 19 nt, Artificial Sequence
  Description of Artificial Sequence: Synthetic oligonucleotide
uuuauuaggaaggagaccc

SEQ ID NO: 2168609 - RNA, 19 nt, Artificial Sequence
  Description of Artificial Sequence: Synthetic oligonucleotide
cacacugagauauugaugc

SEQ ID NO: 2168610 - RNA, 19 nt, Artificial Sequence
  Description of Artificial Sequence: Synthetic oligonucleotide
gaaauuaggaacuucagaa

SEQ ID NO: 2168611 - RNA, 19 nt, Artificial Sequence
  Description of Artificial Sequence: Synthetic oligonucleotide
gagauauugaugcugcccg

SEQ ID NO: 2168612 - RNA, 19 nt, Artificial Sequence
  Description of Artificial Sequence: Synthetic oligonucleotide
uuugccguuacugacaggg

SEQ ID NO: 2168613 - RNA, 19 nt, Artificial Sequence
  Description of Artificial Sequence: Synthetic oligonucleotide
ucugcuacuuuacaggucc

SEQ ID NO: 2168614 - RNA, 19 nt, Artificial Sequence
  Description of Artificial Sequence: Synthetic oligonucleotide
aggaacuucagaauaaacc

SEQ ID NO: 2168615 - RNA, 19 nt, Artificial Sequence
  Description of Artificial Sequence: Synthetic oligonucleotide
aguguuauacucuggauug

SEQ ID NO: 2168616 - RNA, 19 nt, Artificial Sequence
  Description of Artificial Sequence: Synthetic oligonucleotide
uacuuuacagguccgaacc

SEQ ID NO: 2168617 - RNA, 19 nt, Artificial Sequence
  Description of Artificial Sequence: Synthetic oligonucleotide
aaaccaugcagaauucucc

SEQ ID NO: 2168618 - RNA, 19 nt, Artificial Sequence
  Description of Artificial Sequence: Synthetic oligonucleotide
uucacgaaggucucggucg

SEQ ID NO: 2168619 - RNA, 19 nt, Artificial Sequence
  Description of Artificial Sequence: Synthetic oligonucleotide
ugaaauuaggaacuucaga

SEQ ID NO: 2168620 - RNA, 19 nt, Artificial Sequence
  Description of Artificial Sequence: Synthetic oligonucleotide
aguggggacauuuauuagg

SEQ ID NO: 2168621 - RNA, 19 nt, Artificial Sequence
  Description of Artificial Sequence: Synthetic oligonucleotide
uguauagugucagacaacc

SEQ ID NO: 2168622 - RNA, 19 nt, Artificial Sequence
  Description of Artificial Sequence: Synthetic oligonucleotide
uuugucugcuacuuuacag

SEQ ID NO: 2168623 - RNA, 19 nt, Artificial Sequence
  Description of Artificial Sequence: Synthetic oligonucleotide
uugucugcuacuuuacagg

SEQ ID NO: 2168624 - RNA, 19 nt, Artificial Sequence
  Description of Artificial Sequence: Synthetic oligonucleotide
cacaaugaagauaagguuc

SEQ ID NO: 2168625 - RNA, 19 nt, Artificial Sequence
  Description of Artificial Sequence: Synthetic oligonucleotide
uuuacagguccgaaccucg

SEQ ID NO: 2168626 - RNA, 19 nt, Artificial Sequence
  Description of Artificial Sequence: Synthetic oligonucleotide
gauaauguccccaggcugg

SEQ ID NO: 2168627 - RNA, 19 nt, Artificial Sequence
  Description of Artificial Sequence: Synthetic oligonucleotide
ugucagacaaccuuugaac

SEQ ID NO: 2168628 - RNA, 19 nt, Artificial Sequence
  Description of Artificial Sequence: Synthetic oligonucleotide
uauagugucagacaaccuu

SEQ ID NO: 2168629 - RNA, 19 nt, Artificial Sequence
  Description of Artificial Sequence: Synthetic oligonucleotide
uucuccaaucuucuguagg

SEQ ID NO: 2168630 - RNA, 19 nt, Artificial Sequence
  Description of Artificial Sequence: Synthetic oligonucleotide
aguguauagugucagacaa

SEQ ID NO: 2168631 - RNA, 19 nt, Artificial Sequence
  Description of Artificial Sequence: Synthetic oligonucleotide
aaucuucuguaggucaccc

SEQ ID NO: 2168632 - RNA, 19 nt, Artificial Sequence
  Description of Artificial Sequence: Synthetic oligonucleotide
cucugcaccgauuuguugg

SEQ ID NO: 2168633 - RNA, 19 nt, Artificial Sequence
  Description of Artificial Sequence: Synthetic oligonucleotide
caaccuuugaacacugagg

SEQ ID NO: 2168634 - RNA, 19 nt, Artificial Sequence
  Description of Artificial Sequence: Synthetic oligonucleotide
aaacagacugucuuuucca

SEQ ID NO: 2168635 - RNA, 19 nt, Artificial Sequence
  Description of Artificial Sequence: Synthetic oligonucleotide
acagguccgaaccucgugc

SEQ ID NO: 2168636 - RNA, 19 nt, Artificial Sequence
  Description of Artificial Sequence: Synthetic oligonucleotide
guuugguuggcuucgagug

SEQ ID NO: 2168637 - RNA, 19 nt, Artificial Sequence
  Description of Artificial Sequence: Synthetic oligonucleotide
acaaccuuugaacacugag

SEQ ID NO: 2168638 - RNA, 19 nt, Artificial Sequence
  Description of Artificial Sequence: Synthetic oligonucleotide
auuuauuaggaaggagacc

SEQ ID NO: 2168639 - RNA, 19 nt, Artificial Sequence
  Description of Artificial Sequence: Synthetic oligonucleotide
uaagguucagauucuugag

SEQ ID NO: 2168640 - RNA, 19 nt, Artificial Sequence
  Description of Artificial Sequence: Synthetic oligonucleotide
auauccuucacgaaggucu

SEQ ID NO: 2168641 - RNA, 19 nt, Artificial Sequence
  Description of Artificial Sequence: Synthetic oligonucleotide
uuggcuucgagugauucgg

SEQ ID NO: 2168642 - RNA, 19 nt, Artificial Sequence
  Description of Artificial Sequence: Synthetic oligonucleotide
ugaggcauacccuuuggug

SEQ ID NO: 2168643 - RNA, 19 nt, Artificial Sequence
  Description of Artificial Sequence: Synthetic oligonucleotide
aauucuccaaucuucugua

SEQ ID NO: 2168644 - RNA, 19 nt, Artificial Sequence
  Description of Artificial Sequence: Synthetic oligonucleotide
uguuauacucuggauuggg

SEQ ID NO: 2168645 - RNA, 19 nt, Artificial Sequence
  Description of Artificial Sequence: Synthetic oligonucleotide
ucuuugccguuacugacag

SEQ ID NO: 2168646 - RNA, 19 nt, Artificial Sequence
  Description of Artificial Sequence: Synthetic oligonucleotide
uuuguugggugccugcuga

SEQ ID NO: 2168647 - RNA, 19 nt, Artificial Sequence
  Description of Artificial Sequence: Synthetic oligonucleotide
caaacagacugucuuuucc

SEQ ID NO: 2168648 - RNA, 19 nt, Artificial Sequence
  Description of Artificial Sequence: Synthetic oligonucleotide
gaaggagacccuccuaucc

SEQ ID NO: 2168649 - RNA, 19 nt, Artificial Sequence
  Description of Artificial Sequence: Synthetic oligonucleotide
aaccaugcagaauucucca

SEQ ID NO: 2168650 - RNA, 19 nt, Artificial Sequence
  Description of Artificial Sequence: Synthetic oligonucleotide
ucagacaaccuuugaacac

SEQ ID NO: 2168651 - RNA, 19 nt, Artificial Sequence
  Description of Artificial Sequence: Synthetic oligonucleotide
agauucuugagcccgggcu

SEQ ID NO: 2168652 - RNA, 19 nt, Artificial Sequence
  Description of Artificial Sequence: Synthetic oligonucleotide
uccaaucuucuguagguca

SEQ ID NO: 2168653 - RNA, 19 nt, Artificial Sequence
  Description of Artificial Sequence: Synthetic oligonucleotide
ucuggauugggcucgcuga

SEQ ID NO: 2168654 - RNA, 19 nt, Artificial Sequence
  Description of Artificial Sequence: Synthetic oligonucleotide
cuucgagugauucgggugc

SEQ ID NO: 2168655 - RNA, 19 nt, Artificial Sequence
  Description of Artificial Sequence: Synthetic oligonucleotide
ucggucgucaugcuucccg

SEQ ID NO: 2168656 - RNA, 19 nt, Artificial Sequence
  Description of Artificial Sequence: Synthetic oligonucleotide
gggacauuuauuaggaagg

SEQ ID NO: 2168657 - RNA, 19 nt, Artificial Sequence
  Description of Artificial Sequence: Synthetic oligonucleotide
cugaaauuaggaacuucag

SEQ ID NO: 2168658 - RNA, 19 nt, Artificial Sequence
  Description of Artificial Sequence: Synthetic oligonucleotide
uuugaguggggacauuuau

SEQ ID NO: 2168659 - RNA, 19 nt, Artificial Sequence
  Description of Artificial Sequence: Synthetic oligonucleotide
auuaggaaggagacccucc

SEQ ID NO: 2168660 - RNA, 19 nt, Artificial Sequence
  Description of Artificial Sequence: Synthetic oligonucleotide
gaggcauacccuuugguga

SEQ ID NO: 2168661 - RNA, 19 nt, Artificial Sequence
  Description of Artificial Sequence: Synthetic oligonucleotide
ucugcaccgauuuguuggg

SEQ ID NO: 2168662 - RNA, 19 nt, Artificial Sequence
  Description of Artificial Sequence: Synthetic oligonucleotide
augugaggcagugugagag

SEQ ID NO: 2168663 - RNA, 19 nt, Artificial Sequence
  Description of Artificial Sequence: Synthetic oligonucleotide
uucuuugccguuacugaca

SEQ ID NO: 2168664 - RNA, 19 nt, Artificial Sequence
  Description of Artificial Sequence: Synthetic oligonucleotide
acggccaguguauaguguc

SEQ ID NO: 2168665 - RNA, 19 nt, Artificial Sequence
  Description of Artificial Sequence: Synthetic oligonucleotide
uuaggaaggagacccuccu

SEQ ID NO: 2168666 - RNA, 19 nt, Artificial Sequence
  Description of Artificial Sequence: Synthetic oligonucleotide
ucgucaugcuucccgaacc

SEQ ID NO: 2168667 - RNA, 19 nt, Artificial Sequence
  Description of Artificial Sequence: Synthetic oligonucleotide
acaaacagacugucuuuuc

SEQ ID NO: 2168668 - RNA, 19 nt, Artificial Sequence
  Description of Artificial Sequence: Synthetic oligonucleotide
ugucugcuacuuuacaggu

SEQ ID NO: 2168669 - RNA, 19 nt, Artificial Sequence
  Description of Artificial Sequence: Synthetic oligonucleotide
auacccuuuggugagucgg

SEQ ID NO: 2168670 - RNA, 19 nt, Artificial Sequence
  Description of Artificial Sequence: Synthetic oligonucleotide
ucaugcuucccgaaccgug

SEQ ID NO: 2168671 - RNA, 19 nt, Artificial Sequence
  Description of Artificial Sequence: Synthetic oligonucleotide
acaaugaagauaagguuca

SEQ ID NO: 2168672 - RNA, 19 nt, Artificial Sequence
  Description of Artificial Sequence: Synthetic oligonucleotide
caugcuucccgaaccgugg

SEQ ID NO: 2168673 - RNA, 19 nt, Artificial Sequence
  Description of Artificial Sequence: Synthetic oligonucleotide
ugcugaguguuauacucug

SEQ ID NO: 2168674 - RNA, 19 nt, Artificial Sequence
  Description of Artificial Sequence: Synthetic oligonucleotide
uaggaacuucagaauaaac

SEQ ID NO: 2168675 - RNA, 19 nt, Artificial Sequence
  Description of Artificial Sequence: Synthetic oligonucleotide
guuggcuucgagugauucg

SEQ ID NO: 2168676 - RNA, 19 nt, Artificial Sequence
  Description of Artificial Sequence: Synthetic oligonucleotide
cuuugucuuugucacucgg

SEQ ID NO: 2168677 - RNA, 19 nt, Artificial Sequence
  Description of Artificial Sequence: Synthetic oligonucleotide
gacugucuuuuccagagga

SEQ ID NO: 2168678 - RNA, 19 nt, Artificial Sequence
  Description of Artificial Sequence: Synthetic oligonucleotide
acugucuuguucucgggca

SEQ ID NO: 2168679 - RNA, 19 nt, Artificial Sequence
  Description of Artificial Sequence: Synthetic oligonucleotide
cagcacaaugaagauaagg

SEQ ID NO: 2168680 - RNA, 19 nt, Artificial Sequence
  Description of Artificial Sequence: Synthetic oligonucleotide
aaccguggcaccccgccag

SEQ ID NO: 2168681 - RNA, 19 nt, Artificial Sequence
  Description of Artificial Sequence: Synthetic oligonucleotide
agucggauaauguccccag

SEQ ID NO: 2168682 - RNA, 19 nt, Artificial Sequence
  Description of Artificial Sequence: Synthetic oligonucleotide
uuugguuggcuucgaguga

SEQ ID NO: 2168683 - RNA, 19 nt, Artificial Sequence
  Description of Artificial Sequence: Synthetic oligonucleotide
cuacuuuacagguccgaac

SEQ ID NO: 2168684 - RNA, 19 nt, Artificial Sequence
  Description of Artificial Sequence: Synthetic oligonucleotide
gacaggcaacgucagcagg

SEQ ID NO: 2168685 - RNA, 19 nt, Artificial Sequence
  Description of Artificial Sequence: Synthetic oligonucleotide
ugaagauaagguucagauu

SEQ ID NO: 2168686 - RNA, 19 nt, Artificial Sequence
  Description of Artificial Sequence: Synthetic oligonucleotide
ugcagaauucuccaaucuu

SEQ ID NO: 2168687 - RNA, 19 nt, Artificial Sequence
  Description of Artificial Sequence: Synthetic oligonucleotide
uccuucacgaaggucucgg

SEQ ID NO: 2168688 - RNA, 19 nt, Artificial Sequence
  Description of Artificial Sequence: Synthetic oligonucleotide
uugggcucgcugaaauuag

SEQ ID NO: 2168689 - RNA, 19 nt, Artificial Sequence
  Description of Artificial Sequence: Synthetic oligonucleotide
uuggugagucggauaaugu

SEQ ID NO: 2168690 - RNA, 19 nt, Artificial Sequence
  Description of Artificial Sequence: Synthetic oligonucleotide
aauguccccaggcuggaua

SEQ ID NO: 2168691 - RNA, 19 nt, Artificial Sequence
  Description of Artificial Sequence: Synthetic oligonucleotide
acaagcuacuccacccucc

SEQ ID NO: 2168692 - RNA, 19 nt, Artificial Sequence
  Description of Artificial Sequence: Synthetic oligonucleotide
ggugagucggauaaugucc

SEQ ID NO: 2168693 - RNA, 19 nt, Artificial Sequence
  Description of Artificial Sequence: Synthetic oligonucleotide
aggcauacccuuuggugag

SEQ ID NO: 2168694 - RNA, 19 nt, Artificial Sequence
  Description of Artificial Sequence: Synthetic oligonucleotide
uggucgugguggaagggag

SEQ ID NO: 2168695 - RNA, 19 nt, Artificial Sequence
  Description of Artificial Sequence: Synthetic oligonucleotide
uugagcccgggcuugauau

SEQ ID NO: 2168696 - RNA, 19 nt, Artificial Sequence
  Description of Artificial Sequence: Synthetic oligonucleotide
auacucuggauugggcucg

SEQ ID NO: 2168697 - RNA, 19 nt, Artificial Sequence
  Description of Artificial Sequence: Synthetic oligonucleotide
aggaaggagacccuccuau

SEQ ID NO: 2168698 - RNA, 19 nt, Artificial Sequence
  Description of Artificial Sequence: Synthetic oligonucleotide
aacgucagcaggacaagcu

SEQ ID NO: 2168699 - RNA, 19 nt, Artificial Sequence
  Description of Artificial Sequence: Synthetic oligonucleotide
gaguggggacauuuauuag

SEQ ID NO: 2168700 - RNA, 19 nt, Artificial Sequence
  Description of Artificial Sequence: Synthetic oligonucleotide
uccuuugucuuugucacuc

SEQ ID NO: 2168701 - RNA, 19 nt, Artificial Sequence
  Description of Artificial Sequence: Synthetic oligonucleotide
ugcaccgauuuguugggug

SEQ ID NO: 2168702 - RNA, 19 nt, Artificial Sequence
  Description of Artificial Sequence: Synthetic oligonucleotide
augcagaauucuccaaucu

SEQ ID NO: 2168703 - RNA, 19 nt, Artificial Sequence
  Description of Artificial Sequence: Synthetic oligonucleotide
ugggcucgcugaaauuagg

SEQ ID NO: 2168704 - RNA, 19 nt, Artificial Sequence
  Description of Artificial Sequence: Synthetic oligonucleotide
uggauaagguugcccacgu

SEQ ID NO: 2168705 - RNA, 19 nt, Artificial Sequence
  Description of Artificial Sequence: Synthetic oligonucleotide
ugaguguuauacucuggau

SEQ ID NO: 2168706 - RNA, 19 nt, Artificial Sequence
  Description of Artificial Sequence: Synthetic oligonucleotide
acuugucucuugcuaucuc

SEQ ID NO: 2168707 - RNA, 19 nt, Artificial Sequence
  Description of Artificial Sequence: Synthetic oligonucleotide
ucgggcagacaccuggucu

SEQ ID NO: 2168708 - RNA, 19 nt, Artificial Sequence
  Description of Artificial Sequence: Synthetic oligonucleotide
ucgucccacacugagauau

SEQ ID NO: 2168709 - RNA, 19 nt, Artificial Sequence
  Description of Artificial Sequence: Synthetic oligonucleotide
guugggugccugcugagug

SEQ ID NO: 2168710 - RNA, 19 nt, Artificial Sequence
  Description of Artificial Sequence: Synthetic oligonucleotide
aagauaagguucagauucu

SEQ ID NO: 2168711 - RNA, 19 nt, Artificial Sequence
  Description of Artificial Sequence: Synthetic oligonucleotide
uguucucgggcagacaccu

SEQ ID NO: 2168712 - RNA, 19 nt, Artificial Sequence
  Description of Artificial Sequence: Synthetic oligonucleotide
agggagaggacuugucucu

SEQ ID NO: 2168713 - RNA, 19 nt, Artificial Sequence
  Description of Artificial Sequence: Synthetic oligonucleotide
aggacuugucucuugcuau

SEQ ID NO: 2168714 - RNA, 19 nt, Artificial Sequence
  Description of Artificial Sequence: Synthetic oligonucleotide
ugauauccuucacgaaggu

SEQ ID NO: 2168715 - RNA, 19 nt, Artificial Sequence
  Description of Artificial Sequence: Synthetic oligonucleotide
cuggauaagguugcccacg

SEQ ID NO: 2168716 - RNA, 19 nt, Artificial Sequence
  Description of Artificial Sequence: Synthetic oligonucleotide
cagaauaaaccaugcagaa

SEQ ID NO: 2168717 - RNA, 19 nt, Artificial Sequence
  Description of Artificial Sequence: Synthetic oligonucleotide
ucccguuuuggcuuucaga

SEQ ID NO: 2168718 - RNA, 19 nt, Artificial Sequence
  Description of Artificial Sequence: Synthetic oligonucleotide
cugaguguuauacucugga

SEQ ID NO: 2168719 - RNA, 19 nt, Artificial Sequence
  Description of Artificial Sequence: Synthetic oligonucleotide
augcuucccgaaccguggc

SEQ ID NO: 2168720 - RNA, 19 nt, Artificial Sequence
  Description of Artificial Sequence: Synthetic oligonucleotide
uugaguggggacauuuauu

SEQ ID NO: 2168721 - RNA, 19 nt, Artificial Sequence
  Description of Artificial Sequence: Synthetic oligonucleotide
uuugucacucggccugucu

SEQ ID NO: 2168722 - RNA, 19 nt, Artificial Sequence
  Description of Artificial Sequence: Synthetic oligonucleotide
agcuacuccacccuccaau

SEQ ID NO: 2168723 - RNA, 19 nt, Artificial Sequence
  Description of Artificial Sequence: Synthetic oligonucleotide
ggcuugauauccuucacga

SEQ ID NO: 2168724 - RNA, 19 nt, Artificial Sequence
  Description of Artificial Sequence: Synthetic oligonucleotide
cguuuuggcuuucagaagc

SEQ ID NO: 2168725 - RNA, 19 nt, Artificial Sequence
  Description of Artificial Sequence: Synthetic oligonucleotide
gcucgcugaaauuaggaac

SEQ ID NO: 2168726 - RNA, 19 nt, Artificial Sequence
  Description of Artificial Sequence: Synthetic oligonucleotide
acuuuacagguccgaaccu

SEQ ID NO: 2168727 - RNA, 19 nt, Artificial Sequence
  Description of Artificial Sequence: Synthetic oligonucleotide
ugcccguuuugucugcuac

SEQ ID NO: 2168728 - RNA, 19 nt, Artificial Sequence
  Description of Artificial Sequence: Synthetic oligonucleotide
cagugugagagggaugggg

SEQ ID NO: 2168729 - RNA, 19 nt, Artificial Sequence
  Description of Artificial Sequence: Synthetic oligonucleotide
uuguucucgggcagacacc

SEQ ID NO: 2168730 - RNA, 19 nt, Artificial Sequence
  Description of Artificial Sequence: Synthetic oligonucleotide
caccccgccagccagcagg

SEQ ID NO: 2168731 - RNA, 19 nt, Artificial Sequence
  Description of Artificial Sequence: Synthetic oligonucleotide
acagacugucuuuuccaga

SEQ ID NO: 2168732 - RNA, 19 nt, Artificial Sequence
  Description of Artificial Sequence: Synthetic oligonucleotide
gaguguuauacucuggauu

SEQ ID NO: 2168733 - RNA, 19 nt, Artificial Sequence
  Description of Artificial Sequence: Synthetic oligonucleotide
gugagucggauaauguccc

SEQ ID NO: 2168734 - RNA, 19 nt, Artificial Sequence
  Description of Artificial Sequence: Synthetic oligonucleotide
agacugucuuguucucggg

SEQ ID NO: 2168735 - RNA, 19 nt, Artificial Sequence
  Description of Artificial Sequence: Synthetic oligonucleotide
agguccgaaccucgugccc

SEQ ID NO: 2168736 - RNA, 19 nt, Artificial Sequence
  Description of Artificial Sequence: Synthetic oligonucleotide
cucgcugaaauuaggaacu

SEQ ID NO: 2168737 - RNA, 19 nt, Artificial Sequence
  Description of Artificial Sequence: Synthetic oligonucleotide
gggcuugauauccuucacg

SEQ ID NO: 2168738 - RNA, 19 nt, Artificial Sequence
  Description of Artificial Sequence: Synthetic oligonucleotide
agauauugaugcugcccgu

SEQ ID NO: 2168739 - RNA, 19 nt, Artificial Sequence
  Description of Artificial Sequence: Synthetic oligonucleotide
gucuggucgugguggaagg

SEQ ID NO: 2168740 - RNA, 19 nt, Artificial Sequence
  Description of Artificial Sequence: Synthetic oligonucleotide
uccaaucucaaggccagaa

SEQ ID NO: 2168741 - RNA, 19 nt, Artificial Sequence
  Description of Artificial Sequence: Synthetic oligonucleotide
ccugcugaguguuauacuc

SEQ ID NO: 2168742 - RNA, 19 nt, Artificial Sequence
  Description of Artificial Sequence: Synthetic oligonucleotide
ugccguuacugacaggguu

SEQ ID NO: 2168743 - RNA, 19 nt, Artificial Sequence
  Description of Artificial Sequence: Synthetic oligonucleotide
ugguccguucccguuuugg

SEQ ID NO: 2168744 - RNA, 19 nt, Artificial Sequence
  Description of Artificial Sequence: Synthetic oligonucleotide
auugggcucgcugaaauua

SEQ ID NO: 2168745 - RNA, 19 nt, Artificial Sequence
  Description of Artificial Sequence: Synthetic oligonucleotide
uucccguuuuggcuuucag

SEQ ID NO: 2168746 - RNA, 19 nt, Artificial Sequence
  Description of Artificial Sequence: Synthetic oligonucleotide
cauacccuuuggugagucg

SEQ ID NO: 2168747 - RNA, 19 nt, Artificial Sequence
  Description of Artificial Sequence: Synthetic oligonucleotide
cugcugucacucugcaccg

SEQ ID NO: 2168748 - RNA, 19 nt, Artificial Sequence
  Description of Artificial Sequence: Synthetic oligonucleotide
cacgucgucccacacugag

SEQ ID NO: 2168749 - RNA, 19 nt, Artificial Sequence
  Description of Artificial Sequence: Synthetic oligonucleotide
ggcgggacugugcacaccg

SEQ ID NO: 2168750 - RNA, 19 nt, Artificial Sequence
  Description of Artificial Sequence: Synthetic oligonucleotide
uuugaacacugaggcauac

SEQ ID NO: 2168751 - RNA, 19 nt, Artificial Sequence
  Description of Artificial Sequence: Synthetic oligonucleotide
ugccugcugaguguuauac

SEQ ID NO: 2168752 - RNA, 19 nt, Artificial Sequence
  Description of Artificial Sequence: Synthetic oligonucleotide
cuuuacagguccgaaccuc

SEQ ID NO: 2168753 - RNA, 19 nt, Artificial Sequence
  Description of Artificial Sequence: Synthetic oligonucleotide
gaaggucucggucgucaug

SEQ ID NO: 2168754 - RNA, 19 nt, Artificial Sequence
  Description of Artificial Sequence: Synthetic oligonucleotide
ugugugguuugguuggcuu

SEQ ID NO: 2168755 - RNA, 19 nt, Artificial Sequence
  Description of Artificial Sequence: Synthetic oligonucleotide
ucacgaaggucucggucgu

SEQ ID NO: 2168756 - RNA, 19 nt, Artificial Sequence
  Description of Artificial Sequence: Synthetic oligonucleotide
ugguuugguuggcuucgag

SEQ ID NO: 2168757 - RNA, 19 nt, Artificial Sequence
  Description of Artificial Sequence: Synthetic oligonucleotide
gucggauaauguccccagg

SEQ ID NO: 2168758 - RNA, 19 nt, Artificial Sequence
  Description of Artificial Sequence: Synthetic oligonucleotide
gugucagacaaccuuugaa

SEQ ID NO: 2168759 - RNA, 19 nt, Artificial Sequence
  Description of Artificial Sequence: Synthetic oligonucleotide
gauauccuucacgaagguc

SEQ ID NO: 2168760 - RNA, 19 nt, Artificial Sequence
  Description of Artificial Sequence: Synthetic oligonucleotide
guguuauacucuggauugg

SEQ ID NO: 2168761 - RNA, 19 nt, Artificial Sequence
  Description of Artificial Sequence: Synthetic oligonucleotide
auagugucagacaaccuuu

SEQ ID NO: 2168762 - RNA, 19 nt, Artificial Sequence
  Description of Artificial Sequence: Synthetic oligonucleotide
gggcaugugaggcagugug

SEQ ID NO: 2168763 - RNA, 19 nt, Artificial Sequence
  Description of Artificial Sequence: Synthetic oligonucleotide
uccguucccguuuuggcuu

SEQ ID NO: 2168764 - RNA, 19 nt, Artificial Sequence
  Description of Artificial Sequence: Synthetic oligonucleotide
uacccuuuggugagucgga

SEQ ID NO: 2168765 - RNA, 19 nt, Artificial Sequence
  Description of Artificial Sequence: Synthetic oligonucleotide
caguguauagugucagaca

SEQ ID NO: 2168766 - RNA, 19 nt, Artificial Sequence
  Description of Artificial Sequence: Synthetic oligonucleotide
ugagucggauaaugucccc

SEQ ID NO: 2168767 - RNA, 19 nt, Artificial Sequence
  Description of Artificial Sequence: Synthetic oligonucleotide
auauugaugcugcccguuu

SEQ ID NO: 2168768 - RNA, 19 nt, Artificial Sequence
  Description of Artificial Sequence: Synthetic oligonucleotide
uuacagguccgaaccucgu

SEQ ID NO: 2168769 - RNA, 19 nt, Artificial Sequence
  Description of Artificial Sequence: Synthetic oligonucleotide
gaggacuugucucuugcua

SEQ ID NO: 2168770 - RNA, 19 nt, Artificial Sequence
  Description of Artificial Sequence: Synthetic oligonucleotide
accuuugaacacugaggca

SEQ ID NO: 2168771 - RNA, 19 nt, Artificial Sequence
  Description of Artificial Sequence: Synthetic oligonucleotide
auaagguugcccacgucgu

SEQ ID NO: 2168772 - RNA, 19 nt, Artificial Sequence
  Description of Artificial Sequence: Synthetic oligonucleotide
ucucggucgucaugcuucc

SEQ ID NO: 2168773 - RNA, 19 nt, Artificial Sequence
  Description of Artificial Sequence: Synthetic oligonucleotide
gucgugguggaagggagag

SEQ ID NO: 2168774 - RNA, 19 nt, Artificial Sequence
  Description of Artificial Sequence: Synthetic oligonucleotide
ucuggucgugguggaaggg

SEQ ID NO: 2168775 - RNA, 19 nt, Artificial Sequence
  Description of Artificial Sequence: Synthetic oligonucleotide
agcccaguaggagacuguc

SEQ ID NO: 2168776 - RNA, 19 nt, Artificial Sequence
  Description of Artificial Sequence: Synthetic oligonucleotide
guggggacauuuauuagga

SEQ ID NO: 2168777 - RNA, 19 nt, Artificial Sequence
  Description of Artificial Sequence: Synthetic oligonucleotide
gugcacaccgccaagccac

SEQ ID NO: 2168778 - RNA, 19 nt, Artificial Sequence
  Description of Artificial Sequence: Synthetic oligonucleotide
acucugcaccgauuuguug

SEQ ID NO: 2168779 - RNA, 19 nt, Artificial Sequence
  Description of Artificial Sequence: Synthetic oligonucleotide
ugaggcagugugagaggga

SEQ ID NO: 2168780 - RNA, 19 nt, Artificial Sequence
  Description of Artificial Sequence: Synthetic oligonucleotide
agcaggagguccuguggug

SEQ ID NO: 2168781 - RNA, 19 nt, Artificial Sequence
  Description of Artificial Sequence: Synthetic oligonucleotide
uaagguugcccacgucguc

SEQ ID NO: 2168782 - RNA, 19 nt, Artificial Sequence
  Description of Artificial Sequence: Synthetic oligonucleotide
uugguuggcuucgagugau

SEQ ID NO: 2168783 - RNA, 19 nt, Artificial Sequence
  Description of Artificial Sequence: Synthetic oligonucleotide
augcugcccguuuugucug

SEQ ID NO: 2168784 - RNA, 19 nt, Artificial Sequence
  Description of Artificial Sequence: Synthetic oligonucleotide
cacaccgccaagccacccg

SEQ ID NO: 2168785 - RNA, 19 nt, Artificial Sequence
  Description of Artificial Sequence: Synthetic oligonucleotide
cagguccgaaccucgugcc

SEQ ID NO: 2168786 - RNA, 19 nt, Artificial Sequence
  Description of Artificial Sequence: Synthetic oligonucleotide
ugcuacuuuacagguccga

SEQ ID NO: 2168787 - RNA, 19 nt, Artificial Sequence
  Description of Artificial Sequence: Synthetic oligonucleotide
gucgucaugcuucccgaac

SEQ ID NO: 2168788 - RNA, 19 nt, Artificial Sequence
  Description of Artificial Sequence: Synthetic oligonucleotide
gcuucgagugauucgggug

SEQ ID NO: 2168789 - RNA, 19 nt, Artificial Sequence
  Description of Artificial Sequence: Synthetic oligonucleotide
gguucagauucuugagccc

SEQ ID NO: 2168790 - RNA, 19 nt, Artificial Sequence
  Description of Artificial Sequence: Synthetic oligonucleotide
gucucggucgucaugcuuc

SEQ ID NO: 2168791 - RNA, 19 nt, Artificial Sequence
  Description of Artificial Sequence: Synthetic oligonucleotide
uugggugccugcugagugu

SEQ ID NO: 2168792 - RNA, 19 nt, Artificial Sequence
  Description of Artificial Sequence: Synthetic oligonucleotide
cacugaggcauacccuuug

SEQ ID NO: 2168793 - RNA, 19 nt, Artificial Sequence
  Description of Artificial Sequence: Synthetic oligonucleotide
ggugcuugguccguucccg

SEQ ID NO: 2168794 - RNA, 19 nt, Artificial Sequence
  Description of Artificial Sequence: Synthetic oligonucleotide
cugcuacuuuacagguccg

SEQ ID NO: 2168795 - RNA, 19 nt, Artificial Sequence
  Description of Artificial Sequence: Synthetic oligonucleotide
gcuccugcggguuucuuug

SEQ ID NO: 2168796 - RNA, 19 nt, Artificial Sequence
  Description of Artificial Sequence: Synthetic oligonucleotide
acgucagcaggacaagcua

SEQ ID NO: 2168797 - RNA, 19 nt, Artificial Sequence
  Description of Artificial Sequence: Synthetic oligonucleotide
accgccaagccacccgcag

SEQ ID NO: 2168798 - RNA, 19 nt, Artificial Sequence
  Description of Artificial Sequence: Synthetic oligonucleotide
cagaauucuccaaucuucu

SEQ ID NO: 2168799 - RNA, 19 nt, Artificial Sequence
  Description of Artificial Sequence: Synthetic oligonucleotide
uugaugcugcccguuuugu

SEQ ID NO: 2168800 - RNA, 19 nt, Artificial Sequence
  Description of Artificial Sequence: Synthetic oligonucleotide
cagauucuugagcccgggc

SEQ ID NO: 2168801 - RNA, 19 nt, Artificial Sequence
  Description of Artificial Sequence: Synthetic oligonucleotide
cccguuuuggcuuucagaa

SEQ ID NO: 2168802 - RNA, 19 nt, Artificial Sequence
  Description of Artificial Sequence: Synthetic oligonucleotide
ccaguguauagugucagac

SEQ ID NO: 2168803 - RNA, 19 nt, Artificial Sequence
  Description of Artificial Sequence: Synthetic oligonucleotide
gagucggauaaugucccca

SEQ ID NO: 2168804 - RNA, 19 nt, Artificial Sequence
  Description of Artificial Sequence: Synthetic oligonucleotide
agacaccuggucuggucgu

SEQ ID NO: 2168805 - RNA, 19 nt, Artificial Sequence
  Description of Artificial Sequence: Synthetic oligonucleotide
agacaaccuuugaacacug

SEQ ID NO: 2168806 - RNA, 19 nt, Artificial Sequence
  Description of Artificial Sequence: Synthetic oligonucleotide
gguccgaaccucgugcccg

SEQ ID NO: 2168807 - RNA, 19 nt, Artificial Sequence
  Description of Artificial Sequence: Synthetic oligonucleotide
gcaccgauuuguugggugc

SEQ ID NO: 2168808 - RNA, 19 nt, Artificial Sequence
  Description of Artificial Sequence: Synthetic oligonucleotide
uucccgaaccguggcaccc

SEQ ID NO: 2168809 - RNA, 19 nt, Artificial Sequence
  Description of Artificial Sequence: Synthetic oligonucleotide
accguggcaccccgccagc

SEQ ID NO: 2168810 - RNA, 19 nt, Artificial Sequence
  Description of Artificial Sequence: Synthetic oligonucleotide
uaggaaggagacccuccua

SEQ ID NO: 2168811 - RNA, 19 nt, Artificial Sequence
  Description of Artificial Sequence: Synthetic oligonucleotide
gguccguucccguuuuggc

SEQ ID NO: 2168812 - RNA, 19 nt, Artificial Sequence
  Description of Artificial Sequence: Synthetic oligonucleotide
uugccguuacugacagggu

SEQ ID NO: 2168813 - RNA, 19 nt, Artificial Sequence
  Description of Artificial Sequence: Synthetic oligonucleotide
caacgucagcaggacaagc

SEQ ID NO: 2168814 - RNA, 19 nt, Artificial Sequence
  Description of Artificial Sequence: Synthetic oligonucleotide
ugcacaccgccaagccacc

SEQ ID NO: 2168815 - RNA, 19 nt, Artificial Sequence
  Description of Artificial Sequence: Synthetic oligonucleotide
uacugacaggguugcugga

SEQ ID NO: 2168816 - RNA, 19 nt, Artificial Sequence
  Description of Artificial Sequence: Synthetic oligonucleotide
caggguugcuggaggggcc

SEQ ID NO: 2168817 - RNA, 19 nt, Artificial Sequence
  Description of Artificial Sequence: Synthetic oligonucleotide
gggacaggcaacgucagca

SEQ ID NO: 2168818 - RNA, 19 nt, Artificial Sequence
  Description of Artificial Sequence: Synthetic oligonucleotide
guguauagugucagacaac

SEQ ID NO: 2168819 - RNA, 19 nt, Artificial Sequence
  Description of Artificial Sequence: Synthetic oligonucleotide
uggggacauuuauuaggaa

SEQ ID NO: 2168820 - RNA, 19 nt, Artificial Sequence
  Description of Artificial Sequence: Synthetic oligonucleotide
uguugggugccugcugagu

SEQ ID NO: 2168821 - RNA, 19 nt, Artificial Sequence
  Description of Artificial Sequence: Synthetic oligonucleotide
guccugugguggcuugagg

SEQ ID NO: 2168822 - RNA, 19 nt, Artificial Sequence
  Description of Artificial Sequence: Synthetic oligonucleotide
guggcaccccgccagccag

SEQ ID NO: 2168823 - RNA, 19 nt, Artificial Sequence
  Description of Artificial Sequence: Synthetic oligonucleotide
aguaggagacugucuuguu

SEQ ID NO: 2168824 - RNA, 19 nt, Artificial Sequence
  Description of Artificial Sequence: Synthetic oligonucleotide
ccgguugggugcuuggucc

SEQ ID NO: 2168825 - RNA, 19 nt, Artificial Sequence
  Description of Artificial Sequence: Synthetic oligonucleotide
gaaggugugugguuugguu

SEQ ID NO: 2168826 - RNA, 19 nt, Artificial Sequence
  Description of Artificial Sequence: Synthetic oligonucleotide
ccaaucucaaggccagaag

SEQ ID NO: 2168827 - RNA, 19 nt, Artificial Sequence
  Description of Artificial Sequence: Synthetic oligonucleotide
ugcccguccuuugucuuug

SEQ ID NO: 2168828 - RNA, 19 nt, Artificial Sequence
  Description of Artificial Sequence: Synthetic oligonucleotide
caccgauuuguugggugcc

SEQ ID NO: 2168829 - RNA, 19 nt, Artificial Sequence
  Description of Artificial Sequence: Synthetic oligonucleotide
caagcuacuccacccucca

SEQ ID NO: 2168830 - RNA, 19 nt, Artificial Sequence
  Description of Artificial Sequence: Synthetic oligonucleotide
auaauguccccaggcugga

SEQ ID NO: 2168831 - RNA, 19 nt, Artificial Sequence
  Description of Artificial Sequence: Synthetic oligonucleotide
cuuugccguuacugacagg

SEQ ID NO: 2168832 - RNA, 19 nt, Artificial Sequence
  Description of Artificial Sequence: Synthetic oligonucleotide
cuccaaucuucuguagguc

SEQ ID NO: 2168833 - RNA, 19 nt, Artificial Sequence
  Description of Artificial Sequence: Synthetic oligonucleotide
ggucuggucgugguggaag

SEQ ID NO: 2168834 - RNA, 19 nt, Artificial Sequence
  Description of Artificial Sequence: Synthetic oligonucleotide
ucuuguucucgggcagaca

SEQ ID NO: 2168835 - RNA, 19 nt, Artificial Sequence
  Description of Artificial Sequence: Synthetic oligonucleotide
ggcaacgucagcaggacaa

SEQ ID NO: 2168836 - RNA, 19 nt, Artificial Sequence
  Description of Artificial Sequence: Synthetic oligonucleotide
agaaggugugugguuuggu

SEQ ID NO: 2168837 - RNA, 19 nt, Artificial Sequence
  Description of Artificial Sequence: Synthetic oligonucleotide
uucgagugauucgggugcu

SEQ ID NO: 2168838 - RNA, 19 nt, Artificial Sequence
  Description of Artificial Sequence: Synthetic oligonucleotide
ccuuuggugagucggauaa

SEQ ID NO: 2168839 - RNA, 19 nt, Artificial Sequence
  Description of Artificial Sequence: Synthetic oligonucleotide
auccuucacgaaggucucg

SEQ ID NO: 2168840 - RNA, 19 nt, Artificial Sequence
  Description of Artificial Sequence: Synthetic oligonucleotide
cccacgucgucccacacug

SEQ ID NO: 2168841 - RNA, 19 nt, Artificial Sequence
  Description of Artificial Sequence: Synthetic oligonucleotide
ccugcggguuucuuugccg

SEQ ID NO: 2168842 - RNA, 19 nt, Artificial Sequence
  Description of Artificial Sequence: Synthetic oligonucleotide
gauuuguugggugccugcu

SEQ ID NO: 2168843 - RNA, 19 nt, Artificial Sequence
  Description of Artificial Sequence: Synthetic oligonucleotide
aagcuacuccacccuccaa

SEQ ID NO: 2168844 - RNA, 19 nt, Artificial Sequence
  Description of Artificial Sequence: Synthetic oligonucleotide
ggacauuuauuaggaagga

SEQ ID NO: 2168845 - RNA, 19 nt, Artificial Sequence
  Description of Artificial Sequence: Synthetic oligonucleotide
gcuacuccacccuccaauc

SEQ ID NO: 2168846 - RNA, 19 nt, Artificial Sequence
  Description of Artificial Sequence: Synthetic oligonucleotide
gagguccugugguggcuug

SEQ ID NO: 2168847 - RNA, 19 nt, Artificial Sequence
  Description of Artificial Sequence: Synthetic oligonucleotide
ccuuugucuuugucacucg

SEQ ID NO: 2168848 - RNA, 19 nt, Artificial Sequence
  Description of Artificial Sequence: Synthetic oligonucleotide
gccguuacugacaggguug

SEQ ID NO: 2168849 - RNA, 19 nt, Artificial Sequence
  Description of Artificial Sequence: Synthetic oligonucleotide
uugggugcuugguccguuc

SEQ ID NO: 2168850 - RNA, 19 nt, Artificial Sequence
  Description of Artificial Sequence: Synthetic oligonucleotide
gcugaguguuauacucugg

SEQ ID NO: 2168851 - RNA, 19 nt, Artificial Sequence
  Description of Artificial Sequence: Synthetic oligonucleotide
ggacuugucucuugcuauc

SEQ ID NO: 2168852 - RNA, 19 nt, Artificial Sequence
  Description of Artificial Sequence: Synthetic oligonucleotide
ggaaggagacccuccuauc

SEQ ID NO: 2168853 - RNA, 19 nt, Artificial Sequence
  Description of Artificial Sequence: Synthetic oligonucleotide
aaccucgugcccguccuuu

SEQ ID NO: 2168854 - RNA, 19 nt, Artificial Sequence
  Description of Artificial Sequence: Synthetic oligonucleotide
acugucuuuuccagaggaa

SEQ ID NO: 2168855 - RNA, 19 nt, Artificial Sequence
  Description of Artificial Sequence: Synthetic oligonucleotide
ggccaguguauagugucag

SEQ ID NO: 2168856 - RNA, 19 nt, Artificial Sequence
  Description of Artificial Sequence: Synthetic oligonucleotide
aagcccaguaggagacugu

SEQ ID NO: 2168857 - RNA, 19 nt, Artificial Sequence
  Description of Artificial Sequence: Synthetic oligonucleotide
cagacaaccuuugaacacu

SEQ ID NO: 2168858 - RNA, 19 nt, Artificial Sequence
  Description of Artificial Sequence: Synthetic oligonucleotide
accucgugcccguccuuug

SEQ ID NO: 2168859 - RNA, 19 nt, Artificial Sequence
  Description of Artificial Sequence: Synthetic oligonucleotide
ggcucgcugaaauuaggaa

SEQ ID NO: 2168860 - RNA, 19 nt, Artificial Sequence
  Description of Artificial Sequence: Synthetic oligonucleotide
ugcuugguccguucccguu

SEQ ID NO: 2168861 - RNA, 19 nt, Artificial Sequence
  Description of Artificial Sequence: Synthetic oligonucleotide
uggauugggcucgcugaaa

SEQ ID NO: 2168862 - RNA, 19 nt, Artificial Sequence
  Description of Artificial Sequence: Synthetic oligonucleotide
uugguccguucccguuuug

SEQ ID NO: 2168863 - RNA, 19 nt, Artificial Sequence
  Description of Artificial Sequence: Synthetic oligonucleotide
cucgugcccguccuuuguc

SEQ ID NO: 2168864 - RNA, 19 nt, Artificial Sequence
  Description of Artificial Sequence: Synthetic oligonucleotide
gaaccguggcaccccgcca

SEQ ID NO: 2168865 - RNA, 19 nt, Artificial Sequence
  Description of Artificial Sequence: Synthetic oligonucleotide
accgauuuguugggugccu

SEQ ID NO: 2168866 - RNA, 19 nt, Artificial Sequence
  Description of Artificial Sequence: Synthetic oligonucleotide
gaggcagugugagagggau

SEQ ID NO: 2168867 - RNA, 19 nt, Artificial Sequence
  Description of Artificial Sequence: Synthetic oligonucleotide
guccguucccguuuuggcu

SEQ ID NO: 2168868 - RNA, 19 nt, Artificial Sequence
  Description of Artificial Sequence: Synthetic oligonucleotide
gacaaccuuugaacacuga

SEQ ID NO: 2168869 - RNA, 19 nt, Artificial Sequence
  Description of Artificial Sequence: Synthetic oligonucleotide
ccguuuuggcuuucagaag

SEQ ID NO: 2168870 - RNA, 19 nt, Artificial Sequence
  Description of Artificial Sequence: Synthetic oligonucleotide
gcacaaugaagauaagguu

SEQ ID NO: 2168871 - RNA, 19 nt, Artificial Sequence
  Description of Artificial Sequence: Synthetic oligonucleotide
ucgagugauucgggugcug

SEQ ID NO: 2168872 - RNA, 19 nt, Artificial Sequence
  Description of Artificial Sequence: Synthetic oligonucleotide
cugcugaguguuauacucu

SEQ ID NO: 2168873 - RNA, 19 nt, Artificial Sequence
  Description of Artificial Sequence: Synthetic oligonucleotide
accccgccagccagcaggc

SEQ ID NO: 2168874 - RNA, 19 nt, Artificial Sequence
  Description of Artificial Sequence: Synthetic oligonucleotide
cccuccaaucucaaggcca

SEQ ID NO: 2168875 - RNA, 19 nt, Artificial Sequence
  Description of Artificial Sequence: Synthetic oligonucleotide
ucccgaaccguggcacccc

SEQ ID NO: 2168876 - RNA, 19 nt, Artificial Sequence
  Description of Artificial Sequence: Synthetic oligonucleotide
cuugagggguggcagggcu

SEQ ID NO: 2168877 - RNA, 19 nt, Artificial Sequence
  Description of Artificial Sequence: Synthetic oligonucleotide
ggcccuggaucccagggga

SEQ ID NO: 2168878 - RNA, 19 nt, Artificial Sequence
  Description of Artificial Sequence: Synthetic oligonucleotide
cuggucgugguggaaggga

SEQ ID NO: 2168879 - RNA, 19 nt, Artificial Sequence
  Description of Artificial Sequence: Synthetic oligonucleotide
uacucuggauugggcucgc

SEQ ID NO: 2168880 - RNA, 19 nt, Artificial Sequence
  Description of Artificial Sequence: Synthetic oligonucleotide
gggugcuugguccguuccc

SEQ ID NO: 2168881 - RNA, 19 nt, Artificial Sequence
  Description of Artificial Sequence: Synthetic oligonucleotide
cgucaugcuucccgaaccg

SEQ ID NO: 2168882 - RNA, 19 nt, Artificial Sequence
  Description of Artificial Sequence: Synthetic oligonucleotide
cuggauugggcucgcugaa

SEQ ID NO: 2168883 - RNA, 19 nt, Artificial Sequence
  Description of Artificial Sequence: Synthetic oligonucleotide
ugcggguuucuuugccguu

SEQ ID NO: 2168884 - RNA, 19 nt, Artificial Sequence
  Description of Artificial Sequence: Synthetic oligonucleotide
ucgcugaaauuaggaacuu

SEQ ID NO: 2168885 - RNA, 19 nt, Artificial Sequence
  Description of Artificial Sequence: Synthetic oligonucleotide
caggcgggacugugcacac

SEQ ID NO: 2168886 - RNA, 19 nt, Artificial Sequence
  Description of Artificial Sequence: Synthetic oligonucleotide
caggcuggauaagguugcc

SEQ ID NO: 2168887 - RNA, 19 nt, Artificial Sequence
  Description of Artificial Sequence: Synthetic oligonucleotide
gcaacgucagcaggacaag

SEQ ID NO: 2168888 - RNA, 19 nt, Artificial Sequence
  Description of Artificial Sequence: Synthetic oligonucleotide
aggcgggacugugcacacc

SEQ ID NO: 2168889 - RNA, 19 nt, Artificial Sequence
  Description of Artificial Sequence: Synthetic oligonucleotide
aggguugcuggaggggcca

SEQ ID NO: 2168890 - RNA, 19 nt, Artificial Sequence
  Description of Artificial Sequence: Synthetic oligonucleotide
ccuuugaacacugaggcau

SEQ ID NO: 2168891 - RNA, 19 nt, Artificial Sequence
  Description of Artificial Sequence: Synthetic oligonucleotide
cgauuuguugggugccugc

SEQ ID NO: 2168892 - RNA, 19 nt, Artificial Sequence
  Description of Artificial Sequence: Synthetic oligonucleotide
cgccaagccacccgcaggg

SEQ ID NO: 2168893 - RNA, 19 nt, Artificial Sequence
  Description of Artificial Sequence: Synthetic oligonucleotide
cucggccugucuccagcac

SEQ ID NO: 2168894 - RNA, 19 nt, Artificial Sequence
  Description of Artificial Sequence: Synthetic oligonucleotide
gcuucccgaaccguggcac

SEQ ID NO: 2168895 - RNA, 19 nt, Artificial Sequence
  Description of Artificial Sequence: Synthetic oligonucleotide
cgagugauucgggugcugg

SEQ ID NO: 2168896 - RNA, 19 nt, Artificial Sequence
  Description of Artificial Sequence: Synthetic oligonucleotide
ugcugucacucugcaccga

SEQ ID NO: 2168897 - RNA, 19 nt, Artificial Sequence
  Description of Artificial Sequence: Synthetic oligonucleotide
ccaggggacaggcaacguc

SEQ ID NO: 2168898 - RNA, 19 nt, Artificial Sequence
  Description of Artificial Sequence: Synthetic oligonucleotide
guauagugucagacaaccu

SEQ ID NO: 2168899 - RNA, 19 nt, Artificial Sequence
  Description of Artificial Sequence: Synthetic oligonucleotide
aggagguccugugguggcu

SEQ ID NO: 2168900 - RNA, 19 nt, Artificial Sequence
  Description of Artificial Sequence: Synthetic oligonucleotide
ccgccagccagcaggcggg

SEQ ID NO: 2168901 - RNA, 19 nt, Artificial Sequence
  Description of Artificial Sequence: Synthetic oligonucleotide
ggauugggcucgcugaaau

SEQ ID NO: 2168902 - RNA, 19 nt, Artificial Sequence
  Description of Artificial Sequence: Synthetic oligonucleotide
cgaaccguggcaccccgcc

SEQ ID NO: 2168903 - RNA, 19 nt, Artificial Sequence
  Description of Artificial Sequence: Synthetic oligonucleotide
ccguuacugacaggguugc

SEQ ID NO: 2168904 - RNA, 19 nt, Artificial Sequence
  Description of Artificial Sequence: Synthetic oligonucleotide
ggauaagguugcccacguc

SEQ ID NO: 2168905 - RNA, 19 nt, Artificial Sequence
  Description of Artificial Sequence: Synthetic oligonucleotide
acgucgucccacacugaga

SEQ ID NO: 2168906 - RNA, 19 nt, Artificial Sequence
  Description of Artificial Sequence: Synthetic oligonucleotide
cuugagcccgggcuugaua

SEQ ID NO: 2168907 - RNA, 19 nt, Artificial Sequence
  Description of Artificial Sequence: Synthetic oligonucleotide
ggggacaggcaacgucagc

SEQ ID NO: 2168908 - RNA, 19 nt, Artificial Sequence
  Description of Artificial Sequence: Synthetic oligonucleotide
ucuugagcccgggcuugau

SEQ ID NO: 2168909 - RNA, 19 nt, Artificial Sequence
  Description of Artificial Sequence: Synthetic oligonucleotide
gggacugugcacaccgcca

SEQ ID NO: 2168910 - RNA, 19 nt, Artificial Sequence
  Description of Artificial Sequence: Synthetic oligonucleotide
gggcucgcugaaauuagga

SEQ ID NO: 2168911 - RNA, 19 nt, Artificial Sequence
  Description of Artificial Sequence: Synthetic oligonucleotide
ccuggaucccaggggacag

SEQ ID NO: 2168912 - RNA, 19 nt, Artificial Sequence
  Description of Artificial Sequence: Synthetic oligonucleotide
cugcggguuucuuugccgu

SEQ ID NO: 2168913 - RNA, 19 nt, Artificial Sequence
  Description of Artificial Sequence: Synthetic oligonucleotide
cuuugucacucggccuguc

SEQ ID NO: 2168914 - RNA, 19 nt, Artificial Sequence
  Description of Artificial Sequence: Synthetic oligonucleotide
gccaguguauagugucaga

SEQ ID NO: 2168915 - RNA, 19 nt, Artificial Sequence
  Description of Artificial Sequence: Synthetic oligonucleotide
ggcccgguugggugcuugg

SEQ ID NO: 2168916 - RNA, 19 nt, Artificial Sequence
  Description of Artificial Sequence: Synthetic oligonucleotide
ggcaugugaggcaguguga

SEQ ID NO: 2168917 - RNA, 19 nt, Artificial Sequence
  Description of Artificial Sequence: Synthetic oligonucleotide
caccgccagggcccgguug

SEQ ID NO: 2168918 - RNA, 19 nt, Artificial Sequence
  Description of Artificial Sequence: Synthetic oligonucleotide
gcagugugagagggauggg

SEQ ID NO: 2168919 - RNA, 19 nt, Artificial Sequence
  Description of Artificial Sequence: Synthetic oligonucleotide
ccgaaccucgugcccgucc

SEQ ID NO: 2168920 - RNA, 19 nt, Artificial Sequence
  Description of Artificial Sequence: Synthetic oligonucleotide
guucccguuuuggcuuuca

SEQ ID NO: 2168921 - RNA, 19 nt, Artificial Sequence
  Description of Artificial Sequence: Synthetic oligonucleotide
agguccugugguggcuuga

SEQ ID NO: 2168922 - RNA, 19 nt, Artificial Sequence
  Description of Artificial Sequence: Synthetic oligonucleotide
ggcuucgagugauucgggu

SEQ ID NO: 2168923 - RNA, 19 nt, Artificial Sequence
  Description of Artificial Sequence: Synthetic oligonucleotide
cgguugggugcuugguccg

SEQ ID NO: 2168924 - RNA, 19 nt, Artificial Sequence
  Description of Artificial Sequence: Synthetic oligonucleotide
cucggucgucaugcuuccc

SEQ ID NO: 2168925 - RNA, 19 nt, Artificial Sequence
  Description of Artificial Sequence: Synthetic oligonucleotide
cccgguugggugcuugguc

SEQ ID NO: 2168926 - RNA, 19 nt, Artificial Sequence
  Description of Artificial Sequence: Synthetic oligonucleotide
gugguuugguuggcuucga

SEQ ID NO: 2168927 - RNA, 19 nt, Artificial Sequence
  Description of Artificial Sequence: Synthetic oligonucleotide
cccgaaccguggcaccccg

SEQ ID NO: 2168928 - RNA, 19 nt, Artificial Sequence
  Description of Artificial Sequence: Synthetic oligonucleotide
cacucugcaccgauuuguu

SEQ ID NO: 2168929 - RNA, 19 nt, Artificial Sequence
  Description of Artificial Sequence: Synthetic oligonucleotide
ggucgucaugcuucccgaa

SEQ ID NO: 2168930 - RNA, 19 nt, Artificial Sequence
  Description of Artificial Sequence: Synthetic oligonucleotide
ccgauuuguugggugccug

SEQ ID NO: 2168931 - RNA, 19 nt, Artificial Sequence
  Description of Artificial Sequence: Synthetic oligonucleotide
gucaugcuucccgaaccgu

SEQ ID NO: 2168932 - RNA, 19 nt, Artificial Sequence
  Description of Artificial Sequence: Synthetic oligonucleotide
ccccacggccaguguauag

SEQ ID NO: 2168933 - RNA, 19 nt, Artificial Sequence
  Description of Artificial Sequence: Synthetic oligonucleotide
ggucgugguggaagggaga

SEQ ID NO: 2168934 - RNA, 19 nt, Artificial Sequence
  Description of Artificial Sequence: Synthetic oligonucleotide
cacgaaggucucggucguc

SEQ ID NO: 2168935 - RNA, 19 nt, Artificial Sequence
  Description of Artificial Sequence: Synthetic oligonucleotide
cuugguccguucccguuuu

SEQ ID NO: 2168936 - RNA, 19 nt, Artificial Sequence
  Description of Artificial Sequence: Synthetic oligonucleotide
gccaagccacccgcagggg

SEQ ID NO: 2168937 - RNA, 19 nt, Artificial Sequence
  Description of Artificial Sequence: Synthetic oligonucleotide
uccgaaccucgugcccguc

SEQ ID NO: 2168938 - RNA, 19 nt, Artificial Sequence
  Description of Artificial Sequence: Synthetic oligonucleotide
gucgucccacacugagaua

SEQ ID NO: 2168939 - RNA, 19 nt, Artificial Sequence
  Description of Artificial Sequence: Synthetic oligonucleotide
cggguuucuuugccguuac

SEQ ID NO: 2168940 - RNA, 19 nt, Artificial Sequence
  Description of Artificial Sequence: Synthetic oligonucleotide
gcugucacucugcaccgau

SEQ ID NO: 2168941 - RNA, 19 nt, Artificial Sequence
  Description of Artificial Sequence: Synthetic oligonucleotide
guccgaaccucgugcccgu

SEQ ID NO: 2168942 - RNA, 19 nt, Artificial Sequence
  Description of Artificial Sequence: Synthetic oligonucleotide
cgcugaaauuaggaacuuc

SEQ ID NO: 2168943 - RNA, 19 nt, Artificial Sequence
  Description of Artificial Sequence: Synthetic oligonucleotide
caccgccaagccacccgca

SEQ ID NO: 2168944 - RNA, 19 nt, Artificial Sequence
  Description of Artificial Sequence: Synthetic oligonucleotide
gugugugguuugguuggcu

SEQ ID NO: 2168945 - RNA, 19 nt, Artificial Sequence
  Description of Artificial Sequence: Synthetic oligonucleotide
cgggcuugauauccuucac

SEQ ID NO: 2168946 - RNA, 19 nt, Artificial Sequence
  Description of Artificial Sequence: Synthetic oligonucleotide
gcuugguccguucccguuu

SEQ ID NO: 2168947 - RNA, 19 nt, Artificial Sequence
  Description of Artificial Sequence: Synthetic oligonucleotide
gcccguuuugucugcuacu

SEQ ID NO: 2168948 - RNA, 19 nt, Artificial Sequence
  Description of Artificial Sequence: Synthetic oligonucleotide
gcggguuucuuugccguua

SEQ ID NO: 2168949 - RNA, 19 nt, Artificial Sequence
  Description of Artificial Sequence: Synthetic oligonucleotide
cugucacucugcaccgauu

SEQ ID NO: 2168950 - RNA, 19 nt, Artificial Sequence
  Description of Artificial Sequence: Synthetic oligonucleotide
ccgaaccguggcaccccgc

SEQ ID NO: 2168951 - RNA, 19 nt, Artificial Sequence
  Description of Artificial Sequence: Synthetic oligonucleotide
gugcccguccuuugucuuu

SEQ ID NO: 2168952 - RNA, 19 nt, Artificial Sequence
  Description of Artificial Sequence: Synthetic oligonucleotide
gaaccucgugcccguccuu

SEQ ID NO: 2168953 - RNA, 19 nt, Artificial Sequence
  Description of Artificial Sequence: Synthetic oligonucleotide
cccuuuggugagucggaua

SEQ ID NO: 2168954 - RNA, 19 nt, Artificial Sequence
  Description of Artificial Sequence: Synthetic oligonucleotide
cggccaguguauaguguca

SEQ ID NO: 2168955 - RNA, 19 nt, Artificial Sequence
  Description of Artificial Sequence: Synthetic oligonucleotide
ggucucggucgucaugcuu

SEQ ID NO: 2168956 - RNA, 19 nt, Artificial Sequence
  Description of Artificial Sequence: Synthetic oligonucleotide
cggucgucaugcuucccga

SEQ ID NO: 2168957 - RNA, 19 nt, Artificial Sequence
  Description of Artificial Sequence: Synthetic oligonucleotide
guugggugcuugguccguu

SEQ ID NO: 2168958 - RNA, 19 nt, Artificial Sequence
  Description of Artificial Sequence: Synthetic oligonucleotide
ggguuucuuugccguuacu

SEQ ID NO: 2168959 - RNA, 19 nt, Artificial Sequence
  Description of Artificial Sequence: Synthetic oligonucleotide
gcgggacugugcacaccgc

SEQ ID NO: 2168960 - RNA, 19 nt, Artificial Sequence
  Description of Artificial Sequence: Synthetic oligonucleotide
gcccacgucgucccacacu

SEQ ID NO: 2168961 - RNA, 19 nt, Artificial Sequence
  Description of Artificial Sequence: Synthetic oligonucleotide
gggcccgguugggugcuug

SEQ ID NO: 2168962 - RNA, 19 nt, Artificial Sequence
  Description of Artificial Sequence: Synthetic oligonucleotide
cccacggccaguguauagu

SEQ ID NO: 2168963 - RNA, 19 nt, Artificial Sequence
  Description of Artificial Sequence: Synthetic oligonucleotide
gcaccccgccagccagcag

SEQ ID NO: 2168964 - RNA, 19 nt, Artificial Sequence
  Description of Artificial Sequence: Synthetic oligonucleotide
ccguggcaccccgccagcc

SEQ ID NO: 2168965 - RNA, 19 nt, Artificial Sequence
  Description of Artificial Sequence: Synthetic oligonucleotide
ccuucacgaaggucucggu

SEQ ID NO: 2168966 - RNA, 19 nt, Artificial Sequence
  Description of Artificial Sequence: Synthetic oligonucleotide
gguugggugcuugguccgu

SEQ ID NO: 2168967 - RNA, 19 nt, Artificial Sequence
  Description of Artificial Sequence: Synthetic oligonucleotide
cugcaccgauuuguugggu

SEQ ID NO: 2168968 - RNA, 19 nt, Artificial Sequence
  Description of Artificial Sequence: Synthetic oligonucleotide
cccguuuugucugcuacuu

SEQ ID NO: 2168969 - RNA, 19 nt, Artificial Sequence
  Description of Artificial Sequence: Synthetic oligonucleotide
ggcauacccuuuggugagu

SEQ ID NO: 2168970 - RNA, 19 nt, Artificial Sequence
  Description of Artificial Sequence: Synthetic oligonucleotide
gcccaguaggagacugucu

SEQ ID NO: 2168971 - RNA, 19 nt, Artificial Sequence
  Description of Artificial Sequence: Synthetic oligonucleotide
cguggcaccccgccagcca

SEQ ID NO: 2168972 - RNA, 19 nt, Artificial Sequence
  Description of Artificial Sequence: Synthetic oligonucleotide
cgaaccucgugcccguccu

SEQ ID NO: 2168973 - RNA, 19 nt, Artificial Sequence
  Description of Artificial Sequence: Synthetic oligonucleotide
ggggcaugugaggcagugu

SEQ ID NO: 2168974 - RNA, 19 nt, Artificial Sequence
  Description of Artificial Sequence: Synthetic oligonucleotide
ccacgucgucccacacuga

SEQ ID NO: 2168975 - RNA, 19 nt, Artificial Sequence
  Description of Artificial Sequence: Synthetic oligonucleotide
ccucgugcccguccuuugu

SEQ ID NO: 2168976 - RNA, 19 nt, Artificial Sequence
  Description of Artificial Sequence: Synthetic oligonucleotide
ccccaggcuggauaagguu

SEQ ID NO: 2168977 - RNA, 19 nt, Artificial Sequence
  Description of Artificial Sequence: Synthetic oligonucleotide
gcugcccguuuugucugcu

SEQ ID NO: 2168978 - RNA, 19 nt, Artificial Sequence
  Description of Artificial Sequence: Synthetic oligonucleotide
cagggcccgguugggugcu

SEQ ID NO: 2168979 - RNA, 19 nt, Artificial Sequence
  Description of Artificial Sequence: Synthetic oligonucleotide
ccguuuugucugcuacuuu

SEQ ID NO: 2168980 - RNA, 19 nt, Artificial Sequence
  Description of Artificial Sequence: Synthetic oligonucleotide
gcccgguugggugcuuggu

SEQ ID NO: 2168981 - RNA, 19 nt, Artificial Sequence
  Description of Artificial Sequence: Synthetic oligonucleotide
cguucccguuuuggcuuuc

SEQ ID NO: 2168982 - RNA, 19 nt, Artificial Sequence
  Description of Artificial Sequence: Synthetic oligonucleotide
ccguucccguuuuggcuuu

SEQ ID NO: 2168983 - RNA, 19 nt, Artificial Sequence
  Description of Artificial Sequence: Synthetic oligonucleotide
cguuacugacaggguugcu

SEQ ID NO: 2168984 - RNA, 19 nt, Artificial Sequence
  Description of Artificial Sequence: Synthetic oligonucleotide
ugaaaauuaacccaaagga

SEQ ID NO: 2168985 - RNA, 19 nt, Artificial Sequence
  Description of Artificial Sequence: Synthetic oligonucleotide
aaaauggggauuuuaaauc

SEQ ID NO: 2168986 - RNA, 19 nt, Artificial Sequence
  Description of Artificial Sequence: Synthetic oligonucleotide
auugaaagcaguuaccacc

SEQ ID NO: 2168987 - RNA, 19 nt, Artificial Sequence
  Description of Artificial Sequence: Synthetic oligonucleotide
ugauauauuaauuucaaga

SEQ ID NO: 2168988 - RNA, 19 nt, Artificial Sequence
  Description of Artificial Sequence: Synthetic oligonucleotide
uugaaaauuaacccaaagg

SEQ ID NO: 2168989 - RNA, 19 nt, Artificial Sequence
  Description of Artificial Sequence: Synthetic oligonucleotide
uuuauaauuaguucuagug

SEQ ID NO: 2168990 - RNA, 19 nt, Artificial Sequence
  Description of Artificial Sequence: Synthetic oligonucleotide
uugcuuuuaagccacaugg

SEQ ID NO: 2168991 - RNA, 19 nt, Artificial Sequence
  Description of Artificial Sequence: Synthetic oligonucleotide
ucaaaaugcacacauauac

SEQ ID NO: 2168992 - RNA, 19 nt, Artificial Sequence
  Description of Artificial Sequence: Synthetic oligonucleotide
uguaguugaaaauuaaccc

SEQ ID NO: 2168993 - RNA, 19 nt, Artificial Sequence
  Description of Artificial Sequence: Synthetic oligonucleotide
uuauaauuaguucuagugc

SEQ ID NO: 2168994 - RNA, 19 nt, Artificial Sequence
  Description of Artificial Sequence: Synthetic oligonucleotide
uauauuaauuucaagauuu

SEQ ID NO: 2168995 - RNA, 19 nt, Artificial Sequence
  Description of Artificial Sequence: Synthetic oligonucleotide
uuuacaauuguuuuauuca

SEQ ID NO: 2168996 - RNA, 19 nt, Artificial Sequence
  Description of Artificial Sequence: Synthetic oligonucleotide
uaugcaaaacucaauauga

SEQ ID NO: 2168997 - RNA, 19 nt, Artificial Sequence
  Description of Artificial Sequence: Synthetic oligonucleotide
auuucaagauuucugauag

SEQ ID NO: 2168998 - RNA, 19 nt, Artificial Sequence
  Description of Artificial Sequence: Synthetic oligonucleotide
uauguguuagaauaaagug

SEQ ID NO: 2168999 - RNA, 19 nt, Artificial Sequence
  Description of Artificial Sequence: Synthetic oligonucleotide
uuaauuucaagauuucuga

SEQ ID NO: 2169000 - RNA, 19 nt, Artificial Sequence
  Description of Artificial Sequence: Synthetic oligonucleotide
cugaauagaaccuacuugc

SEQ ID NO: 2169001 - RNA, 19 nt, Artificial Sequence
  Description of Artificial Sequence: Synthetic oligonucleotide
aacuuacucauucccauac

SEQ ID NO: 2169002 - RNA, 19 nt, Artificial Sequence
  Description of Artificial Sequence: Synthetic oligonucleotide
ucuaccuuaacucugacuu

SEQ ID NO: 2169003 - RNA, 19 nt, Artificial Sequence
  Description of Artificial Sequence: Synthetic oligonucleotide
aguugaagcuucuacuugc

SEQ ID NO: 2169004 - RNA, 19 nt, Artificial Sequence
  Description of Artificial Sequence: Synthetic oligonucleotide
aauaucuuuaaaaugggga

SEQ ID NO: 2169005 - RNA, 19 nt, Artificial Sequence
  Description of Artificial Sequence: Synthetic oligonucleotide
auguaguugaaaauuaacc

SEQ ID NO: 2169006 - RNA, 19 nt, Artificial Sequence
  Description of Artificial Sequence: Synthetic oligonucleotide
ucugaauagaaccuacuug

SEQ ID NO: 2169007 - RNA, 19 nt, Artificial Sequence
  Description of Artificial Sequence: Synthetic oligonucleotide
acucuaucuaccuuaacuc

SEQ ID NO: 2169008 - RNA, 19 nt, Artificial Sequence
  Description of Artificial Sequence: Synthetic oligonucleotide
aauagaaccuacuugcuuu

SEQ ID NO: 2169009 - RNA, 19 nt, Artificial Sequence
  Description of Artificial Sequence: Synthetic oligonucleotide
auagacuuccgagugaugc

SEQ ID NO: 2169010 - RNA, 19 nt, Artificial Sequence
  Description of Artificial Sequence: Synthetic oligonucleotide
aaauggggauuuuaaauca

SEQ ID NO: 2169011 - RNA, 19 nt, Artificial Sequence
  Description of Artificial Sequence: Synthetic oligonucleotide
aaagcaguuaccaccacgg

SEQ ID NO: 2169012 - RNA, 19 nt, Artificial Sequence
  Description of Artificial Sequence: Synthetic oligonucleotide
uguguuagaauaaaguguu

SEQ ID NO: 2169013 - RNA, 19 nt, Artificial Sequence
  Description of Artificial Sequence: Synthetic oligonucleotide
cacauauacacacaccugg

SEQ ID NO: 2169014 - RNA, 19 nt, Artificial Sequence
  Description of Artificial Sequence: Synthetic oligonucleotide
uccuaagugaccugcaagg

SEQ ID NO: 2169015 - RNA, 19 nt, Artificial Sequence
  Description of Artificial Sequence: Synthetic oligonucleotide
acccauaaugcauugaaag

SEQ ID NO: 2169016 - RNA, 19 nt, Artificial Sequence
  Description of Artificial Sequence: Synthetic oligonucleotide
uuuuaagccacauggcgag

SEQ ID NO: 2169017 - RNA, 19 nt, Artificial Sequence
  Description of Artificial Sequence: Synthetic oligonucleotide
cugauagccacauacauuc

SEQ ID NO: 2169018 - RNA, 19 nt, Artificial Sequence
  Description of Artificial Sequence: Synthetic oligonucleotide
uuuagguaugcaaaacuca

SEQ ID NO: 2169019 - RNA, 19 nt, Artificial Sequence
  Description of Artificial Sequence: Synthetic oligonucleotide
ugucaagucaucauuugug

SEQ ID NO: 2169020 - RNA, 19 nt, Artificial Sequence
  Description of Artificial Sequence: Synthetic oligonucleotide
uguauguguuagaauaaag

SEQ ID NO: 2169021 - RNA, 19 nt, Artificial Sequence
  Description of Artificial Sequence: Synthetic oligonucleotide
uuuuagguaugcaaaacuc

SEQ ID NO: 2169022 - RNA, 19 nt, Artificial Sequence
  Description of Artificial Sequence: Synthetic oligonucleotide
aaaguguucaaaaugcaca

SEQ ID NO: 2169023 - RNA, 19 nt, Artificial Sequence
  Description of Artificial Sequence: Synthetic oligonucleotide
augcauugaaagcaguuac

SEQ ID NO: 2169024 - RNA, 19 nt, Artificial Sequence
  Description of Artificial Sequence: Synthetic oligonucleotide
aauguuaguguguguaugu

SEQ ID NO: 2169025 - RNA, 19 nt, Artificial Sequence
  Description of Artificial Sequence: Synthetic oligonucleotide
aaaauuaacccaaaggauu

SEQ ID NO: 2169026 - RNA, 19 nt, Artificial Sequence
  Description of Artificial Sequence: Synthetic oligonucleotide
aaccucacucaagagaggc

SEQ ID NO: 2169027 - RNA, 19 nt, Artificial Sequence
  Description of Artificial Sequence: Synthetic oligonucleotide
uaagugaccugcaaggcug

SEQ ID NO: 2169028 - RNA, 19 nt, Artificial Sequence
  Description of Artificial Sequence: Synthetic oligonucleotide
aaauacugacuuuacaauu

SEQ ID NO: 2169029 - RNA, 19 nt, Artificial Sequence
  Description of Artificial Sequence: Synthetic oligonucleotide
aauuucaagauuucugaua

SEQ ID NO: 2169030 - RNA, 19 nt, Artificial Sequence
  Description of Artificial Sequence: Synthetic oligonucleotide
acucaagagaggcagguuc

SEQ ID NO: 2169031 - RNA, 19 nt, Artificial Sequence
  Description of Artificial Sequence: Synthetic oligonucleotide
caagauuucugauagccac

SEQ ID NO: 2169032 - RNA, 19 nt, Artificial Sequence
  Description of Artificial Sequence: Synthetic oligonucleotide
uguuagaauaaaguguuca

SEQ ID NO: 2169033 - RNA, 19 nt, Artificial Sequence
  Description of Artificial Sequence: Synthetic oligonucleotide
ucuauacacaauguuagug

SEQ ID NO: 2169034 - RNA, 19 nt, Artificial Sequence
  Description of Artificial Sequence: Synthetic oligonucleotide
ucugcugcggacaugcgag

SEQ ID NO: 2169035 - RNA, 19 nt, Artificial Sequence
  Description of Artificial Sequence: Synthetic oligonucleotide
uuagguaugcaaaacucaa

SEQ ID NO: 2169036 - RNA, 19 nt, Artificial Sequence
  Description of Artificial Sequence: Synthetic oligonucleotide
uaguugaaaauuaacccaa

SEQ ID NO: 2169037 - RNA, 19 nt, Artificial Sequence
  Description of Artificial Sequence: Synthetic oligonucleotide
cauaaugcauugaaagcag

SEQ ID NO: 2169038 - RNA, 19 nt, Artificial Sequence
  Description of Artificial Sequence: Synthetic oligonucleotide
agaaguugaagcuucuacu

SEQ ID NO: 2169039 - RNA, 19 nt, Artificial Sequence
  Description of Artificial Sequence: Synthetic oligonucleotide
uuuuauaauuaguucuagu

SEQ ID NO: 2169040 - RNA, 19 nt, Artificial Sequence
  Description of Artificial Sequence: Synthetic oligonucleotide
uugauauauuaauuucaag

SEQ ID NO: 2169041 - RNA, 19 nt, Artificial Sequence
  Description of Artificial Sequence: Synthetic oligonucleotide
aagucuucaugacucuauc

SEQ ID NO: 2169042 - RNA, 19 nt, Artificial Sequence
  Description of Artificial Sequence: Synthetic oligonucleotide
uucgacuugagcaucucug

SEQ ID NO: 2169043 - RNA, 19 nt, Artificial Sequence
  Description of Artificial Sequence: Synthetic oligonucleotide
cuuacucauucccauaccc

SEQ ID NO: 2169044 - RNA, 19 nt, Artificial Sequence
  Description of Artificial Sequence: Synthetic oligonucleotide
cacuuucagaaguugaagc

SEQ ID NO: 2169045 - RNA, 19 nt, Artificial Sequence
  Description of Artificial Sequence: Synthetic oligonucleotide
ucuagugcuccucaucuug

SEQ ID NO: 2169046 - RNA, 19 nt, Artificial Sequence
  Description of Artificial Sequence: Synthetic oligonucleotide
guugaaaauuaacccaaag

SEQ ID NO: 2169047 - RNA, 19 nt, Artificial Sequence
  Description of Artificial Sequence: Synthetic oligonucleotide
ugaccugcaaggcugagac

SEQ ID NO: 2169048 - RNA, 19 nt, Artificial Sequence
  Description of Artificial Sequence: Synthetic oligonucleotide
uccaaccucacucaagaga

SEQ ID NO: 2169049 - RNA, 19 nt, Artificial Sequence
  Description of Artificial Sequence: Synthetic oligonucleotide
acuuucagaaguugaagcu

SEQ ID NO: 2169050 - RNA, 19 nt, Artificial Sequence
  Description of Artificial Sequence: Synthetic oligonucleotide
uuucaugcuucucugaaua

SEQ ID NO: 2169051 - RNA, 19 nt, Artificial Sequence
  Description of Artificial Sequence: Synthetic oligonucleotide
aaguugucacugcugguag

SEQ ID NO: 2169052 - RNA, 19 nt, Artificial Sequence
  Description of Artificial Sequence: Synthetic oligonucleotide
gugguuucgggugugaucg

SEQ ID NO: 2169053 - RNA, 19 nt, Artificial Sequence
  Description of Artificial Sequence: Synthetic oligonucleotide
gaaccuacuugcuuuggag

SEQ ID NO: 2169054 - RNA, 19 nt, Artificial Sequence
  Description of Artificial Sequence: Synthetic oligonucleotide
uuguugaacuuacucauuc

SEQ ID NO: 2169055 - RNA, 19 nt, Artificial Sequence
  Description of Artificial Sequence: Synthetic oligonucleotide
cauguaguugaaaauuaac

SEQ ID NO: 2169056 - RNA, 19 nt, Artificial Sequence
  Description of Artificial Sequence: Synthetic oligonucleotide
uauuucuauacacaauguu

SEQ ID NO: 2169057 - RNA, 19 nt, Artificial Sequence
  Description of Artificial Sequence: Synthetic oligonucleotide
uugaacuuacucauuccca

SEQ ID NO: 2169058 - RNA, 19 nt, Artificial Sequence
  Description of Artificial Sequence: Synthetic oligonucleotide
uuuggaucugugaauggcu

SEQ ID NO: 2169059 - RNA, 19 nt, Artificial Sequence
  Description of Artificial Sequence: Synthetic oligonucleotide
aucaccaaugcugaguggg

SEQ ID NO: 2169060 - RNA, 19 nt, Artificial Sequence
  Description of Artificial Sequence: Synthetic oligonucleotide
cuuaaaaccuaauaaauau

SEQ ID NO: 2169061 - RNA, 19 nt, Artificial Sequence
  Description of Artificial Sequence: Synthetic oligonucleotide
uuccgagugaugcauuucc

SEQ ID NO: 2169062 - RNA, 19 nt, Artificial Sequence
  Description of Artificial Sequence: Synthetic oligonucleotide
agcaguuaccaccacgguc

SEQ ID NO: 2169063 - RNA, 19 nt, Artificial Sequence
  Description of Artificial Sequence: Synthetic oligonucleotide
cuucaugacucuaucuacc

SEQ ID NO: 2169064 - RNA, 19 nt, Artificial Sequence
  Description of Artificial Sequence: Synthetic oligonucleotide
ugcauugaaagcaguuacc

SEQ ID NO: 2169065 - RNA, 19 nt, Artificial Sequence
  Description of Artificial Sequence: Synthetic oligonucleotide
uacacaauguuagugugug

SEQ ID NO: 2169066 - RNA, 19 nt, Artificial Sequence
  Description of Artificial Sequence: Synthetic oligonucleotide
acuuacucauucccauacc

SEQ ID NO: 2169067 - RNA, 19 nt, Artificial Sequence
  Description of Artificial Sequence: Synthetic oligonucleotide
ucaauaugaccuuccuaag

SEQ ID NO: 2169068 - RNA, 19 nt, Artificial Sequence
  Description of Artificial Sequence: Synthetic oligonucleotide
gcuuuuaagccacauggcg

SEQ ID NO: 2169069 - RNA, 19 nt, Artificial Sequence
  Description of Artificial Sequence: Synthetic oligonucleotide
aacucuucgacuugagcau

SEQ ID NO: 2169070 - RNA, 19 nt, Artificial Sequence
  Description of Artificial Sequence: Synthetic oligonucleotide
uaauuaguucuagugcucc

SEQ ID NO: 2169071 - RNA, 19 nt, Artificial Sequence
  Description of Artificial Sequence: Synthetic oligonucleotide
uguugaacuuacucauucc

SEQ ID NO: 2169072 - RNA, 19 nt, Artificial Sequence
  Description of Artificial Sequence: Synthetic oligonucleotide
aaccuacuugcuuuggaga

SEQ ID NO: 2169073 - RNA, 19 nt, Artificial Sequence
  Description of Artificial Sequence: Synthetic oligonucleotide
uuacucauucccauaccca

SEQ ID NO: 2169074 - RNA, 19 nt, Artificial Sequence
  Description of Artificial Sequence: Synthetic oligonucleotide
uuaguucuagugcuccuca

SEQ ID NO: 2169075 - RNA, 19 nt, Artificial Sequence
  Description of Artificial Sequence: Synthetic oligonucleotide
ugaacuuacucauucccau

SEQ ID NO: 2169076 - RNA, 19 nt, Artificial Sequence
  Description of Artificial Sequence: Synthetic oligonucleotide
aguucuagugcuccucauc

SEQ ID NO: 2169077 - RNA, 19 nt, Artificial Sequence
  Description of Artificial Sequence: Synthetic oligonucleotide
guguguauguguuagaaua

SEQ ID NO: 2169078 - RNA, 19 nt, Artificial Sequence
  Description of Artificial Sequence: Synthetic oligonucleotide
aacucaauaugaccuuccu

SEQ ID NO: 2169079 - RNA, 19 nt, Artificial Sequence
  Description of Artificial Sequence: Synthetic oligonucleotide
ugaagcuucuacuugcuuu

SEQ ID NO: 2169080 - RNA, 19 nt, Artificial Sequence
  Description of Artificial Sequence: Synthetic oligonucleotide
ugcuuuuaagccacauggc

SEQ ID NO: 2169081 - RNA, 19 nt, Artificial Sequence
  Description of Artificial Sequence: Synthetic oligonucleotide
agugcuccucaucuugccc

SEQ ID NO: 2169082 - RNA, 19 nt, Artificial Sequence
  Description of Artificial Sequence: Synthetic oligonucleotide
ugaauagaaccuacuugcu

SEQ ID NO: 2169083 - RNA, 19 nt, Artificial Sequence
  Description of Artificial Sequence: Synthetic oligonucleotide
acauauacacacaccuggc

SEQ ID NO: 2169084 - RNA, 19 nt, Artificial Sequence
  Description of Artificial Sequence: Synthetic oligonucleotide
auuucuauacacaauguua

SEQ ID NO: 2169085 - RNA, 19 nt, Artificial Sequence
  Description of Artificial Sequence: Synthetic oligonucleotide
gacucuaucuaccuuaacu

SEQ ID NO: 2169086 - RNA, 19 nt, Artificial Sequence
  Description of Artificial Sequence: Synthetic oligonucleotide
ucauuugugguuguugaac

SEQ ID NO: 2169087 - RNA, 19 nt, Artificial Sequence
  Description of Artificial Sequence: Synthetic oligonucleotide
aaugcauugaaagcaguua

SEQ ID NO: 2169088 - RNA, 19 nt, Artificial Sequence
  Description of Artificial Sequence: Synthetic oligonucleotide
gagugaugcauuucccucc

SEQ ID NO: 2169089 - RNA, 19 nt, Artificial Sequence
  Description of Artificial Sequence: Synthetic oligonucleotide
auacccauaaugcauugaa

SEQ ID NO: 2169090 - RNA, 19 nt, Artificial Sequence
  Description of Artificial Sequence: Synthetic oligonucleotide
uacaauuguuuuauucaaa

SEQ ID NO: 2169091 - RNA, 19 nt, Artificial Sequence
  Description of Artificial Sequence: Synthetic oligonucleotide
ggugugaucgucuucugag

SEQ ID NO: 2169092 - RNA, 19 nt, Artificial Sequence
  Description of Artificial Sequence: Synthetic oligonucleotide
agguaugcaaaacucaaua

SEQ ID NO: 2169093 - RNA, 19 nt, Artificial Sequence
  Description of Artificial Sequence: Synthetic oligonucleotide
uuaacucugacuucuccua

SEQ ID NO: 2169094 - RNA, 19 nt, Artificial Sequence
  Description of Artificial Sequence: Synthetic oligonucleotide
gucuucugagucuuugcgg

SEQ ID NO: 2169095 - RNA, 19 nt, Artificial Sequence
  Description of Artificial Sequence: Synthetic oligonucleotide
cuuuuaagccacauggcga

SEQ ID NO: 2169096 - RNA, 19 nt, Artificial Sequence
  Description of Artificial Sequence: Synthetic oligonucleotide
uucaugacucuaucuaccu

SEQ ID NO: 2169097 - RNA, 19 nt, Artificial Sequence
  Description of Artificial Sequence: Synthetic oligonucleotide
agugguuucgggugugauc

SEQ ID NO: 2169098 - RNA, 19 nt, Artificial Sequence
  Description of Artificial Sequence: Synthetic oligonucleotide
uucaaaaugcacacauaua

SEQ ID NO: 2169099 - RNA, 19 nt, Artificial Sequence
  Description of Artificial Sequence: Synthetic oligonucleotide
ugugaucgucuucugaguc

SEQ ID NO: 2169100 - RNA, 19 nt, Artificial Sequence
  Description of Artificial Sequence: Synthetic oligonucleotide
ucaccaaugcugagugggg

SEQ ID NO: 2169101 - RNA, 19 nt, Artificial Sequence
  Description of Artificial Sequence: Synthetic oligonucleotide
uaauuucaagauuucugau

SEQ ID NO: 2169102 - RNA, 19 nt, Artificial Sequence
  Description of Artificial Sequence: Synthetic oligonucleotide
cuugcuuuggagaggccag

SEQ ID NO: 2169103 - RNA, 19 nt, Artificial Sequence
  Description of Artificial Sequence: Synthetic oligonucleotide
auugauauauuaauuucaa

SEQ ID NO: 2169104 - RNA, 19 nt, Artificial Sequence
  Description of Artificial Sequence: Synthetic oligonucleotide
aggaagcacuuucagaagu

SEQ ID NO: 2169105 - RNA, 19 nt, Artificial Sequence
  Description of Artificial Sequence: Synthetic oligonucleotide
aaaucuuccccaggaagca

SEQ ID NO: 2169106 - RNA, 19 nt, Artificial Sequence
  Description of Artificial Sequence: Synthetic oligonucleotide
aguugucacugcugguagc

SEQ ID NO: 2169107 - RNA, 19 nt, Artificial Sequence
  Description of Artificial Sequence: Synthetic oligonucleotide
ucugauagccacauacauu

SEQ ID NO: 2169108 - RNA, 19 nt, Artificial Sequence
  Description of Artificial Sequence: Synthetic oligonucleotide
aaagcaaacuuaaaaccua

SEQ ID NO: 2169109 - RNA, 19 nt, Artificial Sequence
  Description of Artificial Sequence: Synthetic oligonucleotide
ucgacuugagcaucucugc

SEQ ID NO: 2169110 - RNA, 19 nt, Artificial Sequence
  Description of Artificial Sequence: Synthetic oligonucleotide
auaauuaguucuagugcuc

SEQ ID NO: 2169111 - RNA, 19 nt, Artificial Sequence
  Description of Artificial Sequence: Synthetic oligonucleotide
ugacuuuacaauuguuuua

SEQ ID NO: 2169112 - RNA, 19 nt, Artificial Sequence
  Description of Artificial Sequence: Synthetic oligonucleotide
ucaagucaucauuuguggu

SEQ ID NO: 2169113 - RNA, 19 nt, Artificial Sequence
  Description of Artificial Sequence: Synthetic oligonucleotide
uucccauacccauaaugca

SEQ ID NO: 2169114 - RNA, 19 nt, Artificial Sequence
  Description of Artificial Sequence: Synthetic oligonucleotide
cuuuuggaucugugaaugg

SEQ ID NO: 2169115 - RNA, 19 nt, Artificial Sequence
  Description of Artificial Sequence: Synthetic oligonucleotide
ccaaccucacucaagagag

SEQ ID NO: 2169116 - RNA, 19 nt, Artificial Sequence
  Description of Artificial Sequence: Synthetic oligonucleotide
ucccauacccauaaugcau

SEQ ID NO: 2169117 - RNA, 19 nt, Artificial Sequence
  Description of Artificial Sequence: Synthetic oligonucleotide
auagaaccuacuugcuuug

SEQ ID NO: 2169118 - RNA, 19 nt, Artificial Sequence
  Description of Artificial Sequence: Synthetic oligonucleotide
ugaguccuaagugaccugc

SEQ ID NO: 2169119 - RNA, 19 nt, Artificial Sequence
  Description of Artificial Sequence: Synthetic oligonucleotide
uugagcaucucugcugcgg

SEQ ID NO: 2169120 - RNA, 19 nt, Artificial Sequence
  Description of Artificial Sequence: Synthetic oligonucleotide
uuuagcagcagagcuuuga

SEQ ID NO: 2169121 - RNA, 19 nt, Artificial Sequence
  Description of Artificial Sequence: Synthetic oligonucleotide
accuaauaaauaucuuuaa

SEQ ID NO: 2169122 - RNA, 19 nt, Artificial Sequence
  Description of Artificial Sequence: Synthetic oligonucleotide
agugaguccuaagugaccu

SEQ ID NO: 2169123 - RNA, 19 nt, Artificial Sequence
  Description of Artificial Sequence: Synthetic oligonucleotide
augucaagucaucauuugu

SEQ ID NO: 2169124 - RNA, 19 nt, Artificial Sequence
  Description of Artificial Sequence: Synthetic oligonucleotide
uugugguuguugaacuuac

SEQ ID NO: 2169125 - RNA, 19 nt, Artificial Sequence
  Description of Artificial Sequence: Synthetic oligonucleotide
cuaacucuucgacuugagc

SEQ ID NO: 2169126 - RNA, 19 nt, Artificial Sequence
  Description of Artificial Sequence: Synthetic oligonucleotide
uucugagucuuugcggccg

SEQ ID NO: 2169127 - RNA, 19 nt, Artificial Sequence
  Description of Artificial Sequence: Synthetic oligonucleotide
ucaaacaaauauugauaua

SEQ ID NO: 2169128 - RNA, 19 nt, Artificial Sequence
  Description of Artificial Sequence: Synthetic oligonucleotide
uaccuuaacucugacuucu

SEQ ID NO: 2169129 - RNA, 19 nt, Artificial Sequence
  Description of Artificial Sequence: Synthetic oligonucleotide
agugggguccccacaagcc

SEQ ID NO: 2169130 - RNA, 19 nt, Artificial Sequence
  Description of Artificial Sequence: Synthetic oligonucleotide
acuuaaaaccuaauaaaua

SEQ ID NO: 2169131 - RNA, 19 nt, Artificial Sequence
  Description of Artificial Sequence: Synthetic oligonucleotide
accaaugcugagugggguc

SEQ ID NO: 2169132 - RNA, 19 nt, Artificial Sequence
  Description of Artificial Sequence: Synthetic oligonucleotide
accugcaaggcugagaccu

SEQ ID NO: 2169133 - RNA, 19 nt, Artificial Sequence
  Description of Artificial Sequence: Synthetic oligonucleotide
cucaaacaaauauugauau

SEQ ID NO: 2169134 - RNA, 19 nt, Artificial Sequence
  Description of Artificial Sequence: Synthetic oligonucleotide
gggauuuuaaaucauuuua

SEQ ID NO: 2169135 - RNA, 19 nt, Artificial Sequence
  Description of Artificial Sequence: Synthetic oligonucleotide
gaaaauuaacccaaaggau

SEQ ID NO: 2169136 - RNA, 19 nt, Artificial Sequence
  Description of Artificial Sequence: Synthetic oligonucleotide
agucuuugcggccgaggac

SEQ ID NO: 2169137 - RNA, 19 nt, Artificial Sequence
  Description of Artificial Sequence: Synthetic oligonucleotide
ucaugcuucucugaauaga

SEQ ID NO: 2169138 - RNA, 19 nt, Artificial Sequence
  Description of Artificial Sequence: Synthetic oligonucleotide
gcaguuaccaccacggucc

SEQ ID NO: 2169139 - RNA, 19 nt, Artificial Sequence
  Description of Artificial Sequence: Synthetic oligonucleotide
cucuuuucaugcuucucug

SEQ ID NO: 2169140 - RNA, 19 nt, Artificial Sequence
  Description of Artificial Sequence: Synthetic oligonucleotide
cuauacacaauguuagugu

SEQ ID NO: 2169141 - RNA, 19 nt, Artificial Sequence
  Description of Artificial Sequence: Synthetic oligonucleotide
uuaagccacauggcgagug

SEQ ID NO: 2169142 - RNA, 19 nt, Artificial Sequence
  Description of Artificial Sequence: Synthetic oligonucleotide
aaugcugaguggggucccc

SEQ ID NO: 2169143 - RNA, 19 nt, Artificial Sequence
  Description of Artificial Sequence: Synthetic oligonucleotide
uggcgagugaguccuaagu

SEQ ID NO: 2169144 - RNA, 19 nt, Artificial Sequence
  Description of Artificial Sequence: Synthetic oligonucleotide
accuuccuaagauuuacaa

SEQ ID NO: 2169145 - RNA, 19 nt, Artificial Sequence
  Description of Artificial Sequence: Synthetic oligonucleotide
uguucaaaaugcacacaua

SEQ ID NO: 2169146 - RNA, 19 nt, Artificial Sequence
  Description of Artificial Sequence: Synthetic oligonucleotide
guccuaagugaccugcaag

SEQ ID NO: 2169147 - RNA, 19 nt, Artificial Sequence
  Description of Artificial Sequence: Synthetic oligonucleotide
uuuucaugcuucucugaau

SEQ ID NO: 2169148 - RNA, 19 nt, Artificial Sequence
  Description of Artificial Sequence: Synthetic oligonucleotide
aaaaccuaauaaauaucuu

SEQ ID NO: 2169149 - RNA, 19 nt, Artificial Sequence
  Description of Artificial Sequence: Synthetic oligonucleotide
cuaggugcugcacccgugg

SEQ ID NO: 2169150 - RNA, 19 nt, Artificial Sequence
  Description of Artificial Sequence: Synthetic oligonucleotide
acugacuuuacaauuguuu

SEQ ID NO: 2169151 - RNA, 19 nt, Artificial Sequence
  Description of Artificial Sequence: Synthetic oligonucleotide
uuugugguuguugaacuua

SEQ ID NO: 2169152 - RNA, 19 nt, Artificial Sequence
  Description of Artificial Sequence: Synthetic oligonucleotide
ugacccuaacucuucgacu

SEQ ID NO: 2169153 - RNA, 19 nt, Artificial Sequence
  Description of Artificial Sequence: Synthetic oligonucleotide
caugacucuaucuaccuua

SEQ ID NO: 2169154 - RNA, 19 nt, Artificial Sequence
  Description of Artificial Sequence: Synthetic oligonucleotide
uagacuuccgagugaugca

SEQ ID NO: 2169155 - RNA, 19 nt, Artificial Sequence
  Description of Artificial Sequence: Synthetic oligonucleotide
uugcccucaaacaaauauu

SEQ ID NO: 2169156 - RNA, 19 nt, Artificial Sequence
  Description of Artificial Sequence: Synthetic oligonucleotide
uuccccaggaagcacuuuc

SEQ ID NO: 2169157 - RNA, 19 nt, Artificial Sequence
  Description of Artificial Sequence: Synthetic oligonucleotide
agaaccuacuugcuuugga

SEQ ID NO: 2169158 - RNA, 19 nt, Artificial Sequence
  Description of Artificial Sequence: Synthetic oligonucleotide
cugacccuaacucuucgac

SEQ ID NO: 2169159 - RNA, 19 nt, Artificial Sequence
  Description of Artificial Sequence: Synthetic oligonucleotide
cccauaaugcauugaaagc

SEQ ID NO: 2169160 - RNA, 19 nt, Artificial Sequence
  Description of Artificial Sequence: Synthetic oligonucleotide
guauguguuagaauaaagu

SEQ ID NO: 2169161 - RNA, 19 nt, Artificial Sequence
  Description of Artificial Sequence: Synthetic oligonucleotide
uagguaugcaaaacucaau

SEQ ID NO: 2169162 - RNA, 19 nt, Artificial Sequence
  Description of Artificial Sequence: Synthetic oligonucleotide
gagggagagugguuucggg

SEQ ID NO: 2169163 - RNA, 19 nt, Artificial Sequence
  Description of Artificial Sequence: Synthetic oligonucleotide
uacccauaaugcauugaaa

SEQ ID NO: 2169164 - RNA, 19 nt, Artificial Sequence
  Description of Artificial Sequence: Synthetic oligonucleotide
cuaucuaccuuaacucuga

SEQ ID NO: 2169165 - RNA, 19 nt, Artificial Sequence
  Description of Artificial Sequence: Synthetic oligonucleotide
agguucugacccuaacucu

SEQ ID NO: 2169166 - RNA, 19 nt, Artificial Sequence
  Description of Artificial Sequence: Synthetic oligonucleotide
uccuuuuggaucugugaau

SEQ ID NO: 2169167 - RNA, 19 nt, Artificial Sequence
  Description of Artificial Sequence: Synthetic oligonucleotide
caagccaaccaacaaacaa

SEQ ID NO: 2169168 - RNA, 19 nt, Artificial Sequence
  Description of Artificial Sequence: Synthetic oligonucleotide
gguccagaagucuucauga

SEQ ID NO: 2169169 - RNA, 19 nt, Artificial Sequence
  Description of Artificial Sequence: Synthetic oligonucleotide
agugaugcauuucccucca

SEQ ID NO: 2169170 - RNA, 19 nt, Artificial Sequence
  Description of Artificial Sequence: Synthetic oligonucleotide
acuugcuuuggagaggcca

SEQ ID NO: 2169171 - RNA, 19 nt, Artificial Sequence
  Description of Artificial Sequence: Synthetic oligonucleotide
caauaugaccuuccuaaga

SEQ ID NO: 2169172 - RNA, 19 nt, Artificial Sequence
  Description of Artificial Sequence: Synthetic oligonucleotide
gauagccacauacauucua

SEQ ID NO: 2169173 - RNA, 19 nt, Artificial Sequence
  Description of Artificial Sequence: Synthetic oligonucleotide
caggcuaggugcugcaccc

SEQ ID NO: 2169174 - RNA, 19 nt, Artificial Sequence
  Description of Artificial Sequence: Synthetic oligonucleotide
aagcacuuucagaaguuga

SEQ ID NO: 2169175 - RNA, 19 nt, Artificial Sequence
  Description of Artificial Sequence: Synthetic oligonucleotide
aucuaccuuaacucugacu

SEQ ID NO: 2169176 - RNA, 19 nt, Artificial Sequence
  Description of Artificial Sequence: Synthetic oligonucleotide
gagucuuugcggccgagga

SEQ ID NO: 2169177 - RNA, 19 nt, Artificial Sequence
  Description of Artificial Sequence: Synthetic oligonucleotide
ugagucuuugcggccgagg

SEQ ID NO: 2169178 - RNA, 19 nt, Artificial Sequence
  Description of Artificial Sequence: Synthetic oligonucleotide
uccccacaagccaaggaaa

SEQ ID NO: 2169179 - RNA, 19 nt, Artificial Sequence
  Description of Artificial Sequence: Synthetic oligonucleotide
cucacucaagagaggcagg

SEQ ID NO: 2169180 - RNA, 19 nt, Artificial Sequence
  Description of Artificial Sequence: Synthetic oligonucleotide
aauggggauuuuaaaucau

SEQ ID NO: 2169181 - RNA, 19 nt, Artificial Sequence
  Description of Artificial Sequence: Synthetic oligonucleotide
cauauacacacaccuggca

SEQ ID NO: 2169182 - RNA, 19 nt, Artificial Sequence
  Description of Artificial Sequence: Synthetic oligonucleotide
ugugguuguugaacuuacu

SEQ ID NO: 2169183 - RNA, 19 nt, Artificial Sequence
  Description of Artificial Sequence: Synthetic oligonucleotide
aagcaguuaccaccacggu

SEQ ID NO: 2169184 - RNA, 19 nt, Artificial Sequence
  Description of Artificial Sequence: Synthetic oligonucleotide
ugacuucuccuauuucuau

SEQ ID NO: 2169185 - RNA, 19 nt, Artificial Sequence
  Description of Artificial Sequence: Synthetic oligonucleotide
guucuagugcuccucaucu

SEQ ID NO: 2169186 - RNA, 19 nt, Artificial Sequence
  Description of Artificial Sequence: Synthetic oligonucleotide
ucugacccuaacucuucga

SEQ ID NO: 2169187 - RNA, 19 nt, Artificial Sequence
  Description of Artificial Sequence: Synthetic oligonucleotide
caggaagcacuuucagaag

SEQ ID NO: 2169188 - RNA, 19 nt, Artificial Sequence
  Description of Artificial Sequence: Synthetic oligonucleotide
uagaaccuacuugcuuugg

SEQ ID NO: 2169189 - RNA, 19 nt, Artificial Sequence
  Description of Artificial Sequence: Synthetic oligonucleotide
gcaaaacucaauaugaccu

SEQ ID NO: 2169190 - RNA, 19 nt, Artificial Sequence
  Description of Artificial Sequence: Synthetic oligonucleotide
acaagcaagccaaccaaca

SEQ ID NO: 2169191 - RNA, 19 nt, Artificial Sequence
  Description of Artificial Sequence: Synthetic oligonucleotide
agcgacugcccuucuuuag

SEQ ID NO: 2169192 - RNA, 19 nt, Artificial Sequence
  Description of Artificial Sequence: Synthetic oligonucleotide
agccacauacauucuaauu

SEQ ID NO: 2169193 - RNA, 19 nt, Artificial Sequence
  Description of Artificial Sequence: Synthetic oligonucleotide
guuaccaccacgguccaga

SEQ ID NO: 2169194 - RNA, 19 nt, Artificial Sequence
  Description of Artificial Sequence: Synthetic oligonucleotide
ugguagcacucuuuucaug

SEQ ID NO: 2169195 - RNA, 19 nt, Artificial Sequence
  Description of Artificial Sequence: Synthetic oligonucleotide
uguggccacaugucaaguc

SEQ ID NO: 2169196 - RNA, 19 nt, Artificial Sequence
  Description of Artificial Sequence: Synthetic oligonucleotide
uaucuaccuuaacucugac

SEQ ID NO: 2169197 - RNA, 19 nt, Artificial Sequence
  Description of Artificial Sequence: Synthetic oligonucleotide
ugauagccacauacauucu

SEQ ID NO: 2169198 - RNA, 19 nt, Artificial Sequence
  Description of Artificial Sequence: Synthetic oligonucleotide
acucaauaugaccuuccua

SEQ ID NO: 2169199 - RNA, 19 nt, Artificial Sequence
  Description of Artificial Sequence: Synthetic oligonucleotide
cuuaacucugacuucuccu

SEQ ID NO: 2169200 - RNA, 19 nt, Artificial Sequence
  Description of Artificial Sequence: Synthetic oligonucleotide
gggagagugguuucgggug

SEQ ID NO: 2169201 - RNA, 19 nt, Artificial Sequence
  Description of Artificial Sequence: Synthetic oligonucleotide
ugcugcggacaugcgagcg

SEQ ID NO: 2169202 - RNA, 19 nt, Artificial Sequence
  Description of Artificial Sequence: Synthetic oligonucleotide
auuaacccaaaggauuaaa

SEQ ID NO: 2169203 - RNA, 19 nt, Artificial Sequence
  Description of Artificial Sequence: Synthetic oligonucleotide
auagccacauacauucuaa

SEQ ID NO: 2169204 - RNA, 19 nt, Artificial Sequence
  Description of Artificial Sequence: Synthetic oligonucleotide
cuugcccucaaacaaauau

SEQ ID NO: 2169205 - RNA, 19 nt, Artificial Sequence
  Description of Artificial Sequence: Synthetic oligonucleotide
ggcgagugaguccuaagug

SEQ ID NO: 2169206 - RNA, 19 nt, Artificial Sequence
  Description of Artificial Sequence: Synthetic oligonucleotide
caugcgagcgcuggugucc

SEQ ID NO: 2169207 - RNA, 19 nt, Artificial Sequence
  Description of Artificial Sequence: Synthetic oligonucleotide
augcuucucugaauagaac

SEQ ID NO: 2169208 - RNA, 19 nt, Artificial Sequence
  Description of Artificial Sequence: Synthetic oligonucleotide
aaaucccuguggccacaug

SEQ ID NO: 2169209 - RNA, 19 nt, Artificial Sequence
  Description of Artificial Sequence: Synthetic oligonucleotide
cucauucccauacccauaa

SEQ ID NO: 2169210 - RNA, 19 nt, Artificial Sequence
  Description of Artificial Sequence: Synthetic oligonucleotide
caacaagcaagccaaccaa

SEQ ID NO: 2169211 - RNA, 19 nt, Artificial Sequence
  Description of Artificial Sequence: Synthetic oligonucleotide
gaagcuucuacuugcuuuu

SEQ ID NO: 2169212 - RNA, 19 nt, Artificial Sequence
  Description of Artificial Sequence: Synthetic oligonucleotide
acucuucgacuugagcauc

SEQ ID NO: 2169213 - RNA, 19 nt, Artificial Sequence
  Description of Artificial Sequence: Synthetic oligonucleotide
caaccucacucaagagagg

SEQ ID NO: 2169214 - RNA, 19 nt, Artificial Sequence
  Description of Artificial Sequence: Synthetic oligonucleotide
cuauuucuauacacaaugu

SEQ ID NO: 2169215 - RNA, 19 nt, Artificial Sequence
  Description of Artificial Sequence: Synthetic oligonucleotide
auaaugcauugaaagcagu

SEQ ID NO: 2169216 - RNA, 19 nt, Artificial Sequence
  Description of Artificial Sequence: Synthetic oligonucleotide
aguccuaagugaccugcaa

SEQ ID NO: 2169217 - RNA, 19 nt, Artificial Sequence
  Description of Artificial Sequence: Synthetic oligonucleotide
caucaccaaugcugagugg

SEQ ID NO: 2169218 - RNA, 19 nt, Artificial Sequence
  Description of Artificial Sequence: Synthetic oligonucleotide
uuugcggccgaggacuuuc

SEQ ID NO: 2169219 - RNA, 19 nt, Artificial Sequence
  Description of Artificial Sequence: Synthetic oligonucleotide
gaauagaaccuacuugcuu

SEQ ID NO: 2169220 - RNA, 19 nt, Artificial Sequence
  Description of Artificial Sequence: Synthetic oligonucleotide
cugacuuuacaauuguuuu

SEQ ID NO: 2169221 - RNA, 19 nt, Artificial Sequence
  Description of Artificial Sequence: Synthetic oligonucleotide
ugguguccgagcgacugcc

SEQ ID NO: 2169222 - RNA, 19 nt, Artificial Sequence
  Description of Artificial Sequence: Synthetic oligonucleotide
cuugagcaucucugcugcg

SEQ ID NO: 2169223 - RNA, 19 nt, Artificial Sequence
  Description of Artificial Sequence: Synthetic oligonucleotide
ugcuuuggagaggccaggc

SEQ ID NO: 2169224 - RNA, 19 nt, Artificial Sequence
  Description of Artificial Sequence: Synthetic oligonucleotide
gagugaguccuaagugacc

SEQ ID NO: 2169225 - RNA, 19 nt, Artificial Sequence
  Description of Artificial Sequence: Synthetic oligonucleotide
gacccuaacucuucgacuu

SEQ ID NO: 2169226 - RNA, 19 nt, Artificial Sequence
  Description of Artificial Sequence: Synthetic oligonucleotide
gguuguugaacuuacucau

SEQ ID NO: 2169227 - RNA, 19 nt, Artificial Sequence
  Description of Artificial Sequence: Synthetic oligonucleotide
gcauugaaagcaguuacca

SEQ ID NO: 2169228 - RNA, 19 nt, Artificial Sequence
  Description of Artificial Sequence: Synthetic oligonucleotide
gaacuuacucauucccaua

SEQ ID NO: 2169229 - RNA, 19 nt, Artificial Sequence
  Description of Artificial Sequence: Synthetic oligonucleotide
cugagaccuccccaucacc

SEQ ID NO: 2169230 - RNA, 19 nt, Artificial Sequence
  Description of Artificial Sequence: Synthetic oligonucleotide
auggcgagugaguccuaag

SEQ ID NO: 2169231 - RNA, 19 nt, Artificial Sequence
  Description of Artificial Sequence: Synthetic oligonucleotide
ugacucuaucuaccuuaac

SEQ ID NO: 2169232 - RNA, 19 nt, Artificial Sequence
  Description of Artificial Sequence: Synthetic oligonucleotide
acuuccgagugaugcauuu

SEQ ID NO: 2169233 - RNA, 19 nt, Artificial Sequence
  Description of Artificial Sequence: Synthetic oligonucleotide
ugggguccccacaagccaa

SEQ ID NO: 2169234 - RNA, 19 nt, Artificial Sequence
  Description of Artificial Sequence: Synthetic oligonucleotide
ccacauagacuuccgagug

SEQ ID NO: 2169235 - RNA, 19 nt, Artificial Sequence
  Description of Artificial Sequence: Synthetic oligonucleotide
aucccuguggccacauguc

SEQ ID NO: 2169236 - RNA, 19 nt, Artificial Sequence
  Description of Artificial Sequence: Synthetic oligonucleotide
agcuucuacuugcuuuuaa

SEQ ID NO: 2169237 - RNA, 19 nt, Artificial Sequence
  Description of Artificial Sequence: Synthetic oligonucleotide
cuccaaccucacucaagag

SEQ ID NO: 2169238 - RNA, 19 nt, Artificial Sequence
  Description of Artificial Sequence: Synthetic oligonucleotide
gcgagugaguccuaaguga

SEQ ID NO: 2169239 - RNA, 19 nt, Artificial Sequence
  Description of Artificial Sequence: Synthetic oligonucleotide
caagcaagccaaccaacaa

SEQ ID NO: 2169240 - RNA, 19 nt, Artificial Sequence
  Description of Artificial Sequence: Synthetic oligonucleotide
gccacauacauucuaauuu

SEQ ID NO: 2169241 - RNA, 19 nt, Artificial Sequence
  Description of Artificial Sequence: Synthetic oligonucleotide
ccucacucaagagaggcag

SEQ ID NO: 2169242 - RNA, 19 nt, Artificial Sequence
  Description of Artificial Sequence: Synthetic oligonucleotide
cauagacuuccgagugaug

SEQ ID NO: 2169243 - RNA, 19 nt, Artificial Sequence
  Description of Artificial Sequence: Synthetic oligonucleotide
ccuuaacucugacuucucc

SEQ ID NO: 2169244 - RNA, 19 nt, Artificial Sequence
  Description of Artificial Sequence: Synthetic oligonucleotide
agcaucucugcugcggaca

SEQ ID NO: 2169245 - RNA, 19 nt, Artificial Sequence
  Description of Artificial Sequence: Synthetic oligonucleotide
agucaucauuugugguugu

SEQ ID NO: 2169246 - RNA, 19 nt, Artificial Sequence
  Description of Artificial Sequence: Synthetic oligonucleotide
agacuuccgagugaugcau

SEQ ID NO: 2169247 - RNA, 19 nt, Artificial Sequence
  Description of Artificial Sequence: Synthetic oligonucleotide
cugacuucuccuauuucua

SEQ ID NO: 2169248 - RNA, 19 nt, Artificial Sequence
  Description of Artificial Sequence: Synthetic oligonucleotide
aaaaucccuguggccacau

SEQ ID NO: 2169249 - RNA, 19 nt, Artificial Sequence
  Description of Artificial Sequence: Synthetic oligonucleotide
gaccuccccaucaccaaug

SEQ ID NO: 2169250 - RNA, 19 nt, Artificial Sequence
  Description of Artificial Sequence: Synthetic oligonucleotide
acccuaacucuucgacuug

SEQ ID NO: 2169251 - RNA, 19 nt, Artificial Sequence
  Description of Artificial Sequence: Synthetic oligonucleotide
cuaagugaccugcaaggcu

SEQ ID NO: 2169252 - RNA, 19 nt, Artificial Sequence
  Description of Artificial Sequence: Synthetic oligonucleotide
guguauguguuagaauaaa

SEQ ID NO: 2169253 - RNA, 19 nt, Artificial Sequence
  Description of Artificial Sequence: Synthetic oligonucleotide
auacacacaccuggcauuu

SEQ ID NO: 2169254 - RNA, 19 nt, Artificial Sequence
  Description of Artificial Sequence: Synthetic oligonucleotide
cgucuucugagucuuugcg

SEQ ID NO: 2169255 - RNA, 19 nt, Artificial Sequence
  Description of Artificial Sequence: Synthetic oligonucleotide
uaguucuagugcuccucau

SEQ ID NO: 2169256 - RNA, 19 nt, Artificial Sequence
  Description of Artificial Sequence: Synthetic oligonucleotide
uucuagugcuccucaucuu

SEQ ID NO: 2169257 - RNA, 19 nt, Artificial Sequence
  Description of Artificial Sequence: Synthetic oligonucleotide
gguaugcaaaacucaauau

SEQ ID NO: 2169258 - RNA, 19 nt, Artificial Sequence
  Description of Artificial Sequence: Synthetic oligonucleotide
uucgggugugaucgucuuc

SEQ ID NO: 2169259 - RNA, 19 nt, Artificial Sequence
  Description of Artificial Sequence: Synthetic oligonucleotide
uccucaucuugcccucaaa

SEQ ID NO: 2169260 - RNA, 19 nt, Artificial Sequence
  Description of Artificial Sequence: Synthetic oligonucleotide
ucuugcccucaaacaaaua

SEQ ID NO: 2169261 - RNA, 19 nt, Artificial Sequence
  Description of Artificial Sequence: Synthetic oligonucleotide
ggugucacuggcggggagg

SEQ ID NO: 2169262 - RNA, 19 nt, Artificial Sequence
  Description of Artificial Sequence: Synthetic oligonucleotide
uuaccaccacgguccagaa

SEQ ID NO: 2169263 - RNA, 19 nt, Artificial Sequence
  Description of Artificial Sequence: Synthetic oligonucleotide
gcgacugcccuucuuuagc

SEQ ID NO: 2169264 - RNA, 19 nt, Artificial Sequence
  Description of Artificial Sequence: Synthetic oligonucleotide
uacuugcuuuggagaggcc

SEQ ID NO: 2169265 - RNA, 19 nt, Artificial Sequence
  Description of Artificial Sequence: Synthetic oligonucleotide
cacauagacuuccgaguga

SEQ ID NO: 2169266 - RNA, 19 nt, Artificial Sequence
  Description of Artificial Sequence: Synthetic oligonucleotide
cucaagagaggcagguucu

SEQ ID NO: 2169267 - RNA, 19 nt, Artificial Sequence
  Description of Artificial Sequence: Synthetic oligonucleotide
ccgaggacuuuccuuuugg

SEQ ID NO: 2169268 - RNA, 19 nt, Artificial Sequence
  Description of Artificial Sequence: Synthetic oligonucleotide
aucuugcccucaaacaaau

SEQ ID NO: 2169269 - RNA, 19 nt, Artificial Sequence
  Description of Artificial Sequence: Synthetic oligonucleotide
gugaguccuaagugaccug

SEQ ID NO: 2169270 - RNA, 19 nt, Artificial Sequence
  Description of Artificial Sequence: Synthetic oligonucleotide
agaagucuucaugacucua

SEQ ID NO: 2169271 - RNA, 19 nt, Artificial Sequence
  Description of Artificial Sequence: Synthetic oligonucleotide
gagaccuccccaucaccaa

SEQ ID NO: 2169272 - RNA, 19 nt, Artificial Sequence
  Description of Artificial Sequence: Synthetic oligonucleotide
aagugaccugcaaggcuga

SEQ ID NO: 2169273 - RNA, 19 nt, Artificial Sequence
  Description of Artificial Sequence: Synthetic oligonucleotide
ggagggagagugguuucgg

SEQ ID NO: 2169274 - RNA, 19 nt, Artificial Sequence
  Description of Artificial Sequence: Synthetic oligonucleotide
cacccgugggugucacugg

SEQ ID NO: 2169275 - RNA, 19 nt, Artificial Sequence
  Description of Artificial Sequence: Synthetic oligonucleotide
cucugcugcggacaugcga

SEQ ID NO: 2169276 - RNA, 19 nt, Artificial Sequence
  Description of Artificial Sequence: Synthetic oligonucleotide
uugcggccgaggacuuucc

SEQ ID NO: 2169277 - RNA, 19 nt, Artificial Sequence
  Description of Artificial Sequence: Synthetic oligonucleotide
gugaucgucuucugagucu

SEQ ID NO: 2169278 - RNA, 19 nt, Artificial Sequence
  Description of Artificial Sequence: Synthetic oligonucleotide
augcgagcgcugguguccg

SEQ ID NO: 2169279 - RNA, 19 nt, Artificial Sequence
  Description of Artificial Sequence: Synthetic oligonucleotide
augacucuaucuaccuuaa

SEQ ID NO: 2169280 - RNA, 19 nt, Artificial Sequence
  Description of Artificial Sequence: Synthetic oligonucleotide
ucccuccaaccucacucaa

SEQ ID NO: 2169281 - RNA, 19 nt, Artificial Sequence
  Description of Artificial Sequence: Synthetic oligonucleotide
gacaugcgagcgcuggugu

SEQ ID NO: 2169282 - RNA, 19 nt, Artificial Sequence
  Description of Artificial Sequence: Synthetic oligonucleotide
ccaggcuaggugcugcacc

SEQ ID NO: 2169283 - RNA, 19 nt, Artificial Sequence
  Description of Artificial Sequence: Synthetic oligonucleotide
ccaaugcugaguggggucc

SEQ ID NO: 2169284 - RNA, 19 nt, Artificial Sequence
  Description of Artificial Sequence: Synthetic oligonucleotide
uguccgagcgacugcccuu

SEQ ID NO: 2169285 - RNA, 19 nt, Artificial Sequence
  Description of Artificial Sequence: Synthetic oligonucleotide
ucuucgacuugagcaucuc

SEQ ID NO: 2169286 - RNA, 19 nt, Artificial Sequence
  Description of Artificial Sequence: Synthetic oligonucleotide
ccuacuugcuuuggagagg

SEQ ID NO: 2169287 - RNA, 19 nt, Artificial Sequence
  Description of Artificial Sequence: Synthetic oligonucleotide
ucuuugcggccgaggacuu

SEQ ID NO: 2169288 - RNA, 19 nt, Artificial Sequence
  Description of Artificial Sequence: Synthetic oligonucleotide
cuuccgagugaugcauuuc

SEQ ID NO: 2169289 - RNA, 19 nt, Artificial Sequence
  Description of Artificial Sequence: Synthetic oligonucleotide
cauacccauaaugcauuga

SEQ ID NO: 2169290 - RNA, 19 nt, Artificial Sequence
  Description of Artificial Sequence: Synthetic oligonucleotide
ccuaacucuucgacuugag

SEQ ID NO: 2169291 - RNA, 19 nt, Artificial Sequence
  Description of Artificial Sequence: Synthetic oligonucleotide
cgagugaugcauuucccuc

SEQ ID NO: 2169292 - RNA, 19 nt, Artificial Sequence
  Description of Artificial Sequence: Synthetic oligonucleotide
cugcugcggacaugcgagc

SEQ ID NO: 2169293 - RNA, 19 nt, Artificial Sequence
  Description of Artificial Sequence: Synthetic oligonucleotide
cacauggcgagugaguccu

SEQ ID NO: 2169294 - RNA, 19 nt, Artificial Sequence
  Description of Artificial Sequence: Synthetic oligonucleotide
gaguccuaagugaccugca

SEQ ID NO: 2169295 - RNA, 19 nt, Artificial Sequence
  Description of Artificial Sequence: Synthetic oligonucleotide
ccgugggugucacuggcgg

SEQ ID NO: 2169296 - RNA, 19 nt, Artificial Sequence
  Description of Artificial Sequence: Synthetic oligonucleotide
uggagaggccaggcuaggu

SEQ ID NO: 2169297 - RNA, 19 nt, Artificial Sequence
  Description of Artificial Sequence: Synthetic oligonucleotide
ggacaugcgagcgcuggug

SEQ ID NO: 2169298 - RNA, 19 nt, Artificial Sequence
  Description of Artificial Sequence: Synthetic oligonucleotide
ugcggacaugcgagcgcug

SEQ ID NO: 2169299 - RNA, 19 nt, Artificial Sequence
  Description of Artificial Sequence: Synthetic oligonucleotide
ccacauggcgagugagucc

SEQ ID NO: 2169300 - RNA, 19 nt, Artificial Sequence
  Description of Artificial Sequence: Synthetic oligonucleotide
accacgguccagaagucuu

SEQ ID NO: 2169301 - RNA, 19 nt, Artificial Sequence
  Description of Artificial Sequence: Synthetic oligonucleotide
agugaccugcaaggcugag

SEQ ID NO: 2169302 - RNA, 19 nt, Artificial Sequence
  Description of Artificial Sequence: Synthetic oligonucleotide
ccauacccauaaugcauug

SEQ ID NO: 2169303 - RNA, 19 nt, Artificial Sequence
  Description of Artificial Sequence: Synthetic oligonucleotide
ggcugagaccuccccauca

SEQ ID NO: 2169304 - RNA, 19 nt, Artificial Sequence
  Description of Artificial Sequence: Synthetic oligonucleotide
cccucaaacaaauauugau

SEQ ID NO: 2169305 - RNA, 19 nt, Artificial Sequence
  Description of Artificial Sequence: Synthetic oligonucleotide
gagcgacugcccuucuuua

SEQ ID NO: 2169306 - RNA, 19 nt, Artificial Sequence
  Description of Artificial Sequence: Synthetic oligonucleotide
aggcuaggugcugcacccg

SEQ ID NO: 2169307 - RNA, 19 nt, Artificial Sequence
  Description of Artificial Sequence: Synthetic oligonucleotide
gcugcggacaugcgagcgc

SEQ ID NO: 2169308 - RNA, 19 nt, Artificial Sequence
  Description of Artificial Sequence: Synthetic oligonucleotide
ugguuucgggugugaucgu

SEQ ID NO: 2169309 - RNA, 19 nt, Artificial Sequence
  Description of Artificial Sequence: Synthetic oligonucleotide
gcggacaugcgagcgcugg

SEQ ID NO: 2169310 - RNA, 19 nt, Artificial Sequence
  Description of Artificial Sequence: Synthetic oligonucleotide
agccacauggcgagugagu

SEQ ID NO: 2169311 - RNA, 19 nt, Artificial Sequence
  Description of Artificial Sequence: Synthetic oligonucleotide
aguuaccaccacgguccag

SEQ ID NO: 2169312 - RNA, 19 nt, Artificial Sequence
  Description of Artificial Sequence: Synthetic oligonucleotide
gccacauggcgagugaguc

SEQ ID NO: 2169313 - RNA, 19 nt, Artificial Sequence
  Description of Artificial Sequence: Synthetic oligonucleotide
agccaaggaaaaggccaca

SEQ ID NO: 2169314 - RNA, 19 nt, Artificial Sequence
  Description of Artificial Sequence: Synthetic oligonucleotide
cccaaaggauuaaaagaaa

SEQ ID NO: 2169315 - RNA, 19 nt, Artificial Sequence
  Description of Artificial Sequence: Synthetic oligonucleotide
gugaccugcaaggcugaga

SEQ ID NO: 2169316 - RNA, 19 nt, Artificial Sequence
  Description of Artificial Sequence: Synthetic oligonucleotide
acgguccagaagucuucau

SEQ ID NO: 2169317 - RNA, 19 nt, Artificial Sequence
  Description of Artificial Sequence: Synthetic oligonucleotide
cccacaagccaaggaaaag

SEQ ID NO: 2169318 - RNA, 19 nt, Artificial Sequence
  Description of Artificial Sequence: Synthetic oligonucleotide
ugcugcacccguggguguc

SEQ ID NO: 2169319 - RNA, 19 nt, Artificial Sequence
  Description of Artificial Sequence: Synthetic oligonucleotide
cuucgacuugagcaucucu

SEQ ID NO: 2169320 - RNA, 19 nt, Artificial Sequence
  Description of Artificial Sequence: Synthetic oligonucleotide
cgguccagaagucuucaug

SEQ ID NO: 2169321 - RNA, 19 nt, Artificial Sequence
  Description of Artificial Sequence: Synthetic oligonucleotide
cccuccaaccucacucaag

SEQ ID NO: 2169322 - RNA, 19 nt, Artificial Sequence
  Description of Artificial Sequence: Synthetic oligonucleotide
guuucgggugugaucgucu

SEQ ID NO: 2169323 - RNA, 19 nt, Artificial Sequence
  Description of Artificial Sequence: Synthetic oligonucleotide
cucuucgacuugagcaucu

SEQ ID NO: 2169324 - RNA, 19 nt, Artificial Sequence
  Description of Artificial Sequence: Synthetic oligonucleotide
gccgaggacuuuccuuuug

SEQ ID NO: 2169325 - RNA, 19 nt, Artificial Sequence
  Description of Artificial Sequence: Synthetic oligonucleotide
cugguagcacucuuuucau

SEQ ID NO: 2169326 - RNA, 19 nt, Artificial Sequence
  Description of Artificial Sequence: Synthetic oligonucleotide
gguccccacaagccaagga

SEQ ID NO: 2169327 - RNA, 19 nt, Artificial Sequence
  Description of Artificial Sequence: Synthetic oligonucleotide
cacgguccagaagucuuca

SEQ ID NO: 2169328 - RNA, 19 nt, Artificial Sequence
  Description of Artificial Sequence: Synthetic oligonucleotide
guccgagcgacugcccuuc

SEQ ID NO: 2169329 - RNA, 19 nt, Artificial Sequence
  Description of Artificial Sequence: Synthetic oligonucleotide
gguuucgggugugaucguc

SEQ ID NO: 2169330 - RNA, 19 nt, Artificial Sequence
  Description of Artificial Sequence: Synthetic oligonucleotide
cugagucuuugcggccgag

SEQ ID NO: 2169331 - RNA, 19 nt, Artificial Sequence
  Description of Artificial Sequence: Synthetic oligonucleotide
uccgagcgacugcccuucu

SEQ ID NO: 2169332 - RNA, 19 nt, Artificial Sequence
  Description of Artificial Sequence: Synthetic oligonucleotide
gaggcagguucugacccua

SEQ ID NO: 2169333 - RNA, 19 nt, Artificial Sequence
  Description of Artificial Sequence: Synthetic oligonucleotide
ggagagugguuucgggugu

SEQ ID NO: 2169334 - RNA, 19 nt, Artificial Sequence
  Description of Artificial Sequence: Synthetic oligonucleotide
guguccgagcgacugcccu

SEQ ID NO: 2169335 - RNA, 19 nt, Artificial Sequence
  Description of Artificial Sequence: Synthetic oligonucleotide
cccgugggugucacuggcg

SEQ ID NO: 2169336 - RNA, 19 nt, Artificial Sequence
  Description of Artificial Sequence: Synthetic oligonucleotide
cacuggcggggagggagag

SEQ ID NO: 2169337 - RNA, 19 nt, Artificial Sequence
  Description of Artificial Sequence: Synthetic oligonucleotide
augcugaguggggucccca

SEQ ID NO: 2169338 - RNA, 19 nt, Artificial Sequence
  Description of Artificial Sequence: Synthetic oligonucleotide
cauggcgagugaguccuaa

SEQ ID NO: 2169339 - RNA, 19 nt, Artificial Sequence
  Description of Artificial Sequence: Synthetic oligonucleotide
gcccucaaacaaauauuga

SEQ ID NO: 2169340 - RNA, 19 nt, Artificial Sequence
  Description of Artificial Sequence: Synthetic oligonucleotide
ugcacccgugggugucacu

SEQ ID NO: 2169341 - RNA, 19 nt, Artificial Sequence
  Description of Artificial Sequence: Synthetic oligonucleotide
ccacgguccagaagucuuc

SEQ ID NO: 2169342 - RNA, 19 nt, Artificial Sequence
  Description of Artificial Sequence: Synthetic oligonucleotide
caguuaccaccacggucca

SEQ ID NO: 2169343 - RNA, 19 nt, Artificial Sequence
  Description of Artificial Sequence: Synthetic oligonucleotide
gcuaggugcugcacccgug

SEQ ID NO: 2169344 - RNA, 19 nt, Artificial Sequence
  Description of Artificial Sequence: Synthetic oligonucleotide
cgugggugucacuggcggg

SEQ ID NO: 2169345 - RNA, 19 nt, Artificial Sequence
  Description of Artificial Sequence: Synthetic oligonucleotide
cugcugguagcacucuuuu

SEQ ID NO: 2169346 - RNA, 19 nt, Artificial Sequence
  Description of Artificial Sequence: Synthetic oligonucleotide
ugcgagcgcugguguccga

SEQ ID NO: 2169347 - RNA, 19 nt, Artificial Sequence
  Description of Artificial Sequence: Synthetic oligonucleotide
acuggcggggagggagagu

SEQ ID NO: 2169348 - RNA, 19 nt, Artificial Sequence
  Description of Artificial Sequence: Synthetic oligonucleotide
caccaaugcugaguggggu

SEQ ID NO: 2169349 - RNA, 19 nt, Artificial Sequence
  Description of Artificial Sequence: Synthetic oligonucleotide
gguguccgagcgacugccc

SEQ ID NO: 2169350 - RNA, 19 nt, Artificial Sequence
  Description of Artificial Sequence: Synthetic oligonucleotide
ccgagugaugcauuucccu

SEQ ID NO: 2169351 - RNA, 19 nt, Artificial Sequence
  Description of Artificial Sequence: Synthetic oligonucleotide
cugcggacaugcgagcgcu

SEQ ID NO: 2169352 - RNA, 19 nt, Artificial Sequence
  Description of Artificial Sequence: Synthetic oligonucleotide
cgacugcccuucuuuagca

SEQ ID NO: 2169353 - RNA, 19 nt, Artificial Sequence
  Description of Artificial Sequence: Synthetic oligonucleotide
ggcuaggugcugcacccgu

SEQ ID NO: 2169354 - RNA, 19 nt, Artificial Sequence
  Description of Artificial Sequence: Synthetic oligonucleotide
cugcacccgugggugucac

SEQ ID NO: 2169355 - RNA, 19 nt, Artificial Sequence
  Description of Artificial Sequence: Synthetic oligonucleotide
cccuaacucuucgacuuga

SEQ ID NO: 2169356 - RNA, 19 nt, Artificial Sequence
  Description of Artificial Sequence: Synthetic oligonucleotide
ccccaucaccaaugcugag

SEQ ID NO: 2169357 - RNA, 19 nt, Artificial Sequence
  Description of Artificial Sequence: Synthetic oligonucleotide
gacuuccgagugaugcauu

SEQ ID NO: 2169358 - RNA, 19 nt, Artificial Sequence
  Description of Artificial Sequence: Synthetic oligonucleotide
ccccauguaguugaaaauu

SEQ ID NO: 2169359 - RNA, 19 nt, Artificial Sequence
  Description of Artificial Sequence: Synthetic oligonucleotide
cccaucaccaaugcugagu

SEQ ID NO: 2169360 - RNA, 19 nt, Artificial Sequence
  Description of Artificial Sequence: Synthetic oligonucleotide
aggcagguucugacccuaa

SEQ ID NO: 2169361 - RNA, 19 nt, Artificial Sequence
  Description of Artificial Sequence: Synthetic oligonucleotide
caccacgguccagaagucu

SEQ ID NO: 2169362 - RNA, 19 nt, Artificial Sequence
  Description of Artificial Sequence: Synthetic oligonucleotide
gcagagcuuugaaguuguc

SEQ ID NO: 2169363 - RNA, 19 nt, Artificial Sequence
  Description of Artificial Sequence: Synthetic oligonucleotide
cacucaagagaggcagguu

SEQ ID NO: 2169364 - RNA, 19 nt, Artificial Sequence
  Description of Artificial Sequence: Synthetic oligonucleotide
gcggccgaggacuuuccuu

SEQ ID NO: 2169365 - RNA, 19 nt, Artificial Sequence
  Description of Artificial Sequence: Synthetic oligonucleotide
acauggcgagugaguccua

SEQ ID NO: 2169366 - RNA, 19 nt, Artificial Sequence
  Description of Artificial Sequence: Synthetic oligonucleotide
cgagcgacugcccuucuuu

SEQ ID NO: 2169367 - RNA, 19 nt, Artificial Sequence
  Description of Artificial Sequence: Synthetic oligonucleotide
cggccgaggacuuuccuuu

SEQ ID NO: 2169368 - RNA, 19 nt, Artificial Sequence
  Description of Artificial Sequence: Synthetic oligonucleotide
cuuugcggccgaggacuuu

SEQ ID NO: 2169369 - RNA, 19 nt, Artificial Sequence
  Description of Artificial Sequence: Synthetic oligonucleotide
cggacaugcgagcgcuggu

SEQ ID NO: 2169370 - RNA, 19 nt, Artificial Sequence
  Description of Artificial Sequence: Synthetic oligonucleotide
gcggggagggagagugguu

SEQ ID NO: 2169371 - RNA, 19 nt, Artificial Sequence
  Description of Artificial Sequence: Synthetic oligonucleotide
ccgagcgacugcccuucuu

SEQ ID NO: 2169372 - RNA, 19 nt, Artificial Sequence
  Description of Artificial Sequence: Synthetic oligonucleotide
ugauaaaacacacagaaag

SEQ ID NO: 2169373 - RNA, 19 nt, Artificial Sequence
  Description of Artificial Sequence: Synthetic oligonucleotide
aguacaaaacaguaguggc

SEQ ID NO: 2169374 - RNA, 19 nt, Artificial Sequence
  Description of Artificial Sequence: Synthetic oligonucleotide
auccguguagcacagauac

SEQ ID NO: 2169375 - RNA, 19 nt, Artificial Sequence
  Description of Artificial Sequence: Synthetic oligonucleotide
aguagcucagaacugcugc

SEQ ID NO: 2169376 - RNA, 19 nt, Artificial Sequence
  Description of Artificial Sequence: Synthetic oligonucleotide
uuauugguuuaucacaccc

SEQ ID NO: 2169377 - RNA, 19 nt, Artificial Sequence
  Description of Artificial Sequence: Synthetic oligonucleotide
gaauucaugacaaacgaug

SEQ ID NO: 2169378 - RNA, 19 nt, Artificial Sequence
  Description of Artificial Sequence: Synthetic oligonucleotide
ugaucuucagcaauguagc

SEQ ID NO: 2169379 - RNA, 19 nt, Artificial Sequence
  Description of Artificial Sequence: Synthetic oligonucleotide
aacgcugcugcguuacucc

SEQ ID NO: 2169380 - RNA, 19 nt, Artificial Sequence
  Description of Artificial Sequence: Synthetic oligonucleotide
agcaauuauaaacucggag

SEQ ID NO: 2169381 - RNA, 19 nt, Artificial Sequence
  Description of Artificial Sequence: Synthetic oligonucleotide
aaagaccuuuuccagccac

SEQ ID NO: 2169382 - RNA, 19 nt, Artificial Sequence
  Description of Artificial Sequence: Synthetic oligonucleotide
aaaccgagggauuugauuu

SEQ ID NO: 2169383 - RNA, 19 nt, Artificial Sequence
  Description of Artificial Sequence: Synthetic oligonucleotide
aaacaguaguggcugcccc

SEQ ID NO: 2169384 - RNA, 19 nt, Artificial Sequence
  Description of Artificial Sequence: Synthetic oligonucleotide
auuucagcugauaaaacac

SEQ ID NO: 2169385 - RNA, 19 nt, Artificial Sequence
  Description of Artificial Sequence: Synthetic oligonucleotide
gcaauuauaaacucggagc

SEQ ID NO: 2169386 - RNA, 19 nt, Artificial Sequence
  Description of Artificial Sequence: Synthetic oligonucleotide
acagcaauuauaaacucgg

SEQ ID NO: 2169387 - RNA, 19 nt, Artificial Sequence
  Description of Artificial Sequence: Synthetic oligonucleotide
aggcuuaaaagcuuccacg

SEQ ID NO: 2169388 - RNA, 19 nt, Artificial Sequence
  Description of Artificial Sequence: Synthetic oligonucleotide
agcaacuacacugacaaag

SEQ ID NO: 2169389 - RNA, 19 nt, Artificial Sequence
  Description of Artificial Sequence: Synthetic oligonucleotide
gauuucagcugauaaaaca

SEQ ID NO: 2169390 - RNA, 19 nt, Artificial Sequence
  Description of Artificial Sequence: Synthetic oligonucleotide
agaguaaaguacaaaacag

SEQ ID NO: 2169391 - RNA, 19 nt, Artificial Sequence
  Description of Artificial Sequence: Synthetic oligonucleotide
ucuucagcaauguagcaac

SEQ ID NO: 2169392 - RNA, 19 nt, Artificial Sequence
  Description of Artificial Sequence: Synthetic oligonucleotide
guuaccagcauguucuucc

SEQ ID NO: 2169393 - RNA, 19 nt, Artificial Sequence
  Description of Artificial Sequence: Synthetic oligonucleotide
uaaaacacacagaaagcgu

SEQ ID NO: 2169394 - RNA, 19 nt, Artificial Sequence
  Description of Artificial Sequence: Synthetic oligonucleotide
gaacuucugagucuuuagg

SEQ ID NO: 2169395 - RNA, 19 nt, Artificial Sequence
  Description of Artificial Sequence: Synthetic oligonucleotide
uuugauuucagcugauaaa

SEQ ID NO: 2169396 - RNA, 19 nt, Artificial Sequence
  Description of Artificial Sequence: Synthetic oligonucleotide
cagcugauaaaacacacag

SEQ ID NO: 2169397 - RNA, 19 nt, Artificial Sequence
  Description of Artificial Sequence: Synthetic oligonucleotide
ugugcuuucgggaauguuc

SEQ ID NO: 2169398 - RNA, 19 nt, Artificial Sequence
  Description of Artificial Sequence: Synthetic oligonucleotide
uucaugacaaacgaugaca

SEQ ID NO: 2169399 - RNA, 19 nt, Artificial Sequence
  Description of Artificial Sequence: Synthetic oligonucleotide
auaaacucggagcaggacu

SEQ ID NO: 2169400 - RNA, 19 nt, Artificial Sequence
  Description of Artificial Sequence: Synthetic oligonucleotide
aaauguugcucugaaucuc

SEQ ID NO: 2169401 - RNA, 19 nt, Artificial Sequence
  Description of Artificial Sequence: Synthetic oligonucleotide
aauguucggcuguuccagc

SEQ ID NO: 2169402 - RNA, 19 nt, Artificial Sequence
  Description of Artificial Sequence: Synthetic oligonucleotide
uaaacucggagcaggacug

SEQ ID NO: 2169403 - RNA, 19 nt, Artificial Sequence
  Description of Artificial Sequence: Synthetic oligonucleotide
aagaacguggccgccaugg

SEQ ID NO: 2169404 - RNA, 19 nt, Artificial Sequence
  Description of Artificial Sequence: Synthetic oligonucleotide
ugcguuacuccccacagca

SEQ ID NO: 2169405 - RNA, 19 nt, Artificial Sequence
  Description of Artificial Sequence: Synthetic oligonucleotide
aaaagcuuccacggugacc

SEQ ID NO: 2169406 - RNA, 19 nt, Artificial Sequence
  Description of Artificial Sequence: Synthetic oligonucleotide
uauugguuuaucacacccc

SEQ ID NO: 2169407 - RNA, 19 nt, Artificial Sequence
  Description of Artificial Sequence: Synthetic oligonucleotide
ucagcaauguagcaacuac

SEQ ID NO: 2169408 - RNA, 19 nt, Artificial Sequence
  Description of Artificial Sequence: Synthetic oligonucleotide
uauacucugugacgugucg

SEQ ID NO: 2169409 - RNA, 19 nt, Artificial Sequence
  Description of Artificial Sequence: Synthetic oligonucleotide
ucaccaagcacuccaagcu

SEQ ID NO: 2169410 - RNA, 19 nt, Artificial Sequence
  Description of Artificial Sequence: Synthetic oligonucleotide
uuggagaagcuucaccucc

SEQ ID NO: 2169411 - RNA, 19 nt, Artificial Sequence
  Description of Artificial Sequence: Synthetic oligonucleotide
agcuucaccucccucuucc

SEQ ID NO: 2169412 - RNA, 19 nt, Artificial Sequence
  Description of Artificial Sequence: Synthetic oligonucleotide
uuucagcugauaaaacaca

SEQ ID NO: 2169413 - RNA, 19 nt, Artificial Sequence
  Description of Artificial Sequence: Synthetic oligonucleotide
uguucugcaccacucauuc

SEQ ID NO: 2169414 - RNA, 19 nt, Artificial Sequence
  Description of Artificial Sequence: Synthetic oligonucleotide
ucaugacaaacgaugacaa

SEQ ID NO: 2169415 - RNA, 19 nt, Artificial Sequence
  Description of Artificial Sequence: Synthetic oligonucleotide
ucuuuggagaagcuucacc

SEQ ID NO: 2169416 - RNA, 19 nt, Artificial Sequence
  Description of Artificial Sequence: Synthetic oligonucleotide
uauuucugugcuuucggga

SEQ ID NO: 2169417 - RNA, 19 nt, Artificial Sequence
  Description of Artificial Sequence: Synthetic oligonucleotide
aucacauccguguagcaca

SEQ ID NO: 2169418 - RNA, 19 nt, Artificial Sequence
  Description of Artificial Sequence: Synthetic oligonucleotide
uucaccucccucuuccgcg

SEQ ID NO: 2169419 - RNA, 19 nt, Artificial Sequence
  Description of Artificial Sequence: Synthetic oligonucleotide
aaaaccgagggauuugauu

SEQ ID NO: 2169420 - RNA, 19 nt, Artificial Sequence
  Description of Artificial Sequence: Synthetic oligonucleotide
aauguagcaacuacacuga

SEQ ID NO: 2169421 - RNA, 19 nt, Artificial Sequence
  Description of Artificial Sequence: Synthetic oligonucleotide
gcugauaaaacacacagaa

SEQ ID NO: 2169422 - RNA, 19 nt, Artificial Sequence
  Description of Artificial Sequence: Synthetic oligonucleotide
gguuuuauacucugugacg

SEQ ID NO: 2169423 - RNA, 19 nt, Artificial Sequence
  Description of Artificial Sequence: Synthetic oligonucleotide
agcaggacugcuuuucuag

SEQ ID NO: 2169424 - RNA, 19 nt, Artificial Sequence
  Description of Artificial Sequence: Synthetic oligonucleotide
uguagcaacuacacugaca

SEQ ID NO: 2169425 - RNA, 19 nt, Artificial Sequence
  Description of Artificial Sequence: Synthetic oligonucleotide
ucugugacgugucggcacg

SEQ ID NO: 2169426 - RNA, 19 nt, Artificial Sequence
  Description of Artificial Sequence: Synthetic oligonucleotide
ggcuuaaaagcuuccacgg

SEQ ID NO: 2169427 - RNA, 19 nt, Artificial Sequence
  Description of Artificial Sequence: Synthetic oligonucleotide
ccugaauucaugacaaacg

SEQ ID NO: 2169428 - RNA, 19 nt, Artificial Sequence
  Description of Artificial Sequence: Synthetic oligonucleotide
uuauaaacucggagcagga

SEQ ID NO: 2169429 - RNA, 19 nt, Artificial Sequence
  Description of Artificial Sequence: Synthetic oligonucleotide
agaacugcggggauucucc

SEQ ID NO: 2169430 - RNA, 19 nt, Artificial Sequence
  Description of Artificial Sequence: Synthetic oligonucleotide
ucagagguuuuauacucug

SEQ ID NO: 2169431 - RNA, 19 nt, Artificial Sequence
  Description of Artificial Sequence: Synthetic oligonucleotide
ucagcugauaaaacacaca

SEQ ID NO: 2169432 - RNA, 19 nt, Artificial Sequence
  Description of Artificial Sequence: Synthetic oligonucleotide
aaccgagggauuugauuuc

SEQ ID NO: 2169433 - RNA, 19 nt, Artificial Sequence
  Description of Artificial Sequence: Synthetic oligonucleotide
ugcucugaaucucauuugu

SEQ ID NO: 2169434 - RNA, 19 nt, Artificial Sequence
  Description of Artificial Sequence: Synthetic oligonucleotide
ugcaccacucauuccagag

SEQ ID NO: 2169435 - RNA, 19 nt, Artificial Sequence
  Description of Artificial Sequence: Synthetic oligonucleotide
uccagagcuuagcacagcc

SEQ ID NO: 2169436 - RNA, 19 nt, Artificial Sequence
  Description of Artificial Sequence: Synthetic oligonucleotide
uuuauacucugugacgugu

SEQ ID NO: 2169437 - RNA, 19 nt, Artificial Sequence
  Description of Artificial Sequence: Synthetic oligonucleotide
uuuucuagcagggcaaccu

SEQ ID NO: 2169438 - RNA, 19 nt, Artificial Sequence
  Description of Artificial Sequence: Synthetic oligonucleotide
ugaaucucauuuguuguca

SEQ ID NO: 2169439 - RNA, 19 nt, Artificial Sequence
  Description of Artificial Sequence: Synthetic oligonucleotide
aguaaaguacaaaacagua

SEQ ID NO: 2169440 - RNA, 19 nt, Artificial Sequence
  Description of Artificial Sequence: Synthetic oligonucleotide
uuugcggucacguguaaau

SEQ ID NO: 2169441 - RNA, 19 nt, Artificial Sequence
  Description of Artificial Sequence: Synthetic oligonucleotide
gagucuuuagggcucucag

SEQ ID NO: 2169442 - RNA, 19 nt, Artificial Sequence
  Description of Artificial Sequence: Synthetic oligonucleotide
ugauuucagcugauaaaac

SEQ ID NO: 2169443 - RNA, 19 nt, Artificial Sequence
  Description of Artificial Sequence: Synthetic oligonucleotide
uccugaauucaugacaaac

SEQ ID NO: 2169444 - RNA, 19 nt, Artificial Sequence
  Description of Artificial Sequence: Synthetic oligonucleotide
ugacgugucggcacgugag

SEQ ID NO: 2169445 - RNA, 19 nt, Artificial Sequence
  Description of Artificial Sequence: Synthetic oligonucleotide
uuuuauacucugugacgug

SEQ ID NO: 2169446 - RNA, 19 nt, Artificial Sequence
  Description of Artificial Sequence: Synthetic oligonucleotide
gacaguagcucagaacugc

SEQ ID NO: 2169447 - RNA, 19 nt, Artificial Sequence
  Description of Artificial Sequence: Synthetic oligonucleotide
acucauuccagagcuuagc

SEQ ID NO: 2169448 - RNA, 19 nt, Artificial Sequence
  Description of Artificial Sequence: Synthetic oligonucleotide
cugaauucaugacaaacga

SEQ ID NO: 2169449 - RNA, 19 nt, Artificial Sequence
  Description of Artificial Sequence: Synthetic oligonucleotide
gacagauggacagugucug

SEQ ID NO: 2169450 - RNA, 19 nt, Artificial Sequence
  Description of Artificial Sequence: Synthetic oligonucleotide
aggucgugcacaauguucg

SEQ ID NO: 2169451 - RNA, 19 nt, Artificial Sequence
  Description of Artificial Sequence: Synthetic oligonucleotide
agacuccugaauucaugac

SEQ ID NO: 2169452 - RNA, 19 nt, Artificial Sequence
  Description of Artificial Sequence: Synthetic oligonucleotide
gaacguggccgccauggcg

SEQ ID NO: 2169453 - RNA, 19 nt, Artificial Sequence
  Description of Artificial Sequence: Synthetic oligonucleotide
aacugcggggauucuccac

SEQ ID NO: 2169454 - RNA, 19 nt, Artificial Sequence
  Description of Artificial Sequence: Synthetic oligonucleotide
uucuagcagggcaaccucc

SEQ ID NO: 2169455 - RNA, 19 nt, Artificial Sequence
  Description of Artificial Sequence: Synthetic oligonucleotide
gagguuuuauacucuguga

SEQ ID NO: 2169456 - RNA, 19 nt, Artificial Sequence
  Description of Artificial Sequence: Synthetic oligonucleotide
gaauguucuucaccaagca

SEQ ID NO: 2169457 - RNA, 19 nt, Artificial Sequence
  Description of Artificial Sequence: Synthetic oligonucleotide
agaaugguuaccagcaugu

SEQ ID NO: 2169458 - RNA, 19 nt, Artificial Sequence
  Description of Artificial Sequence: Synthetic oligonucleotide
aacaguaguggcugccccu

SEQ ID NO: 2169459 - RNA, 19 nt, Artificial Sequence
  Description of Artificial Sequence: Synthetic oligonucleotide
aaacgcugcugcguuacuc

SEQ ID NO: 2169460 - RNA, 19 nt, Artificial Sequence
  Description of Artificial Sequence: Synthetic oligonucleotide
aggacugcuuuucuagcag

SEQ ID NO: 2169461 - RNA, 19 nt, Artificial Sequence
  Description of Artificial Sequence: Synthetic oligonucleotide
ucuagcagggcaaccucca

SEQ ID NO: 2169462 - RNA, 19 nt, Artificial Sequence
  Description of Artificial Sequence: Synthetic oligonucleotide
ucgugcacaauguucggcu

SEQ ID NO: 2169463 - RNA, 19 nt, Artificial Sequence
  Description of Artificial Sequence: Synthetic oligonucleotide
agcauguucuuccugggau

SEQ ID NO: 2169464 - RNA, 19 nt, Artificial Sequence
  Description of Artificial Sequence: Synthetic oligonucleotide
cuguugaucuucagcaaug

SEQ ID NO: 2169465 - RNA, 19 nt, Artificial Sequence
  Description of Artificial Sequence: Synthetic oligonucleotide
ugcggucacguguaaaugu

SEQ ID NO: 2169466 - RNA, 19 nt, Artificial Sequence
  Description of Artificial Sequence: Synthetic oligonucleotide
ugacaguagcucagaacug

SEQ ID NO: 2169467 - RNA, 19 nt, Artificial Sequence
  Description of Artificial Sequence: Synthetic oligonucleotide
gaacgggcaggccuuugcg

SEQ ID NO: 2169468 - RNA, 19 nt, Artificial Sequence
  Description of Artificial Sequence: Synthetic oligonucleotide
acaauguucggcuguucca

SEQ ID NO: 2169469 - RNA, 19 nt, Artificial Sequence
  Description of Artificial Sequence: Synthetic oligonucleotide
ucacguguaaauguugcuc

SEQ ID NO: 2169470 - RNA, 19 nt, Artificial Sequence
  Description of Artificial Sequence: Synthetic oligonucleotide
aagcuacuggaagacagca

SEQ ID NO: 2169471 - RNA, 19 nt, Artificial Sequence
  Description of Artificial Sequence: Synthetic oligonucleotide
caagcuacuggaagacagc

SEQ ID NO: 2169472 - RNA, 19 nt, Artificial Sequence
  Description of Artificial Sequence: Synthetic oligonucleotide
uguucggcuguuccagcag

SEQ ID NO: 2169473 - RNA, 19 nt, Artificial Sequence
  Description of Artificial Sequence: Synthetic oligonucleotide
cugaaucucauuuguuguc

SEQ ID NO: 2169474 - RNA, 19 nt, Artificial Sequence
  Description of Artificial Sequence: Synthetic oligonucleotide
uuauacucugugacguguc

SEQ ID NO: 2169475 - RNA, 19 nt, Artificial Sequence
  Description of Artificial Sequence: Synthetic oligonucleotide
auguagcaacuacacugac

SEQ ID NO: 2169476 - RNA, 19 nt, Artificial Sequence
  Description of Artificial Sequence: Synthetic oligonucleotide
uggagaagcuucaccuccc

SEQ ID NO: 2169477 - RNA, 19 nt, Artificial Sequence
  Description of Artificial Sequence: Synthetic oligonucleotide
uguaaauguugcucugaau

SEQ ID NO: 2169478 - RNA, 19 nt, Artificial Sequence
  Description of Artificial Sequence: Synthetic oligonucleotide
acauccguguagcacagau

SEQ ID NO: 2169479 - RNA, 19 nt, Artificial Sequence
  Description of Artificial Sequence: Synthetic oligonucleotide
uuucuagcagggcaaccuc

SEQ ID NO: 2169480 - RNA, 19 nt, Artificial Sequence
  Description of Artificial Sequence: Synthetic oligonucleotide
caggcuuaaaagcuuccac

SEQ ID NO: 2169481 - RNA, 19 nt, Artificial Sequence
  Description of Artificial Sequence: Synthetic oligonucleotide
ucacauccguguagcacag

SEQ ID NO: 2169482 - RNA, 19 nt, Artificial Sequence
  Description of Artificial Sequence: Synthetic oligonucleotide
caauguucggcuguuccag

SEQ ID NO: 2169483 - RNA, 19 nt, Artificial Sequence
  Description of Artificial Sequence: Synthetic oligonucleotide
agaacguggccgccauggc

SEQ ID NO: 2169484 - RNA, 19 nt, Artificial Sequence
  Description of Artificial Sequence: Synthetic oligonucleotide
gggaauguucuucaccaag

SEQ ID NO: 2169485 - RNA, 19 nt, Artificial Sequence
  Description of Artificial Sequence: Synthetic oligonucleotide
acugcggggauucuccaca

SEQ ID NO: 2169486 - RNA, 19 nt, Artificial Sequence
  Description of Artificial Sequence: Synthetic oligonucleotide
guuuuauacucugugacgu

SEQ ID NO: 2169487 - RNA, 19 nt, Artificial Sequence
  Description of Artificial Sequence: Synthetic oligonucleotide
uauaaacucggagcaggac

SEQ ID NO: 2169488 - RNA, 19 nt, Artificial Sequence
  Description of Artificial Sequence: Synthetic oligonucleotide
ugucggcacgugagaaugg

SEQ ID NO: 2169489 - RNA, 19 nt, Artificial Sequence
  Description of Artificial Sequence: Synthetic oligonucleotide
ccccacagcaauuauaaac

SEQ ID NO: 2169490 - RNA, 19 nt, Artificial Sequence
  Description of Artificial Sequence: Synthetic oligonucleotide
auacucugugacgugucgg

SEQ ID NO: 2169491 - RNA, 19 nt, Artificial Sequence
  Description of Artificial Sequence: Synthetic oligonucleotide
cuuucgggaauguucuuca

SEQ ID NO: 2169492 - RNA, 19 nt, Artificial Sequence
  Description of Artificial Sequence: Synthetic oligonucleotide
gaguaaaguacaaaacagu

SEQ ID NO: 2169493 - RNA, 19 nt, Artificial Sequence
  Description of Artificial Sequence: Synthetic oligonucleotide
ggauucuccacacuugaca

SEQ ID NO: 2169494 - RNA, 19 nt, Artificial Sequence
  Description of Artificial Sequence: Synthetic oligonucleotide
ggaauguucuucaccaagc

SEQ ID NO: 2169495 - RNA, 19 nt, Artificial Sequence
  Description of Artificial Sequence: Synthetic oligonucleotide
ucuuuccagacuccugaau

SEQ ID NO: 2169496 - RNA, 19 nt, Artificial Sequence
  Description of Artificial Sequence: Synthetic oligonucleotide
uguugucaucaauuucuuc

SEQ ID NO: 2169497 - RNA, 19 nt, Artificial Sequence
  Description of Artificial Sequence: Synthetic oligonucleotide
ugcugcguuacuccccaca

SEQ ID NO: 2169498 - RNA, 19 nt, Artificial Sequence
  Description of Artificial Sequence: Synthetic oligonucleotide
cagacuccugaauucauga

SEQ ID NO: 2169499 - RNA, 19 nt, Artificial Sequence
  Description of Artificial Sequence: Synthetic oligonucleotide
gccagaguaaaguacaaaa

SEQ ID NO: 2169500 - RNA, 19 nt, Artificial Sequence
  Description of Artificial Sequence: Synthetic oligonucleotide
cagagcuuagcacagccga

SEQ ID NO: 2169501 - RNA, 19 nt, Artificial Sequence
  Description of Artificial Sequence: Synthetic oligonucleotide
gagcuuagcacagccgacc

SEQ ID NO: 2169502 - RNA, 19 nt, Artificial Sequence
  Description of Artificial Sequence: Synthetic oligonucleotide
gggauuugauuucagcuga

SEQ ID NO: 2169503 - RNA, 19 nt, Artificial Sequence
  Description of Artificial Sequence: Synthetic oligonucleotide
uuccagacuccugaauuca

SEQ ID NO: 2169504 - RNA, 19 nt, Artificial Sequence
  Description of Artificial Sequence: Synthetic oligonucleotide
acgcugcugcguuacuccc

SEQ ID NO: 2169505 - RNA, 19 nt, Artificial Sequence
  Description of Artificial Sequence: Synthetic oligonucleotide
ugagaaugguuaccagcau

SEQ ID NO: 2169506 - RNA, 19 nt, Artificial Sequence
  Description of Artificial Sequence: Synthetic oligonucleotide
cagggcaaccuccagagga

SEQ ID NO: 2169507 - RNA, 19 nt, Artificial Sequence
  Description of Artificial Sequence: Synthetic oligonucleotide
accucaccgaagaacgugg

SEQ ID NO: 2169508 - RNA, 19 nt, Artificial Sequence
  Description of Artificial Sequence: Synthetic oligonucleotide
uagcucagaacugcugcag

SEQ ID NO: 2169509 - RNA, 19 nt, Artificial Sequence
  Description of Artificial Sequence: Synthetic oligonucleotide
gacucagagguuuuauacu

SEQ ID NO: 2169510 - RNA, 19 nt, Artificial Sequence
  Description of Artificial Sequence: Synthetic oligonucleotide
acguguaaauguugcucug

SEQ ID NO: 2169511 - RNA, 19 nt, Artificial Sequence
  Description of Artificial Sequence: Synthetic oligonucleotide
caucacauccguguagcac

SEQ ID NO: 2169512 - RNA, 19 nt, Artificial Sequence
  Description of Artificial Sequence: Synthetic oligonucleotide
ugagucuuuagggcucuca

SEQ ID NO: 2169513 - RNA, 19 nt, Artificial Sequence
  Description of Artificial Sequence: Synthetic oligonucleotide
agagcuuagcacagccgac

SEQ ID NO: 2169514 - RNA, 19 nt, Artificial Sequence
  Description of Artificial Sequence: Synthetic oligonucleotide
cucaccgaagaacguggcc

SEQ ID NO: 2169515 - RNA, 19 nt, Artificial Sequence
  Description of Artificial Sequence: Synthetic oligonucleotide
uuucugugcuuucgggaau

SEQ ID NO: 2169516 - RNA, 19 nt, Artificial Sequence
  Description of Artificial Sequence: Synthetic oligonucleotide
cucugugacgugucggcac

SEQ ID NO: 2169517 - RNA, 19 nt, Artificial Sequence
  Description of Artificial Sequence: Synthetic oligonucleotide
agcuuagcacagccgaccu

SEQ ID NO: 2169518 - RNA, 19 nt, Artificial Sequence
  Description of Artificial Sequence: Synthetic oligonucleotide
ggacugcuuuucuagcagg

SEQ ID NO: 2169519 - RNA, 19 nt, Artificial Sequence
  Description of Artificial Sequence: Synthetic oligonucleotide
aaaacgcugcugcguuacu

SEQ ID NO: 2169520 - RNA, 19 nt, Artificial Sequence
  Description of Artificial Sequence: Synthetic oligonucleotide
caccgaagaacguggccgc

SEQ ID NO: 2169521 - RNA, 19 nt, Artificial Sequence
  Description of Artificial Sequence: Synthetic oligonucleotide
cacucauuccagagcuuag

SEQ ID NO: 2169522 - RNA, 19 nt, Artificial Sequence
  Description of Artificial Sequence: Synthetic oligonucleotide
auucuccacacuugacagu

SEQ ID NO: 2169523 - RNA, 19 nt, Artificial Sequence
  Description of Artificial Sequence: Synthetic oligonucleotide
cugauaaaacacacagaaa

SEQ ID NO: 2169524 - RNA, 19 nt, Artificial Sequence
  Description of Artificial Sequence: Synthetic oligonucleotide
auguucggcuguuccagca

SEQ ID NO: 2169525 - RNA, 19 nt, Artificial Sequence
  Description of Artificial Sequence: Synthetic oligonucleotide
acgugagaaugguuaccag

SEQ ID NO: 2169526 - RNA, 19 nt, Artificial Sequence
  Description of Artificial Sequence: Synthetic oligonucleotide
cuucaccucccucuuccgc

SEQ ID NO: 2169527 - RNA, 19 nt, Artificial Sequence
  Description of Artificial Sequence: Synthetic oligonucleotide
ccguguagcacagauacag

SEQ ID NO: 2169528 - RNA, 19 nt, Artificial Sequence
  Description of Artificial Sequence: Synthetic oligonucleotide
gugucggcacgugagaaug

SEQ ID NO: 2169529 - RNA, 19 nt, Artificial Sequence
  Description of Artificial Sequence: Synthetic oligonucleotide
cuuuucuagcagggcaacc

SEQ ID NO: 2169530 - RNA, 19 nt, Artificial Sequence
  Description of Artificial Sequence: Synthetic oligonucleotide
acacuugacaguagcucag

SEQ ID NO: 2169531 - RNA, 19 nt, Artificial Sequence
  Description of Artificial Sequence: Synthetic oligonucleotide
uucagcaauguagcaacua

SEQ ID NO: 2169532 - RNA, 19 nt, Artificial Sequence
  Description of Artificial Sequence: Synthetic oligonucleotide
cgugagaaugguuaccagc

SEQ ID NO: 2169533 - RNA, 19 nt, Artificial Sequence
  Description of Artificial Sequence: Synthetic oligonucleotide
agaccuuuuccagccacug

SEQ ID NO: 2169534 - RNA, 19 nt, Artificial Sequence
  Description of Artificial Sequence: Synthetic oligonucleotide
guagcucagaacugcugca

SEQ ID NO: 2169535 - RNA, 19 nt, Artificial Sequence
  Description of Artificial Sequence: Synthetic oligonucleotide
ggucacguguaaauguugc

SEQ ID NO: 2169536 - RNA, 19 nt, Artificial Sequence
  Description of Artificial Sequence: Synthetic oligonucleotide
gcacagauacagaacugcg

SEQ ID NO: 2169537 - RNA, 19 nt, Artificial Sequence
  Description of Artificial Sequence: Synthetic oligonucleotide
acgggcaggccuuugcggu

SEQ ID NO: 2169538 - RNA, 19 nt, Artificial Sequence
  Description of Artificial Sequence: Synthetic oligonucleotide
uugcggucacguguaaaug

SEQ ID NO: 2169539 - RNA, 19 nt, Artificial Sequence
  Description of Artificial Sequence: Synthetic oligonucleotide
aagaccuuuuccagccacu

SEQ ID NO: 2169540 - RNA, 19 nt, Artificial Sequence
  Description of Artificial Sequence: Synthetic oligonucleotide
caguagcucagaacugcug

SEQ ID NO: 2169541 - RNA, 19 nt, Artificial Sequence
  Description of Artificial Sequence: Synthetic oligonucleotide
uccagacuccugaauucau

SEQ ID NO: 2169542 - RNA, 19 nt, Artificial Sequence
  Description of Artificial Sequence: Synthetic oligonucleotide
cacguguaaauguugcucu

SEQ ID NO: 2169543 - RNA, 19 nt, Artificial Sequence
  Description of Artificial Sequence: Synthetic oligonucleotide
uccguguagcacagauaca

SEQ ID NO: 2169544 - RNA, 19 nt, Artificial Sequence
  Description of Artificial Sequence: Synthetic oligonucleotide
gcugcguuacuccccacag

SEQ ID NO: 2169545 - RNA, 19 nt, Artificial Sequence
  Description of Artificial Sequence: Synthetic oligonucleotide
cuccaagcuacuggaagac

SEQ ID NO: 2169546 - RNA, 19 nt, Artificial Sequence
  Description of Artificial Sequence: Synthetic oligonucleotide
agccgaccucuuuccagac

SEQ ID NO: 2169547 - RNA, 19 nt, Artificial Sequence
  Description of Artificial Sequence: Synthetic oligonucleotide
cacgugagaaugguuacca

SEQ ID NO: 2169548 - RNA, 19 nt, Artificial Sequence
  Description of Artificial Sequence: Synthetic oligonucleotide
ucugagucuuuagggcucu

SEQ ID NO: 2169549 - RNA, 19 nt, Artificial Sequence
  Description of Artificial Sequence: Synthetic oligonucleotide
uagggcucucaggaaagga

SEQ ID NO: 2169550 - RNA, 19 nt, Artificial Sequence
  Description of Artificial Sequence: Synthetic oligonucleotide
caggacugcuuuucuagca

SEQ ID NO: 2169551 - RNA, 19 nt, Artificial Sequence
  Description of Artificial Sequence: Synthetic oligonucleotide
uccaagcuacuggaagaca

SEQ ID NO: 2169552 - RNA, 19 nt, Artificial Sequence
  Description of Artificial Sequence: Synthetic oligonucleotide
aacucggagcaggacugcu

SEQ ID NO: 2169553 - RNA, 19 nt, Artificial Sequence
  Description of Artificial Sequence: Synthetic oligonucleotide
uuacuccccacagcaauua

SEQ ID NO: 2169554 - RNA, 19 nt, Artificial Sequence
  Description of Artificial Sequence: Synthetic oligonucleotide
guggcugccccuggaacgg

SEQ ID NO: 2169555 - RNA, 19 nt, Artificial Sequence
  Description of Artificial Sequence: Synthetic oligonucleotide
agcuuccacggugaccagg

SEQ ID NO: 2169556 - RNA, 19 nt, Artificial Sequence
  Description of Artificial Sequence: Synthetic oligonucleotide
caccaccucaccgaagaac

SEQ ID NO: 2169557 - RNA, 19 nt, Artificial Sequence
  Description of Artificial Sequence: Synthetic oligonucleotide
gauuugauuucagcugaua

SEQ ID NO: 2169558 - RNA, 19 nt, Artificial Sequence
  Description of Artificial Sequence: Synthetic oligonucleotide
gcauguucuuccugggaug

SEQ ID NO: 2169559 - RNA, 19 nt, Artificial Sequence
  Description of Artificial Sequence: Synthetic oligonucleotide
gagaagcuucaccucccuc

SEQ ID NO: 2169560 - RNA, 19 nt, Artificial Sequence
  Description of Artificial Sequence: Synthetic oligonucleotide
ugccccuggaacgggcagg

SEQ ID NO: 2169561 - RNA, 19 nt, Artificial Sequence
  Description of Artificial Sequence: Synthetic oligonucleotide
gucgugcacaauguucggc

SEQ ID NO: 2169562 - RNA, 19 nt, Artificial Sequence
  Description of Artificial Sequence: Synthetic oligonucleotide
caacuacacugacaaagaa

SEQ ID NO: 2169563 - RNA, 19 nt, Artificial Sequence
  Description of Artificial Sequence: Synthetic oligonucleotide
caccucaccgaagaacgug

SEQ ID NO: 2169564 - RNA, 19 nt, Artificial Sequence
  Description of Artificial Sequence: Synthetic oligonucleotide
gacgugucggcacgugaga

SEQ ID NO: 2169565 - RNA, 19 nt, Artificial Sequence
  Description of Artificial Sequence: Synthetic oligonucleotide
caccacucauuccagagcu

SEQ ID NO: 2169566 - RNA, 19 nt, Artificial Sequence
  Description of Artificial Sequence: Synthetic oligonucleotide
caagcacuccaagcuacug

SEQ ID NO: 2169567 - RNA, 19 nt, Artificial Sequence
  Description of Artificial Sequence: Synthetic oligonucleotide
gaagaacguggccgccaug

SEQ ID NO: 2169568 - RNA, 19 nt, Artificial Sequence
  Description of Artificial Sequence: Synthetic oligonucleotide
ugugacgugucggcacgug

SEQ ID NO: 2169569 - RNA, 19 nt, Artificial Sequence
  Description of Artificial Sequence: Synthetic oligonucleotide
caugacaaacgaugacaaa

SEQ ID NO: 2169570 - RNA, 19 nt, Artificial Sequence
  Description of Artificial Sequence: Synthetic oligonucleotide
acaguagcucagaacugcu

SEQ ID NO: 2169571 - RNA, 19 nt, Artificial Sequence
  Description of Artificial Sequence: Synthetic oligonucleotide
ggcacgugagaaugguuac

SEQ ID NO: 2169572 - RNA, 19 nt, Artificial Sequence
  Description of Artificial Sequence: Synthetic oligonucleotide
guugaucuucagcaaugua

SEQ ID NO: 2169573 - RNA, 19 nt, Artificial Sequence
  Description of Artificial Sequence: Synthetic oligonucleotide
cagcaauuauaaacucgga

SEQ ID NO: 2169574 - RNA, 19 nt, Artificial Sequence
  Description of Artificial Sequence: Synthetic oligonucleotide
aagcuuccacggugaccag

SEQ ID NO: 2169575 - RNA, 19 nt, Artificial Sequence
  Description of Artificial Sequence: Synthetic oligonucleotide
ggucgugcacaauguucgg

SEQ ID NO: 2169576 - RNA, 19 nt, Artificial Sequence
  Description of Artificial Sequence: Synthetic oligonucleotide
accgagggauuugauuuca

SEQ ID NO: 2169577 - RNA, 19 nt, Artificial Sequence
  Description of Artificial Sequence: Synthetic oligonucleotide
gcaggacugcuuuucuagc

SEQ ID NO: 2169578 - RNA, 19 nt, Artificial Sequence
  Description of Artificial Sequence: Synthetic oligonucleotide
ccagagcuuagcacagccg

SEQ ID NO: 2169579 - RNA, 19 nt, Artificial Sequence
  Description of Artificial Sequence: Synthetic oligonucleotide
acguggccgccauggcgcc

SEQ ID NO: 2169580 - RNA, 19 nt, Artificial Sequence
  Description of Artificial Sequence: Synthetic oligonucleotide
ggggauucuccacacuuga

SEQ ID NO: 2169581 - RNA, 19 nt, Artificial Sequence
  Description of Artificial Sequence: Synthetic oligonucleotide
uacuccccacagcaauuau

SEQ ID NO: 2169582 - RNA, 19 nt, Artificial Sequence
  Description of Artificial Sequence: Synthetic oligonucleotide
agccacuggaacuguugau

SEQ ID NO: 2169583 - RNA, 19 nt, Artificial Sequence
  Description of Artificial Sequence: Synthetic oligonucleotide
gaacugcggggauucucca

SEQ ID NO: 2169584 - RNA, 19 nt, Artificial Sequence
  Description of Artificial Sequence: Synthetic oligonucleotide
gaaucucauuuguugucau

SEQ ID NO: 2169585 - RNA, 19 nt, Artificial Sequence
  Description of Artificial Sequence: Synthetic oligonucleotide
ugcacaauguucggcuguu

SEQ ID NO: 2169586 - RNA, 19 nt, Artificial Sequence
  Description of Artificial Sequence: Synthetic oligonucleotide
ugucccgccuguucugcuc

SEQ ID NO: 2169587 - RNA, 19 nt, Artificial Sequence
  Description of Artificial Sequence: Synthetic oligonucleotide
ccgaccucuuuccagacuc

SEQ ID NO: 2169588 - RNA, 19 nt, Artificial Sequence
  Description of Artificial Sequence: Synthetic oligonucleotide
ucggcacggcgccuucacc

SEQ ID NO: 2169589 - RNA, 19 nt, Artificial Sequence
  Description of Artificial Sequence: Synthetic oligonucleotide
cgagggauuugauuucagc

SEQ ID NO: 2169590 - RNA, 19 nt, Artificial Sequence
  Description of Artificial Sequence: Synthetic oligonucleotide
ugcggggauucuccacacu

SEQ ID NO: 2169591 - RNA, 19 nt, Artificial Sequence
  Description of Artificial Sequence: Synthetic oligonucleotide
cagccgaccucuuuccaga

SEQ ID NO: 2169592 - RNA, 19 nt, Artificial Sequence
  Description of Artificial Sequence: Synthetic oligonucleotide
agccagaguaaaguacaaa

SEQ ID NO: 2169593 - RNA, 19 nt, Artificial Sequence
  Description of Artificial Sequence: Synthetic oligonucleotide
ucccggcucggcacggcgc

SEQ ID NO: 2169594 - RNA, 19 nt, Artificial Sequence
  Description of Artificial Sequence: Synthetic oligonucleotide
uagcaacuacacugacaaa

SEQ ID NO: 2169595 - RNA, 19 nt, Artificial Sequence
  Description of Artificial Sequence: Synthetic oligonucleotide
uccuccggcgugucccgcc

SEQ ID NO: 2169596 - RNA, 19 nt, Artificial Sequence
  Description of Artificial Sequence: Synthetic oligonucleotide
gugacgugucggcacguga

SEQ ID NO: 2169597 - RNA, 19 nt, Artificial Sequence
  Description of Artificial Sequence: Synthetic oligonucleotide
agacaggguccuugaacuu

SEQ ID NO: 2169598 - RNA, 19 nt, Artificial Sequence
  Description of Artificial Sequence: Synthetic oligonucleotide
uccggcgugucccgccugu

SEQ ID NO: 2169599 - RNA, 19 nt, Artificial Sequence
  Description of Artificial Sequence: Synthetic oligonucleotide
accucgcgguccuccggcg

SEQ ID NO: 2169600 - RNA, 19 nt, Artificial Sequence
  Description of Artificial Sequence: Synthetic oligonucleotide
ugaccagguccaacuucau

SEQ ID NO: 2169601 - RNA, 19 nt, Artificial Sequence
  Description of Artificial Sequence: Synthetic oligonucleotide
acucugugacgugucggca

SEQ ID NO: 2169602 - RNA, 19 nt, Artificial Sequence
  Description of Artificial Sequence: Synthetic oligonucleotide
cucagagguuuuauacucu

SEQ ID NO: 2169603 - RNA, 19 nt, Artificial Sequence
  Description of Artificial Sequence: Synthetic oligonucleotide
gugcuuucgggaauguucu

SEQ ID NO: 2169604 - RNA, 19 nt, Artificial Sequence
  Description of Artificial Sequence: Synthetic oligonucleotide
gucacguguaaauguugcu

SEQ ID NO: 2169605 - RNA, 19 nt, Artificial Sequence
  Description of Artificial Sequence: Synthetic oligonucleotide
cugcggggauucuccacac

SEQ ID NO: 2169606 - RNA, 19 nt, Artificial Sequence
  Description of Artificial Sequence: Synthetic oligonucleotide
gucccggcucggcacggcg

SEQ ID NO: 2169607 - RNA, 19 nt, Artificial Sequence
  Description of Artificial Sequence: Synthetic oligonucleotide
ccugggaugggagccaaag

SEQ ID NO: 2169608 - RNA, 19 nt, Artificial Sequence
  Description of Artificial Sequence: Synthetic oligonucleotide
ucggcacgugagaaugguu

SEQ ID NO: 2169609 - RNA, 19 nt, Artificial Sequence
  Description of Artificial Sequence: Synthetic oligonucleotide
gcacagccgaccucuuucc

SEQ ID NO: 2169610 - RNA, 19 nt, Artificial Sequence
  Description of Artificial Sequence: Synthetic oligonucleotide
guaguggcugccccuggaa

SEQ ID NO: 2169611 - RNA, 19 nt, Artificial Sequence
  Description of Artificial Sequence: Synthetic oligonucleotide
gccuucaccaccucaccga

SEQ ID NO: 2169612 - RNA, 19 nt, Artificial Sequence
  Description of Artificial Sequence: Synthetic oligonucleotide
ccacacuugacaguagcuc

SEQ ID NO: 2169613 - RNA, 19 nt, Artificial Sequence
  Description of Artificial Sequence: Synthetic oligonucleotide
gcuuucgggaauguucuuc

SEQ ID NO: 2169614 - RNA, 19 nt, Artificial Sequence
  Description of Artificial Sequence: Synthetic oligonucleotide
cucgcgguccuccggcgug

SEQ ID NO: 2169615 - RNA, 19 nt, Artificial Sequence
  Description of Artificial Sequence: Synthetic oligonucleotide
ggaugggagccaaagaccu

SEQ ID NO: 2169616 - RNA, 19 nt, Artificial Sequence
  Description of Artificial Sequence: Synthetic oligonucleotide
cuccgucccggcucggcac

SEQ ID NO: 2169617 - RNA, 19 nt, Artificial Sequence
  Description of Artificial Sequence: Synthetic oligonucleotide
uuagcacagccgaccucuu

SEQ ID NO: 2169618 - RNA, 19 nt, Artificial Sequence
  Description of Artificial Sequence: Synthetic oligonucleotide
uagcacagccgaccucuuu

SEQ ID NO: 2169619 - RNA, 19 nt, Artificial Sequence
  Description of Artificial Sequence: Synthetic oligonucleotide
gcucucaggaaaggagaag

SEQ ID NO: 2169620 - RNA, 19 nt, Artificial Sequence
  Description of Artificial Sequence: Synthetic oligonucleotide
gcugcugcguuacucccca

SEQ ID NO: 2169621 - RNA, 19 nt, Artificial Sequence
  Description of Artificial Sequence: Synthetic oligonucleotide
cagcauguucuuccuggga

SEQ ID NO: 2169622 - RNA, 19 nt, Artificial Sequence
  Description of Artificial Sequence: Synthetic oligonucleotide
cugcaggcaggucgugcac

SEQ ID NO: 2169623 - RNA, 19 nt, Artificial Sequence
  Description of Artificial Sequence: Synthetic oligonucleotide
gcuguuccagcagugggca

SEQ ID NO: 2169624 - RNA, 19 nt, Artificial Sequence
  Description of Artificial Sequence: Synthetic oligonucleotide
cugccccuggaacgggcag

SEQ ID NO: 2169625 - RNA, 19 nt, Artificial Sequence
  Description of Artificial Sequence: Synthetic oligonucleotide
cauccguguagcacagaua

SEQ ID NO: 2169626 - RNA, 19 nt, Artificial Sequence
  Description of Artificial Sequence: Synthetic oligonucleotide
acgugucggcacgugagaa

SEQ ID NO: 2169627 - RNA, 19 nt, Artificial Sequence
  Description of Artificial Sequence: Synthetic oligonucleotide
ugcuuucgggaauguucuu

SEQ ID NO: 2169628 - RNA, 19 nt, Artificial Sequence
  Description of Artificial Sequence: Synthetic oligonucleotide
gugcacaauguucggcugu

SEQ ID NO: 2169629 - RNA, 19 nt, Artificial Sequence
  Description of Artificial Sequence: Synthetic oligonucleotide
cagagguuuuauacucugu

SEQ ID NO: 2169630 - RNA, 19 nt, Artificial Sequence
  Description of Artificial Sequence: Synthetic oligonucleotide
caccaagcacuccaagcua

SEQ ID NO: 2169631 - RNA, 19 nt, Artificial Sequence
  Description of Artificial Sequence: Synthetic oligonucleotide
uggaacgggcaggccuuug

SEQ ID NO: 2169632 - RNA, 19 nt, Artificial Sequence
  Description of Artificial Sequence: Synthetic oligonucleotide
cacggugaccagguccaac

SEQ ID NO: 2169633 - RNA, 19 nt, Artificial Sequence
  Description of Artificial Sequence: Synthetic oligonucleotide
ucggagcaggacugcuuuu

SEQ ID NO: 2169634 - RNA, 19 nt, Artificial Sequence
  Description of Artificial Sequence: Synthetic oligonucleotide
cacuugacaguagcucaga

SEQ ID NO: 2169635 - RNA, 19 nt, Artificial Sequence
  Description of Artificial Sequence: Synthetic oligonucleotide
ggccuuugcggucacgugu

SEQ ID NO: 2169636 - RNA, 19 nt, Artificial Sequence
  Description of Artificial Sequence: Synthetic oligonucleotide
cugcaccacucauuccaga

SEQ ID NO: 2169637 - RNA, 19 nt, Artificial Sequence
  Description of Artificial Sequence: Synthetic oligonucleotide
ccaacuucaucacauccgu

SEQ ID NO: 2169638 - RNA, 19 nt, Artificial Sequence
  Description of Artificial Sequence: Synthetic oligonucleotide
gaccucuuuccagacuccu

SEQ ID NO: 2169639 - RNA, 19 nt, Artificial Sequence
  Description of Artificial Sequence: Synthetic oligonucleotide
uccugggaugggagccaaa

SEQ ID NO: 2169640 - RNA, 19 nt, Artificial Sequence
  Description of Artificial Sequence: Synthetic oligonucleotide
auguugcucugaaucucau

SEQ ID NO: 2169641 - RNA, 19 nt, Artificial Sequence
  Description of Artificial Sequence: Synthetic oligonucleotide
ggacagauggacagugucu

SEQ ID NO: 2169642 - RNA, 19 nt, Artificial Sequence
  Description of Artificial Sequence: Synthetic oligonucleotide
cuuugcggucacguguaaa

SEQ ID NO: 2169643 - RNA, 19 nt, Artificial Sequence
  Description of Artificial Sequence: Synthetic oligonucleotide
gguuaccagcauguucuuc

SEQ ID NO: 2169644 - RNA, 19 nt, Artificial Sequence
  Description of Artificial Sequence: Synthetic oligonucleotide
gggauucuccacacuugac

SEQ ID NO: 2169645 - RNA, 19 nt, Artificial Sequence
  Description of Artificial Sequence: Synthetic oligonucleotide
ccgagggauuugauuucag

SEQ ID NO: 2169646 - RNA, 19 nt, Artificial Sequence
  Description of Artificial Sequence: Synthetic oligonucleotide
agguagacucagagguuuu

SEQ ID NO: 2169647 - RNA, 19 nt, Artificial Sequence
  Description of Artificial Sequence: Synthetic oligonucleotide
ccgccuguucugcucuucc

SEQ ID NO: 2169648 - RNA, 19 nt, Artificial Sequence
  Description of Artificial Sequence: Synthetic oligonucleotide
guuacuccccacagcaauu

SEQ ID NO: 2169649 - RNA, 19 nt, Artificial Sequence
  Description of Artificial Sequence: Synthetic oligonucleotide
gaaugguuaccagcauguu

SEQ ID NO: 2169650 - RNA, 19 nt, Artificial Sequence
  Description of Artificial Sequence: Synthetic oligonucleotide
gcgccuucaccaccucacc

SEQ ID NO: 2169651 - RNA, 19 nt, Artificial Sequence
  Description of Artificial Sequence: Synthetic oligonucleotide
gguagacucagagguuuua

SEQ ID NO: 2169652 - RNA, 19 nt, Artificial Sequence
  Description of Artificial Sequence: Synthetic oligonucleotide
cggggauucuccacacuug

SEQ ID NO: 2169653 - RNA, 19 nt, Artificial Sequence
  Description of Artificial Sequence: Synthetic oligonucleotide
cggucacguguaaauguug

SEQ ID NO: 2169654 - RNA, 19 nt, Artificial Sequence
  Description of Artificial Sequence: Synthetic oligonucleotide
gucggcacgugagaauggu

SEQ ID NO: 2169655 - RNA, 19 nt, Artificial Sequence
  Description of Artificial Sequence: Synthetic oligonucleotide
caggccuuugcggucacgu

SEQ ID NO: 2169656 - RNA, 19 nt, Artificial Sequence
  Description of Artificial Sequence: Synthetic oligonucleotide
cacggcgccuucaccaccu

SEQ ID NO: 2169657 - RNA, 19 nt, Artificial Sequence
  Description of Artificial Sequence: Synthetic oligonucleotide
gcaggcaggucgugcacaa

SEQ ID NO: 2169658 - RNA, 19 nt, Artificial Sequence
  Description of Artificial Sequence: Synthetic oligonucleotide
gucccgccuguucugcucu

SEQ ID NO: 2169659 - RNA, 19 nt, Artificial Sequence
  Description of Artificial Sequence: Synthetic oligonucleotide
ucgcgguccuccggcgugu

SEQ ID NO: 2169660 - RNA, 19 nt, Artificial Sequence
  Description of Artificial Sequence: Synthetic oligonucleotide
gcuguucugcaccacucau

SEQ ID NO: 2169661 - RNA, 19 nt, Artificial Sequence
  Description of Artificial Sequence: Synthetic oligonucleotide
gcgugucccgccuguucug

SEQ ID NO: 2169662 - RNA, 19 nt, Artificial Sequence
  Description of Artificial Sequence: Synthetic oligonucleotide
gccccuggaacgggcaggc

SEQ ID NO: 2169663 - RNA, 19 nt, Artificial Sequence
  Description of Artificial Sequence: Synthetic oligonucleotide
cguguaaauguugcucuga

SEQ ID NO: 2169664 - RNA, 19 nt, Artificial Sequence
  Description of Artificial Sequence: Synthetic oligonucleotide
gcggggauucuccacacuu

SEQ ID NO: 2169665 - RNA, 19 nt, Artificial Sequence
  Description of Artificial Sequence: Synthetic oligonucleotide
cugcugcguuacuccccac

SEQ ID NO: 2169666 - RNA, 19 nt, Artificial Sequence
  Description of Artificial Sequence: Synthetic oligonucleotide
ccacucauuccagagcuua

SEQ ID NO: 2169667 - RNA, 19 nt, Artificial Sequence
  Description of Artificial Sequence: Synthetic oligonucleotide
ggcaggucgugcacaaugu

SEQ ID NO: 2169668 - RNA, 19 nt, Artificial Sequence
  Description of Artificial Sequence: Synthetic oligonucleotide
gccuuugcggucacgugua

SEQ ID NO: 2169669 - RNA, 19 nt, Artificial Sequence
  Description of Artificial Sequence: Synthetic oligonucleotide
ucccgccuguucugcucuu

SEQ ID NO: 2169670 - RNA, 19 nt, Artificial Sequence
  Description of Artificial Sequence: Synthetic oligonucleotide
caaccuccagaggaguuuu

SEQ ID NO: 2169671 - RNA, 19 nt, Artificial Sequence
  Description of Artificial Sequence: Synthetic oligonucleotide
cggcacggcgccuucacca

SEQ ID NO: 2169672 - RNA, 19 nt, Artificial Sequence
  Description of Artificial Sequence: Synthetic oligonucleotide
ccggaccucgcgguccucc

SEQ ID NO: 2169673 - RNA, 19 nt, Artificial Sequence
  Description of Artificial Sequence: Synthetic oligonucleotide
cgugucccgccuguucugc

SEQ ID NO: 2169674 - RNA, 19 nt, Artificial Sequence
  Description of Artificial Sequence: Synthetic oligonucleotide
ggauuugauuucagcugau

SEQ ID NO: 2169675 - RNA, 19 nt, Artificial Sequence
  Description of Artificial Sequence: Synthetic oligonucleotide
gcaggccuuugcggucacg

SEQ ID NO: 2169676 - RNA, 19 nt, Artificial Sequence
  Description of Artificial Sequence: Synthetic oligonucleotide
guccuccggcgugucccgc

SEQ ID NO: 2169677 - RNA, 19 nt, Artificial Sequence
  Description of Artificial Sequence: Synthetic oligonucleotide
gcaaccuccagaggaguuu

SEQ ID NO: 2169678 - RNA, 19 nt, Artificial Sequence
  Description of Artificial Sequence: Synthetic oligonucleotide
cacauccguguagcacaga

SEQ ID NO: 2169679 - RNA, 19 nt, Artificial Sequence
  Description of Artificial Sequence: Synthetic oligonucleotide
ccgccgccggaccucgcgg

SEQ ID NO: 2169680 - RNA, 19 nt, Artificial Sequence
  Description of Artificial Sequence: Synthetic oligonucleotide
gcgguccuccggcgugucc

SEQ ID NO: 2169681 - RNA, 19 nt, Artificial Sequence
  Description of Artificial Sequence: Synthetic oligonucleotide
gcaggucgugcacaauguu

SEQ ID NO: 2169682 - RNA, 19 nt, Artificial Sequence
  Description of Artificial Sequence: Synthetic oligonucleotide
gcggucacguguaaauguu

SEQ ID NO: 2169683 - RNA, 19 nt, Artificial Sequence
  Description of Artificial Sequence: Synthetic oligonucleotide
ccuccgucccggcucggca

SEQ ID NO: 2169684 - RNA, 19 nt, Artificial Sequence
  Description of Artificial Sequence: Synthetic oligonucleotide
cuccuccgucccggcucgg

SEQ ID NO: 2169685 - RNA, 19 nt, Artificial Sequence
  Description of Artificial Sequence: Synthetic oligonucleotide
ccgccggaccucgcggucc

SEQ ID NO: 2169686 - RNA, 19 nt, Artificial Sequence
  Description of Artificial Sequence: Synthetic oligonucleotide
gccgaccucuuuccagacu

SEQ ID NO: 2169687 - RNA, 19 nt, Artificial Sequence
  Description of Artificial Sequence: Synthetic oligonucleotide
ccuggaacgggcaggccuu

SEQ ID NO: 2169688 - RNA, 19 nt, Artificial Sequence
  Description of Artificial Sequence: Synthetic oligonucleotide
gcguuacuccccacagcaa

SEQ ID NO: 2169689 - RNA, 19 nt, Artificial Sequence
  Description of Artificial Sequence: Synthetic oligonucleotide
gccgccggaccucgcgguc

SEQ ID NO: 2169690 - RNA, 19 nt, Artificial Sequence
  Description of Artificial Sequence: Synthetic oligonucleotide
ggcaaccuccagaggaguu

SEQ ID NO: 2169691 - RNA, 19 nt, Artificial Sequence
  Description of Artificial Sequence: Synthetic oligonucleotide
cgggaauguucuucaccaa

SEQ ID NO: 2169692 - RNA, 19 nt, Artificial Sequence
  Description of Artificial Sequence: Synthetic oligonucleotide
cugugacgugucggcacgu

SEQ ID NO: 2169693 - RNA, 19 nt, Artificial Sequence
  Description of Artificial Sequence: Synthetic oligonucleotide
ccuuugcggucacguguaa

SEQ ID NO: 2169694 - RNA, 19 nt, Artificial Sequence
  Description of Artificial Sequence: Synthetic oligonucleotide
cccgccuguucugcucuuc

SEQ ID NO: 2169695 - RNA, 19 nt, Artificial Sequence
  Description of Artificial Sequence: Synthetic oligonucleotide
cggcgugucccgccuguuc

SEQ ID NO: 2169696 - RNA, 19 nt, Artificial Sequence
  Description of Artificial Sequence: Synthetic oligonucleotide
ccgucccggcucggcacgg

SEQ ID NO: 2169697 - RNA, 19 nt, Artificial Sequence
  Description of Artificial Sequence: Synthetic oligonucleotide
cgaagaacguggccgccau

SEQ ID NO: 2169698 - RNA, 19 nt, Artificial Sequence
  Description of Artificial Sequence: Synthetic oligonucleotide
cgugucggcacgugagaau

SEQ ID NO: 2169699 - RNA, 19 nt, Artificial Sequence
  Description of Artificial Sequence: Synthetic oligonucleotide
cuggaacgggcaggccuuu

SEQ ID NO: 2169700 - RNA, 19 nt, Artificial Sequence
  Description of Artificial Sequence: Synthetic oligonucleotide
caggcaggucgugcacaau

SEQ ID NO: 2169701 - RNA, 19 nt, Artificial Sequence
  Description of Artificial Sequence: Synthetic oligonucleotide
cggcgccuucaccaccuca

SEQ ID NO: 2169702 - RNA, 19 nt, Artificial Sequence
  Description of Artificial Sequence: Synthetic oligonucleotide
cgucccggcucggcacggc

SEQ ID NO: 2169703 - RNA, 19 nt, Artificial Sequence
  Description of Artificial Sequence: Synthetic oligonucleotide
ccuccggcgugucccgccu

SEQ ID NO: 2169704 - RNA, 19 nt, Artificial Sequence
  Description of Artificial Sequence: Synthetic oligonucleotide
ccucgcgguccuccggcgu

SEQ ID NO: 2169705 - RNA, 19 nt, Artificial Sequence
  Description of Artificial Sequence: Synthetic oligonucleotide
cgcgccagccgccgccgga

SEQ ID NO: 2169706 - RNA, 19 nt, Artificial Sequence
  Description of Artificial Sequence: Synthetic oligonucleotide
cgcgguccuccggcguguc

SEQ ID NO: 2169707 - RNA, 19 nt, Artificial Sequence
  Description of Artificial Sequence: Synthetic oligonucleotide
cgccggaccucgcgguccu

SEQ ID NO: 2169708 - RNA, 19 nt, Artificial Sequence
  Description of Artificial Sequence: Synthetic oligonucleotide
ccggcgugucccgccuguu

SEQ ID NO: 2169709 - RNA, 19 nt, Artificial Sequence
  Description of Artificial Sequence: Synthetic oligonucleotide
gaaaauaacaucaaaaggc

SEQ ID NO: 2169710 - RNA, 19 nt, Artificial Sequence
  Description of Artificial Sequence: Synthetic oligonucleotide
uguuaaguaaucuuguugg

SEQ ID NO: 2169711 - RNA, 19 nt, Artificial Sequence
  Description of Artificial Sequence: Synthetic oligonucleotide
augauauuuaguuauacac

SEQ ID NO: 2169712 - RNA, 19 nt, Artificial Sequence
  Description of Artificial Sequence: Synthetic oligonucleotide
uuauuaaccauuuuaaaug

SEQ ID NO: 2169713 - RNA, 19 nt, Artificial Sequence
  Description of Artificial Sequence: Synthetic oligonucleotide
aauguuauggaaaagacug

SEQ ID NO: 2169714 - RNA, 19 nt, Artificial Sequence
  Description of Artificial Sequence: Synthetic oligonucleotide
auaucuuacacuuauuuuc

SEQ ID NO: 2169715 - RNA, 19 nt, Artificial Sequence
  Description of Artificial Sequence: Synthetic oligonucleotide
uuuuauaugauauuuaguu

SEQ ID NO: 2169716 - RNA, 19 nt, Artificial Sequence
  Description of Artificial Sequence: Synthetic oligonucleotide
aauacguucauucauguaa

SEQ ID NO: 2169717 - RNA, 19 nt, Artificial Sequence
  Description of Artificial Sequence: Synthetic oligonucleotide
auaaauuucugucuucccc

SEQ ID NO: 2169718 - RNA, 19 nt, Artificial Sequence
  Description of Artificial Sequence: Synthetic oligonucleotide
aagucuaaauuuuauauga

SEQ ID NO: 2169719 - RNA, 19 nt, Artificial Sequence
  Description of Artificial Sequence: Synthetic oligonucleotide
uaaacuuuucagcauauag

SEQ ID NO: 2169720 - RNA, 19 nt, Artificial Sequence
  Description of Artificial Sequence: Synthetic oligonucleotide
uuuaguuauacacuuaagu

SEQ ID NO: 2169721 - RNA, 19 nt, Artificial Sequence
  Description of Artificial Sequence: Synthetic oligonucleotide
auucauguaauucauauga

SEQ ID NO: 2169722 - RNA, 19 nt, Artificial Sequence
  Description of Artificial Sequence: Synthetic oligonucleotide
ucaauguuaaguaaucuug

SEQ ID NO: 2169723 - RNA, 19 nt, Artificial Sequence
  Description of Artificial Sequence: Synthetic oligonucleotide
aauaaauuucugucuuccc

SEQ ID NO: 2169724 - RNA, 19 nt, Artificial Sequence
  Description of Artificial Sequence: Synthetic oligonucleotide
uaauucauaugauauuugg

SEQ ID NO: 2169725 - RNA, 19 nt, Artificial Sequence
  Description of Artificial Sequence: Synthetic oligonucleotide
uuaaccacggaccagaagu

SEQ ID NO: 2169726 - RNA, 19 nt, Artificial Sequence
  Description of Artificial Sequence: Synthetic oligonucleotide
uucaaauaaacuuuucagc

SEQ ID NO: 2169727 - RNA, 19 nt, Artificial Sequence
  Description of Artificial Sequence: Synthetic oligonucleotide
guaacaguguauuagaaug

SEQ ID NO: 2169728 - RNA, 19 nt, Artificial Sequence
  Description of Artificial Sequence: Synthetic oligonucleotide
auaaaagucagaucaagug

SEQ ID NO: 2169729 - RNA, 19 nt, Artificial Sequence
  Description of Artificial Sequence: Synthetic oligonucleotide
aaugguaggaaguaacuga

SEQ ID NO: 2169730 - RNA, 19 nt, Artificial Sequence
  Description of Artificial Sequence: Synthetic oligonucleotide
aaaauaaauuucugucuuc

SEQ ID NO: 2169731 - RNA, 19 nt, Artificial Sequence
  Description of Artificial Sequence: Synthetic oligonucleotide
uuauaugauauuuaguuau

SEQ ID NO: 2169732 - RNA, 19 nt, Artificial Sequence
  Description of Artificial Sequence: Synthetic oligonucleotide
uuuauuucaauguuaagua

SEQ ID NO: 2169733 - RNA, 19 nt, Artificial Sequence
  Description of Artificial Sequence: Synthetic oligonucleotide
auucauaugauauuuggga

SEQ ID NO: 2169734 - RNA, 19 nt, Artificial Sequence
  Description of Artificial Sequence: Synthetic oligonucleotide
auacacuuaaguuuauaac

SEQ ID NO: 2169735 - RNA, 19 nt, Artificial Sequence
  Description of Artificial Sequence: Synthetic oligonucleotide
aucaaauuaaccacggacc

SEQ ID NO: 2169736 - RNA, 19 nt, Artificial Sequence
  Description of Artificial Sequence: Synthetic oligonucleotide
uuuacgauuaauacaggca

SEQ ID NO: 2169737 - RNA, 19 nt, Artificial Sequence
  Description of Artificial Sequence: Synthetic oligonucleotide
aaauuuuacauaucuuaca

SEQ ID NO: 2169738 - RNA, 19 nt, Artificial Sequence
  Description of Artificial Sequence: Synthetic oligonucleotide
ugauauuugggaaauauuu

SEQ ID NO: 2169739 - RNA, 19 nt, Artificial Sequence
  Description of Artificial Sequence: Synthetic oligonucleotide
uuaucuggacauaaaauga

SEQ ID NO: 2169740 - RNA, 19 nt, Artificial Sequence
  Description of Artificial Sequence: Synthetic oligonucleotide
aaauagcuaauauggcuuc

SEQ ID NO: 2169741 - RNA, 19 nt, Artificial Sequence
  Description of Artificial Sequence: Synthetic oligonucleotide
agauaauacacauuuaaaa

SEQ ID NO: 2169742 - RNA, 19 nt, Artificial Sequence
  Description of Artificial Sequence: Synthetic oligonucleotide
aauaacaucaaaaggcuca

SEQ ID NO: 2169743 - RNA, 19 nt, Artificial Sequence
  Description of Artificial Sequence: Synthetic oligonucleotide
uuuuacauaucuuacacuu

SEQ ID NO: 2169744 - RNA, 19 nt, Artificial Sequence
  Description of Artificial Sequence: Synthetic oligonucleotide
uuuagcguaauugagaaaa

SEQ ID NO: 2169745 - RNA, 19 nt, Artificial Sequence
  Description of Artificial Sequence: Synthetic oligonucleotide
ugauauuuaguuauacacu

SEQ ID NO: 2169746 - RNA, 19 nt, Artificial Sequence
  Description of Artificial Sequence: Synthetic oligonucleotide
aaaaugaggauuuuccuuu

SEQ ID NO: 2169747 - RNA, 19 nt, Artificial Sequence
  Description of Artificial Sequence: Synthetic oligonucleotide
aauauggcuucauucaacu

SEQ ID NO: 2169748 - RNA, 19 nt, Artificial Sequence
  Description of Artificial Sequence: Synthetic oligonucleotide
uuaaguuuauaacuggguc

SEQ ID NO: 2169749 - RNA, 19 nt, Artificial Sequence
  Description of Artificial Sequence: Synthetic oligonucleotide
uuuuacgauuaauacaggc

SEQ ID NO: 2169750 - RNA, 19 nt, Artificial Sequence
  Description of Artificial Sequence: Synthetic oligonucleotide
uaaccauuuuaaaugguag

SEQ ID NO: 2169751 - RNA, 19 nt, Artificial Sequence
  Description of Artificial Sequence: Synthetic oligonucleotide
uuacgauuaauacaggcaa

SEQ ID NO: 2169752 - RNA, 19 nt, Artificial Sequence
  Description of Artificial Sequence: Synthetic oligonucleotide
aauucauaugauauuuggg

SEQ ID NO: 2169753 - RNA, 19 nt, Artificial Sequence
  Description of Artificial Sequence: Synthetic oligonucleotide
uauuuaguuauacacuuaa

SEQ ID NO: 2169754 - RNA, 19 nt, Artificial Sequence
  Description of Artificial Sequence: Synthetic oligonucleotide
aacaagauaaaagucagau

SEQ ID NO: 2169755 - RNA, 19 nt, Artificial Sequence
  Description of Artificial Sequence: Synthetic oligonucleotide
cauuuuaaaugguaggaag

SEQ ID NO: 2169756 - RNA, 19 nt, Artificial Sequence
  Description of Artificial Sequence: Synthetic oligonucleotide
ucugaaaauguuauggaaa

SEQ ID NO: 2169757 - RNA, 19 nt, Artificial Sequence
  Description of Artificial Sequence: Synthetic oligonucleotide
uuaguuauacacuuaaguu

SEQ ID NO: 2169758 - RNA, 19 nt, Artificial Sequence
  Description of Artificial Sequence: Synthetic oligonucleotide
uaaguuuauaacuggguca

SEQ ID NO: 2169759 - RNA, 19 nt, Artificial Sequence
  Description of Artificial Sequence: Synthetic oligonucleotide
uugauuuuagcguaauuga

SEQ ID NO: 2169760 - RNA, 19 nt, Artificial Sequence
  Description of Artificial Sequence: Synthetic oligonucleotide
uuuaacaguccuaaauuac

SEQ ID NO: 2169761 - RNA, 19 nt, Artificial Sequence
  Description of Artificial Sequence: Synthetic oligonucleotide
ugauuuuagcguaauugag

SEQ ID NO: 2169762 - RNA, 19 nt, Artificial Sequence
  Description of Artificial Sequence: Synthetic oligonucleotide
caugaagcagauaauacac

SEQ ID NO: 2169763 - RNA, 19 nt, Artificial Sequence
  Description of Artificial Sequence: Synthetic oligonucleotide
gaaaagacuguuaaugacc

SEQ ID NO: 2169764 - RNA, 19 nt, Artificial Sequence
  Description of Artificial Sequence: Synthetic oligonucleotide
uuuuaaguucuacuuuucc

SEQ ID NO: 2169765 - RNA, 19 nt, Artificial Sequence
  Description of Artificial Sequence: Synthetic oligonucleotide
uuauggaaaagacuguuaa

SEQ ID NO: 2169766 - RNA, 19 nt, Artificial Sequence
  Description of Artificial Sequence: Synthetic oligonucleotide
uaucuggacauaaaaugag

SEQ ID NO: 2169767 - RNA, 19 nt, Artificial Sequence
  Description of Artificial Sequence: Synthetic oligonucleotide
cuugauuuuagcguaauug

SEQ ID NO: 2169768 - RNA, 19 nt, Artificial Sequence
  Description of Artificial Sequence: Synthetic oligonucleotide
aauagcugacacaaccacc

SEQ ID NO: 2169769 - RNA, 19 nt, Artificial Sequence
  Description of Artificial Sequence: Synthetic oligonucleotide
uaaguaaucuuguuggagu

SEQ ID NO: 2169770 - RNA, 19 nt, Artificial Sequence
  Description of Artificial Sequence: Synthetic oligonucleotide
uuuaaguucuacuuuuccu

SEQ ID NO: 2169771 - RNA, 19 nt, Artificial Sequence
  Description of Artificial Sequence: Synthetic oligonucleotide
uuaaguucuacuuuuccuc

SEQ ID NO: 2169772 - RNA, 19 nt, Artificial Sequence
  Description of Artificial Sequence: Synthetic oligonucleotide
uauuucaauguuaaguaau

SEQ ID NO: 2169773 - RNA, 19 nt, Artificial Sequence
  Description of Artificial Sequence: Synthetic oligonucleotide
uuuccuuuuauauuaaauu

SEQ ID NO: 2169774 - RNA, 19 nt, Artificial Sequence
  Description of Artificial Sequence: Synthetic oligonucleotide
aagacuguuaaugaccuug

SEQ ID NO: 2169775 - RNA, 19 nt, Artificial Sequence
  Description of Artificial Sequence: Synthetic oligonucleotide
aaagccucugauuagggaa

SEQ ID NO: 2169776 - RNA, 19 nt, Artificial Sequence
  Description of Artificial Sequence: Synthetic oligonucleotide
uacacuuauuuucugaaaa

SEQ ID NO: 2169777 - RNA, 19 nt, Artificial Sequence
  Description of Artificial Sequence: Synthetic oligonucleotide
ggucaauaaaguuaucugg

SEQ ID NO: 2169778 - RNA, 19 nt, Artificial Sequence
  Description of Artificial Sequence: Synthetic oligonucleotide
cugaauagcugacacaacc

SEQ ID NO: 2169779 - RNA, 19 nt, Artificial Sequence
  Description of Artificial Sequence: Synthetic oligonucleotide
guaccugccacauuuacag

SEQ ID NO: 2169780 - RNA, 19 nt, Artificial Sequence
  Description of Artificial Sequence: Synthetic oligonucleotide
ucuggacauaaaaugagga

SEQ ID NO: 2169781 - RNA, 19 nt, Artificial Sequence
  Description of Artificial Sequence: Synthetic oligonucleotide
ucaacuaagucuaaauuuu

SEQ ID NO: 2169782 - RNA, 19 nt, Artificial Sequence
  Description of Artificial Sequence: Synthetic oligonucleotide
ucuuuaacaguccuaaauu

SEQ ID NO: 2169783 - RNA, 19 nt, Artificial Sequence
  Description of Artificial Sequence: Synthetic oligonucleotide
uguguuuaugaauacguuc

SEQ ID NO: 2169784 - RNA, 19 nt, Artificial Sequence
  Description of Artificial Sequence: Synthetic oligonucleotide
acagagaaagcucugggug

SEQ ID NO: 2169785 - RNA, 19 nt, Artificial Sequence
  Description of Artificial Sequence: Synthetic oligonucleotide
uaugaauacguucauucau

SEQ ID NO: 2169786 - RNA, 19 nt, Artificial Sequence
  Description of Artificial Sequence: Synthetic oligonucleotide
caucaaaaggcucaugaag

SEQ ID NO: 2169787 - RNA, 19 nt, Artificial Sequence
  Description of Artificial Sequence: Synthetic oligonucleotide
uuuacagagaaagcucugg

SEQ ID NO: 2169788 - RNA, 19 nt, Artificial Sequence
  Description of Artificial Sequence: Synthetic oligonucleotide
auguuaaguaaucuuguug

SEQ ID NO: 2169789 - RNA, 19 nt, Artificial Sequence
  Description of Artificial Sequence: Synthetic oligonucleotide
uaguuauacacuuaaguuu

SEQ ID NO: 2169790 - RNA, 19 nt, Artificial Sequence
  Description of Artificial Sequence: Synthetic oligonucleotide
uuaaccauuuuaaauggua

SEQ ID NO: 2169791 - RNA, 19 nt, Artificial Sequence
  Description of Artificial Sequence: Synthetic oligonucleotide
uuuauaacugggucaauaa

SEQ ID NO: 2169792 - RNA, 19 nt, Artificial Sequence
  Description of Artificial Sequence: Synthetic oligonucleotide
aaauuaaccacggaccaga

SEQ ID NO: 2169793 - RNA, 19 nt, Artificial Sequence
  Description of Artificial Sequence: Synthetic oligonucleotide
acaagauaaaagucagauc

SEQ ID NO: 2169794 - RNA, 19 nt, Artificial Sequence
  Description of Artificial Sequence: Synthetic oligonucleotide
uuuauaugauauuuaguua

SEQ ID NO: 2169795 - RNA, 19 nt, Artificial Sequence
  Description of Artificial Sequence: Synthetic oligonucleotide
ugaaaagccucugauuagg

SEQ ID NO: 2169796 - RNA, 19 nt, Artificial Sequence
  Description of Artificial Sequence: Synthetic oligonucleotide
auuuuagcguaauugagaa

SEQ ID NO: 2169797 - RNA, 19 nt, Artificial Sequence
  Description of Artificial Sequence: Synthetic oligonucleotide
aaguuaucuggacauaaaa

SEQ ID NO: 2169798 - RNA, 19 nt, Artificial Sequence
  Description of Artificial Sequence: Synthetic oligonucleotide
uggaaaagacuguuaauga

SEQ ID NO: 2169799 - RNA, 19 nt, Artificial Sequence
  Description of Artificial Sequence: Synthetic oligonucleotide
auaugauauuuaguuauac

SEQ ID NO: 2169800 - RNA, 19 nt, Artificial Sequence
  Description of Artificial Sequence: Synthetic oligonucleotide
ugaccaucaaauuaaccac

SEQ ID NO: 2169801 - RNA, 19 nt, Artificial Sequence
  Description of Artificial Sequence: Synthetic oligonucleotide
agaccugaauagcugacac

SEQ ID NO: 2169802 - RNA, 19 nt, Artificial Sequence
  Description of Artificial Sequence: Synthetic oligonucleotide
uaaaugguaggaaguaacu

SEQ ID NO: 2169803 - RNA, 19 nt, Artificial Sequence
  Description of Artificial Sequence: Synthetic oligonucleotide
uuccuuuuauauuaaauuu

SEQ ID NO: 2169804 - RNA, 19 nt, Artificial Sequence
  Description of Artificial Sequence: Synthetic oligonucleotide
aaaagacuguuaaugaccu

SEQ ID NO: 2169805 - RNA, 19 nt, Artificial Sequence
  Description of Artificial Sequence: Synthetic oligonucleotide
ucuuaucuucaaauaaacu

SEQ ID NO: 2169806 - RNA, 19 nt, Artificial Sequence
  Description of Artificial Sequence: Synthetic oligonucleotide
aaaauagcuaauauggcuu

SEQ ID NO: 2169807 - RNA, 19 nt, Artificial Sequence
  Description of Artificial Sequence: Synthetic oligonucleotide
uuaugaauacguucauuca

SEQ ID NO: 2169808 - RNA, 19 nt, Artificial Sequence
  Description of Artificial Sequence: Synthetic oligonucleotide
uauagaccugaauagcuga

SEQ ID NO: 2169809 - RNA, 19 nt, Artificial Sequence
  Description of Artificial Sequence: Synthetic oligonucleotide
uguuggaguuuuaaguucu

SEQ ID NO: 2169810 - RNA, 19 nt, Artificial Sequence
  Description of Artificial Sequence: Synthetic oligonucleotide
aaauaacaucaaaaggcuc

SEQ ID NO: 2169811 - RNA, 19 nt, Artificial Sequence
  Description of Artificial Sequence: Synthetic oligonucleotide
ugacacaaccaccaugacc

SEQ ID NO: 2169812 - RNA, 19 nt, Artificial Sequence
  Description of Artificial Sequence: Synthetic oligonucleotide
aaaugguaggaaguaacug

SEQ ID NO: 2169813 - RNA, 19 nt, Artificial Sequence
  Description of Artificial Sequence: Synthetic oligonucleotide
uucauaugauauuugggaa

SEQ ID NO: 2169814 - RNA, 19 nt, Artificial Sequence
  Description of Artificial Sequence: Synthetic oligonucleotide
ucuuacacuuauuuucuga

SEQ ID NO: 2169815 - RNA, 19 nt, Artificial Sequence
  Description of Artificial Sequence: Synthetic oligonucleotide
uauuagaaugugcugcuuc

SEQ ID NO: 2169816 - RNA, 19 nt, Artificial Sequence
  Description of Artificial Sequence: Synthetic oligonucleotide
uaugauauuugggaaauau

SEQ ID NO: 2169817 - RNA, 19 nt, Artificial Sequence
  Description of Artificial Sequence: Synthetic oligonucleotide
ucaagugauggcuuacuug

SEQ ID NO: 2169818 - RNA, 19 nt, Artificial Sequence
  Description of Artificial Sequence: Synthetic oligonucleotide
ggugaaagcaaaguggugg

SEQ ID NO: 2169819 - RNA, 19 nt, Artificial Sequence
  Description of Artificial Sequence: Synthetic oligonucleotide
ucaauaaaguuaucuggac

SEQ ID NO: 2169820 - RNA, 19 nt, Artificial Sequence
  Description of Artificial Sequence: Synthetic oligonucleotide
aucuuuaacaguccuaaau

SEQ ID NO: 2169821 - RNA, 19 nt, Artificial Sequence
  Description of Artificial Sequence: Synthetic oligonucleotide
uguauuagaaugugcugcu

SEQ ID NO: 2169822 - RNA, 19 nt, Artificial Sequence
  Description of Artificial Sequence: Synthetic oligonucleotide
uccucuuaucuucaaauaa

SEQ ID NO: 2169823 - RNA, 19 nt, Artificial Sequence
  Description of Artificial Sequence: Synthetic oligonucleotide
auuucaauguuaaguaauc

SEQ ID NO: 2169824 - RNA, 19 nt, Artificial Sequence
  Description of Artificial Sequence: Synthetic oligonucleotide
uuuccucuuaucuucaaau

SEQ ID NO: 2169825 - RNA, 19 nt, Artificial Sequence
  Description of Artificial Sequence: Synthetic oligonucleotide
aauguuaaguaaucuuguu

SEQ ID NO: 2169826 - RNA, 19 nt, Artificial Sequence
  Description of Artificial Sequence: Synthetic oligonucleotide
uucaauguuaaguaaucuu

SEQ ID NO: 2169827 - RNA, 19 nt, Artificial Sequence
  Description of Artificial Sequence: Synthetic oligonucleotide
gaaguaacugauuuugaaa

SEQ ID NO: 2169828 - RNA, 19 nt, Artificial Sequence
  Description of Artificial Sequence: Synthetic oligonucleotide
guguauuagaaugugcugc

SEQ ID NO: 2169829 - RNA, 19 nt, Artificial Sequence
  Description of Artificial Sequence: Synthetic oligonucleotide
uuauuucaauguuaaguaa

SEQ ID NO: 2169830 - RNA, 19 nt, Artificial Sequence
  Description of Artificial Sequence: Synthetic oligonucleotide
cucaugaagcagauaauac

SEQ ID NO: 2169831 - RNA, 19 nt, Artificial Sequence
  Description of Artificial Sequence: Synthetic oligonucleotide
acuuaaguuuauaacuggg

SEQ ID NO: 2169832 - RNA, 19 nt, Artificial Sequence
  Description of Artificial Sequence: Synthetic oligonucleotide
uuauaacugggucaauaaa

SEQ ID NO: 2169833 - RNA, 19 nt, Artificial Sequence
  Description of Artificial Sequence: Synthetic oligonucleotide
auuagaaugugcugcuucu

SEQ ID NO: 2169834 - RNA, 19 nt, Artificial Sequence
  Description of Artificial Sequence: Synthetic oligonucleotide
uaacaguguauuagaaugu

SEQ ID NO: 2169835 - RNA, 19 nt, Artificial Sequence
  Description of Artificial Sequence: Synthetic oligonucleotide
aguguauuagaaugugcug

SEQ ID NO: 2169836 - RNA, 19 nt, Artificial Sequence
  Description of Artificial Sequence: Synthetic oligonucleotide
aacaguguauuagaaugug

SEQ ID NO: 2169837 - RNA, 19 nt, Artificial Sequence
  Description of Artificial Sequence: Synthetic oligonucleotide
caagugauggcuuacuuga

SEQ ID NO: 2169838 - RNA, 19 nt, Artificial Sequence
  Description of Artificial Sequence: Synthetic oligonucleotide
agauaaaagucagaucaag

SEQ ID NO: 2169839 - RNA, 19 nt, Artificial Sequence
  Description of Artificial Sequence: Synthetic oligonucleotide
gauuuuagcguaauugaga

SEQ ID NO: 2169840 - RNA, 19 nt, Artificial Sequence
  Description of Artificial Sequence: Synthetic oligonucleotide
gaccaucaaauuaaccacg

SEQ ID NO: 2169841 - RNA, 19 nt, Artificial Sequence
  Description of Artificial Sequence: Synthetic oligonucleotide
cuucauucaacuaagucua

SEQ ID NO: 2169842 - RNA, 19 nt, Artificial Sequence
  Description of Artificial Sequence: Synthetic oligonucleotide
ugaauacguucauucaugu

SEQ ID NO: 2169843 - RNA, 19 nt, Artificial Sequence
  Description of Artificial Sequence: Synthetic oligonucleotide
uuuuaaaugguaggaagua

SEQ ID NO: 2169844 - RNA, 19 nt, Artificial Sequence
  Description of Artificial Sequence: Synthetic oligonucleotide
auucaacuaagucuaaauu

SEQ ID NO: 2169845 - RNA, 19 nt, Artificial Sequence
  Description of Artificial Sequence: Synthetic oligonucleotide
uauaugauauuuaguuaua

SEQ ID NO: 2169846 - RNA, 19 nt, Artificial Sequence
  Description of Artificial Sequence: Synthetic oligonucleotide
uguaccugccacauuuaca

SEQ ID NO: 2169847 - RNA, 19 nt, Artificial Sequence
  Description of Artificial Sequence: Synthetic oligonucleotide
acuaagucuaaauuuuaua

SEQ ID NO: 2169848 - RNA, 19 nt, Artificial Sequence
  Description of Artificial Sequence: Synthetic oligonucleotide
uugauuguaacaguguauu

SEQ ID NO: 2169849 - RNA, 19 nt, Artificial Sequence
  Description of Artificial Sequence: Synthetic oligonucleotide
caacaugguucuuaauacc

SEQ ID NO: 2169850 - RNA, 19 nt, Artificial Sequence
  Description of Artificial Sequence: Synthetic oligonucleotide
accauuuuaaaugguagga

SEQ ID NO: 2169851 - RNA, 19 nt, Artificial Sequence
  Description of Artificial Sequence: Synthetic oligonucleotide
aaguaaucuuguuggaguu

SEQ ID NO: 2169852 - RNA, 19 nt, Artificial Sequence
  Description of Artificial Sequence: Synthetic oligonucleotide
aguuauacacuuaaguuua

SEQ ID NO: 2169853 - RNA, 19 nt, Artificial Sequence
  Description of Artificial Sequence: Synthetic oligonucleotide
uuuaaaugguaggaaguaa

SEQ ID NO: 2169854 - RNA, 19 nt, Artificial Sequence
  Description of Artificial Sequence: Synthetic oligonucleotide
acaguguauuagaaugugc

SEQ ID NO: 2169855 - RNA, 19 nt, Artificial Sequence
  Description of Artificial Sequence: Synthetic oligonucleotide
uuucaauguuaaguaaucu

SEQ ID NO: 2169856 - RNA, 19 nt, Artificial Sequence
  Description of Artificial Sequence: Synthetic oligonucleotide
acguucauucauguaauuc

SEQ ID NO: 2169857 - RNA, 19 nt, Artificial Sequence
  Description of Artificial Sequence: Synthetic oligonucleotide
uuuacauaucuuacacuua

SEQ ID NO: 2169858 - RNA, 19 nt, Artificial Sequence
  Description of Artificial Sequence: Synthetic oligonucleotide
cugaaaauguuauggaaaa

SEQ ID NO: 2169859 - RNA, 19 nt, Artificial Sequence
  Description of Artificial Sequence: Synthetic oligonucleotide
gcuaauauggcuucauuca

SEQ ID NO: 2169860 - RNA, 19 nt, Artificial Sequence
  Description of Artificial Sequence: Synthetic oligonucleotide
uacgauuaauacaggcaac

SEQ ID NO: 2169861 - RNA, 19 nt, Artificial Sequence
  Description of Artificial Sequence: Synthetic oligonucleotide
aacugggucaauaaaguua

SEQ ID NO: 2169862 - RNA, 19 nt, Artificial Sequence
  Description of Artificial Sequence: Synthetic oligonucleotide
aagauauuauuaaccauuu

SEQ ID NO: 2169863 - RNA, 19 nt, Artificial Sequence
  Description of Artificial Sequence: Synthetic oligonucleotide
cuuacuugauuuuagcgua

SEQ ID NO: 2169864 - RNA, 19 nt, Artificial Sequence
  Description of Artificial Sequence: Synthetic oligonucleotide
ugguguguuuaugaauacg

SEQ ID NO: 2169865 - RNA, 19 nt, Artificial Sequence
  Description of Artificial Sequence: Synthetic oligonucleotide
cacuuauuuucugaaaaug

SEQ ID NO: 2169866 - RNA, 19 nt, Artificial Sequence
  Description of Artificial Sequence: Synthetic oligonucleotide
auacaggcaacaugguucu

SEQ ID NO: 2169867 - RNA, 19 nt, Artificial Sequence
  Description of Artificial Sequence: Synthetic oligonucleotide
auagcugacacaaccacca

SEQ ID NO: 2169868 - RNA, 19 nt, Artificial Sequence
  Description of Artificial Sequence: Synthetic oligonucleotide
uuguaacaguguauuagaa

SEQ ID NO: 2169869 - RNA, 19 nt, Artificial Sequence
  Description of Artificial Sequence: Synthetic oligonucleotide
gaaaagccucugauuaggg

SEQ ID NO: 2169870 - RNA, 19 nt, Artificial Sequence
  Description of Artificial Sequence: Synthetic oligonucleotide
caauaaaguuaucuggaca

SEQ ID NO: 2169871 - RNA, 19 nt, Artificial Sequence
  Description of Artificial Sequence: Synthetic oligonucleotide
auuuuauaugauauuuagu

SEQ ID NO: 2169872 - RNA, 19 nt, Artificial Sequence
  Description of Artificial Sequence: Synthetic oligonucleotide
agaaugugcugcuucuugu

SEQ ID NO: 2169873 - RNA, 19 nt, Artificial Sequence
  Description of Artificial Sequence: Synthetic oligonucleotide
aucuggacauaaaaugagg

SEQ ID NO: 2169874 - RNA, 19 nt, Artificial Sequence
  Description of Artificial Sequence: Synthetic oligonucleotide
ggaaaagacuguuaaugac

SEQ ID NO: 2169875 - RNA, 19 nt, Artificial Sequence
  Description of Artificial Sequence: Synthetic oligonucleotide
augaauacguucauucaug

SEQ ID NO: 2169876 - RNA, 19 nt, Artificial Sequence
  Description of Artificial Sequence: Synthetic oligonucleotide
uguuuaugaauacguucau

SEQ ID NO: 2169877 - RNA, 19 nt, Artificial Sequence
  Description of Artificial Sequence: Synthetic oligonucleotide
ggauuuuccuuuuauauua

SEQ ID NO: 2169878 - RNA, 19 nt, Artificial Sequence
  Description of Artificial Sequence: Synthetic oligonucleotide
aacuaagucuaaauuuuau

SEQ ID NO: 2169879 - RNA, 19 nt, Artificial Sequence
  Description of Artificial Sequence: Synthetic oligonucleotide
uuacacuuauuuucugaaa

SEQ ID NO: 2169880 - RNA, 19 nt, Artificial Sequence
  Description of Artificial Sequence: Synthetic oligonucleotide
gggucaauaaaguuaucug

SEQ ID NO: 2169881 - RNA, 19 nt, Artificial Sequence
  Description of Artificial Sequence: Synthetic oligonucleotide
gcaacaugguucuuaauac

SEQ ID NO: 2169882 - RNA, 19 nt, Artificial Sequence
  Description of Artificial Sequence: Synthetic oligonucleotide
accugaauagcugacacaa

SEQ ID NO: 2169883 - RNA, 19 nt, Artificial Sequence
  Description of Artificial Sequence: Synthetic oligonucleotide
accaucaaauuaaccacgg

SEQ ID NO: 2169884 - RNA, 19 nt, Artificial Sequence
  Description of Artificial Sequence: Synthetic oligonucleotide
acgauuaauacaggcaaca

SEQ ID NO: 2169885 - RNA, 19 nt, Artificial Sequence
  Description of Artificial Sequence: Synthetic oligonucleotide
agcguaauugagaaaauaa

SEQ ID NO: 2169886 - RNA, 19 nt, Artificial Sequence
  Description of Artificial Sequence: Synthetic oligonucleotide
ucagcauauagaccugaau

SEQ ID NO: 2169887 - RNA, 19 nt, Artificial Sequence
  Description of Artificial Sequence: Synthetic oligonucleotide
uguuauggaaaagacuguu

SEQ ID NO: 2169888 - RNA, 19 nt, Artificial Sequence
  Description of Artificial Sequence: Synthetic oligonucleotide
cuuuaacaguccuaaauua

SEQ ID NO: 2169889 - RNA, 19 nt, Artificial Sequence
  Description of Artificial Sequence: Synthetic oligonucleotide
auuaaccacggaccagaag

SEQ ID NO: 2169890 - RNA, 19 nt, Artificial Sequence
  Description of Artificial Sequence: Synthetic oligonucleotide
gcuucauucaacuaagucu

SEQ ID NO: 2169891 - RNA, 19 nt, Artificial Sequence
  Description of Artificial Sequence: Synthetic oligonucleotide
aaaguggugguguguuuau

SEQ ID NO: 2169892 - RNA, 19 nt, Artificial Sequence
  Description of Artificial Sequence: Synthetic oligonucleotide
aguuaucuggacauaaaau

SEQ ID NO: 2169893 - RNA, 19 nt, Artificial Sequence
  Description of Artificial Sequence: Synthetic oligonucleotide
auuuaguuauacacuuaag

SEQ ID NO: 2169894 - RNA, 19 nt, Artificial Sequence
  Description of Artificial Sequence: Synthetic oligonucleotide
aaucuuuaacaguccuaaa

SEQ ID NO: 2169895 - RNA, 19 nt, Artificial Sequence
  Description of Artificial Sequence: Synthetic oligonucleotide
uggcuuacuugauuuuagc

SEQ ID NO: 2169896 - RNA, 19 nt, Artificial Sequence
  Description of Artificial Sequence: Synthetic oligonucleotide
cagcauauagaccugaaua

SEQ ID NO: 2169897 - RNA, 19 nt, Artificial Sequence
  Description of Artificial Sequence: Synthetic oligonucleotide
auauagaccugaauagcug

SEQ ID NO: 2169898 - RNA, 19 nt, Artificial Sequence
  Description of Artificial Sequence: Synthetic oligonucleotide
aaaaucuuuaacaguccua

SEQ ID NO: 2169899 - RNA, 19 nt, Artificial Sequence
  Description of Artificial Sequence: Synthetic oligonucleotide
auguaauucauaugauauu

SEQ ID NO: 2169900 - RNA, 19 nt, Artificial Sequence
  Description of Artificial Sequence: Synthetic oligonucleotide
gcagauaauacacauuuaa

SEQ ID NO: 2169901 - RNA, 19 nt, Artificial Sequence
  Description of Artificial Sequence: Synthetic oligonucleotide
agaaagcucugggugaaag

SEQ ID NO: 2169902 - RNA, 19 nt, Artificial Sequence
  Description of Artificial Sequence: Synthetic oligonucleotide
uuguaccugccacauuuac

SEQ ID NO: 2169903 - RNA, 19 nt, Artificial Sequence
  Description of Artificial Sequence: Synthetic oligonucleotide
agaucaagugauggcuuac

SEQ ID NO: 2169904 - RNA, 19 nt, Artificial Sequence
  Description of Artificial Sequence: Synthetic oligonucleotide
guguuucaccacuuguacc

SEQ ID NO: 2169905 - RNA, 19 nt, Artificial Sequence
  Description of Artificial Sequence: Synthetic oligonucleotide
aaaguuaucuggacauaaa

SEQ ID NO: 2169906 - RNA, 19 nt, Artificial Sequence
  Description of Artificial Sequence: Synthetic oligonucleotide
uuagcguaauugagaaaau

SEQ ID NO: 2169907 - RNA, 19 nt, Artificial Sequence
  Description of Artificial Sequence: Synthetic oligonucleotide
uuacuugauuuuagcguaa

SEQ ID NO: 2169908 - RNA, 19 nt, Artificial Sequence
  Description of Artificial Sequence: Synthetic oligonucleotide
uuccucuuaucuucaaaua

SEQ ID NO: 2169909 - RNA, 19 nt, Artificial Sequence
  Description of Artificial Sequence: Synthetic oligonucleotide
ccaauaaagauauuauuaa

SEQ ID NO: 2169910 - RNA, 19 nt, Artificial Sequence
  Description of Artificial Sequence: Synthetic oligonucleotide
auugagaaaauaacaucaa

SEQ ID NO: 2169911 - RNA, 19 nt, Artificial Sequence
  Description of Artificial Sequence: Synthetic oligonucleotide
cacauuuacagagaaagcu

SEQ ID NO: 2169912 - RNA, 19 nt, Artificial Sequence
  Description of Artificial Sequence: Synthetic oligonucleotide
caguguauuagaaugugcu

SEQ ID NO: 2169913 - RNA, 19 nt, Artificial Sequence
  Description of Artificial Sequence: Synthetic oligonucleotide
cauuuacagagaaagcucu

SEQ ID NO: 2169914 - RNA, 19 nt, Artificial Sequence
  Description of Artificial Sequence: Synthetic oligonucleotide
aucuuacacuuauuuucug

SEQ ID NO: 2169915 - RNA, 19 nt, Artificial Sequence
  Description of Artificial Sequence: Synthetic oligonucleotide
ugauuguaacaguguauua

SEQ ID NO: 2169916 - RNA, 19 nt, Artificial Sequence
  Description of Artificial Sequence: Synthetic oligonucleotide
caaauuaaccacggaccag

SEQ ID NO: 2169917 - RNA, 19 nt, Artificial Sequence
  Description of Artificial Sequence: Synthetic oligonucleotide
uuuuagcguaauugagaaa

SEQ ID NO: 2169918 - RNA, 19 nt, Artificial Sequence
  Description of Artificial Sequence: Synthetic oligonucleotide
ggcaacaugguucuuaaua

SEQ ID NO: 2169919 - RNA, 19 nt, Artificial Sequence
  Description of Artificial Sequence: Synthetic oligonucleotide
ucauucaacuaagucuaaa

SEQ ID NO: 2169920 - RNA, 19 nt, Artificial Sequence
  Description of Artificial Sequence: Synthetic oligonucleotide
cuaauauggcuucauucaa

SEQ ID NO: 2169921 - RNA, 19 nt, Artificial Sequence
  Description of Artificial Sequence: Synthetic oligonucleotide
agugauggcuuacuugauu

SEQ ID NO: 2169922 - RNA, 19 nt, Artificial Sequence
  Description of Artificial Sequence: Synthetic oligonucleotide
gaaagcaaagugguggugu

SEQ ID NO: 2169923 - RNA, 19 nt, Artificial Sequence
  Description of Artificial Sequence: Synthetic oligonucleotide
auggcuuacuugauuuuag

SEQ ID NO: 2169924 - RNA, 19 nt, Artificial Sequence
  Description of Artificial Sequence: Synthetic oligonucleotide
aguucuacuuuuccucuua

SEQ ID NO: 2169925 - RNA, 19 nt, Artificial Sequence
  Description of Artificial Sequence: Synthetic oligonucleotide
agauauuauuaaccauuuu

SEQ ID NO: 2169926 - RNA, 19 nt, Artificial Sequence
  Description of Artificial Sequence: Synthetic oligonucleotide
aaguucuacuuuuccucuu

SEQ ID NO: 2169927 - RNA, 19 nt, Artificial Sequence
  Description of Artificial Sequence: Synthetic oligonucleotide
caauguuaaguaaucuugu

SEQ ID NO: 2169928 - RNA, 19 nt, Artificial Sequence
  Description of Artificial Sequence: Synthetic oligonucleotide
auuaaccauuuuaaauggu

SEQ ID NO: 2169929 - RNA, 19 nt, Artificial Sequence
  Description of Artificial Sequence: Synthetic oligonucleotide
guuuauaacugggucaaua

SEQ ID NO: 2169930 - RNA, 19 nt, Artificial Sequence
  Description of Artificial Sequence: Synthetic oligonucleotide
cugauuuugaaaagccucu

SEQ ID NO: 2169931 - RNA, 19 nt, Artificial Sequence
  Description of Artificial Sequence: Synthetic oligonucleotide
aucaagugauggcuuacuu

SEQ ID NO: 2169932 - RNA, 19 nt, Artificial Sequence
  Description of Artificial Sequence: Synthetic oligonucleotide
gcuuacuugauuuuagcgu

SEQ ID NO: 2169933 - RNA, 19 nt, Artificial Sequence
  Description of Artificial Sequence: Synthetic oligonucleotide
gcguaauugagaaaauaac

SEQ ID NO: 2169934 - RNA, 19 nt, Artificial Sequence
  Description of Artificial Sequence: Synthetic oligonucleotide
uagcguaauugagaaaaua

SEQ ID NO: 2169935 - RNA, 19 nt, Artificial Sequence
  Description of Artificial Sequence: Synthetic oligonucleotide
caccacuuguaccugccac

SEQ ID NO: 2169936 - RNA, 19 nt, Artificial Sequence
  Description of Artificial Sequence: Synthetic oligonucleotide
gauggcuuacuugauuuua

SEQ ID NO: 2169937 - RNA, 19 nt, Artificial Sequence
  Description of Artificial Sequence: Synthetic oligonucleotide
uaaccacggaccagaaguu

SEQ ID NO: 2169938 - RNA, 19 nt, Artificial Sequence
  Description of Artificial Sequence: Synthetic oligonucleotide
ggcuucauucaacuaaguc

SEQ ID NO: 2169939 - RNA, 19 nt, Artificial Sequence
  Description of Artificial Sequence: Synthetic oligonucleotide
aaaggcucaugaagcagau

SEQ ID NO: 2169940 - RNA, 19 nt, Artificial Sequence
  Description of Artificial Sequence: Synthetic oligonucleotide
auacguucauucauguaau

SEQ ID NO: 2169941 - RNA, 19 nt, Artificial Sequence
  Description of Artificial Sequence: Synthetic oligonucleotide
acuugauuuuagcguaauu

SEQ ID NO: 2169942 - RNA, 19 nt, Artificial Sequence
  Description of Artificial Sequence: Synthetic oligonucleotide
cguucauucauguaauuca

SEQ ID NO: 2169943 - RNA, 19 nt, Artificial Sequence
  Description of Artificial Sequence: Synthetic oligonucleotide
auagcuaauauggcuucau

SEQ ID NO: 2169944 - RNA, 19 nt, Artificial Sequence
  Description of Artificial Sequence: Synthetic oligonucleotide
gaauacguucauucaugua

SEQ ID NO: 2169945 - RNA, 19 nt, Artificial Sequence
  Description of Artificial Sequence: Synthetic oligonucleotide
ugccacauuuacagagaaa

SEQ ID NO: 2169946 - RNA, 19 nt, Artificial Sequence
  Description of Artificial Sequence: Synthetic oligonucleotide
aaguggugguguguuuaug

SEQ ID NO: 2169947 - RNA, 19 nt, Artificial Sequence
  Description of Artificial Sequence: Synthetic oligonucleotide
aagcaaagugguggugugu

SEQ ID NO: 2169948 - RNA, 19 nt, Artificial Sequence
  Description of Artificial Sequence: Synthetic oligonucleotide
caccaugaccaucaaauua

SEQ ID NO: 2169949 - RNA, 19 nt, Artificial Sequence
  Description of Artificial Sequence: Synthetic oligonucleotide
aauuaaccacggaccagaa

SEQ ID NO: 2169950 - RNA, 19 nt, Artificial Sequence
  Description of Artificial Sequence: Synthetic oligonucleotide
auguuauggaaaagacugu

SEQ ID NO: 2169951 - RNA, 19 nt, Artificial Sequence
  Description of Artificial Sequence: Synthetic oligonucleotide
uggcuucauucaacuaagu

SEQ ID NO: 2169952 - RNA, 19 nt, Artificial Sequence
  Description of Artificial Sequence: Synthetic oligonucleotide
gguguguuuaugaauacgu

SEQ ID NO: 2169953 - RNA, 19 nt, Artificial Sequence
  Description of Artificial Sequence: Synthetic oligonucleotide
guuauggaaaagacuguua

SEQ ID NO: 2169954 - RNA, 19 nt, Artificial Sequence
  Description of Artificial Sequence: Synthetic oligonucleotide
auauuuaguuauacacuua

SEQ ID NO: 2169955 - RNA, 19 nt, Artificial Sequence
  Description of Artificial Sequence: Synthetic oligonucleotide
auaaaguuaucuggacaua

SEQ ID NO: 2169956 - RNA, 19 nt, Artificial Sequence
  Description of Artificial Sequence: Synthetic oligonucleotide
auauggcuucauucaacua

SEQ ID NO: 2169957 - RNA, 19 nt, Artificial Sequence
  Description of Artificial Sequence: Synthetic oligonucleotide
agcaaaguggugguguguu

SEQ ID NO: 2169958 - RNA, 19 nt, Artificial Sequence
  Description of Artificial Sequence: Synthetic oligonucleotide
uacuugauuuuagcguaau

SEQ ID NO: 2169959 - RNA, 19 nt, Artificial Sequence
  Description of Artificial Sequence: Synthetic oligonucleotide
agagaaagcucugggugaa

SEQ ID NO: 2169960 - RNA, 19 nt, Artificial Sequence
  Description of Artificial Sequence: Synthetic oligonucleotide
gugaaagcaaagugguggu

SEQ ID NO: 2169961 - RNA, 19 nt, Artificial Sequence
  Description of Artificial Sequence: Synthetic oligonucleotide
acaggcaacaugguucuua

SEQ ID NO: 2169962 - RNA, 19 nt, Artificial Sequence
  Description of Artificial Sequence: Synthetic oligonucleotide
uuagaaugugcugcuucuu

SEQ ID NO: 2169963 - RNA, 19 nt, Artificial Sequence
  Description of Artificial Sequence: Synthetic oligonucleotide
uacguucauucauguaauu

SEQ ID NO: 2169964 - RNA, 19 nt, Artificial Sequence
  Description of Artificial Sequence: Synthetic oligonucleotide
cuggacauaaaaugaggau

SEQ ID NO: 2169965 - RNA, 19 nt, Artificial Sequence
  Description of Artificial Sequence: Synthetic oligonucleotide
aggcguguuucaccacuug

SEQ ID NO: 2169966 - RNA, 19 nt, Artificial Sequence
  Description of Artificial Sequence: Synthetic oligonucleotide
cguguuucaccacuuguac

SEQ ID NO: 2169967 - RNA, 19 nt, Artificial Sequence
  Description of Artificial Sequence: Synthetic oligonucleotide
caggcaacaugguucuuaa

SEQ ID NO: 2169968 - RNA, 19 nt, Artificial Sequence
  Description of Artificial Sequence: Synthetic oligonucleotide
gaucaagugauggcuuacu

SEQ ID NO: 2169969 - RNA, 19 nt, Artificial Sequence
  Description of Artificial Sequence: Synthetic oligonucleotide
caaaguggugguguguuua

SEQ ID NO: 2169970 - RNA, 19 nt, Artificial Sequence
  Description of Artificial Sequence: Synthetic oligonucleotide
gaaugugcugcuucuuguu

SEQ ID NO: 2169971 - RNA, 19 nt, Artificial Sequence
  Description of Artificial Sequence: Synthetic oligonucleotide
guaaucuuguuggaguuuu

SEQ ID NO: 2169972 - RNA, 19 nt, Artificial Sequence
  Description of Artificial Sequence: Synthetic oligonucleotide
cugacacaaccaccaugac

SEQ ID NO: 2169973 - RNA, 19 nt, Artificial Sequence
  Description of Artificial Sequence: Synthetic oligonucleotide
acaugguucuuaauaccuu

SEQ ID NO: 2169974 - RNA, 19 nt, Artificial Sequence
  Description of Artificial Sequence: Synthetic oligonucleotide
cagaucaagugauggcuua

SEQ ID NO: 2169975 - RNA, 19 nt, Artificial Sequence
  Description of Artificial Sequence: Synthetic oligonucleotide
agcucugggugaaagcaaa

SEQ ID NO: 2169976 - RNA, 19 nt, Artificial Sequence
  Description of Artificial Sequence: Synthetic oligonucleotide
cugccacauuuacagagaa

SEQ ID NO: 2169977 - RNA, 19 nt, Artificial Sequence
  Description of Artificial Sequence: Synthetic oligonucleotide
auaugauauuugggaaaua

SEQ ID NO: 2169978 - RNA, 19 nt, Artificial Sequence
  Description of Artificial Sequence: Synthetic oligonucleotide
ccaugaccaucaaauuaac

SEQ ID NO: 2169979 - RNA, 19 nt, Artificial Sequence
  Description of Artificial Sequence: Synthetic oligonucleotide
agcagauaauacacauuua

SEQ ID NO: 2169980 - RNA, 19 nt, Artificial Sequence
  Description of Artificial Sequence: Synthetic oligonucleotide
cacaaccaccaugaccauc

SEQ ID NO: 2169981 - RNA, 19 nt, Artificial Sequence
  Description of Artificial Sequence: Synthetic oligonucleotide
cuuguaccugccacauuua

SEQ ID NO: 2169982 - RNA, 19 nt, Artificial Sequence
  Description of Artificial Sequence: Synthetic oligonucleotide
ccugaauagcugacacaac

SEQ ID NO: 2169983 - RNA, 19 nt, Artificial Sequence
  Description of Artificial Sequence: Synthetic oligonucleotide
ccauuuuaaaugguaggaa

SEQ ID NO: 2169984 - RNA, 19 nt, Artificial Sequence
  Description of Artificial Sequence: Synthetic oligonucleotide
acacaaccaccaugaccau

SEQ ID NO: 2169985 - RNA, 19 nt, Artificial Sequence
  Description of Artificial Sequence: Synthetic oligonucleotide
gggugaaagcaaaguggug

SEQ ID NO: 2169986 - RNA, 19 nt, Artificial Sequence
  Description of Artificial Sequence: Synthetic oligonucleotide
ccacggaccagaaguugac

SEQ ID NO: 2169987 - RNA, 19 nt, Artificial Sequence
  Description of Artificial Sequence: Synthetic oligonucleotide
guucuacuuuuccucuuau

SEQ ID NO: 2169988 - RNA, 19 nt, Artificial Sequence
  Description of Artificial Sequence: Synthetic oligonucleotide
agccucugauuagggaaaa

SEQ ID NO: 2169989 - RNA, 19 nt, Artificial Sequence
  Description of Artificial Sequence: Synthetic oligonucleotide
ggcguguuucaccacuugu

SEQ ID NO: 2169990 - RNA, 19 nt, Artificial Sequence
  Description of Artificial Sequence: Synthetic oligonucleotide
guguguuuaugaauacguu

SEQ ID NO: 2169991 - RNA, 19 nt, Artificial Sequence
  Description of Artificial Sequence: Synthetic oligonucleotide
guuauacacuuaaguuuau

SEQ ID NO: 2169992 - RNA, 19 nt, Artificial Sequence
  Description of Artificial Sequence: Synthetic oligonucleotide
ccaucaaauuaaccacgga

SEQ ID NO: 2169993 - RNA, 19 nt, Artificial Sequence
  Description of Artificial Sequence: Synthetic oligonucleotide
gcguguuucaccacuugua

SEQ ID NO: 2169994 - RNA, 19 nt, Artificial Sequence
  Description of Artificial Sequence: Synthetic oligonucleotide
guauuagaaugugcugcuu

SEQ ID NO: 2169995 - RNA, 19 nt, Artificial Sequence
  Description of Artificial Sequence: Synthetic oligonucleotide
cacuuguaccugccacauu

SEQ ID NO: 2169996 - RNA, 19 nt, Artificial Sequence
  Description of Artificial Sequence: Synthetic oligonucleotide
aauagggccgcacaccgcg

SEQ ID NO: 2169997 - RNA, 19 nt, Artificial Sequence
  Description of Artificial Sequence: Synthetic oligonucleotide
auuuguacgucuucuugcc

SEQ ID NO: 2169998 - RNA, 19 nt, Artificial Sequence
  Description of Artificial Sequence: Synthetic oligonucleotide
gagggugugugucaggugg

SEQ ID NO: 2169999 - RNA, 19 nt, Artificial Sequence
  Description of Artificial Sequence: Synthetic oligonucleotide
uggugugugacuagguccg

SEQ ID NO: 2170000 - RNA, 19 nt, Artificial Sequence
  Description of Artificial Sequence: Synthetic oligonucleotide
guaugagugcgauugugcg

SEQ ID NO: 2170001 - RNA, 19 nt, Artificial Sequence
  Description of Artificial Sequence: Synthetic oligonucleotide
uuucguauccucuaggguu

SEQ ID NO: 2170002 - RNA, 19 nt, Artificial Sequence
  Description of Artificial Sequence: Synthetic oligonucleotide
aguaugagugcgauugugc

SEQ ID NO: 2170003 - RNA, 19 nt, Artificial Sequence
  Description of Artificial Sequence: Synthetic oligonucleotide
augagugcgauugugcgcg

SEQ ID NO: 2170004 - RNA, 19 nt, Artificial Sequence
  Description of Artificial Sequence: Synthetic oligonucleotide
cacuguucgcauuuguacg

SEQ ID NO: 2170005 - RNA, 19 nt, Artificial Sequence
  Description of Artificial Sequence: Synthetic oligonucleotide
agauagggcacuugugcgg

SEQ ID NO: 2170006 - RNA, 19 nt, Artificial Sequence
  Description of Artificial Sequence: Synthetic oligonucleotide
ugugacuagguccgagcgg

SEQ ID NO: 2170007 - RNA, 19 nt, Artificial Sequence
  Description of Artificial Sequence: Synthetic oligonucleotide
uucguauccucuaggguug

SEQ ID NO: 2170008 - RNA, 19 nt, Artificial Sequence
  Description of Artificial Sequence: Synthetic oligonucleotide
cagauagggcacuugugcg

SEQ ID NO: 2170009 - RNA, 19 nt, Artificial Sequence
  Description of Artificial Sequence: Synthetic oligonucleotide
uggugcgugaccagggcgg

SEQ ID NO: 2170010 - RNA, 19 nt, Artificial Sequence
  Description of Artificial Sequence: Synthetic oligonucleotide
agggcaaccuucucgcugg

SEQ ID NO: 2170011 - RNA, 19 nt, Artificial Sequence
  Description of Artificial Sequence: Synthetic oligonucleotide
aggguugguaccaucuucc

SEQ ID NO: 2170012 - RNA, 19 nt, Artificial Sequence
  Description of Artificial Sequence: Synthetic oligonucleotide
uaugagugcgauugugcgc

SEQ ID NO: 2170013 - RNA, 19 nt, Artificial Sequence
  Description of Artificial Sequence: Synthetic oligonucleotide
acgaagggcaaguguaggg

SEQ ID NO: 2170014 - RNA, 19 nt, Artificial Sequence
  Description of Artificial Sequence: Synthetic oligonucleotide
gguuucguauccucuaggg

SEQ ID NO: 2170015 - RNA, 19 nt, Artificial Sequence
  Description of Artificial Sequence: Synthetic oligonucleotide
ucucuggccaucuuugcac

SEQ ID NO: 2170016 - RNA, 19 nt, Artificial Sequence
  Description of Artificial Sequence: Synthetic oligonucleotide
ugauggcugaagcucuucc

SEQ ID NO: 2170017 - RNA, 19 nt, Artificial Sequence
  Description of Artificial Sequence: Synthetic oligonucleotide
ucgccuguguggaugaucu

SEQ ID NO: 2170018 - RNA, 19 nt, Artificial Sequence
  Description of Artificial Sequence: Synthetic oligonucleotide
uccucuaggguugccacgg

SEQ ID NO: 2170019 - RNA, 19 nt, Artificial Sequence
  Description of Artificial Sequence: Synthetic oligonucleotide
uugugcgcgaugagguugg

SEQ ID NO: 2170020 - RNA, 19 nt, Artificial Sequence
  Description of Artificial Sequence: Synthetic oligonucleotide
aggaauagggccgcacacc

SEQ ID NO: 2170021 - RNA, 19 nt, Artificial Sequence
  Description of Artificial Sequence: Synthetic oligonucleotide
uuuguacgucuucuugccc

SEQ ID NO: 2170022 - RNA, 19 nt, Artificial Sequence
  Description of Artificial Sequence: Synthetic oligonucleotide
gugugacuagguccgagcg

SEQ ID NO: 2170023 - RNA, 19 nt, Artificial Sequence
  Description of Artificial Sequence: Synthetic oligonucleotide
ggaauagggccgcacaccg

SEQ ID NO: 2170024 - RNA, 19 nt, Artificial Sequence
  Description of Artificial Sequence: Synthetic oligonucleotide
caggucacuagccucgugc

SEQ ID NO: 2170025 - RNA, 19 nt, Artificial Sequence
  Description of Artificial Sequence: Synthetic oligonucleotide
aucagcguggagugauggc

SEQ ID NO: 2170026 - RNA, 19 nt, Artificial Sequence
  Description of Artificial Sequence: Synthetic oligonucleotide
acuguucgcauuuguacgu

SEQ ID NO: 2170027 - RNA, 19 nt, Artificial Sequence
  Description of Artificial Sequence: Synthetic oligonucleotide
uuugcacccaggucacuag

SEQ ID NO: 2170028 - RNA, 19 nt, Artificial Sequence
  Description of Artificial Sequence: Synthetic oligonucleotide
ugcccguuucaccaucggg

SEQ ID NO: 2170029 - RNA, 19 nt, Artificial Sequence
  Description of Artificial Sequence: Synthetic oligonucleotide
gcuggguuucucuaggccg

SEQ ID NO: 2170030 - RNA, 19 nt, Artificial Sequence
  Description of Artificial Sequence: Synthetic oligonucleotide
agucggugcagguguaggg

SEQ ID NO: 2170031 - RNA, 19 nt, Artificial Sequence
  Description of Artificial Sequence: Synthetic oligonucleotide
gcagauagggcacuugugc

SEQ ID NO: 2170032 - RNA, 19 nt, Artificial Sequence
  Description of Artificial Sequence: Synthetic oligonucleotide
ucaccaucggggaccagcc

SEQ ID NO: 2170033 - RNA, 19 nt, Artificial Sequence
  Description of Artificial Sequence: Synthetic oligonucleotide
ugugugucagguggggccg

SEQ ID NO: 2170034 - RNA, 19 nt, Artificial Sequence
  Description of Artificial Sequence: Synthetic oligonucleotide
gaucagcguggagugaugg

SEQ ID NO: 2170035 - RNA, 19 nt, Artificial Sequence
  Description of Artificial Sequence: Synthetic oligonucleotide
agggccuugggcccggugg

SEQ ID NO: 2170036 - RNA, 19 nt, Artificial Sequence
  Description of Artificial Sequence: Synthetic oligonucleotide
uaggccgcuguccucuggg

SEQ ID NO: 2170037 - RNA, 19 nt, Artificial Sequence
  Description of Artificial Sequence: Synthetic oligonucleotide
ucagcguggagugauggcu

SEQ ID NO: 2170038 - RNA, 19 nt, Artificial Sequence
  Description of Artificial Sequence: Synthetic oligonucleotide
aaggguuucguauccucua

SEQ ID NO: 2170039 - RNA, 19 nt, Artificial Sequence
  Description of Artificial Sequence: Synthetic oligonucleotide
uggagugauggcugaagcu

SEQ ID NO: 2170040 - RNA, 19 nt, Artificial Sequence
  Description of Artificial Sequence: Synthetic oligonucleotide
ucuaggguugccacggcua

SEQ ID NO: 2170041 - RNA, 19 nt, Artificial Sequence
  Description of Artificial Sequence: Synthetic oligonucleotide
gugugugucagguggggcc

SEQ ID NO: 2170042 - RNA, 19 nt, Artificial Sequence
  Description of Artificial Sequence: Synthetic oligonucleotide
ugcgagcuguggcugaagc

SEQ ID NO: 2170043 - RNA, 19 nt, Artificial Sequence
  Description of Artificial Sequence: Synthetic oligonucleotide
uaggguugguaccaucuuc

SEQ ID NO: 2170044 - RNA, 19 nt, Artificial Sequence
  Description of Artificial Sequence: Synthetic oligonucleotide
acuagguccgagcggcggg

SEQ ID NO: 2170045 - RNA, 19 nt, Artificial Sequence
  Description of Artificial Sequence: Synthetic oligonucleotide
uuuucgccuguguggauga

SEQ ID NO: 2170046 - RNA, 19 nt, Artificial Sequence
  Description of Artificial Sequence: Synthetic oligonucleotide
uccucaaggguuucguauc

SEQ ID NO: 2170047 - RNA, 19 nt, Artificial Sequence
  Description of Artificial Sequence: Synthetic oligonucleotide
guggauacgcuggugcugg

SEQ ID NO: 2170048 - RNA, 19 nt, Artificial Sequence
  Description of Artificial Sequence: Synthetic oligonucleotide
guugccacggcuaggguug

SEQ ID NO: 2170049 - RNA, 19 nt, Artificial Sequence
  Description of Artificial Sequence: Synthetic oligonucleotide
aggguuucguauccucuag

SEQ ID NO: 2170050 - RNA, 19 nt, Artificial Sequence
  Description of Artificial Sequence: Synthetic oligonucleotide
agcggucgcacacguaggg

SEQ ID NO: 2170051 - RNA, 19 nt, Artificial Sequence
  Description of Artificial Sequence: Synthetic oligonucleotide
guggagugauggcugaagc

SEQ ID NO: 2170052 - RNA, 19 nt, Artificial Sequence
  Description of Artificial Sequence: Synthetic oligonucleotide
cuuggcgccggugugagug

SEQ ID NO: 2170053 - RNA, 19 nt, Artificial Sequence
  Description of Artificial Sequence: Synthetic oligonucleotide
auugugcgcgaugagguug

SEQ ID NO: 2170054 - RNA, 19 nt, Artificial Sequence
  Description of Artificial Sequence: Synthetic oligonucleotide
acgucuucuugcccguuuc

SEQ ID NO: 2170055 - RNA, 19 nt, Artificial Sequence
  Description of Artificial Sequence: Synthetic oligonucleotide
cuugcccguuucaccaucg

SEQ ID NO: 2170056 - RNA, 19 nt, Artificial Sequence
  Description of Artificial Sequence: Synthetic oligonucleotide
gugagcugcggccgaagcg

SEQ ID NO: 2170057 - RNA, 19 nt, Artificial Sequence
  Description of Artificial Sequence: Synthetic oligonucleotide
cuugacgccggugugggug

SEQ ID NO: 2170058 - RNA, 19 nt, Artificial Sequence
  Description of Artificial Sequence: Synthetic oligonucleotide
uguucgcauuuguacgucu

SEQ ID NO: 2170059 - RNA, 19 nt, Artificial Sequence
  Description of Artificial Sequence: Synthetic oligonucleotide
auccucuaggguugccacg

SEQ ID NO: 2170060 - RNA, 19 nt, Artificial Sequence
  Description of Artificial Sequence: Synthetic oligonucleotide
cuaggguugccacggcuag

SEQ ID NO: 2170061 - RNA, 19 nt, Artificial Sequence
  Description of Artificial Sequence: Synthetic oligonucleotide
uccucgccacuuuccaggg

SEQ ID NO: 2170062 - RNA, 19 nt, Artificial Sequence
  Description of Artificial Sequence: Synthetic oligonucleotide
ugggcagugaggugcgagc

SEQ ID NO: 2170063 - RNA, 19 nt, Artificial Sequence
  Description of Artificial Sequence: Synthetic oligonucleotide
gcacuugccgcagauaggg

SEQ ID NO: 2170064 - RNA, 19 nt, Artificial Sequence
  Description of Artificial Sequence: Synthetic oligonucleotide
agugcgauugugcgcgaug

SEQ ID NO: 2170065 - RNA, 19 nt, Artificial Sequence
  Description of Artificial Sequence: Synthetic oligonucleotide
gcagcggucgcacacguag

SEQ ID NO: 2170066 - RNA, 19 nt, Artificial Sequence
  Description of Artificial Sequence: Synthetic oligonucleotide
gaggugugagcugcggccg

SEQ ID NO: 2170067 - RNA, 19 nt, Artificial Sequence
  Description of Artificial Sequence: Synthetic oligonucleotide
ucgugcugaccacacugug

SEQ ID NO: 2170068 - RNA, 19 nt, Artificial Sequence
  Description of Artificial Sequence: Synthetic oligonucleotide
ugucucuggccaucuuugc

SEQ ID NO: 2170069 - RNA, 19 nt, Artificial Sequence
  Description of Artificial Sequence: Synthetic oligonucleotide
ugcgauugugcgcgaugag

SEQ ID NO: 2170070 - RNA, 19 nt, Artificial Sequence
  Description of Artificial Sequence: Synthetic oligonucleotide
uugcacccaggucacuagc

SEQ ID NO: 2170071 - RNA, 19 nt, Artificial Sequence
  Description of Artificial Sequence: Synthetic oligonucleotide
cucuggccaucuuugcacc

SEQ ID NO: 2170072 - RNA, 19 nt, Artificial Sequence
  Description of Artificial Sequence: Synthetic oligonucleotide
caggaauagggccgcacac

SEQ ID NO: 2170073 - RNA, 19 nt, Artificial Sequence
  Description of Artificial Sequence: Synthetic oligonucleotide
guggggccggcuuuggcgg

SEQ ID NO: 2170074 - RNA, 19 nt, Artificial Sequence
  Description of Artificial Sequence: Synthetic oligonucleotide
cucaugccggugcagguug

SEQ ID NO: 2170075 - RNA, 19 nt, Artificial Sequence
  Description of Artificial Sequence: Synthetic oligonucleotide
cacggcuaggguugguacc

SEQ ID NO: 2170076 - RNA, 19 nt, Artificial Sequence
  Description of Artificial Sequence: Synthetic oligonucleotide
cuggugcgugaccagggcg

SEQ ID NO: 2170077 - RNA, 19 nt, Artificial Sequence
  Description of Artificial Sequence: Synthetic oligonucleotide
aggucacuagccucgugcu

SEQ ID NO: 2170078 - RNA, 19 nt, Artificial Sequence
  Description of Artificial Sequence: Synthetic oligonucleotide
uugcccguuucaccaucgg

SEQ ID NO: 2170079 - RNA, 19 nt, Artificial Sequence
  Description of Artificial Sequence: Synthetic oligonucleotide
ucaugccggugcagguugg

SEQ ID NO: 2170080 - RNA, 19 nt, Artificial Sequence
  Description of Artificial Sequence: Synthetic oligonucleotide
ugcggcuuggcgccggugu

SEQ ID NO: 2170081 - RNA, 19 nt, Artificial Sequence
  Description of Artificial Sequence: Synthetic oligonucleotide
gacuagguccgagcggcgg

SEQ ID NO: 2170082 - RNA, 19 nt, Artificial Sequence
  Description of Artificial Sequence: Synthetic oligonucleotide
gcccguuucaccaucgggg

SEQ ID NO: 2170083 - RNA, 19 nt, Artificial Sequence
  Description of Artificial Sequence: Synthetic oligonucleotide
ugacuagguccgagcggcg

SEQ ID NO: 2170084 - RNA, 19 nt, Artificial Sequence
  Description of Artificial Sequence: Synthetic oligonucleotide
gucaccaggugcgagcgcc

SEQ ID NO: 2170085 - RNA, 19 nt, Artificial Sequence
  Description of Artificial Sequence: Synthetic oligonucleotide
gaaacgcuuggcgcagcgg

SEQ ID NO: 2170086 - RNA, 19 nt, Artificial Sequence
  Description of Artificial Sequence: Synthetic oligonucleotide
uggaucagcguggagugau

SEQ ID NO: 2170087 - RNA, 19 nt, Artificial Sequence
  Description of Artificial Sequence: Synthetic oligonucleotide
ugcgugaccagggcggagc

SEQ ID NO: 2170088 - RNA, 19 nt, Artificial Sequence
  Description of Artificial Sequence: Synthetic oligonucleotide
cacgaagggcaaguguagg

SEQ ID NO: 2170089 - RNA, 19 nt, Artificial Sequence
  Description of Artificial Sequence: Synthetic oligonucleotide
gguugguaccaucuucccc

SEQ ID NO: 2170090 - RNA, 19 nt, Artificial Sequence
  Description of Artificial Sequence: Synthetic oligonucleotide
aacgcuuggcgcagcgguc

SEQ ID NO: 2170091 - RNA, 19 nt, Artificial Sequence
  Description of Artificial Sequence: Synthetic oligonucleotide
uugacgccggugugggugc

SEQ ID NO: 2170092 - RNA, 19 nt, Artificial Sequence
  Description of Artificial Sequence: Synthetic oligonucleotide
gcauggguagggcuugacg

SEQ ID NO: 2170093 - RNA, 19 nt, Artificial Sequence
  Description of Artificial Sequence: Synthetic oligonucleotide
ucuugcccguuucaccauc

SEQ ID NO: 2170094 - RNA, 19 nt, Artificial Sequence
  Description of Artificial Sequence: Synthetic oligonucleotide
aucggggaccagccccucc

SEQ ID NO: 2170095 - RNA, 19 nt, Artificial Sequence
  Description of Artificial Sequence: Synthetic oligonucleotide
cagggcaaccuucucgcug

SEQ ID NO: 2170096 - RNA, 19 nt, Artificial Sequence
  Description of Artificial Sequence: Synthetic oligonucleotide
uuuccucaaggguuucgua

SEQ ID NO: 2170097 - RNA, 19 nt, Artificial Sequence
  Description of Artificial Sequence: Synthetic oligonucleotide
ggguuucguauccucuagg

SEQ ID NO: 2170098 - RNA, 19 nt, Artificial Sequence
  Description of Artificial Sequence: Synthetic oligonucleotide
aggugcgagcgccagcuga

SEQ ID NO: 2170099 - RNA, 19 nt, Artificial Sequence
  Description of Artificial Sequence: Synthetic oligonucleotide
gcgauugugcgcgaugagg

SEQ ID NO: 2170100 - RNA, 19 nt, Artificial Sequence
  Description of Artificial Sequence: Synthetic oligonucleotide
caguccaggcagugguagg

SEQ ID NO: 2170101 - RNA, 19 nt, Artificial Sequence
  Description of Artificial Sequence: Synthetic oligonucleotide
uucucgcuggguuucucua

SEQ ID NO: 2170102 - RNA, 19 nt, Artificial Sequence
  Description of Artificial Sequence: Synthetic oligonucleotide
uggggucuugagagggugu

SEQ ID NO: 2170103 - RNA, 19 nt, Artificial Sequence
  Description of Artificial Sequence: Synthetic oligonucleotide
acgcuuggcgcagcggucg

SEQ ID NO: 2170104 - RNA, 19 nt, Artificial Sequence
  Description of Artificial Sequence: Synthetic oligonucleotide
acggcuaggguugguacca

SEQ ID NO: 2170105 - RNA, 19 nt, Artificial Sequence
  Description of Artificial Sequence: Synthetic oligonucleotide
guuucguauccucuagggu

SEQ ID NO: 2170106 - RNA, 19 nt, Artificial Sequence
  Description of Artificial Sequence: Synthetic oligonucleotide
uacgucuucuugcccguuu

SEQ ID NO: 2170107 - RNA, 19 nt, Artificial Sequence
  Description of Artificial Sequence: Synthetic oligonucleotide
cuagccucgugcugaccac

SEQ ID NO: 2170108 - RNA, 19 nt, Artificial Sequence
  Description of Artificial Sequence: Synthetic oligonucleotide
guauccucuaggguugcca

SEQ ID NO: 2170109 - RNA, 19 nt, Artificial Sequence
  Description of Artificial Sequence: Synthetic oligonucleotide
cagucggugcagguguagg

SEQ ID NO: 2170110 - RNA, 19 nt, Artificial Sequence
  Description of Artificial Sequence: Synthetic oligonucleotide
cuuccaacacgaagggcaa

SEQ ID NO: 2170111 - RNA, 19 nt, Artificial Sequence
  Description of Artificial Sequence: Synthetic oligonucleotide
cacaccgcggugugugcgc

SEQ ID NO: 2170112 - RNA, 19 nt, Artificial Sequence
  Description of Artificial Sequence: Synthetic oligonucleotide
gggugaaacgcuuggcgca

SEQ ID NO: 2170113 - RNA, 19 nt, Artificial Sequence
  Description of Artificial Sequence: Synthetic oligonucleotide
gaauagggccgcacaccgc

SEQ ID NO: 2170114 - RNA, 19 nt, Artificial Sequence
  Description of Artificial Sequence: Synthetic oligonucleotide
ugucagguggggccggcuu

SEQ ID NO: 2170115 - RNA, 19 nt, Artificial Sequence
  Description of Artificial Sequence: Synthetic oligonucleotide
agcguggagugauggcuga

SEQ ID NO: 2170116 - RNA, 19 nt, Artificial Sequence
  Description of Artificial Sequence: Synthetic oligonucleotide
agugcccuggugugugacu

SEQ ID NO: 2170117 - RNA, 19 nt, Artificial Sequence
  Description of Artificial Sequence: Synthetic oligonucleotide
ugugugcgcuggugggcag

SEQ ID NO: 2170118 - RNA, 19 nt, Artificial Sequence
  Description of Artificial Sequence: Synthetic oligonucleotide
cacccaggucacuagccuc

SEQ ID NO: 2170119 - RNA, 19 nt, Artificial Sequence
  Description of Artificial Sequence: Synthetic oligonucleotide
cagcggucgcacacguagg

SEQ ID NO: 2170120 - RNA, 19 nt, Artificial Sequence
  Description of Artificial Sequence: Synthetic oligonucleotide
ggagcgcuggcugaaacac

SEQ ID NO: 2170121 - RNA, 19 nt, Artificial Sequence
  Description of Artificial Sequence: Synthetic oligonucleotide
gaggugcgagcuguggcug

SEQ ID NO: 2170122 - RNA, 19 nt, Artificial Sequence
  Description of Artificial Sequence: Synthetic oligonucleotide
ugcccuggugugugacuag

SEQ ID NO: 2170123 - RNA, 19 nt, Artificial Sequence
  Description of Artificial Sequence: Synthetic oligonucleotide
ucaccaggugcgagcgcca

SEQ ID NO: 2170124 - RNA, 19 nt, Artificial Sequence
  Description of Artificial Sequence: Synthetic oligonucleotide
cuggguuuccucaaggguu

SEQ ID NO: 2170125 - RNA, 19 nt, Artificial Sequence
  Description of Artificial Sequence: Synthetic oligonucleotide
ugucaccaggugcgagcgc

SEQ ID NO: 2170126 - RNA, 19 nt, Artificial Sequence
  Description of Artificial Sequence: Synthetic oligonucleotide
cacuugccgcagauagggc

SEQ ID NO: 2170127 - RNA, 19 nt, Artificial Sequence
  Description of Artificial Sequence: Synthetic oligonucleotide
agggugugugucagguggg

SEQ ID NO: 2170128 - RNA, 19 nt, Artificial Sequence
  Description of Artificial Sequence: Synthetic oligonucleotide
ccucaaggguuucguaucc

SEQ ID NO: 2170129 - RNA, 19 nt, Artificial Sequence
  Description of Artificial Sequence: Synthetic oligonucleotide
uagggccgcacaccgcggu

SEQ ID NO: 2170130 - RNA, 19 nt, Artificial Sequence
  Description of Artificial Sequence: Synthetic oligonucleotide
gguuuccucaaggguuucg

SEQ ID NO: 2170131 - RNA, 19 nt, Artificial Sequence
  Description of Artificial Sequence: Synthetic oligonucleotide
ugugcgccggugugucacc

SEQ ID NO: 2170132 - RNA, 19 nt, Artificial Sequence
  Description of Artificial Sequence: Synthetic oligonucleotide
ugugcgcuggugggcagug

SEQ ID NO: 2170133 - RNA, 19 nt, Artificial Sequence
  Description of Artificial Sequence: Synthetic oligonucleotide
aggccgcuguccucugggg

SEQ ID NO: 2170134 - RNA, 19 nt, Artificial Sequence
  Description of Artificial Sequence: Synthetic oligonucleotide
gguaccaucuuccccauuu

SEQ ID NO: 2170135 - RNA, 19 nt, Artificial Sequence
  Description of Artificial Sequence: Synthetic oligonucleotide
cuuggcgcagcggucgcac

SEQ ID NO: 2170136 - RNA, 19 nt, Artificial Sequence
  Description of Artificial Sequence: Synthetic oligonucleotide
uucuugcccguuucaccau

SEQ ID NO: 2170137 - RNA, 19 nt, Artificial Sequence
  Description of Artificial Sequence: Synthetic oligonucleotide
gugcgauugugcgcgauga

SEQ ID NO: 2170138 - RNA, 19 nt, Artificial Sequence
  Description of Artificial Sequence: Synthetic oligonucleotide
agccucgugcugaccacac

SEQ ID NO: 2170139 - RNA, 19 nt, Artificial Sequence
  Description of Artificial Sequence: Synthetic oligonucleotide
cccuggguuuccucaaggg

SEQ ID NO: 2170140 - RNA, 19 nt, Artificial Sequence
  Description of Artificial Sequence: Synthetic oligonucleotide
ucuaggccgcuguccucug

SEQ ID NO: 2170141 - RNA, 19 nt, Artificial Sequence
  Description of Artificial Sequence: Synthetic oligonucleotide
gugcagguuggagcggcgg

SEQ ID NO: 2170142 - RNA, 19 nt, Artificial Sequence
  Description of Artificial Sequence: Synthetic oligonucleotide
cuaggccgcuguccucugg

SEQ ID NO: 2170143 - RNA, 19 nt, Artificial Sequence
  Description of Artificial Sequence: Synthetic oligonucleotide
ucucaugccggugcagguu

SEQ ID NO: 2170144 - RNA, 19 nt, Artificial Sequence
  Description of Artificial Sequence: Synthetic oligonucleotide
ggguugguaccaucuuccc

SEQ ID NO: 2170145 - RNA, 19 nt, Artificial Sequence
  Description of Artificial Sequence: Synthetic oligonucleotide
gcaggaauagggccgcaca

SEQ ID NO: 2170146 - RNA, 19 nt, Artificial Sequence
  Description of Artificial Sequence: Synthetic oligonucleotide
gagugauggcugaagcucu

SEQ ID NO: 2170147 - RNA, 19 nt, Artificial Sequence
  Description of Artificial Sequence: Synthetic oligonucleotide
cguuucaccaucggggacc

SEQ ID NO: 2170148 - RNA, 19 nt, Artificial Sequence
  Description of Artificial Sequence: Synthetic oligonucleotide
ugcgccggugugucaccag

SEQ ID NO: 2170149 - RNA, 19 nt, Artificial Sequence
  Description of Artificial Sequence: Synthetic oligonucleotide
ucguauccucuaggguugc

SEQ ID NO: 2170150 - RNA, 19 nt, Artificial Sequence
  Description of Artificial Sequence: Synthetic oligonucleotide
uagccucgugcugaccaca

SEQ ID NO: 2170151 - RNA, 19 nt, Artificial Sequence
  Description of Artificial Sequence: Synthetic oligonucleotide
cgggugaaacgcuuggcgc

SEQ ID NO: 2170152 - RNA, 19 nt, Artificial Sequence
  Description of Artificial Sequence: Synthetic oligonucleotide
cuguucgcauuuguacguc

SEQ ID NO: 2170153 - RNA, 19 nt, Artificial Sequence
  Description of Artificial Sequence: Synthetic oligonucleotide
ugugugcgccgguguguca

SEQ ID NO: 2170154 - RNA, 19 nt, Artificial Sequence
  Description of Artificial Sequence: Synthetic oligonucleotide
auagggcacuugugcggcu

SEQ ID NO: 2170155 - RNA, 19 nt, Artificial Sequence
  Description of Artificial Sequence: Synthetic oligonucleotide
ggucacuagccucgugcug

SEQ ID NO: 2170156 - RNA, 19 nt, Artificial Sequence
  Description of Artificial Sequence: Synthetic oligonucleotide
ccggugugucaccaggugc

SEQ ID NO: 2170157 - RNA, 19 nt, Artificial Sequence
  Description of Artificial Sequence: Synthetic oligonucleotide
gcccuggguuuccucaagg

SEQ ID NO: 2170158 - RNA, 19 nt, Artificial Sequence
  Description of Artificial Sequence: Synthetic oligonucleotide
ucgccacuuuccagggcaa

SEQ ID NO: 2170159 - RNA, 19 nt, Artificial Sequence
  Description of Artificial Sequence: Synthetic oligonucleotide
gugugcgccggugugucac

SEQ ID NO: 2170160 - RNA, 19 nt, Artificial Sequence
  Description of Artificial Sequence: Synthetic oligonucleotide
guuuccucaaggguuucgu

SEQ ID NO: 2170161 - RNA, 19 nt, Artificial Sequence
  Description of Artificial Sequence: Synthetic oligonucleotide
guuucaccaucggggacca

SEQ ID NO: 2170162 - RNA, 19 nt, Artificial Sequence
  Description of Artificial Sequence: Synthetic oligonucleotide
augccggugcagguuggag

SEQ ID NO: 2170163 - RNA, 19 nt, Artificial Sequence
  Description of Artificial Sequence: Synthetic oligonucleotide
gccacuuuccagggcaacc

SEQ ID NO: 2170164 - RNA, 19 nt, Artificial Sequence
  Description of Artificial Sequence: Synthetic oligonucleotide
cgaagggcaaguguagggc

SEQ ID NO: 2170165 - RNA, 19 nt, Artificial Sequence
  Description of Artificial Sequence: Synthetic oligonucleotide
ugagugcgauugugcgcga

SEQ ID NO: 2170166 - RNA, 19 nt, Artificial Sequence
  Description of Artificial Sequence: Synthetic oligonucleotide
caacacgaagggcaagugu

SEQ ID NO: 2170167 - RNA, 19 nt, Artificial Sequence
  Description of Artificial Sequence: Synthetic oligonucleotide
gaagcucuuccaacacgaa

SEQ ID NO: 2170168 - RNA, 19 nt, Artificial Sequence
  Description of Artificial Sequence: Synthetic oligonucleotide
aggugcgagcuguggcuga

SEQ ID NO: 2170169 - RNA, 19 nt, Artificial Sequence
  Description of Artificial Sequence: Synthetic oligonucleotide
uugccacggcuaggguugg

SEQ ID NO: 2170170 - RNA, 19 nt, Artificial Sequence
  Description of Artificial Sequence: Synthetic oligonucleotide
auagggccgcacaccgcgg

SEQ ID NO: 2170171 - RNA, 19 nt, Artificial Sequence
  Description of Artificial Sequence: Synthetic oligonucleotide
gcgccggugugucaccagg

SEQ ID NO: 2170172 - RNA, 19 nt, Artificial Sequence
  Description of Artificial Sequence: Synthetic oligonucleotide
gagugcccuggugugugac

SEQ ID NO: 2170173 - RNA, 19 nt, Artificial Sequence
  Description of Artificial Sequence: Synthetic oligonucleotide
gcggccgaagcgcuucccg

SEQ ID NO: 2170174 - RNA, 19 nt, Artificial Sequence
  Description of Artificial Sequence: Synthetic oligonucleotide
caccaucggggaccagccc

SEQ ID NO: 2170175 - RNA, 19 nt, Artificial Sequence
  Description of Artificial Sequence: Synthetic oligonucleotide
gcuggugcgugaccagggc

SEQ ID NO: 2170176 - RNA, 19 nt, Artificial Sequence
  Description of Artificial Sequence: Synthetic oligonucleotide
gauugugcgcgaugagguu

SEQ ID NO: 2170177 - RNA, 19 nt, Artificial Sequence
  Description of Artificial Sequence: Synthetic oligonucleotide
uccgagcggcgggugaaac

SEQ ID NO: 2170178 - RNA, 19 nt, Artificial Sequence
  Description of Artificial Sequence: Synthetic oligonucleotide
agguccgagcggcggguga

SEQ ID NO: 2170179 - RNA, 19 nt, Artificial Sequence
  Description of Artificial Sequence: Synthetic oligonucleotide
cagugaggugcgagcugug

SEQ ID NO: 2170180 - RNA, 19 nt, Artificial Sequence
  Description of Artificial Sequence: Synthetic oligonucleotide
cgcuggcugaaacacuugc

SEQ ID NO: 2170181 - RNA, 19 nt, Artificial Sequence
  Description of Artificial Sequence: Synthetic oligonucleotide
gccggugugucaccaggug

SEQ ID NO: 2170182 - RNA, 19 nt, Artificial Sequence
  Description of Artificial Sequence: Synthetic oligonucleotide
cuucucgcuggguuucucu

SEQ ID NO: 2170183 - RNA, 19 nt, Artificial Sequence
  Description of Artificial Sequence: Synthetic oligonucleotide
ccacggcuaggguugguac

SEQ ID NO: 2170184 - RNA, 19 nt, Artificial Sequence
  Description of Artificial Sequence: Synthetic oligonucleotide
gccgaagcgcuucccgcag

SEQ ID NO: 2170185 - RNA, 19 nt, Artificial Sequence
  Description of Artificial Sequence: Synthetic oligonucleotide
gccgcuguccucugggguc

SEQ ID NO: 2170186 - RNA, 19 nt, Artificial Sequence
  Description of Artificial Sequence: Synthetic oligonucleotide
ugacgccggugugggugcg

SEQ ID NO: 2170187 - RNA, 19 nt, Artificial Sequence
  Description of Artificial Sequence: Synthetic oligonucleotide
gugugucagguggggccgg

SEQ ID NO: 2170188 - RNA, 19 nt, Artificial Sequence
  Description of Artificial Sequence: Synthetic oligonucleotide
ccgagcggcgggugaaacg

SEQ ID NO: 2170189 - RNA, 19 nt, Artificial Sequence
  Description of Artificial Sequence: Synthetic oligonucleotide
agggcaaguguagggcuuu

SEQ ID NO: 2170190 - RNA, 19 nt, Artificial Sequence
  Description of Artificial Sequence: Synthetic oligonucleotide
gcuaggguugguaccaucu

SEQ ID NO: 2170191 - RNA, 19 nt, Artificial Sequence
  Description of Artificial Sequence: Synthetic oligonucleotide
gcacaccgcggugugugcg

SEQ ID NO: 2170192 - RNA, 19 nt, Artificial Sequence
  Description of Artificial Sequence: Synthetic oligonucleotide
uggcgccggugugagugcc

SEQ ID NO: 2170193 - RNA, 19 nt, Artificial Sequence
  Description of Artificial Sequence: Synthetic oligonucleotide
ggcgcagcggucgcacacg

SEQ ID NO: 2170194 - RNA, 19 nt, Artificial Sequence
  Description of Artificial Sequence: Synthetic oligonucleotide
ccggcuuuggcggccaggc

SEQ ID NO: 2170195 - RNA, 19 nt, Artificial Sequence
  Description of Artificial Sequence: Synthetic oligonucleotide
agugauggcugaagcucuu

SEQ ID NO: 2170196 - RNA, 19 nt, Artificial Sequence
  Description of Artificial Sequence: Synthetic oligonucleotide
agcucugcgugaagcacuu

SEQ ID NO: 2170197 - RNA, 19 nt, Artificial Sequence
  Description of Artificial Sequence: Synthetic oligonucleotide
cccguuucaccaucgggga

SEQ ID NO: 2170198 - RNA, 19 nt, Artificial Sequence
  Description of Artificial Sequence: Synthetic oligonucleotide
ugcggccgaagcgcuuccc

SEQ ID NO: 2170199 - RNA, 19 nt, Artificial Sequence
  Description of Artificial Sequence: Synthetic oligonucleotide
uugggcccgguggugugaa

SEQ ID NO: 2170200 - RNA, 19 nt, Artificial Sequence
  Description of Artificial Sequence: Synthetic oligonucleotide
agcgcuucccgcagucggu

SEQ ID NO: 2170201 - RNA, 19 nt, Artificial Sequence
  Description of Artificial Sequence: Synthetic oligonucleotide
ggugcagguuggagcggcg

SEQ ID NO: 2170202 - RNA, 19 nt, Artificial Sequence
  Description of Artificial Sequence: Synthetic oligonucleotide
caccaggugcgagcgccag

SEQ ID NO: 2170203 - RNA, 19 nt, Artificial Sequence
  Description of Artificial Sequence: Synthetic oligonucleotide
ccuccucgccacuuuccag

SEQ ID NO: 2170204 - RNA, 19 nt, Artificial Sequence
  Description of Artificial Sequence: Synthetic oligonucleotide
ggcccuggguuuccucaag

SEQ ID NO: 2170205 - RNA, 19 nt, Artificial Sequence
  Description of Artificial Sequence: Synthetic oligonucleotide
cgcagauagggcacuugug

SEQ ID NO: 2170206 - RNA, 19 nt, Artificial Sequence
  Description of Artificial Sequence: Synthetic oligonucleotide
cuuuggcggccaggcuucc

SEQ ID NO: 2170207 - RNA, 19 nt, Artificial Sequence
  Description of Artificial Sequence: Synthetic oligonucleotide
ccaacacgaagggcaagug

SEQ ID NO: 2170208 - RNA, 19 nt, Artificial Sequence
  Description of Artificial Sequence: Synthetic oligonucleotide
cccgguggugugaaucuuc

SEQ ID NO: 2170209 - RNA, 19 nt, Artificial Sequence
  Description of Artificial Sequence: Synthetic oligonucleotide
ggcgggugaaacgcuuggc

SEQ ID NO: 2170210 - RNA, 19 nt, Artificial Sequence
  Description of Artificial Sequence: Synthetic oligonucleotide
cuucccucagggcccaccu

SEQ ID NO: 2170211 - RNA, 19 nt, Artificial Sequence
  Description of Artificial Sequence: Synthetic oligonucleotide
gcuuuggcggccaggcuuc

SEQ ID NO: 2170212 - RNA, 19 nt, Artificial Sequence
  Description of Artificial Sequence: Synthetic oligonucleotide
cugcggccgaagcgcuucc

SEQ ID NO: 2170213 - RNA, 19 nt, Artificial Sequence
  Description of Artificial Sequence: Synthetic oligonucleotide
cucuaggguugccacggcu

SEQ ID NO: 2170214 - RNA, 19 nt, Artificial Sequence
  Description of Artificial Sequence: Synthetic oligonucleotide
ggaucagcguggagugaug

SEQ ID NO: 2170215 - RNA, 19 nt, Artificial Sequence
  Description of Artificial Sequence: Synthetic oligonucleotide
gugcgagcgccagcugaag

SEQ ID NO: 2170216 - RNA, 19 nt, Artificial Sequence
  Description of Artificial Sequence: Synthetic oligonucleotide
gucgcacacguagggcuuc

SEQ ID NO: 2170217 - RNA, 19 nt, Artificial Sequence
  Description of Artificial Sequence: Synthetic oligonucleotide
ggcuuggcgccggugugag

SEQ ID NO: 2170218 - RNA, 19 nt, Artificial Sequence
  Description of Artificial Sequence: Synthetic oligonucleotide
cguggagugauggcugaag

SEQ ID NO: 2170219 - RNA, 19 nt, Artificial Sequence
  Description of Artificial Sequence: Synthetic oligonucleotide
ggcaggaauagggccgcac

SEQ ID NO: 2170220 - RNA, 19 nt, Artificial Sequence
  Description of Artificial Sequence: Synthetic oligonucleotide
gguugccacggcuaggguu

SEQ ID NO: 2170221 - RNA, 19 nt, Artificial Sequence
  Description of Artificial Sequence: Synthetic oligonucleotide
cgauugugcgcgaugaggu

SEQ ID NO: 2170222 - RNA, 19 nt, Artificial Sequence
  Description of Artificial Sequence: Synthetic oligonucleotide
gcagucggugcagguguag

SEQ ID NO: 2170223 - RNA, 19 nt, Artificial Sequence
  Description of Artificial Sequence: Synthetic oligonucleotide
gugcgagcuguggcugaag

SEQ ID NO: 2170224 - RNA, 19 nt, Artificial Sequence
  Description of Artificial Sequence: Synthetic oligonucleotide
uuucgccuguguggaugau

SEQ ID NO: 2170225 - RNA, 19 nt, Artificial Sequence
  Description of Artificial Sequence: Synthetic oligonucleotide
cuaggguugguaccaucuu

SEQ ID NO: 2170226 - RNA, 19 nt, Artificial Sequence
  Description of Artificial Sequence: Synthetic oligonucleotide
gggcaaccuucucgcuggg

SEQ ID NO: 2170227 - RNA, 19 nt, Artificial Sequence
  Description of Artificial Sequence: Synthetic oligonucleotide
gcagugaggugcgagcugu

SEQ ID NO: 2170228 - RNA, 19 nt, Artificial Sequence
  Description of Artificial Sequence: Synthetic oligonucleotide
guucgcauuuguacgucuu

SEQ ID NO: 2170229 - RNA, 19 nt, Artificial Sequence
  Description of Artificial Sequence: Synthetic oligonucleotide
caggugcgagcgccagcug

SEQ ID NO: 2170230 - RNA, 19 nt, Artificial Sequence
  Description of Artificial Sequence: Synthetic oligonucleotide
gcacagcgggcaggaauag

SEQ ID NO: 2170231 - RNA, 19 nt, Artificial Sequence
  Description of Artificial Sequence: Synthetic oligonucleotide
ccguuucaccaucggggac

SEQ ID NO: 2170232 - RNA, 19 nt, Artificial Sequence
  Description of Artificial Sequence: Synthetic oligonucleotide
ccuggguuuccucaagggu

SEQ ID NO: 2170233 - RNA, 19 nt, Artificial Sequence
  Description of Artificial Sequence: Synthetic oligonucleotide
ggugcgagcgccagcugaa

SEQ ID NO: 2170234 - RNA, 19 nt, Artificial Sequence
  Description of Artificial Sequence: Synthetic oligonucleotide
gcggucgcacacguagggc

SEQ ID NO: 2170235 - RNA, 19 nt, Artificial Sequence
  Description of Artificial Sequence: Synthetic oligonucleotide
agccccuccucgccacuuu

SEQ ID NO: 2170236 - RNA, 19 nt, Artificial Sequence
  Description of Artificial Sequence: Synthetic oligonucleotide
gugcgugaccagggcggag

SEQ ID NO: 2170237 - RNA, 19 nt, Artificial Sequence
  Description of Artificial Sequence: Synthetic oligonucleotide
cgagcgccagcugaagccc

SEQ ID NO: 2170238 - RNA, 19 nt, Artificial Sequence
  Description of Artificial Sequence: Synthetic oligonucleotide
gggcccgguggugugaauc

SEQ ID NO: 2170239 - RNA, 19 nt, Artificial Sequence
  Description of Artificial Sequence: Synthetic oligonucleotide
agcggcgggugaaacgcuu

SEQ ID NO: 2170240 - RNA, 19 nt, Artificial Sequence
  Description of Artificial Sequence: Synthetic oligonucleotide
gcugcggccgaagcgcuuc

SEQ ID NO: 2170241 - RNA, 19 nt, Artificial Sequence
  Description of Artificial Sequence: Synthetic oligonucleotide
cuugggcccggugguguga

SEQ ID NO: 2170242 - RNA, 19 nt, Artificial Sequence
  Description of Artificial Sequence: Synthetic oligonucleotide
cucaaggguuucguauccu

SEQ ID NO: 2170243 - RNA, 19 nt, Artificial Sequence
  Description of Artificial Sequence: Synthetic oligonucleotide
caccgcggugugugcgcug

SEQ ID NO: 2170244 - RNA, 19 nt, Artificial Sequence
  Description of Artificial Sequence: Synthetic oligonucleotide
caugccggugcagguugga

SEQ ID NO: 2170245 - RNA, 19 nt, Artificial Sequence
  Description of Artificial Sequence: Synthetic oligonucleotide
ugccgcagauagggcacuu

SEQ ID NO: 2170246 - RNA, 19 nt, Artificial Sequence
  Description of Artificial Sequence: Synthetic oligonucleotide
gccgcagauagggcacuug

SEQ ID NO: 2170247 - RNA, 19 nt, Artificial Sequence
  Description of Artificial Sequence: Synthetic oligonucleotide
ccgcacaccgcggugugug

SEQ ID NO: 2170248 - RNA, 19 nt, Artificial Sequence
  Description of Artificial Sequence: Synthetic oligonucleotide
ggcccgguggugugaaucu

SEQ ID NO: 2170249 - RNA, 19 nt, Artificial Sequence
  Description of Artificial Sequence: Synthetic oligonucleotide
ggccgcacaccgcggugug

SEQ ID NO: 2170250 - RNA, 19 nt, Artificial Sequence
  Description of Artificial Sequence: Synthetic oligonucleotide
gucagguggggccggcuuu

SEQ ID NO: 2170251 - RNA, 19 nt, Artificial Sequence
  Description of Artificial Sequence: Synthetic oligonucleotide
ccucuaggguugccacggc

SEQ ID NO: 2170252 - RNA, 19 nt, Artificial Sequence
  Description of Artificial Sequence: Synthetic oligonucleotide
ccuugggcccgguggugug

SEQ ID NO: 2170253 - RNA, 19 nt, Artificial Sequence
  Description of Artificial Sequence: Synthetic oligonucleotide
ugaccacacuguggcucuu

SEQ ID NO: 2170254 - RNA, 19 nt, Artificial Sequence
  Description of Artificial Sequence: Synthetic oligonucleotide
gccggcuuuggcggccagg

SEQ ID NO: 2170255 - RNA, 19 nt, Artificial Sequence
  Description of Artificial Sequence: Synthetic oligonucleotide
ggcauggguagggcuugac

SEQ ID NO: 2170256 - RNA, 19 nt, Artificial Sequence
  Description of Artificial Sequence: Synthetic oligonucleotide
ggugcgugaccagggcgga

SEQ ID NO: 2170257 - RNA, 19 nt, Artificial Sequence
  Description of Artificial Sequence: Synthetic oligonucleotide
gcggcgggugaaacgcuug

SEQ ID NO: 2170258 - RNA, 19 nt, Artificial Sequence
  Description of Artificial Sequence: Synthetic oligonucleotide
gcgcuucccgcagucggug

SEQ ID NO: 2170259 - RNA, 19 nt, Artificial Sequence
  Description of Artificial Sequence: Synthetic oligonucleotide
ggccagggccuugggcccg

SEQ ID NO: 2170260 - RNA, 19 nt, Artificial Sequence
  Description of Artificial Sequence: Synthetic oligonucleotide
ugccacggcuaggguuggu

SEQ ID NO: 2170261 - RNA, 19 nt, Artificial Sequence
  Description of Artificial Sequence: Synthetic oligonucleotide
ccaggcuuccccugugucu

SEQ ID NO: 2170262 - RNA, 19 nt, Artificial Sequence
  Description of Artificial Sequence: Synthetic oligonucleotide
gugcgccggugugucacca

SEQ ID NO: 2170263 - RNA, 19 nt, Artificial Sequence
  Description of Artificial Sequence: Synthetic oligonucleotide
cuagguccgagcggcgggu

SEQ ID NO: 2170264 - RNA, 19 nt, Artificial Sequence
  Description of Artificial Sequence: Synthetic oligonucleotide
ugggcccgguggugugaau

SEQ ID NO: 2170265 - RNA, 19 nt, Artificial Sequence
  Description of Artificial Sequence: Synthetic oligonucleotide
cacuuuccagggcaaccuu

SEQ ID NO: 2170266 - RNA, 19 nt, Artificial Sequence
  Description of Artificial Sequence: Synthetic oligonucleotide
agcgccagcugaagcccuu

SEQ ID NO: 2170267 - RNA, 19 nt, Artificial Sequence
  Description of Artificial Sequence: Synthetic oligonucleotide
ccgcagauagggcacuugu

SEQ ID NO: 2170268 - RNA, 19 nt, Artificial Sequence
  Description of Artificial Sequence: Synthetic oligonucleotide
gguccgagcggcgggugaa

SEQ ID NO: 2170269 - RNA, 19 nt, Artificial Sequence
  Description of Artificial Sequence: Synthetic oligonucleotide
gagugcgauugugcgcgau

SEQ ID NO: 2170270 - RNA, 19 nt, Artificial Sequence
  Description of Artificial Sequence: Synthetic oligonucleotide
ccgguggugugaaucuucu

SEQ ID NO: 2170271 - RNA, 19 nt, Artificial Sequence
  Description of Artificial Sequence: Synthetic oligonucleotide
ccacuuuccagggcaaccu

SEQ ID NO: 2170272 - RNA, 19 nt, Artificial Sequence
  Description of Artificial Sequence: Synthetic oligonucleotide
ccaggugcgagcgccagcu

SEQ ID NO: 2170273 - RNA, 19 nt, Artificial Sequence
  Description of Artificial Sequence: Synthetic oligonucleotide
gugcggcuuggcgccggug

SEQ ID NO: 2170274 - RNA, 19 nt, Artificial Sequence
  Description of Artificial Sequence: Synthetic oligonucleotide
ggguuuccucaaggguuuc

SEQ ID NO: 2170275 - RNA, 19 nt, Artificial Sequence
  Description of Artificial Sequence: Synthetic oligonucleotide
gagcggcggcugaagcucu

SEQ ID NO: 2170276 - RNA, 19 nt, Artificial Sequence
  Description of Artificial Sequence: Synthetic oligonucleotide
gggccuugggcccgguggu

SEQ ID NO: 2170277 - RNA, 19 nt, Artificial Sequence
  Description of Artificial Sequence: Synthetic oligonucleotide
cguauccucuaggguugcc

SEQ ID NO: 2170278 - RNA, 19 nt, Artificial Sequence
  Description of Artificial Sequence: Synthetic oligonucleotide
ggcgccggugugagugccc

SEQ ID NO: 2170279 - RNA, 19 nt, Artificial Sequence
  Description of Artificial Sequence: Synthetic oligonucleotide
gagcggcgggugaaacgcu

SEQ ID NO: 2170280 - RNA, 19 nt, Artificial Sequence
  Description of Artificial Sequence: Synthetic oligonucleotide
cggucgcacacguagggcu

SEQ ID NO: 2170281 - RNA, 19 nt, Artificial Sequence
  Description of Artificial Sequence: Synthetic oligonucleotide
cgguggugugaaucuucuc

SEQ ID NO: 2170282 - RNA, 19 nt, Artificial Sequence
  Description of Artificial Sequence: Synthetic oligonucleotide
ccggugcagguuggagcgg

SEQ ID NO: 2170283 - RNA, 19 nt, Artificial Sequence
  Description of Artificial Sequence: Synthetic oligonucleotide
guccgagcggcgggugaaa

SEQ ID NO: 2170284 - RNA, 19 nt, Artificial Sequence
  Description of Artificial Sequence: Synthetic oligonucleotide
gggucuugagagggugugu

SEQ ID NO: 2170285 - RNA, 19 nt, Artificial Sequence
  Description of Artificial Sequence: Synthetic oligonucleotide
gugugcgcuggugggcagu

SEQ ID NO: 2170286 - RNA, 19 nt, Artificial Sequence
  Description of Artificial Sequence: Synthetic oligonucleotide
gugcgcuggugggcaguga

SEQ ID NO: 2170287 - RNA, 19 nt, Artificial Sequence
  Description of Artificial Sequence: Synthetic oligonucleotide
cucuucccucagggcccac

SEQ ID NO: 2170288 - RNA, 19 nt, Artificial Sequence
  Description of Artificial Sequence: Synthetic oligonucleotide
cgcggugugugcgcuggug

SEQ ID NO: 2170289 - RNA, 19 nt, Artificial Sequence
  Description of Artificial Sequence: Synthetic oligonucleotide
gggcauggguagggcuuga

SEQ ID NO: 2170290 - RNA, 19 nt, Artificial Sequence
  Description of Artificial Sequence: Synthetic oligonucleotide
gccuugggcccgguggugu

SEQ ID NO: 2170291 - RNA, 19 nt, Artificial Sequence
  Description of Artificial Sequence: Synthetic oligonucleotide
gcguggagugauggcugaa

SEQ ID NO: 2170292 - RNA, 19 nt, Artificial Sequence
  Description of Artificial Sequence: Synthetic oligonucleotide
gggccgcacaccgcggugu

SEQ ID NO: 2170293 - RNA, 19 nt, Artificial Sequence
  Description of Artificial Sequence: Synthetic oligonucleotide
gcgcagcggucgcacacgu

SEQ ID NO: 2170294 - RNA, 19 nt, Artificial Sequence
  Description of Artificial Sequence: Synthetic oligonucleotide
gcuugacgccggugugggu

SEQ ID NO: 2170295 - RNA, 19 nt, Artificial Sequence
  Description of Artificial Sequence: Synthetic oligonucleotide
ccagggcaaccuucucgcu

SEQ ID NO: 2170296 - RNA, 19 nt, Artificial Sequence
  Description of Artificial Sequence: Synthetic oligonucleotide
ccagggcggagcucugcgu

SEQ ID NO: 2170297 - RNA, 19 nt, Artificial Sequence
  Description of Artificial Sequence: Synthetic oligonucleotide
gcgccggugugagugcccu

SEQ ID NO: 2170298 - RNA, 19 nt, Artificial Sequence
  Description of Artificial Sequence: Synthetic oligonucleotide
cgcaguccaggcaguggua

SEQ ID NO: 2170299 - RNA, 19 nt, Artificial Sequence
  Description of Artificial Sequence: Synthetic oligonucleotide
gcuuggcgccggugugagu

SEQ ID NO: 2170300 - RNA, 19 nt, Artificial Sequence
  Description of Artificial Sequence: Synthetic oligonucleotide
cgccggugugucaccaggu

SEQ ID NO: 2170301 - RNA, 19 nt, Artificial Sequence
  Description of Artificial Sequence: Synthetic oligonucleotide
ccgcuguccucuggggucu

SEQ ID NO: 2170302 - RNA, 19 nt, Artificial Sequence
  Description of Artificial Sequence: Synthetic oligonucleotide
gcccgguggugugaaucuu

SEQ ID NO: 2170303 - RNA, 19 nt, Artificial Sequence
  Description of Artificial Sequence: Synthetic oligonucleotide
cgccaguaugagugcgauu

SEQ ID NO: 2170304 - RNA, 19 nt, Artificial Sequence
  Description of Artificial Sequence: Synthetic oligonucleotide
ccgcggugugugcgcuggu

SEQ ID NO: 2170305 - RNA, 19 nt, Artificial Sequence
  Description of Artificial Sequence: Synthetic oligonucleotide
cggcuaggguugguaccau

SEQ ID NO: 2170306 - RNA, 19 nt, Artificial Sequence
  Description of Artificial Sequence: Synthetic oligonucleotide
auaguagucaguuuuaccc

SEQ ID NO: 2170307 - RNA, 19 nt, Artificial Sequence
  Description of Artificial Sequence: Synthetic oligonucleotide
aagaccugcauccaaauag

SEQ ID NO: 2170308 - RNA, 19 nt, Artificial Sequence
  Description of Artificial Sequence: Synthetic oligonucleotide
aacguuguucuuuauguac

SEQ ID NO: 2170309 - RNA, 19 nt, Artificial Sequence
  Description of Artificial Sequence: Synthetic oligonucleotide
acuuucacgaaccccaucc

SEQ ID NO: 2170310 - RNA, 19 nt, Artificial Sequence
  Description of Artificial Sequence: Synthetic oligonucleotide
aauugcuuuagcucucagc

SEQ ID NO: 2170311 - RNA, 19 nt, Artificial Sequence
  Description of Artificial Sequence: Synthetic oligonucleotide
uguaguucgggcaagaccu

SEQ ID NO: 2170312 - RNA, 19 nt, Artificial Sequence
  Description of Artificial Sequence: Synthetic oligonucleotide
aguuacacgaacuaucauc

SEQ ID NO: 2170313 - RNA, 19 nt, Artificial Sequence
  Description of Artificial Sequence: Synthetic oligonucleotide
agaaaauugcuuuagcucu

SEQ ID NO: 2170314 - RNA, 19 nt, Artificial Sequence
  Description of Artificial Sequence: Synthetic oligonucleotide
ugagcuuucuuauacaucu

SEQ ID NO: 2170315 - RNA, 19 nt, Artificial Sequence
  Description of Artificial Sequence: Synthetic oligonucleotide
auuguauucgucuccaguc

SEQ ID NO: 2170316 - RNA, 19 nt, Artificial Sequence
  Description of Artificial Sequence: Synthetic oligonucleotide
auugcuuuagcucucagca

SEQ ID NO: 2170317 - RNA, 19 nt, Artificial Sequence
  Description of Artificial Sequence: Synthetic oligonucleotide
agaacuguuucuuguacgc

SEQ ID NO: 2170318 - RNA, 19 nt, Artificial Sequence
  Description of Artificial Sequence: Synthetic oligonucleotide
uuuugcuuggucaauaagu

SEQ ID NO: 2170319 - RNA, 19 nt, Artificial Sequence
  Description of Artificial Sequence: Synthetic oligonucleotide
uucuugacaacuuucacga

SEQ ID NO: 2170320 - RNA, 19 nt, Artificial Sequence
  Description of Artificial Sequence: Synthetic oligonucleotide
aaaaucuucauagaaaauu

SEQ ID NO: 2170321 - RNA, 19 nt, Artificial Sequence
  Description of Artificial Sequence: Synthetic oligonucleotide
aaucguuugguacuaugag

SEQ ID NO: 2170322 - RNA, 19 nt, Artificial Sequence
  Description of Artificial Sequence: Synthetic oligonucleotide
aaaucuucauagaaaauug

SEQ ID NO: 2170323 - RNA, 19 nt, Artificial Sequence
  Description of Artificial Sequence: Synthetic oligonucleotide
auagaaaauugcuuuagcu

SEQ ID NO: 2170324 - RNA, 19 nt, Artificial Sequence
  Description of Artificial Sequence: Synthetic oligonucleotide
aguuuuacccucucgccgc

SEQ ID NO: 2170325 - RNA, 19 nt, Artificial Sequence
  Description of Artificial Sequence: Synthetic oligonucleotide
uacuaugaggaauagacaa

SEQ ID NO: 2170326 - RNA, 19 nt, Artificial Sequence
  Description of Artificial Sequence: Synthetic oligonucleotide
uuaguuacacgaacuauca

SEQ ID NO: 2170327 - RNA, 19 nt, Artificial Sequence
  Description of Artificial Sequence: Synthetic oligonucleotide
ucuaaaucucacuugguac

SEQ ID NO: 2170328 - RNA, 19 nt, Artificial Sequence
  Description of Artificial Sequence: Synthetic oligonucleotide
ugaggaauagacaagccuc

SEQ ID NO: 2170329 - RNA, 19 nt, Artificial Sequence
  Description of Artificial Sequence: Synthetic oligonucleotide
ucguuugguacuaugagga

SEQ ID NO: 2170330 - RNA, 19 nt, Artificial Sequence
  Description of Artificial Sequence: Synthetic oligonucleotide
accaaaccuauugagaagc

SEQ ID NO: 2170331 - RNA, 19 nt, Artificial Sequence
  Description of Artificial Sequence: Synthetic oligonucleotide
uagaaaauugcuuuagcuc

SEQ ID NO: 2170332 - RNA, 19 nt, Artificial Sequence
  Description of Artificial Sequence: Synthetic oligonucleotide
aacccgaucuuucuucugg

SEQ ID NO: 2170333 - RNA, 19 nt, Artificial Sequence
  Description of Artificial Sequence: Synthetic oligonucleotide
auagacuggauucucucgg

SEQ ID NO: 2170334 - RNA, 19 nt, Artificial Sequence
  Description of Artificial Sequence: Synthetic oligonucleotide
uucuauacgggcauaggca

SEQ ID NO: 2170335 - RNA, 19 nt, Artificial Sequence
  Description of Artificial Sequence: Synthetic oligonucleotide
ugcagcauaauuugucagg

SEQ ID NO: 2170336 - RNA, 19 nt, Artificial Sequence
  Description of Artificial Sequence: Synthetic oligonucleotide
cuauugagaagccugcggg

SEQ ID NO: 2170337 - RNA, 19 nt, Artificial Sequence
  Description of Artificial Sequence: Synthetic oligonucleotide
aucauguccccuucuauac

SEQ ID NO: 2170338 - RNA, 19 nt, Artificial Sequence
  Description of Artificial Sequence: Synthetic oligonucleotide
uuuagcucucagcagcccg

SEQ ID NO: 2170339 - RNA, 19 nt, Artificial Sequence
  Description of Artificial Sequence: Synthetic oligonucleotide
acuggauucucucggauag

SEQ ID NO: 2170340 - RNA, 19 nt, Artificial Sequence
  Description of Artificial Sequence: Synthetic oligonucleotide
aaucauaaccagggaaucg

SEQ ID NO: 2170341 - RNA, 19 nt, Artificial Sequence
  Description of Artificial Sequence: Synthetic oligonucleotide
ucuguuaguuacacgaacu

SEQ ID NO: 2170342 - RNA, 19 nt, Artificial Sequence
  Description of Artificial Sequence: Synthetic oligonucleotide
aucguuugguacuaugagg

SEQ ID NO: 2170343 - RNA, 19 nt, Artificial Sequence
  Description of Artificial Sequence: Synthetic oligonucleotide
uuuauugccaguuguaguu

SEQ ID NO: 2170344 - RNA, 19 nt, Artificial Sequence
  Description of Artificial Sequence: Synthetic oligonucleotide
agcgugagcuuucuuauac

SEQ ID NO: 2170345 - RNA, 19 nt, Artificial Sequence
  Description of Artificial Sequence: Synthetic oligonucleotide
ugagcucugaggaagcuug

SEQ ID NO: 2170346 - RNA, 19 nt, Artificial Sequence
  Description of Artificial Sequence: Synthetic oligonucleotide
uggucaauaaguuuauuau

SEQ ID NO: 2170347 - RNA, 19 nt, Artificial Sequence
  Description of Artificial Sequence: Synthetic oligonucleotide
guuacacgaacuaucaucc

SEQ ID NO: 2170348 - RNA, 19 nt, Artificial Sequence
  Description of Artificial Sequence: Synthetic oligonucleotide
uacaucuccuccaucaugu

SEQ ID NO: 2170349 - RNA, 19 nt, Artificial Sequence
  Description of Artificial Sequence: Synthetic oligonucleotide
gagaacuguuucuuguacg

SEQ ID NO: 2170350 - RNA, 19 nt, Artificial Sequence
  Description of Artificial Sequence: Synthetic oligonucleotide
auuuuggcaguucgugugc

SEQ ID NO: 2170351 - RNA, 19 nt, Artificial Sequence
  Description of Artificial Sequence: Synthetic oligonucleotide
aaaccuauugagaagccug

SEQ ID NO: 2170352 - RNA, 19 nt, Artificial Sequence
  Description of Artificial Sequence: Synthetic oligonucleotide
cagaugauaucucuguuag

SEQ ID NO: 2170353 - RNA, 19 nt, Artificial Sequence
  Description of Artificial Sequence: Synthetic oligonucleotide
uuugguacuaugaggaaua

SEQ ID NO: 2170354 - RNA, 19 nt, Artificial Sequence
  Description of Artificial Sequence: Synthetic oligonucleotide
ugcuuggucaauaaguuua

SEQ ID NO: 2170355 - RNA, 19 nt, Artificial Sequence
  Description of Artificial Sequence: Synthetic oligonucleotide
cuaucauccuguauuuggg

SEQ ID NO: 2170356 - RNA, 19 nt, Artificial Sequence
  Description of Artificial Sequence: Synthetic oligonucleotide
uuuauguacugggagaacu

SEQ ID NO: 2170357 - RNA, 19 nt, Artificial Sequence
  Description of Artificial Sequence: Synthetic oligonucleotide
ugucaggccaacuuugacc

SEQ ID NO: 2170358 - RNA, 19 nt, Artificial Sequence
  Description of Artificial Sequence: Synthetic oligonucleotide
uguccuggaucaccaaucg

SEQ ID NO: 2170359 - RNA, 19 nt, Artificial Sequence
  Description of Artificial Sequence: Synthetic oligonucleotide
auaaccagggaaucguuug

SEQ ID NO: 2170360 - RNA, 19 nt, Artificial Sequence
  Description of Artificial Sequence: Synthetic oligonucleotide
cuucuauacgggcauaggc

SEQ ID NO: 2170361 - RNA, 19 nt, Artificial Sequence
  Description of Artificial Sequence: Synthetic oligonucleotide
ucauagaucuuguccauac

SEQ ID NO: 2170362 - RNA, 19 nt, Artificial Sequence
  Description of Artificial Sequence: Synthetic oligonucleotide
uggaucaccaaucguuucc

SEQ ID NO: 2170363 - RNA, 19 nt, Artificial Sequence
  Description of Artificial Sequence: Synthetic oligonucleotide
uuguaguucgggcaagacc

SEQ ID NO: 2170364 - RNA, 19 nt, Artificial Sequence
  Description of Artificial Sequence: Synthetic oligonucleotide
aauuugucaggccaacuuu

SEQ ID NO: 2170365 - RNA, 19 nt, Artificial Sequence
  Description of Artificial Sequence: Synthetic oligonucleotide
caugauaugcuuccgauga

SEQ ID NO: 2170366 - RNA, 19 nt, Artificial Sequence
  Description of Artificial Sequence: Synthetic oligonucleotide
cuugacaacuuucacgaac

SEQ ID NO: 2170367 - RNA, 19 nt, Artificial Sequence
  Description of Artificial Sequence: Synthetic oligonucleotide
uucuaaaucucacuuggua

SEQ ID NO: 2170368 - RNA, 19 nt, Artificial Sequence
  Description of Artificial Sequence: Synthetic oligonucleotide
uauugccaguuguaguucg

SEQ ID NO: 2170369 - RNA, 19 nt, Artificial Sequence
  Description of Artificial Sequence: Synthetic oligonucleotide
cauuagguagcgcauguag

SEQ ID NO: 2170370 - RNA, 19 nt, Artificial Sequence
  Description of Artificial Sequence: Synthetic oligonucleotide
auugagaagccugcgggcc

SEQ ID NO: 2170371 - RNA, 19 nt, Artificial Sequence
  Description of Artificial Sequence: Synthetic oligonucleotide
aacagacacccgcaaccgc

SEQ ID NO: 2170372 - RNA, 19 nt, Artificial Sequence
  Description of Artificial Sequence: Synthetic oligonucleotide
ugucccaugauaugcuucc

SEQ ID NO: 2170373 - RNA, 19 nt, Artificial Sequence
  Description of Artificial Sequence: Synthetic oligonucleotide
agcgcauguagucugcgac

SEQ ID NO: 2170374 - RNA, 19 nt, Artificial Sequence
  Description of Artificial Sequence: Synthetic oligonucleotide
uuauguacugggagaacug

SEQ ID NO: 2170375 - RNA, 19 nt, Artificial Sequence
  Description of Artificial Sequence: Synthetic oligonucleotide
guccauaccaaaccuauug

SEQ ID NO: 2170376 - RNA, 19 nt, Artificial Sequence
  Description of Artificial Sequence: Synthetic oligonucleotide
ugcgcagacuaucaugucc

SEQ ID NO: 2170377 - RNA, 19 nt, Artificial Sequence
  Description of Artificial Sequence: Synthetic oligonucleotide
uaccucuugaaguaggccu

SEQ ID NO: 2170378 - RNA, 19 nt, Artificial Sequence
  Description of Artificial Sequence: Synthetic oligonucleotide
uaaccagggaaucguuugg

SEQ ID NO: 2170379 - RNA, 19 nt, Artificial Sequence
  Description of Artificial Sequence: Synthetic oligonucleotide
ucaguuuuacccucucgcc

SEQ ID NO: 2170380 - RNA, 19 nt, Artificial Sequence
  Description of Artificial Sequence: Synthetic oligonucleotide
augaggaauagacaagccu

SEQ ID NO: 2170381 - RNA, 19 nt, Artificial Sequence
  Description of Artificial Sequence: Synthetic oligonucleotide
uuagguagcgcauguaguc

SEQ ID NO: 2170382 - RNA, 19 nt, Artificial Sequence
  Description of Artificial Sequence: Synthetic oligonucleotide
ucgggcaagaccugcaucc

SEQ ID NO: 2170383 - RNA, 19 nt, Artificial Sequence
  Description of Artificial Sequence: Synthetic oligonucleotide
cauccugcggaacagacac

SEQ ID NO: 2170384 - RNA, 19 nt, Artificial Sequence
  Description of Artificial Sequence: Synthetic oligonucleotide
ucaacauuguauucgucuc

SEQ ID NO: 2170385 - RNA, 19 nt, Artificial Sequence
  Description of Artificial Sequence: Synthetic oligonucleotide
cauagacuggauucucucg

SEQ ID NO: 2170386 - RNA, 19 nt, Artificial Sequence
  Description of Artificial Sequence: Synthetic oligonucleotide
cauaguagucaguuuuacc

SEQ ID NO: 2170387 - RNA, 19 nt, Artificial Sequence
  Description of Artificial Sequence: Synthetic oligonucleotide
cauguccccuucuauacgg

SEQ ID NO: 2170388 - RNA, 19 nt, Artificial Sequence
  Description of Artificial Sequence: Synthetic oligonucleotide
uaauuugucaggccaacuu

SEQ ID NO: 2170389 - RNA, 19 nt, Artificial Sequence
  Description of Artificial Sequence: Synthetic oligonucleotide
uccauaccaaaccuauuga

SEQ ID NO: 2170390 - RNA, 19 nt, Artificial Sequence
  Description of Artificial Sequence: Synthetic oligonucleotide
ucuauacgggcauaggcaa

SEQ ID NO: 2170391 - RNA, 19 nt, Artificial Sequence
  Description of Artificial Sequence: Synthetic oligonucleotide
uucuugagcucugaggaag

SEQ ID NO: 2170392 - RNA, 19 nt, Artificial Sequence
  Description of Artificial Sequence: Synthetic oligonucleotide
cuucuuuugagcaacccga

SEQ ID NO: 2170393 - RNA, 19 nt, Artificial Sequence
  Description of Artificial Sequence: Synthetic oligonucleotide
uaugcugcgcagacuauca

SEQ ID NO: 2170394 - RNA, 19 nt, Artificial Sequence
  Description of Artificial Sequence: Synthetic oligonucleotide
uuguauucgucuccaguca

SEQ ID NO: 2170395 - RNA, 19 nt, Artificial Sequence
  Description of Artificial Sequence: Synthetic oligonucleotide
auuuugggacgguuccacc

SEQ ID NO: 2170396 - RNA, 19 nt, Artificial Sequence
  Description of Artificial Sequence: Synthetic oligonucleotide
ucauguccccuucuauacg

SEQ ID NO: 2170397 - RNA, 19 nt, Artificial Sequence
  Description of Artificial Sequence: Synthetic oligonucleotide
ucuuguacgcaucuucauc

SEQ ID NO: 2170398 - RNA, 19 nt, Artificial Sequence
  Description of Artificial Sequence: Synthetic oligonucleotide
uguagucugcgacauucug

SEQ ID NO: 2170399 - RNA, 19 nt, Artificial Sequence
  Description of Artificial Sequence: Synthetic oligonucleotide
augaacuucugcauugaac

SEQ ID NO: 2170400 - RNA, 19 nt, Artificial Sequence
  Description of Artificial Sequence: Synthetic oligonucleotide
aguucgugugcauaugcug

SEQ ID NO: 2170401 - RNA, 19 nt, Artificial Sequence
  Description of Artificial Sequence: Synthetic oligonucleotide
uuguccauaccaaaccuau

SEQ ID NO: 2170402 - RNA, 19 nt, Artificial Sequence
  Description of Artificial Sequence: Synthetic oligonucleotide
uauugagaagccugcgggc

SEQ ID NO: 2170403 - RNA, 19 nt, Artificial Sequence
  Description of Artificial Sequence: Synthetic oligonucleotide
guuaguuacacgaacuauc

SEQ ID NO: 2170404 - RNA, 19 nt, Artificial Sequence
  Description of Artificial Sequence: Synthetic oligonucleotide
uucgugugcauaugcugcg

SEQ ID NO: 2170405 - RNA, 19 nt, Artificial Sequence
  Description of Artificial Sequence: Synthetic oligonucleotide
aaguaggccuuauucuuga

SEQ ID NO: 2170406 - RNA, 19 nt, Artificial Sequence
  Description of Artificial Sequence: Synthetic oligonucleotide
aucaccaaucguuuccgag

SEQ ID NO: 2170407 - RNA, 19 nt, Artificial Sequence
  Description of Artificial Sequence: Synthetic oligonucleotide
caguuuuacccucucgccg

SEQ ID NO: 2170408 - RNA, 19 nt, Artificial Sequence
  Description of Artificial Sequence: Synthetic oligonucleotide
ugguaccucuugaaguagg

SEQ ID NO: 2170409 - RNA, 19 nt, Artificial Sequence
  Description of Artificial Sequence: Synthetic oligonucleotide
ccuucuaaaucucacuugg

SEQ ID NO: 2170410 - RNA, 19 nt, Artificial Sequence
  Description of Artificial Sequence: Synthetic oligonucleotide
cuuccgaugaacuucugca

SEQ ID NO: 2170411 - RNA, 19 nt, Artificial Sequence
  Description of Artificial Sequence: Synthetic oligonucleotide
guaacguuguucuuuaugu

SEQ ID NO: 2170412 - RNA, 19 nt, Artificial Sequence
  Description of Artificial Sequence: Synthetic oligonucleotide
aauaggcugcagcauaauu

SEQ ID NO: 2170413 - RNA, 19 nt, Artificial Sequence
  Description of Artificial Sequence: Synthetic oligonucleotide
uaguagucaguuuuacccu

SEQ ID NO: 2170414 - RNA, 19 nt, Artificial Sequence
  Description of Artificial Sequence: Synthetic oligonucleotide
uagucugcgacauucuguc

SEQ ID NO: 2170415 - RNA, 19 nt, Artificial Sequence
  Description of Artificial Sequence: Synthetic oligonucleotide
uguauucgucuccagucac

SEQ ID NO: 2170416 - RNA, 19 nt, Artificial Sequence
  Description of Artificial Sequence: Synthetic oligonucleotide
agaccugcauccaaauagc

SEQ ID NO: 2170417 - RNA, 19 nt, Artificial Sequence
  Description of Artificial Sequence: Synthetic oligonucleotide
aacuuucacgaaccccauc

SEQ ID NO: 2170418 - RNA, 19 nt, Artificial Sequence
  Description of Artificial Sequence: Synthetic oligonucleotide
uguacugggagaacuguuu

SEQ ID NO: 2170419 - RNA, 19 nt, Artificial Sequence
  Description of Artificial Sequence: Synthetic oligonucleotide
ggaacagacacccgcaacc

SEQ ID NO: 2170420 - RNA, 19 nt, Artificial Sequence
  Description of Artificial Sequence: Synthetic oligonucleotide
agucaguuuuacccucucg

SEQ ID NO: 2170421 - RNA, 19 nt, Artificial Sequence
  Description of Artificial Sequence: Synthetic oligonucleotide
gucaauaaguuuauuaucu

SEQ ID NO: 2170422 - RNA, 19 nt, Artificial Sequence
  Description of Artificial Sequence: Synthetic oligonucleotide
gggccaaagacauuuuggg

SEQ ID NO: 2170423 - RNA, 19 nt, Artificial Sequence
  Description of Artificial Sequence: Synthetic oligonucleotide
ucuccagucaccuccacuu

SEQ ID NO: 2170424 - RNA, 19 nt, Artificial Sequence
  Description of Artificial Sequence: Synthetic oligonucleotide
gaacagacacccgcaaccg

SEQ ID NO: 2170425 - RNA, 19 nt, Artificial Sequence
  Description of Artificial Sequence: Synthetic oligonucleotide
cuuugaccccguauuuugg

SEQ ID NO: 2170426 - RNA, 19 nt, Artificial Sequence
  Description of Artificial Sequence: Synthetic oligonucleotide
ccaaauagcaggugaaggc

SEQ ID NO: 2170427 - RNA, 19 nt, Artificial Sequence
  Description of Artificial Sequence: Synthetic oligonucleotide
aucguuuccgagcauagua

SEQ ID NO: 2170428 - RNA, 19 nt, Artificial Sequence
  Description of Artificial Sequence: Synthetic oligonucleotide
uccauuagguagcgcaugu

SEQ ID NO: 2170429 - RNA, 19 nt, Artificial Sequence
  Description of Artificial Sequence: Synthetic oligonucleotide
uauuuggguguguuguacu

SEQ ID NO: 2170430 - RNA, 19 nt, Artificial Sequence
  Description of Artificial Sequence: Synthetic oligonucleotide
gaggaauagacaagccucc

SEQ ID NO: 2170431 - RNA, 19 nt, Artificial Sequence
  Description of Artificial Sequence: Synthetic oligonucleotide
ucuugagcucugaggaagc

SEQ ID NO: 2170432 - RNA, 19 nt, Artificial Sequence
  Description of Artificial Sequence: Synthetic oligonucleotide
ugaccccguauuuuggcag

SEQ ID NO: 2170433 - RNA, 19 nt, Artificial Sequence
  Description of Artificial Sequence: Synthetic oligonucleotide
uuuguccuggaucaccaau

SEQ ID NO: 2170434 - RNA, 19 nt, Artificial Sequence
  Description of Artificial Sequence: Synthetic oligonucleotide
uuguccuggaucaccaauc

SEQ ID NO: 2170435 - RNA, 19 nt, Artificial Sequence
  Description of Artificial Sequence: Synthetic oligonucleotide
gaaucguuugguacuauga

SEQ ID NO: 2170436 - RNA, 19 nt, Artificial Sequence
  Description of Artificial Sequence: Synthetic oligonucleotide
aucauaaccagggaaucgu

SEQ ID NO: 2170437 - RNA, 19 nt, Artificial Sequence
  Description of Artificial Sequence: Synthetic oligonucleotide
gaugauaucucuguuaguu

SEQ ID NO: 2170438 - RNA, 19 nt, Artificial Sequence
  Description of Artificial Sequence: Synthetic oligonucleotide
uaucauccuguauuugggu

SEQ ID NO: 2170439 - RNA, 19 nt, Artificial Sequence
  Description of Artificial Sequence: Synthetic oligonucleotide
acuaugaggaauagacaag

SEQ ID NO: 2170440 - RNA, 19 nt, Artificial Sequence
  Description of Artificial Sequence: Synthetic oligonucleotide
ugauaugcuuccgaugaac

SEQ ID NO: 2170441 - RNA, 19 nt, Artificial Sequence
  Description of Artificial Sequence: Synthetic oligonucleotide
ugagcaacccgaucuuucu

SEQ ID NO: 2170442 - RNA, 19 nt, Artificial Sequence
  Description of Artificial Sequence: Synthetic oligonucleotide
gacaacuuucacgaacccc

SEQ ID NO: 2170443 - RNA, 19 nt, Artificial Sequence
  Description of Artificial Sequence: Synthetic oligonucleotide
auucucucggauagcagcg

SEQ ID NO: 2170444 - RNA, 19 nt, Artificial Sequence
  Description of Artificial Sequence: Synthetic oligonucleotide
uguuaguuacacgaacuau

SEQ ID NO: 2170445 - RNA, 19 nt, Artificial Sequence
  Description of Artificial Sequence: Synthetic oligonucleotide
gaaguaggccuuauucuug

SEQ ID NO: 2170446 - RNA, 19 nt, Artificial Sequence
  Description of Artificial Sequence: Synthetic oligonucleotide
guucgugugcauaugcugc

SEQ ID NO: 2170447 - RNA, 19 nt, Artificial Sequence
  Description of Artificial Sequence: Synthetic oligonucleotide
cucuguuaguuacacgaac

SEQ ID NO: 2170448 - RNA, 19 nt, Artificial Sequence
  Description of Artificial Sequence: Synthetic oligonucleotide
accgcggcuccacacagac

SEQ ID NO: 2170449 - RNA, 19 nt, Artificial Sequence
  Description of Artificial Sequence: Synthetic oligonucleotide
caaucguuuccgagcauag

SEQ ID NO: 2170450 - RNA, 19 nt, Artificial Sequence
  Description of Artificial Sequence: Synthetic oligonucleotide
uuagcucucagcagcccgu

SEQ ID NO: 2170451 - RNA, 19 nt, Artificial Sequence
  Description of Artificial Sequence: Synthetic oligonucleotide
ggucaauaaguuuauuauc

SEQ ID NO: 2170452 - RNA, 19 nt, Artificial Sequence
  Description of Artificial Sequence: Synthetic oligonucleotide
ugacaacuuucacgaaccc

SEQ ID NO: 2170453 - RNA, 19 nt, Artificial Sequence
  Description of Artificial Sequence: Synthetic oligonucleotide
uugcuuuagcucucagcag

SEQ ID NO: 2170454 - RNA, 19 nt, Artificial Sequence
  Description of Artificial Sequence: Synthetic oligonucleotide
uggauucucucggauagca

SEQ ID NO: 2170455 - RNA, 19 nt, Artificial Sequence
  Description of Artificial Sequence: Synthetic oligonucleotide
gaaucauaaccagggaauc

SEQ ID NO: 2170456 - RNA, 19 nt, Artificial Sequence
  Description of Artificial Sequence: Synthetic oligonucleotide
agacuaucauguccccuuc

SEQ ID NO: 2170457 - RNA, 19 nt, Artificial Sequence
  Description of Artificial Sequence: Synthetic oligonucleotide
agacauuuugggacgguuc

SEQ ID NO: 2170458 - RNA, 19 nt, Artificial Sequence
  Description of Artificial Sequence: Synthetic oligonucleotide
agaucuuguccauaccaaa

SEQ ID NO: 2170459 - RNA, 19 nt, Artificial Sequence
  Description of Artificial Sequence: Synthetic oligonucleotide
ggugcaauaggcugcagca

SEQ ID NO: 2170460 - RNA, 19 nt, Artificial Sequence
  Description of Artificial Sequence: Synthetic oligonucleotide
guacgcaucuucaucuucc

SEQ ID NO: 2170461 - RNA, 19 nt, Artificial Sequence
  Description of Artificial Sequence: Synthetic oligonucleotide
cucaacauuguauucgucu

SEQ ID NO: 2170462 - RNA, 19 nt, Artificial Sequence
  Description of Artificial Sequence: Synthetic oligonucleotide
ucccaugauaugcuuccga

SEQ ID NO: 2170463 - RNA, 19 nt, Artificial Sequence
  Description of Artificial Sequence: Synthetic oligonucleotide
ugcauugaacuccuugcuu

SEQ ID NO: 2170464 - RNA, 19 nt, Artificial Sequence
  Description of Artificial Sequence: Synthetic oligonucleotide
uguacgcaucuucaucuuc

SEQ ID NO: 2170465 - RNA, 19 nt, Artificial Sequence
  Description of Artificial Sequence: Synthetic oligonucleotide
ugcggaacagacacccgca

SEQ ID NO: 2170466 - RNA, 19 nt, Artificial Sequence
  Description of Artificial Sequence: Synthetic oligonucleotide
aacuaucauccuguauuug

SEQ ID NO: 2170467 - RNA, 19 nt, Artificial Sequence
  Description of Artificial Sequence: Synthetic oligonucleotide
ucuuuugagcaacccgauc

SEQ ID NO: 2170468 - RNA, 19 nt, Artificial Sequence
  Description of Artificial Sequence: Synthetic oligonucleotide
uuggguguguuguacuuau

SEQ ID NO: 2170469 - RNA, 19 nt, Artificial Sequence
  Description of Artificial Sequence: Synthetic oligonucleotide
uuugggacgguuccaccuc

SEQ ID NO: 2170470 - RNA, 19 nt, Artificial Sequence
  Description of Artificial Sequence: Synthetic oligonucleotide
agcagcgugagcuuucuua

SEQ ID NO: 2170471 - RNA, 19 nt, Artificial Sequence
  Description of Artificial Sequence: Synthetic oligonucleotide
ucucucggauagcagcgug

SEQ ID NO: 2170472 - RNA, 19 nt, Artificial Sequence
  Description of Artificial Sequence: Synthetic oligonucleotide
uugccaguuguaguucggg

SEQ ID NO: 2170473 - RNA, 19 nt, Artificial Sequence
  Description of Artificial Sequence: Synthetic oligonucleotide
uauacgggcauaggcaauc

SEQ ID NO: 2170474 - RNA, 19 nt, Artificial Sequence
  Description of Artificial Sequence: Synthetic oligonucleotide
cugcggaacagacacccgc

SEQ ID NO: 2170475 - RNA, 19 nt, Artificial Sequence
  Description of Artificial Sequence: Synthetic oligonucleotide
ugugcauaugcugcgcaga

SEQ ID NO: 2170476 - RNA, 19 nt, Artificial Sequence
  Description of Artificial Sequence: Synthetic oligonucleotide
ucugcgacauucuguccca

SEQ ID NO: 2170477 - RNA, 19 nt, Artificial Sequence
  Description of Artificial Sequence: Synthetic oligonucleotide
auaggcugcagcauaauuu

SEQ ID NO: 2170478 - RNA, 19 nt, Artificial Sequence
  Description of Artificial Sequence: Synthetic oligonucleotide
cauaauuugucaggccaac

SEQ ID NO: 2170479 - RNA, 19 nt, Artificial Sequence
  Description of Artificial Sequence: Synthetic oligonucleotide
uccacuuggccuucauaga

SEQ ID NO: 2170480 - RNA, 19 nt, Artificial Sequence
  Description of Artificial Sequence: Synthetic oligonucleotide
uggaguaacguuguucuuu

SEQ ID NO: 2170481 - RNA, 19 nt, Artificial Sequence
  Description of Artificial Sequence: Synthetic oligonucleotide
auuagguagcgcauguagu

SEQ ID NO: 2170482 - RNA, 19 nt, Artificial Sequence
  Description of Artificial Sequence: Synthetic oligonucleotide
gaaaauugcuuuagcucuc

SEQ ID NO: 2170483 - RNA, 19 nt, Artificial Sequence
  Description of Artificial Sequence: Synthetic oligonucleotide
gacaagccuccauccacag

SEQ ID NO: 2170484 - RNA, 19 nt, Artificial Sequence
  Description of Artificial Sequence: Synthetic oligonucleotide
uugucaggccaacuuugac

SEQ ID NO: 2170485 - RNA, 19 nt, Artificial Sequence
  Description of Artificial Sequence: Synthetic oligonucleotide
uagacuggauucucucgga

SEQ ID NO: 2170486 - RNA, 19 nt, Artificial Sequence
  Description of Artificial Sequence: Synthetic oligonucleotide
uaacguuguucuuuaugua

SEQ ID NO: 2170487 - RNA, 19 nt, Artificial Sequence
  Description of Artificial Sequence: Synthetic oligonucleotide
aggccuuauucuugacaac

SEQ ID NO: 2170488 - RNA, 19 nt, Artificial Sequence
  Description of Artificial Sequence: Synthetic oligonucleotide
acgaaccccauccugcgga

SEQ ID NO: 2170489 - RNA, 19 nt, Artificial Sequence
  Description of Artificial Sequence: Synthetic oligonucleotide
acacgaacuaucauccugu

SEQ ID NO: 2170490 - RNA, 19 nt, Artificial Sequence
  Description of Artificial Sequence: Synthetic oligonucleotide
ucacuugguaccucuugaa

SEQ ID NO: 2170491 - RNA, 19 nt, Artificial Sequence
  Description of Artificial Sequence: Synthetic oligonucleotide
acuaucauguccccuucua

SEQ ID NO: 2170492 - RNA, 19 nt, Artificial Sequence
  Description of Artificial Sequence: Synthetic oligonucleotide
caaagacauuuugggacgg

SEQ ID NO: 2170493 - RNA, 19 nt, Artificial Sequence
  Description of Artificial Sequence: Synthetic oligonucleotide
aucaugucuggaguaacgu

SEQ ID NO: 2170494 - RNA, 19 nt, Artificial Sequence
  Description of Artificial Sequence: Synthetic oligonucleotide
augauaucucuguuaguua

SEQ ID NO: 2170495 - RNA, 19 nt, Artificial Sequence
  Description of Artificial Sequence: Synthetic oligonucleotide
cagcauaauuugucaggcc

SEQ ID NO: 2170496 - RNA, 19 nt, Artificial Sequence
  Description of Artificial Sequence: Synthetic oligonucleotide
uuccgaugaacuucugcau

SEQ ID NO: 2170497 - RNA, 19 nt, Artificial Sequence
  Description of Artificial Sequence: Synthetic oligonucleotide
guaggccuuauucuugaca

SEQ ID NO: 2170498 - RNA, 19 nt, Artificial Sequence
  Description of Artificial Sequence: Synthetic oligonucleotide
gauaucucuguuaguuaca

SEQ ID NO: 2170499 - RNA, 19 nt, Artificial Sequence
  Description of Artificial Sequence: Synthetic oligonucleotide
cauuuugggacgguuccac

SEQ ID NO: 2170500 - RNA, 19 nt, Artificial Sequence
  Description of Artificial Sequence: Synthetic oligonucleotide
uugguaccucuugaaguag

SEQ ID NO: 2170501 - RNA, 19 nt, Artificial Sequence
  Description of Artificial Sequence: Synthetic oligonucleotide
uugguacuaugaggaauag

SEQ ID NO: 2170502 - RNA, 19 nt, Artificial Sequence
  Description of Artificial Sequence: Synthetic oligonucleotide
ccuauugagaagccugcgg

SEQ ID NO: 2170503 - RNA, 19 nt, Artificial Sequence
  Description of Artificial Sequence: Synthetic oligonucleotide
uuacacgaacuaucauccu

SEQ ID NO: 2170504 - RNA, 19 nt, Artificial Sequence
  Description of Artificial Sequence: Synthetic oligonucleotide
aacuuugaccccguauuuu

SEQ ID NO: 2170505 - RNA, 19 nt, Artificial Sequence
  Description of Artificial Sequence: Synthetic oligonucleotide
aaccagggaaucguuuggu

SEQ ID NO: 2170506 - RNA, 19 nt, Artificial Sequence
  Description of Artificial Sequence: Synthetic oligonucleotide
uuauugccaguuguaguuc

SEQ ID NO: 2170507 - RNA, 19 nt, Artificial Sequence
  Description of Artificial Sequence: Synthetic oligonucleotide
aaucguuuccgagcauagu

SEQ ID NO: 2170508 - RNA, 19 nt, Artificial Sequence
  Description of Artificial Sequence: Synthetic oligonucleotide
uaguuacacgaacuaucau

SEQ ID NO: 2170509 - RNA, 19 nt, Artificial Sequence
  Description of Artificial Sequence: Synthetic oligonucleotide
accuauugagaagccugcg

SEQ ID NO: 2170510 - RNA, 19 nt, Artificial Sequence
  Description of Artificial Sequence: Synthetic oligonucleotide
guauuuggguguguuguac

SEQ ID NO: 2170511 - RNA, 19 nt, Artificial Sequence
  Description of Artificial Sequence: Synthetic oligonucleotide
aaagacauuuugggacggu

SEQ ID NO: 2170512 - RNA, 19 nt, Artificial Sequence
  Description of Artificial Sequence: Synthetic oligonucleotide
agaugauaucucuguuagu

SEQ ID NO: 2170513 - RNA, 19 nt, Artificial Sequence
  Description of Artificial Sequence: Synthetic oligonucleotide
acguuguucuuuauguacu

SEQ ID NO: 2170514 - RNA, 19 nt, Artificial Sequence
  Description of Artificial Sequence: Synthetic oligonucleotide
gcagcauaauuugucaggc

SEQ ID NO: 2170515 - RNA, 19 nt, Artificial Sequence
  Description of Artificial Sequence: Synthetic oligonucleotide
ggagaacuguuucuuguac

SEQ ID NO: 2170516 - RNA, 19 nt, Artificial Sequence
  Description of Artificial Sequence: Synthetic oligonucleotide
ucucaacauuguauucguc

SEQ ID NO: 2170517 - RNA, 19 nt, Artificial Sequence
  Description of Artificial Sequence: Synthetic oligonucleotide
agcaggccggugcaauagg

SEQ ID NO: 2170518 - RNA, 19 nt, Artificial Sequence
  Description of Artificial Sequence: Synthetic oligonucleotide
uccaucaugucuggaguaa

SEQ ID NO: 2170519 - RNA, 19 nt, Artificial Sequence
  Description of Artificial Sequence: Synthetic oligonucleotide
uggccaucgaugcucucaa

SEQ ID NO: 2170520 - RNA, 19 nt, Artificial Sequence
  Description of Artificial Sequence: Synthetic oligonucleotide
ugcgacauucugucccaug

SEQ ID NO: 2170521 - RNA, 19 nt, Artificial Sequence
  Description of Artificial Sequence: Synthetic oligonucleotide
uuuuggcaguucgugugca

SEQ ID NO: 2170522 - RNA, 19 nt, Artificial Sequence
  Description of Artificial Sequence: Synthetic oligonucleotide
cucacuugguaccucuuga

SEQ ID NO: 2170523 - RNA, 19 nt, Artificial Sequence
  Description of Artificial Sequence: Synthetic oligonucleotide
gauaugcuuccgaugaacu

SEQ ID NO: 2170524 - RNA, 19 nt, Artificial Sequence
  Description of Artificial Sequence: Synthetic oligonucleotide
ggaucaccaaucguuuccg

SEQ ID NO: 2170525 - RNA, 19 nt, Artificial Sequence
  Description of Artificial Sequence: Synthetic oligonucleotide
uacgggcauaggcaaucug

SEQ ID NO: 2170526 - RNA, 19 nt, Artificial Sequence
  Description of Artificial Sequence: Synthetic oligonucleotide
cagacacccgcaaccgcgg

SEQ ID NO: 2170527 - RNA, 19 nt, Artificial Sequence
  Description of Artificial Sequence: Synthetic oligonucleotide
acgggcauaggcaaucuga

SEQ ID NO: 2170528 - RNA, 19 nt, Artificial Sequence
  Description of Artificial Sequence: Synthetic oligonucleotide
gugcauaugcugcgcagac

SEQ ID NO: 2170529 - RNA, 19 nt, Artificial Sequence
  Description of Artificial Sequence: Synthetic oligonucleotide
guacuaugaggaauagaca

SEQ ID NO: 2170530 - RNA, 19 nt, Artificial Sequence
  Description of Artificial Sequence: Synthetic oligonucleotide
ucgaugcucucaacauugu

SEQ ID NO: 2170531 - RNA, 19 nt, Artificial Sequence
  Description of Artificial Sequence: Synthetic oligonucleotide
ugguacuaugaggaauaga

SEQ ID NO: 2170532 - RNA, 19 nt, Artificial Sequence
  Description of Artificial Sequence: Synthetic oligonucleotide
auucgucuccagucaccuc

SEQ ID NO: 2170533 - RNA, 19 nt, Artificial Sequence
  Description of Artificial Sequence: Synthetic oligonucleotide
ugagaagccugcgggccag

SEQ ID NO: 2170534 - RNA, 19 nt, Artificial Sequence
  Description of Artificial Sequence: Synthetic oligonucleotide
auugccaguuguaguucgg

SEQ ID NO: 2170535 - RNA, 19 nt, Artificial Sequence
  Description of Artificial Sequence: Synthetic oligonucleotide
cccguauuuuggcaguucg

SEQ ID NO: 2170536 - RNA, 19 nt, Artificial Sequence
  Description of Artificial Sequence: Synthetic oligonucleotide
uugggacgguuccaccucu

SEQ ID NO: 2170537 - RNA, 19 nt, Artificial Sequence
  Description of Artificial Sequence: Synthetic oligonucleotide
gcaguucgugugcauaugc

SEQ ID NO: 2170538 - RNA, 19 nt, Artificial Sequence
  Description of Artificial Sequence: Synthetic oligonucleotide
cuuuauguacugggagaac

SEQ ID NO: 2170539 - RNA, 19 nt, Artificial Sequence
  Description of Artificial Sequence: Synthetic oligonucleotide
guaccucuugaaguaggcc

SEQ ID NO: 2170540 - RNA, 19 nt, Artificial Sequence
  Description of Artificial Sequence: Synthetic oligonucleotide
guauucgucuccagucacc

SEQ ID NO: 2170541 - RNA, 19 nt, Artificial Sequence
  Description of Artificial Sequence: Synthetic oligonucleotide
ccagggaaucguuugguac

SEQ ID NO: 2170542 - RNA, 19 nt, Artificial Sequence
  Description of Artificial Sequence: Synthetic oligonucleotide
ccguucuugagcucugagg

SEQ ID NO: 2170543 - RNA, 19 nt, Artificial Sequence
  Description of Artificial Sequence: Synthetic oligonucleotide
caccaaucguuuccgagca

SEQ ID NO: 2170544 - RNA, 19 nt, Artificial Sequence
  Description of Artificial Sequence: Synthetic oligonucleotide
uucuucucauagacuggau

SEQ ID NO: 2170545 - RNA, 19 nt, Artificial Sequence
  Description of Artificial Sequence: Synthetic oligonucleotide
uagucaguuuuacccucuc

SEQ ID NO: 2170546 - RNA, 19 nt, Artificial Sequence
  Description of Artificial Sequence: Synthetic oligonucleotide
gaacuaucauccuguauuu

SEQ ID NO: 2170547 - RNA, 19 nt, Artificial Sequence
  Description of Artificial Sequence: Synthetic oligonucleotide
uuuuguccuggaucaccaa

SEQ ID NO: 2170548 - RNA, 19 nt, Artificial Sequence
  Description of Artificial Sequence: Synthetic oligonucleotide
cuggaucaccaaucguuuc

SEQ ID NO: 2170549 - RNA, 19 nt, Artificial Sequence
  Description of Artificial Sequence: Synthetic oligonucleotide
acgaacuaucauccuguau

SEQ ID NO: 2170550 - RNA, 19 nt, Artificial Sequence
  Description of Artificial Sequence: Synthetic oligonucleotide
gccuucuaaaucucacuug

SEQ ID NO: 2170551 - RNA, 19 nt, Artificial Sequence
  Description of Artificial Sequence: Synthetic oligonucleotide
uguccauaccaaaccuauu

SEQ ID NO: 2170552 - RNA, 19 nt, Artificial Sequence
  Description of Artificial Sequence: Synthetic oligonucleotide
guuuuacccucucgccgcc

SEQ ID NO: 2170553 - RNA, 19 nt, Artificial Sequence
  Description of Artificial Sequence: Synthetic oligonucleotide
gucuggaguaacguuguuc

SEQ ID NO: 2170554 - RNA, 19 nt, Artificial Sequence
  Description of Artificial Sequence: Synthetic oligonucleotide
agacuggauucucucggau

SEQ ID NO: 2170555 - RNA, 19 nt, Artificial Sequence
  Description of Artificial Sequence: Synthetic oligonucleotide
cuuguccauaccaaaccua

SEQ ID NO: 2170556 - RNA, 19 nt, Artificial Sequence
  Description of Artificial Sequence: Synthetic oligonucleotide
cuguuaguuacacgaacua

SEQ ID NO: 2170557 - RNA, 19 nt, Artificial Sequence
  Description of Artificial Sequence: Synthetic oligonucleotide
gcauaugcugcgcagacua

SEQ ID NO: 2170558 - RNA, 19 nt, Artificial Sequence
  Description of Artificial Sequence: Synthetic oligonucleotide
ucucgccgccuucuaaauc

SEQ ID NO: 2170559 - RNA, 19 nt, Artificial Sequence
  Description of Artificial Sequence: Synthetic oligonucleotide
uagcgcauguagucugcga

SEQ ID NO: 2170560 - RNA, 19 nt, Artificial Sequence
  Description of Artificial Sequence: Synthetic oligonucleotide
cauccuguauuugggugug

SEQ ID NO: 2170561 - RNA, 19 nt, Artificial Sequence
  Description of Artificial Sequence: Synthetic oligonucleotide
cuguauuuggguguguugu

SEQ ID NO: 2170562 - RNA, 19 nt, Artificial Sequence
  Description of Artificial Sequence: Synthetic oligonucleotide
uuuacccucucgccgccuu

SEQ ID NO: 2170563 - RNA, 19 nt, Artificial Sequence
  Description of Artificial Sequence: Synthetic oligonucleotide
agacaagccuccauccaca

SEQ ID NO: 2170564 - RNA, 19 nt, Artificial Sequence
  Description of Artificial Sequence: Synthetic oligonucleotide
uuugagcaacccgaucuuu

SEQ ID NO: 2170565 - RNA, 19 nt, Artificial Sequence
  Description of Artificial Sequence: Synthetic oligonucleotide
gaucaccaaucguuuccga

SEQ ID NO: 2170566 - RNA, 19 nt, Artificial Sequence
  Description of Artificial Sequence: Synthetic oligonucleotide
gccaucgaugcucucaaca

SEQ ID NO: 2170567 - RNA, 19 nt, Artificial Sequence
  Description of Artificial Sequence: Synthetic oligonucleotide
aguuguaguucgggcaaga

SEQ ID NO: 2170568 - RNA, 19 nt, Artificial Sequence
  Description of Artificial Sequence: Synthetic oligonucleotide
uuuggcaguucgugugcau

SEQ ID NO: 2170569 - RNA, 19 nt, Artificial Sequence
  Description of Artificial Sequence: Synthetic oligonucleotide
caaccgcggcuccacacag

SEQ ID NO: 2170570 - RNA, 19 nt, Artificial Sequence
  Description of Artificial Sequence: Synthetic oligonucleotide
aggaauagacaagccucca

SEQ ID NO: 2170571 - RNA, 19 nt, Artificial Sequence
  Description of Artificial Sequence: Synthetic oligonucleotide
cuccauuagguagcgcaug

SEQ ID NO: 2170572 - RNA, 19 nt, Artificial Sequence
  Description of Artificial Sequence: Synthetic oligonucleotide
ucaccucucucuugggcuu

SEQ ID NO: 2170573 - RNA, 19 nt, Artificial Sequence
  Description of Artificial Sequence: Synthetic oligonucleotide
ugcauaugcugcgcagacu

SEQ ID NO: 2170574 - RNA, 19 nt, Artificial Sequence
  Description of Artificial Sequence: Synthetic oligonucleotide
gcgacauucugucccauga

SEQ ID NO: 2170575 - RNA, 19 nt, Artificial Sequence
  Description of Artificial Sequence: Synthetic oligonucleotide
uuguacgcaucuucaucuu

SEQ ID NO: 2170576 - RNA, 19 nt, Artificial Sequence
  Description of Artificial Sequence: Synthetic oligonucleotide
ggccaaagacauuuuggga

SEQ ID NO: 2170577 - RNA, 19 nt, Artificial Sequence
  Description of Artificial Sequence: Synthetic oligonucleotide
ucaggccaacuuugacccc

SEQ ID NO: 2170578 - RNA, 19 nt, Artificial Sequence
  Description of Artificial Sequence: Synthetic oligonucleotide
gguaccucuugaaguaggc

SEQ ID NO: 2170579 - RNA, 19 nt, Artificial Sequence
  Description of Artificial Sequence: Synthetic oligonucleotide
uccuguauuuggguguguu

SEQ ID NO: 2170580 - RNA, 19 nt, Artificial Sequence
  Description of Artificial Sequence: Synthetic oligonucleotide
uuggcaguucgugugcaua

SEQ ID NO: 2170581 - RNA, 19 nt, Artificial Sequence
  Description of Artificial Sequence: Synthetic oligonucleotide
cagggaaucguuugguacu

SEQ ID NO: 2170582 - RNA, 19 nt, Artificial Sequence
  Description of Artificial Sequence: Synthetic oligonucleotide
cucucaacauuguauucgu

SEQ ID NO: 2170583 - RNA, 19 nt, Artificial Sequence
  Description of Artificial Sequence: Synthetic oligonucleotide
cacgaaccccauccugcgg

SEQ ID NO: 2170584 - RNA, 19 nt, Artificial Sequence
  Description of Artificial Sequence: Synthetic oligonucleotide
ccaaaccuauugagaagcc

SEQ ID NO: 2170585 - RNA, 19 nt, Artificial Sequence
  Description of Artificial Sequence: Synthetic oligonucleotide
ccaugauaugcuuccgaug

SEQ ID NO: 2170586 - RNA, 19 nt, Artificial Sequence
  Description of Artificial Sequence: Synthetic oligonucleotide
ggaguaacguuguucuuua

SEQ ID NO: 2170587 - RNA, 19 nt, Artificial Sequence
  Description of Artificial Sequence: Synthetic oligonucleotide
accagggaaucguuuggua

SEQ ID NO: 2170588 - RNA, 19 nt, Artificial Sequence
  Description of Artificial Sequence: Synthetic oligonucleotide
auaggcaaucugacagaug

SEQ ID NO: 2170589 - RNA, 19 nt, Artificial Sequence
  Description of Artificial Sequence: Synthetic oligonucleotide
uguuucuuguacgcaucuu

SEQ ID NO: 2170590 - RNA, 19 nt, Artificial Sequence
  Description of Artificial Sequence: Synthetic oligonucleotide
agcauaguagucaguuuua

SEQ ID NO: 2170591 - RNA, 19 nt, Artificial Sequence
  Description of Artificial Sequence: Synthetic oligonucleotide
guuugguacuaugaggaau

SEQ ID NO: 2170592 - RNA, 19 nt, Artificial Sequence
  Description of Artificial Sequence: Synthetic oligonucleotide
uucucucggauagcagcgu

SEQ ID NO: 2170593 - RNA, 19 nt, Artificial Sequence
  Description of Artificial Sequence: Synthetic oligonucleotide
caacccgaucuuucuucug

SEQ ID NO: 2170594 - RNA, 19 nt, Artificial Sequence
  Description of Artificial Sequence: Synthetic oligonucleotide
gacgguuccaccucuucuu

SEQ ID NO: 2170595 - RNA, 19 nt, Artificial Sequence
  Description of Artificial Sequence: Synthetic oligonucleotide
gucccaugauaugcuuccg

SEQ ID NO: 2170596 - RNA, 19 nt, Artificial Sequence
  Description of Artificial Sequence: Synthetic oligonucleotide
guagucugcgacauucugu

SEQ ID NO: 2170597 - RNA, 19 nt, Artificial Sequence
  Description of Artificial Sequence: Synthetic oligonucleotide
auccugcggaacagacacc

SEQ ID NO: 2170598 - RNA, 19 nt, Artificial Sequence
  Description of Artificial Sequence: Synthetic oligonucleotide
ggcaaucugacagaugaua

SEQ ID NO: 2170599 - RNA, 19 nt, Artificial Sequence
  Description of Artificial Sequence: Synthetic oligonucleotide
gcauaggcaaucugacaga

SEQ ID NO: 2170600 - RNA, 19 nt, Artificial Sequence
  Description of Artificial Sequence: Synthetic oligonucleotide
cagacuaucauguccccuu

SEQ ID NO: 2170601 - RNA, 19 nt, Artificial Sequence
  Description of Artificial Sequence: Synthetic oligonucleotide
cuucuaaaucucacuuggu

SEQ ID NO: 2170602 - RNA, 19 nt, Artificial Sequence
  Description of Artificial Sequence: Synthetic oligonucleotide
caguuguaguucgggcaag

SEQ ID NO: 2170603 - RNA, 19 nt, Artificial Sequence
  Description of Artificial Sequence: Synthetic oligonucleotide
ggcaccaggcuggccaucg

SEQ ID NO: 2170604 - RNA, 19 nt, Artificial Sequence
  Description of Artificial Sequence: Synthetic oligonucleotide
auacgggcauaggcaaucu

SEQ ID NO: 2170605 - RNA, 19 nt, Artificial Sequence
  Description of Artificial Sequence: Synthetic oligonucleotide
gacuaucauguccccuucu

SEQ ID NO: 2170606 - RNA, 19 nt, Artificial Sequence
  Description of Artificial Sequence: Synthetic oligonucleotide
guaguucgggcaagaccug

SEQ ID NO: 2170607 - RNA, 19 nt, Artificial Sequence
  Description of Artificial Sequence: Synthetic oligonucleotide
cgaacuaucauccuguauu

SEQ ID NO: 2170608 - RNA, 19 nt, Artificial Sequence
  Description of Artificial Sequence: Synthetic oligonucleotide
cauaaccagggaaucguuu

SEQ ID NO: 2170609 - RNA, 19 nt, Artificial Sequence
  Description of Artificial Sequence: Synthetic oligonucleotide
uuuuacccucucgccgccu

SEQ ID NO: 2170610 - RNA, 19 nt, Artificial Sequence
  Description of Artificial Sequence: Synthetic oligonucleotide
agggaaucguuugguacua

SEQ ID NO: 2170611 - RNA, 19 nt, Artificial Sequence
  Description of Artificial Sequence: Synthetic oligonucleotide
gguguguuguacuuauuuu

SEQ ID NO: 2170612 - RNA, 19 nt, Artificial Sequence
  Description of Artificial Sequence: Synthetic oligonucleotide
ucgccgccuucuaaaucuc

SEQ ID NO: 2170613 - RNA, 19 nt, Artificial Sequence
  Description of Artificial Sequence: Synthetic oligonucleotide
augcugcgcagacuaucau

SEQ ID NO: 2170614 - RNA, 19 nt, Artificial Sequence
  Description of Artificial Sequence: Synthetic oligonucleotide
cuaucauguccccuucuau

SEQ ID NO: 2170615 - RNA, 19 nt, Artificial Sequence
  Description of Artificial Sequence: Synthetic oligonucleotide
cugcgcagacuaucauguc

SEQ ID NO: 2170616 - RNA, 19 nt, Artificial Sequence
  Description of Artificial Sequence: Synthetic oligonucleotide
uggguguguuguacuuauu

SEQ ID NO: 2170617 - RNA, 19 nt, Artificial Sequence
  Description of Artificial Sequence: Synthetic oligonucleotide
gaccccguauuuuggcagu

SEQ ID NO: 2170618 - RNA, 19 nt, Artificial Sequence
  Description of Artificial Sequence: Synthetic oligonucleotide
ggguguguuguacuuauuu

SEQ ID NO: 2170619 - RNA, 19 nt, Artificial Sequence
  Description of Artificial Sequence: Synthetic oligonucleotide
caguucgugugcauaugcu

SEQ ID NO: 2170620 - RNA, 19 nt, Artificial Sequence
  Description of Artificial Sequence: Synthetic oligonucleotide
gcugcgcagacuaucaugu

SEQ ID NO: 2170621 - RNA, 19 nt, Artificial Sequence
  Description of Artificial Sequence: Synthetic oligonucleotide
accaaucguuuccgagcau

SEQ ID NO: 2170622 - RNA, 19 nt, Artificial Sequence
  Description of Artificial Sequence: Synthetic oligonucleotide
guagucaguuuuacccucu

SEQ ID NO: 2170623 - RNA, 19 nt, Artificial Sequence
  Description of Artificial Sequence: Synthetic oligonucleotide
ccaguuguaguucgggcaa

SEQ ID NO: 2170624 - RNA, 19 nt, Artificial Sequence
  Description of Artificial Sequence: Synthetic oligonucleotide
uuccuccauuagguagcgc

SEQ ID NO: 2170625 - RNA, 19 nt, Artificial Sequence
  Description of Artificial Sequence: Synthetic oligonucleotide
gccuucuuuugagcaaccc

SEQ ID NO: 2170626 - RNA, 19 nt, Artificial Sequence
  Description of Artificial Sequence: Synthetic oligonucleotide
ggaauagacaagccuccau

SEQ ID NO: 2170627 - RNA, 19 nt, Artificial Sequence
  Description of Artificial Sequence: Synthetic oligonucleotide
ggcaagaccugcauccaaa

SEQ ID NO: 2170628 - RNA, 19 nt, Artificial Sequence
  Description of Artificial Sequence: Synthetic oligonucleotide
gcaaccgcggcuccacaca

SEQ ID NO: 2170629 - RNA, 19 nt, Artificial Sequence
  Description of Artificial Sequence: Synthetic oligonucleotide
cccuucuauacgggcauag

SEQ ID NO: 2170630 - RNA, 19 nt, Artificial Sequence
  Description of Artificial Sequence: Synthetic oligonucleotide
ggccggugcaauaggcugc

SEQ ID NO: 2170631 - RNA, 19 nt, Artificial Sequence
  Description of Artificial Sequence: Synthetic oligonucleotide
ccaacuuugaccccguauu

SEQ ID NO: 2170632 - RNA, 19 nt, Artificial Sequence
  Description of Artificial Sequence: Synthetic oligonucleotide
ggcaguucgugugcauaug

SEQ ID NO: 2170633 - RNA, 19 nt, Artificial Sequence
  Description of Artificial Sequence: Synthetic oligonucleotide
gcgugagcuuucuuauaca

SEQ ID NO: 2170634 - RNA, 19 nt, Artificial Sequence
  Description of Artificial Sequence: Synthetic oligonucleotide
cacgaacuaucauccugua

SEQ ID NO: 2170635 - RNA, 19 nt, Artificial Sequence
  Description of Artificial Sequence: Synthetic oligonucleotide
ugggacgguuccaccucuu

SEQ ID NO: 2170636 - RNA, 19 nt, Artificial Sequence
  Description of Artificial Sequence: Synthetic oligonucleotide
ccaucaugucuggaguaac

SEQ ID NO: 2170637 - RNA, 19 nt, Artificial Sequence
  Description of Artificial Sequence: Synthetic oligonucleotide
gccgccuucuaaaucucac

SEQ ID NO: 2170638 - RNA, 19 nt, Artificial Sequence
  Description of Artificial Sequence: Synthetic oligonucleotide
gcagcgugagcuuucuuau

SEQ ID NO: 2170639 - RNA, 19 nt, Artificial Sequence
  Description of Artificial Sequence: Synthetic oligonucleotide
caacuuugaccccguauuu

SEQ ID NO: 2170640 - RNA, 19 nt, Artificial Sequence
  Description of Artificial Sequence: Synthetic oligonucleotide
aaccgcggcuccacacaga

SEQ ID NO: 2170641 - RNA, 19 nt, Artificial Sequence
  Description of Artificial Sequence: Synthetic oligonucleotide
ggacgguuccaccucuucu

SEQ ID NO: 2170642 - RNA, 19 nt, Artificial Sequence
  Description of Artificial Sequence: Synthetic oligonucleotide
cccguucuugagcucugag

SEQ ID NO: 2170643 - RNA, 19 nt, Artificial Sequence
  Description of Artificial Sequence: Synthetic oligonucleotide
cuauacgggcauaggcaau

SEQ ID NO: 2170644 - RNA, 19 nt, Artificial Sequence
  Description of Artificial Sequence: Synthetic oligonucleotide
gcgggccagcagcaggccg

SEQ ID NO: 2170645 - RNA, 19 nt, Artificial Sequence
  Description of Artificial Sequence: Synthetic oligonucleotide
gggacgguuccaccucuuc

SEQ ID NO: 2170646 - RNA, 19 nt, Artificial Sequence
  Description of Artificial Sequence: Synthetic oligonucleotide
gagcaacccgaucuuucuu

SEQ ID NO: 2170647 - RNA, 19 nt, Artificial Sequence
  Description of Artificial Sequence: Synthetic oligonucleotide
gaguaacguuguucuuuau

SEQ ID NO: 2170648 - RNA, 19 nt, Artificial Sequence
  Description of Artificial Sequence: Synthetic oligonucleotide
uagcagcgugagcuuucuu

SEQ ID NO: 2170649 - RNA, 19 nt, Artificial Sequence
  Description of Artificial Sequence: Synthetic oligonucleotide
uagcucucagcagcccguu

SEQ ID NO: 2170650 - RNA, 19 nt, Artificial Sequence
  Description of Artificial Sequence: Synthetic oligonucleotide
cauaugcugcgcagacuau

SEQ ID NO: 2170651 - RNA, 19 nt, Artificial Sequence
  Description of Artificial Sequence: Synthetic oligonucleotide
cuugagcucugaggaagcu

SEQ ID NO: 2170652 - RNA, 19 nt, Artificial Sequence
  Description of Artificial Sequence: Synthetic oligonucleotide
cacccgcaaccgcggcucc

SEQ ID NO: 2170653 - RNA, 19 nt, Artificial Sequence
  Description of Artificial Sequence: Synthetic oligonucleotide
gccaacuuugaccccguau

SEQ ID NO: 2170654 - RNA, 19 nt, Artificial Sequence
  Description of Artificial Sequence: Synthetic oligonucleotide
agcccguucuugagcucug

SEQ ID NO: 2170655 - RNA, 19 nt, Artificial Sequence
  Description of Artificial Sequence: Synthetic oligonucleotide
ccaaucguuuccgagcaua

SEQ ID NO: 2170656 - RNA, 19 nt, Artificial Sequence
  Description of Artificial Sequence: Synthetic oligonucleotide
cagcgugagcuuucuuaua

SEQ ID NO: 2170657 - RNA, 19 nt, Artificial Sequence
  Description of Artificial Sequence: Synthetic oligonucleotide
cccaugauaugcuuccgau

SEQ ID NO: 2170658 - RNA, 19 nt, Artificial Sequence
  Description of Artificial Sequence: Synthetic oligonucleotide
accccguauuuuggcaguu

SEQ ID NO: 2170659 - RNA, 19 nt, Artificial Sequence
  Description of Artificial Sequence: Synthetic oligonucleotide
gcggaacagacacccgcaa

SEQ ID NO: 2170660 - RNA, 19 nt, Artificial Sequence
  Description of Artificial Sequence: Synthetic oligonucleotide
ggccaucgaugcucucaac

SEQ ID NO: 2170661 - RNA, 19 nt, Artificial Sequence
  Description of Artificial Sequence: Synthetic oligonucleotide
cucucgccgccuucuaaau

SEQ ID NO: 2170662 - RNA, 19 nt, Artificial Sequence
  Description of Artificial Sequence: Synthetic oligonucleotide
ccuggaucaccaaucguuu

SEQ ID NO: 2170663 - RNA, 19 nt, Artificial Sequence
  Description of Artificial Sequence: Synthetic oligonucleotide
cgcaaccgcggcuccacac

SEQ ID NO: 2170664 - RNA, 19 nt, Artificial Sequence
  Description of Artificial Sequence: Synthetic oligonucleotide
cuggaguaacguuguucuu

SEQ ID NO: 2170665 - RNA, 19 nt, Artificial Sequence
  Description of Artificial Sequence: Synthetic oligonucleotide
acccgcaaccgcggcucca

SEQ ID NO: 2170666 - RNA, 19 nt, Artificial Sequence
  Description of Artificial Sequence: Synthetic oligonucleotide
caauaggcugcagcauaau

SEQ ID NO: 2170667 - RNA, 19 nt, Artificial Sequence
  Description of Artificial Sequence: Synthetic oligonucleotide
ccgagcauaguagucaguu

SEQ ID NO: 2170668 - RNA, 19 nt, Artificial Sequence
  Description of Artificial Sequence: Synthetic oligonucleotide
ccguauuuuggcaguucgu

SEQ ID NO: 2170669 - RNA, 19 nt, Artificial Sequence
  Description of Artificial Sequence: Synthetic oligonucleotide
ccgccuucuaaaucucacu

SEQ ID NO: 2170670 - RNA, 19 nt, Artificial Sequence
  Description of Artificial Sequence: Synthetic oligonucleotide
ccccguauuuuggcaguuc

SEQ ID NO: 2170671 - RNA, 19 nt, Artificial Sequence
  Description of Artificial Sequence: Synthetic oligonucleotide
cccgcaaccgcggcuccac

SEQ ID NO: 2170672 - RNA, 19 nt, Artificial Sequence
  Description of Artificial Sequence: Synthetic oligonucleotide
ccauuagguagcgcaugua

SEQ ID NO: 2170673 - RNA, 19 nt, Artificial Sequence
  Description of Artificial Sequence: Synthetic oligonucleotide
gccugcgggccagcagcag

SEQ ID NO: 2170674 - RNA, 19 nt, Artificial Sequence
  Description of Artificial Sequence: Synthetic oligonucleotide
ggccaacuuugaccccgua

SEQ ID NO: 2170675 - RNA, 19 nt, Artificial Sequence
  Description of Artificial Sequence: Synthetic oligonucleotide
cgaaccccauccugcggaa

SEQ ID NO: 2170676 - RNA, 19 nt, Artificial Sequence
  Description of Artificial Sequence: Synthetic oligonucleotide
cgccgccuucuaaaucuca

SEQ ID NO: 2170677 - RNA, 19 nt, Artificial Sequence
  Description of Artificial Sequence: Synthetic oligonucleotide
cgagcauaguagucaguuu

SEQ ID NO: 2170678 - RNA, 19 nt, Artificial Sequence
  Description of Artificial Sequence: Synthetic oligonucleotide
cagcagcaggccggugcaa

SEQ ID NO: 2170679 - RNA, 19 nt, Artificial Sequence
  Description of Artificial Sequence: Synthetic oligonucleotide
gggaaucguuugguacuau

SEQ ID NO: 2170680 - RNA, 19 nt, Artificial Sequence
  Description of Artificial Sequence: Synthetic oligonucleotide
cgacauucugucccaugau

SEQ ID NO: 2170681 - RNA, 19 nt, Artificial Sequence
  Description of Artificial Sequence: Synthetic oligonucleotide
cugcgacauucugucccau

SEQ ID NO: 2170682 - RNA, 19 nt, Artificial Sequence
  Description of Artificial Sequence: Synthetic oligonucleotide
ccgcaaccgcggcuccaca

SEQ ID NO: 2170683 - RNA, 19 nt, Artificial Sequence
  Description of Artificial Sequence: Synthetic oligonucleotide
ccccuucuauacgggcaua

SEQ ID NO: 2170684 - RNA, 19 nt, Artificial Sequence
  Description of Artificial Sequence: Synthetic oligonucleotide
uguaaggacaccaaggugg

SEQ ID NO: 2170685 - RNA, 19 nt, Artificial Sequence
  Description of Artificial Sequence: Synthetic oligonucleotide
uuagagaucaucuucucag

SEQ ID NO: 2170686 - RNA, 19 nt, Artificial Sequence
  Description of Artificial Sequence: Synthetic oligonucleotide
acauaaggggccuucaggc

SEQ ID NO: 2170687 - RNA, 19 nt, Artificial Sequence
  Description of Artificial Sequence: Synthetic oligonucleotide
cuuuaugaggcccaguucc

SEQ ID NO: 2170688 - RNA, 19 nt, Artificial Sequence
  Description of Artificial Sequence: Synthetic oligonucleotide
aaagccucguuggugaagc

SEQ ID NO: 2170689 - RNA, 19 nt, Artificial Sequence
  Description of Artificial Sequence: Synthetic oligonucleotide
ucccacagcaauuagagau

SEQ ID NO: 2170690 - RNA, 19 nt, Artificial Sequence
  Description of Artificial Sequence: Synthetic oligonucleotide
acgaaggacacguccacgc

SEQ ID NO: 2170691 - RNA, 19 nt, Artificial Sequence
  Description of Artificial Sequence: Synthetic oligonucleotide
agggaguuguucuccagcc

SEQ ID NO: 2170692 - RNA, 19 nt, Artificial Sequence
  Description of Artificial Sequence: Synthetic oligonucleotide
acagcaauuagagaucauc

SEQ ID NO: 2170693 - RNA, 19 nt, Artificial Sequence
  Description of Artificial Sequence: Synthetic oligonucleotide
aggacagucccagaguugc

SEQ ID NO: 2170694 - RNA, 19 nt, Artificial Sequence
  Description of Artificial Sequence: Synthetic oligonucleotide
uucuguggcccacagagac

SEQ ID NO: 2170695 - RNA, 19 nt, Artificial Sequence
  Description of Artificial Sequence: Synthetic oligonucleotide
aguguguaugucuggggcg

SEQ ID NO: 2170696 - RNA, 19 nt, Artificial Sequence
  Description of Artificial Sequence: Synthetic oligonucleotide
uuagaccuaugccugcugc

SEQ ID NO: 2170697 - RNA, 19 nt, Artificial Sequence
  Description of Artificial Sequence: Synthetic oligonucleotide
gaagcacccguuuccaucc

SEQ ID NO: 2170698 - RNA, 19 nt, Artificial Sequence
  Description of Artificial Sequence: Synthetic oligonucleotide
ugggacaugccuuuggccu

SEQ ID NO: 2170699 - RNA, 19 nt, Artificial Sequence
  Description of Artificial Sequence: Synthetic oligonucleotide
uguaugucuggggcgaugg

SEQ ID NO: 2170700 - RNA, 19 nt, Artificial Sequence
  Description of Artificial Sequence: Synthetic oligonucleotide
uuggcccaagcuuagaccu

SEQ ID NO: 2170701 - RNA, 19 nt, Artificial Sequence
  Description of Artificial Sequence: Synthetic oligonucleotide
uucagggccauucccagga

SEQ ID NO: 2170702 - RNA, 19 nt, Artificial Sequence
  Description of Artificial Sequence: Synthetic oligonucleotide
uuuaugaggcccaguuccc

SEQ ID NO: 2170703 - RNA, 19 nt, Artificial Sequence
  Description of Artificial Sequence: Synthetic oligonucleotide
accacgcgcgucuucagcc

SEQ ID NO: 2170704 - RNA, 19 nt, Artificial Sequence
  Description of Artificial Sequence: Synthetic oligonucleotide
acgagggacgcgcaggccc

SEQ ID NO: 2170705 - RNA, 19 nt, Artificial Sequence
  Description of Artificial Sequence: Synthetic oligonucleotide
aucuguaaggacaccaagg

SEQ ID NO: 2170706 - RNA, 19 nt, Artificial Sequence
  Description of Artificial Sequence: Synthetic oligonucleotide
ucugguuauucuguggccc

SEQ ID NO: 2170707 - RNA, 19 nt, Artificial Sequence
  Description of Artificial Sequence: Synthetic oligonucleotide
uucaggcgaaccauguggc

SEQ ID NO: 2170708 - RNA, 19 nt, Artificial Sequence
  Description of Artificial Sequence: Synthetic oligonucleotide
cacauaaggggccuucagg

SEQ ID NO: 2170709 - RNA, 19 nt, Artificial Sequence
  Description of Artificial Sequence: Synthetic oligonucleotide
agaggucugagucuuuaug

SEQ ID NO: 2170710 - RNA, 19 nt, Artificial Sequence
  Description of Artificial Sequence: Synthetic oligonucleotide
ugagucuuuaugaggccca

SEQ ID NO: 2170711 - RNA, 19 nt, Artificial Sequence
  Description of Artificial Sequence: Synthetic oligonucleotide
cucuggguagcucagcacc

SEQ ID NO: 2170712 - RNA, 19 nt, Artificial Sequence
  Description of Artificial Sequence: Synthetic oligonucleotide
gaaggguaccucucggaag

SEQ ID NO: 2170713 - RNA, 19 nt, Artificial Sequence
  Description of Artificial Sequence: Synthetic oligonucleotide
uugucuccgaggcucagug

SEQ ID NO: 2170714 - RNA, 19 nt, Artificial Sequence
  Description of Artificial Sequence: Synthetic oligonucleotide
agccugacacauaaggggc

SEQ ID NO: 2170715 - RNA, 19 nt, Artificial Sequence
  Description of Artificial Sequence: Synthetic oligonucleotide
aggucugagucuuuaugag

SEQ ID NO: 2170716 - RNA, 19 nt, Artificial Sequence
  Description of Artificial Sequence: Synthetic oligonucleotide
uccucauacaccaccugga

SEQ ID NO: 2170717 - RNA, 19 nt, Artificial Sequence
  Description of Artificial Sequence: Synthetic oligonucleotide
aaacgugucuccaggagca

SEQ ID NO: 2170718 - RNA, 19 nt, Artificial Sequence
  Description of Artificial Sequence: Synthetic oligonucleotide
uagaccuaugccugcugcg

SEQ ID NO: 2170719 - RNA, 19 nt, Artificial Sequence
  Description of Artificial Sequence: Synthetic oligonucleotide
aggagcacuaucuucuccu

SEQ ID NO: 2170720 - RNA, 19 nt, Artificial Sequence
  Description of Artificial Sequence: Synthetic oligonucleotide
cauaaggggccuucaggcg

SEQ ID NO: 2170721 - RNA, 19 nt, Artificial Sequence
  Description of Artificial Sequence: Synthetic oligonucleotide
cauguggcuguccucauac

SEQ ID NO: 2170722 - RNA, 19 nt, Artificial Sequence
  Description of Artificial Sequence: Synthetic oligonucleotide
auaaggggccuucaggcga

SEQ ID NO: 2170723 - RNA, 19 nt, Artificial Sequence
  Description of Artificial Sequence: Synthetic oligonucleotide
cuuggugcuguggucaugg

SEQ ID NO: 2170724 - RNA, 19 nt, Artificial Sequence
  Description of Artificial Sequence: Synthetic oligonucleotide
agcuuagaccuaugccugc

SEQ ID NO: 2170725 - RNA, 19 nt, Artificial Sequence
  Description of Artificial Sequence: Synthetic oligonucleotide
caagcuuagaccuaugccu

SEQ ID NO: 2170726 - RNA, 19 nt, Artificial Sequence
  Description of Artificial Sequence: Synthetic oligonucleotide
aagcuuagaccuaugccug

SEQ ID NO: 2170727 - RNA, 19 nt, Artificial Sequence
  Description of Artificial Sequence: Synthetic oligonucleotide
guagcucagcaccacgagg

SEQ ID NO: 2170728 - RNA, 19 nt, Artificial Sequence
  Description of Artificial Sequence: Synthetic oligonucleotide
agaggaaacgugucuccag

SEQ ID NO: 2170729 - RNA, 19 nt, Artificial Sequence
  Description of Artificial Sequence: Synthetic oligonucleotide
ucuuuaugaggcccaguuc

SEQ ID NO: 2170730 - RNA, 19 nt, Artificial Sequence
  Description of Artificial Sequence: Synthetic oligonucleotide
uggagucucugccacaguc

SEQ ID NO: 2170731 - RNA, 19 nt, Artificial Sequence
  Description of Artificial Sequence: Synthetic oligonucleotide
cuuucagguucugugcugg

SEQ ID NO: 2170732 - RNA, 19 nt, Artificial Sequence
  Description of Artificial Sequence: Synthetic oligonucleotide
ucaggguggugacuguacc

SEQ ID NO: 2170733 - RNA, 19 nt, Artificial Sequence
  Description of Artificial Sequence: Synthetic oligonucleotide
ugaagcacccguuuccauc

SEQ ID NO: 2170734 - RNA, 19 nt, Artificial Sequence
  Description of Artificial Sequence: Synthetic oligonucleotide
ugaaguucccacagcaauu

SEQ ID NO: 2170735 - RNA, 19 nt, Artificial Sequence
  Description of Artificial Sequence: Synthetic oligonucleotide
gucauggcucuucagggcc

SEQ ID NO: 2170736 - RNA, 19 nt, Artificial Sequence
  Description of Artificial Sequence: Synthetic oligonucleotide
cucucggaaggccaggaag

SEQ ID NO: 2170737 - RNA, 19 nt, Artificial Sequence
  Description of Artificial Sequence: Synthetic oligonucleotide
ucuucagccgggcuuguuc

SEQ ID NO: 2170738 - RNA, 19 nt, Artificial Sequence
  Description of Artificial Sequence: Synthetic oligonucleotide
ucguuggugaagcacccgu

SEQ ID NO: 2170739 - RNA, 19 nt, Artificial Sequence
  Description of Artificial Sequence: Synthetic oligonucleotide
ucuggguagcucagcacca

SEQ ID NO: 2170740 - RNA, 19 nt, Artificial Sequence
  Description of Artificial Sequence: Synthetic oligonucleotide
uggguagcucagcaccacg

SEQ ID NO: 2170741 - RNA, 19 nt, Artificial Sequence
  Description of Artificial Sequence: Synthetic oligonucleotide
ucccugggcaccacgcgcg

SEQ ID NO: 2170742 - RNA, 19 nt, Artificial Sequence
  Description of Artificial Sequence: Synthetic oligonucleotide
gagacauagaggggcuugg

SEQ ID NO: 2170743 - RNA, 19 nt, Artificial Sequence
  Description of Artificial Sequence: Synthetic oligonucleotide
cuuggcacccgacgcaggg

SEQ ID NO: 2170744 - RNA, 19 nt, Artificial Sequence
  Description of Artificial Sequence: Synthetic oligonucleotide
acacauaaggggccuucag

SEQ ID NO: 2170745 - RNA, 19 nt, Artificial Sequence
  Description of Artificial Sequence: Synthetic oligonucleotide
cacuaucuucuccuugugc

SEQ ID NO: 2170746 - RNA, 19 nt, Artificial Sequence
  Description of Artificial Sequence: Synthetic oligonucleotide
cauuggcccaagcuuagac

SEQ ID NO: 2170747 - RNA, 19 nt, Artificial Sequence
  Description of Artificial Sequence: Synthetic oligonucleotide
ggcgauggugacuacacug

SEQ ID NO: 2170748 - RNA, 19 nt, Artificial Sequence
  Description of Artificial Sequence: Synthetic oligonucleotide
ccagaguugcccaucagag

SEQ ID NO: 2170749 - RNA, 19 nt, Artificial Sequence
  Description of Artificial Sequence: Synthetic oligonucleotide
ucagugcucugccuguggu

SEQ ID NO: 2170750 - RNA, 19 nt, Artificial Sequence
  Description of Artificial Sequence: Synthetic oligonucleotide
ugcugcguccuccuggggu

SEQ ID NO: 2170751 - RNA, 19 nt, Artificial Sequence
  Description of Artificial Sequence: Synthetic oligonucleotide
cuguaaggacaccaaggug

SEQ ID NO: 2170752 - RNA, 19 nt, Artificial Sequence
  Description of Artificial Sequence: Synthetic oligonucleotide
ggucuuucagguucugugc

SEQ ID NO: 2170753 - RNA, 19 nt, Artificial Sequence
  Description of Artificial Sequence: Synthetic oligonucleotide
uccugcaaccgcuguacca

SEQ ID NO: 2170754 - RNA, 19 nt, Artificial Sequence
  Description of Artificial Sequence: Synthetic oligonucleotide
uguggucauggcucuucag

SEQ ID NO: 2170755 - RNA, 19 nt, Artificial Sequence
  Description of Artificial Sequence: Synthetic oligonucleotide
uaugccugcugcguccucc

SEQ ID NO: 2170756 - RNA, 19 nt, Artificial Sequence
  Description of Artificial Sequence: Synthetic oligonucleotide
guaaggacaccaagguggc

SEQ ID NO: 2170757 - RNA, 19 nt, Artificial Sequence
  Description of Artificial Sequence: Synthetic oligonucleotide
ccaagcuuagaccuaugcc

SEQ ID NO: 2170758 - RNA, 19 nt, Artificial Sequence
  Description of Artificial Sequence: Synthetic oligonucleotide
gagcacuaucuucuccuug

SEQ ID NO: 2170759 - RNA, 19 nt, Artificial Sequence
  Description of Artificial Sequence: Synthetic oligonucleotide
uggggcaugaggccuggcu

SEQ ID NO: 2170760 - RNA, 19 nt, Artificial Sequence
  Description of Artificial Sequence: Synthetic oligonucleotide
ucuggggcgauggugacua

SEQ ID NO: 2170761 - RNA, 19 nt, Artificial Sequence
  Description of Artificial Sequence: Synthetic oligonucleotide
agagagagagaguguguau

SEQ ID NO: 2170762 - RNA, 19 nt, Artificial Sequence
  Description of Artificial Sequence: Synthetic oligonucleotide
caggguggugacuguaccc

SEQ ID NO: 2170763 - RNA, 19 nt, Artificial Sequence
  Description of Artificial Sequence: Synthetic oligonucleotide
uggcacccgacgcagggca

SEQ ID NO: 2170764 - RNA, 19 nt, Artificial Sequence
  Description of Artificial Sequence: Synthetic oligonucleotide
gaggccuggcuccuucucc

SEQ ID NO: 2170765 - RNA, 19 nt, Artificial Sequence
  Description of Artificial Sequence: Synthetic oligonucleotide
uaugaggcccaguucccuc

SEQ ID NO: 2170766 - RNA, 19 nt, Artificial Sequence
  Description of Artificial Sequence: Synthetic oligonucleotide
guacccgggcugcaggagg

SEQ ID NO: 2170767 - RNA, 19 nt, Artificial Sequence
  Description of Artificial Sequence: Synthetic oligonucleotide
ucauggcucuucagggcca

SEQ ID NO: 2170768 - RNA, 19 nt, Artificial Sequence
  Description of Artificial Sequence: Synthetic oligonucleotide
guggugugggugaaguucc

SEQ ID NO: 2170769 - RNA, 19 nt, Artificial Sequence
  Description of Artificial Sequence: Synthetic oligonucleotide
aggaaacgugucuccagga

SEQ ID NO: 2170770 - RNA, 19 nt, Artificial Sequence
  Description of Artificial Sequence: Synthetic oligonucleotide
gccacuguugucuccgagg

SEQ ID NO: 2170771 - RNA, 19 nt, Artificial Sequence
  Description of Artificial Sequence: Synthetic oligonucleotide
aggcgaaccauguggcugu

SEQ ID NO: 2170772 - RNA, 19 nt, Artificial Sequence
  Description of Artificial Sequence: Synthetic oligonucleotide
agccucguuggugaagcac

SEQ ID NO: 2170773 - RNA, 19 nt, Artificial Sequence
  Description of Artificial Sequence: Synthetic oligonucleotide
cuccugagccuccuuuggg

SEQ ID NO: 2170774 - RNA, 19 nt, Artificial Sequence
  Description of Artificial Sequence: Synthetic oligonucleotide
cucaggguggugacuguac

SEQ ID NO: 2170775 - RNA, 19 nt, Artificial Sequence
  Description of Artificial Sequence: Synthetic oligonucleotide
aacgugucuccaggagcac

SEQ ID NO: 2170776 - RNA, 19 nt, Artificial Sequence
  Description of Artificial Sequence: Synthetic oligonucleotide
aggcccgggaacugucccc

SEQ ID NO: 2170777 - RNA, 19 nt, Artificial Sequence
  Description of Artificial Sequence: Synthetic oligonucleotide
aguucccacagcaauuaga

SEQ ID NO: 2170778 - RNA, 19 nt, Artificial Sequence
  Description of Artificial Sequence: Synthetic oligonucleotide
agcacccguuuccauccac

SEQ ID NO: 2170779 - RNA, 19 nt, Artificial Sequence
  Description of Artificial Sequence: Synthetic oligonucleotide
gaaguucccacagcaauua

SEQ ID NO: 2170780 - RNA, 19 nt, Artificial Sequence
  Description of Artificial Sequence: Synthetic oligonucleotide
agugauggaggaggcuggg

SEQ ID NO: 2170781 - RNA, 19 nt, Artificial Sequence
  Description of Artificial Sequence: Synthetic oligonucleotide
acccguuuccauccacaag

SEQ ID NO: 2170782 - RNA, 19 nt, Artificial Sequence
  Description of Artificial Sequence: Synthetic oligonucleotide
cuuagaccuaugccugcug

SEQ ID NO: 2170783 - RNA, 19 nt, Artificial Sequence
  Description of Artificial Sequence: Synthetic oligonucleotide
uuaugaggcccaguucccu

SEQ ID NO: 2170784 - RNA, 19 nt, Artificial Sequence
  Description of Artificial Sequence: Synthetic oligonucleotide
caggccacuguugucuccg

SEQ ID NO: 2170785 - RNA, 19 nt, Artificial Sequence
  Description of Artificial Sequence: Synthetic oligonucleotide
ggugacuacacugggccag

SEQ ID NO: 2170786 - RNA, 19 nt, Artificial Sequence
  Description of Artificial Sequence: Synthetic oligonucleotide
gagagagagagagugugua

SEQ ID NO: 2170787 - RNA, 19 nt, Artificial Sequence
  Description of Artificial Sequence: Synthetic oligonucleotide
caggagcacuaucuucucc

SEQ ID NO: 2170788 - RNA, 19 nt, Artificial Sequence
  Description of Artificial Sequence: Synthetic oligonucleotide
accacgagggacgcgcagg

SEQ ID NO: 2170789 - RNA, 19 nt, Artificial Sequence
  Description of Artificial Sequence: Synthetic oligonucleotide
uccuuugggacaugccuuu

SEQ ID NO: 2170790 - RNA, 19 nt, Artificial Sequence
  Description of Artificial Sequence: Synthetic oligonucleotide
uaaggggccuucaggcgaa

SEQ ID NO: 2170791 - RNA, 19 nt, Artificial Sequence
  Description of Artificial Sequence: Synthetic oligonucleotide
ucaggcgaaccauguggcu

SEQ ID NO: 2170792 - RNA, 19 nt, Artificial Sequence
  Description of Artificial Sequence: Synthetic oligonucleotide
augucuggggcgaugguga

SEQ ID NO: 2170793 - RNA, 19 nt, Artificial Sequence
  Description of Artificial Sequence: Synthetic oligonucleotide
augaggcccaguucccucu

SEQ ID NO: 2170794 - RNA, 19 nt, Artificial Sequence
  Description of Artificial Sequence: Synthetic oligonucleotide
gagucuuuaugaggcccag

SEQ ID NO: 2170795 - RNA, 19 nt, Artificial Sequence
  Description of Artificial Sequence: Synthetic oligonucleotide
agccuccuuugggacaugc

SEQ ID NO: 2170796 - RNA, 19 nt, Artificial Sequence
  Description of Artificial Sequence: Synthetic oligonucleotide
accuggagcucuggguagc

SEQ ID NO: 2170797 - RNA, 19 nt, Artificial Sequence
  Description of Artificial Sequence: Synthetic oligonucleotide
aguuguucuccagcccauc

SEQ ID NO: 2170798 - RNA, 19 nt, Artificial Sequence
  Description of Artificial Sequence: Synthetic oligonucleotide
caggcgaaccauguggcug

SEQ ID NO: 2170799 - RNA, 19 nt, Artificial Sequence
  Description of Artificial Sequence: Synthetic oligonucleotide
agaccuaugccugcugcgu

SEQ ID NO: 2170800 - RNA, 19 nt, Artificial Sequence
  Description of Artificial Sequence: Synthetic oligonucleotide
aucaucuucucaggguggu

SEQ ID NO: 2170801 - RNA, 19 nt, Artificial Sequence
  Description of Artificial Sequence: Synthetic oligonucleotide
ggucauggcucuucagggc

SEQ ID NO: 2170802 - RNA, 19 nt, Artificial Sequence
  Description of Artificial Sequence: Synthetic oligonucleotide
gucuuuaugaggcccaguu

SEQ ID NO: 2170803 - RNA, 19 nt, Artificial Sequence
  Description of Artificial Sequence: Synthetic oligonucleotide
uacccgggcugcaggagga

SEQ ID NO: 2170804 - RNA, 19 nt, Artificial Sequence
  Description of Artificial Sequence: Synthetic oligonucleotide
ucaggccacuguugucucc

SEQ ID NO: 2170805 - RNA, 19 nt, Artificial Sequence
  Description of Artificial Sequence: Synthetic oligonucleotide
ugcaggugcuccugagccu

SEQ ID NO: 2170806 - RNA, 19 nt, Artificial Sequence
  Description of Artificial Sequence: Synthetic oligonucleotide
cugguuauucuguggccca

SEQ ID NO: 2170807 - RNA, 19 nt, Artificial Sequence
  Description of Artificial Sequence: Synthetic oligonucleotide
ucccagaguugcccaucag

SEQ ID NO: 2170808 - RNA, 19 nt, Artificial Sequence
  Description of Artificial Sequence: Synthetic oligonucleotide
acagagacauagaggggcu

SEQ ID NO: 2170809 - RNA, 19 nt, Artificial Sequence
  Description of Artificial Sequence: Synthetic oligonucleotide
gaccuaugccugcugcguc

SEQ ID NO: 2170810 - RNA, 19 nt, Artificial Sequence
  Description of Artificial Sequence: Synthetic oligonucleotide
cuucuuggcacccgacgca

SEQ ID NO: 2170811 - RNA, 19 nt, Artificial Sequence
  Description of Artificial Sequence: Synthetic oligonucleotide
gacacauaaggggccuuca

SEQ ID NO: 2170812 - RNA, 19 nt, Artificial Sequence
  Description of Artificial Sequence: Synthetic oligonucleotide
guucaggccacuguugucu

SEQ ID NO: 2170813 - RNA, 19 nt, Artificial Sequence
  Description of Artificial Sequence: Synthetic oligonucleotide
cccaagcuuagaccuaugc

SEQ ID NO: 2170814 - RNA, 19 nt, Artificial Sequence
  Description of Artificial Sequence: Synthetic oligonucleotide
caaagccucguuggugaag

SEQ ID NO: 2170815 - RNA, 19 nt, Artificial Sequence
  Description of Artificial Sequence: Synthetic oligonucleotide
ucuccgaggcucagugcuc

SEQ ID NO: 2170816 - RNA, 19 nt, Artificial Sequence
  Description of Artificial Sequence: Synthetic oligonucleotide
gggcagaucuguaaggaca

SEQ ID NO: 2170817 - RNA, 19 nt, Artificial Sequence
  Description of Artificial Sequence: Synthetic oligonucleotide
ggcagaucuguaaggacac

SEQ ID NO: 2170818 - RNA, 19 nt, Artificial Sequence
  Description of Artificial Sequence: Synthetic oligonucleotide
acaguccucggguggccug

SEQ ID NO: 2170819 - RNA, 19 nt, Artificial Sequence
  Description of Artificial Sequence: Synthetic oligonucleotide
guaccucucggaaggccag

SEQ ID NO: 2170820 - RNA, 19 nt, Artificial Sequence
  Description of Artificial Sequence: Synthetic oligonucleotide
cauagaggggcuuggugcu

SEQ ID NO: 2170821 - RNA, 19 nt, Artificial Sequence
  Description of Artificial Sequence: Synthetic oligonucleotide
cuugugcagggaguuguuc

SEQ ID NO: 2170822 - RNA, 19 nt, Artificial Sequence
  Description of Artificial Sequence: Synthetic oligonucleotide
aggguaccucucggaaggc

SEQ ID NO: 2170823 - RNA, 19 nt, Artificial Sequence
  Description of Artificial Sequence: Synthetic oligonucleotide
ggagucucugccacagucc

SEQ ID NO: 2170824 - RNA, 19 nt, Artificial Sequence
  Description of Artificial Sequence: Synthetic oligonucleotide
cagugcucugccuguggug

SEQ ID NO: 2170825 - RNA, 19 nt, Artificial Sequence
  Description of Artificial Sequence: Synthetic oligonucleotide
aagccucguuggugaagca

SEQ ID NO: 2170826 - RNA, 19 nt, Artificial Sequence
  Description of Artificial Sequence: Synthetic oligonucleotide
uggggcgauggugacuaca

SEQ ID NO: 2170827 - RNA, 19 nt, Artificial Sequence
  Description of Artificial Sequence: Synthetic oligonucleotide
ggaaggguaccucucggaa

SEQ ID NO: 2170828 - RNA, 19 nt, Artificial Sequence
  Description of Artificial Sequence: Synthetic oligonucleotide
ugguuauucuguggcccac

SEQ ID NO: 2170829 - RNA, 19 nt, Artificial Sequence
  Description of Artificial Sequence: Synthetic oligonucleotide
cucguuggugaagcacccg

SEQ ID NO: 2170830 - RNA, 19 nt, Artificial Sequence
  Description of Artificial Sequence: Synthetic oligonucleotide
gguggugacuguacccggg

SEQ ID NO: 2170831 - RNA, 19 nt, Artificial Sequence
  Description of Artificial Sequence: Synthetic oligonucleotide
cacgcgcgucuucagccgg

SEQ ID NO: 2170832 - RNA, 19 nt, Artificial Sequence
  Description of Artificial Sequence: Synthetic oligonucleotide
uucucaggguggugacugu

SEQ ID NO: 2170833 - RNA, 19 nt, Artificial Sequence
  Description of Artificial Sequence: Synthetic oligonucleotide
aagcacccguuuccaucca

SEQ ID NO: 2170834 - RNA, 19 nt, Artificial Sequence
  Description of Artificial Sequence: Synthetic oligonucleotide
aggggccuucaggcgaacc

SEQ ID NO: 2170835 - RNA, 19 nt, Artificial Sequence
  Description of Artificial Sequence: Synthetic oligonucleotide
agccauuggcccaagcuua

SEQ ID NO: 2170836 - RNA, 19 nt, Artificial Sequence
  Description of Artificial Sequence: Synthetic oligonucleotide
gggaguuguucuccagccc

SEQ ID NO: 2170837 - RNA, 19 nt, Artificial Sequence
  Description of Artificial Sequence: Synthetic oligonucleotide
acgcagggcagaucuguaa

SEQ ID NO: 2170838 - RNA, 19 nt, Artificial Sequence
  Description of Artificial Sequence: Synthetic oligonucleotide
caccacgcgcgucuucagc

SEQ ID NO: 2170839 - RNA, 19 nt, Artificial Sequence
  Description of Artificial Sequence: Synthetic oligonucleotide
ugacuacacugggccagcc

SEQ ID NO: 2170840 - RNA, 19 nt, Artificial Sequence
  Description of Artificial Sequence: Synthetic oligonucleotide
auguggcuguccucauaca

SEQ ID NO: 2170841 - RNA, 19 nt, Artificial Sequence
  Description of Artificial Sequence: Synthetic oligonucleotide
agacauagaggggcuuggu

SEQ ID NO: 2170842 - RNA, 19 nt, Artificial Sequence
  Description of Artificial Sequence: Synthetic oligonucleotide
cuccgcaggcccgggaagg

SEQ ID NO: 2170843 - RNA, 19 nt, Artificial Sequence
  Description of Artificial Sequence: Synthetic oligonucleotide
guaccaacuccaccaggaa

SEQ ID NO: 2170844 - RNA, 19 nt, Artificial Sequence
  Description of Artificial Sequence: Synthetic oligonucleotide
uaaggacaccaagguggca

SEQ ID NO: 2170845 - RNA, 19 nt, Artificial Sequence
  Description of Artificial Sequence: Synthetic oligonucleotide
ggacgaaggacacguccac

SEQ ID NO: 2170846 - RNA, 19 nt, Artificial Sequence
  Description of Artificial Sequence: Synthetic oligonucleotide
cugcaaccgcuguaccaac

SEQ ID NO: 2170847 - RNA, 19 nt, Artificial Sequence
  Description of Artificial Sequence: Synthetic oligonucleotide
cuccugcaaccgcuguacc

SEQ ID NO: 2170848 - RNA, 19 nt, Artificial Sequence
  Description of Artificial Sequence: Synthetic oligonucleotide
gacgcgcaggcccgggaac

SEQ ID NO: 2170849 - RNA, 19 nt, Artificial Sequence
  Description of Artificial Sequence: Synthetic oligonucleotide
cugcucuuggaagccuggc

SEQ ID NO: 2170850 - RNA, 19 nt, Artificial Sequence
  Description of Artificial Sequence: Synthetic oligonucleotide
uuggcacccgacgcagggc

SEQ ID NO: 2170851 - RNA, 19 nt, Artificial Sequence
  Description of Artificial Sequence: Synthetic oligonucleotide
cuccgugucccugggcacc

SEQ ID NO: 2170852 - RNA, 19 nt, Artificial Sequence
  Description of Artificial Sequence: Synthetic oligonucleotide
cccaaagccucguugguga

SEQ ID NO: 2170853 - RNA, 19 nt, Artificial Sequence
  Description of Artificial Sequence: Synthetic oligonucleotide
agucuuuaugaggcccagu

SEQ ID NO: 2170854 - RNA, 19 nt, Artificial Sequence
  Description of Artificial Sequence: Synthetic oligonucleotide
auagaggggcuuggugcug

SEQ ID NO: 2170855 - RNA, 19 nt, Artificial Sequence
  Description of Artificial Sequence: Synthetic oligonucleotide
caccaagguggcaggccac

SEQ ID NO: 2170856 - RNA, 19 nt, Artificial Sequence
  Description of Artificial Sequence: Synthetic oligonucleotide
ccugagccuccuuugggac

SEQ ID NO: 2170857 - RNA, 19 nt, Artificial Sequence
  Description of Artificial Sequence: Synthetic oligonucleotide
ccucguuggugaagcaccc

SEQ ID NO: 2170858 - RNA, 19 nt, Artificial Sequence
  Description of Artificial Sequence: Synthetic oligonucleotide
guuggugaagcacccguuu

SEQ ID NO: 2170859 - RNA, 19 nt, Artificial Sequence
  Description of Artificial Sequence: Synthetic oligonucleotide
aaggggccuucaggcgaac

SEQ ID NO: 2170860 - RNA, 19 nt, Artificial Sequence
  Description of Artificial Sequence: Synthetic oligonucleotide
gaggaggccagaggucuga

SEQ ID NO: 2170861 - RNA, 19 nt, Artificial Sequence
  Description of Artificial Sequence: Synthetic oligonucleotide
ucggguggccugccuggac

SEQ ID NO: 2170862 - RNA, 19 nt, Artificial Sequence
  Description of Artificial Sequence: Synthetic oligonucleotide
aggaagccugacacauaag

SEQ ID NO: 2170863 - RNA, 19 nt, Artificial Sequence
  Description of Artificial Sequence: Synthetic oligonucleotide
uggcccaagcuuagaccua

SEQ ID NO: 2170864 - RNA, 19 nt, Artificial Sequence
  Description of Artificial Sequence: Synthetic oligonucleotide
ggggcgauggugacuacac

SEQ ID NO: 2170865 - RNA, 19 nt, Artificial Sequence
  Description of Artificial Sequence: Synthetic oligonucleotide
cuguggucauggcucuuca

SEQ ID NO: 2170866 - RNA, 19 nt, Artificial Sequence
  Description of Artificial Sequence: Synthetic oligonucleotide
cgggacgaaggacacgucc

SEQ ID NO: 2170867 - RNA, 19 nt, Artificial Sequence
  Description of Artificial Sequence: Synthetic oligonucleotide
uguguaugucuggggcgau

SEQ ID NO: 2170868 - RNA, 19 nt, Artificial Sequence
  Description of Artificial Sequence: Synthetic oligonucleotide
ccuccugggguucaggcca

SEQ ID NO: 2170869 - RNA, 19 nt, Artificial Sequence
  Description of Artificial Sequence: Synthetic oligonucleotide
caccacgagggacgcgcag

SEQ ID NO: 2170870 - RNA, 19 nt, Artificial Sequence
  Description of Artificial Sequence: Synthetic oligonucleotide
cacccguuuccauccacaa

SEQ ID NO: 2170871 - RNA, 19 nt, Artificial Sequence
  Description of Artificial Sequence: Synthetic oligonucleotide
cgcagggcagaucuguaag

SEQ ID NO: 2170872 - RNA, 19 nt, Artificial Sequence
  Description of Artificial Sequence: Synthetic oligonucleotide
gcagccauuggcccaagcu

SEQ ID NO: 2170873 - RNA, 19 nt, Artificial Sequence
  Description of Artificial Sequence: Synthetic oligonucleotide
uuccauccacaagcaggac

SEQ ID NO: 2170874 - RNA, 19 nt, Artificial Sequence
  Description of Artificial Sequence: Synthetic oligonucleotide
ccaacuccaccaggaaggg

SEQ ID NO: 2170875 - RNA, 19 nt, Artificial Sequence
  Description of Artificial Sequence: Synthetic oligonucleotide
gguucaggccacuguuguc

SEQ ID NO: 2170876 - RNA, 19 nt, Artificial Sequence
  Description of Artificial Sequence: Synthetic oligonucleotide
ggcggggucccgcugccag

SEQ ID NO: 2170877 - RNA, 19 nt, Artificial Sequence
  Description of Artificial Sequence: Synthetic oligonucleotide
cagggccauucccaggaca

SEQ ID NO: 2170878 - RNA, 19 nt, Artificial Sequence
  Description of Artificial Sequence: Synthetic oligonucleotide
ggccacuguugucuccgag

SEQ ID NO: 2170879 - RNA, 19 nt, Artificial Sequence
  Description of Artificial Sequence: Synthetic oligonucleotide
cccagaguugcccaucaga

SEQ ID NO: 2170880 - RNA, 19 nt, Artificial Sequence
  Description of Artificial Sequence: Synthetic oligonucleotide
gccugacacauaaggggcc

SEQ ID NO: 2170881 - RNA, 19 nt, Artificial Sequence
  Description of Artificial Sequence: Synthetic oligonucleotide
cccauccaccugcaggagc

SEQ ID NO: 2170882 - RNA, 19 nt, Artificial Sequence
  Description of Artificial Sequence: Synthetic oligonucleotide
ccaccccaaagccucguug

SEQ ID NO: 2170883 - RNA, 19 nt, Artificial Sequence
  Description of Artificial Sequence: Synthetic oligonucleotide
ggugaaguucccacagcaa

SEQ ID NO: 2170884 - RNA, 19 nt, Artificial Sequence
  Description of Artificial Sequence: Synthetic oligonucleotide
ggguagcucagcaccacga

SEQ ID NO: 2170885 - RNA, 19 nt, Artificial Sequence
  Description of Artificial Sequence: Synthetic oligonucleotide
caccaggaaggguaccucu

SEQ ID NO: 2170886 - RNA, 19 nt, Artificial Sequence
  Description of Artificial Sequence: Synthetic oligonucleotide
ccacgagggacgcgcaggc

SEQ ID NO: 2170887 - RNA, 19 nt, Artificial Sequence
  Description of Artificial Sequence: Synthetic oligonucleotide
gccauuggcccaagcuuag

SEQ ID NO: 2170888 - RNA, 19 nt, Artificial Sequence
  Description of Artificial Sequence: Synthetic oligonucleotide
gguuauucuguggcccaca

SEQ ID NO: 2170889 - RNA, 19 nt, Artificial Sequence
  Description of Artificial Sequence: Synthetic oligonucleotide
ccacgcgcgucuucagccg

SEQ ID NO: 2170890 - RNA, 19 nt, Artificial Sequence
  Description of Artificial Sequence: Synthetic oligonucleotide
gcgucuucagccgggcuug

SEQ ID NO: 2170891 - RNA, 19 nt, Artificial Sequence
  Description of Artificial Sequence: Synthetic oligonucleotide
gagggacgcgcaggcccgg

SEQ ID NO: 2170892 - RNA, 19 nt, Artificial Sequence
  Description of Artificial Sequence: Synthetic oligonucleotide
cacgagggacgcgcaggcc

SEQ ID NO: 2170893 - RNA, 19 nt, Artificial Sequence
  Description of Artificial Sequence: Synthetic oligonucleotide
cuguggcccacagagacau

SEQ ID NO: 2170894 - RNA, 19 nt, Artificial Sequence
  Description of Artificial Sequence: Synthetic oligonucleotide
cgaggcucagugcucugcc

SEQ ID NO: 2170895 - RNA, 19 nt, Artificial Sequence
  Description of Artificial Sequence: Synthetic oligonucleotide
ggcaccacgcgcgucuuca

SEQ ID NO: 2170896 - RNA, 19 nt, Artificial Sequence
  Description of Artificial Sequence: Synthetic oligonucleotide
ccacagcaauuagagauca

SEQ ID NO: 2170897 - RNA, 19 nt, Artificial Sequence
  Description of Artificial Sequence: Synthetic oligonucleotide
uguggcccacagagacaua

SEQ ID NO: 2170898 - RNA, 19 nt, Artificial Sequence
  Description of Artificial Sequence: Synthetic oligonucleotide
acgcgcgucuucagccggg

SEQ ID NO: 2170899 - RNA, 19 nt, Artificial Sequence
  Description of Artificial Sequence: Synthetic oligonucleotide
cgagggacgcgcaggcccg

SEQ ID NO: 2170900 - RNA, 19 nt, Artificial Sequence
  Description of Artificial Sequence: Synthetic oligonucleotide
ccugcaaccgcuguaccaa

SEQ ID NO: 2170901 - RNA, 19 nt, Artificial Sequence
  Description of Artificial Sequence: Synthetic oligonucleotide
gacgcagggcagaucugua

SEQ ID NO: 2170902 - RNA, 19 nt, Artificial Sequence
  Description of Artificial Sequence: Synthetic oligonucleotide
agggacgcgcaggcccggg

SEQ ID NO: 2170903 - RNA, 19 nt, Artificial Sequence
  Description of Artificial Sequence: Synthetic oligonucleotide
cuaugccugcugcguccuc

SEQ ID NO: 2170904 - RNA, 19 nt, Artificial Sequence
  Description of Artificial Sequence: Synthetic oligonucleotide
gaguuguucuccagcccau

SEQ ID NO: 2170905 - RNA, 19 nt, Artificial Sequence
  Description of Artificial Sequence: Synthetic oligonucleotide
gacaugccuuuggccucug

SEQ ID NO: 2170906 - RNA, 19 nt, Artificial Sequence
  Description of Artificial Sequence: Synthetic oligonucleotide
ccguuuccauccacaagca

SEQ ID NO: 2170907 - RNA, 19 nt, Artificial Sequence
  Description of Artificial Sequence: Synthetic oligonucleotide
ggcagccauuggcccaagc

SEQ ID NO: 2170908 - RNA, 19 nt, Artificial Sequence
  Description of Artificial Sequence: Synthetic oligonucleotide
ccaagguggcaggccaccc

SEQ ID NO: 2170909 - RNA, 19 nt, Artificial Sequence
  Description of Artificial Sequence: Synthetic oligonucleotide
ccccaaagccucguuggug

SEQ ID NO: 2170910 - RNA, 19 nt, Artificial Sequence
  Description of Artificial Sequence: Synthetic oligonucleotide
gacccuccgcaggcccggg

SEQ ID NO: 2170911 - RNA, 19 nt, Artificial Sequence
  Description of Artificial Sequence: Synthetic oligonucleotide
ccgacccuccgcaggcccg

SEQ ID NO: 2170912 - RNA, 19 nt, Artificial Sequence
  Description of Artificial Sequence: Synthetic oligonucleotide
acccgacgcagggcagauc

SEQ ID NO: 2170913 - RNA, 19 nt, Artificial Sequence
  Description of Artificial Sequence: Synthetic oligonucleotide
gugaagcacccguuuccau

SEQ ID NO: 2170914 - RNA, 19 nt, Artificial Sequence
  Description of Artificial Sequence: Synthetic oligonucleotide
gccuccuuugggacaugcc

SEQ ID NO: 2170915 - RNA, 19 nt, Artificial Sequence
  Description of Artificial Sequence: Synthetic oligonucleotide
cccgacgcagggcagaucu

SEQ ID NO: 2170916 - RNA, 19 nt, Artificial Sequence
  Description of Artificial Sequence: Synthetic oligonucleotide
gcaccacgcgcgucuucag

SEQ ID NO: 2170917 - RNA, 19 nt, Artificial Sequence
  Description of Artificial Sequence: Synthetic oligonucleotide
acccgggcugcaggaggag

SEQ ID NO: 2170918 - RNA, 19 nt, Artificial Sequence
  Description of Artificial Sequence: Synthetic oligonucleotide
ccgaggcucagugcucugc

SEQ ID NO: 2170919 - RNA, 19 nt, Artificial Sequence
  Description of Artificial Sequence: Synthetic oligonucleotide
cuggggcgauggugacuac

SEQ ID NO: 2170920 - RNA, 19 nt, Artificial Sequence
  Description of Artificial Sequence: Synthetic oligonucleotide
ggcucagugcucugccugu

SEQ ID NO: 2170921 - RNA, 19 nt, Artificial Sequence
  Description of Artificial Sequence: Synthetic oligonucleotide
gcuuagaccuaugccugcu

SEQ ID NO: 2170922 - RNA, 19 nt, Artificial Sequence
  Description of Artificial Sequence: Synthetic oligonucleotide
ccuccgcaggcccgggaag

SEQ ID NO: 2170923 - RNA, 19 nt, Artificial Sequence
  Description of Artificial Sequence: Synthetic oligonucleotide
ccuuugggacaugccuuug

SEQ ID NO: 2170924 - RNA, 19 nt, Artificial Sequence
  Description of Artificial Sequence: Synthetic oligonucleotide
cacagcaauuagagaucau

SEQ ID NO: 2170925 - RNA, 19 nt, Artificial Sequence
  Description of Artificial Sequence: Synthetic oligonucleotide
cgaaccauguggcuguccu

SEQ ID NO: 2170926 - RNA, 19 nt, Artificial Sequence
  Description of Artificial Sequence: Synthetic oligonucleotide
cuccgaggcucagugcucu

SEQ ID NO: 2170927 - RNA, 19 nt, Artificial Sequence
  Description of Artificial Sequence: Synthetic oligonucleotide
ggagcacuaucuucuccuu

SEQ ID NO: 2170928 - RNA, 19 nt, Artificial Sequence
  Description of Artificial Sequence: Synthetic oligonucleotide
ggcacccgacgcagggcag

SEQ ID NO: 2170929 - RNA, 19 nt, Artificial Sequence
  Description of Artificial Sequence: Synthetic oligonucleotide
ccaggacagucccagaguu

SEQ ID NO: 2170930 - RNA, 19 nt, Artificial Sequence
  Description of Artificial Sequence: Synthetic oligonucleotide
cuggggcaugaggccuggc

SEQ ID NO: 2170931 - RNA, 19 nt, Artificial Sequence
  Description of Artificial Sequence: Synthetic oligonucleotide
ugggcaccacgcgcgucuu

SEQ ID NO: 2170932 - RNA, 19 nt, Artificial Sequence
  Description of Artificial Sequence: Synthetic oligonucleotide
ggucccgcugccaggccuc

SEQ ID NO: 2170933 - RNA, 19 nt, Artificial Sequence
  Description of Artificial Sequence: Synthetic oligonucleotide
caagcaggaccuggggcau

SEQ ID NO: 2170934 - RNA, 19 nt, Artificial Sequence
  Description of Artificial Sequence: Synthetic oligonucleotide
ggcccgggaaggcgggguc

SEQ ID NO: 2170935 - RNA, 19 nt, Artificial Sequence
  Description of Artificial Sequence: Synthetic oligonucleotide
cccgggacgaaggacacgu

SEQ ID NO: 2170936 - RNA, 19 nt, Artificial Sequence
  Description of Artificial Sequence: Synthetic oligonucleotide
cuguggugugggugaaguu

SEQ ID NO: 2170937 - RNA, 19 nt, Artificial Sequence
  Description of Artificial Sequence: Synthetic oligonucleotide
ccagaggucugagucuuua

SEQ ID NO: 2170938 - RNA, 19 nt, Artificial Sequence
  Description of Artificial Sequence: Synthetic oligonucleotide
ggacaugccuuuggccucu

SEQ ID NO: 2170939 - RNA, 19 nt, Artificial Sequence
  Description of Artificial Sequence: Synthetic oligonucleotide
ccgacgcagggcagaucug

SEQ ID NO: 2170940 - RNA, 19 nt, Artificial Sequence
  Description of Artificial Sequence: Synthetic oligonucleotide
gcccgggaaggcggggucc

SEQ ID NO: 2170941 - RNA, 19 nt, Artificial Sequence
  Description of Artificial Sequence: Synthetic oligonucleotide
cagucccagaguugcccau

SEQ ID NO: 2170942 - RNA, 19 nt, Artificial Sequence
  Description of Artificial Sequence: Synthetic oligonucleotide
gggcgauggugacuacacu

SEQ ID NO: 2170943 - RNA, 19 nt, Artificial Sequence
  Description of Artificial Sequence: Synthetic oligonucleotide
ggcccaagcuuagaccuau

SEQ ID NO: 2170944 - RNA, 19 nt, Artificial Sequence
  Description of Artificial Sequence: Synthetic oligonucleotide
gggacgcgcaggcccggga

SEQ ID NO: 2170945 - RNA, 19 nt, Artificial Sequence
  Description of Artificial Sequence: Synthetic oligonucleotide
gggaaggcggggucccgcu

SEQ ID NO: 2170946 - RNA, 19 nt, Artificial Sequence
  Description of Artificial Sequence: Synthetic oligonucleotide
gggucccgcugccaggccu

SEQ ID NO: 2170947 - RNA, 19 nt, Artificial Sequence
  Description of Artificial Sequence: Synthetic oligonucleotide
gcccaagcuuagaccuaug

SEQ ID NO: 2170948 - RNA, 19 nt, Artificial Sequence
  Description of Artificial Sequence: Synthetic oligonucleotide
ccugacacauaaggggccu

SEQ ID NO: 2170949 - RNA, 19 nt, Artificial Sequence
  Description of Artificial Sequence: Synthetic oligonucleotide
caacuccaccaggaagggu

SEQ ID NO: 2170950 - RNA, 19 nt, Artificial Sequence
  Description of Artificial Sequence: Synthetic oligonucleotide
ggggucuuucagguucugu

SEQ ID NO: 2170951 - RNA, 19 nt, Artificial Sequence
  Description of Artificial Sequence: Synthetic oligonucleotide
cggggucccgcugccaggc

SEQ ID NO: 2170952 - RNA, 19 nt, Artificial Sequence
  Description of Artificial Sequence: Synthetic oligonucleotide
cgcaggcccgggaacuguc

SEQ ID NO: 2170953 - RNA, 19 nt, Artificial Sequence
  Description of Artificial Sequence: Synthetic oligonucleotide
cucugccuguggugugggu

SEQ ID NO: 2170954 - RNA, 19 nt, Artificial Sequence
  Description of Artificial Sequence: Synthetic oligonucleotide
ccgggacgaaggacacguc

SEQ ID NO: 2170955 - RNA, 19 nt, Artificial Sequence
  Description of Artificial Sequence: Synthetic oligonucleotide
ccucucggaaggccaggaa

SEQ ID NO: 2170956 - RNA, 19 nt, Artificial Sequence
  Description of Artificial Sequence: Synthetic oligonucleotide
ccccgggacgaaggacacg

SEQ ID NO: 2170957 - RNA, 19 nt, Artificial Sequence
  Description of Artificial Sequence: Synthetic oligonucleotide
ccauguggcuguccucaua

SEQ ID NO: 2170958 - RNA, 19 nt, Artificial Sequence
  Description of Artificial Sequence: Synthetic oligonucleotide
cgacccuccgcaggcccgg

SEQ ID NO: 2170959 - RNA, 19 nt, Artificial Sequence
  Description of Artificial Sequence: Synthetic oligonucleotide
ggcaugaggccuggcuccu

SEQ ID NO: 2170960 - RNA, 19 nt, Artificial Sequence
  Description of Artificial Sequence: Synthetic oligonucleotide
ccgcugccaggccuccgug

SEQ ID NO: 2170961 - RNA, 19 nt, Artificial Sequence
  Description of Artificial Sequence: Synthetic oligonucleotide
cccuccgcaggcccgggaa

SEQ ID NO: 2170962 - RNA, 19 nt, Artificial Sequence
  Description of Artificial Sequence: Synthetic oligonucleotide
ccauuggcccaagcuuaga

SEQ ID NO: 2170963 - RNA, 19 nt, Artificial Sequence
  Description of Artificial Sequence: Synthetic oligonucleotide
gggcaccacgcgcgucuuc

SEQ ID NO: 2170964 - RNA, 19 nt, Artificial Sequence
  Description of Artificial Sequence: Synthetic oligonucleotide
cugacacauaaggggccuu

SEQ ID NO: 2170965 - RNA, 19 nt, Artificial Sequence
  Description of Artificial Sequence: Synthetic oligonucleotide
gccagugauggaggaggcu

SEQ ID NO: 2170966 - RNA, 19 nt, Artificial Sequence
  Description of Artificial Sequence: Synthetic oligonucleotide
gcaccacgagggacgcgca

SEQ ID NO: 2170967 - RNA, 19 nt, Artificial Sequence
  Description of Artificial Sequence: Synthetic oligonucleotide
cgcgcgucuucagccgggc

SEQ ID NO: 2170968 - RNA, 19 nt, Artificial Sequence
  Description of Artificial Sequence: Synthetic oligonucleotide
ccugggcaccacgcgcguc

SEQ ID NO: 2170969 - RNA, 19 nt, Artificial Sequence
  Description of Artificial Sequence: Synthetic oligonucleotide
gucuucagccgggcuuguu

SEQ ID NO: 2170970 - RNA, 19 nt, Artificial Sequence
  Description of Artificial Sequence: Synthetic oligonucleotide
ccuugugcagggaguuguu

SEQ ID NO: 2170971 - RNA, 19 nt, Artificial Sequence
  Description of Artificial Sequence: Synthetic oligonucleotide
gccaccccaaagccucguu

SEQ ID NO: 2170972 - RNA, 19 nt, Artificial Sequence
  Description of Artificial Sequence: Synthetic oligonucleotide
gcgcgucuucagccgggcu

SEQ ID NO: 2170973 - RNA, 19 nt, Artificial Sequence
  Description of Artificial Sequence: Synthetic oligonucleotide
ccuggagcucuggguagcu

SEQ ID NO: 2170974 - RNA, 19 nt, Artificial Sequence
  Description of Artificial Sequence: Synthetic oligonucleotide
gcgcaggcccgggaacugu

SEQ ID NO: 2170975 - RNA, 19 nt, Artificial Sequence
  Description of Artificial Sequence: Synthetic oligonucleotide
ccgugucccugggcaccac

SEQ ID NO: 2170976 - RNA, 19 nt, Artificial Sequence
  Description of Artificial Sequence: Synthetic oligonucleotide
cccugggcaccacgcgcgu

SEQ ID NO: 2170977 - RNA, 19 nt, Artificial Sequence
  Description of Artificial Sequence: Synthetic oligonucleotide
cgucuucagccgggcuugu

SEQ ID NO: 2170978 - RNA, 19 nt, Artificial Sequence
  Description of Artificial Sequence: Synthetic oligonucleotide
agagauguuauacugaucg

SEQ ID NO: 2170979 - RNA, 19 nt, Artificial Sequence
  Description of Artificial Sequence: Synthetic oligonucleotide
aaugagauagaugauggcc

SEQ ID NO: 2170980 - RNA, 19 nt, Artificial Sequence
  Description of Artificial Sequence: Synthetic oligonucleotide
aacuauuagucauagaaga

SEQ ID NO: 2170981 - RNA, 19 nt, Artificial Sequence
  Description of Artificial Sequence: Synthetic oligonucleotide
acaacaagaagaaagagac

SEQ ID NO: 2170982 - RNA, 19 nt, Artificial Sequence
  Description of Artificial Sequence: Synthetic oligonucleotide
aacaaugcagaaauguucc

SEQ ID NO: 2170983 - RNA, 19 nt, Artificial Sequence
  Description of Artificial Sequence: Synthetic oligonucleotide
ugaagauugaguaccauug

SEQ ID NO: 2170984 - RNA, 19 nt, Artificial Sequence
  Description of Artificial Sequence: Synthetic oligonucleotide
aagcaaccaaaauacagac

SEQ ID NO: 2170985 - RNA, 19 nt, Artificial Sequence
  Description of Artificial Sequence: Synthetic oligonucleotide
auagacuucugccucaccc

SEQ ID NO: 2170986 - RNA, 19 nt, Artificial Sequence
  Description of Artificial Sequence: Synthetic oligonucleotide
ggaagaauuaaacuggugg

SEQ ID NO: 2170987 - RNA, 19 nt, Artificial Sequence
  Description of Artificial Sequence: Synthetic oligonucleotide
uugaauagccagauuauag

SEQ ID NO: 2170988 - RNA, 19 nt, Artificial Sequence
  Description of Artificial Sequence: Synthetic oligonucleotide
ugugguaagugcuauaggc

SEQ ID NO: 2170989 - RNA, 19 nt, Artificial Sequence
  Description of Artificial Sequence: Synthetic oligonucleotide
uguuauacugaucggagug

SEQ ID NO: 2170990 - RNA, 19 nt, Artificial Sequence
  Description of Artificial Sequence: Synthetic oligonucleotide
  modified_base (16)..(16): a, c, u, g, unknown or other
gaugguaagguguccnggg

SEQ ID NO: 2170991 - RNA, 19 nt, Artificial Sequence
  Description of Artificial Sequence: Synthetic oligonucleotide
aaugcagaaauguuccucu

SEQ ID NO: 2170992 - RNA, 19 nt, Artificial Sequence
  Description of Artificial Sequence: Synthetic oligonucleotide
ugucagugcaaugagauag

SEQ ID NO: 2170993 - RNA, 19 nt, Artificial Sequence
  Description of Artificial Sequence: Synthetic oligonucleotide
aggguauucacucauagga

SEQ ID NO: 2170994 - RNA, 19 nt, Artificial Sequence
  Description of Artificial Sequence: Synthetic oligonucleotide
cagauuauagacuucugcc

SEQ ID NO: 2170995 - RNA, 19 nt, Artificial Sequence
  Description of Artificial Sequence: Synthetic oligonucleotide
ugguaguagagauagaggu

SEQ ID NO: 2170996 - RNA, 19 nt, Artificial Sequence
  Description of Artificial Sequence: Synthetic oligonucleotide
auuaccugcagaaaccucc

SEQ ID NO: 2170997 - RNA, 19 nt, Artificial Sequence
  Description of Artificial Sequence: Synthetic oligonucleotide
uacaaguuggcugaagugg

SEQ ID NO: 2170998 - RNA, 19 nt, Artificial Sequence
  Description of Artificial Sequence: Synthetic oligonucleotide
auagaugauggccaaagca

SEQ ID NO: 2170999 - RNA, 19 nt, Artificial Sequence
  Description of Artificial Sequence: Synthetic oligonucleotide
ugaauagccagauuauaga

SEQ ID NO: 2171000 - RNA, 19 nt, Artificial Sequence
  Description of Artificial Sequence: Synthetic oligonucleotide
uuguagagauguuauacug

SEQ ID NO: 2171001 - RNA, 19 nt, Artificial Sequence
  Description of Artificial Sequence: Synthetic oligonucleotide
gcuaaaguagccuugguag

SEQ ID NO: 2171002 - RNA, 19 nt, Artificial Sequence
  Description of Artificial Sequence: Synthetic oligonucleotide
aaagcaaccaaaauacaga

SEQ ID NO: 2171003 - RNA, 19 nt, Artificial Sequence
  Description of Artificial Sequence: Synthetic oligonucleotide
gaacuauugcuggagaagg

SEQ ID NO: 2171004 - RNA, 19 nt, Artificial Sequence
  Description of Artificial Sequence: Synthetic oligonucleotide
ugguucagaacuauuaguc

SEQ ID NO: 2171005 - RNA, 19 nt, Artificial Sequence
  Description of Artificial Sequence: Synthetic oligonucleotide
uuagucauagaagaggcac

SEQ ID NO: 2171006 - RNA, 19 nt, Artificial Sequence
  Description of Artificial Sequence: Synthetic oligonucleotide
gaauagccagauuauagac

SEQ ID NO: 2171007 - RNA, 19 nt, Artificial Sequence
  Description of Artificial Sequence: Synthetic oligonucleotide
gauguuauacugaucggag

SEQ ID NO: 2171008 - RNA, 19 nt, Artificial Sequence
  Description of Artificial Sequence: Synthetic oligonucleotide
aagugguugccacuacugg

SEQ ID NO: 2171009 - RNA, 19 nt, Artificial Sequence
  Description of Artificial Sequence: Synthetic oligonucleotide
ucuaccaccacugaaccug

SEQ ID NO: 2171010 - RNA, 19 nt, Artificial Sequence
  Description of Artificial Sequence: Synthetic oligonucleotide
gaacuauuagucauagaag

SEQ ID NO: 2171011 - RNA, 19 nt, Artificial Sequence
  Description of Artificial Sequence: Synthetic oligonucleotide
gauuauagacuucugccuc

SEQ ID NO: 2171012 - RNA, 19 nt, Artificial Sequence
  Description of Artificial Sequence: Synthetic oligonucleotide
uagagcccaacacagagcu

SEQ ID NO: 2171013 - RNA, 19 nt, Artificial Sequence
  Description of Artificial Sequence: Synthetic oligonucleotide
guaguagagauagaggugc

SEQ ID NO: 2171014 - RNA, 19 nt, Artificial Sequence
  Description of Artificial Sequence: Synthetic oligonucleotide
ucauagaagaggcaccacu

SEQ ID NO: 2171015 - RNA, 19 nt, Artificial Sequence
  Description of Artificial Sequence: Synthetic oligonucleotide
ucuugauaguaguuggagc

SEQ ID NO: 2171016 - RNA, 19 nt, Artificial Sequence
  Description of Artificial Sequence: Synthetic oligonucleotide
ugcaaugagauagaugaug

SEQ ID NO: 2171017 - RNA, 19 nt, Artificial Sequence
  Description of Artificial Sequence: Synthetic oligonucleotide
agugguugccacuacuggg

SEQ ID NO: 2171018 - RNA, 19 nt, Artificial Sequence
  Description of Artificial Sequence: Synthetic oligonucleotide
uuguagacuggggugaugg

SEQ ID NO: 2171019 - RNA, 19 nt, Artificial Sequence
  Description of Artificial Sequence: Synthetic oligonucleotide
gaauuaaacuggugguucc

SEQ ID NO: 2171020 - RNA, 19 nt, Artificial Sequence
  Description of Artificial Sequence: Synthetic oligonucleotide
auuguagagauguuauacu

SEQ ID NO: 2171021 - RNA, 19 nt, Artificial Sequence
  Description of Artificial Sequence: Synthetic oligonucleotide
uuuugaauagccagauuau

SEQ ID NO: 2171022 - RNA, 19 nt, Artificial Sequence
  Description of Artificial Sequence: Synthetic oligonucleotide
auacugaucggaguggugg

SEQ ID NO: 2171023 - RNA, 19 nt, Artificial Sequence
  Description of Artificial Sequence: Synthetic oligonucleotide
acugacacacugucagugc

SEQ ID NO: 2171024 - RNA, 19 nt, Artificial Sequence
  Description of Artificial Sequence: Synthetic oligonucleotide
  modified_base (4)..(4): a, c, u, g, unknown or other
uccnggguugggaagaugu

SEQ ID NO: 2171025 - RNA, 19 nt, Artificial Sequence
  Description of Artificial Sequence: Synthetic oligonucleotide
cuggguugguguaagagag

SEQ ID NO: 2171026 - RNA, 19 nt, Artificial Sequence
  Description of Artificial Sequence: Synthetic oligonucleotide
ugaacuauugcuggagaag

SEQ ID NO: 2171027 - RNA, 19 nt, Artificial Sequence
  Description of Artificial Sequence: Synthetic oligonucleotide
accaguagggcuaugcccc

SEQ ID NO: 2171028 - RNA, 19 nt, Artificial Sequence
  Description of Artificial Sequence: Synthetic oligonucleotide
auagccagauuauagacuu

SEQ ID NO: 2171029 - RNA, 19 nt, Artificial Sequence
  Description of Artificial Sequence: Synthetic oligonucleotide
uggggugaacuauugcugg

SEQ ID NO: 2171030 - RNA, 19 nt, Artificial Sequence
  Description of Artificial Sequence: Synthetic oligonucleotide
uugaguaccauugccaacu

SEQ ID NO: 2171031 - RNA, 19 nt, Artificial Sequence
  Description of Artificial Sequence: Synthetic oligonucleotide
gaagauugaguaccauugc

SEQ ID NO: 2171032 - RNA, 19 nt, Artificial Sequence
  Description of Artificial Sequence: Synthetic oligonucleotide
aaucacaguugagucuacc

SEQ ID NO: 2171033 - RNA, 19 nt, Artificial Sequence
  Description of Artificial Sequence: Synthetic oligonucleotide
guugguguaagagaggcug

SEQ ID NO: 2171034 - RNA, 19 nt, Artificial Sequence
  Description of Artificial Sequence: Synthetic oligonucleotide
uucaguucuugauaguagu

SEQ ID NO: 2171035 - RNA, 19 nt, Artificial Sequence
  Description of Artificial Sequence: Synthetic oligonucleotide
ugaaccugaccugaacucg

SEQ ID NO: 2171036 - RNA, 19 nt, Artificial Sequence
  Description of Artificial Sequence: Synthetic oligonucleotide
agaaauguuccucuucagu

SEQ ID NO: 2171037 - RNA, 19 nt, Artificial Sequence
  Description of Artificial Sequence: Synthetic oligonucleotide
ucacaguugagucuaccac

SEQ ID NO: 2171038 - RNA, 19 nt, Artificial Sequence
  Description of Artificial Sequence: Synthetic oligonucleotide
guauucacucauaggaugg

SEQ ID NO: 2171039 - RNA, 19 nt, Artificial Sequence
  Description of Artificial Sequence: Synthetic oligonucleotide
ugaacugguagcugauucc

SEQ ID NO: 2171040 - RNA, 19 nt, Artificial Sequence
  Description of Artificial Sequence: Synthetic oligonucleotide
guagguaggguauucacuc

SEQ ID NO: 2171041 - RNA, 19 nt, Artificial Sequence
  Description of Artificial Sequence: Synthetic oligonucleotide
ugacuugcccuacaaguug

SEQ ID NO: 2171042 - RNA, 19 nt, Artificial Sequence
  Description of Artificial Sequence: Synthetic oligonucleotide
uaggguauucacucauagg

SEQ ID NO: 2171043 - RNA, 19 nt, Artificial Sequence
  Description of Artificial Sequence: Synthetic oligonucleotide
auugaguaccauugccaac

SEQ ID NO: 2171044 - RNA, 19 nt, Artificial Sequence
  Description of Artificial Sequence: Synthetic oligonucleotide
gaagguaggggagagugcc

SEQ ID NO: 2171045 - RNA, 19 nt, Artificial Sequence
  Description of Artificial Sequence: Synthetic oligonucleotide
aauagccagauuauagacu

SEQ ID NO: 2171046 - RNA, 19 nt, Artificial Sequence
  Description of Artificial Sequence: Synthetic oligonucleotide
guaggguauucacucauag

SEQ ID NO: 2171047 - RNA, 19 nt, Artificial Sequence
  Description of Artificial Sequence: Synthetic oligonucleotide
uagagauccccagaaaagc

SEQ ID NO: 2171048 - RNA, 19 nt, Artificial Sequence
  Description of Artificial Sequence: Synthetic oligonucleotide
ugggacugaagauugagua

SEQ ID NO: 2171049 - RNA, 19 nt, Artificial Sequence
  Description of Artificial Sequence: Synthetic oligonucleotide
guccauaguucuuucggcg

SEQ ID NO: 2171050 - RNA, 19 nt, Artificial Sequence
  Description of Artificial Sequence: Synthetic oligonucleotide
auaguagagauccccagaa

SEQ ID NO: 2171051 - RNA, 19 nt, Artificial Sequence
  Description of Artificial Sequence: Synthetic oligonucleotide
cuacguuugguacugccag

SEQ ID NO: 2171052 - RNA, 19 nt, Artificial Sequence
  Description of Artificial Sequence: Synthetic oligonucleotide
gaaaccuccucgauagggg

SEQ ID NO: 2171053 - RNA, 19 nt, Artificial Sequence
  Description of Artificial Sequence: Synthetic oligonucleotide
ugaacucgauaguagagau

SEQ ID NO: 2171054 - RNA, 19 nt, Artificial Sequence
  Description of Artificial Sequence: Synthetic oligonucleotide
cuuucggcggcacugacac

SEQ ID NO: 2171055 - RNA, 19 nt, Artificial Sequence
  Description of Artificial Sequence: Synthetic oligonucleotide
acugaaccugaccugaacu

SEQ ID NO: 2171056 - RNA, 19 nt, Artificial Sequence
  Description of Artificial Sequence: Synthetic oligonucleotide
agggcuaugccccagccug

SEQ ID NO: 2171057 - RNA, 19 nt, Artificial Sequence
  Description of Artificial Sequence: Synthetic oligonucleotide
uccaaagucugguucagaa

SEQ ID NO: 2171058 - RNA, 19 nt, Artificial Sequence
  Description of Artificial Sequence: Synthetic oligonucleotide
gauagaugauggccaaagc

SEQ ID NO: 2171059 - RNA, 19 nt, Artificial Sequence
  Description of Artificial Sequence: Synthetic oligonucleotide
uccaacagacaccuggggu

SEQ ID NO: 2171060 - RNA, 19 nt, Artificial Sequence
  Description of Artificial Sequence: Synthetic oligonucleotide
agaggugccacuguaaacu

SEQ ID NO: 2171061 - RNA, 19 nt, Artificial Sequence
  Description of Artificial Sequence: Synthetic oligonucleotide
gauggcagaggcuaaagua

SEQ ID NO: 2171062 - RNA, 19 nt, Artificial Sequence
  Description of Artificial Sequence: Synthetic oligonucleotide
ucgauaguagagaucccca

SEQ ID NO: 2171063 - RNA, 19 nt, Artificial Sequence
  Description of Artificial Sequence: Synthetic oligonucleotide
uaagagaggcugcugccgc

SEQ ID NO: 2171064 - RNA, 19 nt, Artificial Sequence
  Description of Artificial Sequence: Synthetic oligonucleotide
uccagcgcagagcugguag

SEQ ID NO: 2171065 - RNA, 19 nt, Artificial Sequence
  Description of Artificial Sequence: Synthetic oligonucleotide
aagugcuauaggcaauggu

SEQ ID NO: 2171066 - RNA, 19 nt, Artificial Sequence
  Description of Artificial Sequence: Synthetic oligonucleotide
acuauuagucauagaagag

SEQ ID NO: 2171067 - RNA, 19 nt, Artificial Sequence
  Description of Artificial Sequence: Synthetic oligonucleotide
aguugagucuaccaccacu

SEQ ID NO: 2171068 - RNA, 19 nt, Artificial Sequence
  Description of Artificial Sequence: Synthetic oligonucleotide
gguauucacucauaggaug

SEQ ID NO: 2171069 - RNA, 19 nt, Artificial Sequence
  Description of Artificial Sequence: Synthetic oligonucleotide
ucgauaggggcuacguuug

SEQ ID NO: 2171070 - RNA, 19 nt, Artificial Sequence
  Description of Artificial Sequence: Synthetic oligonucleotide
gauaguagagauccccaga

SEQ ID NO: 2171071 - RNA, 19 nt, Artificial Sequence
  Description of Artificial Sequence: Synthetic oligonucleotide
agagacuccaacagacacc

SEQ ID NO: 2171072 - RNA, 19 nt, Artificial Sequence
  Description of Artificial Sequence: Synthetic oligonucleotide
aguuguaguagccauugua

SEQ ID NO: 2171073 - RNA, 19 nt, Artificial Sequence
  Description of Artificial Sequence: Synthetic oligonucleotide
cuugauaguaguuggagcu

SEQ ID NO: 2171074 - RNA, 19 nt, Artificial Sequence
  Description of Artificial Sequence: Synthetic oligonucleotide
accauugccaacuggaguu

SEQ ID NO: 2171075 - RNA, 19 nt, Artificial Sequence
  Description of Artificial Sequence: Synthetic oligonucleotide
guagagauccccagaaaag

SEQ ID NO: 2171076 - RNA, 19 nt, Artificial Sequence
  Description of Artificial Sequence: Synthetic oligonucleotide
aucacaguugagucuacca

SEQ ID NO: 2171077 - RNA, 19 nt, Artificial Sequence
  Description of Artificial Sequence: Synthetic oligonucleotide
aauuaaacuggugguucca

SEQ ID NO: 2171078 - RNA, 19 nt, Artificial Sequence
  Description of Artificial Sequence: Synthetic oligonucleotide
cucgauaguagagaucccc

SEQ ID NO: 2171079 - RNA, 19 nt, Artificial Sequence
  Description of Artificial Sequence: Synthetic oligonucleotide
aggaagaaaacugcaucuc

SEQ ID NO: 2171080 - RNA, 19 nt, Artificial Sequence
  Description of Artificial Sequence: Synthetic oligonucleotide
ugaagugguugccacuacu

SEQ ID NO: 2171081 - RNA, 19 nt, Artificial Sequence
  Description of Artificial Sequence: Synthetic oligonucleotide
uucagaacuauuagucaua

SEQ ID NO: 2171082 - RNA, 19 nt, Artificial Sequence
  Description of Artificial Sequence: Synthetic oligonucleotide
ucccggaaaaucacaguug

SEQ ID NO: 2171083 - RNA, 19 nt, Artificial Sequence
  Description of Artificial Sequence: Synthetic oligonucleotide
agcaccaguagggcuaugc

SEQ ID NO: 2171084 - RNA, 19 nt, Artificial Sequence
  Description of Artificial Sequence: Synthetic oligonucleotide
cuacaaguuggcugaagug

SEQ ID NO: 2171085 - RNA, 19 nt, Artificial Sequence
  Description of Artificial Sequence: Synthetic oligonucleotide
auggcagaggcuaaaguag

SEQ ID NO: 2171086 - RNA, 19 nt, Artificial Sequence
  Description of Artificial Sequence: Synthetic oligonucleotide
gaggcuaaaguagccuugg

SEQ ID NO: 2171087 - RNA, 19 nt, Artificial Sequence
  Description of Artificial Sequence: Synthetic oligonucleotide
agacaacaagaagaaagag

SEQ ID NO: 2171088 - RNA, 19 nt, Artificial Sequence
  Description of Artificial Sequence: Synthetic oligonucleotide
agcaaccaaaauacagacc

SEQ ID NO: 2171089 - RNA, 19 nt, Artificial Sequence
  Description of Artificial Sequence: Synthetic oligonucleotide
gagucuaccaccacugaac

SEQ ID NO: 2171090 - RNA, 19 nt, Artificial Sequence
  Description of Artificial Sequence: Synthetic oligonucleotide
uaccauugccaacuggagu

SEQ ID NO: 2171091 - RNA, 19 nt, Artificial Sequence
  Description of Artificial Sequence: Synthetic oligonucleotide
guugagucuaccaccacug

SEQ ID NO: 2171092 - RNA, 19 nt, Artificial Sequence
  Description of Artificial Sequence: Synthetic oligonucleotide
ugagucuaccaccacugaa

SEQ ID NO: 2171093 - RNA, 19 nt, Artificial Sequence
  Description of Artificial Sequence: Synthetic oligonucleotide
agugcuauaggcaauggua

SEQ ID NO: 2171094 - RNA, 19 nt, Artificial Sequence
  Description of Artificial Sequence: Synthetic oligonucleotide
gaagugguugccacuacug

SEQ ID NO: 2171095 - RNA, 19 nt, Artificial Sequence
  Description of Artificial Sequence: Synthetic oligonucleotide
uacuggguugguguaagag

SEQ ID NO: 2171096 - RNA, 19 nt, Artificial Sequence
  Description of Artificial Sequence: Synthetic oligonucleotide
caaugagauagaugauggc

SEQ ID NO: 2171097 - RNA, 19 nt, Artificial Sequence
  Description of Artificial Sequence: Synthetic oligonucleotide
agagauagaggugccacug

SEQ ID NO: 2171098 - RNA, 19 nt, Artificial Sequence
  Description of Artificial Sequence: Synthetic oligonucleotide
uggaguggucuccaaaguc

SEQ ID NO: 2171099 - RNA, 19 nt, Artificial Sequence
  Description of Artificial Sequence: Synthetic oligonucleotide
caagacugggcagaggaag

SEQ ID NO: 2171100 - RNA, 19 nt, Artificial Sequence
  Description of Artificial Sequence: Synthetic oligonucleotide
agccauuguagacuggggu

SEQ ID NO: 2171101 - RNA, 19 nt, Artificial Sequence
  Description of Artificial Sequence: Synthetic oligonucleotide
auagaggugccacuguaaa

SEQ ID NO: 2171102 - RNA, 19 nt, Artificial Sequence
  Description of Artificial Sequence: Synthetic oligonucleotide
uacguuugguacugccagg

SEQ ID NO: 2171103 - RNA, 19 nt, Artificial Sequence
  Description of Artificial Sequence: Synthetic oligonucleotide
ugcagaaauguuccucuuc

SEQ ID NO: 2171104 - RNA, 19 nt, Artificial Sequence
  Description of Artificial Sequence: Synthetic oligonucleotide
ugauggcagaggcuaaagu

SEQ ID NO: 2171105 - RNA, 19 nt, Artificial Sequence
  Description of Artificial Sequence: Synthetic oligonucleotide
ugagauagaugauggccaa

SEQ ID NO: 2171106 - RNA, 19 nt, Artificial Sequence
  Description of Artificial Sequence: Synthetic oligonucleotide
caccaguagggcuaugccc

SEQ ID NO: 2171107 - RNA, 19 nt, Artificial Sequence
  Description of Artificial Sequence: Synthetic oligonucleotide
agauugaguaccauugcca

SEQ ID NO: 2171108 - RNA, 19 nt, Artificial Sequence
  Description of Artificial Sequence: Synthetic oligonucleotide
uugguguaagagaggcugc

SEQ ID NO: 2171109 - RNA, 19 nt, Artificial Sequence
  Description of Artificial Sequence: Synthetic oligonucleotide
cuggggugaacuauugcug

SEQ ID NO: 2171110 - RNA, 19 nt, Artificial Sequence
  Description of Artificial Sequence: Synthetic oligonucleotide
auguuauacugaucggagu

SEQ ID NO: 2171111 - RNA, 19 nt, Artificial Sequence
  Description of Artificial Sequence: Synthetic oligonucleotide
accugaacucgauaguaga

SEQ ID NO: 2171112 - RNA, 19 nt, Artificial Sequence
  Description of Artificial Sequence: Synthetic oligonucleotide
caccaaggagccauuguag

SEQ ID NO: 2171113 - RNA, 19 nt, Artificial Sequence
  Description of Artificial Sequence: Synthetic oligonucleotide
aacacagagcugguaguug

SEQ ID NO: 2171114 - RNA, 19 nt, Artificial Sequence
  Description of Artificial Sequence: Synthetic oligonucleotide
ggacugaagauugaguacc

SEQ ID NO: 2171115 - RNA, 19 nt, Artificial Sequence
  Description of Artificial Sequence: Synthetic oligonucleotide
guagccauuguagagaugu

SEQ ID NO: 2171116 - RNA, 19 nt, Artificial Sequence
  Description of Artificial Sequence: Synthetic oligonucleotide
guaagagaggcugcugccg

SEQ ID NO: 2171117 - RNA, 19 nt, Artificial Sequence
  Description of Artificial Sequence: Synthetic oligonucleotide
cauagcguccaugagugug

SEQ ID NO: 2171118 - RNA, 19 nt, Artificial Sequence
  Description of Artificial Sequence: Synthetic oligonucleotide
ugcuauaggcaaugguacu

SEQ ID NO: 2171119 - RNA, 19 nt, Artificial Sequence
  Description of Artificial Sequence: Synthetic oligonucleotide
uggguugguguaagagagg

SEQ ID NO: 2171120 - RNA, 19 nt, Artificial Sequence
  Description of Artificial Sequence: Synthetic oligonucleotide
caguucuugauaguaguug

SEQ ID NO: 2171121 - RNA, 19 nt, Artificial Sequence
  Description of Artificial Sequence: Synthetic oligonucleotide
uuauacugaucggaguggu

SEQ ID NO: 2171122 - RNA, 19 nt, Artificial Sequence
  Description of Artificial Sequence: Synthetic oligonucleotide
cugaaccugaccugaacuc

SEQ ID NO: 2171123 - RNA, 19 nt, Artificial Sequence
  Description of Artificial Sequence: Synthetic oligonucleotide
uugauaguaguuggagcug

SEQ ID NO: 2171124 - RNA, 19 nt, Artificial Sequence
  Description of Artificial Sequence: Synthetic oligonucleotide
uaguagagauagaggugcc

SEQ ID NO: 2171125 - RNA, 19 nt, Artificial Sequence
  Description of Artificial Sequence: Synthetic oligonucleotide
ccagauuauagacuucugc

SEQ ID NO: 2171126 - RNA, 19 nt, Artificial Sequence
  Description of Artificial Sequence: Synthetic oligonucleotide
cucauaggaugguaaggug

SEQ ID NO: 2171127 - RNA, 19 nt, Artificial Sequence
  Description of Artificial Sequence: Synthetic oligonucleotide
uuaccugcagaaaccuccu

SEQ ID NO: 2171128 - RNA, 19 nt, Artificial Sequence
  Description of Artificial Sequence: Synthetic oligonucleotide
uucggcggcacugacacac

SEQ ID NO: 2171129 - RNA, 19 nt, Artificial Sequence
  Description of Artificial Sequence: Synthetic oligonucleotide
cuaugccccagccugguac

SEQ ID NO: 2171130 - RNA, 19 nt, Artificial Sequence
  Description of Artificial Sequence: Synthetic oligonucleotide
uggugguuccaaaugugaa

SEQ ID NO: 2171131 - RNA, 19 nt, Artificial Sequence
  Description of Artificial Sequence: Synthetic oligonucleotide
agucauagaagaggcacca

SEQ ID NO: 2171132 - RNA, 19 nt, Artificial Sequence
  Description of Artificial Sequence: Synthetic oligonucleotide
gaguaccauugccaacugg

SEQ ID NO: 2171133 - RNA, 19 nt, Artificial Sequence
  Description of Artificial Sequence: Synthetic oligonucleotide
ccugaccugaacucgauag

SEQ ID NO: 2171134 - RNA, 19 nt, Artificial Sequence
  Description of Artificial Sequence: Synthetic oligonucleotide
auagcguccaugagugugg

SEQ ID NO: 2171135 - RNA, 19 nt, Artificial Sequence
  Description of Artificial Sequence: Synthetic oligonucleotide
guagagauagaggugccac

SEQ ID NO: 2171136 - RNA, 19 nt, Artificial Sequence
  Description of Artificial Sequence: Synthetic oligonucleotide
  modified_base (18)..(18): a, c, u, g, unknown or other
aggaugguaagguguccng

SEQ ID NO: 2171137 - RNA, 19 nt, Artificial Sequence
  Description of Artificial Sequence: Synthetic oligonucleotide
acguuugguacugccaggg

SEQ ID NO: 2171138 - RNA, 19 nt, Artificial Sequence
  Description of Artificial Sequence: Synthetic oligonucleotide
cacucauaggaugguaagg

SEQ ID NO: 2171139 - RNA, 19 nt, Artificial Sequence
  Description of Artificial Sequence: Synthetic oligonucleotide
agccagauuauagacuucu

SEQ ID NO: 2171140 - RNA, 19 nt, Artificial Sequence
  Description of Artificial Sequence: Synthetic oligonucleotide
  modified_base (19)..(19): a, c, u, g, unknown or other
uaggaugguaagguguccn

SEQ ID NO: 2171141 - RNA, 19 nt, Artificial Sequence
  Description of Artificial Sequence: Synthetic oligonucleotide
uaguagccauuguagagau

SEQ ID NO: 2171142 - RNA, 19 nt, Artificial Sequence
  Description of Artificial Sequence: Synthetic oligonucleotide
uagagauagaggugccacu

SEQ ID NO: 2171143 - RNA, 19 nt, Artificial Sequence
  Description of Artificial Sequence: Synthetic oligonucleotide
uacugaucggagugguggc

SEQ ID NO: 2171144 - RNA, 19 nt, Artificial Sequence
  Description of Artificial Sequence: Synthetic oligonucleotide
  modified_base (2)..(2): a, c, u, g, unknown or other
cnggguugggaagaugucc

SEQ ID NO: 2171145 - RNA, 19 nt, Artificial Sequence
  Description of Artificial Sequence: Synthetic oligonucleotide
ucuuucggcggcacugaca

SEQ ID NO: 2171146 - RNA, 19 nt, Artificial Sequence
  Description of Artificial Sequence: Synthetic oligonucleotide
aacuggaguggucuccaaa

SEQ ID NO: 2171147 - RNA, 19 nt, Artificial Sequence
  Description of Artificial Sequence: Synthetic oligonucleotide
gaccugaacucgauaguag

SEQ ID NO: 2171148 - RNA, 19 nt, Artificial Sequence
  Description of Artificial Sequence: Synthetic oligonucleotide
  modified_base (10)..(10): a, c, u, g, unknown or other
aagguguccnggguuggga

SEQ ID NO: 2171149 - RNA, 19 nt, Artificial Sequence
  Description of Artificial Sequence: Synthetic oligonucleotide
uaugccccagccugguacc

SEQ ID NO: 2171150 - RNA, 19 nt, Artificial Sequence
  Description of Artificial Sequence: Synthetic oligonucleotide
gccuugguaguagagauag

SEQ ID NO: 2171151 - RNA, 19 nt, Artificial Sequence
  Description of Artificial Sequence: Synthetic oligonucleotide
ggagccauuguagacuggg

SEQ ID NO: 2171152 - RNA, 19 nt, Artificial Sequence
  Description of Artificial Sequence: Synthetic oligonucleotide
ugaguaccauugccaacug

SEQ ID NO: 2171153 - RNA, 19 nt, Artificial Sequence
  Description of Artificial Sequence: Synthetic oligonucleotide
uauagacuucugccucacc

SEQ ID NO: 2171154 - RNA, 19 nt, Artificial Sequence
  Description of Artificial Sequence: Synthetic oligonucleotide
acuacuggguugguguaag

SEQ ID NO: 2171155 - RNA, 19 nt, Artificial Sequence
  Description of Artificial Sequence: Synthetic oligonucleotide
uugagucuaccaccacuga

SEQ ID NO: 2171156 - RNA, 19 nt, Artificial Sequence
  Description of Artificial Sequence: Synthetic oligonucleotide
acaaugcagaaauguuccu

SEQ ID NO: 2171157 - RNA, 19 nt, Artificial Sequence
  Description of Artificial Sequence: Synthetic oligonucleotide
uaggggcuacguuugguac

SEQ ID NO: 2171158 - RNA, 19 nt, Artificial Sequence
  Description of Artificial Sequence: Synthetic oligonucleotide
ugaccugaacucgauagua

SEQ ID NO: 2171159 - RNA, 19 nt, Artificial Sequence
  Description of Artificial Sequence: Synthetic oligonucleotide
caaugcagaaauguuccuc

SEQ ID NO: 2171160 - RNA, 19 nt, Artificial Sequence
  Description of Artificial Sequence: Synthetic oligonucleotide
ugaucggagugguggcuag

SEQ ID NO: 2171161 - RNA, 19 nt, Artificial Sequence
  Description of Artificial Sequence: Synthetic oligonucleotide
gguucagaacuauuaguca

SEQ ID NO: 2171162 - RNA, 19 nt, Artificial Sequence
  Description of Artificial Sequence: Synthetic oligonucleotide
uagagauguuauacugauc

SEQ ID NO: 2171163 - RNA, 19 nt, Artificial Sequence
  Description of Artificial Sequence: Synthetic oligonucleotide
  modified_base (11)..(11): a, c, u, g, unknown or other
uaagguguccnggguuggg

SEQ ID NO: 2171164 - RNA, 19 nt, Artificial Sequence
  Description of Artificial Sequence: Synthetic oligonucleotide
augauggccaaagcaacca

SEQ ID NO: 2171165 - RNA, 19 nt, Artificial Sequence
  Description of Artificial Sequence: Synthetic oligonucleotide
guaccccaggccaagacug

SEQ ID NO: 2171166 - RNA, 19 nt, Artificial Sequence
  Description of Artificial Sequence: Synthetic oligonucleotide
uagguaggguauucacuca

SEQ ID NO: 2171167 - RNA, 19 nt, Artificial Sequence
  Description of Artificial Sequence: Synthetic oligonucleotide
cagugcaaugagauagaug

SEQ ID NO: 2171168 - RNA, 19 nt, Artificial Sequence
  Description of Artificial Sequence: Synthetic oligonucleotide
gcguccaugagugugguag

SEQ ID NO: 2171169 - RNA, 19 nt, Artificial Sequence
  Description of Artificial Sequence: Synthetic oligonucleotide
agugccgugcugugguaag

SEQ ID NO: 2171170 - RNA, 19 nt, Artificial Sequence
  Description of Artificial Sequence: Synthetic oligonucleotide
uaguagagauccccagaaa

SEQ ID NO: 2171171 - RNA, 19 nt, Artificial Sequence
  Description of Artificial Sequence: Synthetic oligonucleotide
aacuauugcuggagaaggu

SEQ ID NO: 2171172 - RNA, 19 nt, Artificial Sequence
  Description of Artificial Sequence: Synthetic oligonucleotide
agauagaggugccacugua

SEQ ID NO: 2171173 - RNA, 19 nt, Artificial Sequence
  Description of Artificial Sequence: Synthetic oligonucleotide
cacugacacacugucagug

SEQ ID NO: 2171174 - RNA, 19 nt, Artificial Sequence
  Description of Artificial Sequence: Synthetic oligonucleotide
ccaacagacaccuggggug

SEQ ID NO: 2171175 - RNA, 19 nt, Artificial Sequence
  Description of Artificial Sequence: Synthetic oligonucleotide
agcuguccauaguucuuuc

SEQ ID NO: 2171176 - RNA, 19 nt, Artificial Sequence
  Description of Artificial Sequence: Synthetic oligonucleotide
ugauggccaaagcaaccaa

SEQ ID NO: 2171177 - RNA, 19 nt, Artificial Sequence
  Description of Artificial Sequence: Synthetic oligonucleotide
gagugugguagguagggua

SEQ ID NO: 2171178 - RNA, 19 nt, Artificial Sequence
  Description of Artificial Sequence: Synthetic oligonucleotide
acaaguuggcugaaguggu

SEQ ID NO: 2171179 - RNA, 19 nt, Artificial Sequence
  Description of Artificial Sequence: Synthetic oligonucleotide
agauccccagaaaagcuug

SEQ ID NO: 2171180 - RNA, 19 nt, Artificial Sequence
  Description of Artificial Sequence: Synthetic oligonucleotide
auaggggcuacguuuggua

SEQ ID NO: 2171181 - RNA, 19 nt, Artificial Sequence
  Description of Artificial Sequence: Synthetic oligonucleotide
gccauuguagacuggggug

SEQ ID NO: 2171182 - RNA, 19 nt, Artificial Sequence
  Description of Artificial Sequence: Synthetic oligonucleotide
uuauagacuucugccucac

SEQ ID NO: 2171183 - RNA, 19 nt, Artificial Sequence
  Description of Artificial Sequence: Synthetic oligonucleotide
agagauccccagaaaagcu

SEQ ID NO: 2171184 - RNA, 19 nt, Artificial Sequence
  Description of Artificial Sequence: Synthetic oligonucleotide
ggugacuugcccuacaagu

SEQ ID NO: 2171185 - RNA, 19 nt, Artificial Sequence
  Description of Artificial Sequence: Synthetic oligonucleotide
uggccaaagcaaccaaaau

SEQ ID NO: 2171186 - RNA, 19 nt, Artificial Sequence
  Description of Artificial Sequence: Synthetic oligonucleotide
ugccaacuggaguuguagu

SEQ ID NO: 2171187 - RNA, 19 nt, Artificial Sequence
  Description of Artificial Sequence: Synthetic oligonucleotide
  modified_base (15)..(15): a, c, u, g, unknown or other
augguaagguguccngggu

SEQ ID NO: 2171188 - RNA, 19 nt, Artificial Sequence
  Description of Artificial Sequence: Synthetic oligonucleotide
auaguucuuucggcggcac

SEQ ID NO: 2171189 - RNA, 19 nt, Artificial Sequence
  Description of Artificial Sequence: Synthetic oligonucleotide
agguaggguauucacucau

SEQ ID NO: 2171190 - RNA, 19 nt, Artificial Sequence
  Description of Artificial Sequence: Synthetic oligonucleotide
gguaguagagauagaggug

SEQ ID NO: 2171191 - RNA, 19 nt, Artificial Sequence
  Description of Artificial Sequence: Synthetic oligonucleotide
guaccauugccaacuggag

SEQ ID NO: 2171192 - RNA, 19 nt, Artificial Sequence
  Description of Artificial Sequence: Synthetic oligonucleotide
aacugguagcugauuccag

SEQ ID NO: 2171193 - RNA, 19 nt, Artificial Sequence
  Description of Artificial Sequence: Synthetic oligonucleotide
accacugaaccugaccuga

SEQ ID NO: 2171194 - RNA, 19 nt, Artificial Sequence
  Description of Artificial Sequence: Synthetic oligonucleotide
ggccaaagcaaccaaaaua

SEQ ID NO: 2171195 - RNA, 19 nt, Artificial Sequence
  Description of Artificial Sequence: Synthetic oligonucleotide
gugguuccaaaugugaaaa

SEQ ID NO: 2171196 - RNA, 19 nt, Artificial Sequence
  Description of Artificial Sequence: Synthetic oligonucleotide
ucugccucacccucccgga

SEQ ID NO: 2171197 - RNA, 19 nt, Artificial Sequence
  Description of Artificial Sequence: Synthetic oligonucleotide
gugaacuauugcuggagaa

SEQ ID NO: 2171198 - RNA, 19 nt, Artificial Sequence
  Description of Artificial Sequence: Synthetic oligonucleotide
ccugaacucgauaguagag

SEQ ID NO: 2171199 - RNA, 19 nt, Artificial Sequence
  Description of Artificial Sequence: Synthetic oligonucleotide
gagccauuguagacugggg

SEQ ID NO: 2171200 - RNA, 19 nt, Artificial Sequence
  Description of Artificial Sequence: Synthetic oligonucleotide
cugaacucgauaguagaga

SEQ ID NO: 2171201 - RNA, 19 nt, Artificial Sequence
  Description of Artificial Sequence: Synthetic oligonucleotide
auuagucauagaagaggca

SEQ ID NO: 2171202 - RNA, 19 nt, Artificial Sequence
  Description of Artificial Sequence: Synthetic oligonucleotide
ucggagugguggcuagagc

SEQ ID NO: 2171203 - RNA, 19 nt, Artificial Sequence
  Description of Artificial Sequence: Synthetic oligonucleotide
aguagagauagaggugcca

SEQ ID NO: 2171204 - RNA, 19 nt, Artificial Sequence
  Description of Artificial Sequence: Synthetic oligonucleotide
cauuaccugcagaaaccuc

SEQ ID NO: 2171205 - RNA, 19 nt, Artificial Sequence
  Description of Artificial Sequence: Synthetic oligonucleotide
  modified_base (12)..(12): a, c, u, g, unknown or other
guaagguguccnggguugg

SEQ ID NO: 2171206 - RNA, 19 nt, Artificial Sequence
  Description of Artificial Sequence: Synthetic oligonucleotide
guagccuugguaguagaga

SEQ ID NO: 2171207 - RNA, 19 nt, Artificial Sequence
  Description of Artificial Sequence: Synthetic oligonucleotide
ugugguagguaggguauuc

SEQ ID NO: 2171208 - RNA, 19 nt, Artificial Sequence
  Description of Artificial Sequence: Synthetic oligonucleotide
aggggcuacguuugguacu

SEQ ID NO: 2171209 - RNA, 19 nt, Artificial Sequence
  Description of Artificial Sequence: Synthetic oligonucleotide
cuuccagggaagaauuaaa

SEQ ID NO: 2171210 - RNA, 19 nt, Artificial Sequence
  Description of Artificial Sequence: Synthetic oligonucleotide
gguagcugauuccagcgca

SEQ ID NO: 2171211 - RNA, 19 nt, Artificial Sequence
  Description of Artificial Sequence: Synthetic oligonucleotide
ugguguaagagaggcugcu

SEQ ID NO: 2171212 - RNA, 19 nt, Artificial Sequence
  Description of Artificial Sequence: Synthetic oligonucleotide
auuaaacuggugguuccaa

SEQ ID NO: 2171213 - RNA, 19 nt, Artificial Sequence
  Description of Artificial Sequence: Synthetic oligonucleotide
  modified_base (17)..(17): a, c, u, g, unknown or other
ggaugguaagguguccngg

SEQ ID NO: 2171214 - RNA, 19 nt, Artificial Sequence
  Description of Artificial Sequence: Synthetic oligonucleotide
gauagaggugccacuguaa

SEQ ID NO: 2171215 - RNA, 19 nt, Artificial Sequence
  Description of Artificial Sequence: Synthetic oligonucleotide
gaagaaaacugcaucucau

SEQ ID NO: 2171216 - RNA, 19 nt, Artificial Sequence
  Description of Artificial Sequence: Synthetic oligonucleotide
uaggggagagugccgugcu

SEQ ID NO: 2171217 - RNA, 19 nt, Artificial Sequence
  Description of Artificial Sequence: Synthetic oligonucleotide
uagggcuaugccccagccu

SEQ ID NO: 2171218 - RNA, 19 nt, Artificial Sequence
  Description of Artificial Sequence: Synthetic oligonucleotide
guagggcuaugccccagcc

SEQ ID NO: 2171219 - RNA, 19 nt, Artificial Sequence
  Description of Artificial Sequence: Synthetic oligonucleotide
ucagugcaaugagauagau

SEQ ID NO: 2171220 - RNA, 19 nt, Artificial Sequence
  Description of Artificial Sequence: Synthetic oligonucleotide
agggaagaauuaaacuggu

SEQ ID NO: 2171221 - RNA, 19 nt, Artificial Sequence
  Description of Artificial Sequence: Synthetic oligonucleotide
ugcugccgccauuaccugc

SEQ ID NO: 2171222 - RNA, 19 nt, Artificial Sequence
  Description of Artificial Sequence: Synthetic oligonucleotide
agugugguagguaggguau

SEQ ID NO: 2171223 - RNA, 19 nt, Artificial Sequence
  Description of Artificial Sequence: Synthetic oligonucleotide
uccucgauaggggcuacgu

SEQ ID NO: 2171224 - RNA, 19 nt, Artificial Sequence
  Description of Artificial Sequence: Synthetic oligonucleotide
guaggggagagugccgugc

SEQ ID NO: 2171225 - RNA, 19 nt, Artificial Sequence
  Description of Artificial Sequence: Synthetic oligonucleotide
guagcugauuccagcgcag

SEQ ID NO: 2171226 - RNA, 19 nt, Artificial Sequence
  Description of Artificial Sequence: Synthetic oligonucleotide
acucgauaguagagauccc

SEQ ID NO: 2171227 - RNA, 19 nt, Artificial Sequence
  Description of Artificial Sequence: Synthetic oligonucleotide
auggccaaagcaaccaaaa

SEQ ID NO: 2171228 - RNA, 19 nt, Artificial Sequence
  Description of Artificial Sequence: Synthetic oligonucleotide
cacugaaccugaccugaac

SEQ ID NO: 2171229 - RNA, 19 nt, Artificial Sequence
  Description of Artificial Sequence: Synthetic oligonucleotide
gccauuaccugcagaaacc

SEQ ID NO: 2171230 - RNA, 19 nt, Artificial Sequence
  Description of Artificial Sequence: Synthetic oligonucleotide
uucuuucggcggcacugac

SEQ ID NO: 2171231 - RNA, 19 nt, Artificial Sequence
  Description of Artificial Sequence: Synthetic oligonucleotide
acacacugucagugcaaug

SEQ ID NO: 2171232 - RNA, 19 nt, Artificial Sequence
  Description of Artificial Sequence: Synthetic oligonucleotide
uggcuugggacugaagauu

SEQ ID NO: 2171233 - RNA, 19 nt, Artificial Sequence
  Description of Artificial Sequence: Synthetic oligonucleotide
gaaccugaccugaacucga

SEQ ID NO: 2171234 - RNA, 19 nt, Artificial Sequence
  Description of Artificial Sequence: Synthetic oligonucleotide
gaacucgauaguagagauc

SEQ ID NO: 2171235 - RNA, 19 nt, Artificial Sequence
  Description of Artificial Sequence: Synthetic oligonucleotide
uaguucuuucggcggcacu

SEQ ID NO: 2171236 - RNA, 19 nt, Artificial Sequence
  Description of Artificial Sequence: Synthetic oligonucleotide
ugauuccagcgcagagcug

SEQ ID NO: 2171237 - RNA, 19 nt, Artificial Sequence
  Description of Artificial Sequence: Synthetic oligonucleotide
caccacugaaccugaccug

SEQ ID NO: 2171238 - RNA, 19 nt, Artificial Sequence
  Description of Artificial Sequence: Synthetic oligonucleotide
ugccgugcugugguaagug

SEQ ID NO: 2171239 - RNA, 19 nt, Artificial Sequence
  Description of Artificial Sequence: Synthetic oligonucleotide
ugccucacccucccggaaa

SEQ ID NO: 2171240 - RNA, 19 nt, Artificial Sequence
  Description of Artificial Sequence: Synthetic oligonucleotide
cugguucagaacuauuagu

SEQ ID NO: 2171241 - RNA, 19 nt, Artificial Sequence
  Description of Artificial Sequence: Synthetic oligonucleotide
agccauuguagagauguua

SEQ ID NO: 2171242 - RNA, 19 nt, Artificial Sequence
  Description of Artificial Sequence: Synthetic oligonucleotide
cagccugguaccccaggcc

SEQ ID NO: 2171243 - RNA, 19 nt, Artificial Sequence
  Description of Artificial Sequence: Synthetic oligonucleotide
  modified_base (9)..(9): a, c, u, g, unknown or other
agguguccnggguugggaa

SEQ ID NO: 2171244 - RNA, 19 nt, Artificial Sequence
  Description of Artificial Sequence: Synthetic oligonucleotide
ggugaacuauugcuggaga

SEQ ID NO: 2171245 - RNA, 19 nt, Artificial Sequence
  Description of Artificial Sequence: Synthetic oligonucleotide
cucgauaggggcuacguuu

SEQ ID NO: 2171246 - RNA, 19 nt, Artificial Sequence
  Description of Artificial Sequence: Synthetic oligonucleotide
ugagugugguagguagggu

SEQ ID NO: 2171247 - RNA, 19 nt, Artificial Sequence
  Description of Artificial Sequence: Synthetic oligonucleotide
cagaaaccuccucgauagg

SEQ ID NO: 2171248 - RNA, 19 nt, Artificial Sequence
  Description of Artificial Sequence: Synthetic oligonucleotide
ggcuacguuugguacugcc

SEQ ID NO: 2171249 - RNA, 19 nt, Artificial Sequence
  Description of Artificial Sequence: Synthetic oligonucleotide
ggcacauagcguccaugag

SEQ ID NO: 2171250 - RNA, 19 nt, Artificial Sequence
  Description of Artificial Sequence: Synthetic oligonucleotide
gggcacauagcguccauga

SEQ ID NO: 2171251 - RNA, 19 nt, Artificial Sequence
  Description of Artificial Sequence: Synthetic oligonucleotide
gggugaacuauugcuggag

SEQ ID NO: 2171252 - RNA, 19 nt, Artificial Sequence
  Description of Artificial Sequence: Synthetic oligonucleotide
ggcuaaaguagccuuggua

SEQ ID NO: 2171253 - RNA, 19 nt, Artificial Sequence
  Description of Artificial Sequence: Synthetic oligonucleotide
  modified_base (7)..(7): a, c, u, g, unknown or other
guguccnggguugggaaga

SEQ ID NO: 2171254 - RNA, 19 nt, Artificial Sequence
  Description of Artificial Sequence: Synthetic oligonucleotide
agguaggggagagugccgu

SEQ ID NO: 2171255 - RNA, 19 nt, Artificial Sequence
  Description of Artificial Sequence: Synthetic oligonucleotide
uugcuggagacagggugcu

SEQ ID NO: 2171256 - RNA, 19 nt, Artificial Sequence
  Description of Artificial Sequence: Synthetic oligonucleotide
cuguaaacuggaguggucu

SEQ ID NO: 2171257 - RNA, 19 nt, Artificial Sequence
  Description of Artificial Sequence: Synthetic oligonucleotide
ugcuggcuugggacugaag

SEQ ID NO: 2171258 - RNA, 19 nt, Artificial Sequence
  Description of Artificial Sequence: Synthetic oligonucleotide
ggugccacuguaaacugga

SEQ ID NO: 2171259 - RNA, 19 nt, Artificial Sequence
  Description of Artificial Sequence: Synthetic oligonucleotide
aggcaaugguacuguugcu

SEQ ID NO: 2171260 - RNA, 19 nt, Artificial Sequence
  Description of Artificial Sequence: Synthetic oligonucleotide
cacugucagugcaaugaga

SEQ ID NO: 2171261 - RNA, 19 nt, Artificial Sequence
  Description of Artificial Sequence: Synthetic oligonucleotide
cucacccucccggaaaauc

SEQ ID NO: 2171262 - RNA, 19 nt, Artificial Sequence
  Description of Artificial Sequence: Synthetic oligonucleotide
uccaugagugugguaggua

SEQ ID NO: 2171263 - RNA, 19 nt, Artificial Sequence
  Description of Artificial Sequence: Synthetic oligonucleotide
caccuggggugaacuauug

SEQ ID NO: 2171264 - RNA, 19 nt, Artificial Sequence
  Description of Artificial Sequence: Synthetic oligonucleotide
auucacucauaggauggua

SEQ ID NO: 2171265 - RNA, 19 nt, Artificial Sequence
  Description of Artificial Sequence: Synthetic oligonucleotide
gcaccaguagggcuaugcc

SEQ ID NO: 2171266 - RNA, 19 nt, Artificial Sequence
  Description of Artificial Sequence: Synthetic oligonucleotide
acugaucggagugguggcu

SEQ ID NO: 2171267 - RNA, 19 nt, Artificial Sequence
  Description of Artificial Sequence: Synthetic oligonucleotide
acugaagauugaguaccau

SEQ ID NO: 2171268 - RNA, 19 nt, Artificial Sequence
  Description of Artificial Sequence: Synthetic oligonucleotide
augcagaaauguuccucuu

SEQ ID NO: 2171269 - RNA, 19 nt, Artificial Sequence
  Description of Artificial Sequence: Synthetic oligonucleotide
gccgccauuaccugcagaa

SEQ ID NO: 2171270 - RNA, 19 nt, Artificial Sequence
  Description of Artificial Sequence: Synthetic oligonucleotide
agcgcagagcugguaguug

SEQ ID NO: 2171271 - RNA, 19 nt, Artificial Sequence
  Description of Artificial Sequence: Synthetic oligonucleotide
cgauaguagagauccccag

SEQ ID NO: 2171272 - RNA, 19 nt, Artificial Sequence
  Description of Artificial Sequence: Synthetic oligonucleotide
ugccacuacuggguuggug

SEQ ID NO: 2171273 - RNA, 19 nt, Artificial Sequence
  Description of Artificial Sequence: Synthetic oligonucleotide
gggaagaauuaaacuggug

SEQ ID NO: 2171274 - RNA, 19 nt, Artificial Sequence
  Description of Artificial Sequence: Synthetic oligonucleotide
gggugacuugcccuacaag

SEQ ID NO: 2171275 - RNA, 19 nt, Artificial Sequence
  Description of Artificial Sequence: Synthetic oligonucleotide
gaggcaccacugugggcug

SEQ ID NO: 2171276 - RNA, 19 nt, Artificial Sequence
  Description of Artificial Sequence: Synthetic oligonucleotide
gguugccacuacuggguug

SEQ ID NO: 2171277 - RNA, 19 nt, Artificial Sequence
  Description of Artificial Sequence: Synthetic oligonucleotide
gccacuacuggguuggugu

SEQ ID NO: 2171278 - RNA, 19 nt, Artificial Sequence
  Description of Artificial Sequence: Synthetic oligonucleotide
cccggaaaaucacaguuga

SEQ ID NO: 2171279 - RNA, 19 nt, Artificial Sequence
  Description of Artificial Sequence: Synthetic oligonucleotide
ugccgccauuaccugcaga

SEQ ID NO: 2171280 - RNA, 19 nt, Artificial Sequence
  Description of Artificial Sequence: Synthetic oligonucleotide
uagccauuguagagauguu

SEQ ID NO: 2171281 - RNA, 19 nt, Artificial Sequence
  Description of Artificial Sequence: Synthetic oligonucleotide
cgccauuaccugcagaaac

SEQ ID NO: 2171282 - RNA, 19 nt, Artificial Sequence
  Description of Artificial Sequence: Synthetic oligonucleotide
caacagacaccugggguga

SEQ ID NO: 2171283 - RNA, 19 nt, Artificial Sequence
  Description of Artificial Sequence: Synthetic oligonucleotide
ggcagaggcuaaaguagcc

SEQ ID NO: 2171284 - RNA, 19 nt, Artificial Sequence
  Description of Artificial Sequence: Synthetic oligonucleotide
cucccggaaaaucacaguu

SEQ ID NO: 2171285 - RNA, 19 nt, Artificial Sequence
  Description of Artificial Sequence: Synthetic oligonucleotide
ggguugggaagauguccag

SEQ ID NO: 2171286 - RNA, 19 nt, Artificial Sequence
  Description of Artificial Sequence: Synthetic oligonucleotide
aaccugaccugaacucgau

SEQ ID NO: 2171287 - RNA, 19 nt, Artificial Sequence
  Description of Artificial Sequence: Synthetic oligonucleotide
ggggcuacguuugguacug

SEQ ID NO: 2171288 - RNA, 19 nt, Artificial Sequence
  Description of Artificial Sequence: Synthetic oligonucleotide
ccccagaaaagcuugguua

SEQ ID NO: 2171289 - RNA, 19 nt, Artificial Sequence
  Description of Artificial Sequence: Synthetic oligonucleotide
gugguagguaggguauuca

SEQ ID NO: 2171290 - RNA, 19 nt, Artificial Sequence
  Description of Artificial Sequence: Synthetic oligonucleotide
ggaguggucuccaaagucu

SEQ ID NO: 2171291 - RNA, 19 nt, Artificial Sequence
  Description of Artificial Sequence: Synthetic oligonucleotide
gugguugccacuacugggu

SEQ ID NO: 2171292 - RNA, 19 nt, Artificial Sequence
  Description of Artificial Sequence: Synthetic oligonucleotide
caguugagucuaccaccac

SEQ ID NO: 2171293 - RNA, 19 nt, Artificial Sequence
  Description of Artificial Sequence: Synthetic oligonucleotide
gcggcacugacacacuguc

SEQ ID NO: 2171294 - RNA, 19 nt, Artificial Sequence
  Description of Artificial Sequence: Synthetic oligonucleotide
gauaggggcuacguuuggu

SEQ ID NO: 2171295 - RNA, 19 nt, Artificial Sequence
  Description of Artificial Sequence: Synthetic oligonucleotide
guucuuucggcggcacuga

SEQ ID NO: 2171296 - RNA, 19 nt, Artificial Sequence
  Description of Artificial Sequence: Synthetic oligonucleotide
gcuacguuugguacugcca

SEQ ID NO: 2171297 - RNA, 19 nt, Artificial Sequence
  Description of Artificial Sequence: Synthetic oligonucleotide
uagcguccaugaguguggu

SEQ ID NO: 2171298 - RNA, 19 nt, Artificial Sequence
  Description of Artificial Sequence: Synthetic oligonucleotide
gguagguaggguauucacu

SEQ ID NO: 2171299 - RNA, 19 nt, Artificial Sequence
  Description of Artificial Sequence: Synthetic oligonucleotide
uuucggcggcacugacaca

SEQ ID NO: 2171300 - RNA, 19 nt, Artificial Sequence
  Description of Artificial Sequence: Synthetic oligonucleotide
gugccacuguaaacuggag

SEQ ID NO: 2171301 - RNA, 19 nt, Artificial Sequence
  Description of Artificial Sequence: Synthetic oligonucleotide
cugucagugcaaugagaua

SEQ ID NO: 2171302 - RNA, 19 nt, Artificial Sequence
  Description of Artificial Sequence: Synthetic oligonucleotide
gguaggggagagugccgug

SEQ ID NO: 2171303 - RNA, 19 nt, Artificial Sequence
  Description of Artificial Sequence: Synthetic oligonucleotide
gagauccccagaaaagcuu

SEQ ID NO: 2171304 - RNA, 19 nt, Artificial Sequence
  Description of Artificial Sequence: Synthetic oligonucleotide
  modified_base (6)..(6): a, c, u, g, unknown or other
uguccnggguugggaagau

SEQ ID NO: 2171305 - RNA, 19 nt, Artificial Sequence
  Description of Artificial Sequence: Synthetic oligonucleotide
cugaccugaacucgauagu

SEQ ID NO: 2171306 - RNA, 19 nt, Artificial Sequence
  Description of Artificial Sequence: Synthetic oligonucleotide
ggggugaacuauugcugga

SEQ ID NO: 2171307 - RNA, 19 nt, Artificial Sequence
  Description of Artificial Sequence: Synthetic oligonucleotide
ccuacaaguuggcugaagu

SEQ ID NO: 2171308 - RNA, 19 nt, Artificial Sequence
  Description of Artificial Sequence: Synthetic oligonucleotide
cagaggcuaaaguagccuu

SEQ ID NO: 2171309 - RNA, 19 nt, Artificial Sequence
  Description of Artificial Sequence: Synthetic oligonucleotide
ccauuguagacugggguga

SEQ ID NO: 2171310 - RNA, 19 nt, Artificial Sequence
  Description of Artificial Sequence: Synthetic oligonucleotide
gguaccccaggccaagacu

SEQ ID NO: 2171311 - RNA, 19 nt, Artificial Sequence
  Description of Artificial Sequence: Synthetic oligonucleotide
accuccucgauaggggcua

SEQ ID NO: 2171312 - RNA, 19 nt, Artificial Sequence
  Description of Artificial Sequence: Synthetic oligonucleotide
acaccuggggugaacuauu

SEQ ID NO: 2171313 - RNA, 19 nt, Artificial Sequence
  Description of Artificial Sequence: Synthetic oligonucleotide
cuacuggguugguguaaga

SEQ ID NO: 2171314 - RNA, 19 nt, Artificial Sequence
  Description of Artificial Sequence: Synthetic oligonucleotide
cuccucgauaggggcuacg

SEQ ID NO: 2171315 - RNA, 19 nt, Artificial Sequence
  Description of Artificial Sequence: Synthetic oligonucleotide
gccagauuauagacuucug

SEQ ID NO: 2171316 - RNA, 19 nt, Artificial Sequence
  Description of Artificial Sequence: Synthetic oligonucleotide
gaucggagugguggcuaga

SEQ ID NO: 2171317 - RNA, 19 nt, Artificial Sequence
  Description of Artificial Sequence: Synthetic oligonucleotide
gagugccgugcugugguaa

SEQ ID NO: 2171318 - RNA, 19 nt, Artificial Sequence
  Description of Artificial Sequence: Synthetic oligonucleotide
cuggaguggucuccaaagu

SEQ ID NO: 2171319 - RNA, 19 nt, Artificial Sequence
  Description of Artificial Sequence: Synthetic oligonucleotide
gugacuugcccuacaaguu

SEQ ID NO: 2171320 - RNA, 19 nt, Artificial Sequence
  Description of Artificial Sequence: Synthetic oligonucleotide
gccauuguagagauguuau

SEQ ID NO: 2171321 - RNA, 19 nt, Artificial Sequence
  Description of Artificial Sequence: Synthetic oligonucleotide
  modified_base (3)..(3): a, c, u, g, unknown or other
ccnggguugggaagauguc

SEQ ID NO: 2171322 - RNA, 19 nt, Artificial Sequence
  Description of Artificial Sequence: Synthetic oligonucleotide
agagugccgugcuguggua

SEQ ID NO: 2171323 - RNA, 19 nt, Artificial Sequence
  Description of Artificial Sequence: Synthetic oligonucleotide
gcugccgccauuaccugca

SEQ ID NO: 2171324 - RNA, 19 nt, Artificial Sequence
  Description of Artificial Sequence: Synthetic oligonucleotide
  modified_base (5)..(5): a, c, u, g, unknown or other
guccnggguugggaagaug

SEQ ID NO: 2171325 - RNA, 19 nt, Artificial Sequence
  Description of Artificial Sequence: Synthetic oligonucleotide
ggugauggcagaggcuaaa

SEQ ID NO: 2171326 - RNA, 19 nt, Artificial Sequence
  Description of Artificial Sequence: Synthetic oligonucleotide
agccuugguaguagagaua

SEQ ID NO: 2171327 - RNA, 19 nt, Artificial Sequence
  Description of Artificial Sequence: Synthetic oligonucleotide
cugccgccauuaccugcag

SEQ ID NO: 2171328 - RNA, 19 nt, Artificial Sequence
  Description of Artificial Sequence: Synthetic oligonucleotide
ggggcacauagcguccaug

SEQ ID NO: 2171329 - RNA, 19 nt, Artificial Sequence
  Description of Artificial Sequence: Synthetic oligonucleotide
aguuggcaccaaggagcca

SEQ ID NO: 2171330 - RNA, 19 nt, Artificial Sequence
  Description of Artificial Sequence: Synthetic oligonucleotide
cacuacuggguugguguaa

SEQ ID NO: 2171331 - RNA, 19 nt, Artificial Sequence
  Description of Artificial Sequence: Synthetic oligonucleotide
ggguauucacucauaggau

SEQ ID NO: 2171332 - RNA, 19 nt, Artificial Sequence
  Description of Artificial Sequence: Synthetic oligonucleotide
gguaggguauucacucaua

SEQ ID NO: 2171333 - RNA, 19 nt, Artificial Sequence
  Description of Artificial Sequence: Synthetic oligonucleotide
gcagaggcuaaaguagccu

SEQ ID NO: 2171334 - RNA, 19 nt, Artificial Sequence
  Description of Artificial Sequence: Synthetic oligonucleotide
guccaugagugugguaggu

SEQ ID NO: 2171335 - RNA, 19 nt, Artificial Sequence
  Description of Artificial Sequence: Synthetic oligonucleotide
uuccagcgcagagcuggua

SEQ ID NO: 2171336 - RNA, 19 nt, Artificial Sequence
  Description of Artificial Sequence: Synthetic oligonucleotide
cgauaggggcuacguuugg

SEQ ID NO: 2171337 - RNA, 19 nt, Artificial Sequence
  Description of Artificial Sequence: Synthetic oligonucleotide
agcguccaugaguguggua

SEQ ID NO: 2171338 - RNA, 19 nt, Artificial Sequence
  Description of Artificial Sequence: Synthetic oligonucleotide
gguaagugcuauaggcaau

SEQ ID NO: 2171339 - RNA, 19 nt, Artificial Sequence
  Description of Artificial Sequence: Synthetic oligonucleotide
cauugccaacuggaguugu

SEQ ID NO: 2171340 - RNA, 19 nt, Artificial Sequence
  Description of Artificial Sequence: Synthetic oligonucleotide
uugccacuacuggguuggu

SEQ ID NO: 2171341 - RNA, 19 nt, Artificial Sequence
  Description of Artificial Sequence: Synthetic oligonucleotide
cccuacaaguuggcugaag

SEQ ID NO: 2171342 - RNA, 19 nt, Artificial Sequence
  Description of Artificial Sequence: Synthetic oligonucleotide
gugcaaugagauagaugau

SEQ ID NO: 2171343 - RNA, 19 nt, Artificial Sequence
  Description of Artificial Sequence: Synthetic oligonucleotide
cauuguagacuggggugau

SEQ ID NO: 2171344 - RNA, 19 nt, Artificial Sequence
  Description of Artificial Sequence: Synthetic oligonucleotide
ccauuaccugcagaaaccu

SEQ ID NO: 2171345 - RNA, 19 nt, Artificial Sequence
  Description of Artificial Sequence: Synthetic oligonucleotide
uaguuggagcugggaucuu

SEQ ID NO: 2171346 - RNA, 19 nt, Artificial Sequence
  Description of Artificial Sequence: Synthetic oligonucleotide
cagcuguccauaguucuuu

SEQ ID NO: 2171347 - RNA, 19 nt, Artificial Sequence
  Description of Artificial Sequence: Synthetic oligonucleotide
cugccucacccucccggaa

SEQ ID NO: 2171348 - RNA, 19 nt, Artificial Sequence
  Description of Artificial Sequence: Synthetic oligonucleotide
gcacugacacacugucagu

SEQ ID NO: 2171349 - RNA, 19 nt, Artificial Sequence
  Description of Artificial Sequence: Synthetic oligonucleotide
ccgugcugugguaagugcu

SEQ ID NO: 2171350 - RNA, 19 nt, Artificial Sequence
  Description of Artificial Sequence: Synthetic oligonucleotide
ggagaagguaggggagagu

SEQ ID NO: 2171351 - RNA, 19 nt, Artificial Sequence
  Description of Artificial Sequence: Synthetic oligonucleotide
gugugguagguaggguauu

SEQ ID NO: 2171352 - RNA, 19 nt, Artificial Sequence
  Description of Artificial Sequence: Synthetic oligonucleotide
gugccgugcugugguaagu

SEQ ID NO: 2171353 - RNA, 19 nt, Artificial Sequence
  Description of Artificial Sequence: Synthetic oligonucleotide
ccucccggaaaaucacagu

SEQ ID NO: 2171354 - RNA, 19 nt, Artificial Sequence
  Description of Artificial Sequence: Synthetic oligonucleotide
gggcuacguuugguacugc

SEQ ID NO: 2171355 - RNA, 19 nt, Artificial Sequence
  Description of Artificial Sequence: Synthetic oligonucleotide
gcuaugccccagccuggua

SEQ ID NO: 2171356 - RNA, 19 nt, Artificial Sequence
  Description of Artificial Sequence: Synthetic oligonucleotide
cggcggcacugacacacug

SEQ ID NO: 2171357 - RNA, 19 nt, Artificial Sequence
  Description of Artificial Sequence: Synthetic oligonucleotide
cagcaccaguagggcuaug

SEQ ID NO: 2171358 - RNA, 19 nt, Artificial Sequence
  Description of Artificial Sequence: Synthetic oligonucleotide
ggcuaugccccagccuggu

SEQ ID NO: 2171359 - RNA, 19 nt, Artificial Sequence
  Description of Artificial Sequence: Synthetic oligonucleotide
cagcgcagagcugguaguu

SEQ ID NO: 2171360 - RNA, 19 nt, Artificial Sequence
  Description of Artificial Sequence: Synthetic oligonucleotide
gccugguaccccaggccaa

SEQ ID NO: 2171361 - RNA, 19 nt, Artificial Sequence
  Description of Artificial Sequence: Synthetic oligonucleotide
ccuccucgauaggggcuac

SEQ ID NO: 2171362 - RNA, 19 nt, Artificial Sequence
  Description of Artificial Sequence: Synthetic oligonucleotide
ccgccauuaccugcagaaa

SEQ ID NO: 2171363 - RNA, 19 nt, Artificial Sequence
  Description of Artificial Sequence: Synthetic oligonucleotide
ccucgauaggggcuacguu

SEQ ID NO: 2171364 - RNA, 19 nt, Artificial Sequence
  Description of Artificial Sequence: Synthetic oligonucleotide
ccucacccucccggaaaau

SEQ ID NO: 2171365 - RNA, 19 nt, Artificial Sequence
  Description of Artificial Sequence: Synthetic oligonucleotide
agaacuagcaaccaggacc

SEQ ID NO: 2171366 - RNA, 19 nt, Artificial Sequence
  Description of Artificial Sequence: Synthetic oligonucleotide
uuauuagugaucuucaggg

SEQ ID NO: 2171367 - RNA, 19 nt, Artificial Sequence
  Description of Artificial Sequence: Synthetic oligonucleotide
uuuauuacaacgcugggcc

SEQ ID NO: 2171368 - RNA, 19 nt, Artificial Sequence
  Description of Artificial Sequence: Synthetic oligonucleotide
aaaguuuucauucggcaac

SEQ ID NO: 2171369 - RNA, 19 nt, Artificial Sequence
  Description of Artificial Sequence: Synthetic oligonucleotide
uguuuuaaaugcaucaacg

SEQ ID NO: 2171370 - RNA, 19 nt, Artificial Sequence
  Description of Artificial Sequence: Synthetic oligonucleotide
auaauggucaugcacauac

SEQ ID NO: 2171371 - RNA, 19 nt, Artificial Sequence
  Description of Artificial Sequence: Synthetic oligonucleotide
uuuauaauuuccaugcacc

SEQ ID NO: 2171372 - RNA, 19 nt, Artificial Sequence
  Description of Artificial Sequence: Synthetic oligonucleotide
uuuauuagugaucuucagg

SEQ ID NO: 2171373 - RNA, 19 nt, Artificial Sequence
  Description of Artificial Sequence: Synthetic oligonucleotide
auaaccuuugauuaagugg

SEQ ID NO: 2171374 - RNA, 19 nt, Artificial Sequence
  Description of Artificial Sequence: Synthetic oligonucleotide
uguauauugagcaacagua

SEQ ID NO: 2171375 - RNA, 19 nt, Artificial Sequence
  Description of Artificial Sequence: Synthetic oligonucleotide
auuuauaauuuccaugcac

SEQ ID NO: 2171376 - RNA, 19 nt, Artificial Sequence
  Description of Artificial Sequence: Synthetic oligonucleotide
uauaucagaacuagcaacc

SEQ ID NO: 2171377 - RNA, 19 nt, Artificial Sequence
  Description of Artificial Sequence: Synthetic oligonucleotide
auaacacuuuauuacaacg

SEQ ID NO: 2171378 - RNA, 19 nt, Artificial Sequence
  Description of Artificial Sequence: Synthetic oligonucleotide
ucugaacucauaaauaaca

SEQ ID NO: 2171379 - RNA, 19 nt, Artificial Sequence
  Description of Artificial Sequence: Synthetic oligonucleotide
aguauaguugcucucugcc

SEQ ID NO: 2171380 - RNA, 19 nt, Artificial Sequence
  Description of Artificial Sequence: Synthetic oligonucleotide
uuucucuagauuuugagga

SEQ ID NO: 2171381 - RNA, 19 nt, Artificial Sequence
  Description of Artificial Sequence: Synthetic oligonucleotide
aaguaauauaaucacagaa

SEQ ID NO: 2171382 - RNA, 19 nt, Artificial Sequence
  Description of Artificial Sequence: Synthetic oligonucleotide
auaguuguaauuccaguac

SEQ ID NO: 2171383 - RNA, 19 nt, Artificial Sequence
  Description of Artificial Sequence: Synthetic oligonucleotide
uaaccuuugauuaaguggu

SEQ ID NO: 2171384 - RNA, 19 nt, Artificial Sequence
  Description of Artificial Sequence: Synthetic oligonucleotide
ucaacgaaucuucucaagg

SEQ ID NO: 2171385 - RNA, 19 nt, Artificial Sequence
  Description of Artificial Sequence: Synthetic oligonucleotide
uuuaaaugcaucaacgaau

SEQ ID NO: 2171386 - RNA, 19 nt, Artificial Sequence
  Description of Artificial Sequence: Synthetic oligonucleotide
ucacauagggcuuaaaucu

SEQ ID NO: 2171387 - RNA, 19 nt, Artificial Sequence
  Description of Artificial Sequence: Synthetic oligonucleotide
aauuccaguaccaaaaugu

SEQ ID NO: 2171388 - RNA, 19 nt, Artificial Sequence
  Description of Artificial Sequence: Synthetic oligonucleotide
uccacuaugacguaugugu

SEQ ID NO: 2171389 - RNA, 19 nt, Artificial Sequence
  Description of Artificial Sequence: Synthetic oligonucleotide
uguaauuccaguaccaaaa

SEQ ID NO: 2171390 - RNA, 19 nt, Artificial Sequence
  Description of Artificial Sequence: Synthetic oligonucleotide
aaugcaucaacgaaucuuc

SEQ ID NO: 2171391 - RNA, 19 nt, Artificial Sequence
  Description of Artificial Sequence: Synthetic oligonucleotide
ggugauuacaaacugaacc

SEQ ID NO: 2171392 - RNA, 19 nt, Artificial Sequence
  Description of Artificial Sequence: Synthetic oligonucleotide
uugucauaacccaacaaag

SEQ ID NO: 2171393 - RNA, 19 nt, Artificial Sequence
  Description of Artificial Sequence: Synthetic oligonucleotide
aaauguuuucggcagauaa

SEQ ID NO: 2171394 - RNA, 19 nt, Artificial Sequence
  Description of Artificial Sequence: Synthetic oligonucleotide
aggauaauaguuguaauuc

SEQ ID NO: 2171395 - RNA, 19 nt, Artificial Sequence
  Description of Artificial Sequence: Synthetic oligonucleotide
aacacugccaauuguaagu

SEQ ID NO: 2171396 - RNA, 19 nt, Artificial Sequence
  Description of Artificial Sequence: Synthetic oligonucleotide
aaaguaaaugggcuguuca

SEQ ID NO: 2171397 - RNA, 19 nt, Artificial Sequence
  Description of Artificial Sequence: Synthetic oligonucleotide
aaaguuucuuucccagugg

SEQ ID NO: 2171398 - RNA, 19 nt, Artificial Sequence
  Description of Artificial Sequence: Synthetic oligonucleotide
uguaaguaauauaaucaca

SEQ ID NO: 2171399 - RNA, 19 nt, Artificial Sequence
  Description of Artificial Sequence: Synthetic oligonucleotide
auguuuucggcagauaacc

SEQ ID NO: 2171400 - RNA, 19 nt, Artificial Sequence
  Description of Artificial Sequence: Synthetic oligonucleotide
uuaaaugcaucaacgaauc

SEQ ID NO: 2171401 - RNA, 19 nt, Artificial Sequence
  Description of Artificial Sequence: Synthetic oligonucleotide
agugaaaagaaacugcuau

SEQ ID NO: 2171402 - RNA, 19 nt, Artificial Sequence
  Description of Artificial Sequence: Synthetic oligonucleotide
aauggucaugcacauacug

SEQ ID NO: 2171403 - RNA, 19 nt, Artificial Sequence
  Description of Artificial Sequence: Synthetic oligonucleotide
cuuucauaaaccaucagca

SEQ ID NO: 2171404 - RNA, 19 nt, Artificial Sequence
  Description of Artificial Sequence: Synthetic oligonucleotide
aaagaaacugcuauaucag

SEQ ID NO: 2171405 - RNA, 19 nt, Artificial Sequence
  Description of Artificial Sequence: Synthetic oligonucleotide
gaaaguuucuuucccagug

SEQ ID NO: 2171406 - RNA, 19 nt, Artificial Sequence
  Description of Artificial Sequence: Synthetic oligonucleotide
uauaaucacagaaaaguuu

SEQ ID NO: 2171407 - RNA, 19 nt, Artificial Sequence
  Description of Artificial Sequence: Synthetic oligonucleotide
cacagaaaaguuuucauuc

SEQ ID NO: 2171408 - RNA, 19 nt, Artificial Sequence
  Description of Artificial Sequence: Synthetic oligonucleotide
cuauaucagaacuagcaac

SEQ ID NO: 2171409 - RNA, 19 nt, Artificial Sequence
  Description of Artificial Sequence: Synthetic oligonucleotide
gauuaaguggugcucuggg

SEQ ID NO: 2171410 - RNA, 19 nt, Artificial Sequence
  Description of Artificial Sequence: Synthetic oligonucleotide
uuucaaucccacaguaggg

SEQ ID NO: 2171411 - RNA, 19 nt, Artificial Sequence
  Description of Artificial Sequence: Synthetic oligonucleotide
aaugugguuuauuagugau

SEQ ID NO: 2171412 - RNA, 19 nt, Artificial Sequence
  Description of Artificial Sequence: Synthetic oligonucleotide
cagauuguccacuaugacg

SEQ ID NO: 2171413 - RNA, 19 nt, Artificial Sequence
  Description of Artificial Sequence: Synthetic oligonucleotide
uuuuaaggcagauuuguuc

SEQ ID NO: 2171414 - RNA, 19 nt, Artificial Sequence
  Description of Artificial Sequence: Synthetic oligonucleotide
uguuagugaaaagaaacug

SEQ ID NO: 2171415 - RNA, 19 nt, Artificial Sequence
  Description of Artificial Sequence: Synthetic oligonucleotide
ucuacacaugagcagagug

SEQ ID NO: 2171416 - RNA, 19 nt, Artificial Sequence
  Description of Artificial Sequence: Synthetic oligonucleotide
guaaaugggcuguucaggg

SEQ ID NO: 2171417 - RNA, 19 nt, Artificial Sequence
  Description of Artificial Sequence: Synthetic oligonucleotide
uguucaggguuauaccucg

SEQ ID NO: 2171418 - RNA, 19 nt, Artificial Sequence
  Description of Artificial Sequence: Synthetic oligonucleotide
accaaaauguuuucggcag

SEQ ID NO: 2171419 - RNA, 19 nt, Artificial Sequence
  Description of Artificial Sequence: Synthetic oligonucleotide
uucuucugaacucauaaau

SEQ ID NO: 2171420 - RNA, 19 nt, Artificial Sequence
  Description of Artificial Sequence: Synthetic oligonucleotide
uagaagccaucucagauug

SEQ ID NO: 2171421 - RNA, 19 nt, Artificial Sequence
  Description of Artificial Sequence: Synthetic oligonucleotide
aaacacugccaauuguaag

SEQ ID NO: 2171422 - RNA, 19 nt, Artificial Sequence
  Description of Artificial Sequence: Synthetic oligonucleotide
uuaaguggugcucugggac

SEQ ID NO: 2171423 - RNA, 19 nt, Artificial Sequence
  Description of Artificial Sequence: Synthetic oligonucleotide
uugauguuuuccaguauag

SEQ ID NO: 2171424 - RNA, 19 nt, Artificial Sequence
  Description of Artificial Sequence: Synthetic oligonucleotide
agggcuuaaaucuccuccc

SEQ ID NO: 2171425 - RNA, 19 nt, Artificial Sequence
  Description of Artificial Sequence: Synthetic oligonucleotide
aacgaaucuucucaaggcu

SEQ ID NO: 2171426 - RNA, 19 nt, Artificial Sequence
  Description of Artificial Sequence: Synthetic oligonucleotide
uuagugacaacaacacaca

SEQ ID NO: 2171427 - RNA, 19 nt, Artificial Sequence
  Description of Artificial Sequence: Synthetic oligonucleotide
caggguuauaccucgauag

SEQ ID NO: 2171428 - RNA, 19 nt, Artificial Sequence
  Description of Artificial Sequence: Synthetic oligonucleotide
ugucauaacccaacaaaga

SEQ ID NO: 2171429 - RNA, 19 nt, Artificial Sequence
  Description of Artificial Sequence: Synthetic oligonucleotide
cucuacaggaggauaauag

SEQ ID NO: 2171430 - RNA, 19 nt, Artificial Sequence
  Description of Artificial Sequence: Synthetic oligonucleotide
ucaugcacauacugaaagg

SEQ ID NO: 2171431 - RNA, 19 nt, Artificial Sequence
  Description of Artificial Sequence: Synthetic oligonucleotide
agaaaaguuuucauucggc

SEQ ID NO: 2171432 - RNA, 19 nt, Artificial Sequence
  Description of Artificial Sequence: Synthetic oligonucleotide
guuauaccucgauagaagc

SEQ ID NO: 2171433 - RNA, 19 nt, Artificial Sequence
  Description of Artificial Sequence: Synthetic oligonucleotide
ugaacucauaaauaacacu

SEQ ID NO: 2171434 - RNA, 19 nt, Artificial Sequence
  Description of Artificial Sequence: Synthetic oligonucleotide
uuauaccucgauagaagcc

SEQ ID NO: 2171435 - RNA, 19 nt, Artificial Sequence
  Description of Artificial Sequence: Synthetic oligonucleotide
aaaugugguuuauuaguga

SEQ ID NO: 2171436 - RNA, 19 nt, Artificial Sequence
  Description of Artificial Sequence: Synthetic oligonucleotide
uucuuugcugaguacauac

SEQ ID NO: 2171437 - RNA, 19 nt, Artificial Sequence
  Description of Artificial Sequence: Synthetic oligonucleotide
uguucuaacagugcagugc

SEQ ID NO: 2171438 - RNA, 19 nt, Artificial Sequence
  Description of Artificial Sequence: Synthetic oligonucleotide
uauaccucgauagaagcca

SEQ ID NO: 2171439 - RNA, 19 nt, Artificial Sequence
  Description of Artificial Sequence: Synthetic oligonucleotide
uaguuguaauuccaguacc

SEQ ID NO: 2171440 - RNA, 19 nt, Artificial Sequence
  Description of Artificial Sequence: Synthetic oligonucleotide
uuagugaucuucagggugu

SEQ ID NO: 2171441 - RNA, 19 nt, Artificial Sequence
  Description of Artificial Sequence: Synthetic oligonucleotide
uauauugagcaacaguauu

SEQ ID NO: 2171442 - RNA, 19 nt, Artificial Sequence
  Description of Artificial Sequence: Synthetic oligonucleotide
ugaggacuugucauaaccc

SEQ ID NO: 2171443 - RNA, 19 nt, Artificial Sequence
  Description of Artificial Sequence: Synthetic oligonucleotide
uaaguaauauaaucacaga

SEQ ID NO: 2171444 - RNA, 19 nt, Artificial Sequence
  Description of Artificial Sequence: Synthetic oligonucleotide
ucgauagaagccaucucag

SEQ ID NO: 2171445 - RNA, 19 nt, Artificial Sequence
  Description of Artificial Sequence: Synthetic oligonucleotide
aguagggaagucuugauuu

SEQ ID NO: 2171446 - RNA, 19 nt, Artificial Sequence
  Description of Artificial Sequence: Synthetic oligonucleotide
gugauuacaaacugaacca

SEQ ID NO: 2171447 - RNA, 19 nt, Artificial Sequence
  Description of Artificial Sequence: Synthetic oligonucleotide
uuaaaucuccucccaaagu

SEQ ID NO: 2171448 - RNA, 19 nt, Artificial Sequence
  Description of Artificial Sequence: Synthetic oligonucleotide
agauuguccacuaugacgu

SEQ ID NO: 2171449 - RNA, 19 nt, Artificial Sequence
  Description of Artificial Sequence: Synthetic oligonucleotide
acugcuauaucagaacuag

SEQ ID NO: 2171450 - RNA, 19 nt, Artificial Sequence
  Description of Artificial Sequence: Synthetic oligonucleotide
cuuaaaucuccucccaaag

SEQ ID NO: 2171451 - RNA, 19 nt, Artificial Sequence
  Description of Artificial Sequence: Synthetic oligonucleotide
ugaguacauacccugcccc

SEQ ID NO: 2171452 - RNA, 19 nt, Artificial Sequence
  Description of Artificial Sequence: Synthetic oligonucleotide
agcuucuacauuuauaauu

SEQ ID NO: 2171453 - RNA, 19 nt, Artificial Sequence
  Description of Artificial Sequence: Synthetic oligonucleotide
aaauaauggucaugcacau

SEQ ID NO: 2171454 - RNA, 19 nt, Artificial Sequence
  Description of Artificial Sequence: Synthetic oligonucleotide
uggaaaguuucuuucccag

SEQ ID NO: 2171455 - RNA, 19 nt, Artificial Sequence
  Description of Artificial Sequence: Synthetic oligonucleotide
aucagaacuagcaaccagg

SEQ ID NO: 2171456 - RNA, 19 nt, Artificial Sequence
  Description of Artificial Sequence: Synthetic oligonucleotide
uuacaaacugaaccacucc

SEQ ID NO: 2171457 - RNA, 19 nt, Artificial Sequence
  Description of Artificial Sequence: Synthetic oligonucleotide
aguaaaugggcuguucagg

SEQ ID NO: 2171458 - RNA, 19 nt, Artificial Sequence
  Description of Artificial Sequence: Synthetic oligonucleotide
uaccaaaauguuuucggca

SEQ ID NO: 2171459 - RNA, 19 nt, Artificial Sequence
  Description of Artificial Sequence: Synthetic oligonucleotide
uaugacguaugugucauca

SEQ ID NO: 2171460 - RNA, 19 nt, Artificial Sequence
  Description of Artificial Sequence: Synthetic oligonucleotide
caacgaaucuucucaaggc

SEQ ID NO: 2171461 - RNA, 19 nt, Artificial Sequence
  Description of Artificial Sequence: Synthetic oligonucleotide
ucuucugaacucauaaaua

SEQ ID NO: 2171462 - RNA, 19 nt, Artificial Sequence
  Description of Artificial Sequence: Synthetic oligonucleotide
uaugcguacauuucucugu

SEQ ID NO: 2171463 - RNA, 19 nt, Artificial Sequence
  Description of Artificial Sequence: Synthetic oligonucleotide
aaaugcaucaacgaaucuu

SEQ ID NO: 2171464 - RNA, 19 nt, Artificial Sequence
  Description of Artificial Sequence: Synthetic oligonucleotide
ucuacaggaggauaauagu

SEQ ID NO: 2171465 - RNA, 19 nt, Artificial Sequence
  Description of Artificial Sequence: Synthetic oligonucleotide
uccucccaaaguaaauggg

SEQ ID NO: 2171466 - RNA, 19 nt, Artificial Sequence
  Description of Artificial Sequence: Synthetic oligonucleotide
gaacuagcaaccaggaccc

SEQ ID NO: 2171467 - RNA, 19 nt, Artificial Sequence
  Description of Artificial Sequence: Synthetic oligonucleotide
agauuuugaggacuuguca

SEQ ID NO: 2171468 - RNA, 19 nt, Artificial Sequence
  Description of Artificial Sequence: Synthetic oligonucleotide
cuuuauuacaacgcugggc

SEQ ID NO: 2171469 - RNA, 19 nt, Artificial Sequence
  Description of Artificial Sequence: Synthetic oligonucleotide
uuugcugaguacauacccu

SEQ ID NO: 2171470 - RNA, 19 nt, Artificial Sequence
  Description of Artificial Sequence: Synthetic oligonucleotide
aguuuuaaggcagauuugu

SEQ ID NO: 2171471 - RNA, 19 nt, Artificial Sequence
  Description of Artificial Sequence: Synthetic oligonucleotide
uuucauucggcaacuggga

SEQ ID NO: 2171472 - RNA, 19 nt, Artificial Sequence
  Description of Artificial Sequence: Synthetic oligonucleotide
gcuuucauaaaccaucagc

SEQ ID NO: 2171473 - RNA, 19 nt, Artificial Sequence
  Description of Artificial Sequence: Synthetic oligonucleotide
uuuccaguauaguugcucu

SEQ ID NO: 2171474 - RNA, 19 nt, Artificial Sequence
  Description of Artificial Sequence: Synthetic oligonucleotide
uucugaacucauaaauaac

SEQ ID NO: 2171475 - RNA, 19 nt, Artificial Sequence
  Description of Artificial Sequence: Synthetic oligonucleotide
aacgcugggcccauguagc

SEQ ID NO: 2171476 - RNA, 19 nt, Artificial Sequence
  Description of Artificial Sequence: Synthetic oligonucleotide
ugguuuauuagugaucuuc

SEQ ID NO: 2171477 - RNA, 19 nt, Artificial Sequence
  Description of Artificial Sequence: Synthetic oligonucleotide
aaggcagauuuguucagca

SEQ ID NO: 2171478 - RNA, 19 nt, Artificial Sequence
  Description of Artificial Sequence: Synthetic oligonucleotide
agcauuguguucuaacagu

SEQ ID NO: 2171479 - RNA, 19 nt, Artificial Sequence
  Description of Artificial Sequence: Synthetic oligonucleotide
agcagaguguauauugagc

SEQ ID NO: 2171480 - RNA, 19 nt, Artificial Sequence
  Description of Artificial Sequence: Synthetic oligonucleotide
acaacacacacuguuagug

SEQ ID NO: 2171481 - RNA, 19 nt, Artificial Sequence
  Description of Artificial Sequence: Synthetic oligonucleotide
uauaguugcucucugccuu

SEQ ID NO: 2171482 - RNA, 19 nt, Artificial Sequence
  Description of Artificial Sequence: Synthetic oligonucleotide
ugagcagaguguauauuga

SEQ ID NO: 2171483 - RNA, 19 nt, Artificial Sequence
  Description of Artificial Sequence: Synthetic oligonucleotide
ggaaaaugugguuuauuag

SEQ ID NO: 2171484 - RNA, 19 nt, Artificial Sequence
  Description of Artificial Sequence: Synthetic oligonucleotide
caacaacacacacuguuag

SEQ ID NO: 2171485 - RNA, 19 nt, Artificial Sequence
  Description of Artificial Sequence: Synthetic oligonucleotide
cuugucauaacccaacaaa

SEQ ID NO: 2171486 - RNA, 19 nt, Artificial Sequence
  Description of Artificial Sequence: Synthetic oligonucleotide
ugacguaugugucaucauc

SEQ ID NO: 2171487 - RNA, 19 nt, Artificial Sequence
  Description of Artificial Sequence: Synthetic oligonucleotide
aacaacacacacuguuagu

SEQ ID NO: 2171488 - RNA, 19 nt, Artificial Sequence
  Description of Artificial Sequence: Synthetic oligonucleotide
cuccucccaaaguaaaugg

SEQ ID NO: 2171489 - RNA, 19 nt, Artificial Sequence
  Description of Artificial Sequence: Synthetic oligonucleotide
uagauuuugaggacuuguc

SEQ ID NO: 2171490 - RNA, 19 nt, Artificial Sequence
  Description of Artificial Sequence: Synthetic oligonucleotide
auaaucacagaaaaguuuu

SEQ ID NO: 2171491 - RNA, 19 nt, Artificial Sequence
  Description of Artificial Sequence: Synthetic oligonucleotide
uuuucggcagauaaccuuu

SEQ ID NO: 2171492 - RNA, 19 nt, Artificial Sequence
  Description of Artificial Sequence: Synthetic oligonucleotide
guagcccugcuucacauag

SEQ ID NO: 2171493 - RNA, 19 nt, Artificial Sequence
  Description of Artificial Sequence: Synthetic oligonucleotide
ugguuuguaucaucuacac

SEQ ID NO: 2171494 - RNA, 19 nt, Artificial Sequence
  Description of Artificial Sequence: Synthetic oligonucleotide
ucgauggaggagcuaugcg

SEQ ID NO: 2171495 - RNA, 19 nt, Artificial Sequence
  Description of Artificial Sequence: Synthetic oligonucleotide
gucauaacccaacaaagaa

SEQ ID NO: 2171496 - RNA, 19 nt, Artificial Sequence
  Description of Artificial Sequence: Synthetic oligonucleotide
uugcugaguacauacccug

SEQ ID NO: 2171497 - RNA, 19 nt, Artificial Sequence
  Description of Artificial Sequence: Synthetic oligonucleotide
uuaaggcagauuuguucag

SEQ ID NO: 2171498 - RNA, 19 nt, Artificial Sequence
  Description of Artificial Sequence: Synthetic oligonucleotide
uucagcauuguguucuaac

SEQ ID NO: 2171499 - RNA, 19 nt, Artificial Sequence
  Description of Artificial Sequence: Synthetic oligonucleotide
gagcagaguguauauugag

SEQ ID NO: 2171500 - RNA, 19 nt, Artificial Sequence
  Description of Artificial Sequence: Synthetic oligonucleotide
ggauaauaguuguaauucc

SEQ ID NO: 2171501 - RNA, 19 nt, Artificial Sequence
  Description of Artificial Sequence: Synthetic oligonucleotide
uucccagugguaucucugg

SEQ ID NO: 2171502 - RNA, 19 nt, Artificial Sequence
  Description of Artificial Sequence: Synthetic oligonucleotide
uuucauaaaccaucagcau

SEQ ID NO: 2171503 - RNA, 19 nt, Artificial Sequence
  Description of Artificial Sequence: Synthetic oligonucleotide
cucgauagaagccaucuca

SEQ ID NO: 2171504 - RNA, 19 nt, Artificial Sequence
  Description of Artificial Sequence: Synthetic oligonucleotide
ucagauuguccacuaugac

SEQ ID NO: 2171505 - RNA, 19 nt, Artificial Sequence
  Description of Artificial Sequence: Synthetic oligonucleotide
gaggaaacacugccaauug

SEQ ID NO: 2171506 - RNA, 19 nt, Artificial Sequence
  Description of Artificial Sequence: Synthetic oligonucleotide
uucucaaggcuucuuugcu

SEQ ID NO: 2171507 - RNA, 19 nt, Artificial Sequence
  Description of Artificial Sequence: Synthetic oligonucleotide
ugauuaaguggugcucugg

SEQ ID NO: 2171508 - RNA, 19 nt, Artificial Sequence
  Description of Artificial Sequence: Synthetic oligonucleotide
agcuuuagugacaacaaca

SEQ ID NO: 2171509 - RNA, 19 nt, Artificial Sequence
  Description of Artificial Sequence: Synthetic oligonucleotide
guucuaacagugcagugca

SEQ ID NO: 2171510 - RNA, 19 nt, Artificial Sequence
  Description of Artificial Sequence: Synthetic oligonucleotide
uucaaucccacaguaggga

SEQ ID NO: 2171511 - RNA, 19 nt, Artificial Sequence
  Description of Artificial Sequence: Synthetic oligonucleotide
gauuuguucagcauugugu

SEQ ID NO: 2171512 - RNA, 19 nt, Artificial Sequence
  Description of Artificial Sequence: Synthetic oligonucleotide
cuaacagugcagugcagug

SEQ ID NO: 2171513 - RNA, 19 nt, Artificial Sequence
  Description of Artificial Sequence: Synthetic oligonucleotide
uuucuaguuuuaaggcaga

SEQ ID NO: 2171514 - RNA, 19 nt, Artificial Sequence
  Description of Artificial Sequence: Synthetic oligonucleotide
cacacuguuagugaaaaga

SEQ ID NO: 2171515 - RNA, 19 nt, Artificial Sequence
  Description of Artificial Sequence: Synthetic oligonucleotide
uaaguggugcucugggaca

SEQ ID NO: 2171516 - RNA, 19 nt, Artificial Sequence
  Description of Artificial Sequence: Synthetic oligonucleotide
uguuacucaucuuuauguu

SEQ ID NO: 2171517 - RNA, 19 nt, Artificial Sequence
  Description of Artificial Sequence: Synthetic oligonucleotide
uuuugaggacuugucauaa

SEQ ID NO: 2171518 - RNA, 19 nt, Artificial Sequence
  Description of Artificial Sequence: Synthetic oligonucleotide
ugaggaaacacugccaauu

SEQ ID NO: 2171519 - RNA, 19 nt, Artificial Sequence
  Description of Artificial Sequence: Synthetic oligonucleotide
uguuuucggcagauaaccu

SEQ ID NO: 2171520 - RNA, 19 nt, Artificial Sequence
  Description of Artificial Sequence: Synthetic oligonucleotide
auaguugcucucugccuuc

SEQ ID NO: 2171521 - RNA, 19 nt, Artificial Sequence
  Description of Artificial Sequence: Synthetic oligonucleotide
uuauuacaacgcugggccc

SEQ ID NO: 2171522 - RNA, 19 nt, Artificial Sequence
  Description of Artificial Sequence: Synthetic oligonucleotide
cuaugcguacauuucucug

SEQ ID NO: 2171523 - RNA, 19 nt, Artificial Sequence
  Description of Artificial Sequence: Synthetic oligonucleotide
cucagauuguccacuauga

SEQ ID NO: 2171524 - RNA, 19 nt, Artificial Sequence
  Description of Artificial Sequence: Synthetic oligonucleotide
uccaguauaguugcucucu

SEQ ID NO: 2171525 - RNA, 19 nt, Artificial Sequence
  Description of Artificial Sequence: Synthetic oligonucleotide
uggguggaaaguuucuuuc

SEQ ID NO: 2171526 - RNA, 19 nt, Artificial Sequence
  Description of Artificial Sequence: Synthetic oligonucleotide
ucggcaauguccguguuac

SEQ ID NO: 2171527 - RNA, 19 nt, Artificial Sequence
  Description of Artificial Sequence: Synthetic oligonucleotide
auuaaguggugcucuggga

SEQ ID NO: 2171528 - RNA, 19 nt, Artificial Sequence
  Description of Artificial Sequence: Synthetic oligonucleotide
uaaaugcaucaacgaaucu

SEQ ID NO: 2171529 - RNA, 19 nt, Artificial Sequence
  Description of Artificial Sequence: Synthetic oligonucleotide
gaagccaucucagauuguc

SEQ ID NO: 2171530 - RNA, 19 nt, Artificial Sequence
  Description of Artificial Sequence: Synthetic oligonucleotide
agugcaguaggugauuaca

SEQ ID NO: 2171531 - RNA, 19 nt, Artificial Sequence
  Description of Artificial Sequence: Synthetic oligonucleotide
auuuugaggacuugucaua

SEQ ID NO: 2171532 - RNA, 19 nt, Artificial Sequence
  Description of Artificial Sequence: Synthetic oligonucleotide
aaguuuucauucggcaacu

SEQ ID NO: 2171533 - RNA, 19 nt, Artificial Sequence
  Description of Artificial Sequence: Synthetic oligonucleotide
ugcuuucauaaaccaucag

SEQ ID NO: 2171534 - RNA, 19 nt, Artificial Sequence
  Description of Artificial Sequence: Synthetic oligonucleotide
ucucuagauuuugaggacu

SEQ ID NO: 2171535 - RNA, 19 nt, Artificial Sequence
  Description of Artificial Sequence: Synthetic oligonucleotide
ucuacuucuugaggaaaca

SEQ ID NO: 2171536 - RNA, 19 nt, Artificial Sequence
  Description of Artificial Sequence: Synthetic oligonucleotide
aggaggauaauaguuguaa

SEQ ID NO: 2171537 - RNA, 19 nt, Artificial Sequence
  Description of Artificial Sequence: Synthetic oligonucleotide
guguuacucaucuuuaugu

SEQ ID NO: 2171538 - RNA, 19 nt, Artificial Sequence
  Description of Artificial Sequence: Synthetic oligonucleotide
ugcugaguacauacccugc

SEQ ID NO: 2171539 - RNA, 19 nt, Artificial Sequence
  Description of Artificial Sequence: Synthetic oligonucleotide
agaaacugcuauaucagaa

SEQ ID NO: 2171540 - RNA, 19 nt, Artificial Sequence
  Description of Artificial Sequence: Synthetic oligonucleotide
ucaggguuauaccucgaua

SEQ ID NO: 2171541 - RNA, 19 nt, Artificial Sequence
  Description of Artificial Sequence: Synthetic oligonucleotide
gcaucaacgaaucuucuca

SEQ ID NO: 2171542 - RNA, 19 nt, Artificial Sequence
  Description of Artificial Sequence: Synthetic oligonucleotide
gguuauaccucgauagaag

SEQ ID NO: 2171543 - RNA, 19 nt, Artificial Sequence
  Description of Artificial Sequence: Synthetic oligonucleotide
gacaacaacacacacuguu

SEQ ID NO: 2171544 - RNA, 19 nt, Artificial Sequence
  Description of Artificial Sequence: Synthetic oligonucleotide
ugaaaggcuuugauguuuu

SEQ ID NO: 2171545 - RNA, 19 nt, Artificial Sequence
  Description of Artificial Sequence: Synthetic oligonucleotide
aggagcuaugcguacauuu

SEQ ID NO: 2171546 - RNA, 19 nt, Artificial Sequence
  Description of Artificial Sequence: Synthetic oligonucleotide
ugcaucaacgaaucuucuc

SEQ ID NO: 2171547 - RNA, 19 nt, Artificial Sequence
  Description of Artificial Sequence: Synthetic oligonucleotide
caaucccacaguagggaag

SEQ ID NO: 2171548 - RNA, 19 nt, Artificial Sequence
  Description of Artificial Sequence: Synthetic oligonucleotide
agguucucggcaauguccg

SEQ ID NO: 2171549 - RNA, 19 nt, Artificial Sequence
  Description of Artificial Sequence: Synthetic oligonucleotide
cuugaggaaacacugccaa

SEQ ID NO: 2171550 - RNA, 19 nt, Artificial Sequence
  Description of Artificial Sequence: Synthetic oligonucleotide
ucggcagauaaccuuugau

SEQ ID NO: 2171551 - RNA, 19 nt, Artificial Sequence
  Description of Artificial Sequence: Synthetic oligonucleotide
uccagcuucuacauuuaua

SEQ ID NO: 2171552 - RNA, 19 nt, Artificial Sequence
  Description of Artificial Sequence: Synthetic oligonucleotide
auauugagcaacaguauuu

SEQ ID NO: 2171553 - RNA, 19 nt, Artificial Sequence
  Description of Artificial Sequence: Synthetic oligonucleotide
gggacaaauggguggaaag

SEQ ID NO: 2171554 - RNA, 19 nt, Artificial Sequence
  Description of Artificial Sequence: Synthetic oligonucleotide
ugccaauuguaaguaauau

SEQ ID NO: 2171555 - RNA, 19 nt, Artificial Sequence
  Description of Artificial Sequence: Synthetic oligonucleotide
uauaauuuccaugcaccuu

SEQ ID NO: 2171556 - RNA, 19 nt, Artificial Sequence
  Description of Artificial Sequence: Synthetic oligonucleotide
cagugcuaagucuucgaug

SEQ ID NO: 2171557 - RNA, 19 nt, Artificial Sequence
  Description of Artificial Sequence: Synthetic oligonucleotide
caacgcugggcccauguag

SEQ ID NO: 2171558 - RNA, 19 nt, Artificial Sequence
  Description of Artificial Sequence: Synthetic oligonucleotide
cugguuuguaucaucuaca

SEQ ID NO: 2171559 - RNA, 19 nt, Artificial Sequence
  Description of Artificial Sequence: Synthetic oligonucleotide
cuuugauuaaguggugcuc

SEQ ID NO: 2171560 - RNA, 19 nt, Artificial Sequence
  Description of Artificial Sequence: Synthetic oligonucleotide
gaggauaauaguuguaauu

SEQ ID NO: 2171561 - RNA, 19 nt, Artificial Sequence
  Description of Artificial Sequence: Synthetic oligonucleotide
acuagcaaccaggacccuc

SEQ ID NO: 2171562 - RNA, 19 nt, Artificial Sequence
  Description of Artificial Sequence: Synthetic oligonucleotide
acuugucauaacccaacaa

SEQ ID NO: 2171563 - RNA, 19 nt, Artificial Sequence
  Description of Artificial Sequence: Synthetic oligonucleotide
ggcagauaaccuuugauua

SEQ ID NO: 2171564 - RNA, 19 nt, Artificial Sequence
  Description of Artificial Sequence: Synthetic oligonucleotide
uacaacgcugggcccaugu

SEQ ID NO: 2171565 - RNA, 19 nt, Artificial Sequence
  Description of Artificial Sequence: Synthetic oligonucleotide
aguacauacccugccccuc

SEQ ID NO: 2171566 - RNA, 19 nt, Artificial Sequence
  Description of Artificial Sequence: Synthetic oligonucleotide
aggaaacacugccaauugu

SEQ ID NO: 2171567 - RNA, 19 nt, Artificial Sequence
  Description of Artificial Sequence: Synthetic oligonucleotide
uccguguuacucaucuuua

SEQ ID NO: 2171568 - RNA, 19 nt, Artificial Sequence
  Description of Artificial Sequence: Synthetic oligonucleotide
aggguuauaccucgauaga

SEQ ID NO: 2171569 - RNA, 19 nt, Artificial Sequence
  Description of Artificial Sequence: Synthetic oligonucleotide
acuaugacguaugugucau

SEQ ID NO: 2171570 - RNA, 19 nt, Artificial Sequence
  Description of Artificial Sequence: Synthetic oligonucleotide
uacucaucuuuauguuggc

SEQ ID NO: 2171571 - RNA, 19 nt, Artificial Sequence
  Description of Artificial Sequence: Synthetic oligonucleotide
uucaggguuauaccucgau

SEQ ID NO: 2171572 - RNA, 19 nt, Artificial Sequence
  Description of Artificial Sequence: Synthetic oligonucleotide
cuguucaggguuauaccuc

SEQ ID NO: 2171573 - RNA, 19 nt, Artificial Sequence
  Description of Artificial Sequence: Synthetic oligonucleotide
acacuuuauuacaacgcug

SEQ ID NO: 2171574 - RNA, 19 nt, Artificial Sequence
  Description of Artificial Sequence: Synthetic oligonucleotide
acaugagcagaguguauau

SEQ ID NO: 2171575 - RNA, 19 nt, Artificial Sequence
  Description of Artificial Sequence: Synthetic oligonucleotide
uaacuuucugauagagguu

SEQ ID NO: 2171576 - RNA, 19 nt, Artificial Sequence
  Description of Artificial Sequence: Synthetic oligonucleotide
cucaaggcuucuuugcuga

SEQ ID NO: 2171577 - RNA, 19 nt, Artificial Sequence
  Description of Artificial Sequence: Synthetic oligonucleotide
ucuagauuuugaggacuug

SEQ ID NO: 2171578 - RNA, 19 nt, Artificial Sequence
  Description of Artificial Sequence: Synthetic oligonucleotide
gacuugucauaacccaaca

SEQ ID NO: 2171579 - RNA, 19 nt, Artificial Sequence
  Description of Artificial Sequence: Synthetic oligonucleotide
gaaacacugccaauuguaa

SEQ ID NO: 2171580 - RNA, 19 nt, Artificial Sequence
  Description of Artificial Sequence: Synthetic oligonucleotide
gcuuuagugacaacaacac

SEQ ID NO: 2171581 - RNA, 19 nt, Artificial Sequence
  Description of Artificial Sequence: Synthetic oligonucleotide
ucuaguuuuaaggcagauu

SEQ ID NO: 2171582 - RNA, 19 nt, Artificial Sequence
  Description of Artificial Sequence: Synthetic oligonucleotide
agcuaugcguacauuucuc

SEQ ID NO: 2171583 - RNA, 19 nt, Artificial Sequence
  Description of Artificial Sequence: Synthetic oligonucleotide
gaguguauauugagcaaca

SEQ ID NO: 2171584 - RNA, 19 nt, Artificial Sequence
  Description of Artificial Sequence: Synthetic oligonucleotide
aggugauuacaaacugaac

SEQ ID NO: 2171585 - RNA, 19 nt, Artificial Sequence
  Description of Artificial Sequence: Synthetic oligonucleotide
ugcaccuucccagugcuaa

SEQ ID NO: 2171586 - RNA, 19 nt, Artificial Sequence
  Description of Artificial Sequence: Synthetic oligonucleotide
uccaugcaccuucccagug

SEQ ID NO: 2171587 - RNA, 19 nt, Artificial Sequence
  Description of Artificial Sequence: Synthetic oligonucleotide
guaucucuggagucuccag

SEQ ID NO: 2171588 - RNA, 19 nt, Artificial Sequence
  Description of Artificial Sequence: Synthetic oligonucleotide
guacauacccugccccucc

SEQ ID NO: 2171589 - RNA, 19 nt, Artificial Sequence
  Description of Artificial Sequence: Synthetic oligonucleotide
ugggaggcugguuuguauc

SEQ ID NO: 2171590 - RNA, 19 nt, Artificial Sequence
  Description of Artificial Sequence: Synthetic oligonucleotide
uucggcaacugggaggcug

SEQ ID NO: 2171591 - RNA, 19 nt, Artificial Sequence
  Description of Artificial Sequence: Synthetic oligonucleotide
uggagucuccagcuucuac

SEQ ID NO: 2171592 - RNA, 19 nt, Artificial Sequence
  Description of Artificial Sequence: Synthetic oligonucleotide
auggguggaaaguuucuuu

SEQ ID NO: 2171593 - RNA, 19 nt, Artificial Sequence
  Description of Artificial Sequence: Synthetic oligonucleotide
guguauauugagcaacagu

SEQ ID NO: 2171594 - RNA, 19 nt, Artificial Sequence
  Description of Artificial Sequence: Synthetic oligonucleotide
cugcuuucauaaaccauca

SEQ ID NO: 2171595 - RNA, 19 nt, Artificial Sequence
  Description of Artificial Sequence: Synthetic oligonucleotide
gacguaugugucaucaucu

SEQ ID NO: 2171596 - RNA, 19 nt, Artificial Sequence
  Description of Artificial Sequence: Synthetic oligonucleotide
auggucaugcacauacuga

SEQ ID NO: 2171597 - RNA, 19 nt, Artificial Sequence
  Description of Artificial Sequence: Synthetic oligonucleotide
guaggugauuacaaacuga

SEQ ID NO: 2171598 - RNA, 19 nt, Artificial Sequence
  Description of Artificial Sequence: Synthetic oligonucleotide
aacugcuauaucagaacua

SEQ ID NO: 2171599 - RNA, 19 nt, Artificial Sequence
  Description of Artificial Sequence: Synthetic oligonucleotide
cacuaugacguauguguca

SEQ ID NO: 2171600 - RNA, 19 nt, Artificial Sequence
  Description of Artificial Sequence: Synthetic oligonucleotide
aauguccguguuacucauc

SEQ ID NO: 2171601 - RNA, 19 nt, Artificial Sequence
  Description of Artificial Sequence: Synthetic oligonucleotide
ucccagugcuaagucuucg

SEQ ID NO: 2171602 - RNA, 19 nt, Artificial Sequence
  Description of Artificial Sequence: Synthetic oligonucleotide
cagcuuuagugacaacaac

SEQ ID NO: 2171603 - RNA, 19 nt, Artificial Sequence
  Description of Artificial Sequence: Synthetic oligonucleotide
aauaauggucaugcacaua

SEQ ID NO: 2171604 - RNA, 19 nt, Artificial Sequence
  Description of Artificial Sequence: Synthetic oligonucleotide
gauggaggagcuaugcgua

SEQ ID NO: 2171605 - RNA, 19 nt, Artificial Sequence
  Description of Artificial Sequence: Synthetic oligonucleotide
uuugacauguuuggccuuu

SEQ ID NO: 2171606 - RNA, 19 nt, Artificial Sequence
  Description of Artificial Sequence: Synthetic oligonucleotide
acugaaaggcuuugauguu

SEQ ID NO: 2171607 - RNA, 19 nt, Artificial Sequence
  Description of Artificial Sequence: Synthetic oligonucleotide
aaaauguuuucggcagaua

SEQ ID NO: 2171608 - RNA, 19 nt, Artificial Sequence
  Description of Artificial Sequence: Synthetic oligonucleotide
gcaaccaggacccucuaca

SEQ ID NO: 2171609 - RNA, 19 nt, Artificial Sequence
  Description of Artificial Sequence: Synthetic oligonucleotide
gcuauaucagaacuagcaa

SEQ ID NO: 2171610 - RNA, 19 nt, Artificial Sequence
  Description of Artificial Sequence: Synthetic oligonucleotide
ugacaacaacacacacugu

SEQ ID NO: 2171611 - RNA, 19 nt, Artificial Sequence
  Description of Artificial Sequence: Synthetic oligonucleotide
caaaguaaaugggcuguuc

SEQ ID NO: 2171612 - RNA, 19 nt, Artificial Sequence
  Description of Artificial Sequence: Synthetic oligonucleotide
aaccuuugauuaaguggug

SEQ ID NO: 2171613 - RNA, 19 nt, Artificial Sequence
  Description of Artificial Sequence: Synthetic oligonucleotide
ucccacaguagggaagucu

SEQ ID NO: 2171614 - RNA, 19 nt, Artificial Sequence
  Description of Artificial Sequence: Synthetic oligonucleotide
uugaggaaacacugccaau

SEQ ID NO: 2171615 - RNA, 19 nt, Artificial Sequence
  Description of Artificial Sequence: Synthetic oligonucleotide
cagaacuagcaaccaggac

SEQ ID NO: 2171616 - RNA, 19 nt, Artificial Sequence
  Description of Artificial Sequence: Synthetic oligonucleotide
ggcuguucaggguuauacc

SEQ ID NO: 2171617 - RNA, 19 nt, Artificial Sequence
  Description of Artificial Sequence: Synthetic oligonucleotide
augcguacauuucucuguu

SEQ ID NO: 2171618 - RNA, 19 nt, Artificial Sequence
  Description of Artificial Sequence: Synthetic oligonucleotide
gagcuaugcguacauuucu

SEQ ID NO: 2171619 - RNA, 19 nt, Artificial Sequence
  Description of Artificial Sequence: Synthetic oligonucleotide
acaacaacacacacuguua

SEQ ID NO: 2171620 - RNA, 19 nt, Artificial Sequence
  Description of Artificial Sequence: Synthetic oligonucleotide
gguuucaaucccacaguag

SEQ ID NO: 2171621 - RNA, 19 nt, Artificial Sequence
  Description of Artificial Sequence: Synthetic oligonucleotide
agauaaccuuugauuaagu

SEQ ID NO: 2171622 - RNA, 19 nt, Artificial Sequence
  Description of Artificial Sequence: Synthetic oligonucleotide
auuccaguaccaaaauguu

SEQ ID NO: 2171623 - RNA, 19 nt, Artificial Sequence
  Description of Artificial Sequence: Synthetic oligonucleotide
uacauacccugccccucca

SEQ ID NO: 2171624 - RNA, 19 nt, Artificial Sequence
  Description of Artificial Sequence: Synthetic oligonucleotide
cuucacauagggcuuaaau

SEQ ID NO: 2171625 - RNA, 19 nt, Artificial Sequence
  Description of Artificial Sequence: Synthetic oligonucleotide
ggcaauguccguguuacuc

SEQ ID NO: 2171626 - RNA, 19 nt, Artificial Sequence
  Description of Artificial Sequence: Synthetic oligonucleotide
aaguggugcucugggacaa

SEQ ID NO: 2171627 - RNA, 19 nt, Artificial Sequence
  Description of Artificial Sequence: Synthetic oligonucleotide
guauaguugcucucugccu

SEQ ID NO: 2171628 - RNA, 19 nt, Artificial Sequence
  Description of Artificial Sequence: Synthetic oligonucleotide
caucaacgaaucuucucaa

SEQ ID NO: 2171629 - RNA, 19 nt, Artificial Sequence
  Description of Artificial Sequence: Synthetic oligonucleotide
gcuuaaaucuccucccaaa

SEQ ID NO: 2171630 - RNA, 19 nt, Artificial Sequence
  Description of Artificial Sequence: Synthetic oligonucleotide
cuagauuuugaggacuugu

SEQ ID NO: 2171631 - RNA, 19 nt, Artificial Sequence
  Description of Artificial Sequence: Synthetic oligonucleotide
cuagcaaccaggacccucu

SEQ ID NO: 2171632 - RNA, 19 nt, Artificial Sequence
  Description of Artificial Sequence: Synthetic oligonucleotide
gguuuguaucaucuacaca

SEQ ID NO: 2171633 - RNA, 19 nt, Artificial Sequence
  Description of Artificial Sequence: Synthetic oligonucleotide
cagugcaguaggugauuac

SEQ ID NO: 2171634 - RNA, 19 nt, Artificial Sequence
  Description of Artificial Sequence: Synthetic oligonucleotide
gacaaauggguggaaaguu

SEQ ID NO: 2171635 - RNA, 19 nt, Artificial Sequence
  Description of Artificial Sequence: Synthetic oligonucleotide
gcuguucaggguuauaccu

SEQ ID NO: 2171636 - RNA, 19 nt, Artificial Sequence
  Description of Artificial Sequence: Synthetic oligonucleotide
cugccaauuguaaguaaua

SEQ ID NO: 2171637 - RNA, 19 nt, Artificial Sequence
  Description of Artificial Sequence: Synthetic oligonucleotide
augacguaugugucaucau

SEQ ID NO: 2171638 - RNA, 19 nt, Artificial Sequence
  Description of Artificial Sequence: Synthetic oligonucleotide
guuuucggcagauaaccuu

SEQ ID NO: 2171639 - RNA, 19 nt, Artificial Sequence
  Description of Artificial Sequence: Synthetic oligonucleotide
cagaguguauauugagcaa

SEQ ID NO: 2171640 - RNA, 19 nt, Artificial Sequence
  Description of Artificial Sequence: Synthetic oligonucleotide
aggcagauuuguucagcau

SEQ ID NO: 2171641 - RNA, 19 nt, Artificial Sequence
  Description of Artificial Sequence: Synthetic oligonucleotide
gaguacauacccugccccu

SEQ ID NO: 2171642 - RNA, 19 nt, Artificial Sequence
  Description of Artificial Sequence: Synthetic oligonucleotide
ggacuugucauaacccaac

SEQ ID NO: 2171643 - RNA, 19 nt, Artificial Sequence
  Description of Artificial Sequence: Synthetic oligonucleotide
acgaaucuucucaaggcuu

SEQ ID NO: 2171644 - RNA, 19 nt, Artificial Sequence
  Description of Artificial Sequence: Synthetic oligonucleotide
aucucagauuguccacuau

SEQ ID NO: 2171645 - RNA, 19 nt, Artificial Sequence
  Description of Artificial Sequence: Synthetic oligonucleotide
uaccucgauagaagccauc

SEQ ID NO: 2171646 - RNA, 19 nt, Artificial Sequence
  Description of Artificial Sequence: Synthetic oligonucleotide
ggagcuaugcguacauuuc

SEQ ID NO: 2171647 - RNA, 19 nt, Artificial Sequence
  Description of Artificial Sequence: Synthetic oligonucleotide
uguagcccugcuucacaua

SEQ ID NO: 2171648 - RNA, 19 nt, Artificial Sequence
  Description of Artificial Sequence: Synthetic oligonucleotide
aucuacacaugagcagagu

SEQ ID NO: 2171649 - RNA, 19 nt, Artificial Sequence
  Description of Artificial Sequence: Synthetic oligonucleotide
gcccauguagcuuugacau

SEQ ID NO: 2171650 - RNA, 19 nt, Artificial Sequence
  Description of Artificial Sequence: Synthetic oligonucleotide
guccacuaugacguaugug

SEQ ID NO: 2171651 - RNA, 19 nt, Artificial Sequence
  Description of Artificial Sequence: Synthetic oligonucleotide
gggcuguucaggguuauac

SEQ ID NO: 2171652 - RNA, 19 nt, Artificial Sequence
  Description of Artificial Sequence: Synthetic oligonucleotide
gcaacaguauuucuuucua

SEQ ID NO: 2171653 - RNA, 19 nt, Artificial Sequence
  Description of Artificial Sequence: Synthetic oligonucleotide
cuaugacguaugugucauc

SEQ ID NO: 2171654 - RNA, 19 nt, Artificial Sequence
  Description of Artificial Sequence: Synthetic oligonucleotide
acccucuacaggaggauaa

SEQ ID NO: 2171655 - RNA, 19 nt, Artificial Sequence
  Description of Artificial Sequence: Synthetic oligonucleotide
cuucccagugcuaagucuu

SEQ ID NO: 2171656 - RNA, 19 nt, Artificial Sequence
  Description of Artificial Sequence: Synthetic oligonucleotide
ggguuauaccucgauagaa

SEQ ID NO: 2171657 - RNA, 19 nt, Artificial Sequence
  Description of Artificial Sequence: Synthetic oligonucleotide
gauagagguucucggcaau

SEQ ID NO: 2171658 - RNA, 19 nt, Artificial Sequence
  Description of Artificial Sequence: Synthetic oligonucleotide
auuacaacgcugggcccau

SEQ ID NO: 2171659 - RNA, 19 nt, Artificial Sequence
  Description of Artificial Sequence: Synthetic oligonucleotide
ccacuaugacguauguguc

SEQ ID NO: 2171660 - RNA, 19 nt, Artificial Sequence
  Description of Artificial Sequence: Synthetic oligonucleotide
acccaacaaagaauuuuaa

SEQ ID NO: 2171661 - RNA, 19 nt, Artificial Sequence
  Description of Artificial Sequence: Synthetic oligonucleotide
gugcaguaggugauuacaa

SEQ ID NO: 2171662 - RNA, 19 nt, Artificial Sequence
  Description of Artificial Sequence: Synthetic oligonucleotide
ccaugcaccuucccagugc

SEQ ID NO: 2171663 - RNA, 19 nt, Artificial Sequence
  Description of Artificial Sequence: Synthetic oligonucleotide
cgaaucuucucaaggcuuc

SEQ ID NO: 2171664 - RNA, 19 nt, Artificial Sequence
  Description of Artificial Sequence: Synthetic oligonucleotide
cauagggcuuaaaucuccu

SEQ ID NO: 2171665 - RNA, 19 nt, Artificial Sequence
  Description of Artificial Sequence: Synthetic oligonucleotide
uagugaucuucaggguguc

SEQ ID NO: 2171666 - RNA, 19 nt, Artificial Sequence
  Description of Artificial Sequence: Synthetic oligonucleotide
ucuuucccagugguaucuc

SEQ ID NO: 2171667 - RNA, 19 nt, Artificial Sequence
  Description of Artificial Sequence: Synthetic oligonucleotide
augcaucaacgaaucuucu

SEQ ID NO: 2171668 - RNA, 19 nt, Artificial Sequence
  Description of Artificial Sequence: Synthetic oligonucleotide
caucucagauuguccacua

SEQ ID NO: 2171669 - RNA, 19 nt, Artificial Sequence
  Description of Artificial Sequence: Synthetic oligonucleotide
acaacgcugggcccaugua

SEQ ID NO: 2171670 - RNA, 19 nt, Artificial Sequence
  Description of Artificial Sequence: Synthetic oligonucleotide
acgcugggcccauguagcu

SEQ ID NO: 2171671 - RNA, 19 nt, Artificial Sequence
  Description of Artificial Sequence: Synthetic oligonucleotide
gccaucucagauuguccac

SEQ ID NO: 2171672 - RNA, 19 nt, Artificial Sequence
  Description of Artificial Sequence: Synthetic oligonucleotide
ggaaaguuucuuucccagu

SEQ ID NO: 2171673 - RNA, 19 nt, Artificial Sequence
  Description of Artificial Sequence: Synthetic oligonucleotide
caaaauguuuucggcagau

SEQ ID NO: 2171674 - RNA, 19 nt, Artificial Sequence
  Description of Artificial Sequence: Synthetic oligonucleotide
ggcuuaaaucuccucccaa

SEQ ID NO: 2171675 - RNA, 19 nt, Artificial Sequence
  Description of Artificial Sequence: Synthetic oligonucleotide
ggaggauaauaguuguaau

SEQ ID NO: 2171676 - RNA, 19 nt, Artificial Sequence
  Description of Artificial Sequence: Synthetic oligonucleotide
caugcaccuucccagugcu

SEQ ID NO: 2171677 - RNA, 19 nt, Artificial Sequence
  Description of Artificial Sequence: Synthetic oligonucleotide
auaccucgauagaagccau

SEQ ID NO: 2171678 - RNA, 19 nt, Artificial Sequence
  Description of Artificial Sequence: Synthetic oligonucleotide
aacuagcaaccaggacccu

SEQ ID NO: 2171679 - RNA, 19 nt, Artificial Sequence
  Description of Artificial Sequence: Synthetic oligonucleotide
cucuagauuuugaggacuu

SEQ ID NO: 2171680 - RNA, 19 nt, Artificial Sequence
  Description of Artificial Sequence: Synthetic oligonucleotide
gcuaugcguacauuucucu

SEQ ID NO: 2171681 - RNA, 19 nt, Artificial Sequence
  Description of Artificial Sequence: Synthetic oligonucleotide
gggcuuaaaucuccuccca

SEQ ID NO: 2171682 - RNA, 19 nt, Artificial Sequence
  Description of Artificial Sequence: Synthetic oligonucleotide
ugcuucacauagggcuuaa

SEQ ID NO: 2171683 - RNA, 19 nt, Artificial Sequence
  Description of Artificial Sequence: Synthetic oligonucleotide
ggacaaauggguggaaagu

SEQ ID NO: 2171684 - RNA, 19 nt, Artificial Sequence
  Description of Artificial Sequence: Synthetic oligonucleotide
ucucggcaauguccguguu

SEQ ID NO: 2171685 - RNA, 19 nt, Artificial Sequence
  Description of Artificial Sequence: Synthetic oligonucleotide
uagcaaccaggacccucua

SEQ ID NO: 2171686 - RNA, 19 nt, Artificial Sequence
  Description of Artificial Sequence: Synthetic oligonucleotide
gcaccuucccagugcuaag

SEQ ID NO: 2171687 - RNA, 19 nt, Artificial Sequence
  Description of Artificial Sequence: Synthetic oligonucleotide
ccauguagcuuugacaugu

SEQ ID NO: 2171688 - RNA, 19 nt, Artificial Sequence
  Description of Artificial Sequence: Synthetic oligonucleotide
caauguccguguuacucau

SEQ ID NO: 2171689 - RNA, 19 nt, Artificial Sequence
  Description of Artificial Sequence: Synthetic oligonucleotide
gacccucuacaggaggaua

SEQ ID NO: 2171690 - RNA, 19 nt, Artificial Sequence
  Description of Artificial Sequence: Synthetic oligonucleotide
aguugcucucugccuucuu

SEQ ID NO: 2171691 - RNA, 19 nt, Artificial Sequence
  Description of Artificial Sequence: Synthetic oligonucleotide
cccauguagcuuugacaug

SEQ ID NO: 2171692 - RNA, 19 nt, Artificial Sequence
  Description of Artificial Sequence: Synthetic oligonucleotide
cucggcaauguccguguua

SEQ ID NO: 2171693 - RNA, 19 nt, Artificial Sequence
  Description of Artificial Sequence: Synthetic oligonucleotide
gcguacauuucucuguuuu

SEQ ID NO: 2171694 - RNA, 19 nt, Artificial Sequence
  Description of Artificial Sequence: Synthetic oligonucleotide
agaagccaucucagauugu

SEQ ID NO: 2171695 - RNA, 19 nt, Artificial Sequence
  Description of Artificial Sequence: Synthetic oligonucleotide
uuacaacgcugggcccaug

SEQ ID NO: 2171696 - RNA, 19 nt, Artificial Sequence
  Description of Artificial Sequence: Synthetic oligonucleotide
guucaggguuauaccucga

SEQ ID NO: 2171697 - RNA, 19 nt, Artificial Sequence
  Description of Artificial Sequence: Synthetic oligonucleotide
cagcuucuacauuuauaau

SEQ ID NO: 2171698 - RNA, 19 nt, Artificial Sequence
  Description of Artificial Sequence: Synthetic oligonucleotide
cuuugacauguuuggccuu

SEQ ID NO: 2171699 - RNA, 19 nt, Artificial Sequence
  Description of Artificial Sequence: Synthetic oligonucleotide
ggaggagcuaugcguacau

SEQ ID NO: 2171700 - RNA, 19 nt, Artificial Sequence
  Description of Artificial Sequence: Synthetic oligonucleotide
ugggcuguucaggguuaua

SEQ ID NO: 2171701 - RNA, 19 nt, Artificial Sequence
  Description of Artificial Sequence: Synthetic oligonucleotide
guuuuccaguauaguugcu

SEQ ID NO: 2171702 - RNA, 19 nt, Artificial Sequence
  Description of Artificial Sequence: Synthetic oligonucleotide
cagauuuguucagcauugu

SEQ ID NO: 2171703 - RNA, 19 nt, Artificial Sequence
  Description of Artificial Sequence: Synthetic oligonucleotide
aguggugcucugggacaaa

SEQ ID NO: 2171704 - RNA, 19 nt, Artificial Sequence
  Description of Artificial Sequence: Synthetic oligonucleotide
gcugggcccauguagcuuu

SEQ ID NO: 2171705 - RNA, 19 nt, Artificial Sequence
  Description of Artificial Sequence: Synthetic oligonucleotide
caccuucccagugcuaagu

SEQ ID NO: 2171706 - RNA, 19 nt, Artificial Sequence
  Description of Artificial Sequence: Synthetic oligonucleotide
cauguagcuuugacauguu

SEQ ID NO: 2171707 - RNA, 19 nt, Artificial Sequence
  Description of Artificial Sequence: Synthetic oligonucleotide
auucggcaacugggaggcu

SEQ ID NO: 2171708 - RNA, 19 nt, Artificial Sequence
  Description of Artificial Sequence: Synthetic oligonucleotide
guggugcucugggacaaau

SEQ ID NO: 2171709 - RNA, 19 nt, Artificial Sequence
  Description of Artificial Sequence: Synthetic oligonucleotide
ccaucucagauuguccacu

SEQ ID NO: 2171710 - RNA, 19 nt, Artificial Sequence
  Description of Artificial Sequence: Synthetic oligonucleotide
gucuucgauggaggagcua

SEQ ID NO: 2171711 - RNA, 19 nt, Artificial Sequence
  Description of Artificial Sequence: Synthetic oligonucleotide
augcaccuucccagugcua

SEQ ID NO: 2171712 - RNA, 19 nt, Artificial Sequence
  Description of Artificial Sequence: Synthetic oligonucleotide
ggcaacugggaggcugguu

SEQ ID NO: 2171713 - RNA, 19 nt, Artificial Sequence
  Description of Artificial Sequence: Synthetic oligonucleotide
cccucuacaggaggauaau

SEQ ID NO: 2171714 - RNA, 19 nt, Artificial Sequence
  Description of Artificial Sequence: Synthetic oligonucleotide
cggcaauguccguguuacu

SEQ ID NO: 2171715 - RNA, 19 nt, Artificial Sequence
  Description of Artificial Sequence: Synthetic oligonucleotide
uuuauugacagcaaaaguc

SEQ ID NO: 2171716 - RNA, 19 nt, Artificial Sequence
  Description of Artificial Sequence: Synthetic oligonucleotide
aacaguguggcauagcagg

SEQ ID NO: 2171717 - RNA, 19 nt, Artificial Sequence
  Description of Artificial Sequence: Synthetic oligonucleotide
agauguaggaaccagcgcc

SEQ ID NO: 2171718 - RNA, 19 nt, Artificial Sequence
  Description of Artificial Sequence: Synthetic oligonucleotide
aaguacacccucuuguugc

SEQ ID NO: 2171719 - RNA, 19 nt, Artificial Sequence
  Description of Artificial Sequence: Synthetic oligonucleotide
gaagcuaucgggaacaugg

SEQ ID NO: 2171720 - RNA, 19 nt, Artificial Sequence
  Description of Artificial Sequence: Synthetic oligonucleotide
aaguacacggucuugucac

SEQ ID NO: 2171721 - RNA, 19 nt, Artificial Sequence
  Description of Artificial Sequence: Synthetic oligonucleotide
aauguggugacgcucgagg

SEQ ID NO: 2171722 - RNA, 19 nt, Artificial Sequence
  Description of Artificial Sequence: Synthetic oligonucleotide
gcauaaauaauacuggugg

SEQ ID NO: 2171723 - RNA, 19 nt, Artificial Sequence
  Description of Artificial Sequence: Synthetic oligonucleotide
aggcaagacacacugaggc

SEQ ID NO: 2171724 - RNA, 19 nt, Artificial Sequence
  Description of Artificial Sequence: Synthetic oligonucleotide
ucacacuugagacagaacu

SEQ ID NO: 2171725 - RNA, 19 nt, Artificial Sequence
  Description of Artificial Sequence: Synthetic oligonucleotide
auaaauaauacuggugggc

SEQ ID NO: 2171726 - RNA, 19 nt, Artificial Sequence
  Description of Artificial Sequence: Synthetic oligonucleotide
cagagcauaaauaauacug

SEQ ID NO: 2171727 - RNA, 19 nt, Artificial Sequence
  Description of Artificial Sequence: Synthetic oligonucleotide
uucucagcgaaguacacgg

SEQ ID NO: 2171728 - RNA, 19 nt, Artificial Sequence
  Description of Artificial Sequence: Synthetic oligonucleotide
auauucacaccuuuggguc

SEQ ID NO: 2171729 - RNA, 19 nt, Artificial Sequence
  Description of Artificial Sequence: Synthetic oligonucleotide
uucucagcaaaguacaccc

SEQ ID NO: 2171730 - RNA, 19 nt, Artificial Sequence
  Description of Artificial Sequence: Synthetic oligonucleotide
uauauucacaccuuugggu

SEQ ID NO: 2171731 - RNA, 19 nt, Artificial Sequence
  Description of Artificial Sequence: Synthetic oligonucleotide
agggcccucagucagaggc

SEQ ID NO: 2171732 - RNA, 19 nt, Artificial Sequence
  Description of Artificial Sequence: Synthetic oligonucleotide
aucgaggacacauauuggg

SEQ ID NO: 2171733 - RNA, 19 nt, Artificial Sequence
  Description of Artificial Sequence: Synthetic oligonucleotide
uccauagcaaggcuugugg

SEQ ID NO: 2171734 - RNA, 19 nt, Artificial Sequence
  Description of Artificial Sequence: Synthetic oligonucleotide
cauaaauaauacugguggg

SEQ ID NO: 2171735 - RNA, 19 nt, Artificial Sequence
  Description of Artificial Sequence: Synthetic oligonucleotide
auagauauagcuucccaca

SEQ ID NO: 2171736 - RNA, 19 nt, Artificial Sequence
  Description of Artificial Sequence: Synthetic oligonucleotide
aauacuggugggcaugugu

SEQ ID NO: 2171737 - RNA, 19 nt, Artificial Sequence
  Description of Artificial Sequence: Synthetic oligonucleotide
uaaauaauacuggugggca

SEQ ID NO: 2171738 - RNA, 19 nt, Artificial Sequence
  Description of Artificial Sequence: Synthetic oligonucleotide
gauauagcuucccacagca

SEQ ID NO: 2171739 - RNA, 19 nt, Artificial Sequence
  Description of Artificial Sequence: Synthetic oligonucleotide
agauauagcuucccacagc

SEQ ID NO: 2171740 - RNA, 19 nt, Artificial Sequence
  Description of Artificial Sequence: Synthetic oligonucleotide
cucggaagaagcuaucggg

SEQ ID NO: 2171741 - RNA, 19 nt, Artificial Sequence
  Description of Artificial Sequence: Synthetic oligonucleotide
cugaacugugccuucaggg

SEQ ID NO: 2171742 - RNA, 19 nt, Artificial Sequence
  Description of Artificial Sequence: Synthetic oligonucleotide
uagauauagcuucccacag

SEQ ID NO: 2171743 - RNA, 19 nt, Artificial Sequence
  Description of Artificial Sequence: Synthetic oligonucleotide
uucucguagauguaggaac

SEQ ID NO: 2171744 - RNA, 19 nt, Artificial Sequence
  Description of Artificial Sequence: Synthetic oligonucleotide
acagcaaaagucuccguag

SEQ ID NO: 2171745 - RNA, 19 nt, Artificial Sequence
  Description of Artificial Sequence: Synthetic oligonucleotide
cauagauauagcuucccac

SEQ ID NO: 2171746 - RNA, 19 nt, Artificial Sequence
  Description of Artificial Sequence: Synthetic oligonucleotide
auugacagcaaaagucucc

SEQ ID NO: 2171747 - RNA, 19 nt, Artificial Sequence
  Description of Artificial Sequence: Synthetic oligonucleotide
ucauaggagcgccaccucg

SEQ ID NO: 2171748 - RNA, 19 nt, Artificial Sequence
  Description of Artificial Sequence: Synthetic oligonucleotide
gagaauuccauagcaaggc

SEQ ID NO: 2171749 - RNA, 19 nt, Artificial Sequence
  Description of Artificial Sequence: Synthetic oligonucleotide
agguuugcaggcaagacac

SEQ ID NO: 2171750 - RNA, 19 nt, Artificial Sequence
  Description of Artificial Sequence: Synthetic oligonucleotide
agagcucaccuucucagcg

SEQ ID NO: 2171751 - RNA, 19 nt, Artificial Sequence
  Description of Artificial Sequence: Synthetic oligonucleotide
aucaccggcaagcagagca

SEQ ID NO: 2171752 - RNA, 19 nt, Artificial Sequence
  Description of Artificial Sequence: Synthetic oligonucleotide
agggauaucauaggagcgc

SEQ ID NO: 2171753 - RNA, 19 nt, Artificial Sequence
  Description of Artificial Sequence: Synthetic oligonucleotide
ugagacagaacuugugcca

SEQ ID NO: 2171754 - RNA, 19 nt, Artificial Sequence
  Description of Artificial Sequence: Synthetic oligonucleotide
ucauagauauagcuuccca

SEQ ID NO: 2171755 - RNA, 19 nt, Artificial Sequence
  Description of Artificial Sequence: Synthetic oligonucleotide
ugaaccacgugcacccugg

SEQ ID NO: 2171756 - RNA, 19 nt, Artificial Sequence
  Description of Artificial Sequence: Synthetic oligonucleotide
ucuagggcugaacugugcc

SEQ ID NO: 2171757 - RNA, 19 nt, Artificial Sequence
  Description of Artificial Sequence: Synthetic oligonucleotide
cacuuggaggccauggucg

SEQ ID NO: 2171758 - RNA, 19 nt, Artificial Sequence
  Description of Artificial Sequence: Synthetic oligonucleotide
auggccaucaccggcaagc

SEQ ID NO: 2171759 - RNA, 19 nt, Artificial Sequence
  Description of Artificial Sequence: Synthetic oligonucleotide
agagagcucaccuucucag

SEQ ID NO: 2171760 - RNA, 19 nt, Artificial Sequence
  Description of Artificial Sequence: Synthetic oligonucleotide
agagaauuccauagcaagg

SEQ ID NO: 2171761 - RNA, 19 nt, Artificial Sequence
  Description of Artificial Sequence: Synthetic oligonucleotide
aacugugccuucagggucc

SEQ ID NO: 2171762 - RNA, 19 nt, Artificial Sequence
  Description of Artificial Sequence: Synthetic oligonucleotide
uguugcagcgcucacacuu

SEQ ID NO: 2171763 - RNA, 19 nt, Artificial Sequence
  Description of Artificial Sequence: Synthetic oligonucleotide
agcagagcauaaauaauac

SEQ ID NO: 2171764 - RNA, 19 nt, Artificial Sequence
  Description of Artificial Sequence: Synthetic oligonucleotide
aacuugugccaguccuugc

SEQ ID NO: 2171765 - RNA, 19 nt, Artificial Sequence
  Description of Artificial Sequence: Synthetic oligonucleotide
uggucggugcgcucgaucg

SEQ ID NO: 2171766 - RNA, 19 nt, Artificial Sequence
  Description of Artificial Sequence: Synthetic oligonucleotide
cucgguucgcaccacaggg

SEQ ID NO: 2171767 - RNA, 19 nt, Artificial Sequence
  Description of Artificial Sequence: Synthetic oligonucleotide
ucggaagaagcuaucggga

SEQ ID NO: 2171768 - RNA, 19 nt, Artificial Sequence
  Description of Artificial Sequence: Synthetic oligonucleotide
gcaucgaggacacauauug

SEQ ID NO: 2171769 - RNA, 19 nt, Artificial Sequence
  Description of Artificial Sequence: Synthetic oligonucleotide
ugaacugugccuucagggu

SEQ ID NO: 2171770 - RNA, 19 nt, Artificial Sequence
  Description of Artificial Sequence: Synthetic oligonucleotide
ucagcgaaguacacggucu

SEQ ID NO: 2171771 - RNA, 19 nt, Artificial Sequence
  Description of Artificial Sequence: Synthetic oligonucleotide
agcaccgguguucacuccc

SEQ ID NO: 2171772 - RNA, 19 nt, Artificial Sequence
  Description of Artificial Sequence: Synthetic oligonucleotide
uauucacaccuuugggucc

SEQ ID NO: 2171773 - RNA, 19 nt, Artificial Sequence
  Description of Artificial Sequence: Synthetic oligonucleotide
uccguagcugugaaccacg

SEQ ID NO: 2171774 - RNA, 19 nt, Artificial Sequence
  Description of Artificial Sequence: Synthetic oligonucleotide
uaucauaggagcgccaccu

SEQ ID NO: 2171775 - RNA, 19 nt, Artificial Sequence
  Description of Artificial Sequence: Synthetic oligonucleotide
cagggauaucauaggagcg

SEQ ID NO: 2171776 - RNA, 19 nt, Artificial Sequence
  Description of Artificial Sequence: Synthetic oligonucleotide
gauaucauaggagcgccac

SEQ ID NO: 2171777 - RNA, 19 nt, Artificial Sequence
  Description of Artificial Sequence: Synthetic oligonucleotide
agaaaggcuucccaucaug

SEQ ID NO: 2171778 - RNA, 19 nt, Artificial Sequence
  Description of Artificial Sequence: Synthetic oligonucleotide
cuuguugcaucgaggacac

SEQ ID NO: 2171779 - RNA, 19 nt, Artificial Sequence
  Description of Artificial Sequence: Synthetic oligonucleotide
cacauauuggguuccccag

SEQ ID NO: 2171780 - RNA, 19 nt, Artificial Sequence
  Description of Artificial Sequence: Synthetic oligonucleotide
cauaggagcgccaccucgg

SEQ ID NO: 2171781 - RNA, 19 nt, Artificial Sequence
  Description of Artificial Sequence: Synthetic oligonucleotide
ucgaggacacauauugggu

SEQ ID NO: 2171782 - RNA, 19 nt, Artificial Sequence
  Description of Artificial Sequence: Synthetic oligonucleotide
gucuccguagcugugaacc

SEQ ID NO: 2171783 - RNA, 19 nt, Artificial Sequence
  Description of Artificial Sequence: Synthetic oligonucleotide
gugaauguggugacgcucg

SEQ ID NO: 2171784 - RNA, 19 nt, Artificial Sequence
  Description of Artificial Sequence: Synthetic oligonucleotide
uauugacagcaaaagucuc

SEQ ID NO: 2171785 - RNA, 19 nt, Artificial Sequence
  Description of Artificial Sequence: Synthetic oligonucleotide
acacauauuggguucccca

SEQ ID NO: 2171786 - RNA, 19 nt, Artificial Sequence
  Description of Artificial Sequence: Synthetic oligonucleotide
caccuucucagcaaaguac

SEQ ID NO: 2171787 - RNA, 19 nt, Artificial Sequence
  Description of Artificial Sequence: Synthetic oligonucleotide
uguugcaucgaggacacau

SEQ ID NO: 2171788 - RNA, 19 nt, Artificial Sequence
  Description of Artificial Sequence: Synthetic oligonucleotide
auagcuucccacagcaccg

SEQ ID NO: 2171789 - RNA, 19 nt, Artificial Sequence
  Description of Artificial Sequence: Synthetic oligonucleotide
ucagucagaggcuucucgu

SEQ ID NO: 2171790 - RNA, 19 nt, Artificial Sequence
  Description of Artificial Sequence: Synthetic oligonucleotide
aggagcgccaccucggaag

SEQ ID NO: 2171791 - RNA, 19 nt, Artificial Sequence
  Description of Artificial Sequence: Synthetic oligonucleotide
uccccagugaaugugguga

SEQ ID NO: 2171792 - RNA, 19 nt, Artificial Sequence
  Description of Artificial Sequence: Synthetic oligonucleotide
caaacaguguggcauagca

SEQ ID NO: 2171793 - RNA, 19 nt, Artificial Sequence
  Description of Artificial Sequence: Synthetic oligonucleotide
uuugcaggcaagacacacu

SEQ ID NO: 2171794 - RNA, 19 nt, Artificial Sequence
  Description of Artificial Sequence: Synthetic oligonucleotide
gauguaggaaccagcgccc

SEQ ID NO: 2171795 - RNA, 19 nt, Artificial Sequence
  Description of Artificial Sequence: Synthetic oligonucleotide
cuaucgggaacaugggaac

SEQ ID NO: 2171796 - RNA, 19 nt, Artificial Sequence
  Description of Artificial Sequence: Synthetic oligonucleotide
aaacaguguggcauagcag

SEQ ID NO: 2171797 - RNA, 19 nt, Artificial Sequence
  Description of Artificial Sequence: Synthetic oligonucleotide
acacccucuuguugcaucg

SEQ ID NO: 2171798 - RNA, 19 nt, Artificial Sequence
  Description of Artificial Sequence: Synthetic oligonucleotide
cuucucagcaaaguacacc

SEQ ID NO: 2171799 - RNA, 19 nt, Artificial Sequence
  Description of Artificial Sequence: Synthetic oligonucleotide
caucgaggacacauauugg

SEQ ID NO: 2171800 - RNA, 19 nt, Artificial Sequence
  Description of Artificial Sequence: Synthetic oligonucleotide
ugugccuucaggguccuug

SEQ ID NO: 2171801 - RNA, 19 nt, Artificial Sequence
  Description of Artificial Sequence: Synthetic oligonucleotide
cacuugggacacuuggagg

SEQ ID NO: 2171802 - RNA, 19 nt, Artificial Sequence
  Description of Artificial Sequence: Synthetic oligonucleotide
uaggcgacccugaggacag

SEQ ID NO: 2171803 - RNA, 19 nt, Artificial Sequence
  Description of Artificial Sequence: Synthetic oligonucleotide
cucagucagaggcuucucg

SEQ ID NO: 2171804 - RNA, 19 nt, Artificial Sequence
  Description of Artificial Sequence: Synthetic oligonucleotide
gagacagaacuugugccag

SEQ ID NO: 2171805 - RNA, 19 nt, Artificial Sequence
  Description of Artificial Sequence: Synthetic oligonucleotide
uguggugacgcucgaggcu

SEQ ID NO: 2171806 - RNA, 19 nt, Artificial Sequence
  Description of Artificial Sequence: Synthetic oligonucleotide
gaggacacauauuggguuc

SEQ ID NO: 2171807 - RNA, 19 nt, Artificial Sequence
  Description of Artificial Sequence: Synthetic oligonucleotide
ucccaucaugcucagcgug

SEQ ID NO: 2171808 - RNA, 19 nt, Artificial Sequence
  Description of Artificial Sequence: Synthetic oligonucleotide
agcaaaguacacccucuug

SEQ ID NO: 2171809 - RNA, 19 nt, Artificial Sequence
  Description of Artificial Sequence: Synthetic oligonucleotide
aggacacauauuggguucc

SEQ ID NO: 2171810 - RNA, 19 nt, Artificial Sequence
  Description of Artificial Sequence: Synthetic oligonucleotide
aguccuugcccagagagcu

SEQ ID NO: 2171811 - RNA, 19 nt, Artificial Sequence
  Description of Artificial Sequence: Synthetic oligonucleotide
gaacacaggcacucaggcc

SEQ ID NO: 2171812 - RNA, 19 nt, Artificial Sequence
  Description of Artificial Sequence: Synthetic oligonucleotide
gcaggcaagacacacugag

SEQ ID NO: 2171813 - RNA, 19 nt, Artificial Sequence
  Description of Artificial Sequence: Synthetic oligonucleotide
gaacugugccuucaggguc

SEQ ID NO: 2171814 - RNA, 19 nt, Artificial Sequence
  Description of Artificial Sequence: Synthetic oligonucleotide
aaagucuccguagcuguga

SEQ ID NO: 2171815 - RNA, 19 nt, Artificial Sequence
  Description of Artificial Sequence: Synthetic oligonucleotide
gcaagcagagcauaaauaa

SEQ ID NO: 2171816 - RNA, 19 nt, Artificial Sequence
  Description of Artificial Sequence: Synthetic oligonucleotide
ucagcaugcccgccagggg

SEQ ID NO: 2171817 - RNA, 19 nt, Artificial Sequence
  Description of Artificial Sequence: Synthetic oligonucleotide
aucgggaacaugggaacac

SEQ ID NO: 2171818 - RNA, 19 nt, Artificial Sequence
  Description of Artificial Sequence: Synthetic oligonucleotide
gcaacagggauaucauagg

SEQ ID NO: 2171819 - RNA, 19 nt, Artificial Sequence
  Description of Artificial Sequence: Synthetic oligonucleotide
cagaucuagggcugaacug

SEQ ID NO: 2171820 - RNA, 19 nt, Artificial Sequence
  Description of Artificial Sequence: Synthetic oligonucleotide
cauagcaaggcuuguggca

SEQ ID NO: 2171821 - RNA, 19 nt, Artificial Sequence
  Description of Artificial Sequence: Synthetic oligonucleotide
ugggaaugcugugagcuca

SEQ ID NO: 2171822 - RNA, 19 nt, Artificial Sequence
  Description of Artificial Sequence: Synthetic oligonucleotide
cuucucagcgaaguacacg

SEQ ID NO: 2171823 - RNA, 19 nt, Artificial Sequence
  Description of Artificial Sequence: Synthetic oligonucleotide
ucguagauguaggaaccag

SEQ ID NO: 2171824 - RNA, 19 nt, Artificial Sequence
  Description of Artificial Sequence: Synthetic oligonucleotide
acauauuggguuccccagu

SEQ ID NO: 2171825 - RNA, 19 nt, Artificial Sequence
  Description of Artificial Sequence: Synthetic oligonucleotide
aagcuaucgggaacauggg

SEQ ID NO: 2171826 - RNA, 19 nt, Artificial Sequence
  Description of Artificial Sequence: Synthetic oligonucleotide
cagcgcucacacuugagac

SEQ ID NO: 2171827 - RNA, 19 nt, Artificial Sequence
  Description of Artificial Sequence: Synthetic oligonucleotide
gagagcucaccuucucagc

SEQ ID NO: 2171828 - RNA, 19 nt, Artificial Sequence
  Description of Artificial Sequence: Synthetic oligonucleotide
ucaugcucagcguggcccc

SEQ ID NO: 2171829 - RNA, 19 nt, Artificial Sequence
  Description of Artificial Sequence: Synthetic oligonucleotide
uuggguccaaagagaauuc

SEQ ID NO: 2171830 - RNA, 19 nt, Artificial Sequence
  Description of Artificial Sequence: Synthetic oligonucleotide
aucauaggagcgccaccuc

SEQ ID NO: 2171831 - RNA, 19 nt, Artificial Sequence
  Description of Artificial Sequence: Synthetic oligonucleotide
ugacgcucgaggcuuugcu

SEQ ID NO: 2171832 - RNA, 19 nt, Artificial Sequence
  Description of Artificial Sequence: Synthetic oligonucleotide
accucggaagaagcuaucg

SEQ ID NO: 2171833 - RNA, 19 nt, Artificial Sequence
  Description of Artificial Sequence: Synthetic oligonucleotide
agcugugaaccacgugcac

SEQ ID NO: 2171834 - RNA, 19 nt, Artificial Sequence
  Description of Artificial Sequence: Synthetic oligonucleotide
gugggcaacagggauauca

SEQ ID NO: 2171835 - RNA, 19 nt, Artificial Sequence
  Description of Artificial Sequence: Synthetic oligonucleotide
aaaagucuccguagcugug

SEQ ID NO: 2171836 - RNA, 19 nt, Artificial Sequence
  Description of Artificial Sequence: Synthetic oligonucleotide
auacuggugggcaugugug

SEQ ID NO: 2171837 - RNA, 19 nt, Artificial Sequence
  Description of Artificial Sequence: Synthetic oligonucleotide
ccaaagagaauuccauagc

SEQ ID NO: 2171838 - RNA, 19 nt, Artificial Sequence
  Description of Artificial Sequence: Synthetic oligonucleotide
agcuaucgggaacauggga

SEQ ID NO: 2171839 - RNA, 19 nt, Artificial Sequence
  Description of Artificial Sequence: Synthetic oligonucleotide
gacgcucgaggcuuugcug

SEQ ID NO: 2171840 - RNA, 19 nt, Artificial Sequence
  Description of Artificial Sequence: Synthetic oligonucleotide
caugggaacacaggcacuc

SEQ ID NO: 2171841 - RNA, 19 nt, Artificial Sequence
  Description of Artificial Sequence: Synthetic oligonucleotide
agcucauggccaucaccgg

SEQ ID NO: 2171842 - RNA, 19 nt, Artificial Sequence
  Description of Artificial Sequence: Synthetic oligonucleotide
uggguccaaagagaauucc

SEQ ID NO: 2171843 - RNA, 19 nt, Artificial Sequence
  Description of Artificial Sequence: Synthetic oligonucleotide
uccaaacaguguggcauag

SEQ ID NO: 2171844 - RNA, 19 nt, Artificial Sequence
  Description of Artificial Sequence: Synthetic oligonucleotide
agcgcucacacuugagaca

SEQ ID NO: 2171845 - RNA, 19 nt, Artificial Sequence
  Description of Artificial Sequence: Synthetic oligonucleotide
aguacacccucuuguugca

SEQ ID NO: 2171846 - RNA, 19 nt, Artificial Sequence
  Description of Artificial Sequence: Synthetic oligonucleotide
cuuguggcaguagggcugg

SEQ ID NO: 2171847 - RNA, 19 nt, Artificial Sequence
  Description of Artificial Sequence: Synthetic oligonucleotide
cuugucauagauauagcuu

SEQ ID NO: 2171848 - RNA, 19 nt, Artificial Sequence
  Description of Artificial Sequence: Synthetic oligonucleotide
acccugggaaugcugugag

SEQ ID NO: 2171849 - RNA, 19 nt, Artificial Sequence
  Description of Artificial Sequence: Synthetic oligonucleotide
ucgguucgcaccacaggga

SEQ ID NO: 2171850 - RNA, 19 nt, Artificial Sequence
  Description of Artificial Sequence: Synthetic oligonucleotide
ggggccggugaucugaggg

SEQ ID NO: 2171851 - RNA, 19 nt, Artificial Sequence
  Description of Artificial Sequence: Synthetic oligonucleotide
aagucuccguagcugugaa

SEQ ID NO: 2171852 - RNA, 19 nt, Artificial Sequence
  Description of Artificial Sequence: Synthetic oligonucleotide
acccucuuguugcaucgag

SEQ ID NO: 2171853 - RNA, 19 nt, Artificial Sequence
  Description of Artificial Sequence: Synthetic oligonucleotide
ggggucagugucuuggagc

SEQ ID NO: 2171854 - RNA, 19 nt, Artificial Sequence
  Description of Artificial Sequence: Synthetic oligonucleotide
ugaauguggugacgcucga

SEQ ID NO: 2171855 - RNA, 19 nt, Artificial Sequence
  Description of Artificial Sequence: Synthetic oligonucleotide
ggaagaagcuaucgggaac

SEQ ID NO: 2171856 - RNA, 19 nt, Artificial Sequence
  Description of Artificial Sequence: Synthetic oligonucleotide
uaucgggaacaugggaaca

SEQ ID NO: 2171857 - RNA, 19 nt, Artificial Sequence
  Description of Artificial Sequence: Synthetic oligonucleotide
caccuucucagcgaaguac

SEQ ID NO: 2171858 - RNA, 19 nt, Artificial Sequence
  Description of Artificial Sequence: Synthetic oligonucleotide
uccacccgcgcucgucucg

SEQ ID NO: 2171859 - RNA, 19 nt, Artificial Sequence
  Description of Artificial Sequence: Synthetic oligonucleotide
auggucggugcgcucgauc

SEQ ID NO: 2171860 - RNA, 19 nt, Artificial Sequence
  Description of Artificial Sequence: Synthetic oligonucleotide
uacacggucuugucacacu

SEQ ID NO: 2171861 - RNA, 19 nt, Artificial Sequence
  Description of Artificial Sequence: Synthetic oligonucleotide
auauuggguuccccaguga

SEQ ID NO: 2171862 - RNA, 19 nt, Artificial Sequence
  Description of Artificial Sequence: Synthetic oligonucleotide
auauagcuucccacagcac

SEQ ID NO: 2171863 - RNA, 19 nt, Artificial Sequence
  Description of Artificial Sequence: Synthetic oligonucleotide
ugcagcgcucacacuugag

SEQ ID NO: 2171864 - RNA, 19 nt, Artificial Sequence
  Description of Artificial Sequence: Synthetic oligonucleotide
uuccccagugaauguggug

SEQ ID NO: 2171865 - RNA, 19 nt, Artificial Sequence
  Description of Artificial Sequence: Synthetic oligonucleotide
gaauguggugacgcucgag

SEQ ID NO: 2171866 - RNA, 19 nt, Artificial Sequence
  Description of Artificial Sequence: Synthetic oligonucleotide
gauggggccggugaucuga

SEQ ID NO: 2171867 - RNA, 19 nt, Artificial Sequence
  Description of Artificial Sequence: Synthetic oligonucleotide
accuucucagcgaaguaca

SEQ ID NO: 2171868 - RNA, 19 nt, Artificial Sequence
  Description of Artificial Sequence: Synthetic oligonucleotide
aguacacggucuugucaca

SEQ ID NO: 2171869 - RNA, 19 nt, Artificial Sequence
  Description of Artificial Sequence: Synthetic oligonucleotide
uucccaucaugcucagcgu

SEQ ID NO: 2171870 - RNA, 19 nt, Artificial Sequence
  Description of Artificial Sequence: Synthetic oligonucleotide
uuuucccucagggucccgu

SEQ ID NO: 2171871 - RNA, 19 nt, Artificial Sequence
  Description of Artificial Sequence: Synthetic oligonucleotide
agggcugaacugugccuuc

SEQ ID NO: 2171872 - RNA, 19 nt, Artificial Sequence
  Description of Artificial Sequence: Synthetic oligonucleotide
accgguguucacucccuug

SEQ ID NO: 2171873 - RNA, 19 nt, Artificial Sequence
  Description of Artificial Sequence: Synthetic oligonucleotide
aucugagggcccucaguca

SEQ ID NO: 2171874 - RNA, 19 nt, Artificial Sequence
  Description of Artificial Sequence: Synthetic oligonucleotide
gcaaaguacacccucuugu

SEQ ID NO: 2171875 - RNA, 19 nt, Artificial Sequence
  Description of Artificial Sequence: Synthetic oligonucleotide
cuugggacacuuggaggcc

SEQ ID NO: 2171876 - RNA, 19 nt, Artificial Sequence
  Description of Artificial Sequence: Synthetic oligonucleotide
gaaccacgugcacccuggg

SEQ ID NO: 2171877 - RNA, 19 nt, Artificial Sequence
  Description of Artificial Sequence: Synthetic oligonucleotide
ugcaucgaggacacauauu

SEQ ID NO: 2171878 - RNA, 19 nt, Artificial Sequence
  Description of Artificial Sequence: Synthetic oligonucleotide
acacggucuugucacacuu

SEQ ID NO: 2171879 - RNA, 19 nt, Artificial Sequence
  Description of Artificial Sequence: Synthetic oligonucleotide
agcgccaccucggaagaag

SEQ ID NO: 2171880 - RNA, 19 nt, Artificial Sequence
  Description of Artificial Sequence: Synthetic oligonucleotide
auucacaccuuugggucca

SEQ ID NO: 2171881 - RNA, 19 nt, Artificial Sequence
  Description of Artificial Sequence: Synthetic oligonucleotide
guaggcgacccugaggaca

SEQ ID NO: 2171882 - RNA, 19 nt, Artificial Sequence
  Description of Artificial Sequence: Synthetic oligonucleotide
uaggcagcgggucguuuuc

SEQ ID NO: 2171883 - RNA, 19 nt, Artificial Sequence
  Description of Artificial Sequence: Synthetic oligonucleotide
gaggccauggucggugcgc

SEQ ID NO: 2171884 - RNA, 19 nt, Artificial Sequence
  Description of Artificial Sequence: Synthetic oligonucleotide
guccaaagagaauuccaua

SEQ ID NO: 2171885 - RNA, 19 nt, Artificial Sequence
  Description of Artificial Sequence: Synthetic oligonucleotide
ucaccggcaagcagagcau

SEQ ID NO: 2171886 - RNA, 19 nt, Artificial Sequence
  Description of Artificial Sequence: Synthetic oligonucleotide
auaggagcgccaccucgga

SEQ ID NO: 2171887 - RNA, 19 nt, Artificial Sequence
  Description of Artificial Sequence: Synthetic oligonucleotide
acacaggcacucaggcccc

SEQ ID NO: 2171888 - RNA, 19 nt, Artificial Sequence
  Description of Artificial Sequence: Synthetic oligonucleotide
ugacagcaaaagucuccgu

SEQ ID NO: 2171889 - RNA, 19 nt, Artificial Sequence
  Description of Artificial Sequence: Synthetic oligonucleotide
agcagggccggugccaguc

SEQ ID NO: 2171890 - RNA, 19 nt, Artificial Sequence
  Description of Artificial Sequence: Synthetic oligonucleotide
gcauagcagggcuuguggc

SEQ ID NO: 2171891 - RNA, 19 nt, Artificial Sequence
  Description of Artificial Sequence: Synthetic oligonucleotide
gugaaccacgugcacccug

SEQ ID NO: 2171892 - RNA, 19 nt, Artificial Sequence
  Description of Artificial Sequence: Synthetic oligonucleotide
ccucggaagaagcuaucgg

SEQ ID NO: 2171893 - RNA, 19 nt, Artificial Sequence
  Description of Artificial Sequence: Synthetic oligonucleotide
ggcagaaaggcuucccauc

SEQ ID NO: 2171894 - RNA, 19 nt, Artificial Sequence
  Description of Artificial Sequence: Synthetic oligonucleotide
ccgguguucacucccuugg

SEQ ID NO: 2171895 - RNA, 19 nt, Artificial Sequence
  Description of Artificial Sequence: Synthetic oligonucleotide
ggugcgcucgaucgguccg

SEQ ID NO: 2171896 - RNA, 19 nt, Artificial Sequence
  Description of Artificial Sequence: Synthetic oligonucleotide
guugcagcgcucacacuug

SEQ ID NO: 2171897 - RNA, 19 nt, Artificial Sequence
  Description of Artificial Sequence: Synthetic oligonucleotide
uggguuccccagugaaugu

SEQ ID NO: 2171898 - RNA, 19 nt, Artificial Sequence
  Description of Artificial Sequence: Synthetic oligonucleotide
gagcucaccuucucagcga
